United States Patent Application Publication US 2006/0134663 A1 - sequence listing, part 28

SEQ ID NO: 43420 - DNA, 623 bp, Homo Sapiens
tgccccagagaaggttaagtgacttcctctttatggagccagtgttccaacctaggttgcctgataccagacctgtggccccacctcccatgcaggtctctgtggggtcttgggatggatctcctagggctgggctggaagcctcatgtactgttgtcttctaggtaaccaccctgaagagaaggggtggcatcaggaaccgcagggaaccaagcagcctttggtccagtgctgctccttggaacagttgagtgtggcctcaaaccattctcctgggtagctcagtcataaaacaccgaatgcctgcctcaaaatagcctctgagggaagggagctgttgacaagtgaagccctcaggttgtgtgggattccagcaggttattacagcttgtggggggagggagggtccattccaccagctttgaatcccagggtcccctcagcttcactgggccacagtgtctgtcccaggaagaagcaaatggacagtgaggatgatggagagactacagctgccttgtctaaaacctgggatcttacaagtgttatttggcttttatcttttaaaaaaagaaaggaaaatgggcattgtattaatccaaaaaaaaaaaaaaaaaaaaaaa

SEQ ID NO: 43421 - DNA, 502 bp, Homo Sapiens
cctgaacaagaattggaagctgccctgcccatgggagctggttagaaatgcagaatcctaggctccaccccatccagttcatgagaatctatatttaacaagatctgcagggggtgtgtctgctcagtaatttgaggacaaccattccagactgcttccaattttctggaatacatgaaatatagatcagttataagtagcaggccaagtcaggcccttattttcaagaaactgaggaattttctttgtgtagctttgctctttggtagaaaaggctaggtacacagctctagacactgccacacagggtctgcaaggtctttggttcagctaagctaggaatgaaatcctgcttcagtgtatggaaataaatgtatcatagaaatgtaacttttgtaagacaaaggttttcctcttctattttgtaaactcaaaatatttgtacatagttatttatttattggagataatctagaacacaggcaaaatccttgcttatgac

SEQ ID NO: 43422 - DNA, 616 bp, Homo Sapiens
ttccacccacgcgtccggtcaaagagaaaaacaaatcctgaagatacatggaaatgtaacctagtttagggtgggtatttttctgaagatacatcaatacctgaccttttttaaaaaaataattttaaaacagcatactgtgaggaagaacagtattgacatacccacatcccagcatgtgtaccctgccagttcttttagggatttttcctccaaagagatttggatttggttttggtaaaaggggttaaattgtgcttccaggcaagaactttgccttatcataaacaggaaatgaaaaagggaagggctgtcaggatgggataatttgggaggcttctcattctggcttctatttctatgtgagtaccagcatatagagtgttttaaaaacagatacatgtcatataatttatctgcacagacttagaccttcaggaaacataggttaagcccccttttacaaagaaaaagtaaacatacttcagcatcttggagggtagttttcaaaactcaagtttcatgtttcaatgccaagttcttattttaaaaaataaaatctacttataagagaaaggtgcattacttaaaaaaaaaaaaactttaaagaaatgaa

SEQ ID NO: 43423 - DNA, 554 bp, Homo Sapiens
ggctcatcctggagctggtctctggcggggagctctttgacttcctggcggagaaggagtcgctgacggaggacgaggccacccagttcctcaagcagatcctggacggcgttcactacctgcactctaagcgcatcgcacactttgacctgaagccggaaaacatcatgctgctggacaagaacgtgcccaacccacgaatcaagctcatcgacttcggcatcgcgcacaagatcgaggcggggaacgagttcaagaacatcttcggcaccccggagtttgtggccccagagattgtgaactatgagccgctgggcctggaggcggacatgtggagcatcggtgtcatcacctatatcctcctgagcggtgcatccccgttcctgggcgagaccaagcaggagacgctcaccaacatctcagccgtgaactacgacttcgacgaggagtacttcagcaacaccagcgagctggccaaggacttcattcgccggctgctcgtcaaagatcccaagcggagaatgaccattgcccagagcctggaacattcctgg

SEQ ID NO: 43424 - DNA, 555 bp, Homo Sapiens
tctcaatcagacccacgtccaccaggctggaggcggagtgggaggagctggagccaggcccgtaagttcgcaggcaggggtgggtgtgggacggggctgcttctctacacagcctctacgctggccttcaccttcacccctgcatcgtcggtgaccctgggaccctccaggcagcgtggcctgtggcaccgtgagggttgggacccaccgaggcgcagaggcggcccgaatgcagccctggttcaggcccggaggagggtttgcgggtagttgcacggacaattcggcggggtgctgcctgttgctgccattagcccaggaggaggtcgtgggacggggagggtgggatggacggcggacaggcagtccccacgctgctgggtggcgccgggcttggtggggtcttccactgtgtgcccttctcgccgaggccggtcccccgggtgtggggtgccctgctgcggactcctccgcgagccccatcgtcgcgcctgtggacgcctaggcaagagcggcctctgcagccaagagaaataaaatactggcttccagatc

SEQ ID NO: 43425 - DNA, 526 bp, Homo Sapiens
gccagacaagaaaggcctacggtttctggagcaaacctgtcccccacctgtgaccagtcactctggggcaagcatcactgggaagggcatagccggagacctttctcctagtgactggtagtcagtggggcattttaggatgtcagggccccagggtgacatgtgtccagcttttctatggcagcagaggcctttccctcagacaagctacaaagtgcccaggatgccatccaccatggtccccttcagtacctcacgcatggtccccagcttctcctaggatcccagtggcatttatcagtggccagctacctgccaggcccgggctggggcacggtctgcggccatgaggccaggccgcctcccgcacccctaccccgtggcagcagcatacctctgcatttctggaatgtgtgtgcatcaatgatgtttgtatatttgaggcatttaaaaatctattttcgttacgagggcaaatgaagaatgaatattgatcttaaaaaaagaaaagaagacaaaaaaaata

SEQ ID NO: 43426 - DNA, 1048 bp, Homo Sapiens
  misc_feature (672)..(672): n is a, c, g, or t
  misc_feature (721)..(721): n is a, c, g, or t
  misc_feature (736)..(736): n is a, c, g, or t
  misc_feature (771)..(771): n is a, c, g, or t
  misc_feature (846)..(846): n is a, c, g, or t
  misc_feature (848)..(848): n is a, c, g, or t
  misc_feature (860)..(861): n is a, c, g, or t
  misc_feature (863)..(864): n is a, c, g, or t
  misc_feature (867)..(867): n is a, c, g, or t
  misc_feature (870)..(872): n is a, c, g, or t
  misc_feature (874)..(880): n is a, c, g, or t
  misc_feature (885)..(886): n is a, c, g, or t
  misc_feature (888)..(889): n is a, c, g, or t
  misc_feature (891)..(892): n is a, c, g, or t
  misc_feature (896)..(896): n is a, c, g, or t
  misc_feature (899)..(900): n is a, c, g, or t
  misc_feature (910)..(913): n is a, c, g, or t
  misc_feature (915)..(915): n is a, c, g, or t
  misc_feature (926)..(932): n is a, c, g, or t
  misc_feature (934)..(935): n is a, c, g, or t
  misc_feature (941)..(941): n is a, c, g, or t
  misc_feature (946)..(948): n is a, c, g, or t
  misc_feature (953)..(956): n is a, c, g, or t
  misc_feature (959)..(959): n is a, c, g, or t
  misc_feature (961)..(962): n is a, c, g, or t
  misc_feature (964)..(965): n is a, c, g, or t
  misc_feature (969)..(973): n is a, c, g, or t
  misc_feature (975)..(975): n is a, c, g, or t
  misc_feature (981)..(981): n is a, c, g, or t
  misc_feature (984)..(992): n is a, c, g, or t
  misc_feature (994)..(998): n is a, c, g, or t
  misc_feature (1000)..(1000): n is a, c, g, or t
  misc_feature (1002)..(1011): n is a, c, g, or t
  misc_feature (1013)..(1013): n is a, c, g, or t
  misc_feature (1017)..(1020): n is a, c, g, or t
  misc_feature (1022)..(1023): n is a, c, g, or t
  misc_feature (1027)..(1027): n is a, c, g, or t
  misc_feature (1032)..(1032): n is a, c, g, or t
ctatttgttcaagtttgcagaacttggagaaaaaattttctgcctgcagaaactgatttctttgcatccttttaatccttggaactggggcaaattggcagaggcttacctgaatctggggccagctctttcagcagcacttgcgtcatctcagaaacagcacagtttcacctcaagtgacaaaactatcaaatccttctttccacactcaggaaaagactgtcttttgtgttttcctgaaaccttgcctgagagctctttattttctgtggaagcgaatagcagtaatagccagaaaaatgagaaagctctgacaaatatccaaaactgtatggcagaaaagagagaaacagtgttgatagagactcagctgaaagcatgtgcctcttttatacgaaccaggcttctgcttcagtttacccaacctcagcaaacatcgtttgctttggagaggaacttaaggactcagcaggaaattgaagataaaatgaaagggttcagcttcaaagaagacactttgctgttgatagctgaggttatgggagaagatatcccagaaaaaataaaagatgaagttcacccagaggtgaagtgtgttggctccgtagccctgactgccttggtgactgtatcctcagaagaatttgaagacaagtggttcagaaagatcanagaccatttctgtccatttgaaaatcagttccatacagagatacaaatncttggcttagtgggntataaaaaacaaaaccacaaatatcttggactggnataattgtccttgtttacttcagacaggatccattgctaatcatggagtataaatggatatttatggtttataananaaaaaaaaaaannannaanaannnannnnnnnaaaannannannaaanaannaaaaaaaaannnnanaaaaaaaaaannnnnnnannaaaaanaaaannnaaaannnnaanannanntttnnnnnanaaaaanaannnnnnnnnannnnnanannnnnnnnnnanttannnnannaaanaaaanaggggtgggggggggg

SEQ ID NO: 43427 - DNA, 531 bp, Homo Sapiens
ggatggcgcggtaccccggggccgcagacgcctctccgagcggacscacccgctgtccgtctctccatcagttcctagaactcaagcacagctcccgccgatcctggggcggcgccgcctctccacccgcagcctgcggaggcggggacttgggtgtcggcttttctgagggtgatcttttgttttccgagtttgggattcggctgttgggaaaaaaaaatcgcgtttgtaccttttccccccacagatgagaagtgtttgtaatggatttgtatttttcttaattttatgctctttagacgtttaaaagaaccaaaaaagaaacttttgcttcttcgttttcggttgggatttgcagtttaatggcctcagatccttctccagatccccagggtttctttgtcttatttatggagaaaaaccggtcactttgtccagcgcactgtgaggcccccactcaggccagccctggcccccccttggtacttggaaccgaagttacagattatattaaaataataatgtacaaaa

SEQ ID NO: 43428 - DNA, 1521 bp, Homo Sapiens
cggcgccgttgcgggcgggagcggctgcaacgccggtgcctgaggagcgatgccgagggaaatcatcaccctacagttgggccagtgcggcaatcagattgggttcgagttctggaaacagctgtgcgccgagcatggtatcagccccgagggcatcgtggaggagttcgccaccgagggcactgaccgcaaggacgtctttttctaccaggcagacgatgagcactacatcccccgggccgtgctgctggacttggaaccccgggtgatccactccatcctcaactccccctatgccaagctctacaacccagagaacatctacctgtcggaacatggaggaggagctggcaacaactgggccagcggattctcccagggagaaaagatccatgaggacatttttgacatcatagaccgggaggcagatggtagtgacagtctagaggtatcctaagaagctggtgcagacatactcagtgtttcccaaccaggacgagatgagcgatgtggtggtccagccttacaattcactcctcacactcaagaggctgacgcagaatgcagactgtgtggtggtgctggacaacacagccctgaaccggattgccacagaccgcctgcacatccagaacccatccttctcccagatcaaccagctggtgtctaccatcatgtcagccagcaccaccaccctgcgctaccctggctacatgaacaatgacctcatcggcctcatcgcctcgctcattcccaccccacggctccacttcctcatgaccggctacacccctctcactacggaccagtcagtggccagcgtgaggaagaccacggtcctggatgtcatgaggcggctgctgcagcccaagaacgtgatggtgtccacaggccgagaccgccagaccaaccactgctacatcgccatcctcaacatcatccagggagaggtggaccccacccaggtccacaagagcctgcagaggatccgggaacggaagttggccaacttcatcccgtggggccccgccagcatccaggtggccctgtcgaggaagtctccctacctgccctcagcccaccgggtcagcgggctcatgatggccaaccacaccagcatctcctcgctctttgaaagttcctgccagcagtttgacaagctgcggaagcgggatgccttcctcgagcagttccgtaaggaggacatgttcaaggacaactttgatgagatggacaggtctagggaggttgttcaggagctcattgatgagtaccatgcggccacccagccagactacatttcctggggcacccaggagcagtgatttccctccccactactccttctccttctagatggtaaccacagcctcgaccatgcctgctccctctgacccagcttcacctcatggacaacccttcttggttcatctccagcccgtgagctggtcctgcttcctcccttccatgccctaacttttaatatgcttgttcagctctaataaagtaataaagcttggt

SEQ ID NO: 43429 - DNA, 554 bp, Homo Sapiens
atatttaagaaactgtttgaagaaggtttaaacattcaaaagcaaagattacgagacctaagaaactatgccaaagaaaagcgagatgaacaaaggagacgccaccaggatgaactggactccatggagaactactataaggaccagttttcattgctggcagaagccatatcacaggaacatcaagaacttaaagccagagagaaatctcaggcccagacattacataaggtgaagagggagctgagatctaagatggagaaggaaattcagcagctgcaggacatgataacacagaatgatgatgatgttttcttccgggaactggaagctgagcgcttcagatctcggcttcagctggcttcctttcagtacagtaaaagtccctccctatgaggccagacttgataatagtaggtgaaggttctggaggcctttaccaggacagagctagaatcgagccagtaaacagtctaagccagaaaaataattttcaaatgctttacctgtattttcattccagtactttttatgattttttaaataaaaatcga

SEQ ID NO: 43430 - DNA, 646 bp, Homo Sapiens
  misc_feature (622)..(622): n is a, c, g, or t
cctaactctggccagagctcagctttggcaactctgaccgttgagcagctctcatcccgggtttcctttacgtctctttctgatgacaccagcacagcgggctccatggaggcctctgtccagcagccatcccagcagcagcagctcctgcaggaactgcagggtgaggaccacatctctgctcagaactatgtgatcatctaaaaaagggggagctggcctccaccctgtgttccatggattcggaacaagatttcagacatctgcatgagtgacaaactttctgaacaccaccaccaccaataatacttatcagcatcataaagtatctcttaaacactgatcttggcagggacggaactcctattcagcagtttttgtggaaagcagtaatgcttgcaaaacgtgtgtgtcattcagcattttaagtggagactatgcatttcatagtatatttgacagattagtactgtgtcctgtgttttgttccagattcttcagtataaataagctctatatcaaaaagttgcctgtctaaatagaaaatgtcttgctgtgttttgtcctatggaaaatactgtaattcaggattatgtttacaattgatccaggtgtttgtttnctacttctgtaatacatacaatgc

SEQ ID NO: 43431 - DNA, 664 bp, Homo Sapiens
agttctttacgttgtaggaaacattttaatggaatttaaactcaaaaacttgaatacaggacaatgcttgccttttcatgtatgtactacattttttgctaagaaatactgatatttctgtttagttgagctagaaatacttcttatttatacatttaggaaagcaaataatgcctactactccgacttttatagaagctacttttaaatcagaatatttaatttttgatattcatataattaatagaagttgcatttatattttttatggggcatagttccttatgtgtttttttaatgtattttcatactacatactgaatttgtatgtttttaaaattgttacatctagacaactgtaaacattatttttttagctagtgcaaacctagtacctgccatttttactaatttttgtctttaaaaaaagcaaaaaagcacattgacctaagttgaaaattaagtaagtttatttttaacaaaaaatgcctgaaaaaagctaaattatttaagtcattaagatattgagaaaaaatttgaaatttttactatttctgtttccacaattccaaatatttatcttggtgtatatattggtactttaacagaacttgcattattttgtttttaataaatataaacatgaaatttttgtatgtgaaaa

SEQ ID NO: 43432 - DNA, 845 bp, Homo Sapiens
ccagggagcccacagaggcactcagtgggtggtggggtgatggatacacatctatcaggcacagggcggaggtgggcaccactgagttgcactcagcaaacacattgggtatcttgtgcccaaggcctgtatttgtggagctgatgttctagtgagagacagtaaatgtgacaaaagtaaaatatatcagatggtgagaaaacagaaaaatgagatcagaagtggagatgttggggccaggcacagtggcccaggcctgtaatcccatcactttgggaggtgcaggcaggcagatggcttgagcccaggaattcaagaccagtccgagcaacatagcaaaagcccttatctgcaaaaaattcaaaaattagccaggtgtggtggtgcgtgcccaggttcccaggtactcggaggctgagaggtgggaggatgccttgagcttgagaggttgaagctgcagtgagctgtgatcgcaccactgcactccagcttggttcatggagaccctgtttttttaaaaaaagaagtggaggtgtttacaccagcaaaatactcattttttaagtgtaattaagttgaagatcaaaaaatggaaatgtataattaaatcatacttagcaaatctaacacatgaaatgtaacatctgcatatggagaatcgtgttactttattgaaaaaacattaaaaggtttgagaaatttaaaaaaaaaaaaaaaaagggcgggccgcttctaaaagtatcccctccgagggggccccaaggctttaccccgttaccccaagctttttcctttgtaacaaagtggggtcccccttattaagggggaagtccgcaatttaatac

SEQ ID NO: 43433 - DNA, 579 bp, Homo Sapiens
atttactatctctgtttccacaattccaaatatttatcttggtgtatatattgttactttaacagaacttgcattattttgtttttaataaatataaacatgaaatttttgtatgtgagaatgattgaactagtttgttcttaatctcaaaaatttagttaccaaagtagaaaaggtattttgatactagatattaaaaactacatatagttaatataattttataatttttgtaattaaatgtgctcctgtaattgtgatattttgttttctaagtaattaagccttaatttttcccctatgttactaaagacttttaatgtttagaaagttacctcagttttagaaagatggactacttacaaagctgttttccctggccataggaaaacttacaataagaaaccattaagtagtcaaactgcttattcaggctaagtgggaaatgaatttgtgcagtgtgttcccttaattatctactgaatgttgttaccgactaaacaaggtttctaaaagtctcgcatttcttttactattcaaaactctttggttggaaatgactaatactgctccatttta

SEQ ID NO: 43434 - DNA, 912 bp, Homo Sapiens
cgaaaacttacagaagacactgccagaccttctgtatgtgaattttcacacaccttgaagaaactgccaaattgaaaatgtttgacatctttcacctctgcagttatgcctcaccagacattcactctggtccctagatgtttttgcagtaatccaaaagaatacaaacaaggattaagtttgaatcaaccctgcctacccatagacaacggtggatctgactttagactcaattgtggtctcctactggagggaagatcatgaaaagcccacagtagttattcagaactaacacctgcagagtgttggtcatctctacagccttaggcaggtttcacccaaagaggagaaacttctgtcgtcacccaaagtgttacatgcttaaaacacaagctacctttgtaaatacttcatctgatcagaagtgtgtcatgcttgtttgagatggagttgctgcattttaggactattgatacctttttttaattgtttttataatatttaatttgaaagaggagacccttctctctctactctttcatagactgaagtttgaatatgaaataggccttaaccatcatgttgactctcctgtcagaattttaggttggaaatttggttttattctttcatgtaattgcttatttgaacagatcacttactaaagctttagaagaagtgaaaaaaaacacccaagagcaaacagcaggaaaaaaaaaacaacaggggcgggccgctctaaaaataatccctcgaaggggccccaagcttaacgccgtaccccacccttttctttggacaaacaggggggcccccctaataagggggagtcccgcaattaataaaagcctaaagggccacttggggccccctctcccttttttaccaaacgcgccccgtggaaacttggga

SEQ ID NO: 43435 - DNA, 399 bp, Homo Sapiens
cgaaacagatgattttggcactgatatatttgacagtggcataggaactgaccttgatccagtagcctgagtgtgactgattgttatatggttgccatgaagaggtgactggcgatctttctccttactgtgacgactactctgtttactgcgttgtagttgctgcctcagtttggcgatctcttttagttgatcagcactcccccatgacgcagaacgctgatgtgacctcttttctgcaccctcttctgcccaacagctaggtgtctgagtagctttgtctttcatgcatgaagggtagtgaacatgaggatcccgtggccactgtcctgtgaggtaaggtcctgttattgtatcccaagaggaggttcgccttattgtactagaggtccgaacttg

SEQ ID NO: 43436 - DNA, 608 bp, Homo Sapiens
ccccgcgtccgactgcatgcagcaggagcctcttgtttttcttaatgagctgaaaagacagcagatgttcacagctgatgctgggtgttgactcagcgccacgggaagctctgtgcccgcaggtaagcacgcacagtcttacagttctccttgtaaaatatcatcacccttcctgcctgagaaacgagtacatttgtattttatgtaacaacaatagtcaaggcagcattgcaacactgagcagggtgaggtgggggtgctgagcacaggacaagagggaggaggcctgccctccattcagatgcatctgcatcgcccttctgtgtgcagtcacatcgagactgcacacagcatgcatctcctcttggaaaatatcttttgcctccgagttgttttaagcaattagaatcaggtcctgaatccccagactgttcagagacttcaagggacacctccctcacaagaagcctggcacccccactgtgtacctttgagaggaaaggagtgcgtttgttttcatctgcattctgtttgtcagtggcaacagactctatcaatgtaaaaccatggttgtgatcatgtggggaaatcaaataaatcctttgaaa

SEQ ID NO: 43437 - DNA, 699 bp, Homo Sapiens
gggaagagttatgtttatttttgaagggtattaggataattaaaaataatgtaatgtgcctagcacactacctgaaaacgatggcatttgttcttattaatgtctttaaaatatgcaaggaccataagtttttcctcttgcagatgaggaaagtaaaaaataatacgaacatgtaattcagcttctcagattcaagccaatgttttttgcatcaacttttctatattgtatgtatatatataaatacatagattaaggaaataggaaactgaaactctgtggaatataaactttttaaaaataatttcatcaggttttttgtatgttactgacccatatggattttagtaacatcttgcttagtcatgttgttataaaacattcaaattctgatatacattgcttgaaaatgagtgagtacctcagagaaatttgatagactcaaacagatagtatgagaaatatctttgaaagaaatatggaggaaggttaaaaggggattagtaaaattaatgcgataggtaacatgtttgtaaccatatagtatccttttagatacaaaagcttattttcattattattataataaacagttaatggttgaaacttagtaaaatgtcctatttctgatttattagactagtataaatgagaaaatccaagctattaagtaccattagctacagtgatcttagcttc

SEQ ID NO: 43438 - DNA, 589 bp, Homo Sapiens
ggtacaatcaagtgatattttgtagcacctcactatctgaaaggccatgagttttcagatgatttcattgagcttcattgcagcctgaaattttaaaaaagttgtgtaatacgccaaccagtcaagttgtgttttggccagagatttagatatgtccaatttcctggctcatttcattgtgctctatgggtacgtataaaaagcaagaattctgtttcctaggcaaacattgcaactcagggctaaagtcatccagtgaaacttttagagccagaagtaactttgtcccagtcctacaatgtgaaaagagtgaatagttgcctctttttagccattttcatggctggtacatattcgtacgcattacttttcagaatcaatacgcactttcagatattcttatttttattctcttaagtctttattaactttggagagagaaatgatgcatctttttattttaaatgaagtagatcaacatggtggaacaaaatgataaagaacagaaaacatttcaatatattactaataactttttccaatataaatcctaaaattcctataacatagtattttacagttttatgaa

SEQ ID NO: 43439 - DNA, 700 bp, Homo Sapiens
cgcagtaaatagtttcttgttaatgtatgtttgaggagtttgaacgtcagtgtcacttacccacaaagttattcaagttgtaaaaggttatacaataatttaacaactaccttttttattctgtcgggttactgacctcactttatgtaaatacttcgcatgacaaattcagtaactcgtctatttcagcatgcataagacttttcactagggaaactgataaagcttgagtcaactaaatctgccttcatactttatcaaggggaaccaagcctgctgtgcttacatcagcatctggaagactttcctctcctctaatctgtgtacacatctccaagcaaggaagaaaaaacaaactctgctcagacgcctatgaaacacctgaatgaactttgatgaagtacagtctgagttaccatcatgcacaagtagaactgctcttggacttgttttcctgttgtttgtggaacctacgcgtttgaatggcttgaacgttgcatcttttaaagttattttttaaggtttcttggcatttatcctagttgtccgtgtttggcaatgtgctgttaaagtaatagacttttaatctttatgtattttttgttttctctggagtacttggacagatgttatagtggtttcttttaggaaaatctgtcattaaaaaagttatagccttgcaaataaaaaaaaaaaaaaa

SEQ ID NO: 43440 - DNA, 1168 bp, Homo Sapiens
ggacgcgtgggtgcaatttgggaaaatcaggtttattttttggagtggaactgttataagtgcttatttataaaaggaatgtttctgaatgcaagtgcctaaaaagatctttgttggtatgcatatgttttgtcacacaattttatagtgcatctttcaccatttgtgcttttttaagatacgtatgtaagctcttatttttcaattggcaattcagttaatttttaaatgtttacataatggccagaaggcttgcaaatctgtatttaattgcattttaattaattgccagtttttacatgtgatagtcagttgtacaaagaaaatgcacttaaacctgtttctaaattatatattcagttatattatatttggctttagatggttttaatacatttgatagtttttcaccccttggctttattttatataaacttttgtttttcagcagttctgaactttttagtattttataaatggtccaaaaaatgcctgtttcagaagtttttgaattcagtgcatttcctcttgatttgtctgggttaaaaccattccttttgtatgaaatgttttgacttaggaatcattttatgtacttgttctacctggattgtcaacaactgaaagtacatatttcatccaaatcaagctaaaatttatttaagttgattctgagagtacaggtcagtaagcctcattatttggaatttgagagaaggtataggtgatcggatctgtttcatttataaaaggtccagtttttacgactagtacattcctgttattttctgggttttatcattttgcctaaaataggatataaaagggacaaaaaataagtagactgtttttatgtgtgaaatatatttctactaaatgtttttgaatgactgggttatactttgatatatatatttatttttttccaaccccaaaaccacttacctcatacaacaaaactctctttccttctcaccatacctacaaacaaaatcacataaacacaacaacctctccataacatcaaacataaaaagggggcgcccctctataaaatatttcccccagggggccccaactttatccgcgcacccacctttttttttaaaaaaaaggggccctcatatgggggcccccaattataaacactggcacacggtcccctctt

SEQ ID NO: 43441 - DNA, 802 bp, Homo Sapiens
ggatcttgttctttggttgggcttgtgcctagattaggagaggaagccaggggccctgcactcatgccacctgccaggtagtgtagtatcaggagtggagacaaagtgggctctgggttggggtakgggaagggagggttcagaaagaggaatgaagatgttgtatgacaagaaggaaagttactgagaacaaaaacccagattggtgagataggacacttgtgcagcagatatgccaatgggccatgtttattgtggattggtaagaatcaccaggaaaccattaagccccaatagctacaaggagggtggttaatctgctatatcaaactccttccctgaaaccagcaaacaccgggaaacattttggctcattataatccggtgaacaatgcagtcaggcctgttataaccgctgagcagccacactcgcacctcctgggtgctgtagtctgtgttggtacaggcttctgcatgcctggtaaagtccagccaaggctggtcaaggcaacatctccacacagaaaatctgcaccagttatgtaagctaaaaagctgtgtgaacccaggtgtcccggaaaggggctgcaggacacagcaaaatgccagcagcgtgccggacccctcccttccatcctcctctccaaagaacagaggtcaggaaaaacactggctgggacgctagaagggtcatgtgttaactataatcacatttatggtttggaaccatcaccccaaggtaaaaaaaaaataaaaggtatgtttggcaaaataaaataaaggtaattaaaaacctaaaaaa

SEQ ID NO: 43442 - DNA, 588 bp, Homo Sapiens
ggagggaagtagcctcttgcagggaaatattttcccctgccctggaatctcctatgtgcctgttaaagattccagggccaagaactcggcaggctgaggagcagctaggtaggtgggttatgcggttcaggactgcttctggaagggactgcctgtacttctgtaccaccgttgccctttacactttgctcagggcggggtgggggaagcattcaaacaaaacaaggaagggaactgtctggcaaagcataagtggatgcatccagagctcagtcccctttaatcttttgtctctgggcgttctgctgccttcctcataccggggactggcattccaggtcagcttggctgtggtcttagaggcagggagtgcctacccagtcctgcctcaggagcagggtgagtagctaaatacagacttaggcttttttttccccccttttaagatgcttgctcctctcccttttctttttaccaccctacctttattgttagtggttacaaagtgaccacatattatgtactttgctgtaaataaagacagacaaaaaggcaaaaaaaaaaaataaagctaatgacttggagctt

SEQ ID NO: 43443 - DNA, 782 bp, Homo Sapiens
  misc_feature (722)..(722): n is a, c, g, or t
  misc_feature (733)..(733): n is a, c, g, or t
  misc_feature (745)..(745): n is a, c, g, or t
tcattaaatacacctgctttgggtaaaactctttgcaagcagtaattaacactagtaacagtgaaagcacaagatttccaaatcagtcgttttctcaaaaaaatatcgtataagtgactcatcctgtctgctaactccagacctcccagcttgaagccaaatctttccatgtgagattgatatggatttcctagaagtactggaatgttgtcatatcttgccctattttaattctgctatagaaaacaattgccttcacttttaaggagtaatttgaatattaataactctggtctagattttcatataatgtattaaagacaaagtagtgaacatcaatgaacatctgatagagataaactgtaatcaggcataagcttgtttgtatgttctggcagtgactaatcagtaaatgatgtcggtttgcccagtatcacttatcttctgtatttttcctctgtcgtgtaaatagtataaccttttcatttatggacaattttttggactagtagccttcaatatacattctgctttgaattaattttttcaaatcaataaattatgtagacatttaaaatcaaatatcaagtagaattgaaaaatgtgagttacataagttaaaaacttactttaaatcttaccttctataggtagctctaaataaattcatatggttatatgatatctctggtgtatactgattgagaaaataattaaactgnagttagggganggggaccttggnttcttggatttttcagtgaatatcctaatgtaaatgg

SEQ ID NO: 43444 - DNA, 873 bp, Homo Sapiens
aggtgattcaactactatatattaaactagattatcttttattttttaattttgaaatctggatgctcaagctctgcctgcacaaccacatgaggaagaaggaacaatgacaacaaaaataacactaaatttaaatttaagagtactacttttaggaaatagacaaaccattatttgggtacaactaaaggcaactggcatggactcaaatattttggggaagaaaaagactaaaagttctaaggaagaaaatgcgaaccttgatagtttgaaatagttaaaaagacagtgtagaaactgtttaggcagtttgattatggactattagatgatacttgggtctgataatggtataaggagaataaagtatttagggatccaatattacgcctgcagctttttccaaatagttcatgggggagggggatgtgtaagtggttaactgaagtctaactagataggtttgttgtaagcttaggatgtttacagttcttcatgttaagttgagcgtgatgggaagggaaagaatgctgatctttaaatttttgtccttagttaagttctgtatttagtgaattaattgcmtcctaaaaagtcaaacttgaaaagcacattttaaatggcaaatctattttttacatgtttgtgaagtttttattttttagtaaacagaccatcagaagagaacaatggtacagagcaggggtcagcagatggattttgtaaagcatcaacttgtaaatattttcaagtttattagctgtatggctctggtttctgttccctgttccaaatgttaaagtctactgttgtattctaaaagcagccatggactgaatgtagctgtgttccaataaaacttacacaaaagca

SEQ ID NO: 43445 - DNA, 569 bp, Homo Sapiens
  misc_feature (535)..(535): n is a, c, g, or t
ggctttctcaataagcctcagctttctaagatctaacaagatagccaccgagatccttatcgaaactcattttaggcaaatatgagttttattgtccgtttacttgtttcagagtttgtattgtgattatcaattaccacaccatctcccatgaagaaagggaacggtgaagtactaagcgctagaggaagcagccaagtcggttagtggaagcatgattggtgcccagttagcctctgcaggatgtggaaacctccttccaggggaggttcagtgaattgtgtaggagaggttgtctgtggccagaatttaaacctatactcactttcccaaattgaatcactgctcacactgctgatgatttagagtgctgtccggtggagatcccacccgaacgtcttatctaatcatgaaactccctagttccttcatgtaacttccctgaaaaatctaagtgtttcataaatttgagagtctgtgacccacttaccttgcatctcacaggtagacagtatataactaacaaccaaagacnacatattgtcactgacacacacgttataatcatt

SEQ ID NO: 43446 - DNA, 623 bp, Homo Sapiens
  misc_feature (587)..(587): n is a, c, g, or t
  misc_feature (594)..(614): n is a, c, g, or t
ggctagattcagaagcaaaaccgattttgctttcaccattaaggttgcattttaatgcagttattgttttaaattagagaataaaatgtaaaaccaagggaggctttagaaccctttattgaatggcatggcaaacttttaaaactgcttttgctatttcactagaactatctttgataaaggatatagctaaaaaatgtcagcccaaactgtgtgtaattagggttgtttattaaaattttctctaaatgtcatacagaggcttaagatctgtgtatgctgttgggtcggagtgccagtcactgctttggaagtctatgttctggggctgcagaatgacaaacgtgtcatgggattaaaaccaatcaactgtgaattgtgaaattgaaactactctttcggttttattttctttagcatattgagtatagaaatctgaaacttatttaaaatttatactgcttttgttgatggctcattttggctgtgtatcctcacttatgtactgatttctgataaaggcttgacattattataacacgcattttgtgttccagtttaataaaacggtttctgagtcttgtctngaaaaannnnnnnnnnnnnnnnnnnnnaacatgtcg

SEQ ID NO: 43447 - DNA, 630 bp, Homo Sapiens
ggattttttccggaaccataatttggagttgtcgaagctgctgagccggcttggacagccagtgccctcgtggcttcgggaagaactgcagcattccagtctgggctgatgtcccagcctcccataccagcaaaatgccccctgcttccctaagggtcaggtccagagcagggcccacaagggggattagagtggcctggcccctccccctctacctcagtagcccccaggcctgagatggctgagaagggaagggtatccttttcccacagttctgggacaaataaaggggcttcctttggtaccccacataatagtgctaggtacctttgacccatcatcttgggaggtggggaggaatgagagggtccaggcagggtgtaggggaatgtattagtccaatgagatttccctcttcatccgcagcagtgtatctattctatacctggctatgggagagaccccttgcatgggagggaccccttgctatggcccctttagccaggcagtgggatctacctgtggcccggcctccctaatgtcattcacattgaatggggatgaggtcggacagtggctcatagagccgagtatgagccctagctgtgggctagaaatgtccttaataaa

SEQ ID NO: 43448 - DNA, 570 bp, Homo Sapiens
ggctaccccacccctaccacggagccatctggaccgaggtgtgggagtgatggagcaggtttactgtgcctgcccgtgttgggggccagcctgagccagcagtgggaggtggggccttagtgcctcaccgggcacacggattaggctgagtgaagattaagggagggtgtgctctgtggtctcctccctgccctctccccactggggagagacctgtgatttgccaagtccctggaccctggaccagctactgggccttatgggttgggggtggtaggcaggtgagcgtaagtggggagggaaatgggtaagaagtctactccaaacctaggtctctatgtcagaccagacctaggtgcttctctaggagggaaacagggagacctggggtcctgtggataactgagtggggagtctgccaggggagggcaccttcccattgtgccttctgtgtgtattgtgcattaacctcttcctcaccactaggcttctggggctgggtcccagatgcccttgaccctgaccaatcaaagttctcgtattttatggaacaaaagtaactaaaaaaat

SEQ ID NO: 43449 - DNA, 619 bp, Homo Sapiens
gtttgctctttttttgtacagactatttagttgttgagaaaacaggggcgtttcctaatttggtctttatcctgcgacaacactttcagcagactagcctctccttatctcacagatcacaagcacccctagatagtgtgattctgtcagatagcatttatgcaaaaatctatgaagttaaaagatcgtagaagccaaatgaaatgtacatatctactgactgatgacaagggaatttcattaggaagaaggtaaagaaacatcgttgagtagcctaccttgatttctgtcaagttcataaccagcttcatattttaaaggcttcaggtttgaaattaagtcaactgcatgcagctttgctgataaatgaataattctctttgatgccatttatgagaaaagacttcaatatctgttgcctgtcatatttaagaaaaattactgtttctactctctgtatctgattttaaaagaaaaaactattcatacctggcttccaggtaattgactttgaattcttacaagcaaaggtcattgtgtttttcttgaatagacatctaataaattttgcttggaagtataaaaaaaaaaaaaaaaaaaaaaaaagggcggccgctct

SEQ ID NO: 43450 - DNA, 749 bp, Homo Sapiens
  misc_feature (696)..(696): n is a, c, g, or t
  misc_feature (698)..(698): n is a, c, g, or t
  misc_feature (723)..(723): n is a, c, g, or t
  misc_feature (727)..(727): n is a, c, g, or t
caggcagcagcctcaatccagaatgagcctggcggcaagcactgtgtggagaaaggaacccagccgaggtctgagtttcagacagaaactggggagttgggacatcttctctgtgccaggcttcattgacaccatcgctccccacagcagctccttggggcagggggctcacctgtgcagccacccttactcacagtagcatcccattcttcacactgcaaccccccagcactgtggacccttccagggaggtgacaggagccagcagacacatgacattcccagaaagccccatcttatccagacaggcttccctccatacttctttccacagttttaccctcagaaaaatgttggctgcagtcttcccttccttcacctccaccctggggaagggtcagtaaccaatgccgagggtcggggaaggaggaggcacaggcaagacagggactcagcgcagtgctcccgccatcatcggggacaggtgccagggtcagctgcagctctccttccgggagcagggtgtggtggccctggatggtcccagggagcagagggaggcaggcagctgtcacagccacagcggctctgaatggcttgagcttttagtatgtgttcaagtgcaggatactacaaactggtaaagacttccaccatgtgaagaatgtatgtaaattaaagtttattgtaatgaangnttttactttttgcaattaaaagtgntggntgataagaaaaaaaaaaaaaaa

SEQ ID NO: 43451 - DNA, 584 bp, Homo Sapiens
  misc_feature (530)..(530): n is a, c, g, or t
gtgacctgaccgcaagaggccaatggagtgtgggagctgaaagggtcttcgctggcggccggacagtactgcttttaaagagacagtgttagggatcttggaagcacagccaacatgtgtgacattgaagaagccactaaccaactcctagatgtgaaccttcatgagaaccagaagtctgtacaagtgacagaaagcgacctcggaagtgaatctgagcttctagtcactattggagccactgtacctactggctttgagcaaacagctgcagatgaagtcagagagaaacttgggtcatcatgcaaaatcagcagagaccgtggcaagatatattttgtcatttcagtggaaagtctggcacaggttcattgtctgagatcagttgataacttatttgtggtggttcaggagtttcaagattaccagttcaaacaaacaaaggaagaagttctaaaggattttgaagacttggctggaaaactcccatggtcaaaccccttaaaagtgtggaaaattaatgccagttntaaaaagaaaaaagcaaagcgcataaagataaatcagaattcaagtaaagagaa

SEQ ID NO: 43452 - DNA, 460 bp, Homo Sapiens
cacgaggcggttgatgggccctttggcactgccagtgaagatgtgttcagctatgaggtggtgatgttagtgggagcagggattggggtcacacccttcgcatccattctcaagtcagtctggtacaaatattgcaataacgccaccaatctgaagctcaaaaagatctacttctactggctgtgccgggacacacatgcctttgagtggtttgcagatctgctgcaactgctggagagccagatgcaggaaaggaacaatgccggcttcctcagctacaacatctacctcactggctgggatgagtctcaggccaatcactttgctgtgcaccatgatgaggagaaagatgtgatcacaggcctgaaacaaaagactttgtatggacggcccaactgggataatgaattcaagacaattgcaagtcaacaccctaataccagaataggagttttcctct

SEQ ID NO: 43453 - DNA, 590 bp, Homo Sapiens
tgggtcagtgacctgcacggtgattctccacctccaaaggtaggggtgggactggaggcgtccctaggtcaggccgttgagttcgagctccgatgggccaccttgaatccaggactgaccgcccgtgtgtgcacagtttgttcttggacgaggactcgtgaggatcgagggctggggaccccggtgtgagcaggatggggccctgccctcccgtgggagttgtggactcgagcccaggggctgcccgtcacagcggtgtcccaggtccctgccatccgattttacctgggatgtcttctctggagtttggaattgcttgaggaaccctgcgtgtgcttggagaggccagagggcttgctgagaaccccatggacagtggagagcgggattcgaaccaagggctggactcccacacctctggcctgcgttgcccagttctttgtggctctgaagaattggccgctgtggaaaagagcaaatgtccgagacccccaacaggaagagtctaaaaatccagtttgcaaccacttctgacctacaaaaaaatggaaatttagtgtttttcagcctaagacattaaatttcatatc

SEQ ID NO: 43454 - DNA, 765 bp, Homo Sapiens
agatcatgtagctgctgtgtaacatgaccttaaatagtcttcctgcataggaagagcaaaagggtattcatcaataggatatagatttaagacattccctgactaccccttgcgtgttaggtgatgtcttttagcagaatcatgaagaccttttttctcccttaataaaggagaaaaatatactgatggctggagaaatttttctctgcctttcagttttatgaattttttcagaagtaacaatattattattgactttttacttatttgataaaaattaaagaactattttgttttggtcagataaattgacaagactaatcagtattttattataagtaaaagatttttcttctttccttaaaaatatttttttttcacctaggtctaaatagctaactaactggtagaccagagtattacatcatcttatttggttttataccaataaaacatagcgtggaactcattcaggtaatgttgcatttcattgctttggatgaacaaaggaagtaaactaatcctttataaatgaaaacccagaatagttggtatgtcagctagtcattcctgtcatattcccagtagaatgattttcaagttgaatttctgtacaaatatctaaataagagatgtgcagagagcaccaattttccttcaatatccattctttacttttcacataatgatagaacctttgattttttcaagtgggtatgcctcctagaattaaagactacatttcccagtaaaagcaaaaaccaa

SEQ ID NO: 43455 - DNA, 952 bp, Homo Sapiens
cgcgccgcgccggagtccgctgtccgccagctacccgcttcctgccgcccgccgctgccatgctgcccgccgcgctgctccgccgcccgggacttggccgcctcgtccgccacgcccgtgcctatgccgaggccgccgccgccccggctgccgcctctggccccaaccagatgtccttcaccttcgcctctcccacgcaggtgttcttcaacggtgccaacgtccggcaggtggacgtgcccacgctgaccggagccttcggcatcctggcggcccacgtgcccacgctgcaggtcctgcggccggggctggtcgtggtgcatgcagaggacggcaccacctccaaatactttgtgagcagcggttccatcgcagtgaacgccgactcttcggtgcagttgttggccgaagaggccgtgacgctggacatgttggacctgggggcagccaaggcaaacttggagaaggcccaggcggagctggtggggacagctgacgaggccacgcgggcagagatccagatccgaatcgaggccaacgaggccctggtgaaggccctggagtaggcggtgcgtacccggtgtcccgaggcccggccaggggctgggcagggatgccaggtgggcccagccagctcctggggtcccggccacctggggaagccgcgcctgccaaggaggccaccagagggcagtgcaggcttctgcctgggccccaggccctgcctgtgttgaaagctctggggactgggccagggaagctcctcctcagctttgagctgtggctgccacccatggggctctccttccgcctctcaagatccccccagcctgacgggccgcttaccatcccctctgccctgcagagccacgccgcmaaggttgacctcagcttcggagccacctctggatgaactgccccagcccccgcccattaaaraccggaagsctga

SEQ ID NO: 43456 - DNA, 784 bp, Homo Sapiens
gaaattggagaatctggttttgctttattattccctcaaattgaaggaataaaaatacaaccctttcattttattaaggatccaaagaatttaacattagaaagacatcaactcactgaagtaggtcttttagataaccctgaacttcgtgtggtccttgtctttggttataattgctgtaaggtgggagccagtaattatctgcagcaagtagtcagcactttcagtgatatgaatatcatcttggctggaggccaggtggacaacctgtcatcactgacttctgaaaagaaccctctggatattgatgcctcgggtgtggttggactgtcatttagtggacaccgaatccagagtgccactgtgctcctcaacgaggacgtcagtgatgagaagactgctgaggctgcgatgcagcgcctcaaagcggccaacattccagagcataacaccattggcttcatgtttgcatgcgttggcaggggctttcagtattacagagccaaggggaatgttgaggctgatgcatttagaaagttttttcctagtgttcccttattcggcttctttggaaatggagaaattggatgtgatcggatagtcactgggaactttatattgaggaaatgtaatgaggtaaaagatgatgatctgtttcatagctatacaacaataatggcactcatacatctggggtcatctaaataataattaaagtggctttcataatatgtaacttttgggttctgcctttttcagaaaatggaaacttgggccatgtgta

SEQ ID NO: 43457 - DNA, 903 bp, Homo Sapiens
  misc_feature (265)..(265): n is a, c, g, or t
ggtgaacctccaaaatcaggggatcgcagcggctacagcabccccggctccccaggcactcccggcagccgctcccgcmbcccgtcccttccaabcccacccacccgggagcccaagaaggtggcagtggtccgtactccacccaagtcgccgtcttccgccaagagccgcctgcagacagckccccgtgcccatgccakacctgaagaatgtcaagtccaagatcggctccactgagaacctgaagcaccagccgggaggcggngaaggtgcaaatagtctacaaaccagttgacctgagcaaggtgacctccaagtgtggctcattaggcaacatccatcataaaccaggaggtggccaggtggaagtaaaatctgagaagcttgacttcaaggacagagtccagtcgaagattgggtccctggacaatatcacccacgtccctggcggaggaaataaaaagattgaaacccacaagctgaccttccgcgagaacgccaaagccaagacagaccacggggcggagatcgtgtacaagtcgccagtggtgtctggggacacgtctccacggcatctcagcaatgtctcctccaccggcagcatcgacatggtagactcgccccagctcgccacgctagctgacgaggtgtctgcctccctggccaagcagggtttgtgatcaggcccctggggcggtcaataattgtggagaggagagaatgagagagtgtggaaaaaaaaagaataatgacccggcccccgccctctgcccccagctgctcctcgcagttcggttaattggttaatcacttaacctgcttttgtcactcggctttggctcgggacttcaaaatcagtgatgggagtaagagcaaatttcatctttccaaattgatgggtgg

SEQ ID NO: 43458 - DNA, 577 bp, Homo Sapiens
aaaaagattttataagaaagcagagcttttccttgaagctcttttgaagtggtagcttaattagtattttgttgaaaatactttaaagatgcctagtgaaaagcctactaaagtgctgtgagattggggtttagaacattttattttcaggctttatggcctattttccattgtgtcaagtgcaaaactaccctggcccaaaggaagggcagagaacataattacatcttaggccacatttcattctttgcagctttgctaatccagttgctcaagttctttacctcaacctgaaggaatgaagcattattacattttgtgaatggtgttcagcctataagacgaagtctcacaagacctataggaaagtttaccatctgccttaaatattaaaatatccatctgttattcacattaatacacagaatgaaaatagaggtctaggaattatcaaaggtactgcaaaaatactgtatagaacttatttgtaaatagcacatacattgatagatggggtgtgggaccaacaaaccaaattaaaagaaattgtttttctttcagtaaaaaacaaaaaaag

SEQ ID NO: 43459 - DNA, 859 bp, Homo Sapiens
ggggttttttttcccccttttaaaatcaacaggaaatgtttcaaaggagggatgaaatgcttcttggcttcctcagcacttggcaaggtagacctcatagcaaccttgaatatgactttctttagtctctagctatgcactattaagtgcctcttgggtagaggtagagttaagtattgagtgccagtcttgacgtccgtatgcctcagtttttctcatatataaaaagcagtatacatacctacccttttctacctcatcatttgttgtagggattaaatccgggagagcaattctgaagcctataaatttccttgaagagatctaagaacctattatgctcttggtgtaccaagctctggggtatatattcagaatacctcatgttctggaagctgagcactagctcccctttattgcctgcctggcagagcctgtttgattactgcaggcccttttacccatgcttctagtttaagtattctttctttgatatgaggctcttgaccagaaaagagttctttctctaggtgttctgagagaagtttgtaaatttggatagtacattctatcctgataaaaccaccttgctgtggtcttgatgtacaaaaaaaaatttttttttttgagacagagtcttacttctgttcaccaggcctggaatgcatttggcgcaatcctgggttcaatgcaaaccccccgcctccttgggttaaagcggattcctcctggcctcaaacttctcaaatttccctgggaactaaccggggttggccaccaacccaacctgggccaagatttggaaatttttggggtagagaaaaagaatttttaccccttgtgttgggccaagcctgga

SEQ ID NO: 43460 - DNA, 644 bp, Homo Sapiens
gcagctctggctccttgtctcccaggctgatcctttattcagaataccacaaagaaaggacattcagctcaaggctccctgccgtgttgaagagttctgactgcacaaaccagcttctggtttcttctggaatgaataccctcatatctgtcctgatgtgatatgtctgagactgaatgcgggaggttcaatgtgaagctgtgtgtggtgtcaaagtttcaggaaggattttacccttttgttcttccccctgtccccaacccactctcaccccgcaacccatcagtattttagttatttggcctctactccagtaaacctgattgggtttgttcactctctgaatgattattagccagacttcaaaattattttatagcccaaattataacatctattgtattatttagacttttaacatatagagctatttctactgatttttgcccttgttctgtcctttttttcagaaaagaaaatgtgttttttgtttggtaccatagtgtgaaatgctgggaacaatgactataagacatgctatggcacatatatttatagtctgtttatgtagaaacaaatgtaatatattaaagccttatatataatgacttttgtactattcacattttgtatcagtattatgt

SEQ ID NO: 43461 - DNA, 764 bp, Homo Sapiens
  misc_feature (720)..(720): n is a, c, g, or t
  misc_feature (730)..(730): n is a, c, g, or t
  misc_feature (736)..(736): n is a, c, g, or t
  misc_feature (739)..(740): n is a, c, g, or t
  misc_feature (748)..(748): n is a, c, g, or t
  misc_feature (752)..(753): n is a, c, g, or t
  misc_feature (757)..(759): n is a, c, g, or t
  misc_feature (761)..(764): n is a, c, g, or t
cccactgccatcacccagcaccccagatcaccgccaggccagcccccaatggtccccttacggacaggtcccagagatggacagaggcacccagggtccccaccgtccttctgacacagcctgtgggctcccggaccgagtgtcccccgccaggctactcctaactaacgcgttgcctttcacggaccccgctggaagcttgtagcttggcaaggctgatgcttctgccctggcctgctctgggtggtggtggataggtggacagacggccagccagccagctgtggccgggggcccggctccatgtgtcccgtgtctgtgtgctgtgctgccgcgccgtgtctgatgtgtcagtgctccggccgccgctgtccctttcatcaaagccttaacctttgctttatgctcttgtgggaggcgacgggggggcaggcgggagcaggcacgggggtgatgctgccacagggggctggtgacacccagagccccctccccagccctcaggccctccctgccaaactggagaaccccaccccaaggcatgccacgtccgcagccccggcctggctgcggtgctcgcgccgtgggaaagcacactggggaggggtcagtgcttcccttggtgtcagggacctgagagtaagcacatgacagcgtctgcttgcgttgtgtctgttttatgtttttatatctacatctatatatctataattttattanaaaaaagaanaggaanaannaaaaaaanaaannaaannnannnn

SEQ ID NO: 43462 - DNA, 631 bp, Homo Sapiens
  misc_feature (616)..(616): n is a, c, g, or t
caacactttagaattacagacaacgcgcttttgctgaactgtccattttggtggttgtgtttttcagtcaaatataagcaggatgggcgatagagatatatttatatatagatacatattctatatatctaatgcctaaatatgggtattaaagggaaaatttttaaagtctgattaaatccaatatgacatgaaattaaatatatggattagtaaggaaaaatgttaaaaagtagagaggataccaagaagattaaactggactagccttatttgcaagtgaaggatctggtgctgctttcagatgtttatcttttatttttttcccttaagctttaatcttcgtcattgtcttaaagtcaactggtgtttcttgttcattgactttggtacgatggtgctttgcaaggatgtatttatgttataatggccaacatttggtcagcccttgtccacttattcactttccttcttttgtaaaataagtgctttaattataactgtataaaataccttgattaaccccttttttgattattacaaataaatagctggaatggtacaaattgaaaattgatttttggaattaaacaattgaaaaagttaaaaaaaactnttcattcttggccgg

SEQ ID NO: 43463 - DNA, 841 bp, Homo Sapiens
  misc_feature (794)..(794): n is a, c, g, or t
ccatgtggatccctcagaggacaccagctcccctcatagccctgagtggccacctgctgatgctctgcccctgccccccacgaccccgccctcccaggagttgactccggatgcatgcgcccagggcgtcccatcagagcagcggcagatgctccgtgactacatggccaagctaccaccccagagggacaccccaggctgtgccaccacacctccccactcccaggcctccagcgtccgggccactcgctcccagcagcacacacccgtcctctctagctctcagcccctccgtaagaagcctcgaatgggcttctgaggacacaaggtgggctgccctcaagccccagagagcccctcatccttcctctgggaccagatgtgccttccacagttgaaacttgagaagcagagctcgccaccttctggaggccactgtgatgatgagccaagcaatttggagccaagttgaagggacagggcaacaaaatacagtagtagtttcttttgtattttgtatattcgcctgaagatcatcccgcaaggcaggctggaggtgccggtgggcctgtgttgctgggattttagtctgtgctgggaggcagggctccgctgcgcctcagctgtgggggcctcaggcaggtccctcagttctcacgccttcctgtccagtggaatgggggccaggagtgctggctcctcgtgtttggtgagggtggagtgaggcccctgcagagctgctgatgaggtgggcacagcggccgttggcagctgctgttgtgggttgctttgtncatctctgccccggtctgatgtttcctacagggagatgccttggatc

SEQ ID NO: 43464 - DNA, 583 bp, Homo Sapiens
tgtgatgataaagcaagcctagggccagggtttggggagcagagagagccaagaagttgaccacgtgtgatttccagcccttcccactgggacttgacttcccaggtcaaggagtccgtctcattctggctggtcgagtgaccagaggcctgtgtgaatgtgtgcacctgcttttcctgcctggaatgttttctggctcagctgcagcaacatctgtgagcccagtgtctgccctgtgtccctgggctcgctccaagtgcaggaacatacatgcagggcccaacatgatgatggtgtgaagggcaggaaacagtcctctgaaggagtggggaggtgggcagtctgcccccgccaggtaccatcgcctcctgccagcttccttagaccaggcagggctgccatggtgctagctgcaagtccatcagtattgaccgtctcgctccatcttggtcctccggagtcccaagtttccttttcatcaaatctgacaagagagaagaaacatgggtgtgcttggcccacagggcctggtggtgatggacctccccgctccctcaagctctggatggctgcagtgttgtac

SEQ ID NO: 43465 - DNA, 672 bp, Homo Sapiens
cgcgtccggttttactgattttatctccacctctctgatacatcactctttcatcttcattgctattattaataaatacctacagtactaacctgcctcctatacctagctggtctcctctctgttgctcaatgttaccacagcaggctttctagaagcactctgacagtgttactccctaatatccttcagtgacttcaggaactttcaggagaaagccaaactcctctgtttggtgtacaaggtcttctgatgtgtttcctccaccgaatgttctggtgaaacagacttacacttcttcagaagccacatttggccaggcctcccgccttggtaaatgctgtactctttgcatcaagtgtgctagtcatccttccccacttggaaaattcctatgcatcttgcaggcctgacataagcatttcctctgtgaaacctcctttgctccactcaaggagagtcatctaacttccactttcgtgtcaccactgtaattacaacctacctctattgtatgtcacttaaatcgtactgtattgttttatttttcaaaagtctttactagaatgtgagctccttaagggcaggaaaaggaacctttttattttttgcatctccatagcatagtttttggcatatgaatgtttaataaatgtttgttgaataaaaaaa

SEQ ID NO: 43466 - DNA, 787 bp, Homo Sapiens
gccctggagaagcatggcttcagtgatattaaggtggaggacacagccaagggccatatcgtcctgctccaggaggctgagacgctcatccagattgaagaagactcgacccatatcatctgcgacaatgacgagatgctcagagtgcgactgcgggaccttgtcctcaaattcttacagaagttctgagtgggccatctgagctacttccctgaaatcctgcagtccctcactggctgccctcacaagccacctgaggagtggcatgagaggccattaactgtgtctttgtggtgtcctctggcttaaggagtgaagaggtggctcttgagggaaatggtctggacttattcccagcactgtttcaggcaagaactttccctttcaacttcaggctcattttcttctcaactctggctctctcaaggagctggagggtggcagaagtgggacaggagaagttttccaagaggttcatgggaggcggaggtgactggctggctgtcttgcatcagtcccaggcctcggccaggggagccagcctttggtttcgtttacttgcctacagtgctgtacgcaataagatgatgatcccaaaatatggtaaagtgaacccatctgtctgcattttctactctgagcccatttgtcaactcaaacaccgttattccccatcatgcaacaccacaaaccaaaagaacgccgaaggcagctcacaggcccgagtcgcggacaacaagagtgccccgcaactgggccccagggcccacaggcggaccccgtgacc

SEQ ID NO: 43467 - DNA, 837 bp, Homo Sapiens
gccgagcgccctgaggactcagcgaagggtgggcgccgccgaggcctcctgccgctggcgggtttccgcggagtgccgcccggctccgctctgccgccggcgcggctcatgggcagagtcggccgggcgggccggcattaaactgaagaaaagatgtccctgtacgatgacctaggagtggagaccagtgactcaaaaacagaaggctggtccaaaaacttcaaacttctgcagtctcagcttcaggtgaagaaggcagctctcactcaggcaaagagccaaaggacgaaacaaagtacagtcctcgccccagtcattgacctgaagcgaggtggctcctcagatgaccggcaaattgtggacactccaccgcatgtagcagctgggctgaaggatcctgttcccagtgggttttctgcaggggaagttctgattcccttagctgacgaatatgaccctatgtttcctaatgattatgagaaagtagtgaagcgccaaagagaggaacgacagagacagcgggagctggaaagacaaaaggaaatagaagaaagggaaaaaaggcgtaaagacagacatgaagcaagtgggtttgcaaggagaccagatccagattctgatgaagatgaagattatgagcgagagaggaggaaaagaagtatgggcggagctgccattgccccacccacttctctggtagagaaagacaagagttacccgagattttcttatgaagaggactcagactcgatcacagtcttcaagcagcatttctcccagtgacgaggacagacgacgaatctcaccgactacactctctcgtactggggcagtgcc

SEQ ID NO: 43468 - DNA, 589 bp, Homo Sapiens
atttaaagaagtcataaacagcatttattaccttggtatatcatactggtcttgttgctgttgttccttcacatttaagtggtttttcatctttcctccctcctcccacagcctggctatacagtgcatccttgaactgtcagcccacagcagcaatatgcttattctatccacatccctaacatcatgcattcacaaggtcaaagttctggtccaaacccttccctatagaagttcaatggctgcgaaagaatttgtagtaaaccaggcctcccaggatggcgagctccagtaagatgataatggaaagcagcagcttgttggttgtcactctacaaagagaagcaaagtggggagtagtcagaagtttggataaccttccttctaaacattttggggttagacctgggaccacggctggatactctgaggctgtatgtttgatcacacagccacttagcaggaagtactcataaggttctttagctgtcacttagggataacactgtctacctcacagaaatgttaaactgagacaataaaaaccaaagcataaaaaaaaaaaaaaaaaaaaaaaaaaaaaaaaaaa

SEQ ID NO: 43469 - DNA, 584 bp, Homo Sapiens
ggtgagcacttgaaacactgccttggggccttgggttaggggagcctttgtctttagtgcaggacacacatatgcttacacctacctttatcaccattcgttcatgaatcatgcctagctccatccttgccctgggacctactaggccttccatccaactgggaaatggggagaagcaaagctggcctcatgctcttcagggtcagttcctatctggagttgaccaggcctaccccagttgccattcctgaaaaatctcagctgccaggctgcctttagggtccctgcagacccaggagagttgagagggtgggggacacagagagaatagagaggatgtgggaactgccagagggccggagcgcaggagttcaagtggaggaatgctggctttgagccctctacactgctggttgtatgaccttggacaagtcacttcacctctctgtgcctcagcatcctcatctataaatggggatctctgaaaccttcctaccctacctacctcacagggctgttgtgaggacccagggagtttggatgtggaagtaaaagtgctgctaaaacctaaaaaaaaaaaaaaa

SEQ ID NO: 43470 - DNA, 575 bp, Homo Sapiens
ccgttctcctgtgtctactaacaaggacatgggggtgggcggtgacctccgcatccctcagagctcagagggtcctcgctgccaccggtccccccctagcccgtcatcagccggtggcagctccatcttccattcctggttttagggcagaatccatggagactgcttccagaaggcatctggctctgagttataaattacttccctggtcctgacagtcacctggggtcccccctctccctggttccacctttctgaggaggagcctggagtcagggctgggttttggattaacccatccttcctagttaacacctttttgtttttattttattttatttttgtttgttttctccgtgtgtgtgttttcctaatttatttacctctgtttcccctttttcctttttttttttaattaaagagcaaagctttttattactttgtaatttaaaaaactgaaaaaaaaaactgaagaactttggggggaattttgtacttttttcctgtgtaaatattggacttttttgagctttatcgtggttgttaatttgaagtaataaagtagaaaagataaa

SEQ ID NO: 43471 - DNA, 785 bp, Homo Sapiens
ggggatgaactgatggaaattttccgaagatgcaagataccaaatactgttgaggaagctgtgaggatcattactggtggggccccagagctagctgtagaaggcaacggccccgtggaaagtaatgcagtactcaccaaggccgtcaaaaggcccaacgaggattcagatgaagatgaagaaaagggagccgttgtcccccctgttcatgacatttacagagcacggcagcagaagcggattcggtagggttttaaacgcctctgcagaaaactcctgtccaggattccttttgcctcaagtggtatgtttaaaagagacaacgctttgttacaaggttcttggaaacaaagttgtattgtcattggtgcctctatcacatggttcttgagaaaaaacaaaccaacctgtgtgaattttagaatacggaacagacctatgctctaagcaaaattaggttttcaaaaatgtgagaacagtacaaagtggcagaaccacattttgttccctcttcaagggtgtcttgtatgtgccgcttgaagatttgtgagtttttcaacagttttattttaaaaactggatggcttatgattgtaaagcattttatcacattttctgaaaacaattgttcttggtttgcttatgtagagtccctgccttaatggttggtttttaattatgggcagaatggatggaaatcccgttttgtagttttcaatttttaaaaagcccttttaaaaaattaaaagggattcccaaaaccttcaaaaaaaaaaaaaaaaaaa

SEQ ID NO: 43472 - DNA, 692 bp, Homo Sapiens
  misc_feature (30)..(30): n is a, c, g, or t
agaagctgaaggctgtccttcagccccagnaagagacaccagtggataaaaagccagaggtgcatgaaaaggccaagagaaagtccacccgtcctcattatgaggaagagggagaagacgatgacctccagggtgtgggcgaggaattatcttccagccccccaagcagctgtgtcagcttggagacccttgggagtcacagcgaagaaggcctggatttcaagccctccccacccctctcaaaggtttccgtcattccccacgacctcttctatttcccacactatgaggttcccctggctgcagttttggaggcttatgtagaagacccggaggatctaaaaaatgaagaaatggatctcgaagagccagagggctatatgccagacctggactccagggaggaggaggccgatggctctcagagcagctccagttcctcggtgccaggagagagcctccccagtgccagcgaccaggtgctgtatctcagcaggggtggtgtgggtaccacaccagcctcagaacccgctccactggccccccatgaggaccaccagcaaagggagaccaaagagaatgaccccatggacagccatcagtcccaggaatccccaaacctggaaaacatagcaaaccccctagaagaaaatgtaacgaaagaatcaatcagtagtaaaaaaaaaaaaaaa

SEQ ID NO: 43473 - DNA, 564 bp, Homo Sapiens
  misc_feature (370)..(370): n is a, c, g, or t
gaacgagggcttcacctcaagcgcacagccctgctgagccacatggccggctctgtgcagttccgtcagctgcagctgttcaagcacgagatgcagcatttcgtgaaggtcatccagggctacatcgccaaccagatcctgcacgtcacctggtgcgagttcagggccaggttggccaccgtgggcgacctggaggagatccagcgtgcgcacgcagagtacctgcacaaggccgtcttcaggggcctgctcacggagaaggcggcgcccgtcatgaacgtcatccacagcatcttcagcctcgtgctcaagttccgcagccagctcatctcccaggcctgggggccccctgggggcccgcggggtgcanagcaccccaactttgcactcatgcagcagtcctacaacaccttcaagtactactcccactttctcttcaaagtggtgaccaagctggtgaaccgcgggtaccagccccacctcggaggactttctgctgcgcatcaacttcaacaactactaccaagacgcctgaggctgctctgcgggggacgtgcacaataa

SEQ ID NO: 43474 - DNA, 522 bp, Homo Sapiens
gtgcgtggaattcgcccgcccacaaccaccacgcacacaactactacaattccgcctagggccacaaggccttccctgttttccccccaagggaggctgctgctgctcttggctggacccagccaggcccagccgaccccctctccctgcatggcatcctccagcccctgtagaactcaacctctacagggttagagtttggagagagcagactggcggggggcccattggggggaaggggaccctccgctctgtagtgctacagggtccaacatagagccgggtgtccccaacagcgcccaaaggacgcactgagcaacgctattccagctgtccccccactccctcacaagtgggtacccccaggaccagaagctcccccagcaaagcccccagagcccaggctcggcctgcccccaccccattcccgcagtgggagcaaactgcatgcccagagacccagcggacacacgcggtttggtttgcagcgactggcatactatgtggatgtgacagtggcgt

SEQ ID NO: 43475 - DNA, 789 bp, Homo Sapiens
  misc_feature (676)..(676): n is a, c, g, or t
ggggctgttaccagctaccacccataacaagaccacaagaccaaaaatgtcaattgtgttaccagcaataaacataaatgagaatgtgatcaatgggcaggactacgaagtgatgatgcagattgactgtcaggtgatggacaccaggatcctccatatcaaaagttcgtcggttcctccttacctccgagatcagcagaggaatcaaaccaacaccttctttggctcccctcccgcagccacagaggcaacccacgttgtcagcaccatccctgagtcattacaatagcaccctgcagctatgctggaaaactgagcgtgggaccctgccagactgaagagcaggtgagcaaaatgctgctttctgccttggtggcaggcagagaactgtctcgtactagaattcaaggagaaaagaagaagaaataaaagaagctgctccatttttcatcatctacccatctatttggaaagcactggaattcagatgcaagagaacaatgtttcttcagtggcaaatgtagccctgcatcctccagtgttacctggtgtagatttttttttctgtacctttctaaacctctcttccctctgtgatggttttgtgtttaaacagtcatcttcttttaaataatatccacctctcctttttgccatttcacttattgattcatanagtgaaattttatttaagctatgccacacatgcatggtcaaatggtttccactgattcgatttttcattcatttaatgcaaacccattctggatattgtgctttatttgagaa

SEQ ID NO: 43476 - DNA, 884 bp, Homo Sapiens
acgtggtgctctcccgggctcgctccgagccgcgacgggcgaggggcggacgttcgtggcgaacgggaccgtccttctcgctccgccccgcgggggtcccctcgtctctcctctccccgcccgccggcggtgcgtgtgggaaggcgtggggtgcggaccccggcccgacctcgccgtcccgcccgccgccttctgcgtcgcgggtgcgggccggcggggtcctctgacgcggcagacagccctcgctgtcgcctccagtggttgtcgacttgcgggcggcccccctccgcggcggtgggggtgccgtcccgccggcccgtcgtgctgccctctcggggggggtttgcgcgagcgtcggctccgcctgggcccttgcggtgctcctggagcgctccgggttgtccctcaggtgcccgaggccgaacggtggtgtgtcgttcccgcccccggcgccccctcctccggtcgccgccgcggtgtccgcgcgtgggtcctgagggagctcgtctgtgtggggttcgaggcggtttgagtgagacgagacgagacgcgcccctcccacgcggggaagggcgcccgcctgctctcggtggagcgcacgtcctcgtgctcccctctggcgggtgcgcgccggcccttttgagcgatcgcaggggggttttggcccgaaggtgacgcgtccccccgatcggaccgttggaggggactggccagttgtgcaatagctagggggctctattggctcccaggagctttggtaggacggttcgtttgcgtaggaagggtttggtagcctgggaggcctccgggggtggatcgtgcaaggagagtgttagtatggtgctgctatgggttggctggccggggtgggggtgggccgtctt

SEQ ID NO: 43477 - DNA, 882 bp, Homo Sapiens
  misc_feature (698)..(699): n is a, c, g, or t
  misc_feature (701)..(705): n is a, c, g, or t
  misc_feature (707)..(708): n is a, c, g, or t
  misc_feature (710)..(712): n is a, c, g, or t
  misc_feature (714)..(714): n is a, c, g, or t
  misc_feature (719)..(722): n is a, c, g, or t
  misc_feature (724)..(724): n is a, c, g, or t
  misc_feature (734)..(735): n is a, c, g, or t
  misc_feature (737)..(737): n is a, c, g, or t
  misc_feature (743)..(744): n is a, c, g, or t
tggctctccgattgatcctgtgaggatgaatttgcatttccagaatccttgagcatggattagatgtttcctgggaggtgccttgagtaccattatgtgcaagctacataattaaaacatttttcttagtttccctgggaagcttttcttgactcacagcccaggttcttctgcccaacacaaaaggagtgagttggggtctttagtctcttcttattgggtagctcttgctttaatattctgtttggtgagtgtaagggattctgcaagggacagggggcctgactacccagtctttgacttgtatcctctcccctcttcatacactcctgctgaaaaatgttaatccaaatacacatttaaacttagggtcggtccttattctgatttgagtattttaatgtctcagtgtgctgatttggtagttggaagaattattcttctggaggtctgttagactacatcctacactgacttcagaaaacagtctgtcagacaaaaaggccttatgtcaccactggtacctcagtttcctcatcccatttacagtttttctaactccagggtagtgtttagtgttaatatttgggatatattttttttcaaaactgtttttaagtagtttgtaatttgtaacaaacttgtaacctggttgggactgatattgtcatagctatgataaactttggatattagcnncnnnnncnncnnncnccccnnnncncccccgcccnncncccccnncccaaaaggggcggccgcctctaaaaatatcccctcggagggggccccagctttacgcgttaccccagctttttcttggaaacaaagtgggccccccatataaggggagcccgtaattttataaagcctagggccccc

SEQ ID NO: 43478 - DNA, 529 bp, Homo Sapiens
atttttggaaatactgttgttcattttgtagggtgttcctaactgcagttttctgtgttctgcatacaagtcttagcttaggaaacatttggttcttaccatcacagccaggttcacagaggctctgatgctttttggttgattgctggtgagaatggccggcggtggctgcagtggtagcctgaggaaggccaagctgccctccctgggaatcactcagatgccccaagatgtccgttgggaagctcccaggacagcactttttatacagaggacaccgcctcggccccacgtccttagaggccagagcacatctgaaaactgcaatcacagccgtccgctggaaaaacgtttcgaagcacagtggccagcgagcgagcacgtggctactccctgttgcatgtcaaatccacacagatgtcagcggcagctgctcggcagcccagccctgggcctgggtgggttcatgtccaatcttgttcgatcactagatgattctaacatcgaaataaacctctttttatatggc

SEQ ID NO: 43479 - DNA, 530 bp, Homo Sapiens
cgcgtccgattgtgtgtaacctgcacaatgtggaaagctgatatacctgtgcaaaatctttgcctctgtgctgtcagtgtgatgtgctttctgcatggttatatactactagtgattttatcaaaacttctaaaatttaaattacgtggtaaaagatctgtaaaaggctgcataaatgttagttggcacataaagacaattgtagaagttgaaaaatgattgctatatttcaatgtttattcccactcaacatactgccttctaagcttccctttttttgttcaaagcatgatcttaaagatatgtttaagttaatggatgtaatgcagggttcctacactgtattttggcgcatgttggtggccctctgtgccctagatatatgcacacagggtgcaagttaaaagctacagagtgaaagttggtttggatcctcttcatttcatttgtttagcttttctgttatttttctctacttacatgtattcctgtgaataaatccttgttaagttaaccctttaaaaaaaaaa

SEQ ID NO: 43480 - DNA, 563 bp, Homo Sapiens
  misc_feature (521)..(521): n is a, c, g, or t
gtgctatgaattcagatgagctaatatcttttcctctgaaggagtacttcaagcaatatgaagtagggctccaaaacctgtgcaattcctaccagagccgtgctgactcccgggccaaggcctccgaggaaagcctgcgcacctccgagaggaagctccgcgagacggaggagaagctgcagaagctgaggaccaacatcgtggcactcctgcaaaaggtgcaggaggacatagacatcaacacagatgatgagctggacgcctacattgaggacctcatcaccaagggggactgaaggcaggagagagagcagctcccctgcccacctgcccctcaaccctgtagctgcagggggaggggacttcattcatgggttggtggtcgcaccttggtttgacttacacgggacatttgtgtttttggaggaaaagataccctgattctttgaatcttccttaagtttataaatatttattttttaaatgaaaaaattcctaaaagagaaaaactgtgctacttnaggggggccttttgttttgggttttggggaggggcccttaaa

SEQ ID NO: 43481 - DNA, 774 bp, Homo Sapiens
ggatcaaactaaagatgacatcttaattttgcattgaacattaatgtagcggatataatttgatgattatacttcattagatttaatttctaggccaagatgttactttttaaagtgcagtttaaggttcaggcatgcattctggctcatagtggttgaaagtaatttaaattagtgggaaagtagcatgcttgcatcacatagagtgagattggtattcatttacctatgttgcgccagtttgtgttgcagtttaccaattcaatatagccctgcatttaaagttcctttttaagatttgtggattttatttttattaagaacatagatatataaagtactgtagtttacaggtaggccttgaaatatcttttttaggatctgttaggaataagattgatattgtattgtgtgtaacctgcacaatgtggaaagctgatatacctgtgcaaaatctttgcctctgtgctgtcagtgtgatgtgctttctgcatggttatatactactagtgattttatcaaaacttctaaaatttaaattacgtggtaaaagatctgtaaaaggctgcataaatgttagttggcacataaagacaattgtagaagttgaaaaatgattgctatatttcaatgtttattcccactcaacatactgccttctaagcttccctttttttgttcaaagcatgatcttaaagatatgtttaagttaatggatgtaatgcagggttcctacactgtattttggcgcatgttggtggccctctgtgccct

SEQ ID NO: 43482 - DNA, 716 bp, Homo Sapiens
ggcacatctcacattgccatgtacagaggcaggagtcacgtttggtcaccatggaagcttttattgctcccacatggtcaggtctcaccctgcttgaagcgcagaaggcacagccttactgaccagcacgcccactgactggcatctgccggctttgtgcaggcagccccgacggtttccacagcgagcgccagctccggccagcctgggacagctcatcccagccgactacacctgcttctggtcctgtccacattttgatacgcagatcacttgagcttgtcaattagggttctgccattctgaaataaatgaagtttctaaagcagagtcggcctcagaagccaaaaactgaccagaagatggtgctcaaacctttaagacttcatctccatgtgaagggctcactgtttctaccaaggctgtgcctgtattaaggcttttccgtcctgggaactgtcagtctgggagagctcttgatctgcaggtggcaaaatggcactgaatatccccttggcagcagagaaaacccactgaaagatcgtagagtggcacatgcttacagggcattggtgccaagtccagtggatgagaatccagcccctcacaagctgtgggatggggcttgggaagttgcagtgaaatgtcattaaaatttcttccaaaacaaaactagaaataattgctgagggcttataggggaagtggtttaaaag

SEQ ID NO: 43483 - DNA, 605 bp, Homo Sapiens
agggaagtgccaaccatgtatagagtgggcaggcggttccagggagacaagcagcatgttattaaattgggcctaggcagttggacgataatggagaaaaagcagggatgctataatgagtcctccccaagggtgagttcagcaccccagccctgttctgcttgtatcccagtgatacttgggaggtaggaagaaaatgggagtaagagaacaatttggggctgaagggagtgtcagaggcacgttgatccttgttttgttgtcatggaaacttcggggctggtgggacttaggccaaaagctcagaggcacagccaaaatttagaagcttgctactcctacgactcggcctataaggaagagagaagctgtctgtactttggggactacattgctgaaggaaaaaaatcactccctggctaattaagattgcttccaaattgggggaatgtgtgtcatttcctttaccaaggccagtcatccctgcttccacccatggtcaggacagtcagccactacgtgatgctgtataaattggattacaaaccatattcttgttcagcttgcactaatctatataaataaaatatgtactttgaaaaaaa

SEQ ID NO: 43484 - DNA, 876 bp, Homo Sapiens
agaaaagtgatttaacagggtggattccactctgtgggaagccttcgatggaactcaaggtggagctcagcctttccaatgagctctaagcatgtagatagcctgagctgtgtctaagcctggtgtttaaagatgggtatttgtcatacaatatgggtcctaaatccaaccaactacacattttatctggtgttcaaaccaaagaaacaatgatctactcaaacattggagaaaaaaactgccagaggaggagttgccaattggcagtgtgtcttatctccatgttgtaactggactctgactttagaccattacctattaggaagattaaaaatgactgtatttttaaaggaataaatcccagtgtgcctgatttgacattcttgtcagcaaaaaaaacttaatttctagtaaatctataaaaatgggtaagtccctaaattacaaatgagaaaattgaagcacaaggaaaaaaataactagtttgaaatattttgaaaagtaataacataaaactagtatttgtagaagattatgtgttgtatataacaaattagtatttatagaatatgacctatttatctgaagtttataattgtttatacctaatacagtccttttggagtaagaatgattatataatcgttatcccatttgggtataaatctgtattttttagttttttcccctttgattagtatgtgttacctattaagacgaaataaggcataatcaagagctttaattggtataattttttccaccgagaagaagattgatactggctataggatccctggtttagggaaatatgggctttccggtttcaataaaatttaatttaaaaaaaaaaaaaaaaaaggggggcaaaacaca

SEQ ID NO: 43485 - DNA, 613 bp, Homo Sapiens
  misc_feature (506)..(506): n is a, c, g, or t
gcgtatgatggctgccggcagctgatttggtacaatgccagaagtaagcctcacatacacccatgctggaaagaaggagatacagtaggatttctgttagacttgaatgaaaagcaaatgatcttctttttaaatggcaaccagctgcctcctgaaaagcaagtcttttcatctactgtatctggattttttgctgcagctagtttcatgtcatatcaacaatgtgagttcaattttggagcaaaaccattcaaatacccaccatctatgaaatttagcacttttaatgactacgccttcctaacagctgaagaaaaaatcattttgccaaggcacaggcgtcttgctctgttgaagcaagtcagtatccgagaaaactgctgttccctttgttgtgatgaggtagcagacacacaattgaagccatgtggacacagtgacctgtgcatggattgtgccttgcagctggagacctgcccattgtgtcgtaaagaaatagtatctanaatcagacagatttctcatatttcatgacacatgtgaagaggcatcgtggacttttttctactcaattccagccaatgttgaaaaaaaaaaaaaaaaaaaaggacgc

SEQ ID NO: 43486 - DNA, 461 bp, Homo Sapiens
ctacactgtgaatctttaagccttggtggactagagcaacatcgtgctgcccaaaggactaacctatgcaaactagttcacattttagtggatgtcgcagttaatgtgtaataagacattatttcccctgcataatgtacaacagcattgaaatgacacattaagcctagcatcacattgtatagtacagtcactcacaaacccttcaaggctaccctaatcattaacattaatatttgtttaaaagcaaatcaccgatttatctattgaaactacttaaatgacggcaaaccaggaatgacagatggctgtgtcagcaatggctttaatgtgttccctgcaagtggtctcctatgatagaactgcgttctcaaatgcactctcttcagggtcttaatattctgtgttttctctctgtatttgtaaaacattataacacattaatttcctatctctacaca

SEQ ID NO: 43487 - DNA, 881 bp, Homo Sapiens
  misc_feature (844)..(844): n is a, c, g, or t
tttggttaaggtgatatggaggtgggagagcttttagttaagtaagaagctatgtaaactgacaaggatgctaaaataaaagtctctgaagtattccatgccttttggaccctttcctcgcaactaactgtcaactgttgatcaaaaaagtcaaggcattgtatgttgcttctgtggttattattctgtgatgcttagactacttgaacccataaacttggaagaatctttgagcaaattttctcagttgtctgtatgacttcagtatattcctgggaatgccataggattttttgtgcttgatacatggtatccagtttgcatagtatcacttctttgtaatccagttgctgttaagaatgatgtactttaaaggaaaagagaaaactgcatcacagtcccattctccagtgtccatgcaatgaattgctgagcatttaggaagcagcaccaagtctattacaggcatggtgtgaaacttgatgtttgacctgtgatcaaaattgaaccattgtacagtttggcttctgtttgcttcaaaatatgtagaattgtggttgatgattaatttgcgagactaactttgagagtgtaacagttttgaagaaaacattgaatgttttgcaaatgaaggggcttcacggaatgttacaatgttactaatataatttggcttttgttatgcaaattgttaacaccagctattaaaatatattttagtagaaatgctttaattcatatttttttcctctacactgtgaaatctttaagcctttggtggactagaagcaacatcgtggctgcccaaaggactaacctaatgcaactaggttccaatttttanagggggaggccgccagttaatgtgggaaataaagaaa

SEQ ID NO: 43488 - DNA, 892 bp, Homo Sapiens
  misc_feature (811)..(811): n is a, c, g, or t
  misc_feature (826)..(826): n is a, c, g, or t
  misc_feature (859)..(859): n is a, c, g, or t
gagagagagctagagggacaaagagaatgagaagacatggatgatctgggagagtctcactttggaatcagaattggaatcacattctgtttatcaagccataatgtaaggacagaataatacaatattaagtccaaatccaacctcctgtcagtggagcagttatgttttatactctacagattttacaaataatgaggctgttccttgaaaatgtgttgttgctgtgtcctggaggagacatgagttccgagatgacccaatctgcctttgaatctggaggaaataggcagaaacaaaatgactgtagaacttattctctgtaggccaaatttcatttcagccacttctgcaggatccctactgccaacctggaatggagacttttatctacttctctctctctgaagatgtcaaatcgtggtttagatcaaatatatttcaagctataaaagcaggaggttatctgtgcagggggctggcatcatgtatttaggggcaagtaataatggaatgctactaagatactccatattcttccccgaatcacacagacagtttctgacaggcgcaactcctccattttcctcccgcaggtgagaaccctgtggagatgagtcagtgccatgactgagaaggaaccgacccctagttgagagcaccttgcagttccccgagaactttctgattcacagtctcattttgacagcatgaaatgtcctcttgaagcatagctttttaaatatctttttccttctactcctccctctgactctaagaattctctcttctggaatcgcttgaccccagnaagccggaggttgcnagtaagccaaggtcatgccactgcacttctaancctggggtggacagagcgagactccatctcaaa

SEQ ID NO: 43489 - DNA, 526 bp, Homo Sapiens
aaatacatgtttttgaatagttcaatcatgaattattgactatgtcttcatcaaaagtgttaatccctctcagggtctctggtgaagaccttcaagagtttggttttttctcccaggaaattggaaggtagaattgtaaattcatagaacttcttttataatggtgtacctcagcagctgcctttcaatttatgccaagtccttacagagtttatacttgaatagtaaatatgtcttctgagttttacagtgtcttaaactcaatgcacatttttttttcttctttttccaccccttcttgtttgtagttcattatacctgtcctattacagaactgatttccttcctggctgtacatgttggggtgctggatttttttccgtgtctttagtcttccataaatccacacacacacacacacacaaaaaatatatatatatataaatatatatgtaggatacatgttctcttctttagctgtggtgaatacagtaatttgcattgaagaataaaacatctgttgcct

SEQ ID NO: 43490 - DNA, 612 bp, Homo Sapiens
atttgattgtttaacacaggatgtgttgtgtcattctgaagtttttatttggggcagaagtctttatggagatgtaaatgacagcgtttctgggttatgcataacttctcactggtcagagacaccggtgtgtcaagcatggatattgcattgcaagacttgaatctataaaaattagaatcacacagtcagtactacaagcaaaacagagaacctgaaagaaggtgcacagactgtaagaaaaaacccaagtttgtgatatttcagtgattccaaagaacattctaggttttttgtttgtttttttgttttttgggtttttttttttactgcagaaaattggtggtattttcacattcatagtgtttctatccaatttcagtacccacatttaatgaggaaaaaatgttttaccaatgaaggaggaattcttaaattagctgtaatgttaggttggagaaaatttggtatttagggtattttcaaggtaccatcaaatcagatttctgtttttttgttaaaaaaaatttttttaatcagtattgtttttacaagtaatatactttgaaactcttgaactaatagtctcaaaaaactctagaggacagtctg

SEQ ID NO: 43491 - DNA, 652 bp, Homo Sapiens
cataattcgtgttgtaaatcagactccagcaatttttgttgtatgattttgtttttttgtaaagtgtaattgtccttgtacaaaatgctcatatttaattatgaactgctttaaatcactatcaaagttacaagaaatgtttggcttattgtgtgatgcaacagatatatagccctttcaagtcatgttgtgtttggacttggggttggaacagggagagcagcagccatgtcagctacacgctcaaatgtgcagatgattatggaaaataacctcaaaatcttacaaagctgaacatccaaggagttattgaaaactatcttaaatgttcttggtaggggagttggcattgttgataaagccagtcccttcatttaactgtctttcaggatgttccttcgttgtttccatgagtattgcaggtaataatacagtgtattcataagaatctcaatcttggggctaaatgccttgtttctttgcacctcttttcaagtccttacatttaattactaattgataagcagcagcttcctacatatagtaggaaactgccacatttttgctatcatgattggctgggcctgctgctgttcctagtaagatattctgaattccattttatcaataaagcttgatttaacaaacaaaa

SEQ ID NO: 43492 - DNA, 625 bp, Homo Sapiens
ggaaggtgggggctagaaaaggctcataatttttaaactcttgggaattaaacttgggaatttctattcctacagtgttttctctgggatttttagctcactgatcgccctagaatagtgtgaactctccagataggtcctgctgtgataggccaggggagtaggctgtgcagtgacggcttagggtaataagtaatggttggaggacaccagcataggagcagagtttagaacttaagaggacaagaaagctgctcagtggctggcgtatagctgtgaaggtaaccaaacaccaaagagggagtctgtcatttttataaggctggaagcgaatgttccttttctaccttaacatacagtttagggggttgcaccaagacaaagtttccaggctggagggtaatacatatccagcgcgagtgaagtccccactccaacatataccctttttgggtgggtaaacacctctttgcatgtggacagaaaatgtttatacttaaacagacatattttgcatatttttatctggagacttcttctagttttatactcttcccacatctatgccaatgccaccattctaaaacttacactccttttctacccctggtcttttccttgtcct

SEQ ID NO: 43493 - DNA, 671 bp, Homo Sapiens
cgcgtccgtaaattcttctcttacaccccacccgaaagtattcagctggcatttagagagctacagtcttcattttagtgctttacacattcgggcctgaaaacaaatatgaccttttttacttgaagccaatgaattttaatctatagattctttaatattagcacagaataatatctttgggtcttactatttttacccataaaagtgaccaggtagaccctttttaattacattcactacttctaccacttgtgtatctctagccaatgtgcttgcaagtgtacagatctgtgtagaggaatgtgtgtatatttacctcttcgtttgctcaaacatgagtgggtatttttttgtttgttttttttgttgttgttgtttttgaggcgcgtctcaccctgttgcccaggctggagtgcaatggcgcgttctctgctcactacagcacccgcttcccaggttgaagtgattctcttgcctcagcctcccgagtagctgggattacaggtgcccaccaccgcgcccagctaattttttaatttttagtagagacagggttttaccatgttggccaggctggtcttgaactcctgaccctcaagtgatctgcccaccttggcctccctaagtgctggggattataggcgtgagccaccatgctcagccattaa

SEQ ID NO: 43494 - DNA, 494 bp, Homo Sapiens
aggctggcacctccggaaaaactgcctttcagccttggtgttccgtgcaaggtgaaaagaaataggtcctcccagtttacagcttgaaatcaggctagtgagtggccctggagaccacgaggggagaatttaaaggccccggctggcagggtctaggtggctggcagaggcacatgcagaccctgcctggagcctgccctaggacgctgggcgggtcagtctccgtgcaggatgtgagcagcgtccctgggctctatccgcgaggtgccagtagcgtgtgcaggtacatacacgtgcgtgcacactgtgatgacacccggaaatgtctcaggatgttgaaatgtgtccttgggggcagaagtgtccccagttgagaatctgccccagaggaacacacccacaccaggcctcaggattttgtgttgatcaagttccaaggaaaaggaacatctcagccgggcgtggtggttcacgcctggaatcccagcacttga

SEQ ID NO: 43495 - DNA, 464 bp, Homo Sapiens
cggcacgaggcttgagccaagaaggagcacaagattccttccctcttcagcagaagatcttggtttgctctttgatgctcttgatcaggcagttgaaaatcaaagaggtcactctggggaagttatatgaagcctacagtaaagtctgtcgcaaacagcaggtggcggctgtggaccagtcagagtgtttgtcactttcagggctcttggaagccaggggcattttaggattaaagagaaacaaggaaacccgtttgacaaaggtgtttttcaagattgaagagaaagaaatagaacatgctctgaaagataaagctttaattggaaatatcttagctactggattgccttaaattcttctcttacaccccacccgaaagtattcagctggcatttagagagctacagtcttcattttagtgctttacacattcgggcctgaaaacaaatatgaccttttttac

SEQ ID NO: 43496 - DNA, 718 bp, Homo Sapiens
  misc_feature (684)..(684): n is a, c, g, or t
  misc_feature (706)..(706): n is a, c, g, or t
ttgacaatcagctcactcaccctcccttagtgcctccagtgcctactcctgtcactccaatgtcaacccattgggagttgaggcctgtcactccaatgtcaacccgtgggctgttactttgcgtcatatgatgctgtgagaggccttgctggaatgtcctaggaatccctagtagcagtggctattagtcttctagaaaagaactattgctgctgccttgtgcacatgccccaccttctgggcaagtggcagcattgcgctcatgaggggctttgcattcttagccaagggcaataaactgggtgggtgatctggcccaaacttgcccctaggctctgctagccctgaatcagcaggcttcagagacgagggtgggtgttataaaagccagtctgtaaagggtaaattccaaatcttgtgccttgttataccaatccttcctgattcccgtttaaaccaactactctatttctgtgctgcctacattttcaatcctcccacgcattagcaaattcctgaaatttcctcatttggtaggccttccataggagtcagctatggacttccataggagttggcagctaaaaccagactgtgagcttctgtctccgttctgatttttgctgcacctcccaggggacagtccccacatgattacaaaagccaggtgccctcatcacccgntacccctgacctgtccacttgntttgaataaacc

SEQ ID NO: 43497 - DNA, 582 bp, Homo Sapiens
  misc_feature (539)..(540): n is a, c, g, or t
  misc_feature (559)..(559): n is a, c, g, or t
  misc_feature (563)..(569): n is a, c, g, or t
  misc_feature (572)..(573): n is a, c, g, or t
  misc_feature (578)..(581): n is a, c, g, or t
ataatttgttacacatggacatttgttccaaactgactaaaaatcaatatagatattttatatacatatatatatatataaatacaaaattcagtgtactttaccatattaatactgaggaaaaatctgttggagacataggtctaggatgtgtgaagtttggaaaaatatgctatttaattataatgttccctagactgctgtaaacagaagtgaatcagacttttctccagctacctttcaaaataataaattatttgtctcaaatataccttgatggaggacttttttattcttatggaaatagtgaattccaacaactatgatgaactatgttctttgctatttcttcactatattttttaaggttttattaaaaagccttagaaagttacatattggtttagaggctaaaattgtgttgatgctgtttactcacctaattacatagttttaatcatttgtacataattttaaaaacttactttgtattgattttgaatacagtgaaaatcttattgcaataaactattttagtnnaaaaaaaaaaaaaaaaaanaaannnnnnnaannaaaannnna

SEQ ID NO: 43498 - DNA, 625 bp, Homo Sapiens
tttttttttttttgattgaattttattttttcgctttgtatctacaacagaaattgatttgttcatttttatttcaaatctcttcatggcaagttgggctaatggactttgcactcaagaaaggtttgtttaccagttttgtagccatgtttggcaaatcttagcaactagaaaccccgtcctttcttttccttctttatatgttcttgcagttactcttgtattgcaagattttctgactttaagctttgagactactgcatcttaaaagaagaactaggctgactggcaaaaagtcttgccagtggccctgtcactcccatgatgctttggttttgagagttgggaaaactctgagaacttaagggaaccaaactcaggaatcccaaaattggtggcattgtgccattcgtttaggggctgaacataggacctgtctgaaactgagtgagctagatgcatttgggtttgaatttttgtcacatactgaaatgtaagtcagccctaaataatcaaaacactttattttatttttctttttttaaataggaactttctgaagaaaaagtggtgtgtaaaacatttgatatttaagacaataaagtttttatcataacctcgtgcc

SEQ ID NO: 43499 - DNA, 733 bp, Homo Sapiens
tttttaacagatagtaagtaaatttggtggttttttcccctgggtcagtgatggaaaggggttaacttcagccaggattgatggcagctgagggaaattcttgcccaatctaaacccagaactcaaacttaacattagaaaataaggtccagggccggacacagtggcccatgcctgtaatcccagcactttggggggccaaggcaggctggatcacctgaggacaggagttcgagaccagtctggccaacatggggaaaccccgtctctactaaaaatacaaaaattagccgggcatggtggtgggcgcctgtaatcccagctactcagaaggctgaggcaggagaatcacttgaacctaggaggcggaggttgcagtgagccaagatggcgccattgcactccagcctgggtgacaagagtgaaactccatctcaaaaaaaaagaaaagaaggtccagcttttggattcaatgagtgggaaatacattgtgcctttctctagatgtgatacgttataccaaaatctttgtagtgtgcagagcggtggtttgagactaaatacaggcttagaacttgcagagtgtgtattcttggatggctgatgcatcgacttgcattccccacttaacactttgattagcatgaacttgccaatcaaaaaatgacaatcaatttgagaaaatagaaatagatattttaaataaaaccattcacagtcaaaaaaacaaaaa

SEQ ID NO: 43500 - DNA, 573 bp, Homo Sapiens
  misc_feature (545)..(545): n is a, c, g, or t
ggacatgtatttttataaaccaggtaatttactattatcctggaatttagactaggtttgtttcatttgttgacttagtttccagccaagaaggaaacgactgtctcccccatgtccaggtctcagtttcaagggcagagtccagagagcagacagagttctgtgagagcaggagagcagtctggaaaccctggctgtgcataccgtgtcagccgtgggcctggagatgggagcaggtgagacgcagagccccagtactgagaggaggaagccctcttacagggccccttgcccaccccaagtccgtgtctgaaacacggagcgggtgctgcttcaacccgcatttaatgctgtgtaagtagcgataaccacgtacgagtctgtctggttgatttctaatgtgactcctctggtatttcctcctggtaataaatacaagtgtgacctttcagattgcatatctcacaagtaacattgctaatgttttataataaaatatattatgtgtgttttggttggtgaaaataatacagactacattttanacagataaaaaaaaaaaaaaaaacgcgg

SEQ ID NO: 43501 - DNA, 793 bp, Homo Sapiens
  misc_feature (561)..(561): n is a, c, g, or t
  misc_feature (776)..(776): n is a, c, g, or t
  misc_feature (785)..(785): n is a, c, g, or t
ggggacttggagcaaaaactaaaagaaatcagaaatctcgttgagcagcataagtcttcttcttggattaataaagatggatccaaacctttattatgccattatatgatgccagatgaagaaactccattagcagtgcaggcctgtggactttctcctcgagacattaccactattaaacttctcaatgaaactagagacatgttggaaagcccagattttagtacagttttgaatacctgtttaaaccgaggttttagtagacttctagacaatatggctgagttctttcgacctactgaacaggacctgcaacatggtaactctatgaatagtctttccagtgtcagcctgcctttagctaagataattccaatagtaaacggacagatccattcagtttgcagtgaaacacctagtcattttgttcaggatctgttgacaatggagcaagtgaaagactttgctgctaatgtgtatgaagcttttagtacccctcagcaactggagaaatgatttttccttcaagaaaaactacagtgggattcatttactttttanaatacactgggtaaatcacctatacttagagtaacagtttgttatcaaaatgcctggataaatatattcttaaataaagtcttcatttcataatgaaatcaatttatttggcatcttaatataattttttagatttcatcacagaccagtttttggtgggcatatatatatacacgtgcaaatatcagaattggtaaatatttgttacacatggnacattttgntccaaaaa

SEQ ID NO: 43502 - DNA, 470 bp, Homo Sapiens
atatggagtgcaatgaactgagtcaatatggcaaggtgtatgtgatctgtgggagttatgccatttaacataggaagtgcatgggactttccctctctgcactccagctcttactgtaccattagaagatgcagaattctgttggtgtgcaaaaagtatagccttacattcaagcagaatggatctgaagaaagcagcaatatctgttactagagaacattcccatgtgtttaaactcttcacttcttagatgcatttaaattcttaatgcaaatgacgtagcaatttgaaaacttctccgtattacttgtgtttaaaatgtcttgctttaaatacaaaacaaatggtaaaggggattatcttttgtttagatggttaaatattatttttgccttagatagctttgtaataatttttctccagacagttcaacacttttgaaaaatgacatgaattttcattaaaaaccc

SEQ ID NO: 43503 - DNA, 833 bp, Homo Sapiens
gaggacttccggaataaagtggatgactacatcaaacgttatgccagatgataaaaggggacgattgcaggcccatggactgtgttacagtttgtctctaacatgaaacagcaagaggtagccccctctcccgtcctcatgctccctctcagtcccctggattgccccagtcctgtgaccatgttgccctgaagaagaccatcttcatgactgctcattgtagatggagaattcaacataaatacagcaagaaaatgtgtttgggcttctgaagagttgtctgcttaccttaacatgtttacttttttgaacttgtactgtataggctgttggtgaaattcttaagaagttgtaatgaactcaaaattgaggccagagcttgctttcccttttcccaaacaaaattggttttctgcacaagcgatgctaatgatgtgttcagtgtaactcgcagattggcaataagatacccgctacaaactgtgattggatgcaaaatctcttagcttctttcacgaatgttggccctgcctagatgttgtgaagcctcccagaatgcatagagtcattcactgtagatctcttattgaaatgcgtattttatttaatgtaagtatattttggaacagatttgtaatttgtacaattcaatgctttaattattttttctattctcatttagtttgtattttcattgtatagagcagacagaaagatgttgggtcaagcaactattgaagagaaatacaaagaaaatatgaaaggcacatttattcattttgtccaaatggcaattgagaatctcactccttaaaaaatcaggctcttggctt

SEQ ID NO: 43504 - DNA, 672 bp, Homo Sapiens
aactacggctaggtcgaggcccgtgtgaatcggccgaggcatatctagtctttgtcaaattctagtagaagatttccacagtgaaatcagtgagccagaccaactctacatctcctgcctaacctactgcctaagtcattagggctgagggctcggctgtaggggcttccttaggctgagagtgcccccaggctgacatctgtgttggcttttgttcagaaccattactctggcacatgctcaatggtatattgcagggaggagaggagtagatttagatttgagtaaatgccaatcactttacacatgaaggtgggtgggactttccttccattcatcccttgctctcttggatctgaactcttctggagcctcagctcaggatagctgctggccactcctgtcctgtggattgtgcaggtggcctttcctcccaaaagaaaaggcatcaggctccccaagccccacagctctcctttccaccaaagccaggtttcctggtaaggtcactcgaagataagggatggggatgggggctgactgacaaaaaattttagccccaggtctcagtacctggctggggagggggatatttttccttccttaagtagttttacattgccacagtgtgtatgtgttcactatgataaatgtttcctctgctctttgaaa

SEQ ID NO: 43505 - DNA, 706 bp, Homo Sapiens
gggtgaagctgggggcatcctgttcaaagggaaggtgcctatggtggtcttgcaggacatcttggctgtgagaccaccgcaaatcaagtcccttccagccacaccccaaggcaagaacatgacccctgagagtgaggtgctggaatctttccccgaagaagactctgtactcagccattcgtccctgagctctccctcttccaccagctcgcccgaggggccgcctgctcccccaaagcagcacagcagtaccagtcccttccccacctccacgcccctccgcagaataactaagaaattcgtcaaaggctctacagagaagaacaagctcagactgcaaagagatcaggagcgtctgggcaagcagctcaagttacgtgcagaaagggaagaaaaggagaagctgaaagaggaggccaagcgggccaaggaggaggccaagaagaagaaggaggaagagaaggagcttaaggaaaaggagaggcgggagaagcgggagaaggatgagaaggagaaggcggagaagcagcggctcaaggaggagcggcgcaaggagagacaggaagccctggaggctaaacttgaggaaaaaaggaaaaaggaagaagagaaacggttaagagaagaagagaagcgcattaaagcagagaaggccgaaatcacgaggttcttccagaaaccaaagactccacaggcccccaagacc

SEQ ID NO: 43506 - DNA, 605 bp, Homo Sapiens
gaataacacagtctgtgctttccaaaaatgcttgaacttttatgttgttaagaaatatataatgatatcttacattaagcatgagtctaatttgtattaattgggatggactaaattttcatttgattatcaggaaaattaaggagttatatatttaaaagcaattttctgtgttttcttctttgtaagttgactcatttgtgaagcaattaggcaaattttgagaagatcattgttattgtggtttgcagtatatatttcttagtaaatatcacttaagattaaatttttcagaaagaaaattatagcttttttcccaaaatatttttaagatttaatctttttgtagtatgctacagatttaattatattaactcttttttaagacattgaccatgacttaacattttgccttctaacaccttttaaatctatgtactttaatagttaagagaaaataagtttgcagatttttaataatctgtttgtaaaaggctatctctaagcctagtatgtgggtaattttacaggtgtgttttttgataactttaatataaaataaactcattttatttgtggaaaaaaaaaaaaaaaaaaaaaaaaaa

SEQ ID NO: 43507 - DNA, 617 bp, Homo Sapiens
gcacggcaatgtgaacgggagcaaggtcatcatccgggagttccaggagcactgccgccggggactgctcagcaaccacaccggcagcccgcggagcccctccaccacctacctgcacacccccacccccagcgaggatgccgccacacccctctaagtcccggctcaagcggctcatttccgagaactcagtgtatgagaagcggcctgacttcaggatgtgctggtacgtgcacccgcaggtgctacagagcttccagcaggagcacctgcccgtgccgtgccagtggagctatgtgacatcggtgccctcggcccccaaagaggacagtggcagcgtcccctccacggggcccagccagggcactcccatctcgctgaagaggaagtcagcgggcagcatgtgcatcacccaattcatgaagaagcgcaggcacgacggccagattggtgctgaagacatggacggcttccaggcagacacggaggaggaggaagaggaggagggcgactgtatgatcgtggatgtcccggatgctgtggaggtccaagccccgtgtggagccgcttccggagctgggggtggtgtgggggtggacaccggcaaggccaccctg

SEQ ID NO: 43508 - DNA, 790 bp, Homo Sapiens
gggcaatatattaaactctagtctgttttcttgcctgtgaagtgaggctgcacttgattatatttgattctttgttcgtaatacatgggaacgacagctaagtgtggtgaaaaacgcggggatccaaagagctggatttttatctcagatctgccgctaacttttgtatcctataggctacttttatttctatggtctcaatctataacatgaatgggttgggttaaatgactgaagttccttcaagtgctaaaattctttttctacagtcttcattggatttatgtatttcttattcctaatatgtttaactgggatgtctgtcactctagggcggcaagacagacatttaaaagtaacagtcacactgctgaactggcatttctgttaacacaaaagtttagaaaactcacggtaactgttacttgatttaagtgtatataaaattttcagtaaggctgcttttaaaaggaaccactgtccatttaaaggtttcatagttatcttcaatgggttagtattgtttggggcaggacattaaactagaagggattctataggatgaggtgatacctagaaggtaatatattgtaaggcaaaagagattagaagaaatggggaaaggatagtaaaaaggcaagtcagattaaaggttgaaacatgaagatatcctcaatgtatttctgcctatgttgcttttttggtcagcatctgttggaagagacaaaatgtgacttggttcataataaagcaagaattatttactcttcgaaaaaaaaaaaaaaaaaaa

SEQ ID NO: 43509 - DNA, 666 bp, Homo Sapiens
ctcaaacgtggcttttagacagatttgttcatagaccctctcaagtgccctctccgagctggtaggcattccagctcctccgtgcttcctcagttacacaaaggacctcagctgcttctcccacttggccaagcagggaggaagaagcttaggcagggctctctttccttcttgccttcagatgttctctcccaggggctggcttcaggagggagcatagaaggcaggtgagcaaccagttggctaggggagcagggggcccaccagagctgtggagaggggaccctaagactcctcggcctggctcctacccaccgcccttgccgaaccaggagctgctcactacctcctcagggatggccgttggccacgtcttccttctgcctgagcttccccaccacacacaggccctttcctcaggcaaggtctggcctcaggtgggccgcaggcgggaaaagcagcccttggccagaagtcaagcccagacacgtggagcctagagtgagggcctgaggtctggctagcttgcccccatgctggcgccaacaacttcatccatcctttctgcctctcaagatcacttgaatcctagggcctggagtagtcatgtaatatgaaacagaaccataaagcatatgtgtgggcttgtcgtacaaaaaaactcaa

SEQ ID NO: 43510 - DNA, 1082 bp, Homo Sapiens
  misc_feature (13)..(13): n is a, c, g, or t
ggctggtaccggnccggaattcccgggatccgcccggaccgggcatggtgttgggcgccgggcccgcctcgcctgtctcggggagcccagggtaaaggcagcagtaatgctaacgctagcaagtaaactgaagcgtgacgatggtctcaaagggtcccggacggcagccacagcgtccgactcgactcggagggtttctgtgagagacaaattgcttgttaaagaggttgcagaacttgaagctaatttaccttgtacatgtaaagtgcattttcctgatccaaacaagcttcattgttttcagctaacagtaaccccagatgagggttactaccagggtggaaaatttcagtttgaaactgaagttcccgatgcgtacaacatggtgcctcccaaagtgaaatgcctgaccaagatctggcaccccaacatcacagagacaggggaaatatgtctgagtttattgagagaacattcaattgatggcactggctgggctcccacaagaacattaaaggatgtcgtttggggattaaactctttgtttactgatcttttgaattttgatgatccactgaatattgaagctgcagaacatcatttgcgggacaaggaggacttccggaataaagtggatgactacatcaaacgttatgccagatgataaaaggggacgattgcaggcccatggactgtgttacagtttgtctctaacatgaaacagcaagaggtagccccctctcccgtcctcatgctccctctcagtcccctggattgccccagtcctgtkaccatgttgccctkaakaagaccatcttcatkactgytcattgtagatggagaattcaacataaatacagcaagaaaatgtgtttgggkcttctgaagagttgtctgcttaccttaacatgtttacttttttgaacttgtactgtataggytgttggtgaaattcttaagaagttgtaatgtactcaaaattkwgktcakagcttgygttcccttttcccaaacaaaattggttttctgtacagtgtdgttaatgwtgtgttcagtgtamtcgtmgatggkcaaaagwaacc

SEQ ID NO: 43511 - DNA, 957 bp, Homo Sapiens
  misc_feature (597)..(597): n is a, c, g, or t
tcggggcctgactccactggcatatgctcgccgggccggcagccaggagtgtgcagacatcttgatccagcatggctgccctggggagggctgtggcttagcgcctacccccaacagagagcctgccaatggcaccaacccctctgctgagctgcaccgtagtcctagcctcctataaggcccaggaagagggcagaggggccagaaggactccatggcccaaagaccctcctccctgcaggcactgtgggaacagacacagagatggagaagcagggacatgctgagaggacgaagccaaggaaattagggaggagagtcaaagggatcaaggagagttggggatttgagctgcagcagagagggatgagggatttagccctctgccctaaggtgccattgaaaagggacaggacccttcggaggtgcctgtgaggagaggggagcaggacctctccctcctccagatccctgcctcctagtgccagcccctcacacgccttcatcctgaaacaggaagaggacggcaccaagttgggggtgctggatgaaagagacgaggggtgatctgtgagtcccatgtaaactttgtacatnggaatatttatgtttgtgtacatattgatgtgtgtgtgtatgatgagccaataaacagactgtgtgcgtggcaaaaacaaaaaaaaaacaaaagggggggggaaaaaaaattcccgaggggccaagttagggtaaccagattctggcacgagggggccccaaaaggaggacgcgaaaaagaccaaggcacggggccgcgcgataaccacgcggaccgggaaaaccggacagcgcggacacggggagagaacccatacccgggggggaccagtggcccacaccagcgagaataagggcagggcacataccgtcacgcaatcagggaacagcgcactcaccagaagtgcccgcagcaggatc

SEQ ID NO: 43512 - DNA, 671 bp, Homo Sapiens
  misc_feature (659)..(660): n is a, c, g, or t
tgccctgacagaggaagtggagagcgagctctatcgcatcggccagcagctggggatgacgttcatcagtgtgggacatcggcagagccttgagaagtttcattccttggttctgaaactctgtggaggaggaagatgggagctgatgagaatcaaagtggaatgaagctctggcttttggaaggagagccacactgtggcgggtcggcggccctcaggagagaccaggaggactgacagcgaagatcgagctcaggttcgccacatagatcccgtgcaggagccacatgggtcctgtgcaggacccctagcagtggtgggctgagcccaggtctaggtttctgtgggggacactgaatctcccagtgttcagtctcccaggactctgctgcctcagccagagcctccatatgcttgaagtgctgattacctacaaatgatttcagatcatgtttgctaaagagaaatctggaagtgtgagatctgtaagaaatgaaagaaatgactcttggagtcaagagatctggaaatcttttaatcagttaaattgtgcagcaatagatttttaactttaactgaccatttaagttttttaataagttttttacaaagaaaagttaaacattaaaaagaattacagctttctgtcttctctatcnnaaaaaaaaaaa

SEQ ID NO: 43513 - DNA, 703 bp, Homo Sapiens
gggagaatctactcttaaaaatcagctcttgctttcgggtccggatgtggtgagcacattttggagccctttgaagctagatttggatgatcaaaacaaaaaggcagggagcccattctaacatgctgcccagaggaaactggctggagcctggaccagctggggctgatgcttttgcagtggtcatgtgattgtgacctggtagctacttatcagagagccagaccctgctgtcctgggagacaggagcgatgcctcaggaatcagcccaatgtctgatgtcactgagactgtacctgtggccttcttctgagtttgctatggctccaggccctgccggtggggtgagcctcctaggccttggaggaccaggagtcaacagtggcatatgccatcctcggccaggttaatatactgcagaggaaaagccctgaagagaggcaagtggatttactccagcatgtagacatttgaaccagtgaaatcaaacacaaaataaatgtctgtctagtttcatttgctgcctgcctaacactctcaaacttaactgccagcttccttagacctctggattcccccatctgccatctactgggtttagtttgtttttcttaatttatagaatctctgattgtgagatcagtctgtcacggagacccagcaggtgaggaatgtaggccttgcttcctctttgcacccatta

SEQ ID NO: 43514 - DNA, 606 bp, Homo Sapiens
  misc_feature (9)..(11): n is a, c, g, or t
  misc_feature (28)..(28): n is a, c, g, or t
  misc_feature (157)..(157): n is a, c, g, or t
  misc_feature (264)..(264): n is a, c, g, or t
  misc_feature (386)..(386): n is a, c, g, or t
  misc_feature (417)..(418): n is a, c, g, or t
  misc_feature (437)..(437): n is a, c, g, or t
  misc_feature (460)..(460): n is a, c, g, or t
  misc_feature (473)..(473): n is a, c, g, or t
  misc_feature (487)..(487): n is a, c, g, or t
  misc_feature (489)..(489): n is a, c, g, or t
  misc_feature (507)..(507): n is a, c, g, or t
  misc_feature (510)..(510): n is a, c, g, or t
  misc_feature (518)..(518): n is a, c, g, or t
  misc_feature (560)..(560): n is a, c, g, or t
  misc_feature (562)..(562): n is a, c, g, or t
  misc_feature (575)..(575): n is a, c, g, or t
  misc_feature (577)..(577): n is a, c, g, or t
  misc_feature (582)..(582): n is a, c, g, or t
  misc_feature (585)..(585): n is a, c, g, or t
  misc_feature (590)..(590): n is a, c, g, or t
  misc_feature (596)..(596): n is a, c, g, or t
gatcttcannngttaagcacttgctctnaagattaaaattccttttctttttaaggttaagggtgtgtacgtatggcagtgatgtctatgttgagattaacttatgtattgaggaaaatttgaagtttattttttcgatgaataaggctgtcaaatnatttagtatagattaatgacatcttttttagaaatattaaagtgagtattcctcattatgtcatcatttctgataattagagtgctaatttgaatgttagataatgnttccacatctatacctatttctttctagggcacttctgaccctggggcttggggatggcctttaggcacaagtagtgtctgtgttaagttcactaaatgtgtatttaatgagaaacattccnatgtaaaaatgtgtgtatgtgaacgtatgcnnacattgttattgtgcaccngtacattgtgaagaagtagtttngaaattttgtaangcacaacccttaangnggtgtggagttattaaantgntgtaggcncaaatgtaatgtttagcctataaaaggccctcctattgtccntnggcaaggctttgncncttgnaantaaancccgtntttgtttaaa

SEQ ID NO: 43515 - DNA, 572 bp, Homo Sapiens
  misc_feature (529)..(529): n is a, c, g, or t
tagattaggtttcaaacagaaagttcaagtgtaacaacaacaataaaaatagattatgaaacaggctataattggctcttttggatttgataggggcaagatgaaaggcaactttcttgcttttgaaatcatgttgggtaagaggtaaggaatccagctacaattttattagtgcttgaaacgggcttccttgaattctccaggccctatcattttttttttcttactaatcagaagagagctggggtagaagccccatgtttgtattccatgaaacacgtcgggttggagtaaaggcaaaaacagctagacacaccaggtgtgtctgtttgacatttataagctggcactcatcaacactcctgtttctcctttctctgggacgtgtggattaaggggtgtgagttgtgggaagaattgccctcgtacctcctggatttattatttttctcaaataccaaccagtaagatcccaaataacttgagaaaaattgtttcctgatctgtccacttctggtgtcaaagattntactcatcttcttagtacattctatgtattttatatgtataat

SEQ ID NO: 43516 - DNA, 748 bp, Homo Sapiens
  misc_feature (445)..(475): n is a, c, g, or t
gggtggcctcttgagcagtggctggtccagggctagtgacttgtgtcccatgatccctgtgttgtctctagagcagggattaacctctgcactactgacatgtggggccaggtcaccctttgctgtgaggctgtcctgtacattgtgggatgttcagcactgtcccttgcctcaatgccagtaacgcgtcttcctgagtggtgccaaacaaaaaggttctcaggtgttgccaaatatgtcctggggtataaaactttcctcgcctgacaaccactggtctgtagggatttttggctacacacaaaccagtatcgctcatagatcagcaaaccggggcctactagagtctgaacagctgtaatctatgaattctaagtgaaattttaaaaattgttaaatttttcctatattgcattaattttaaaaaaataaatcctgaggcttnnnnnnnnnnnnnnnnnnnnnnnnnnnnnnncccttggccggcccgcctcgggcccttcgaaaaaccttttttaaaaccttttcctttggggccgccggggccccccaaagggtaaaaggggaaccagggggccaataagctgggtttccccaaagggaaaaacccccgggggccatgggaaaaaaaggggcgttggggagttttcccccccccccaaaaaaaaaaaaacccccccccgggggggggaaaaaccccaggagggtggttttttgaaaaacaaaaaatcccccccgaagggggggg

SEQ ID NO: 43517 - DNA, 706 bp, Homo Sapiens
acgagggctgggcggtggggtgcgggtgcccgggtgaggggcggagctgggggcatggcgtccggagcggctcgctggctagtattggcacccgtcaggtccggggctctccggagcgggcctagcttgaggaaagatggcgatgtctccgccgcatggagcggctcaggccggagcctggtaccgtcgaggtcagtcatcgttacccgcagcggcgccattttgcccaaaccggtgaaaatgtccttcggccttctccgtgtgttctccattgtgatcccctttctctatgtcgggacactcattagcaagaactttgctgctctacttgaggaacatgacatttttgttccagaggatgatgatgatgatgactaacaggaattacagaaaggagaaagcactaactgaagaaatggtgatgctctcagtttctctgccttccctatcagcagaaaggctcggggaaggccctcagcctcccagtctggtgaagcttcctgtatggtccatgaccgtattccaccccaggctctgggaggctccctgagatgtgctgtccactaagcactgcacaaacaagcaatcaaattatgaataaacataataaatatcagccgtgcgtgactgagtgatggctgcagtttctcagtatccctaggttctagttggtgcagttgtctctgctgtcctttatttatgggag

SEQ ID NO: 43518 - DNA, 581 bp, Homo Sapiens
aacatgatacgaaactgtgattagaaaattctggtctggatgtgattagtaaggatacaagataatgttctaagactgcctaatgctttttgtttgattttcatctgccaggcgttgttatgtgctatgagggtagcaagtacgtctttgtcttaatgatctaaggctggtgtagaaacaaagggcctaatgagaaccaatcatcatggaagtcagttgcgggggcagcccataaggaaagggaaagtgagtggggttgggcataggctgagtgaggtggcctgaatgacacctcttagaggactgtgaagtacaggcacagcccgactgcagggagggatgcacccatcatttacccatgggagcatctgtaggaccatctctctcccacttcttctcccctcccccaccgcatctggccagatggactgtcctacagcaatcgtttccatctgtcaccctcttccctctcctttcataccagtcactatcttgggtaacaaatttatacaggacagtggtacagaaatacatctttgctctgagaatacagcaaatattaacttaaattattataactg

SEQ ID NO: 43519 - DNA, 888 bp, Homo Sapiens
tttacttttttgatataaaatcaagatatttcttgctgaagtatttaaatcttatcctgtatctttttatacatatttgaaaataagcttatatgtatttgaacttttttgaaatcctattcaagtatatttatcatgctatgtgatattttagcacttggtagcttttacactgaatttctaagaaaattgtaaaatagtcttcttttatactgtaaaaaaagatataccaaaaagtcttataataggaatttaactttaaaaacccacttattgataccttaccatctaaaatgtgtgatttttatagtctcgttttaggaatttcacagatctaaattatgtaactgaaataaggtgcttactcaaagagtgtccactattgattgtattatgctgctcactgatccttctgcatatttaaaataaaatgtcctaaagggttagtagacaaaatgttagtcttttgtatattaggccaagtgcaattgacttcccttttttaatgtttcatgaccacccattgattgtattataaccacttacagttgcttatatctttgttttaactttgttttttaacatttagaatattacattttgtattatacagtacctttctcagacatttgtagaacttcatttcgggcagctcactagattttcgctgaaccattaaaagtgtgataagcgatataagtgccaatcaaaatggcaccacaaggtggtcttattaacacagaaaaacacgttttattccacctattttaatattaacggcgttctaattaggtccataaaatatatttgggcaaaatccggaagctgaatccccataaattggtgggtctcatagacctgggcacactttgctggaagcgaatccca

SEQ ID NO: 43520 - DNA, 856 bp, Homo Sapiens
ttcattggtggaattcctctttaacaagggctgcaatgccctcatacccatgcacagtacaataatgtactcacatataacatgcaaacaggttgttttctactttgcccctttcagtatgtccccataagacaaacactgccatattgtgtaatttaagtgacacagacattttgtgtgagacttaaaacatggtgcctatatctgagagacctgtgtgaactattgagaagatcggaacagctccttactctgaggaagttgattcttatttgatggtggtattgtgaccactgaattcactccagtcaacagattcagaatgagaatggacgtttggtttttttttgtttttgtttttgttttttcctttataaggttgtctgtttttttttttttaaataattgcatcagttcattgacctcatcattaataagtgaagaatacatcagaaaataaaatattcactctccattagaaaattttgtaaaacaatgccatgaacaaattctttagtactcaatgtttctggacattctctttgataacaaaaaataaattttaaaaaggaattttgtaaagtttctagaattttatatcattggatgatatgttgatcagccttatgtggaagaactgtgataaaaagaggagctttttagtttttcagcttatttactttgttttttttcctgtttctgatatagtaactaattcttaactcagagacattggtccattttaatactgaaaaccaattttcattggtacacattacaaaattgctaagaacactgttttgggaagctttcatttctcatatttttgggaaattgttttttaatttgagttgaa

SEQ ID NO: 43521 - DNA, 626 bp, Homo Sapiens
ccggttctaaaatccttcattatgagggattcaaagtatttataaaaacactgccctctaaaaatttcctcagatctgaagtatggtcttggtcctgaatatacagtgttatcctatgtttaaaagggtgatccagacatgagacgcaactagttggtgcataagaaggccccacttggctatttcatatctacctacaattgaccaaaaaaaattttttaggccagcaattattatttagcttcgctctttctagtgcaagaaactgcaggctggatcagtagttcaacagctaaacagtcataaaatagtcattgtgcatgttaaatttctttcaatgctttcaaagataaattccaatttctatttacttattcattgtgacagtattactaaacaggtaaggatgggaatattttgttatactgtgtatagtgaatgtattgtactgtgtctgtgaaaactgtgctttaaattatattttcatatgttttgttggggacagagcacattaagtctgaaagcaacagaggtttgttttagaactgaaggcaatttaatcaaaattcctgtcaagaaaagctgcttataaatgtaaatgaaatcacatttaaaataaactgcct

SEQ ID NO: 43522 - DNA, 721 bp, Homo Sapiens
gtttcacacaaacaaggcctgtcagctaaagaagtttgaacatttgggttactatttcttgtggttataacttaatgaaaacaatgcagtacaggacatatattttttaaaataagtctgatttaattgggcactatttatttacaaatgttttgctcaatagattgctcaaatcaggttttcttttaagaatcaatcatgtcagtctgcttagaaataacagaagaaaatagaattgacattgaaatctaggaaaattattctataatttccatttacttaagacttaatgagactttaaaagcattttttaacctcctaagtatcaagtatagaaaatcttcatggaattcacaaagtaatttggaaattaggttgaaacatatctcttatcttacgaaaaaatggtagcattttaaacaaaatagaaagttgcaaggcaaatgtttatttaaaagagcaggccaggcgcggtggctcacgcctgtaatcccagcactttgggaggctgaggcgggtggatcacgaggtcaggagatcgagaccatcctggctaacacggtgaaacccgtctctactaaaaatgcaaaaaaaattagccgggcgtggtggcaggcacctgtagtcccagctactccggaggctgaggcaggagactggcgtgaacccaggaggcggaccttgtagtgagccgagatcgcgccactgtgctccagcctgg

SEQ ID NO: 43523 - DNA, 763 bp, Homo Sapiens
ctgccttgttgatgggaaaagccaataacaatgtgggtactggaacctgtgacaaagtcaataacatccacccagctgttcatacaaagactgataactctgttgcctcttcaccatcttcagccatttcaacagcaacaccttctccaaaatccactgagcagacaaccacaaacagtgttaccagccttaacagccctcacagtgggctacacacaattaatggagaagggatggaagaatctcagagccccatgaaaacagatctgcttctggttaaccacaaacctagtccacagatcataccatcaatgtctgtgtccatataccccagctcagcagaagttctgaaggcatgcaggaatctaggtaaaaatggcttatctaacagtagcattttgttggataaatgtccacctccaagaccaccatcttcaccataccctcccttgccaaaggacaagttgaatccacctacacctagtatttacttggaaaataaacgtgatgctttctttcctccattacatcaattttgtacaaatccgaacaaccctgttacagtaatacgtggccttgctggagctcttaagttagacctgggacttttctctactaaaactttggtggaagctaacaatgaacatatggtagaagtgaggacacagttgttgcagccagcagatgaaaactgggatcccactgggaacaaagaaaatctgggcattgtgaaagtaatagatctcatactacaattgctaaa

SEQ ID NO: 43524 - DNA, 759 bp, Homo Sapiens
caccagaacaaccaaaagcacatgtccttttttcctgtcatgtgtagctcattgggggaaaagaaggccaacttaaaacagtcccaggggaggactgcttgagcccaggagtctgaggttgcagtgagctatgattgtgccactgcgctccagcctgtctccaaaacaaaacaaaacaaaacaaaagccgtcccagaggaagtcctgctgcagaaaagatgatagaatggtcacccaatcaatagctgtgaagacttccttattcctgctgaacttccttccttggatatcttcatggataagcctgtgtctgtggacagagtggggcccaagtgctgaggctcgaaagacaggttttacaatcagccaattaaacatcttaccagtgctgtaccccttgccaaggggatgagctgaggagcttcttttctttaggtccaacatcaaaatgagtccatctaagctagggcttttgcaaaggtgattaaaaatcaaggctggagttccagccaaatagggaggagaggtaccacaagttcatcttaaacttgcttccgggctgggtagttaaaacaggaagatcccaaggggatcttacgaggcaaatatcagcaggtaactgtggaagaaaggaatctcaggactaatgagttcgttgtaaaatattccgcgagttgatgggggatctaactccagatttttactttttttaaagaatattgttgctttcctacaaaatgtcatatatttgcagtgata

SEQ ID NO: 43525 - DNA, 886 bp, Homo Sapiens
caggaaataacccagttctgcaccactggtttttgtagctatctcgtaaggctgctggctgaaaactgtgtctatgcaaccttccaagtgcggagtgtcaaccaactggacgggagagagtactgctcctactccaggactctcacaaagctgatgagctgtacttcagaaaaaaataataatttccatgtttgtatatatctgacaaaactggcaacatcttacagactactgacttgaagacaacctcttttatatttctctatttctgggctgatgaatttgttttcatctgtcttttcccccttcagaattttccttggaaaaaaaatactagcctagctggtcatttctttgtaaggtagttagcaattttaagtctttctttggtcaacttttttttaatgtgaaaagttaggtaagacacttttttactgcttttatgtttttctgtcttgttttgagaccatgatggttacacttttggttcctaaataaaatttaaaaaattaacagccaagtcacaaaggtaatggattgcacatagactaaggaataaacttcaagatttgtgattttgtttctaatcttgatgtaaaatttacactatttataaatacatatttattgcttggaaaatatgtgtgaatggatgctgtgattttttcagattaacttgcatgaatttaagggggtctgtgatttcaacacctatcctataaattttatggtgtgaaaaactggttcctgtccgaactttttaaatggtcggtcacaaggtccactgtgggttcaaccatacctagggccggtggtgtttgaacgcggaaattattcaggggggtaaataaaagggttttataagcacctgccaaaagggcgaagc

SEQ ID NO: 43526 - DNA, 788 bp, Homo Sapiens
  misc_feature (722)..(722): n is a, c, g, or t
taagatacgaacgagaaacctgatttattgctcatccttcccttgcctccctaatggcaagcaaaactctgaacatctgaaaaggatgtagttctggacaaatcctgactacccagaggaaactcactgtgagattgctgttgatttgaagggtgctttcactaaggttatattttaaagtagaataacacatgctgagtgtaaactggctttggattggtcagctgcagtagtacaaaaacagcatagaatttgagaaaactaaaactgctatgagatagctatgagaaaactaaaactgctatgagatagaaatgatgtaaaattatgtggaaagttttccctcatatactcacatacagcctttgaagggctctggctctgaccggttgatggccttgagcgagatgaaatcatgaaattgagtcaaatcaatttgacattgaaatgacaagaggaaactcttaaatacataaaaacaagctctcatttgcctaggatagatactgtcttaaaaataaagactgaacctagatgttctgagcactagcaacaaggtattttaacaagtttaaaggaattctctgaaaaagttataaaattattctaggaaacataaccataatagtgttttaagggactttcacctggggattttatattcatgaacagagtgtattctgtatttaaaatgtctcatttgtgggaattggatgacatgnttttttgataaatttattcacaatataaattgactttttattctaggaccatgtgaataatgggtt

SEQ ID NO: 43527 - DNA, 614 bp, Homo Sapiens
agttaggtgcactgagccatatagcccagtgtatgcatgtgtgggtgtgttcatgcacacacacactctctctcttgtctctctgtctctctctcactctttcttactctcttctcaggtcacttgtacacttggtttcctagtagaagctcacttgccacctctcagaggggtcccggattgcatccatcacaatcccaaaactagagttggggggaactggagggagcaaaacactgatttgatactagtcagtttgcttgaaactagttcacctaaagctagatctcttaaaaccaatttactgaaaacttgtttgcttaaagttaatgacttaatgactaatttgccaaaagctcaattcctattttggtgtgtttatatccatttaggtgtcctattcttttttgtcatgctttggatatttcaaggatttatatctattcatccaagagtacttctgagctattatcagcaacataaatttatcaaatttgcagcactttgtaaatgatgagattgcttcctacctttatggatgtctttttctatgttatctaccattcaaaaacttttttaaaaagtttaaagtttctagcaataaatacaattgg

SEQ ID NO: 43528 - DNA, 707 bp, Homo Sapiens
tttctgagaattgtgtccctcttcaggttccctcttggtgcctaacctggattagtaatgtgcattcaggtgaattttcagctgaggctctgagaactggtactctcagtgtgttctggtcatcttgtggcttagttgtagaagcaggtgtgtctcttgcctctgcttgcctcctactgcacactcagcacccaggactggaatcaccgactactgaatctcctacatgtattgctgctacttcaagctcctccacttgaaaccttatgattttcccaaggggagatgggacagtgtcatctaaatattccgaatgtttggccttctgagaaaagagcttctagtaattgaaccatgggaaacccagcttctggagggttggccgtggggctgtgtacatgtgtgtgcccaggggtgagtgtttctcaggattcctaacgattcaaattaccgttgagtatatataaagaatgagtctctgtatggaagaacaaatgtgtgcattcacccccagtcacaatggtctccattgcatttcaaaggagaggatcagactatctgaatataaacacaatctgatgttaatttattctaagaacaccatcattttgattgtcctaaagaattctgcctttgtgaataccgtgttaaatttttttaaatttgtgacaggattgtagcaaattattatttaaggaaaataaatt

SEQ ID NO: 43529 - DNA, 702 bp, Homo Sapiens
  misc_feature (576)..(576): n is a, c, g, or t
cacgaaaatatacacatgtcagaatgtgaaattaaataatggtttgaacagaaaattcaaacaagactctttccaatttaaagggccaaaccctaccaaagagagggagttgactggcttttaaaaagtatttaaataccacaaatgacatttaatttcactgtattcagctttaagttgttcacaatgaaaccacactttcaaacaagcaggttcaagctgctgaatagacattatttcttgcattaaaataccactaatgcattctcttgcaacactgccagacatgggattgtcaccatagaattagttggtactatgccatctttcactctttcacaagtcagtgatggaacctgctttatgaccaagattcatcctcaaataagccacatgtacccttctgacaaagctgtgtaaagtattagaatctgatgctctagaaagatcctagttgcctttgtgtatatttactgcctgcttgagtgtttctatgtgtgggttttccctgtatcttgtagaaatgttggggtgttttcctctgccatatggctcgtggcctgcgagccaactatntcagctgtattttaccttcattcttgatgaggtgatttaaattctgttcactttgtgtagtgaattccacagtagttttctgattgttgttaaaaatgacttaacatattacacagatattcaata

SEQ ID NO: 43530 - DNA, 590 bp, Homo Sapiens
tgtcctagcccatcagacagctatctaagctctggactacccctttgtgcagctgaatcactgcagggttgacctgcctggtgccacagccatggtttccatttctagatgaaaggatggcctaggacataggtctcaaagactcttggatcagaatcaggagattagggaaaacaggatggatacctgagcactaacagcagtagacgtagacctctgtcctttaccatctgaggtcttctggattctttgtggggttaattttgatttgatgtcatctgtttgcccttcatcttgcttgcaagtgtgcatggttcaatccctcacatccaggaaatgaattttgcaattgggccagatgctaatttgcacgttgattcaccttctttgcctttaagccttttttttcttttttttttttttggcaaatgaatgtaccatttcaactttgattttaatagtgctagttgatattggtaataatgctaaccaagagatcaatgccagatttttctcttggggtaagttagctgaagtcatttaaagatggaaaggtgggaaaattctttgatatttgatgtcattgtatc

SEQ ID NO: 43531 - DNA, 698 bp, Homo Sapiens
tgccacaaacagttaagtccattggcttggagatgacaagcacgagtttctggtatgtctagtgttctcattcactgattcagtcagtacacagataatcagtatagagaacttaagaggctggcttatgttatacctaaatttttactttcttgtatacaacaatgctaaaattgagcagattgataactgccagcaaaccatagatttaagataaatgaatgatttacccaaccctaaaattccatgggtaaaaattttgattcctttattttcaatactgcgttccttataggtcttacatgcatatgcaaggatattttatcttattcattcatttcatactctcaaaacaccaaacttcaaaaagttaattattgtcataatgcattattccatgtgtggtgtcaatacattttagcggacaaagaagaaacatgccagttaaaacatttctgctactgggattctttattaattatttgagaatgttattttgctagttcttaaggttaagtttttcatcaaagactcaggtacctattattgttccctggtgaaactgaggagaaaagttaatcaaccaggttactcccacagtttgcccgtgtgttatgtatcagttatacaggtatcccaccaaggttcaagtcaaaagaaattcctaactttgtatatttctggagctataaaacccc

SEQ ID NO: 43532 - DNA, 853 bp, Homo Sapiens
gtgtgaatatttttacgtctgtattagacattttctttgcaaatctatgttcgattgaaatgtaaatgaaattaaagatggtgtacacccatcatgtaaaaagcaggcaccatctctaagatggatttaatgctcatttttaaggcatatactcagcttctatttaaaactataatttaaaataattctgtacaatgaaatcgggaatatatatgggaataaattctattccatttatttcaatttgaatttccaaattgtaatgtttccctttgtgctataggaataggattaaatgggggaagactaggatttataaggcctgtatatggggggagggcagagatggaacaatgagggttgtgatgatagtgaatagcaaagagtgaattctgtgtgtttttgctggtagcactgaagtgaagagatattagcttgtggtgttcacaaaatagagcatcatgattttcagtgtttgagagaaaattgactggcaaaaagtttgcagtacttgacattgtatttgcatgccaaaataaaattatttgtccaccggaaaaaaaaaaaaaaaaaaaaaaaaaaaattttcgggcgctcggaccgaaaaagtttcaaacacatctgggtggggcgggaccagaaggtaaatgacatggctacgtggacaaaagaacctgcgccagaaaaggggcgggtttccaccaaaaaaaaccgcgcgggccggggttcgacaccaagaggggtcgggctaacggttccaccgggcacgccgaccccctctccgcggtggggcaacacagcaaaaaaaacaaccccccagaacaaagaaaaaaccacagacccaaacaaagag

SEQ ID NO: 43533 - DNA, 774 bp, Homo Sapiens
aggtgagacagctgggggaaaatgtggagtaaatgataatcaaatgttgaattctaaaagtctctacatttacctaggttggctttctcccccagttcagaagtttccagcttggccaatcatcagaatcacttgaggaacttagaaagaactccctggctgtagctcctatgtaggtttaggttgagactctggattccacaatttttaaaggttaccatctgaggtttctgatcatagtctacttttgaagcagctgctgctgtttctttattccattgaacaccctggaattgacataattttatctatcagcatttctccccttttagtttatttaataattaacccggtctccagggcagttttcatatgaccatgtgtatattcactgctcacgaaaaagtttaatgttagattaccaaatttaatatagttacagaattactgcataagggcttcccttcttggagactcttacccagcatgggaacagtgatctgcccacatgacagggtggtatgccaggcatagttaactgcttttggttgtgaggtactcatcttcctttagttacccttagttatgtggcacacatgtccttattgcctagttcgtcatccacactttggatcttgtgaaaatgctgttagtatccaaccttaaaatatattagtatatggggtttttattaaaagaattactttgaattttctatttaattcatatgtaaataaaggaacatttcatttcaccttaaaaaaaaaaaaaaag

SEQ ID NO: 43534 - DNA, 645 bp, Homo Sapiens
agaaaattgaagatcttgaaaaggaagtagtaagagaaagacaagaaaacctaagacttgtgagactgatgcaagataaagaggaaatgattggaaaactcaaagaagaaattgatttattaaatagagacctagatgacatagaagatgaaaatgaacagctaaagcaggaaaataaaactcttttgaaagttgtgggtcagctgaccaggtagaggattcaagactcaatgtggaaaaaatattttaaactactgattgaatgttaatggtcaatgctagcacaatattcctatgctgcaatacattaaaataactaagcaagtatatttatttctagcaaacagatgtttgttttcaaaatacttctttttcattattggttttaaaaaagcattatccttttatctcacaaataagtaatatctttcagttattaaatgatagataatgcctttttggttttgtgtggtattcaactaatacatggtttaaagtcacagccgtttgaatatattttatcttggtagtacattttctcccttaggaatatacatagtctttgtttacatgagttcaaatacttttgggatgttaccttcacatgtcctattactgatgtgtgcaaccttttatgtgttgatg

SEQ ID NO: 43535 - DNA, 717 bp, Homo Sapiens
  misc_feature (645)..(645): n is a, c, g, or t
cctcagcccactcatacctagagacgctgctggggaaggtcagcacacccaagaactttgggagtgtgtgtctgttttggtttgtgagaaagtagctgcccctcattctggccagttctttccagtagccatggggctggctacaagaagcaaaactgcccatgcaaagagaacacaggtcacttttcaaaacacttgcatcattaccctaaaaataggctgttatgcgttttgacaattgcgctatcctacactctgagggagttggcaacgcatgcggtatagtggagtgggaagagttgagactgaaagttaagagaagggttttcaagtcccggctcatctcaccccagtgactttgacagtgtgctcactctcagagccatggattacctggaacaaagtgcagattagtgcccacggtcctttccaggtataacatgctatcgttctttaattttattatatatacatacttttcttctgttttttgctttaagaactaaccccgatcaagagtattttctttagctagcttaaaaagaaaacatatattttatgtaaaaacacatacatggccaaatgcaatactgaagagacaatcatcctgtatcttttatggtttttcctgcttctgagtgtcgntctacaatgcccgttgacttattccattgcgtctctgctttagggtatgggtttggtcgctttggttgtcat

SEQ ID NO: 43536 - DNA, 574 bp, Homo Sapiens
  misc_feature (26)..(26): n is a, c, g, or t
  misc_feature (72)..(72): n is a, c, g, or t
ctgcctgcctccccatactgccgggnagtgtcggccgtccttgtcattgtggtcatatgaaaaggccccagnaaggagatgattctttcaagggacacaggcagcttctctccttgtcctctggggaggtgctgacccctcagaaaccccttcccccaacttgaccccaggctgaacagaccactgcatctcactgggccagcagcccccccagcccccagccttggtggggaccaagcagcctttcccgtcccctcctcgacccgtacagttgagagccaggggctggtgtgtgggagctgctacctggcagtttgtcgaggggtcaccgagcctctggtgggacacctgggcaggagtgctctcaccacgaggctgcttccgcagggaaccctggcctgcccgcgacttcgcatcagggaccgcatgctgatttgtactgctctctgctgggttttctatgttcttttcgagtgtgggaaaagggttttagtagaagggtgaatcgtattttacacagcggtcttatttatataaatgtcttggtttttacaattaaaatgaccaaaaactg

SEQ ID NO: 43537 - DNA, 731 bp, Homo Sapiens
ggattcagattcctgattcatttatacatctgtttccatatggcagggacattatgatacttaatgaataatgctttgaggagttctgcagttaactttcaagtcttccagatgattgtcaacaacaaaaaaggcttattgaatcccatcttgctatgcaagttttatcagatgatcaaatagtagatctgatacatccccattgtatgtacgacattttcaaaccaagtcttaacttttcaaggacattttagtagctaattcaggggagggggaagaatgatgcaggtttttagattgactgactatttttgagttatggggctcattttgaaagactgctgtccagatcagcttgttgctgcagataatagaaggttcttatgaatccaagttgtatattcacttgtaggataatttaaaaattagattttttttgcatatgagcaaaaaccttttgctggatacaggagaaggttggactttatctacagttatcttttgattacagcaacagctctgggtgagagtagaatttatagagggataatttgtcaagccatagaaagaaaatctaaattaatctagtaagtgtatgacctctcaccattttaagaggtatcagattcatttgcactattaggaatgctagttttgtgcaaaaataatgccttacctgttttttccccacatttaaggttgaaaagctttcaaatgttccaagttatgcc

SEQ ID NO: 43538 - DNA, 638 bp, Homo Sapiens
cgcgtccgtgctttttgtccatgtgccgttttaactgatatgcttgttagaactcagctaatggagctcaaagtatgagatacagaacttggtgacccatgtattgcataagctaaagcaacacagacactcctaggcaaagtttttgtttgtgaatagtacttgcaaaacttgtaaattagcagatgacttttttccattgttttctccagagagaatgtgctatatttttgtatatacaataatatttgcaactgtgaaaaacaagttgtgccatactacatggcacagacacaaaatattatactaatatgttgtacattcggaagaatgtgaatcaatcagtatgtttttagattgtattttgccttacagaaagcctttattgtaagactctgatttccctttggacttcatgtatattgtacagttacagtaaaattcaacctttattttctaattttttcaacatattgtttagtgtaaagaatatttatttgaagttttattattttataaaaaagaatatttattttaagaggcatcttacaaattttgccccttttatgaggatgtgatagttgctgcaaatgaggggttacagatgcatatgtccaatataaaatagaaaatatatt

SEQ ID NO: 43539 - DNA, 704 bp, Homo Sapiens
  misc_feature (12)..(12): n is a, c, g, or t
  misc_feature (21)..(22): n is a, c, g, or t
aaagcaggggcntgggtaccnnggtccggaattcccggggataaagtagacaataaagttttccacaaataggatgaccctctagctatagatactgccactcctcctttccccatcctttttttcccttagcactattcagtgcaaaaagtgaaaaaggttggtaaaataggtaaaatacctagaaacaatcactacagaaaacagctgaagacagtggccatgcagtccgagaggagtagtggtctgcctctaattttctaatctaagttcgtttattgagttacagtggtctttagtaaagtaaaacaatttcccaatcccaggccttgtgatttgagatggtaccttagaaaaagttacacgcagttccgtggttgaatatatttgagatggtaccttagaaaaagtttcacgcagatccttggttgaatatagttgagggagcgtagtattgacaattcttcatgtaggaaacctgaaatgaacacagtcacagtttgattaaaacattgtcctgtttgttgcaacagaaaactcggatagttttaacaacaggaaacacttgtaggacttcctttaccaacatactttttaaatgttttgctattggttccatatttatttagatttataagtgtcaataaagcaaacttttgatgcctcaaaaaaaaaaaaaaaaaaaaaaaaaaaaaaaaaaaaag

SEQ ID NO: 43540 - DNA, 408 bp, Homo Sapiens
aagaaatcttcgaaggtgtggttttcatttctcagtcaccaacagatgaataattatgcttaataataaagtatttattaagactttcttcagagtatgaaagtacaaaaagtctagttacagtggatttagaatatatttatgttgatgtcaaacagctgagcaccgtagcatgcagatgtcaaggcagttaggaagtaaatggtgtcttgtagatatgtgcaaggtagcatgatgagcaacttgagtttgttgccactgagaagcaggcgggttgggtgggaggaggaagaaagggaagaattaggtttgaattgctttttaaaaaaaaaagaaaagaaaaagacagcatctcactatgttgccaaggctcatcttgagaatcaggcgggttgggtgggaggagga

SEQ ID NO: 43541 - DNA, 500 bp, Homo Sapiens
accacctctcccagctgttagagccgccctgggggccccagaaccagagctggctcccagcaagggtaggacgggccgcatgcgggcagaaagttgggactgagcagctgggagcaggcgaccgagctccttccccatcatttctccttggccaacgacgaggccagccagaatggcaataaggactccgaatacataataaaagcaaacagaacactccaacttagagcaataacggctgccgcagcagccagggaagaccttggtttggtttatgtgtcagtttcacttttccgatagaaatttcttacctcatttttttaagcagtaaggcttgaagtgatgaaacccacagatcctagcaaatgtgcccaaccagctttactaaagggggaggaagggagggcaaagggatgagaagacaagtttcccagaagtgcctggttctgtgtacttgtccctttgttgtcgttgttgtagttaaaggaatttcatttttt

SEQ ID NO: 43542 - DNA, 574 bp, Homo Sapiens
  misc_feature (1)..(1): n is a, c, g, or t
  misc_feature (135)..(135): n is a, c, g, or t
  misc_feature (453)..(453): n is a, c, g, or t
  misc_feature (470)..(470): n is a, c, g, or t
  misc_feature (516)..(516): n is a, c, g, or t
  misc_feature (536)..(536): n is a, c, g, or t
ntggctgatcacttgtggggtcagtctccagcacccagcgctcccacaagccttgccaaggaaggcctgcttttcagccacaaacttcaggaaactcatccccccgctccccaaagtgttgttgctggccctggnttgtgtggctcctgaggattgggaatttcaaataattgcaatacctgagttagaattccttctaatggcatcgttttaagctggaccataaagcagaggggaattacaagtgtgtcccatgcctgaccttcataattggtttgggggacaggggagtcacagccactgatatttaggtgatgtctcttaggacttcagtgcctcagctgcctgaactgtaaatgttttctgaatttcacatatttttttttgcatgccttaggaagaagcacataggtaaaaccagcagtttccagtaatatagggggtttttgagcnaggcccctggagcagcngagagacaagatggagcacatgtagtctgtgtgcctggtcacacanaggcctgcatgcaagtagcnaagcaagctctcaagggcttgtcaagtaaaatatatta

SEQ ID NO: 43543 - DNA, 700 bp, Homo Sapiens
ctgatgagctgcagatcctaacctaccagctgtgtcacacctacgtgcgctgcacacgctccgtgtccatcccagcgccagcatactacgctcacctggtggccttccgggccaggtaccacctggtggataaggaacatgacagtgctgaaggaagccatacctctgggcagagtaacgggcgagaccaccaagcactggccaaggcggtccaggttcaccaagacactctgcgcaccatgtactttgcttgacatgttttagtgtttagcgattgtgtaccgagtgggattcacgagaccagctacactcagaccaacagatggccagcccttccgtgacagccagcatcgaacatgagacgtcattgattttattagattctccgttttccagaatgccttccgtcccagatttcaaacttggattttgaactgcagacctgtatgagaacccaatgtcataggaaatatggtttgctaaaatctataagctgcttattaaaacagagtcccgtgtgtcctaaaaatctcctaaaaccagtctatgaactcagggctttaaaacatttttaatttatttggtcattcaatttacttgtttttaatacatgattctctatgaaattgatgggctcaaactagctgtgaatcttctgagagtgaaagcaacacaaaacacaagtgtggttttaaagcct

SEQ ID NO: 43544 - DNA, 858 bp, Homo Sapiens
caggaaaccctcttaggcctgcctcctcgtgttgatgctgaagctagcaagtcagtcaataaaacaacaggtttgacaaggcatattatcaatactagttctcgtttattaaatttgcgtcaagtctctaaaactcgcctttctgaaccaggaaccgatctcgtagaaccttcaccaaaacacacacccaacacgtcagacaacgaaggcagtgacacggaggtctgtggtccaaacagtccttctaaacggggaaacagcacaggaataaagttagtgagaaaagagggtggtctggatgacagtgttttcattgcagttaaagaaattggtcgtgatctgtacaggggcttgcctacagaggaaaggatccagaaactagagttcatgttggataagctacagaatgaaattgatcaggagttggaacacaataattcccttgttagagaagaaaaagagacaactgatacaaggaaaaaatcacttctttctgctgccttagctaaatcaggtgaaaggctacaagctctaacacttcttatgattcactacagagcaggcattgaagatatagaaactttagaaagtctgtctttagaccagcactccaaaaaaataagcaagtacacagatgatacagaagaagaccttgataatgaaataagccaactaatagactctcagccattcagcagcatatcagatgacttatttggcccatccgagtctgtgtagcagacaggtctatttaaactttcaaatgaacagggtaaagttgcatctaaagtaccacagatacaaccatgtttaaatcctcgtatgcactctggcctgctttctcagttacttgcttgt

SEQ ID NO: 43545 - DNA, 695 bp, Homo Sapiens
gtgttcgggatgcagggggcactatagtgttcttggacttgtcgtcctggggcagttttagttctttatatttagtgggtcagtgccaagtgctaccacttcccaataaaggaatggggacccagaggctgggtccctggctaccttgttatgaggttttgttatttctctgacaagattgctttggaaagagctgcttttagggattattttttgaataccccgagtggggagcagggttctcctcaaagcctcacaaccataggatcataggaaaggggccctattttcctgctgcttcccagctcagaacatatactgaatggaatgtatttttaagagaataaagtctatttttttgtattttaaagattgagagggctaagaaagtagccctcaaataaactgttattgcattataggcccctttgttgggggcagcctgttggtccacacctacttgctcaggcaggtgctctggtctctctcacccctgccccttagagtctaggtgcagcagctccaagcatgggaccaaggaggccagaacctgtcgctggaaaccagggcaaagcagtggctcagggctccttgggtgcatgtgtatcattggagctgcctgtctgcatgtatcctctggcgcgaatgctctctgttggctctgcagtacaatatgtaaccaataaagctccctc

SEQ ID NO: 43546 - DNA, 857 bp, Homo Sapiens
tggtctccgacagagcggctgcgtctcctgtccagcacaaggggtctccagtgtggacgtggcctgaccagggccactggaaactgtcccaggaacgatggactcacgcttttgtccttaaactgacttaccatccgaggagttcccatgacgccaaaacagcgaatgtccatcaacaggaatcggatgggaacagaattccatggtctcaatgacttaagtttatgggaagtcattgtggccataatggtagcagaagtagcgagcacgctcaggtgataggacgactcctgagacccagcgaccgtggagacagcctcgggaagccctggccgtggatggatcccttggctgtctgaggactgctccagaagtggcgggaatccaggcccacccagaagaccgtgaacagttccttagcctcccacccccaaggcagctcttttcatccaactcagtttacaggcgtggtttgtatttcaaactgggcttcctggatgtacaaatggaactgtggtgagggtgcgggctgcggtttctcctgggcgtcaccaagggcagccctgggctctggcctgggatgaagacgaaagcccggatcggcgaaaaggtaagagggaagcccgcgggcccgccgaacacacaaggccccccaaactggcgttattcccaaatggcccagatggcaggacacaataaggaagttgcggactgaaattctgcactctaccggcctggggtctcgccagggactcgcagtgcacaaaaacgaggtacgcaacacaacaaaacaccaacacacacacacgcgccgacaaacaccacagagcaacacacccacactacaacggccaaac

SEQ ID NO: 43547 - DNA, 969 bp, Homo Sapiens
  misc_feature (838)..(838): n is a, c, g, or t
ctggaactggaaaaacatccactattttggcagcagctagagaactctttgggcctgaacttttccgattaagagttcttgagttaaatgcatctgatgaacgtggaatacaagtagttcgagagaaagtgaaaaattttgctcaattaactgtgtcaggaagtcgctcagatgggaagccgtgtccaccttttaagattgtgattctggatgaagcagattctatgacctcagctgctcaggcagctttaagacgtaccatggagaaggagtcgaaaaccacccgattctgtcttatctgtaactatgtcagtcgaataattgaacccctgacctctagatgttcaaaattccgcttcaagcctctgtcagataaaattcaacagcagcgattactagacattgccaagaaggaaaatgtcaaaattagtgatgagggaatagcttatcttgttaaagtgtcagaaggagacttaagaaaagccattacatttcttcaaagcgctactcgattaacaggtggaaaggagatcacagagaaagtgattacagacattgccggggtaataccagctgagaaaattgatggagtatttgctgcctgtcagagtggctcttttgacaaactagaagctgtggtcaaggatttaatagatgagggtcatgcagcaactcagctcgtcaatcaactccatgatgtggttgtagaaaataacttatctgataaacagaagtctattatcacagaaaaaacttgccgaaggtgacgaatgcctagcagatggtgctgatgaacatttgcaactcatcagcctttgtgcaactgtgatgcagcagntatctcagaattgttaaacgtgaattaatatctgggatgggggggtttttgttaaatagaggaaagttgtaattaaaaaaattaaaatgaacccaaaaaggccaaaaaaaaaaaaaaaaaaaaaaggggcc

SEQ ID NO: 43548 - DNA, 898 bp, Homo Sapiens
tctccagcgactccccactggactcttctcccaagtacccccctctctaccctcccggcaggatcatccacctgcaggaggagggcgcctcggggcggtttggctgctgctctgctgctcactatagcgccaagtggtcacacgaagcggaattcagcaaaatactcataggtccgaagatgctcaccgaccacatgccagacatcctgatgcgggccttggacagcgtggtctccgacagagcggcctgcgtctcctgtccagcacgaggggtctccagtgtggacgtggcctgaccagggccactggaaactgtcccaggaacgatggactcacgcttttgtccttaaactgacttaccatccgaggagttcccatgacgccaaaacagcgaatgtccatcaacaggaatcggatgggaacagaattccatggtctcaatgacttaagtttatgggaagtcattgtggccataatggtagcagaagtagcgagcacgctcaggtgataggacgactcctgagacccagcgaccgtggagacagcctcgggaagccctggcccgtgggatggatcccttggctgtctgaggactgctccagaagtgcggggaatccaggccccacccagaaagaccgtgaaacagttccctttagcctccccacccccaagggcaggctctttttcatcccaactcaggtttacaaggcgggggttttggttttttcaaactgggggctttcctgggaatgtacaaatgggaaactgttgttgaaaggtgcccggccctggggggtttttctccctggggcgggccacccaagggccagccccctggggctctgggcttgggggattgaaaaacccaaaaccccgatccggggaaaagtaaagtggg

SEQ ID NO: 43549 - DNA, 613 bp, Homo Sapiens
tcataatgtggggtgggtaatactgtctgtgaaataatgtaagaagcttttcacttaaaaaaaatgcattactttcacttaacactagacaccaggtcgaaaattttcaaggttatagtacttatttcaacaattcttagagatgctagctagtgttgaagctaaaaatagctttatttatgctgaattgtgatttttttatgccaaattttttttagttctaatcattgatgatagcttggaaataaataattatgccatggcatttgacagttcattattcctataagaattaaattgagtttagagagaatggtggtgttgagctgattattaacagttactgaaatcaaatatttatttgttacattattccatttgtattttaggtttccttttacattctttttatatgcattctgacattacatattttttaagactatggaaataatttaaagatttaagctctggtggatgattatctgctaagtaagtctgaaaatgtaatattttgataatactgtaatatacctgtcacacaaatgcttttctaatgttttaaccttgagtattgcagttgctgctttgtacagaggttactgcaataaag

SEQ ID NO: 43550 - DNA, 707 bp, Homo Sapiens
cgaggcgacagcacctgcttgcttacctcagggagagagggaagctgagcagaagccaattccttgtgaaaagctgactgccatcagtaatctcaatagaaaagagatatgttttctggagtcataaaggaattcaattcctagggtttttgtttttgtttttgagatgtaatattgctctgttgcccaggctggagtgcagtggtatgatctcaccttactgcaaccaccacttcctgggttcaagcgattctcctgcctcagcctccccagtagctgggattacaggcaccagccaccatgcctggctaatttttttgtatttttagtagagatgtggtttctccatgttggccaggctggtctcaaaatcctgacctcaagtcatctgctggccttgacctcacaaagtgctggcccagccgagatttgttttctaagatactttgtgtcatgaacagttcagtttagtgtcatgaactattcacttcatatttttcttgtattaactgtttaaatttttaaaatatcttgtagtaactctttaaaatgtatgtaagtaaatggctgcagaaagtttttttagagaatcctgcttccatcagtaatacagcaatattaccccatccactaatggtctttgtttccttaaccactactcattaatccttaatcacctcattcaaactaattcattctgcattttt

SEQ ID NO: 43551 - DNA, 672 bp, Homo Sapiens
ttttttttttttttttagtagagatgtggtttctccatgttggccaggctggtctcaaaatcctgacctcaagtcatctgctggccttgacctcacaaagtgctggcccagccgagatttgttttctaagatactttgtgtcatgaacagttcagtttagtgtcatgaactattcacttcatatttttcttgtattaactgtttaaatttttaaaatatcttgtagtaactctttaaaatgtatgtaagtaaatggctgcagaaagtttttttagagaatcctgcttccatcagtaatacagcaatattaccccatccactaatggtctttgtttccttaaccactactcattaatccttaatcacctcattcaaactaattcattctgcatttttgagtaccaactcttgtcaggctcagtggcagcttctacgacctgatggatggaaaaaaatcaaactctgtgactctatggttgactgccacctctgcaaccttgactcatctgctgaaaaggcaagaagaagaaagggcagcaagccctgttttagggactacataagatgaggggagataagggggacatagatgagttctttaggattgcgtgtgttttgagtttttgtttctaactgaagaaatctgtcaatattaaatagggtgggaaaatg

SEQ ID NO: 43552 - DNA, 809 bp, Homo Sapiens
agcagaaggtcccccaggtagacatggagaagcactttgttttaaataggagggtttcatagttgcatctgaagccacctggttctgttaaactgtatcgtgcaggttttgggtttggcattgtttctgatcaattctatgcaactctcatagttcctgttactttttagcattagctgccaaatgacttcaaaaggctggggtgggtgacttgactgtgagactggattataacatggacaaatcttattttgcttaatgtgtttgtgtgtgtgtgtgtgtgtgtgtgtgtatgtatatatatatatataaatatctttcccaatatgccccgttgacagtgtttaaattccagactaggactgctgatctgcacaatttaattatgtggttattcgagcacttaatttcactcaaggttcattgggctctgctctcctccctgccattacgggagctgtggacagagctccctcacttcaagattcctagtgtttttgcacaacaggttgtccaagtgagaaagactgagttgcgtgtctgtaaatgtctgcgcagggtgcacatgctgcgaggtctccatcctccgggctgtccctcccagatgggctggcctttggccctcctcagagtatgcctgggtacaaacctcagtgttcagatgggctgtaagttctcacttcaaagctatggaatggattttagccccttttaaaaaaaaaaaaaactttggctttcaataatatgggaaattccgaagggtgacacccaaatggtttgcccgttccgggcaagggagaggggggtca

SEQ ID NO: 43553 - DNA, 876 bp, Homo Sapiens
tgccggcgtcccgcagtgtgcggttcgtgcccttaaccacccgcttctttgtttcccgcccctctgctttcgcaggagctcttgtgcttgagttcagtgttagtggtagcgtggctcactccacttggaggtggcggccgtctgaccgtgtgttactgctttgccgacggggcctcccggccctgatgcgtgtacactctgcgggctgcaccgggtggctctggttgggggcgaagctgtgttgactgggagagcgttggaaattgagacatggagagatgacgggagtgcgtttctctgggtttgatctccatcctgttttctcccagacacaccacacctaccttgggggaatgccgttgcctgttccacccctttgttcacttcgcgttaactgctgtggtaactttttcaggatctgtgtgaagaatggtaatgacgtagttgaaaggaaaatgtactgttgtgtgtttcatttgtgtgatttcgtaccaaaaaaatgtgtttgaactatattgtatgtaatttggaagtcgtgttaataaaaccctgcagtttcaaaaaaaaaaaaaacagcaaaaacaaaaaaagaaaaaaaaaaaaagaaaaaacaacgaaaacaaaaaaaacaaagacaaaaacaaaaaagaaaaaaaagaaaaaaggagaagaacacaacaaaaaaatgacaaagcgagaacaaaataagaagaaagaaaagaaagagagagagagagcagcacagaagaaagaagaaaaaaaaaaaaaaagaggaggagagagagagacaaccagaagagagaaaaaacaaaagcagaagaagacacaagaaaaagaaacaacaagagaggaaggaaaaaaaggaaagacaaaaaa

SEQ ID NO: 43554 - DNA, 515 bp, Homo Sapiens
atgaagaaatgaatgaaatctgcaagactgaatttcaaatgcgattgctatggggcagcaaaggtgcacaagtcaatcagacagagagatatgagaaattcaaccagattttaactgccctctcgcgtaaattggaacctcctcctgtaaagcaggcagagctttgataactctccagagaacctttagaatatcttttcaagtttccccagcttcatctttgggaaagcttactgttattgataaagtaataatgtgcaaatctgacaatatacaagcttttagtatccacaggatattaaacgtgtaaattgcacagagcacacttatttatgaattgtctaaagttactactgattttaaaatgaataatttattattaaggtaactactgctaatgttgatcagcaaatttaagagaagacctagctatgttggctggttgctttctattatcatggtatttgaccattttagtttcaattccatgtcagataagtgtaaatagaagagtt

SEQ ID NO: 43555 - DNA, 843 bp, Homo Sapiens
atcttgatattgaatccatcagtgatccaagagatacacctatttgcctaaaacaacctaagatgtattggttatggaatcatgtgttggataggttcttaagacctgtttcctcaaatcttgacacagttttcaagggtggcttattgacttgcacggttgggcagataatccagatttacctaagattgggtaaaaaagtcatctgtgactttgctggcagggcatttgctaagtggagtacaggatctaaaagggttttcttagaaagggcaatattgtccaatgaagtaagcagaaggactctgggttagaagcatctgcacaaaaactggtgagacctactctccactgctctgcagctggatggctgatggcaggctgagcagtggggaagcaggttttaacaacagggagtccttccaggtcactgtatattgagaagaaacataaaactattgtctgttacattccgaggtcagccttcttcttaacgttttataatatgcaaatgccagcttctggaaagcaagtatcatcatgtaccaaatgctttatacaccatcacattcatgaattttttagcatggtcagaacttgtgtaaatatgtctcttagatgatttggggagatgtgatctattttcatattttcaaatgccttttcatttcaataagtttcattgagacaacacaaaaaaaaaagggggcgcaaatttcccgagggccaattacgtcccttttcttaaagggctatggagttaaaagcggccgcttaagtccgtggaggttggttggagcctctgggtatgacctatgcgaaaatgtatgattttgtgtttac

SEQ ID NO: 43556 - DNA, 829 bp, Homo Sapiens
  misc_feature (801)..(801): n is a, c, g, or t
agccaccaaggccaggctttgttaaaagaagtgtattctatttatgttgttttaaaatgcatactgagagacaaacatcttgtcattttcactgtttgtaaaagataattcagattgtttgtctccttgtgaagaaccatcgaaacctgtttgttcccagcccacccccagtggatgggatgcataatgccagcaagttttgtttaacagcaaaaaaggaagattaatgcaggtgttatagaagccagaagagaaactgtgtcaccctaaagaagcatataatcatagcattaaaaatgcacacattactccaggtggaaggtggcaattgctttctgatatcagctcgtttgatttagtgcaaaaatgttttcaagactatttaatggatgtaaaaaagcctatttctacattataccaactgagaaaaaaatggtcggtaaagtgttctttcataataaataatcagacatggtcccatttgcaggaaaagtgcagactctgagtgttccagggaaacacatgctggacgtcccttgtaacccggtatgggcgcccctgcattgctgggatgtttctgcccacggttttgtttgtgcaataacgttatcacatttctaatgaggattcacattaatataatataaaataaataggtcagttactggtctctttctccgaatgttatgttttgcttttatctcacagtaaaataaatataattaatggtttgcatgtgaaattcactttttgaagaacatgttaccttaccttttgttttagaagtttttcagtattaanatattttttagaaaaaaaaaaaaaaaaa

SEQ ID NO: 43557 - DNA, 716 bp, Homo Sapiens
  misc_feature (6)..(6): n is a, c, g, or t
  misc_feature (670)..(670): n is a, c, g, or t
gaggantgaggagacagccatccaaagagtcctgcagcagctcactgaagaagctgccctggatgaggcaagtggctttaacatccctgcagagcaggcttctcgaccctggacgcaaccccgcggggcagagcctgaggcccaggatgtggaccccaggcctgaggctgaggaagaggagctcccctggtgctgcatctgcaatgaggatgccaccctacgctgcgctggctgcgatggggacctcttctgtgcccgctgcttccgagagggccatgatgcctttgagcttaaagagcaccagacatctgcctactctcctccacgtgcaggccaagagcactgaagacaccctggtcctcccggaagggcagtcccacaggcagcggcacccatttctgggcccagccacaggacgtccgatgggagagcttgtctggctctactgatgatggataggccccttcctgagccttggtgtccctggaatgaggaaagattctccattcgagagaatgactgggagggaagaagtcggggccctcctattagaagcccagactggaagtgagaggcatgatggggagagaccagactgaatctacgggtgagccctgtaacctggctctagggcacaggcccctcccctggcacttagtgggtctaatanagtatgttgattcattgggaaaaaaaaaaaaaaaaaaaaaaaatgg

SEQ ID NO: 43558 - DNA, 845 bp, Homo Sapiens
cgagttcctggtcaaggctcatctgaagatgacctgcaggaagaggaacaaattgagcaggccatcaaagagcatttgaatcaaggcagctctcaggagactgacaagctggccccggtgagcaaaaggttccctgtggggcccccgaagaatgatgataccccaaataggcagtactgggatgaagatctgttaatgaaagtgctggaatacctcaaccaagaaaaggcagaaaagggaagggagcatattgctaagagagcaatggaaaatatgtaagctgctttcattaattaccctactttcattcctcccaccccaagcaaatcccaacatttctcttcagtgtgttgacttctatcctgttaacactgtaatatctttaaatgatgtacaggcagatgaaaccaggtcactggggagtctgcttcatttcctctgagctgttatcttgtgtatggatatgtgtaaatgttatgactccttgataaaaaatttattatgtccattattcaagaaagatatctatgactgtgtttaatagtatatctaatggctgtggcattgttgatgctcacatatgataaaaaagtgtcctataattctattgaaagtttttaatatttattgaattattttgttactgtctgtagtgttttgtggagtactggaccaaaaaaataaagcattataaatatatagttttatttataaggccttttctattgtgtgttttactgttgattaataaatgttatttctggacaactttggactcttaattatggaaaaccagagacaatgtctacgaagcaagcagtatgaagcccaaagagaaaatcatc

SEQ ID NO: 43559 - DNA, 551 bp, Homo Sapiens
tggcattaaaaattttacaaaaacataattttaatggctatattatattccatttaatggatgcaactcagtttatttaaccattcccatgttgttaactatttaggttgtttctaattttcattattataaagttgcagaaatttggtgtacataaaactgtctccatataattgattattaggatatattcccatgaaggattctttttttaaaaaaatgtgaaatgtcatcttgtacttacacctttcatgaaaagggatttcctgcttttgtactgcatgggtggcagttgtgaggaaaagccagtcaaatgacctttttacaaaagaaatgcagtggtcacttcagttgagagtgactttttaatacaacaagatcaactagaagaattcaactgtctcaagaatcaaggtaccccaatatatctcgcaattccaaactttgtttgagggactcgttatccagctcttggtagccacacctgcaatgtaaaatggaagaaaatgcaaagaaaccaaatgtgccgagtgaataaaggattgtcatat

SEQ ID NO: 43560 - DNA, 705 bp, Homo Sapiens
gcgtccgggactttaataagagaaattccatagtttttaatatcccagaagtgagacaatttgaacagtgtattctagaaaacaatacactaactgaacagaagtgaatgcttatatatattatgatagccttaaacctttttcctctaatgccttaactgtcaaataattataaccttttaaagcataggactatagtcagcatgctagactgagaggtaaacactgatgcaattagaacaggtactgatgctgtcagtgtttaacactatgtttagctgtgtttatgctataaaagtgcaatattagacactagctagtactgctgcctcatgtaactccaaagaaaacaggatttcattaagtgcattgaatgtggctatttctctaagttactcatattgtcctttgcttgaatgcaatgccgtgcagatttatgtggctgctatttttattttctgtgcattactttaacaccttaaagggagaagcaaacatttccttcttcagctgactggcaatggccctttaactgcaataggaagaaaaaaaaaaaggtttgtgtgaaaattggtgataactggcacttaagatcgaaaagaaatttctgtatacttgatgccttaagatgcccaaagctgcccaaagctctgaaagactttaagataggcagtaatgcttactacaatactactgagtttttgt

SEQ ID NO: 43561 - DNA, 853 bp, Homo Sapiens
  misc_feature (678)..(681): n is a, c, g, or t
  misc_feature (684)..(684): n is a, c, g, or t
gggctttccaacttggacgctgcagaatggctcccgcaaagaagggtggcgagaagaaaaagaaaataaaatgtataggcagggttccttcaattggcattttccccagaattgtgagccaaagcctatagtaattgcagacagcaaatgattccggatctctaaaaggctctctcagatgaaaagggagtaaaggaaaaaagaggtcaaccactgtttctgataatgtacttgagtttcattgttcttttagtttgtattcttataaaaaatgtttacactctgcagattgattttttttttttagtactgtggctttcttttcctattttatgaaaaaaatgataatctttttgtaaaattgtctgtgaaatataaacattaatatataaagaaaaaccttgaagtgctgtatagtgaagtataaattaatgttttattgatttgtgaagaatttaagactattatataattatcttggtggatctattttatgcatgaccttttaacctttgactttgcttatttcccactacgaaggggaaggtagattttatgaatgattttaatagcaaatatattttataaaggggaaaaatcccagtgtggaggtaacaaagcatctatctatttctgaatcatgtttggaaataaaaattgctcccatctgggaaaaannnnctnaaacaaaccacacacggccggggacaacacctaatctaagtagaaaaattaaattgtgggccccccctggccccctaaaaaacttttctaaaaccattctttgggggcggggggccccctaggaaaaggaaccagggccttaacttgtgtcccagggaaactcgggccc

SEQ ID NO: 43562 - DNA, 625 bp, Homo Sapiens
gaaccccatcatttactcctaccgcgacaaagaaatgagcgccacctttaggcagatcctctgctgccagcgcagtgagaaccccaccggccccacagaaggctcagaccgctcggcttcctccctcaaccacaccatcttggctggagttcacagcaatgaccactctgtggtttagaacggaaactgagatgaggaaccagccgtcctctcttggaggataaacagcctccccctacccaattgccagggcaaggtggggtgtgagagaggagaaaagtcaactcatgtacttaaacactaaccaatgacagtatttgttcctggaccccacaagacttgatatatattgaaaattagcttatgtgacaaccctcatcttgatccccatcccttctgaaagtaggaagttggagctcttgcaatggaattcaagaacagactctggagtgtccatttagactacactaactagacttttaaaagattttgtgtggtttggtgcaagtcagaataaattctggctagttgaatccacaacttcatttatatacaggcttcccttttttatttttaaaggatacgtttcacttaataaacacgtttatgcctatcaaaaaaaaaa

SEQ ID NO: 43563 - DNA, 693 bp, Homo Sapiens
ccgggagaagctgcggcgagtcctgagcggccaggacgacgaggagcagggcctgactgcgcaggtcctggatgcctcatcccttagtttcaacaccagattgaaatggtttgccatctgcttcgtatgtggcgttttcttttctattcttggaactggattgctgtggcttccgggcggcataaagctttttgcagtgttttataccctcggcaatcttgctgcgttagccagtacatgctttttaatgggacctgtgaagcaactgaagaaaatgtttgaagcaacaagattgcttgcaacaattgttatgcttttgtgtttcatatttaccctgtgtgctgctctttggtggcataagaagggactggctgtgttattctgcatattgcagttcttgtcaatgacctggtatagcctgtcgtacatcccatatgcaagggatgcagttattaaatgctgttcttctctcctaagttgaaaatcagaaacttgtggaaaagagcacttgaatgttggtactctatgtttggtgaagtttgcttttccccataaaacactccaggaacaactgacgtgacagttgaagaccgttttgtactaagtctcattttgtatactggtaaaaactacatgcttgattaaaccattaaatgcttgtaactttaaattcattatgtgtcattaatatac

SEQ ID NO: 43564 - DNA, 637 bp, Homo Sapiens
gcacgagaagggaaaacattttgcatgtgtaaagcttcatgaagttctctttaaaaaataccaaagcttgtttatttctgataattaacctaagcccttatgaaaataaacaaaatgaagggattatgacaggtattaccaaaaacaccaaaaggaacaaaggggcctgcgttaaaacctaattgctaatgcttcacaactaggagagcatgccgtcttgatgtttaaaaaacccagggtctccacccttcctttgatttgtgcaattctgtcttccacagttccggagccttcagtgaggggtagctacatgccccatgcctgccctttctttccttctttgctcactttactatgggtgtattttaatcttgtataaaaatatgcatgaatgagtcatgcacatgtatacgttatgtatttgacaagtggtggtgaaacaaaatcaaaacagatttgatttgtgtttttgaaatgtcagtacattttgtgccactaacactgtgatgtataaaagagctgtttgaatgccttttaatgttgtgttttgtactctggaatcatatggaaaaagtttgatttgtaatttcaatacatattttaaatgtattgtgtcttacgtagtttgcccccccct

SEQ ID NO: 43565 - DNA, 649 bp, Homo Sapiens
  misc_feature (619)..(619): n is a, c, g, or t
agaagaaacatccaaaagcacatttcatttctccaaactttgtgttttaaattatagttataaattgtaaggtaattttaaattgtccctcgtattatttctccacgtctgttttagtttaatgtctcctaagcttttctctcatagcgtagacctagggaagggatgggaagattgcccagtccccgatggctgcgcacacaggaggcggcggagcacaaggcaagtgagtttgcactgtcagccccagaccgtaagcttggctacactgatgtttttctttactaaggatactattcaaaaattaacattttcatctcagtaagtttttagaacatcaaaatgttttctgagctccaagtggctaggttgtaaaagttttataataatttgcaattaaaatacatgatacatattaatccattaaagactagtgggaatgtatcagccagagtagcaagtaatttttgttttataaatcatagtatctgtcatcttgcagtattaccaatgctgttgtaaattgaatttaaagtggtattaaaaaaaactgttaaacaatttttatctgtttgtatatcttactatagattatgtacaagtaacatctaaataaaantacacttttaaccctaaaaaaaaaaaaaaa

SEQ ID NO: 43566 - DNA, 607 bp, Homo Sapiens
cgtccggggttcaagccatccctcctgcctcagcctccccagtagctggaactacaggtgtgtgccatcacacctggctttacatttttctgtggggtcttactatgttgcccaagccggtctcaaactcctgagctcaagtgatcctctgcctcagcctccagagtatctgggattacatatgtcggctaccgtgtctggccgttcacatctttggccactatttgcttgtgaaaaggtataatgaggtggtacttatcatttttactgtgtctcatgttttgtatatttttgtttcatcaactaagatgcactgtaacatctctgaaatctggatatattatcaatggtttatcatagttttgttagcaatacactgtcttttagtggtgcctaaaataatggtatagttgtgaggtgatcttagatttgatgaagcacagtatgcaggtaggcctaatgggggaagatggtaatataaaagcaagaagtattttttttttgtaatgactgaaagctgttctgtggatgacctaccctttcctttaaacacgattctctcacttccaactccaaacttgctcaactaatccttaaaaataaactt

SEQ ID NO: 43567 - DNA, 692 bp, Homo Sapiens
tgtctcagctctgagggtctttgtgagttcccaccaacttttaattattcatgcccttgaccatgtggttgcttggagacctggggtcttctgcagactgaagaagacacatttctagattatttgtcctttttatcctctcaaaaatttaaacactgtacctcttcagtggtcagaagaaagttggaaacttttcctacatattaggcgttagtatgaggacatttgtttgaattatagaaatttgccctgagctgaactgggttgtgttaacacattggtagagctatgattccttcccagttctaagagatacgatctgtaagtccctatgtcaccacattgcttgagatgatcattcagttacttgtcaggatttctcctcttcagagagatttttttttatagcacagattcctttgccccttttatctccttatctggatatgataagtggttatgagggtctcactaactattttgtgtttaccttttatatgtgtaaaactttgcagtagcatttaaagtgtaatttatttttctatcaagtgcactattcatttagtgtgttccagttttatatgacttgtattagaaacactgcactgagttgtttgtacactgaaatgagaactctagatgtaactctattcaaataaaccttcgtgagacattcaaaaaaaaaaaaaaaa

SEQ ID NO: 43568 - DNA, 752 bp, Homo Sapiens
tattcccccaggaaaaaggagccccagccttctgaggctgtgggaacctgtggctgccttggacgctgcagccccctcctcaacggccaggccagagtctgagacaggacccaggcaccctcacggcaggcctctctggggcctagaagtcttctcaagctgacttcctacctccccctccatctctagataagtgtcatatatttgttgagggcaaaagactatggactggaaggcagaaagtgggatcctggccccactctgcctttcctattgagcaaccagctctgggctcagtttcctcacctggagggttggacccactcacctccactctagccccgaaccctcctgccccaggcttccaggccccatcaggcctgccctgagttggccttgtccactccttgaggcagatcctggcactacctcacagctccctggggacggccactccctggctgagggccctcccctcccctctgcctgtccggaacgggaggctgaaatggaaaagctgccttggccctgcttggctgagtcacaaggggcagtgggctcttgggtgctgttccaccctgaccctggctcacccctcttcctaggcctgggggcaggcagttcctaccatgtacccctctcaggctgcctgcctgacaaggtcagcatcatttgctctcctgaatttatgaggtttatttatttttctctttcctactcctattaaagaacctcgtcccagtgaaaaaaaa

SEQ ID NO: 43569 - DNA, 797 bp, Homo Sapiens
  misc_feature (11)..(11): n is a, c, g, or t
  misc_feature (766)..(766): n is a, c, g, or t
ctgttaccagnaaagccaaattttataatgcgggtgaaagaaaaatatagattaaaattgctgggcactgaaaaggggtgggagttggaaatcagaaagaaagagaaatatttcattatgttaatgaagaaaagagaaaattgaagcataaatgtatttttgaattagttattcggtagctgagaacttattaagggatttaggaatttaacctcctgatgtggattcctcaaagacttgatcggagaatactcttgtttcaccattatgttggtacagtatagtaccattattttatgttgtgccagtgaatccagttgccagaaataagtctgaatgttttcatgcatctttttcttaaatgcaagagcttctactgactcttaacaagcatgcttacccaaattttgttgcatgcttttaagtagcattagctatgcacacttgacatttttaaatatccctttcctagtgtaccagccttcacaggataagaggactgggaataaagtcagatgtaatgtgaccctagaaaactgtagcaagcttcagaaataaatcttttgatctttccctatcttgattagatccaaagtcaaagcaaccatacttcacctagagaagacagtattggcaatcatgacacctgtaataaaaacttgaatccaaagtcaaaacttaagcaagatacaaatgtgctgcctgcagttagtcctgcatgggaataaggactagttatttttttagtgctgcatttttttaaagntggattgctgctatttaaaaaaaaaaaaaaa

SEQ ID NO: 43570 - DNA, 614 bp, Homo Sapiens
  misc_feature (600)..(600): n is a, c, g, or t
tgtactccagtctgggtgacagagtgagaccccatctctaaataaataggtcaaacccttaaaaatatttaaattcttaaaaaattgaaaagattattcttctcaaatttagttgagctttctaagagaagcaattggctttttcccacttcaataatcattttcagtttgactcatacagttaacacaatgtgaatttcttcctcagcataacagagttatagaatgacagggctggaagtgaccttagagagtatccagttctttcattttacaggtgaggcaactgagactcaaaggtgatgtaatttgtgcaaagattatagctaattagtagcagagccctgactgggacatagtttgaaggtgaaaaacttcaccaagctacctttcttgaaaggtccaaatgtttatgttttcaactactctttccactgtaccataactttcactacatattaaatgacactttataactaatataataggacaatcatcaatgcatatatagccagcccttcatatctgtgggttttgcatccatggattcaaccaaggaggaattgaaaacactgagaaaaaaaaaaaagaccacacaanaaaaaaaaaaaaaa

SEQ ID NO: 43571 - DNA, 786 bp, Homo Sapiens
gcgtccgagtcatctggacatgaattaaagtatatgatgccagcctgggcaacaagagcaaaactctgtctcaaaaaaaaaaaaaaaagatataaatcacaataaataaataggtcaatacaaatgttagccaggcgtggtggcacatgcccatagtcgcagctactctggaggcagaggcaggaggatcacttgagcccatgaatttgaggcagcagtgagctatgattgtgccactgtactccagtctgggtgacagagtgagaccccatctctaaataaataggtcaaacccttaaaaatatttaaattcttaaaaaattgaaaagattattcttctcaaatttagttgagctttctaagagaagcaattggctttttcccacttcaataatcattttcagtttgactcatacagttaacacaatgtgaatttcttcctcagcataacagagttatagaatgacagggctggaagtgaccttagagagtatccagttctttcattttacaggtgaggcaactgagactcaaaggtgatgtaatttgtgcaaagattatagctaattagtagcagagccctgactgggacatagtttgaaggtgaaaaacttcaccaagctacctttcttgaaaggtccaaatggttatgttttcaactactctttccactgtaccataactttcactacatattaaatgacactttataactaatataataggacaatcatcaatgcatatatagccagcccttcatatctgtggggttttgcatccatggat

SEQ ID NO: 43572 - DNA, 1033 bp, Homo Sapiens
gctgctgcattttttatcacctatgaatatgtgaagtggtttttgcatgctgattcatcttcatatttgacacctatgaaacatatgttggctgcctctgctggagaagtggttgcctgcctgattcgagttccatctgaagtggttaagcagagggcacaggtatctgcttctacaagaacatttcagattttctctaacatcttatatgaagagggtatccaagggttgtatcgaggctataaaagcacagttttaagagagattcctttttctttggtccagtttcccttatgggagtccttaaaagccctctggtcctggaggcaggatcatgtggtggattcttggcagtcagcagtctgtggagcttttgcaggtggatttgccgctgcagtcaccacccctctagacgtggcaaagacaagaattatgctggcaaaggctggctccagcactgctgatgggaatgtgctctctgtcctgcatggggtctggcggtcacaggggctggcaggactatttgcaggtgtcttccctcgaatggcagccatcagtctgggaggtttcatctttctgggggcttatgaccgaacgcacagcttgctgttggaagttggcagaaagagtccttgaagcagagacaagcctcacctccacttctgtcaagagaggggcctgcagtgcaaaccctcttccgctgagcagctgtctgaactataggccccagtgctgaagaccagttgtgctaagataccggcatggagattgtgccatccgtggtataggctggctggtatgaagtcattggcctgtatgccagagagctaagagaagaaacgggggctgtggcggtactctgaacaatttcctcagaacycttaataaataaktttggtaatgctgrggcmggycytttagagyttcatttgrtytgtwtctgatctttcattycykgccmctgatggggggttcagcagaaggaagagggtgwtaatytaaaaaaaagttkttkttttttttttgggraaag

SEQ ID NO: 43573 - DNA, 775 bp, Homo Sapiens
  misc_feature (722)..(722): n is a, c, g, or t
taaaggcctgcctgccgcaggcttcggaggcgtctgctgagtcctctcacccgcatgggtctggggaagtgatcacgctcagccgacggtctgaccacacttcatcctccccccggggccttctcatcttgggagatgactcctcttcagagcacctgctgcaggactggatcccacccccctgcaggtcctggggtctcagggccttggagcagcccatgctggaatcatgtttacctcctagtgcaaccgtcccctacccagggactgtcgaatggccccacggaggggacgggcggcctgctgagtgaagccacaaataccgagtggacttgaccccggcccccactaggctgcacacctagactcgccctgccagggcctcgctcttcccatctgaaaagtcctggtagttcttgaggtttacttctcaaatgaaatatttttagtaaaaagtacaggtatatctcggagatattgtgggttcagttccagaccacctcggtaaagccaacatcacaataaagcaaggaagcgcattgttttagtttcccagtgcatctaagtcatgtttactgcatattgcagtccactaaatgtgcaatagcattatgtctaacaaatatacaaaccttaatttaaaaatatttactgttcaaaatgctgacacagaaacgcaaagtgagcacatgctgttggaaaatggtgccaaatagacttgnctgatgccaggctgctacaaaccttcattttaaaaaaaaaaacagtattcaca

SEQ ID NO: 43574 - DNA, 538 bp, Homo Sapiens
  misc_feature (48)..(48): n is a, c, g, or t
  misc_feature (103)..(103): n is a, c, g, or t
  misc_feature (205)..(205): n is a, c, g, or t
  misc_feature (213)..(213): n is a, c, g, or t
gcacgagggacatttaaaattcaattaggattaataaagatggcactntcccgttttattccagttttataaaaagtggagacagactgatgtgtatacgtangaattttttccttttgtgttctgtcaccaactgaagtggctaaagagctttgtgatatactggttcacatcctacccctttgcacttgtggcaacagataantttgcagntggctaagagaggtttccgaagggttttgctacattctaatgcatgtattcgggttaggggaatggagggaatgctcagaaaggaaataattttatgctggactctggaccatataccatctccagctatttacacacacctttctttagcatgctacagttattaatctggacattcgaggaattggccgctgtcactgcttgttgtttgcgcatttttttttaaagcatattggtgctagaaaaggcagctaaaggaagtgaatctgtattggggtacaggaatgaaccttctgcaacatcttaagatccacaaatgaaggga

SEQ ID NO: 43575 - DNA, 662 bp, Homo Sapiens
cccacccagatgcccctttctggattattctgggggctgcagttcgactctgtgctggccagcgagcgcccagctcctgacactgctggagaggccccagccgcttggcgatgccagccaagctctgcagtcccagcggtgggacctagggaggcatggtctgccctctgcatcctctggagccagccgagcaggaggcctaggagggtcctctgagactccagacctgaggcgagaagggctgcttccctgaagctcccacagtcccatctgcttcaggcccccgccttggcctgtgttcttcctggccgcctgggtccaatgctcaggtgctggggcctggttcccggagaagtgtgccttctctctcccttttcagggaccgccccctgtctctcagggccaggcctctccctcctccaggaagccttcccctaccccttgtcgcccctccctcccagagcacctgctgtctgggtggctcactcagcacttggtgtggccttcccttctacctagcgggatggggctcccccaggggctgtcccggaggcggtgggcctggttaaataaggcagggtttatatgcactttcttccgatctgtacctgagaggtttgtggaaaagatggcaaatggggaataaaaagattttgtgtcaa

SEQ ID NO: 43576 - DNA, 695 bp, Homo Sapiens
  misc_feature (576)..(576): n is a, c, g, or t
  misc_feature (587)..(587): n is a, c, g, or t
  misc_feature (637)..(637): n is a, c, g, or t
  misc_feature (666)..(666): n is a, c, g, or t
ggtcagacaatgaaaccttctcctctggggctttgttgccaggaagattagaactaaatttatttttttcatttctgtcatgaaatcattccagatacctcttttcttctttccaaatggttttcacatgtgtttgaaatatttgtactttgaattgtcggattttccatgtcctcctttctcctttgtgcccagcctgagtcagcaccatcccgcattcagaacctcccagtgaaagggcagccttcattttgagaaggtggaaggtgttagggtttgggagacagctcatccaatctcccaagtctcatggtggatttgtgactgtgagagtttccggtttaaaatctgaaaagccagatatgcctgtttccttttcccagcaccatgcctgtggaggggacagtcagacccagaggtcctttacgtgtggatggagttcacaggcgaatagaggagaggaccaggggacgtggcttgtcccttttgtccaacaaagcattatatttttaagaatggcagtcctgtttgctgaagtgttcataagataacaataggcttgaatctccaattcanatgaatgtcanagcacatatctttaatatgctgaatgaaatattatttttgtatccattanacagtatattgatctcttttattcttatnaaataaatgctctttttcaaaaaaaaaaa

SEQ ID NO: 43577 - DNA, 787 bp, Homo Sapiens
  misc_feature (688)..(688): n is a, c, g, or t
  misc_feature (723)..(723): n is a, c, g, or t
ctgtggcccctgtcccgggttggcaccttcagttcagcacagcctgagcagtgagaaggtctgaaaggagagtatatagttaagatccttgagaagggctgcctgaggaactgacctcttaaagatctcaggatctttaagacaacaagttaggttcctactggagttacctgccagaatggcctcttaattaactcaggtaatgaagagctaactgtgttataatcatcttgcttttgcctgaatttggagaaagtattataattaagttcccagtatcagaaatgtccttacataagattaaaatatcttgatgactaataccattctatgagaaagagtagttatatgcccagactgtattaatttactttagaaactaatgtttgaagtaatggaaaaaattttaaattataaagctaaggtgcaataacatttgctacttatttatagaattatttgaagaattttgtttttgaagtaatgctttaaggagtataagatattcaagataaattatactataaaatgattttattgaaagttgaaggttacacaaattgttttaggtatgagcagaagaggttaaggtatttctaaaggtaacatatagtcaagagtttcctcaaaatagttatttggagaagaatcagaatgtctgtgtatttcttgtctgtttctatgttgncttatagctctgactaaatgtgtttacctatgcanaagatttattaaagcatagaaaaggtgaatgaataaaaatataaaataatttgtcctttttctt

SEQ ID NO: 43578 - DNA, 496 bp, Homo Sapiens
ccccgcagaacagtcccttcctaatagcagggatgctctgtcatggttttctgtaaattatcgtgtgttgggaagttctgttgaggcttagtttgatcttccatggtggacacgtctgttctgtatgtaaaaggcattacaattgtgttttagcagatgagacttgaagcctttccacagtccttgtgctctgagatggctgttgagctctgctcaactgtcgtagctgaattctttctttgcgctgaacactgggcagcctcaccatgttgccaacgtgcttctggggcccctgtcactgccgccggatgccgcgcacacaggcagagtgccttggcaggtttgtgcaccccttggcgagccagaactgggaaccccgcggggtgaccccttctcatggggggtcggggaggggagtgcctatttttaatcctgtctgtttgttgcacaatggaaatcactgtgatttgtacatatgccctaggaaaattttact

SEQ ID NO: 43579 - DNA, 1027 bp, Homo Sapiens
caagacagcactggcttgggttgtatttttgcagccagttaactttgcatcaggtctacacagtccttgcagcctttgatttctccagttgtagagatttgaaatggggtgcccgggttcctctcgtttttccttcaatctacctagcatgcattttacacacattggaggagtcgtatgcactgtttttctgttgctgatggaggcaagcaggccttctaattagtctaacttaaacggatgggattcacttaacaaaagcaagaagaaaagcacacgaacaggtgtcttaatgcatttggatagtttctttgcggggtgtgtgtgtgtgtgtgtgtgtcttggtgaaggtgaggggctgtattttcaccaagccttttcataatcaagtttgctttgcaaaccttatggccttgcaccccgcagaacagtcccttcctaatagcagggatgctctgtcatggttttctgtaaattatcgtgtgttgggaagttctgttgaggcttagtttgatcttccatggtggacacgtctgttctgtatgtaaaaggcattacaattgtgttttagcagatgagacttgaagcctttccacagtccttgtgctctgagatggctgttgagctctgctcaactgtcgtagctgaattctttctttgcgctgaacactgggcagcctcaccatgttgccaacgtgcttctggggcccctgtcactgccgctggatgccgcgcacacaggcagagtgcccttggcaggtttgtgcaccccttggcgagccagaactgggaaccccgcggggtgaccccttctcatgggggggtcgggggaggggaaatgcctatttttaatccctggccggtttgttggccaccagggaaatcccttgtgaatttgaacatatggcccccaagaaaaatttttaccggccgggcctaaatttaaggaaacaaaaaaccggcggaattccccaggtttttggtttaaaaaaaaaaccttgggaattcctttttcacaaaaaaaaaa

SEQ ID NO: 43580 - DNA, 591 bp, Homo Sapiens
gcagttaggtgtacatgtgactgagtgttggccagtgagatgaagtctcctcaaaggaaggcagcatgtgtcctttttcatcccttcatcttgctgctgggattgtggatataacaggagccctggcagctgtctccagaggatcaaagccacacccaaagagtaaggcagattagagaccagaaagaccttgactacttccctacttccactgctttttcctgcatttaagccattgtaaatctgggtgtgttacatgaagtgaaaattaattctttctgcccttcagttctttatcctgataccatttaacactgtctgaattaactagactgcaataattctttcttttgaaagcttttaaaggataatgtgcaattcacattaaaattgattttccattgtcaattagttatactcattttcctgccttgatctttcattagatattttgtatctgcttggaatatattatcttctttttaactgtgtaattggtaattactaaaactctgtaatctccaaaatattgctatcaaattacacaccatgttttctatcattctcatagatctgccttataaacattta

SEQ ID NO: 43581 - DNA, 584 bp, Homo Sapiens
tattttacttgattgtatacatagaccctttccagaattcacatgtaatctccagtgaacttttaagtggttaaaacttgtattcatgtgaacctttgcacatttttttttttttacttctttatctacacctacagattttctcagtaatgtttttgttagcttttggttccattttttattgtgcatgcagaatgtacattgatgcctgtgaccttaggtttattaaaggctaggtttatttgggcagtattagaaacaaaatcatggatcaagagatactcttgataatttgaatagggccaaaacaaagttggtgacctaaaggcttgttagtgatgtggagttcctacatgcagtgagtggaaaatgaagttcgttttctcttaggaaaatgggcagctgtcttctgcctaatgtgtatttttcatgttaattctgacagttcaccaaatagctagtcatggagaatgcaggcagttaacttaatatccctccaggaatggttcctacgttgtgtattatttggtttcttttacttacctgcttgaatacttgaataaaccattcaccaattttaaaaa

SEQ ID NO: 43582 - DNA, 747 bp, Homo Sapiens
  misc_feature (31)..(31): n is a, c, g, or t
tctcggacgaggagaaagggaacacatgccncactttggaggaattctttgaagaagccattgaacaggcagaccctgaaaatatggtggaaaatgaatataaggctgtgaacaattcaaattatggttggagagccctgagactattagcacggagaagccctcacttcttccagccaaccaaccagcagtttaaaagtttaccagaatatcttgaaaatatggtaataaagctagccaaggaattaccgcctccttctgaagaaataaaaacaggtgaggatgaagatgaggaagataatgatgctctactgaaggaaaatgaaagtcctgatgttcggcgagacaaacctgtaacaggagaacaaatagaggtatttgccaacaagctgggtgaacaatggaagattctggctccctacttggaaatgaaagactcagaaattaggcagattgagtgtgacagtgaagacatgaagatgagagctaagcagctcctggttgcctggcaagatcaagagggagttcatgcaacacctgagaatctgattaatgcactgaataagtctggattaagtgaccttgcagaaagtctaactaatgacaatgagacaaatagttagcttctttttttttttctttttattaaaactgtgatagattttgttaccaagcagcatttgataagaggccccactggttttggtaaacaataaacttttttataaccaaaaaaaaaaaaaaaaa

SEQ ID NO: 43583 - DNA, 720 bp, Homo Sapiens
  misc_feature (442)..(442): n is a, c, g, or t
  misc_feature (676)..(676): n is a, c, g, or t
gcacgaggcgattttagaaggtgaggggaggggaggctttttctacctgagaaggggagtgtctttgagggccttaaaaggaccatggcccaggaatgggggcgctggttgggcttggagctcaggctgctgtggatcccggcgcatcagttctgacttgccttacctgggtggacagcagtgaatctccacctgtcttctccagggagctcccatgttggggctgaagacgagcaggggcaacctgccagcatcacagaattcagtgtagtttatacatttcgattcctttcatctcagcaaaatgggcactgccagagccatttctgatcacaccaccatcctggaccatgtgactggaaggtgggtaaccaagttcaccagcaataaaacccagcgcccaggtagcctccagcagtgcggcttcctggcaacaaggtangccctggtgcagggcaagccgcagcgaccatttcagataccgtccacagccaggaccgctgagaactgggacagtttcctgggatgagtgccagcctgagcctgcatggtgccgccgagcccggggtggaggagggagccaggcttcgcttcaaggcggcctctaccttttctcagaatggtttcctgattgtgtcaatgtgaaagttaaataaaattatgtgccaaacctganaaaaaaaaaaaaaaaaaaaaaaacacttaatgggcggccgcaag

SEQ ID NO: 43584 - DNA, 488 bp, Homo Sapiens
cacgcgtccgcttgccttcgggtttggagcagtggcatcatcccaccaacctgagccatgaaagggctgagcagaaagttaaatggtagtttcctgactggaagccacacgtaggtcacttgagtagtcaggaagcacagtgggtgtggagccatcatctgtcttgggctggttcctcccaatctttgtccagtggtataaatggactgtctgctgatggccatacgcagcactggctgttaagatggggaaggggtacatcaggattccactcatagccctggttcgttattgttactcatggctctgacgtccccaagccctcttgaatgttgcaagcaatgttaaatatcacacctcggtctccttttgagcagcccaggtacctaaagcaaggtcaccaaacttgggtttaaacttcagttgccatcacagcagggttcaggttatgcagtttttgcagtgtggagttgaacgctgggtaaaga

SEQ ID NO: 43585 - DNA, 656 bp, Homo Sapiens
acgcgtccgggagaaggggcaactttccttaactggcagttgagcacatagtacatttcccctctaccaaacggaacacttggattccatctcttctctgaggagctcgacggcataaatcagaagcaagcacagagtttgtcaggtttgaagcccctatgatggtgtgtgtcaaatcagttgtagctaatctgtccagggagaatactggcttcattacacttgtacagccgagttcttcccgcattactgctgtttaatagaacgtgattagtcatcgccgagaagaaagcatattagccgaggaggtagtcacgcggcacgcgccggtgattgccacgatgtgattgcaatactcttagaagcaccatattatcccagacatgttctttcaagcccttggagccctctctaaattcactgtcatcatttagtatctgtttaatttttcagtccaaagagaggaaatcagtcgctgagtattatttgactccggtctccttggtgcaaaaacaaaatgggaaaaataaataagaataactcagaaactcaaaaggaaaccacaaattcagctaataatagcatttcgagtatatttcgtaaactaaggaaatacacaaaaggctgttttttccgactgtaagagatatttgatg

SEQ ID NO: 43586 - DNA, 561 bp, Homo Sapiens
caggattccactcatagccctggttcgttattgttactcatggctctgacgtccccaagccctcttgaatgttgcaagcaatgttaaatatcacacctcggtctccttttgagcagcccaggtacctaaagcaaggtcaccaaacttgggtttaaacttcagttgccatcacagcagggttcaggttatgcagtttttgcagtgtggagttgaacgctgggtaaagaagggagagctgactctccattgcttttctagtggaaaccagccagtttgacggcacggtgcggatacaggactccatcaggctagtgttggggaaccagcccggcagccttccatgtgaattccaaagctgtttcaacactggctgataggcagacaaaaggttacttgtgtgtttctctgagaagcggtgtaaatgaagtcaccttagaatatattctgtgcggatgcttatattttgttaacttcacgacttatggcatgtcttatttaaaaaaaaaaaagtactaggtgcaaataacattatgaagtggtatttaattaaaaatccatgca

SEQ ID NO: 43587 - DNA, 610 bp, Homo Sapiens
ttccttgatttccaggatagtttttcaataggaaagcaataatggcagtagttctcaaatgggctaggccttttttatattgaagcaataattccatttttaccctttgaaattttgtttttttgatttttgatgtttggtacaaatagaactatatatatttaggtaaaatagatctatcgtgtttaaaaccaaagaaatcaatggaacccttgcacaaaaaagtgtgataaatatttttaaataaaaacttaatacaaatgtaatttgttaatattgtttcatgttttatgtgtagatctaatagctgaactgattcaaactgtaataagctcatcaatttcatttctatgaaaatgtgctctgttgtcacaggatgtttctgttgattttattcatttcctgggaattggtaaacatcatgttcctgatgataacccagtagcaaaaacatttgtactgagtggtacaagccttggggactgaaaaaaaaaagattaaaaccattaaaaagaaactcatttttacgctgaatgaacatttatatgattgcattgggaccagtcatttcctaagctacatatggccatcttgacagtgttttttcttt

SEQ ID NO: 43588 - DNA, 533 bp, Homo Sapiens
  misc_feature (517)..(517): n is a, c, g, or t
caggttgacactgaaaaaaaaacaaaacactgaatttttcacacctatgtctgcattaaaggctgttttactaccggaagttacatagacttcctgcagtcagctgctgtgccccagtgccttactggtcctttgtagatttgccttaatgatttgtacaaatgactgggaggcggggatgctgcctgtgtcctggtgaaccttaatgaaggggccgtcttaggcacagtgcaaaacaagcatttgtcctgtactgttagagccaaaattgtgatgagcaatactgataattgtccagtttatgtcatctttcccagattttaaaatctgttctagatattcttagcttgaaccacttttgattgtgaaatgtattaggtgttgtcccattattactgtaaaatgaagttttgaatcttcttgttaataaactgtggatttcccctctcaatttcttaaacaacaacaaaaaaatgcttgaagattgtctttgagtgtaagatctgccttttcaganagggagtgttagtttg

SEQ ID NO: 43589 - DNA, 760 bp, Homo Sapiens
ctccgtttaaaaaaaaaagttgctaaatctggccgtcctaaactagatggcagactgagaaatgtgactcccctccccagtaccttgttttctgtgtccttgtagccgtggtccttcagcatatctctgtgctgcagacaacacaccttcctgatggaggtgtccggctgttggagaagtctgggggcttggaaatcatctttgatgtttaccaggccgacgctgtggccacattccgaaagaataaccctggcaaaccctatgcccggatgtgcattagtggatttgatgagcctgtcccagacctctgcagcctcaagcggttgtcttaccagagtggggatgtccctctgatctttgccctggtggatcatggtgacatctccttctacagcttcagggacttcacgttgccccaggatgtggggcactgacctcacagctctgcagaggatggagcttgctccgggggaccgggactgtctgttctcagggaccatctcggctgcctcctgtacccagactctaacctgtagcttcagaggccagtctgggccttggccctgggtgtctgatactcacagagtgaaactgtgaccctctcccttccctgctgccttgcagtgacccctctggaactcaggactcgattttaaggacccaggaggtggggcagaagagaggactgtgtgcctttaacgagagggtgcctgcttcgtgctataaagccaaagccattaaaaataaaaaaaaaaaaaaa

SEQ ID NO: 43590 - DNA, 843 bp, Homo Sapiens
aaaataataaataatagctgattagggtaatcatttatttaatcagaataaagattatatccataaaatttacttgcagagaagtactttctttttgttttaaagacagggtctcactctgtcacccaagctatggtgcagtggcacaatcacagctcactgcagcctggacctcctggcctcaaggggatgatcctcctacttcaggaattatgccaccatgcccggctagttgagaagtactttcaaatagcaacatgaagcctttcctttaccatttgaaaataaaacatagttgtaaacataaaccagtatgtctttgtaaagccaataatatatcattttataggagcattgtcttcttgtgtttttcaagttgactatgtagttcaatgtcagtctccattttaatatcttgtttgtttatcagcctgagcatatttcattttaaaatgtatttgttgagaagtcatggtggttttttgtttttcacaagtcaagtagcttgaacactatcacttgtccaatgggaaagttgatgcttatctttatggcaaatgcttggttgaataatatatttgcaaagatgttaattctacagagagctaaataaagttaagatacctgtaaaacagtttctccagatgactttaaataagccttattttgtcaatctatgttactttagggtgttcaggttgtgcaaatacctaatgaatggtggggctaaatttgcctcattcagactgagaccgggctggtaaattcatttctacctataactgtgcttaactcaaaaaaaaaaagggggccgcaaaaataccctcaggccatttcctccct

SEQ ID NO: 43591 - DNA, 611 bp, Homo Sapiens
ggtcaaaagctgacagcctgtgtatgtgaaaagggaattgtaaatggactgcaatgtaatgtacactgtaatttgaatacaattactgtatctaaaaggagctgctatgaagtacctttcttatgttgctaggctactgtttctgaaagccctggatctctttgcaccaaaaatggtccagatagactctttttaaggatcttggctgctttttactagaaggttgcttttatgagcatatttatactgctgaaggatgagtgttaattttaattaactttgccgttttgtagagaaaactattcacaagataaattccaagtcttttcacctgtcaggcatgcatattttaatatctgtttggatagtcagaagtagaatcataaaggtaaaatatgagttgttactttgtttcttcgatgtcatattttatgtgtaatatatatgtaaagggccattcttaagttctctccttaaacttaatgctgtcaagtgttagatgtgtgcatgtgaacttgttgcactgcagaaacatattcagagtttatctatgtaacttattcactctgtaaatacatttaaagtttttgggatgtaagcttaattgatat

SEQ ID NO: 43592 - DNA, 910 bp, Homo Sapiens
  misc_feature (737)..(739): n is a, c, g, or t
  misc_feature (799)..(799): n is a, c, g, or t
  misc_feature (907)..(907): n is a, c, g, or t
tgaaagcggtcggtccggattcccgggatggaagaacgactattgggaggaggtacaccagagattgctcagtgtgcagcctgctacctcacttttggctctggattgcctggtggtagaagggaagagtattatgtagttagcaccttacatatttgatgctcaggaagaaagtgcaagaagatccctaatagaacattaaagattcttaaaagtttttgaagtaggctgcttggggtgaccagccccacccttacatctccatagttggtacagttagcttgtagcagctgaagctgatgcctggagatcactgtctgttggtctgatctcagtatcatactgagacacctcccctgagccttacctacttaaattggtaaccgtcctaccaaaatttgtcaattttaatcaagtgaggcaagttgcaagggagccagagatacgtgaaaaaagaaaagcagaaatactgatactttctaagaaagaagttgtaataatttctttggcacattgacttactgatatcttttgaaatgcatagatgactcttgtgaaccaaagagagcagtagtggttattccccggcgcaataaaaatgcctttgtgtatcacttgcgattgccagtcatttctgtgccagttgctttcattccagagaatggcctcattctccaaaaaaaagatgatgattttagaagtaggatttccctacaattatgtggtggggagggacnnngcgggatttatcatccgtctgactctcatacgtataccattagtttaagacaagatgggnggagaggataaagctgaagtactaacactcagactagtgtatcgattgactggattcactcgctcgctagatatgacaagtagagatggattggatagttgcatgaanaaa

SEQ ID NO: 43593 - DNA, 633 bp, Homo Sapiens
ggggactgcgggccctcagtccttaactggaaagtgaccgtccactgccccatggagcccatctggacacagcacagccccaaaaccgttagcagctggctctgtttccaagcctggggaggggttcctcagtgcaggagttggggacaggctggggatccaagctgcttgagggggtcaaccttggaccaaagttgccttaagcctgtggtaaaagggcttcagggaaggtaagtgggccacctgctggaagctgccagctgcccggctggcaatggtgtgagtgtcttggccctgtccctgccctggggtccagcaggtcatccctcccttcttctctctcctttggcgtttgttcctgtagtcactgggctaatctccccctagcttcaagctgtacatagggcctcccagtgcaaatcctcctgcccataccgtgcacccttagaagcctgcgtgtgcatagagcgccccctacttcccagttaactcccagttcttctccctgagcttggtatttgtcatgtgccaactctgactctgaggtgggcagtgagggaagcagccccgggcctgcttgcttctggtcccgaaatgttcgtttcttctgagtaaatattactatataattat

SEQ ID NO: 43594 - DNA, 398 bp, Homo Sapiens
cagagctcggtacccgttcgctactgtgtggagaggaccattcccgttttgctcaccagaactggagattcttctgcccgcctccgcgtcacagctgcaaattttattcaggaaatggccttgtttaaagaagttaagtctctccaaattattccatcctacctggtgcagccattgaaagcaaactcttcagttcacctggcaatgagtcagatgggcctcctggcccggctgctgaaagacctgggcactggcagctcgggcttcaccattgacaacgtgatgaagttttcagtgagtgccctggagcatagagtgtatgaggtccgcgagacggcggttcgaattattttggacatgtacagacagcaccaggcttccatcctggagtaccttcc

SEQ ID NO: 43595 - DNA, 615 bp, Homo Sapiens
aaagacgattctgctgtatttgttaaacgttgacatttggttctagggccttgagtatgtgccacgtgcttgtgaaatgctatgattcacatgtaacatttaaacattaatttaaaaagggaaccttggagaattcttttgttcactagttcctttttttctctacatttttaatttattaaacttgctgtgaaaacactttgattttctaagaggaaggtactttaagttccagaatgaacatgtagctgcactatgccagaaattaatgagggaagactttcttcctaagtgcttatgttttaacttatgttagtgaaaccactacaaggggtttcaggcgctgataacatgcttcacacctgcccttggaggtcacagtactaatttacttcaaatttagttatgacagtgtcactgtatcctagttatgtttacagcacaaataaataatgactgtcatacatccagaggagaccgaacctgcccagctgatgtactgttttatggaataaagtcacttgatcagaaggaattgaaacaatagatcattttgttacctactggagggatttttgtcttgaatttgtttccttagaaattctacaaaaaaat

SEQ ID NO: 43596 - DNA, 651 bp, Homo Sapiens
gcagtgctttctgacctgggcggagtgaagacgctgctggtggctgaggccagtaacatggggcccctgcccagccaccctgaaggctgggtaggtccctcttttcaccaccagttttccacatctgtgtactctagattaacaaactctggataaacagatatttacattttaaactcaggcctacacagagtagttttccttataaggagcatgtatcacttagcaagaaactaaaaatggcaaatgagtttttcatcctttaagaaaaaaatcagctttagaattctctgcggtcagttgtgtgcaatgcaacaaaactacctttcagtaaattacttagttatttatttcagtgttttgtttcttttgatactaagtttccctttcaataatgaatgatgtgaccaaccaaggagaatttgtttgttctgtactaaaattatattttacagttaggaattataaaaagcaagggagcatctttaaatgttttttgtttaagcgatgtcttccatccaaagtaagaataatactctcggaaggtccttttggtgtcatgtcacttgctgtatgtggcagccttacagtgccacacttgggtactgaaaaatcaataaaacgaaagttcatcatcccataaaaaaaaaa

SEQ ID NO: 43597 - DNA, 645 bp, Homo Sapiens
cacgcgtccgcattaaaattaatgactaatcaggaggcaacgtaaccaaaagcacagtgaatgaaagttttcatggtaggttcaacatgggtttattgctagaaagatccaggggatagctttaggtttaacttcggctcaccaacgtaactttctaatcatttatttcagtaatagctagaagtgggtctgaatgttttcccagagtctgatacgtgtttttttttgccagaagagaggtcttcaggagacttcatttaaattctgattattaaactgaggctttaattgatgttaatgccttatgtcaaatgtaaagttagaatttgctagggctgggatagggagtgatatttctaggacttagacattgaaaactaattcagcctgtagtaacctggatggttttcaatggcatggttagtcaaattcatggttttaaacttagaagcagctttcgggggagagggtaggttggagcatttattacatattttactgtttaatgtcttaaccgtgggccttttaatttgtaaacactgaaatgattgttgggctgtggaaaacatttacctatttaccttggaagttttaaaagacagtccactttttagcatgtgtgttgtgtccagcctgtggtcgtct

SEQ ID NO: 43598 - DNA, 707 bp, Homo Sapiens
gggccgtttgtaggtatcagtgcttcaaatcggcctggatgtttgaggtgtttcataggggcttttcgtttcctgtcaactataaaagcttaaagactgccttgcaagtttacgacaaggaggttcagtggacccttggagccatcctctacaggacccgctttctaccattaagagacatccagcaggaggccttccgagccagtcacacccactggcggggcgtttcctttgtctacaaccactacctgttctctggctgcttcctggtggtgctgctggccatcctgctgtacctgctgcggctgcggcgcatccacaggcgcactccccggagcagctcggccgccgccctctggatggaggagggccttcccgcccagaatgccccggggaccttgtgatccagctcacagctccacgaagactcaaaaggaaaagccatttttgcctcagggtttctcctctttattttcctgtggttttgttttttctttcccttttttgttcctccaaacaaaaacaaaatgcaggccgagcgcggtggctcacgcctgtaatcccagcactttgggaggccgaggcgggcggatcatgaggtcaggagatcgagaccatcctggctaacacggtgaaaccccgtctctactaaaaatacaaaaaattagctgggtgtggtggcgggcgcccgtagtcccagctactca

SEQ ID NO: 43599 - DNA, 364 bp, Homo Sapiens
aaaaaaaaaaaaaaaaacttaagatggacacagctgactggacccccatcctgcctcacccatgggtgctgcaccccagacccatcctgccacttctatgtctctggaccacaggatggtggtggcattgcaggttggcaagtgggctgatggggtccgccctcctcactgctgagctcctcacctggacagtctcctggacgaggagtttccagctgctggctggagtctcaggccaaattgcagagggtcctccagggtcctgaagagcactggactaagagtctagtggttccagggccctgaccagtaggtgctcaataaatgtttgttgttgaaaaaaaaaaaaaaaaaaaaaaaggac

SEQ ID NO: 43600 - DNA, 639 bp, Homo Sapiens
gcacgagctgtggccttcagcaagtggcaggagcaggcgctggagcaggccccgagggaggcagagcccccgcccgtggaggccatgctcacacccgccagtcagaatgacctctcggacttccgcagcgagccagccctgtatttctgagcccagcactgccaggaccaaggctgagcccagctgtgggagtcccggaagctgggcagtagccagggactactgcacccgcttctgccttgtttggcctcactgtatcccacccacccctcctggccctggaagcagctagggtgcctcctgccatcggggccaggtctgggtctcactccccggccctgatttgggagggtccaagggggaagtggggtggggaactgcctgtgggtgagtgccaggggcctgctgggtggtggccatctgcgacccggcagggggctgtgcagattctgcacctggccattccctgtcctgtctcctcagcctgcctcacagtggccatggggtgtcggggtgaagggctgtcccagctacttgtcctctgcaggaccctaagcccctgcccgcagcccacatgccctctgtgatgagtggcgtctttcctgcctctgatgatggactcaataaacagcactggac

SEQ ID NO: 43601 - DNA, 897 bp, Homo Sapiens
aagagctgtttgcctatccctgttaatgatggttgtggtttaagaatcatcctcgtcacgtttgtgttcagatctcttatgttataattagatcagagactggtagcatcgtttctctctctgaaagcaccagtgcccagagtctgctcggtaataaaattatggatccagattgttctgagagacgaagatacttgctgctgatagaggtgaaaacgagattgatccgtctggggttttacggtgtgcactgggtgctgcacagacttgtcaaggtttgctacgtcctctgggcatctgcaaaaggccctgctctctggagtgttgtatatagtgtagcaaaagagtatttatacatcccaccaatcaaaacacagctttattacctcatgcgaactcatacaaaccaatagaatttcaacatgttctgtagcttagagtgctcacttactacctctgaacaatactcacgctgtagtttgtctctttcttatctttttgcatcttgtaattaactctttgtttcccttcataaaatgtaatgtacattgtaatcttttaaaagaaaaatcagggttgcacttgcaacttttaaaaaaccgagtgttggaaacatttgggtcttaattcaaacacaggatcggtaaaactgttgtaaatactgagaaacatcttggaatgttcttcatcttattactaatccatgcaaaaaaaaaaaaaaacggcgggcactaaattgggaggcttccaatttccacattccgggaccgggtttttcccctgttttattgggcccccctccttttctcctttggtttttgtgcgcccgaacggtggtcctcaaaaaattgggggggagaacactgttaaaaccggccttcaacggtacccgctgaa

SEQ ID NO: 43602 - DNA, 762 bp, Homo Sapiens
  misc_feature (677)..(677): n is a, c, g, or t
ttttgctactcttatacaatggaatcaatggaaatgtcatccagccactgaattgcctattattatatctaaaaagtttctaagatgacagttatcactattttgttttatctccatgctgacatttgaaagaaggtactagtatccctctagccagattgcttagtttttcgttaatcaaacaacagttgtactaaaggaaagtaaagctaggacctaaatcagaatcatagttgcctgcatatatggtaacaaggtcgtgtgcatttgctttcacagtgatgagtgagaggatgagaagaaattatttgacatttttctgtggttgaatagaagacacctttcttttgtctttaggtttaggaggagatactaagatacttggatgtttatcctatcttagtttggttggagtaataagagagaagaagagggtggactttggcttttcagtgttttttcccctaaagagtgatattgctgacgtttctatcaattttacacataatatgtggctatgaaaccatatatctcacttaagtaacaaagtaatcactttgtctatcactaagtaatagacaaaaatcattgtctattatttaaagccaacaaaacagtgtaacagttttaagttcaataatgttaagtattgtatagaaatatattggaggcaaagntcagttgatgacaattgtgtatatgttactgatgctgtaaattatttttaataaagaaaattgtattatcaaaaaaaaaaaaaaa

SEQ ID NO: 43603 - DNA, 522 bp, Homo Sapiens
aggaaccccatgtgtgtggagactgtagggtgagagcacacaattattagcatcatttctgagtgatctcacagattttttttcttgtgtttgttttgctttttgacaactgcttctcccacgttccttgcaattctattctctcaccttcactttactatttgtattcgatggaccaggataattcaggcaaggttaccttgtaaacttgaattggccacacaccatgttgtcacccagctggctatgaagtgaataatggtactgaaagtaaacctgaagacctttctcagatctattttaagtctgagtctgaccaaccatggaaaatattcgacatgaattaatgtagagaactataaagcatttatgacagctccaagaaaagtcatctactctatgcaggagatatgtttagagacctctcagaaaaacttgcctggtttgagggtacacagtaccattttaatcttctgaaaatatctgtattcctgctctttttctgctgtcactgtcaatctg

SEQ ID NO: 43604 - DNA, 576 bp, Homo Sapiens
  misc_feature (558)..(558): n is a, c, g, or t
aagagctatgacgtcgcatgcacgcgtacgtaagcttggatcctctagagcggccgcctactactactaaattcgcggccgcgtcgaccgcttgggattctaggaggaaggaaggttccatggacatgtaagtacagcatattcccctcagtcttctaggagggcagagtgaatcccagaactggtaagattgggaatctgagcattgccactttaatcttagaatatttatcattttgacacatcctgttttttagagaggaaaacaaacacagtttctgcattggtagtgtaaagcataccttgttaggaacgtgttttgtaagacacatttgggttgtcattctagagcatgtcaaactttgtacttcaaaatatatttagtatgattgttagtggtaacatatatcaaggctttgaattaactgttttatttaattttcacaagaagcacttattttagccataggaaaaccaatctgagctacaaatagttctttaaaataagcccaggttatttagctattctaagaagtgccgacttttttcaagaagcangcattgtaggacagctga

SEQ ID NO: 43605 - DNA, 614 bp, Homo Sapiens
ccggccagaaatagggatggaagtgcatcctctgggaaaaagataatggcttctgattcaacatagccatagtcctttgaagtaagtggctagaaacagcactctggttataattgccccagggcctgattcaggactgactctccaccataaaactggaagctgcttcccctgtagtccccatttcagtaccagttctgccagccacagtgagcccctattattactttcagattgtctgtgacactcaagcccctctcatttttatctgtctacctccattctgaagagggaggttttggtgtccctggtcctctgggaatagaagatccatttgtctttgtgtagagcaagcacgttttccacctcactgtctccatcctccacctctgagatggacacttaagagacggggcaaatgtggatccaagaaaccagggccatgaccaggtccactgtggagcagccatctatctacctgactcctgagccaggctgccgtggtgtcatttctgtcatccgtgctctgtttccttttggagtttcttctccacattatctttgttcctggggaataaaaactaccattggacctagaaaaaaaaaaaaaaaag

SEQ ID NO: 43606 - DNA, 639 bp, Homo Sapiens
ccaggcttagctccagcctcccggcggcctctgcaggcccaagtcgtcctcaagtcggcctggaagtgggcctggaagagcagcaagtcggcctccctgggcccagctccgtcctctcgacggcctctccaggtgcaaaacttcctcgagtcagcctctccaggcccagctcctcctgcctcccagtggcctctttcggcccagcccagctcatggctctcggcggccttcccaggccccgcttttgacttttggcagcctcttcaggcgcagaacttgatctccagtcggcctttgcaggcccggcctcctgcgtctcgaaggcctgcacgggcccagcctcggcctcggcctcacagcggactctccacgcccagctagctctcgcctcactgcggcctccccagtccaaagctcctgcctttcggccacttcggcaggtccagctcctgcctgccagtggcctctttaggcccagctcattcctcacgtcggccattccaggccctgtttttcccttccggcagcctcttggcctctaatttgtttatcttttgtgtataaatcccaaaatattgaattttggaatatttccaccattatgtaaatgttttggtaggtaatttatttggagtgagt

SEQ ID NO: 43607 - DNA, 558 bp, Homo Sapiens
ttgactgctgccctcaatctagaacgctacacaagaaatatttgttttactcagcaggtgtgccttaacctccctattcagaaagctccacatcaataaacatgacactctgaagtgaaagtagccacgagaattgtgctacttatactggttcataatctggaggcaaggttcgactgcagccgccccgtcagcctgtgctaggcatggtgtcttcacaggaggcaaatccagagcctggctgtggggaaagtgaccactctgccctgaccccgatcagttaaggagctgtgcaataaccttcctagtacctgagtgagtgtgtaacttattgggttggcgaagcctggtaaagctgttggaatgagtatgtgattctttttaagtatgaaaataaagatatatgtacagacttgtattttttctctggtggcattcctttaggaatgctgtgtgtctgtccggcaccccggtaggcctgattgggtttctagtcctccttaaccacttatctcccatatgagagtgtgaaaaataggaacacgtgctctacctcca

SEQ ID NO: 43608 - DNA, 555 bp, Homo Sapiens
tgctcttccctgtcctgtggcacctctggatttatgcaggaagtgccaactctaatttcttttatgccatcacactgaccttcaacgttgggcagatcctgctcatctctgattacttctatgccttcctgcggcgggagtactacctcacacatggcctctacttgaccgccaaggatggcacagaggccatgctcgtgctcaagtaggcctggctggcacagggctgcatggacctcagggggctgtggggccagaagctgggccaagccctccagccagagttgccagcaggcgagtgcttgggcagaagaggttcgagtccagggtcacaagtctctggtaccaaaagggacccatggctgactgacagcaaggcctatggggaagaactgggagctccccaacttggacccccaccttgtggctctgcacaccaaggagccccctcccagacaggaaggagaagaggcaggtgagcagggcttgttagattgtggctacttaataaatgttttttgttatgaagtctaaaaaaaaaaaaaaaaaaaaaaa

SEQ ID NO: 43609 - DNA, 430 bp, Homo Sapiens
ataattttgtgatcagtaaaatgatattttaaagagtgatcttaaaaatatgacctggtcattgcacaacgtttgcatttgaaatgaatttttgtactatagggtggatatggagttattcagtgcaagtgtgtgcttaatatcaaaccctatgcaaggagctatgtctagatttttggtccaaatttgcctccttcaagcctactagtgtgagatggaaaaaaatcgattgctcttttaatattatttccattttgaaattctcgacacttgaatgaaggcagtagaggcctctttttggatttctcttctaataacaaaactttatttagggaaggtttccctgtgctatcgtaagtttgttttgagcactgcattcactttaaaattctggaggaacaaaggctgggcacataatcacaaagcccag

SEQ ID NO: 43610 - DNA, 442 bp, Homo Sapiens
aggttggagatgtcaagttgggttcacttgccatgcaggaagaggcccactagagggcccatcaggcagtgttacctgttagctccctgtggggcaggagtgccaggaccagcctgtaccttgctgtggggctacaggatggtgggcaggatctcaagccagccccctccagctcatgacactgtttggcctttcttggggagaaggcggggtattcccactcaccagccctagctgtcccatggggaaaccctggagccatcccttcggagccaacaagaccgccccagggctatagcagaaagaactttaaagctcaggagggtgacgcccagctccgcctgctgggaagagctcccctccacagctgcagctgatgcataggactaccgcaggcccggactcaccaacttgccacatgttctaggtttcagcaacaaga

SEQ ID NO: 43611 - DNA, 626 bp, Homo Sapiens
aattctggccgtcgacaattttaatgggatcaagatcaaaggaagaactatccgagtggatcatgtgtctaactatcgggctcctaaggactcagaagaaatagatgatgtgaccagacaactccaggagaagggctgtggggctcgtaccccctcaccaagtttgtctgagagctctgaagatgaaaaaccaacaaaaaagcacaaaaaagacaaaaaggaaaaaaagaaaaaaaagaaagaaaaagagaaagccgaccgggaggtacaggcagagcaaccatcctcttcgtcacccagacgcaagacagtaaaggaaaaggatgacactggccctaagaagcacagcagcaagaactcagagagagctcagaagtcagagcccagggaggggcagaagctccccaaatccaggacggcctactctggtggagcagaggacctagagagggagctgaagaaggagaaacccaagcacgagcacaagtcctcaagcaggagggaggcaagagaagaaaagaccaggattagggacagagggcggagctcagatgcacattctagctggtataatgggcgttctgaagggcgtagttatagaagtagaagtaggagccgagataaat

SEQ ID NO: 43612 - DNA, 704 bp, Homo Sapiens
  misc_feature (634)..(635): n is a, c, g, or t
  misc_feature (641)..(641): n is a, c, g, or t
atacatcaatggggacaagtatttccagcagatttttgattgtccccggctgaagttttctgagattccccagcgcctcacagccctgctattgccccctgacccaattgtcatcaaccatgtcatcagcgtggacccttcagaccagaagaagacggcgtgctatgacattgacgtggaggtggaggagccattaaaggggcagatgagcagcttcctcctatccacggccaaccagcaggagatcagtgctctggacagtaagatccatgagacgattgagtccataaaccagctcaagatccagagggacttcatgctaagcttctccagagaccccaaaggctatgtccaagacctgctccgctcccagagccgggacctcaaggtgatgacagatgtagccggcaaccctgaagaggagcgccgggctgagttctaccaccagccctggtcccaggaggccgtcagtcgctacttctactgcaagatccagcagcgcaggcaggagctggagcagtcgctggttgtgcgcaacacctaggagcccaaaaataagcagcacgacggaactttcagccgtgtcccgggccccagcattttgccccgggctccagcatcactcctctgccanncttggnggtgtgggggctggattaaaagtcattcatctgacaaaaaaaaaaaaaaaaaaaaaaaaaaag

SEQ ID NO: 43613 - DNA, 621 bp, Homo Sapiens
  misc_feature (610)..(610): n is a, c, g, or t
  misc_feature (621)..(621): n is a, c, g, or t
accagtggaggtgactggttggagcctggaattggaagcagattccaagctctggtggacaaactctccaggcctggtgggaatcacagctggggcagacctcatcctggctgcctggccacaggcccccactctctgccactggtggtaggacgatgcctgtgtggagagctggcttctctgctcccgcctggtccaccacttggctagagttcagagacaggaagtgattggtctaagctaacacagcaagttggtggcagacctggttctagaggcaaaaccttcttccagatgtgaatgaaacctgcaggcttcattttcctttctgagcagtgcttcttagctctttggagacacgaagcccttggaaaatctgatgaaggttacggaccttccctaggaaaacagataactgacgtagactcaaaaaccccaagcaatttcaggagccactggactccctgaatgaaacccatccctggactccaggctaagaacctcagccctggggacttcacctgctgccctttccttacctgtcacacattgagccccgagtcaaggccactgtacaagtagtgcccctccctccccctggccaagcctncttcccttgtn

SEQ ID NO: 43614 - DNA, 445 bp, Homo Sapiens
ttcatacatatagttcttatctaaacttgttcagctaacttcatagatcagttacttagcaaattcatactgagtcttattttgggaagtcttcctgagggaagctgtacaaaactgaggtggtcaggttcatctcttcaaagtaccagttatacagccatctaaataggcataacttatggcaaaattataacaattttttttctttgcagtaaacgatacctcatctaagaggctctaatacctaaagagtttatccttaaaagtaaaagtgactttgtaccgtaaaataaccccaaagccactctctagggtttttattttcttctttctttgtctttatcttttctaacttagttttggaattacgttagctactttggttccatagaacaagttttcaacttggggtctacagttcctacagtgtgctcattgtctcagt

SEQ ID NO: 43615 - DNA, 509 bp, Homo Sapiens
tgtgttgagcgtattcttgaaagtattgtgtttatgcatttcaatttcaatggtgttggcttcccctccccaccccacgcgtgcataaaaactggttctacaaatttttacttgaagtaccaggccgtttgctttttcaggttgttttgttttatagtattaagtgaaattttaaatgcacagttctatttgctatctgaactaattcatttattaagtatatttgtaaaagctaaggctcgagttaaaacaatgaagtgttttacaatgatttgtaaaggactatttataactaatatggttttgttttcaatgaattaagaaagattaaatatatctttgtaaattattttatgtcatagtttaattggtctaccaagtaagacatctcaaatacagtagtataatgtatgaattttgtaagtataagaaattttattagacattctcttactttttgtaaatgctgtaaatatttcataaattaacaaagtgtcactccataaaaa

SEQ ID NO: 43616 - DNA, 537 bp, Homo Sapiens
  misc_feature (537)..(537): n is a, c, g, or t
ggcagagagattttcatcgggtgcattctctctgcttcgtgtgtgacaagttatcttggctgctgagaaagagtgccctgccccacaccggcagacctttccttcacctcatcagtatgattcagtttctcttatcaattggactctcccaggttccacagaacagtaatattttttgaacaataggtacaatagaaggtcttctgtcatttaacctggtaaaggcagggctggagggggaaaataaatcattaagcctttgagtaacggcagaatatatggctgtagatccatttttaatggttcatttcctttatggtcatataactgcacagctgaagatgaaaggggaaaataaatgaaaattttacttttcgatgccaatgatacattgcactaaactgatggaagaagttatccaaagtactgtataacatcttgtttattatttaatgttttctaaaataaaaaatgttagtggttttccaaatggcctaataaaaacaattatttgtaaataaaaacactgttagcaan

SEQ ID NO: 43617 - DNA, 841 bp, Homo Sapiens
ccccatggtttggtttggtttggttttgttttttaaatcaagaaagtttcagggaatcaaaagaggtcggacattttttaacctagcagaagtacagagtcatatattttgctacgaatattgttgtagtacagaaaacccactttgcccgttagtgtgtggatagtatgtgtgtgtccgcactcatgataacttgaatgttgaaccagacatagggttcatttttgaaaggttaaaccacactgtttcaggaacttgctccaaatactacttggttatcccttcctttaccagttagaactaaagagtgtgatgtatgaacacactgggttgggattttctgttgaggatatgcagggcattttggcatgaggcaaatacagaagcaagatttcattctacttggtgatttgaatcatgacagtcctcattccaatctctctttaattctctctggccctgcccacactctgtatttgaaaatcttgtttttgctctttccggagcttcacccctctacttacatattgtaaagttgtataaatctatcattgaaaggtcctctctgccagcagtggtgccaccctttggtttgctgtgggtacttttggcttggtgtactccggtgggccatcatggttactgtgttaaataagattcattttaatacacactaaaaaaaaaaaaaaaccagagacaacagaacaaaaaagaggagagtataaagaaaaccagggagaaaaagaacaccacgattttgctaaaaggcacataaggagataaaaaaaaaggcactaaaactaaaggaaaaaaacgaatttgaagaaacaagggaaacaac

SEQ ID NO: 43618 - DNA, 890 bp, Homo Sapiens
  misc_feature (27)..(27): n is a, c, g, or t
  misc_feature (797)..(797): n is a, c, g, or t
  misc_feature (820)..(820): n is a, c, g, or t
  misc_feature (832)..(832): n is a, c, g, or t
tttgctctttcagggtttactaaccanactaagtgttggtagcagacttcttagaacaaaattacgacactatttttgagcctatgagaaattgcttcagtctgagaattatgttactaagagacagtctttaaagctgctaggggagctgatcctggaccgtcacaactttgccatcatgacaaagtatatcagcaagccggagaacctgaaactcatgatgaacctccttcgggataaaagtcccaacatccagtttgaagcctttcatgtttttaaggtgtttgtggccagtcctcacaaaacacagcctattgtggagatcctgttaaaaaatcagcccaaactcattgagtttctgagcagcttccaaaaagaaaggacggatgatgagcagttcgctgacgagaagaactacttgattaaacagatccgagacttgaagaaaacggccccttgaagagctccccggcccctgtcacagtcagtcgtctcatttgtccagtttgtacagtgtgtcatttcagaaagtcatcattcttgggaagactttggaggtgcctattttttctgctgtaattgttctgggtagatggagtataaacatttgaatggaaaaaaattaacctagaataatatattcattttagtcaagtctgtgattatttatgtgaaatgagaaccattgtatcagatgttgataaaagcaattttaacttgcagatgtgagcccctgggcacaatgagccgctaaatgggagctcaattgacaggcatcaccaagtcttcagggaggnactgagtctcaggggagaactgngaaatgggccangggtgcaaaaatgcttgcccatctgtaggtagacacacagatcgctcaggcactgaga

SEQ ID NO: 43619 - DNA, 578 bp, Homo Sapiens
tgggattggaaagcatctacttaaatatctattgggttcccccctccccccaccttttttgctgtgaaactgaaatagtgaacttttctacgtattgacagcagatttttcgatgaaatcttcagagctttgcctatggggcacagtaggcctagtaacctggcatgtttgatatatgtaggtaaagcataatttaaagtaatcccaggtaaagatggccctaaatactttcatgtctctatattcatttttcacagatccacctgtctcttgaaaatataaaaagacaaaacaggtttgccttggatcagagagcacaaagattaaaagttactttaaatttgccaatattttgggagaacaataaaactacattttttcctcttccatactggtagatgcgaaatttatctgtgcatgaaagggtcacttctgtaatagtgcaacagatttggtattaaaaattaaatgtggttttaaaagttcctctctcttttgtaatttatgttcccaattgagtgtgaatgtccaagtaatggtgtatgtaatggtacaggcaaatgtgactggatttccct

SEQ ID NO: 43620 - DNA, 599 bp, Homo Sapiens
gctccctctgctccaccaggacacatgtataggacactgtgctgtgtgcagtggagaaatctccctgggccaggggaaagttcagacagtgcctctagattgtgttttgcctcctccaatgtagagttgacatctggaccccagagcccagcagggctttctgtcagacatgctagggtggtagaaatgggccctccaggtccccctgcagtgcactgggcagagacctccggaaagccggcagcgggagcgcttcctgggcagcttcccccagcacagtgttcccaaaccagtccatccggaaaacagtctgtacagcaaatgctgtgtgagatcttaggcttttcactttttttgttttgttttgtttttgaaagaaagaaaaaaatacaattaacaagcctcttttgtaaatgggtttcctttctatgtataaaatcgtgggtgtcccttgtttttacatgttcatgctgtgtaattttgagatgttactgagatatgttctgaacataatgtgcatttttttctgtacagatgaaatgggagaatttaataaagagtttgcaggtttttaaaaaaaaaaaaaaaaaaaaataggt

SEQ ID NO: 43621 - DNA, 597 bp, Homo Sapiens
  misc_feature (125)..(126): n is a, c, g, or t
tctttttttcagaaacagaaaatagttccttgagtacttccttcttgcatttctgcctatgtttttgaagttgttgctgtttgcctgcaataggctataaggaatagcaggagaaattttaactnngaagtgctgttttcctaggtgctactttggcagagctaagttatcttttgttttcttaatgcgtttggaccattttgctggctataaaataactgattaatataattctaacacaatgttgacattgtagttacacaaacacaaataaatattttatttaaaattctggaagtaatataaaagggaaaatatatttataagaaagggataaaggtaatagagcccttctgccccccacccaccaaatttacacaacaaaatgacatgttcgaatgtgaaaggtcataatagctttcccatcatgaatcagaaagatgtggacagcttgatgttttagacaaccactgaactagatgactgttgtactgtagctcagtcatttaaaaaatatataaatactaccttgtagtgtcccatactgtgttttttacatggtagattcttatttaagtgctaactggttattttctt

SEQ ID NO: 43622 - DNA, 731 bp, Homo Sapiens
  misc_feature (695)..(695): n is a, c, g, or t
atgaaagtaactataatcttttcacatcccatggaactgccgtttacacattgcaactttttaaacttaaccatatttttcaaaattaacgtttttggagggagaaaaatccccgcttgctaaatgatactaaaccgttgtttgggctcttataattaggtcctgagattttataaaaatttagtctgtagctttttaggttcttcactagagttggttgtacataaaaataataaagaatataaagtatcccaaaattcttttaaagtctggatttttccgctaatatgtactttagagaatattttgttcatgcatacttccacgttaaattgaaaatgtcttcagcttctcttggtaaatgtgaaccatttgttttttattgtgcttgggggagagggtattttaatataatttttgcctaaatcaagaagtcccctctgaatgttaatttttaaatgtcaaaatatgatgaacgatatatcttgaaagtgagattgcaatatgcttaaacttaagtggtatttcaaaaacgagaaaattctggaatttgtcatttgaagctccataagagaaattgataggacttcgtttttgatcagtctgaatagataccaatgtcattgtgtgggaattttttttaacttgtttatgtattattttgatccatttttctgtggcatttggtgcaatanaacttttgaatttatcttgaaaaaaaaaaaaaaaag

SEQ ID NO: 43623 - DNA, 568 bp, Homo Sapiens
tgttcatcgttgtgcctaaagcatgtcgatgtggcgtcaagtacatcgtccaaatccctgtctcttcagcttctctgatgcttgaactctcacctttgaccttgtgttgacctttgatgctgatgtgtatttttattatgtttgtttctttcttcgtttttttttctttttttctttcctttttttttccttttgtgctgccaaattggttttgctagaacgactgctgaaggggaaatatttaaacttgcatttgaatataaaaaaaatctatttttctagaacttcataagataaccacttgattttgtgattccaattctttgtaattgtcttcagagcagccctactagcacataccgcgtggtgtttgtatttctgtgaacacacagccagtccgtttctaggctttgtttctctgtgtgcttagttttaaagacaactttgaagtaaacaatgaaataaaagatgtcactaaaacctctgaggctcctgagcacattttgctgatacagtctgtggggcttgaggagaccgcatgtattgttctttcttttgtttttcttct

SEQ ID NO: 43624 - DNA, 663 bp, Homo Sapiens
atttttcattcgtgtgtagcctaagtaaggtgactcaagatgatacaccgagagaaaaatgcaaaatatatttggttctcatttctgttgctgtcgtttcctttttaaagacgatttatcaactgctgccatttggaacttcctataagaaactaaaaatgatctatttcagtgttcctttcgcctttcctctgctttctgaataaatggtttcagtaacccatgctgttctctccctattctacgtctttctccctatgttgaaaaaagattcccacagtttctgatgtgtgtgtttatagtcttcaatgtatgttaacatgttaggaactgagtatcttaagagatgtcttagaatgctttagttttcataatttgtcctttatgtatttttcattgtatttgctgttttgacatggaagtaatttaaaaagttggtgcaggaaaggactctttactgttgcacattttggttttctgatatgtaataaattcatggcttggcagctgacatgatgtttcccagagagaaggagatgtatttctgcagggtccagaccaaaagagccatttacagcatgttctcccatgttccattatcagcctgatgaaacctgccctgcaaggcataaacttttgtactagctgtctccatattatgtc

SEQ ID NO: 43625 - DNA, 560 bp, Homo Sapiens
  misc_feature (540)..(540): n is a, c, g, or t
ccgtttctcattacgtgtaaataaactgtcagagctgatgttacagcttttacagtttaaagcattcccctcgtctctagttccttttttcttgtttacatgttttgggcactttccctcattcaccaccttccagggtttcatagaaaataacttgttacaaaatcagttcaattctaatgtggacatagtggcatgttcataattagacccatataggggacactgagctttaaatcgttgattctaaactctatacattaaaaaaattcagcccaggcccctcaaagcctgagaaaatttaatttgctcttaatttaatgttccaaaactcactcttggaaaaatgcctgttggaaaactacaggtgggtcacatgtgggggctgtctccgtgacactcaggattccagtcagaacctaatcctcatatctattgcctacaaaaatagaccaagaatgttgctgctcttttataatcctttaaatatttaacattcaagttttctttgtcttaaattcagcctcttcctaaaagcanaaaaaaaaaaaaaaaaggac

SEQ ID NO: 43626 - DNA, 819 bp, Homo Sapiens
tgcttggacccagtctcaaacttaaccctcatctagcacccgggcaggcctcctgggttgcagggacttgagaaaaggcagagttctcaggtcctaggaagctggggcacgctggcgtgacaagcgtcccggagaaagccaagccctcggggagctggggaccgcagcagggctgcagtcacatcctgcgcgggtgggcggcgggccaggccttcagttgtttcgggacgcgccgagcttcgccgctcttccagcggctccgctgccagagctagcccgagcccggttctggggcgaaaatgcctgcccttcacatcgaagatttgccagagaaggaaaaactgaaaatggaagttgagcagcttcgcaaagaagtgaagttgcagagacaacaagtgtctaaatgttctgaagaaataaagaactatattgaagaacgttctggagaggatcctctagtaaagggaattccagaagacaagaacccctttaaagaaaaaggcagctgtgttatttcataaataacttgggagaaactgcatcctaagtggaagaactagtttgttttagttttcccagataaaaccaacatgctttttaaggaaggaagaatgaaattaaaaggagactttcttaagcaccatatagatagggttatgtataaaagcatatgtgctactcatctttgctcactatgcagtcttttttaagagagcagagagtatcagatgtacaattatggaaataagaacattacttgagcatgacacttctttcagtatattgcttgatgcttcaaataaagttttgtcttgggaa

SEQ ID NO: 43627 - DNA, 499 bp, Homo Sapiens
attggcttgatgtaagttatggttgctctgattctctgaacgtaacagcagctgaagtgaactctaattttaggtctgcagtttgaacatcttccatttctaacttcattatagccccagtgtccaaaggctgaagctaacaactaagtttcttaacagcttatgaaatgacatactaccagataacaattctgacattaatcacccagaagtaaagacttggtattgggaaaatgctcttaaaattaccatttgattagtattcatctgccatctttctacactgccaagatttgcttaatataaaactcagatgaaacaatcgtgaggctgggaagaatgggacagttgaaacaataaatgcttgtcatctcagaagataagcattaaagatggagataaagaaaaattcatgagacagaagatctaggcaatgatttagaggaaacctcctcccaaaaaccccagaggaagaatatgacctgtgtttcaaattttg

SEQ ID NO: 43628 - DNA, 567 bp, Homo Sapiens
ctctcatgtgcaagctttaaaggatgcactcttgccattttatgtactggaagatcattggtcagatgaatactgtgtctgacaaaaatgtaaactgtataaactgaggaacctcatctaatcagtattactttgtatatcaccatgcccaccacatttcaaactcaaactatctgtagatttcaaaatccattgtgtttgagtttgtttgcagttccctcagcttgctggtaattgtggtgttttgttttttgttttgttttcaatgcaaatgtgatgtaatattcttattttctttggatcaaagctggactggaaattgtatcgtgtaattatttttgtgttcttaatgttatttggtactcaagttgtaaataacgtctactactgtttattccagtttctactacctcaggtgtcctatagatttttcttctaccaaagttcactttcacaatgaaattatatttgctgtgtgactatgattcctaagatttccagggcttaagggctaacttctattagcaccttactgtgtaagcaaatgttacaaaaaaaaaaaaaaag

SEQ ID NO: 43629 - DNA, 849 bp, Homo Sapiens
aatgaaccaatctcttagagtgcaaattacagccttgcactcttatcttatcttgccttcttatcttaatctgcctttagataactcaaagaactgcatcagtttgacaatttattcttgtatttaattgtttaaatatacaattttttactcattattaccttagtgtaatttggtaagagccatgtccaagcatgactctaaaggactatatcctttttattagcatggccatataatttttagctacaaaagtttaagcaaaaacaaactctgcaatgatgtggaatagcagaaaagatcctttgcaggcaagagactctagcatatttacctatgtagttaacaggctgcagacctggttgctacatacctgtattgtgtatttcctcagcaatatacatgccttctcgataggttagtcccccgacaacaggagttcctgtggctggagccagtgtagggtcaaatgcatcaatatcaaaactcaaatggattggtctttgtctcctaaaaaggaagaggataaaataatacttaaaataatacttaactggttgtccttggacactcatccttcttatggttgcaactccttgattttgttgctattagtcctagtactttgttaataaagctgttaatacatttccaggcttcctattcttggaagttactgagattggcaatattaacttcctacataccacttcatgatactgccatttgttctgcatacctcagacagactaactccaatgtatatttctgccttacactgggtattagaacctcttatactaataactgtcaatagagagatttcttcactttctagatgagattggg

SEQ ID NO: 43630 - DNA, 503 bp, Homo Sapiens
  misc_feature (2)..(2): n is a, c, g, or t
  misc_feature (359)..(359): n is a, c, g, or t
cntacttgtgaaaacagtaaaatagtttggatagttatgcaaatgcacctatgtgtaacttccccccaaccccaagctgtttcggaagatatcataatcattctgtgtaacattatgcaaacttctaagcccaaacatgactttgtttttaaaaagttcattaatctaatgtctaggattataaaacatttttttgtgtctaaattggacccaaaacattgaacagtttggggtagtaagctaaatttcatcttgtggagattttgctaaacagactaagacccatgatttagctttgctcaaattagaatgtttagcatgagttgaggtaccaggtagtgttaagtaggttcatcacngctctaaggccgttttttccttagccagacccctgttgatagaccagatacttgagggcaaactgtttgctcctcctcttgaaaatggattaggcacttaaggacagtaaagctggtattttctggaaggaagactgtatcttc

SEQ ID NO: 43631 - DNA, 541 bp, Homo Sapiens
actctctataagctcagctccccccaccccacccccactctagcgttttgtcacgtcttacattttagcagtattttatattttctgtaacgcaccaagtcttagatctttctagagcttgtttgttcatcctcacaatcacagatttttttctccaatcctcacagagacccaattgaccaaaaaagaaaaaaggaaaaaaaaaaagtcgtcttttttttttttttttgtacaaatcgctttgagatgcctctggtgtgttgctgtgtgacatctctctggtaacattttatttcttgctatttgtttttctacattaagagtcaaagttgacctggctggcgtgggggtgggggaggcacccgtcggccccttggtgttgtccctctgtctttggttagccatacgatgtttgttctcagcactgtacaacggtccctatataatacggagaagcaatatcactgtatgagactcacaccatgtattattattcactagcaccctaggtgtgataattgaagtaaatatcttttataca

SEQ ID NO: 43632 - DNA, 810 bp, Homo Sapiens
  misc_feature (82)..(82): n is a, c, g, or t
  misc_feature (84)..(84): n is a, c, g, or t
ccagcagtttctccgccactatctggaaaattacccgattgctcccggcagaatacaagagcttgaagaacgccgcgcggtntncgtggaagcctgcagagcaagggaagcagcgtttgatgccgaatatcagcgaaatcctcacagggtggacctcgatattttaacctttacgatagctctgactgcctctgaagttatcaaccctctgatagaagaacttggttgcgataagtttatcaatagagaatagttatgtggtgacactacttcaagagaacctctgcattccagttataccaatcctgcaacttgattttcagaagtcaagagtatatcgcgataagacagtgcacaggtggaggggaaaaaaagggggagggggaagcttatcttgaaaaagcatcacagaagtagaaaaaaatgtcgaaagcattataactgtaacgttctttgagtttgtgattgatccacatttttccccctgcattatggaaaatgtctctcagcattgctttattacaaagtaaaggatggttttataaaattgagactgatgaaacatcaatactagagcccatgaggatgaaagaaattatcaaatagtgctgaacagaataagatgttaacgctgagttattaggactggaaggctatgaaaagaacttgaaattgtcggaatatgtgctctcttcatgtcatattcaatagaagtttctagtttaagattgattttgtgttttcttaggcatttcaagtgacaagcaaagtaaatgtatatattatgtgataaatcatgtttttcaagaa

SEQ ID NO: 43633 - DNA, 717 bp, Homo Sapiens
atgttttcactaatttaagtacttgagactcttgaagaaaattcagaatgaagttctggagaaaggtatgttactgtagtaattactctttgaacaggttttgtgttttgtcattagctctgccctttttaattaaatattttggttcatggaccaaagggtttacttgacaaatttgtgtgacagactccgaacaattcctttactacgaagtataatttataaaataaaatatacccattttaagggtacagtttgatttttgaccagtgaaactatgatcccaatcaaggtatagatgccgtcaccccaaaaagttccctccatatccctttgcagtcagttcatccctaccctggcccagatgatcactgatcttgtcattatagatgagttttgccagttcaagaatttaatggaatcagatattgtaagcattcttgtgtaatacttcattctctctcattattgagattcatccatattgttgaatgtttcactagttaatgtttattgttcaatatttttgtatatacttttaaagcctattcacttgctgatggatctttggtttgtttccaggtttggttattatgaataaagttgctgtgaatacttaaaaaaaaaaaaaaaaaaaaaaaaactcgagggggggcccggacccaattcgccctaatgtgagtcgtattacaattcactggccgtcgttttacaacg

SEQ ID NO: 43634 - DNA, 600 bp, Homo Sapiens
tgactcttaggacatttgtttttcagttcaagtgctcttcagcactgtcttgtctcccaatataccaacccactggcacatttttctcttgttttctctctccgattttgctctgtctcctcagttaagtgtttccttcctttgtgccccccgctggtgaccctctgcttccctctctctttccctttggcagctgcaatacacagtgttattttggggaaataaatctagcaaagcctcgccttccatgccgagcgtcctcttggctctgagagggaaaggtctgtccttgggatgctctctggtcttttttccccctaagtctttctctttcccatcatacccttccctgcccaccttgttttctgttctccttttattaggaattcccaagtgaattttattaatgtgggagtggaacagatgctaaaagctatccaggattttgtttctgtttgttttaaattttgtggttccttccctttcctccccctcccatgcgtaagacgttctgtgtaacctccattaaatttggtacaaaaccactcgccagagctgtggtgtcagaaaaataaaatatattgtttcttaaaaaaaaaa

SEQ ID NO: 43635 - DNA, 632 bp, Homo Sapiens
gctcagaatacgctgatttccctctcctgactttgccaagcctttggctgcttttgcctgataaagggcaggccatctgaagacacttcccccagtcggctttggagtcacgggagctagtgcctgctcacacatttttcaaaagggcagtgcactcagaacttcactgtacctgggatttttaattcctcttgcagtgttgaccagcagagagacttgaggctactttaagcctccactatgtgtttgtagataaaattctccattcaaacattttaaaggactttgaacattatctgcttatggaagttgtgcccttcacttggttagtaaccacctcagccataatacttaccatcataggtttcttaaaatgctttttttttttccctaaacttgagtttccttagtgatttcaaaatgaagtataagaatatcagatccagttagcaaaagcctaggacttgtttctccaaacattgtactaacattcaacttgttttaaaattatgactcaagaattttaaaaaattattctggacatgaattaaaacttttttataatataagtatttttctgattgaacaaacggatataattgacttcactctaatggtcatgtatatttcca

SEQ ID NO: 43636 - DNA, 434 bp, Homo Sapiens
gctcgacaaatgttgtaccagttaccattccgggttcgagcatcacaagcttttgagcgcatggaactccataaactaacaaattacataaactaaagggggattttctttcttcttttgtttggtagaaaattatccttttctaaaaactgaacaatggcacaattgtttgctatgtgcacccgtccaggacagaaccgtgcataggcaaaaggagtggagcacagcgtccggcccagtgtgtttccggttctgagtcagggtgatctgtggacgggaccccagcaccaagtctacgggtgccagatcagtagggcctgtgatttcctgtcagtgtcctcagctaatgtgaacagtgttggtctgctggttagaaactagaatattgatattttcaggaaagaaatcagctcagctctccactcattgccaaa

SEQ ID NO: 43637 - DNA, 882 bp, Homo Sapiens
  misc_feature (21)..(21): n is a, c, g, or t
ggccaatattatggatatctnttggagtgaagtattttccatggatatgttttacagctgttttaaaaaagaagggataatgaatccagaggttggaatgaaatacagaaacctaatcctgaaacctgggggatctctggacggcatggacatgctccacaatttcttgaaacgtgagccaaaccaaaaagcgttcctaatgagtagaggcctgcatgctccgtgaactggggatctttggtagccgtccatgtctggaggacaagtcgacatcaccatgtgttactggcctggaaactgaagggagttttgcaagtgaaaatttagatttctattgacatccttttgttttctaattttaaaaattataaagatgtaaatggaattataaatactgtgacctaagaaaagacccactagaaagtaattgtactataaaatttcataaaactggatttgatttctttttatgaaagtttcatatgaatgtaacttgattttttactattataatctagataatatgatataagagggctaagaatttttaaattgaatcatatatatgatataatttgatccttcttgtatcttgaagttttgtacttgggatttctggactgataaatgaatcatcacattcttctggtaaatattttcttggagctctgtgtcaactttgatcctttgtctcccaggaaagtgtgacctctcctttgcctgcatacctcaaggccagggggatatgcctcagtgatgcatttatctttgatatcaggccgcatgattcccactttctgccacactttaaatacgttccctccatttcaggtttgtcttttcctggctaaaagtcagtcaaagagtatcaaaaaattatgt

SEQ ID NO: 43638 - DNA, 948 bp, Homo Sapiens
ctctgcagagaggggccctggggagaagcaggatgggattgatgggcaggagggatccccgcactgggagacaggcccaggtatgaatgagccagccatgcttcctcctgcctgtgtgacgctgggcgagtctcttcccctgtctgggccaaacagggagcgggtaagacaatccatgctctaagatccattttagatcaatgtctaaaatagctctatcgctctgcggagtcccagcagaggctatggaatgtttctgcaaccctaaggcacagagagcccaaccctgagtgtctcagaggccccctgagtgttccccttggcctgagccccttacccattcctgcagccagtgagagacctggcctcagccctggcagggctctctcttcaaggccatatccacctgtgccctggggcttgggagaccccatagggccgggactcttgggtcagcccggccactggcttctctctttttctccgttttcattctgtgtgcgttgtggggtgggggagggggtccacctgccttacctttctgagttgcctttagagagatgcgtttttctaggactctgtgcaactgtcgtatatggtcccgtgggctgaccgctttgtacatgagaatacatctatttctttctacaaaaaaaaacaaccatacccacacagacacacaaaggcgcggcacgcgacacagaagagaaccaccacgaggggcgccaaggtaaccgcgttcccacaggcctgcgcacaatcggggcccctaagaaggacgcgagatacaagacgccgagacacagggcgaggcgtatcacagacgccggagaggcgagacaccgggaccccggcgcaccccgggaagaaaccctcaacccgcgggcgccaccacactgggcgccacacacacgtgaacagccactaaacaacccacggcacgaccac

SEQ ID NO: 43639 - DNA, 829 bp, Homo Sapiens
  misc_feature (696)..(697): n is a, c, g, or t
gggtgatttttattttaagtgaacctttggatctatctttaactctctttattgtgagtctaaattccaattctgcagcagatcagtaaactcacagtatttttcctgtggaaatctattcaataaggaaaccaagacaggataataaaatttaaaaaaaaaacaactttgaattcccctgcctaggtcttccagttgttttccagcgcatacctcaggtatgactttgctagccggggacaaaattagcaccttccgattctctagtccaaatgaactttgtgctaaataaaaaattattatactacataataaagttacagacagcaggaaatgcaagagctaggagattcctagattatatctgccaagcaaataccttaaacatccacctgaaatcctactaccccctcttctgagataatttgcccagcccttctcttccccacactcactcaatgtcacccccttctaatccccaaaactgtttttgtggtctttgtagcctatagtagttttctcacatctttccccctagacttttctgttttccagtttcagacaaaaaaactcttcagctttttccagtgtgtctccttaacagtaactttaccacttgaaatcttatttcatagaaaaactaaattgggtgtggaaaggctgccacccaataaagtttatattatttatccccgnngccccgcggcgcttaaaaaaaacaaccacccttggtcggcccgcccttgggcccctcccaaaaaagctttttctagaaccccatttcctttttgggggcgcccggggggcccccatttaagggtaaaagttc

SEQ ID NO: 43640 - DNA, 512 bp, Homo Sapiens
acaagaatggaatcaacagttctgggcaaaccagaatttgacttttagtaaggaaaaagaagaatttattcactcaagactaaaaactaaaggcctgggcctgagaactgaatcaggtcagaaagcaacattgaatgcagaagaaatggcggacttctacaaggaatttttaagtaaaaattttcagaagcacatgtattataacagagattggtacaagcgcaattttgccatcaccttcttcatgggaaaagtggccctggaaaggatttggaacaagcttaaacagaaacaaaagaagaggagcaactaggagtccactctgacccagccagagtccaggtttccacaggaagcagatggagctcctttcacaggggctctgagaaaaactggagctgatctcaagaagccccacatcttcctaaggggccccatggcctgtttgggggcagggtaggtcctggggcactgtgggccgcctgcctgctgatgtgggcgcaaggccacat

SEQ ID NO: 43641 - DNA, 629 bp, Homo Sapiens
cttaagagattaaaattaatttggttgctgttggttctgaacaaataatgagttcttttatttgaggtatgccattttgaagactgagacgttggagttttatcctagaggataaaggaaatctttgggaaagtcagtattttatatagcaaaaatatgaacctcaaactgaatcctctaaaggccccatacaatgaagtagacattggtggaaacatttacacccagtcagcttgaagagtttcaaatggaccctaccactgagaaatcaagatggcagtctactatggggaattgaggaaaaatggattaatacaagagtcctgtgataatatacaaccaagacagggttcttttaacatggattccatgcagtgaatgaagacataggtttcttacccaacacaaatggacagtggatttgactttctaaagactttttttgtggacattttgacatttggagaagaaagatggcacactaacccagataatagtttttatgcctggaattttttgcagtttgatttgtatacgtatgacctcttgaaatgttaatttttaataaaatttgtaacacttaaaaatttctcagtttgggtttttttttttaaagtggaagtttaatt

SEQ ID NO: 43642 - DNA, 683 bp, Homo Sapiens
gcagactgggcagtgtcaatgagaacctctcagtattgctgatggccaaaaagtttgaaattcctgttgcccccatgctggtggagttggcctctgtgaactggtgcagcacctgattatatttgactacatatcagtttctgcaagccttgaaaatagggtgtgtgagtatgttgaccacctgcatgagcatttcaagtatcccgtgatgatccagcgggcttcctacatgcctcccaaggatcccggctactcaacagaaatgaaggaggaatctgtaaagaaacaccagtatccagatggtgaagtttggaagaaactccttcctgctcaagaaaattaagtgctcagccccaacaacttttttctttctgaagtgaaagggcttaaaatttcttggaaatagttttacaaaaatggatttaaaaaatcctaccgatcaagatgagttcagctagaagtcataccaccctcaggaatcagctaagtaattattacttgattcttttagcaaatcaatgcacgttatcctacttaatccttaaataagtttagatttaactaacccaaagtccaggaggatgttcttacaaaaatagctatatcaagggctggcacctagacattaaactgtactttgaaaataaaaaaaaaaaacaaaaaaaaaatgaaaagaaaggggg

SEQ ID NO: 43643 - DNA, 846 bp, Homo Sapiens
tcttgaaaaaggggagagaatggctgggtgctggggagttcccccctccgagccctccttcccggcccaacctgagggatgtggatttgggactgtctgggggtccctcctgcagcgaggatgggagggggtgctgagctgtgaatcccctgggcagggggcgacaactccgtgtagcattaacccccgtggcggggtccgctgctggtctaatttggaccccctgcctctcagtgcccctgccctaggggtgtctgtctccagaggggagggacaaatcccctactggggccatttcaatggggtagtttttggatttttttccccactcactttttattttttaatgataatggagatgtctggacccttcctcaccccacctgtcggtcttgtcctggctctgcctgtcccccaccgttgttctcgtaggtgaaccccaggtcctcaactccccccctttatgtgttgaaagttaatggtttcagatgtgaacatcacgtgttataactgtagcgctgtaaatttttttgtgggagggtgggcagggaggggtcccagagggtagagctcaaggattttgggttttgttttgttttcatttttccaaaaaaaaaagaaaaaaaaatagaaaaaaaaggagtaaaaggggcgggtttgttttttgaagaactgtcttggatacctatttaaatgtgtggttctgtttttgttttttaacgatttttaaataacgtctgtgcctccactgggttgagggtgggaccctccaggcagggaaccgggctcgccacccctctggcccggtaaggggctgccccaagaaaagcattacccggcccctcg

SEQ ID NO: 43644 - DNA, 675 bp, Homo Sapiens
cacgagctgtctgcgccgtgccgtccctgcagtgacaccgaggtgctcctagccgtctgcaccagcgacttcgccgttcgaggctccatccagcaagttacccacgagcctgagcggcaggactcagccatccacctgcgcgtgagcagactctatcggcagaaaagcagggtcttcgagccggtgcccgagggtgacggccactggcaggggcgcgtcaggacgctgctggagtgtggcgtgcggccggggcatggcgacttcctcttcactggccacatgcacttcggggaggcgcggctcggctgtgccccacgcttcaaggacttccagaggatgtacagggatgcccaggagagggggctgaacccttgtgaggttggcacggactgactccgtgggccgctgcccttcctctcctgatgagtcacaggctgcggtgggcgctgcggtcctggtggggccgtgcggtgagggccacgcgctgggagccgcgtgccctgggcccaggcctgaccctggtaccgaagctgtggacgttctcgccacactcaaccccatgagcttccagccaaggatgccctggccgattggaaatgctgtaaaatgcaaactaagttattatatttttttggtaaaaaagaaaaacaaaatcaaacatgcacacaaaacagc

SEQ ID NO: 43645 - DNA, 947 bp, Homo Sapiens
gcgcaaagatgtttgtattttagccaaatctttttatagtacaaacttagaattattttacacactaaaatggttgcagttttatggcatatgtctccgatttagatggttattctctagaaaatagtatttaaagacattttatgaaatcttcattgtcaaaacctttaataaaagtggaaatattttgaaatgccctttttcttgataccactcatccacgtgttcctgattgtccacatttcatgataaaatgagagctctgcagagaatgttagcctttctgttgtaaatgtaatcttcaagtagtcacttttgttaagttctttagaaagtagttgtcaagtacttagtcatccctattatgatatgagatagtacagcttttcaggaagcttagatctgaatttactttgaaaaacaattgtaatgaatattttatatttacattgagaatttcaactagcttctgatcaatttttaataaaaaattttcaaatcatgttagctgttaaaaaatgtataataactcagtttttcttggtttatggaaatatctatattatgtgaaaataattaatttagaattgtgattaaagtgagcatttgtctaaaaaaaaaaaaacaacaagtacacacgacactcctgaccaaacaccagtaagcacgccagcaacagtcaacaccggtaaacacacaaagacctgctgccagcgactaccagtacacgcggaacacacagaagacagcggcgcgccccacacaacactgcggcagccgcaactaacgacccaccgttcataggacagggcgcccagtaggctctagatacaagccgggctgctccaaacaggtgacacagctcgttcgctagaagacccccccgtggcggtagaccccacagagcgtgcggacaactagtaaacgccgcggccgcgtataacgga

SEQ ID NO: 43646 - DNA, 843 bp, Homo Sapiens
gcttggactatgacagtttcggtcggaatcccgggatcatgacaaatttgagtatctgtttaattttgacaacacatttgaaatccacgatgacatagaagtgctgaagcggatgggcatggcttgcgggctggagtcggggagctgctctgccgaagaccttaaaatggccagaagtctggtccccaaggctctggagccatacgtgacagaaatggctcagggaactgttggaggcgtgttcatcacgacggcaggttccacgtctaacggcacaaggttctctgccagtgacctgaccaacggtgcagatgggatgctggccacaagctccaatgggtctcagtacagcggctccagggtggagactccggtgtcctacgtcggggaggacgacgaggaggacgatgacttcaacgagaatgacgaggacgactgacgtcctccccacttcagattcggcttcaggaaaacgtttagcgaaaagaaactttttttttaatgtgggttttctgtttccttttggcctactcccaagaagatattggtaagctattgaatttagatatgcacctctgataagcaaggattgtttcccgtaagattaagacgtgctgtggatgtgtgttttgataccagtgtgctgatgcagagcgtttatttacttgttaggattttgtggtttcatttgccatttttccttaagtgcagagttcatttttgcccctgaaaagtttttgctgaatttgctgaagaaattgtattttcacacatccatgaaattaaacacctctgttgtggaagtgagccctgatgcgcgtatttgcgtgagttggacgcacc

SEQ ID NO: 43647 - DNA, 636 bp, Homo Sapiens
tgtttgctgcccagccataacccactcagtgacagacgaacacagctaaggcctcgctgccagccttctgacggcgggcgagcacacggtctcttcccctgccccaactggccctctccaccaccaacttctctactttgggtttgtttggttttttccctctatttttctggctggttttttgctcttttctccccttgagaccctaatatctcgacttcattgccaaaaaacaacccattgagaactttcttcctactgatcccatctcttttcccttctttcctcctggttccggtcagttcagaggatttaacaatcacaagtgtcctgcaaaaatgcctgaacattattcttaggccctcgtggattttttttttcagaaaacttaaacaaaaaaagacttactaagaaatatgtacagctacccctgttttcaggcactatgtttgagaacattttagccattgatgttcacacgtggcatcagcccatgcaagataggtttctgtatttatatattaaaatacaaaaaaaaacttataaaatgtttaaaaaaatgttcaaagcttgggagaaaagctttcttcattagtcaaggtgttttgatatggtattaaaatgtctaataaaaga

SEQ ID NO: 43648 - DNA, 648 bp, Homo Sapiens
atgaaggctttgtggacaacatgacttggagctgcatgcctccaacgccaccctcctaagtgccaacgccagccaggggaagttgcttccggcccactcaggcctcagcctcatcatcagtgacgcaggccctgacaacagttcctgggcccctgtggccccagggacagttgtggttagccgtatcattgtgtgggacatcatggccttcaatggcatcatccatgctctggccagccccctcctggcacccccacagccccaggcagtgctggcgcctgaagccccacctgtggcggcaggcgtgggggctgtgcttgccgctggagcactgcttggcttggtggccggagctctctacctccgtgcccgaggcaagcccatgggctttggcttctctgccttccaggcggaagatgatgctgatgacgacttctcaccgtggcaagaagggaccaaccccaccctggtctctgtccccaaccctgtctttggcagcgacaccttttgtgaacccttcgatgactcactgctggaggaggacttccctgacacccagaggatcctcacagtcaagtgacgaggctggggctgaaagcagaagcatgcacagggaggagaccacttttattgcttgtctgggtggat

SEQ ID NO: 43649 - DNA, 752 bp, Homo Sapiens
  misc_feature (593)..(595): n is a, c, g, or t
  misc_feature (597)..(597): n is a, c, g, or t
  misc_feature (603)..(604): n is a, c, g, or t
  misc_feature (606)..(607): n is a, c, g, or t
  misc_feature (609)..(611): n is a, c, g, or t
  misc_feature (616)..(616): n is a, c, g, or t
  misc_feature (618)..(619): n is a, c, g, or t
  misc_feature (631)..(631): n is a, c, g, or t
  misc_feature (635)..(636): n is a, c, g, or t
  misc_feature (639)..(643): n is a, c, g, or t
  misc_feature (645)..(646): n is a, c, g, or t
  misc_feature (699)..(738): n is a, c, g, or t
  misc_feature (740)..(751): n is a, c, g, or t
ggcaaccagagaaaactgctggatttctgcaagtcaaaagacattgttctggttgcctatagtgctctgggatcccaccgagaagaaccatgggtggacccgaactccccggtgctcttggaggacccagtcctttgtgccttggcaaaaaagcacaagcgaaccccagccctgattgccctgcgctaccagctacagcgtggggttgtggtcctggccaagagctacaatgagcagcgcatcagacagaacgtgcaggtgtttgaattccagttgacttcagaggagatgaaagccatagatggcctaaacagaaatgtgcgatatttgacccttgatatttttgctggcccccctaattatccattttctgatgaatattaacatggagggcattgcatgaggtctgccagaaggccctgcgtgtggatggtgacacagaggatggctctatgctggtgactggacacatcgcctctggttaaatctctcctgcttggtgatttcagcaagctacagcaaagcccattggccagaaaggaaagacaataattttgttttttcattttgaaaaaattaaatgctctctcctnnnanggaagnnanngnnnaaaananngggcgggggggngggnncgnnnnngnnattaaatagaaaaaaacaaaaaaagggcctgctgaataaagagtacaaggggnnnnnnnnnnnnnnnnnnnnnnnnnnnnnnnnnnnnnnnngnnnnnnnnnnnnc

SEQ ID NO: 43650 - DNA, 687 bp, Homo Sapiens
gggccgtttctaacgttgagtgttacaaccccgagcaggatgcgtggaattttgtggcgcccttacccaatcctctggctgagttctctgcctgtgagtgtaagggaaaaatttatgtcattggaggatacactaccagagaccggaacatgaacattttgcagtactgcccctcttccgacatgtggacgctctttgaaacatgtgacgtccacattcgcaagcagcagatggtgtctgtggaagagaccatctacatcgtgggggggtgtctccacgagctggggcccaaccgcaggagcagccagagcgaggacatgctcaccgtgcagtcctacaacaccgtcacccgccagtggctctacctcaaggagaacacgtccaaatcgggtcttaacttgacttgtgcgctccataacgacggcatctacatcatgagcagagacgtcaccctgtcgaccagcttggaacaccgagtgttcctcaagtacaacatcttttcagatagttgggaagcatttcggcgttttccagcttttggacataacttgctggtttcttctctttatctgcccaataaagcagaaacatgactgaattgaattggtagatgaaaaaaacctggttcaagttttttttaaaatgtggtgtcccattccaggggagaccaattcctaaagggtaaag

SEQ ID NO: 43651 - DNA, 775 bp, Homo Sapiens
ctttgatcaaagaacaggacataaaaacaaagtcacaatgacattccatagtaaatttggaatcagaactccaaatgcaacttcgggctcgctggagaacaactaaggggcaccaaaccctctgaggttttactttaaggttcgctgtatgtttgccttggacaaaaaggctacctaccacgtgctatccagtaatatacttaaataagccaatacttagatctactgtaaggcagatgctaattataaggcattaagtaagcaaatagtgccctcagctactgcagaagaaaagtcccactgaggaaaagaaagtcttgtgatttttaaaggcaagttttcaagtgctctcatagttctatcctctaattccattaaatccatactaggagcgtcagtgagggttttcatagcttttggaaatactttggtctctgaactgtaattagcaagaagtaaaaacagaaacgtcaaacgtcaaatgtttgctttgttacctggaggactaaatgtagatgtctttagtatactttgtatgttcttaatattggaagataattttgtgaatctgtagattttattttttcagtcttaccttacaaatttcttttctatgaataatagaggaacttacggcactctgccatttgttaatgaaaggaagtgcagaggatttagaaaagtacatgatccccagaccacaaaaacaaaacataaactcatgtctgtgtcccatggtcatagtcaaagatttgtactgtaaaattaccaaata

SEQ ID NO: 43652 - DNA, 640 bp, Homo Sapiens
taccgagccattcaactagccaaggaaaaaaagcagagaggagcggggagcaatgcaggtgaggccgtgtgtgctgcagccggacgagcaagggcctgagggttctctgtcactgttactggcagaagaaacacagcaggtgtttctgtgctcttggttttacgtttctgttcagaatacccttttatcaactccttagttttatttgaacttaagggaaaaaattagtaacaaaattcccagcatcagtatgaacatattttatttgcctaaacaagctttgtgaaagttaagcgttcaaacaccagtgtcagttacctggaaggctactaaggtaaataagcaaagcaggccagttgtcaggaaagcagagattgtgcctggtgctgaatggccttggggcctgatcttggcatggcagagacctggggactgccactgtccccaggtacgtgtacatggagccaaactgtgtgtcctgtggcattgtcagagttatgttgaaatcttatttgaaaatgttagcaacttacttgcatttttaaagaccaaacaagagctggtaacctatggcctcaagcatctgtccttcctaaaaatggaatagtgggatgtagtgcttaatggaaactgctaaatc

SEQ ID NO: 43653 - DNA, 767 bp, Homo Sapiens
  misc_feature (1)..(3): n is a, c, g, or t
nnnttgaagaggcggacggtccggattcccgggatttgtgacttgcaccttttgttcaagtatttcctttaggcattgtaattgtgaacagctcttacttgtgccagtgacagatgcagtggtctcctttccccagttgaagcagtgcatacgcagtagctattatttgtgttatctttatttctcttcattgttagaaaccaaagtcttctctgctggctggggctgagagagggtctgggttatctccttctgatcttcaaaacaagagagagaccttgaatacactgactcttccaccctttttttttctgggaaaggagagcaagaggtcccgagtcccctcctagtctttcatcctgaatttgcacagaggaaagcgggtgcccggcatggccatcctgatgttgctggcgggatccccatgcaccttgtccttctccactgatactggcagctcggctcctggacccaagatcccttgagtggaattctgcagtgcaagagcccttcgtgggagctgtcccatgtttccatggtccccagtctcccctccacttggtggggtcaccaactactcaccagaagggggcttaccaagaaagccctaaaaagctgttgacttatctgcgcttgttccaactcttatgcccccaacctgccctaccaccaccacgcgctcagcctgatgtgtttacatggtactgtatgtatgggagagcagactgcaccctccagcaaacacagatgaaagccagtgagcctac

SEQ ID NO: 43654 - DNA, 699 bp, Homo Sapiens
gtcccgccgacactatggagaatctataacaaatataggcaaagcaagcatattaggggctgctagcattggaaagggacttggaggaatgttgttctcaagatttggacgttcatctacaacacagtcatctgaaacatcaaaagactcaatggaagatgagaagaagccagttgcctcaccttctgctaccaccgtagggacacagacccttccacatagcagttctggcttcctcgattctgcatggagttggatcacaggattgattttgaactcagagaaggccttgtggagagccgctattggtcagctgtcacgtcgcatactgcctatggtcatccttggatgttgccctttttcttttaaccttcatgtataaacatgagcacgatgatgatgcaaaacccaatttagatccaatctgaactctcttgaaggacatgaatggcctaaaactgattttttttttttccgttaaaatgtgtgtgtcaagatacggagattctcagggttaaagtatatttcagttttcttaagggcaacatatattggaatttaaaagcactttaaaaacaaaaagaagtttccagttctgaagaagtcatttaccaggttggccatcatttgaattatgagttcttgacaaaaccttctccagagaatcaaggcaagacctgggatgtgaagaaggttgcg

SEQ ID NO: 43655 - DNA, 769 bp, Homo Sapiens
  misc_feature (613)..(613): n is a, c, g, or t
gggttattatcattattaataaataaagagaaaaggaatttttgtttaaatgagaaatgtttaaccagattctgttctatttgaattgtgacttgcaccttttgttcaaagtatttcctttaggcattgtaattgtgaacagctcttacttgtgccagtgacagatgcagtggtctcctttccccagttgaagcagtgcatacgcagtagctattatttgtgttatctttatttctcttcattgttagaaaccaaagtcttctctgctggctggggctgagagagggtctgggttatctccttctgatcttcaaaacaagagagagaccttgaatacactgactcttccaccctttttttttctgggaaaggagagcaagaggtcccgagtcccctcctagtctttcatcctgaatttgcacagaggaaagcgggtgcccggcatggccatcctgatgttgctggcgggatccccatgcaccttgtccttctccactgatactggcagctcggctcctggacccaagatcccttgagtggaattctgcagtgcaagagccccttcgtgggagctgtcccatgtttccatgggtccccagtctccccctccccntgggtgggggtcacccaacctacttcaccagaaaggggggctttaccaaaaaaagcccctaaaaaaacctgtttgacttttatcctgccccttggttcccaaacttctttaaagcccccccaaaccctgggcccttaatacaaccaacccagggga

SEQ ID NO: 43656 - DNA, 599 bp, Homo Sapiens
  misc_feature (451)..(451): n is a, c, g, or t
atataaaggaggggaaagtcacatagtgttaggaaaacattcctgtgttttgaatacgatgaatccataggatagagaaaaatctgcttgttctattctgagagttctctgagatatcccttcactctgcttggcatttggccattgatattcaacaggtcactgaccaagcttttctaaatttttcagagagagttacttaccaataaggtctgttcttaaacctacctagttgattttcatatctttccataaagtgtcatgattctatcatagaccctgacttaacattgtaaggactatgagtcctccattttttaattaattttttttagcaaattaggacttcggcaggttttcctctcctaaactcattctttcctccacaggattgctttgtccatctcctgctttcatttcaagtgcataaacaaaacctcaaagggcctgngaaggtgaggcaggccagagtctgtgttctgtgttgagtgtcaagctatttgttaagaaggtctgcaacaggcctttggtgtgggctctgccagagactgttctgaacactttgcttgagatccgtgccctgtaaaatggatatgatg

SEQ ID NO: 43657 - DNA, 465 bp, Homo Sapiens
  misc_feature (23)..(24): n is a, c, g, or t
ttctccggatatcgtcgacccanncgcgtccgggctgcggggagccacaaatcttcaataaacgtggggagggctcccccacgttgcctctactttatcaattaactgagtagctctcctgacttttaatgtcatttgttaaaatacagttctgtcatatgttaagcagctaaattttctgaaactgcataagtgaaaatcttacaacaggcttatgaatatatttaagcaacatctttttaacctgcaaaatctgttctaacatgtaattgcagataactttgactttcttctgaatattttatctttccttggcttttcccttgcttccccttttgccaatctcaacacccaagttgaagactttgtttttaaaatggtttgtcctgatgcttttgtctaattaaaacactttcaaaacagaaaaaacaaaaaaaaaaaaaaacaaaaaataaaaaaaaaaag

SEQ ID NO: 43658 - DNA, 815 bp, Homo Sapiens
atgtttaaaaaaaattccaaggctccatgaccaagtatgtgactcactaagaaacccttgctataaaaggcttttgatgaaatcttagcaaagctaaattatctctaacttagagattcctatgaactcaggtcattttcatagcctgtttattttgtaggtctaatttagttctcaggaaaattaaactcatgctatatgactgtatcgttaaaggtacttgagcgtatgttgctgtaggtggtatgacactcaaatgcataagaacttgaagggatttattcttaaccactagaatatgaagagccctttttacctgagaagagtgaaattatgtcagaccttttaatttgatatcactgagtaaaaggtatgttcctatagccataggaatatgtctgcttcctttttttcatgttgagaaaacagtcaaatttaaccatttggagtttatttgaattcttggaaagagcaatattcaaaacttttcaaaaataagatattctggactactggatggatgtttgttttcagttcatttttcatcagtagagatggtgatttcggtttgtagtatccttgtttctatgtctgtgcatgtttaacattggatgtatttgtatataccttaattaatatacagactgtgtgtcattctgggttgattagaagctaagtcagttactgaagtaacattttgcaactttattccagcagtactaaatcggcaaaaaaggttggttttgataccattaaatttattctcaaaaaaaaaaaaaaaaaaatttggggggcgggcccaaaaaattttaaac

SEQ ID NO: 43659 - DNA, 579 bp, Homo Sapiens
ccaccaggtcctcaaggtgaacagggagtggagggggcaccagcagcccctgtgccccaagtggcattttcagctgctctgagtttgccccggtctgaaccaggcacggtccccttcgacagagtcctgctcaatgatggaggctattatgatccagagacaggcgtgttcacagcgccactggctggacgctacttgctgagcgcggtgctgactgggcaccggcacgagaaagtggaggccgtgctgtcccgctccaaccagggcgtggcccgcgtagactccggtggctacgagcctgagggcctggagaataagccggtggccgagagccagcccagcccgggcaccctgggcgtcttcagcctcatcctgccgctgcaggccggggacacggtctgcgtcgacctggtcatggggcagctggcgcactcggaggagccgctcaccatcttcagcggggccctgctctatggggacccagagcttgaacacgcgtagactggggtcccgcccgacgtgtctacgtcggctgaagagacagcgggggcggcgggctcctggggtctcgcctgagac

SEQ ID NO: 43660 - DNA, 780 bp, Homo Sapiens
gacctcctcctggccaccacagccaagccatcagtacccagtgctgacagtgagacacccctgacccaggacaggccaggcagtcccagtggctctgaggacaagggcaacccggcgccggagctgagggcctcctttctgccacgtaccttgtctctgcggaactccatcagcaggatcatgtcggaggcgggcagtgggaccctggaggacgagtggcaggccatctcggagattgcctctacttgcaacaccattctggagtcgctgtcccgagagggacagcccatcccagagagtggagaccctaagggaactccaaaatctgatgctgagccagagcctgggaacctctcagagaaggtctctcacttggagtccatgctcaggaagctgcaggaggacctgcagaaggagaaggcggacagggcggccctggaggaggaggtgcggagcctgagacacaacaaccggcggctgcaggcggagtctgagagtgcagccacacgcctcctcctggcctccaagcagctgggctcacccaccgccgacctggcctgagccgtctggaaccacctgggcccctgagggcactgtggtcacactgggccctcctcaggaactctccctgcgcagaggcgtgtcttagcactgcccccctccctagccccttatttggtggcggaagtggcctccacccttccctgtttgtaaatattctgtggagaaaacgaggacttcagggaggttaaaaaggcaagaaaaacactcgcaaaaaac

SEQ ID NO: 43661 - DNA, 540 bp, Homo Sapiens
gaaacatgctccaaggaaatggaatctgtcctttaaatggataacagtatgtgttctaatggcataaaatattactggataaaaacagttgtgtcagtgtctctcctaaggtagtaaatataattgacttattctgaacccattctattttgaatcttcccctttcctctcacaatacttgaacattttaatcttttggaatattgtctttctttgttataactattcatttttagcttttgtctccagtgcatgatctcatatttttgcttttatttttagtataagaacatttataaaatcatatttttgttactgcaattgttttatttgttgtgtggcaaatgagaaatcctttatttattgtgctgtgatctctctgtgtggaatgccttggtgagggagatgcttattatgactattatcatttctgaccaagcttctattaatgttatttctaataatacactatcttgattgtactctccagaaaatttttctgtcagtgaaaataaaagaaaaattaaagtaaagctaagg

SEQ ID NO: 43662 - DNA, 571 bp, Homo Sapiens
gggcggggggcgcggcgggcggtggtcccgagcggcagagcgtgatccagttcagcccacccttccccggcgcccaggctcctctctgacacgcctttaggcgaaacatgccccaagacacagggaccgtttctcccctaggagcagcggtggggagcagggccaaggtcccctgaccactgctcagaggagccctaggccctggccgcagtgccttcagcgcccgacccgggcccccacctggtcagccctggcggggcccactcaggacagctgggggccggggcgtggcagggccctctctgtgcctctcctcccaagtaggaaggggctccgggtggctgctctgggactgggcacccacaagggctcagtgggcccaaacccttgaaatccgtgaaaccgggtggtcccaagagctagaaactcaggaaaccccaggtgctcagggccccgcgtctcgggggctccgtggggcagacccctgctaatatatgcaattctccctcccccagcccttccctgacccctaagttattgcccgctcacctctcccaggccccaggccgcg

SEQ ID NO: 43663 - DNA, 614 bp, Homo Sapiens
ttttttttttttttgtttctagcctgttcagtgtacagtttattcaaggctacatgcttttctttaatgcttctggctatgcattttctctttttacatataggatttgggattgggggtgggttggatgtttttgtttggggacttatttagtagtattgagtctcttatagccctactcttaagccttcaatactgtccactctttatattcctttacttgcagaatttataaaagcccccaaactgcatataatatgagcctttaaaacatgggtaaaactaatcccattgatgggtttggatggtatgttaagaaatggagatgctgcagagcccaacgtaattttttaaacagcaagttttccatctccctacgaatcctctgaagcttttacccaagccctttcttgcctctccagtgctattttccttcagatggaccttaaacataatttcttggacactactagagagacttcgaggcaataataaaagatcagtattaaccagctataacagaggtttgatcatgcttacttgtacagtttttcgcccgttttaaaaaggaatgtaataaaatttgttttttctatagaattaaatcctcgtgc

SEQ ID NO: 43664 - DNA, 2448 bp, Homo Sapiens
agcccgagagccctagattggacctcgctacacacccgacgacaccccgttcagaactatcttcagtggtcttactggcaggtgttggtgtccagatggatcgccttcgcagggctagccatggcggactacctgatcagcggcggcaccggctacgtgcccgaggatgggctcaccgcgcagcagctcttcgccagcgccgacgacctcacctacaacgacttcctgattctcccaggattcatagacttcatagctgatgaggtggacctgacctcagccctgacccggaagatcacgctgaagacgccactgatctcctcccccatggacactgtgacagaggctgacatggccattgccatggctctgatgggaggtattggtttcattcaccacaactgcaccccagagttccaggccaacgaggtgcggaaggtcaagaagtttgaacagggcttcatcacggaccctgtggtgctgagcccctcgcacactgtgggcgatgtgctggaggccaagatgcggcatggcttctctggcatccccatcactgagacgggcaccatgggcagcaagctggtgggcatcgtcacctcccgagacatcgactttcttgctgagaaggaccacaccaccctcctcagtgaggcaaatgttcctggccccacaggtgatgacgccaaggattgaactggtggtggctccagcaggtgtgacgttgaaagaggcaaatgagatcctgcagcgtagcaagaaagggaagctgcctatcgtcaatgattgcgatgagctggtggccatcatcgcccgcaccgacctgaagaagaaccgagactaccctctggcctccaaggattcccagaagcagctcctctgtggggcagctgtgggcacccgtgaggatgacaaataccgtctggacctgctcacccaggcgggcgtcgacgtcatagtcttggactcgtcccaagggaattcggtgtatcagatcgccatggtgcattacatcaaacagaagtacccccacctccaggtgattggggggaacgtggtgacagcagcccaggccaagaacctgattgatgctggtgtggacgggctgcgcgtgggcatgggctgcggctccatctgcatcacccaggaagtgatggcctgtggtcggccccagggcactgctgtgtacaaggtggctgagtatgcccggcgctttggtgtgcccatcatagccgatggcggcatccagaccgtgggacacgtggtcaaggccctggcccttggagcctccacagtgatgatgggctccctgctggccgccactacggaggcccctggcgagtacttcttctcagacggggtgcggctcaagaagtaccggggcatgggctcactggatgccatggagaagagcagcagcagccagaaacgatacttcagcgagggggataaagtgaagatcgcgcagggtgtctcgggctccatccaggacaaaggatccattcagaagttcgtgccctacctcatagcaggcatccaacacggctgccaggatatcggggcccgcagcctgtctgtccttcggtccatgatgtactcaggagagctcaagtttgagaagcggaccatgtcggcccagattgagggtggtgtccatggcctgcactcctatacctttctgccgtttacgaaaagcggctgtactgaggacagcggtggaggccgaggtggtggaggggatgcaccccagtgtccacttttgggcacagcctccctccataactgagtggtccacagatttgcactacgggttctccagctcctttccaggcagagaggaggggaggtcctgaggggactgctgcccctcactcggcatcccctgcagagtcaggactgctcccggggccaggctgccctgggagcccccctccgagcccagccagccaggctctcaggccctgcgcctgcctcaggtctttcttgctgcagcctgctccagcctggcccccaccccaggggcaggcggcccctcctggcttctcctgtagggcacctccctgcccctagcctcccaggaaatggtgctctcctggccctgcctctggcccttcccgggccgctgcccctcagccatgtggcacttctgagctcctgacctaggccaaggggaggtctctgcccccttccccggccctgggctacccttgggtcctgctcctcaggccgctcccctgtccctggccatgggtaggagactgccctggtcatggccgcctgcctgtcattcctgactcaccaccgtccccaggtgaaccattcctcccttctcctcagctgcagtcgaaggctttaactttgcacacttgggatcacagttgcgtcattgtgtattaaatacttggaataaatcaagcaggtctcaacgcctccactaaaaaaaaaaaaaaa

SEQ ID NO: 43665 - DNA, 637 bp, Homo Sapiens
gcatcctgcaaggtgaaacaagacaaaatgacagtttcagagagtcaatgtcattacatagaacacttcggacacaggaaaaataaacgtggattttaaaaaatcaatcaatggtgcagaaaaaaacttaaagcaaaatagtattgctgaactcttaggcacatcaattaattgattcctcgcgacatcttctcaaccttatcaaggattttcatgttgatgactcgaaactgacagtattaagggtaggatgttgcttctgaatcactgttgagttctgattgtgttgaagaagggttatcctttcattaggcaaagtacaaaattgcctataatacttgcaactaaggacaaattagcatgcaagcttggtcaaactttttccagcaaaatggaagcaaagacaaaagaaacttaccaattgatgttttacgtgcaaacaacctgaatcttttttttatataaatatatatttttcaaatagatttttgattcagctcattatgaaaaacatcccaaactttaaaatgcgaaattattggttggcgtgaagaaagccagacaacttctgtttcttctcttggtgaaataataaaatgcaaatgaatcattgttaaaaaaaaaaaaaaaaaaggac

SEQ ID NO: 43666 - DNA, 696 bp, Homo Sapiens
tgcaacttgaaggtaaaaattttactttgtcaatactgaagtctctgctgtaatccttatatatctttctccagagaacataatattgtcaaatagatacacatttttctaataggtatttagaagcacttgaaatattcttaatctctgcatgtgttacaattcagttatttctgtagtttgtaaactctaaagtgacattactattattttagagatgtctaagttgtaattttgatttttgtggaaccattgtttgttaatgttgggattctctgcacttttgaatgtgaaagcttatatccctgaattctgatacttaagagttttctatttcagacatctctgtgtggaagttgagactaagaataatcctagggatgtcatgaatttaggcaatgtttctcatttggaaaatgaaatgagaaataatttccttctttaaagcaagtatatatagtatgagaaacttggaggcatttcatacacacgtttcttaggaaaatggacacattgaaaatgtcctcttttttatattagagattctgcagctctttgctcttaagagcaaatcacaacaggattcttaatgtatgatttctttgttcatatattatgaatgtattatttctatttgcttcgtaataaagtttataaggaagagcatctcatacatacccattatcgtggaacacc

SEQ ID NO: 43667 - DNA, 736 bp, Homo Sapiens
  misc_feature (675)..(675): n is a, c, g, or t
acctattaaattggggcttggtgcttttccaccttccccctctgaatgaaagccaaggaatgggggaagagcgggaactctgccgcggaggtggagcaagaacggtgaagggccctggtcccagagaggctggtgggtccctctcccaaaggaaggcagacagtctctgctttgccttggaccttggtgctgggggtggggaggcctgggggggacactccccactcccattccccttcctttgtcctaatcctggaattaagtacaggggtttataggttctatttcttcccaagagccctgcaaagaaccccagtttcctatttggatgcccctacactgttgtgtttcagtggaatgtattttcatttaaaaacaactttgaatggggcactttttctttcctgttttaaaaattgaaaaattcttacagtacaaacaggactgtcagggtgggggtgttggtgctgtaagaggtcactcttgagtgcattttggcactgggatgggatggctggggtgggaagacccccatccccacccccaacttcttttctaatatttaaggagtgtctgtaggattcaacaaccaccacaacttgaattcgtatcatgggaggtgggagggagtggcttagaggtgtctgcctatgcttaaagccaactgtggaagtnctgtttccctttttgtataatagagtgaaaaacaaaggttaaacacaggaacacgaacaag

SEQ ID NO: 43668 - DNA, 818 bp, Homo Sapiens
cagagatgggtgcccccatccgcacactgtcctttggccaccggacatcatgcctcccaagaaggatgttcccgtgaagaaaccagcagggccctccatctccaaacctgctgctaagccagcagcagcaggggctcctccagccaagaccaaagctgagccagctgtcccccaggcccctcagaaaacccaggagcctccagtcgatctctccaaagtggtgatcgagtttaacaaggaccagctggaggagttcaaggaggccttcgagctgtttgaccgagtgggggatggcaagatcctgtacagccagtgtggggacgtgatgagggccctgggccagaaccccaccaacgccgaggtgctcaaggtcctggggaaccccaagagtgatgagctgaagtcgcggcgtgtggactttgagactttcctgcccatgctccaggcagtggccaagaaccgaggccaaggcacatatgaggactacttggaggggtttcgtgtgtttgacaaggaggggaacggcaaagtcatgggagcagagctcagacatgttctcaccacccttggagagaagatgactgaggaggaggtggagaccgttctggcaggacacgaggacagcaacggctgcatcaactacgaggccttcttgaaacacatcctaagcgtctgagtgctgcaggtagggccctcccaccccttcgccgcgccttacgaggcaagtctcccgcccttctctcagccaacatagaaaagcagcggagttcattctgctgtccggttgctgcacgggctccagcgcttcgcaactttgg

SEQ ID NO: 43669 - DNA, 591 bp, Homo Sapiens
aaaatctgaatttgttttatgatttaaagcatctggtttgcatattgtattgtaatactgatacagtttggctgtgtccccaccaaattgaattgtgttaatagttcccataatccctacgtgttgtgggagggacccagtgggcagtaatttaatcatggtggtggttaccctcatgctgttcttgtgatggtgagttctcatgagatctgatgggtgtttttttttgttttgttttttgttttttgagatggagttttgctcttgttgcccagactggagtgcaatggcacacgatctcggctcaccgcaacctctgcctcctgggttcaagcgattctcctgcctcagcatctcgagtagctgggattacaggcatgcaccaccacgcccagctaattttgtatttttagtagagacggggtttctccatgttggttaggctggcctcaaactcccgacctcaggtgatccgcccgcctgggcctcccaaagtgctgggattacaggcgtgagccactgctcctggcccaagatctgatggttttgtaagggaattttccccctttgcttggcacttcttcctgctgc

SEQ ID NO: 43670 - DNA, 586 bp, Homo Sapiens
cctttcctggttgtggtttttcatgccctctaccatgtgggccttccccaggagatgatcctgttaagtgttcggcagtaacctactttgttccttcgcctcagcagcaaatcttgctactggctctagatctgcggtttcccctctaccctgcctcccgtctccccagaatgggaatttcttttatgtttttatttttttcctggctcccttttatttttgtgcgcgatatttaaggtcgtctggatggggaagcaacctgcagctgaggtcgccggcgcctttttctttttagatgggaaggaggccaggaaagggtcagcttaaccatttcctatgtgccaagctgtgccagcagtccagggtaccctgactgtccctctgtagactgttgagactgagttcctgttgggacagtcagttggtatgtatccaagtccctgctgaccactaatgttctagctgatggtgagcggcacagtcccacttccccatctccccaagtaggtggtgttagaaaaccttaattttttttcccttttgtatggactacaaataaaacttggggcaatttgcagtttggaaa

SEQ ID NO: 43671 - DNA, 747 bp, Homo Sapiens
gtcatccagtccacaggaggtggtgaggagtatctcccagtttcccatacttgttttaatcttctggatcttccaaaatatacagaaaaagaaactctacgctctaaactgatccaagctatgatcacaatgaaggcttcagtttaatataactttggagttataactattcagtttagtgcaaaagcattaaactatttgtgtttttcttgtggtgatgaattcagcaaggtgacagaggtactattataattcttacttgcagaatgttcaatctacgagtgttcatggaagccaaaaaatattaaaggaaaatgaacaaactgttaatattattgtacagaaccatggattttttttgaccatcttctaataaacatagcaagtattatgaatacattaaagttttactaacatgaattttaagagtttgcatatttcagaaatgatctggtgtgagtgcatggaaatattgcttaatttttcttcaatcattgagtgaaaaacctttaactttggcctgcaatagtcatctgattattttttcatttggtaaataatgttaagtttggtaataaaatagttatgtctggataccagtacagtttctatggttgtaattgaacttgaacagactttttaccgggttacaccaacttatgatttaaatcttactctgagactctataaaacgaaccacacacggtagcatggtggaaacacttatctttcctttttgctagaata

SEQ ID NO: 43672 - DNA, 737 bp, Homo Sapiens
ggtggcatgcgactgtgccaccaagcacaagatccccgtgaactccaggtacttcacggaagtgcatcatccaggttctgcagagcaagcatcccggggactttggtgctgatgcccagggggccatgaacaaggccctggagctgttccggaaggacatggcctccaagctacaaggagctgggcttccagggctaggcccctgccgctcccacccccacccatctgggccccgggttcaagagagagcggggtctgatctcgtgtagccatatagagtttgcttctgagtgtctgctttgtttagtagaggtgggcaggaggagctgaggggctggggctggggtgttgaagttggctttgcatgcccagcgatgcgcctccctgtgggatgtcatcaccctgggaaccgggagtggcccttggctcactgtgttctgcatggtttggatctgaattaattgtcctttcttctaaatcccaaccgaacttcttccaacctccaaactggctgtaaccccaaatccaagccattaactacacctgacagtagcaattgtctgattaatcactggccccttgaagacagcagaatgtccctttgcaatgaggaggagatctgggctgggcgggccagctggggaagcatttgactatctggaacttgtgtgtgcctcctcaggtatggcagtgactcacctggtttaattaaacaagctgcgacaacatacgacaaa

SEQ ID NO: 43673 - DNA, 650 bp, Homo Sapiens
ttttttttttttttttttgacagagaaaattggtatttatttttctattatagccatatttatatatttatgcacttgtaaataaatgtatatgttttataattctggagagacataaggagtcctacccgttgaggttggagagggaaaataaagaagctgccacctaacaggagtcacccaggaaagcaccgcacaggctggcgcgggacagactcctaacctggggcctctgcagtggcaggcgaggctgcaggaggcccacagataagctggcaagaggaaggatcccaggcacatggttcatcacgagcatgagggaacagcaaggggcacggtatcacagcctggagacacccacacagatggctggatccggtgctacgggaaacattttcctaagatgcccatgagaacagaccaagatgtgtacagcactatgagcattaaaaaaccttccagaatcaataatccgtggcaacatatctctgtaaaaacaaacactgtaacttctaaataaatgtttagtcttccctgtaaccttcaaactgagtcatgtgtgagtcagcattttctttacatgttagaattcagtctctgagtatttgaagaaaataccacttacaatattttcaggtccatcagaaatg

SEQ ID NO: 43674 - DNA, 706 bp, Homo Sapiens
ctgacatagtgcccttgtcagtttctgtaagatgccactactgtcacaaggtgtttcagactcttgataaggcagtgttttgtattttagttctaacattgagtttggacaattttatctaattgtaattctctagggtgccagagataggtatttctcattggtttgctttcccaaatcctgtttggttaattgtagcctccatacagtggggtcttctctgtggctggtagacaccaagctgctgtgactgaccacggtaccacgggctgccacagcccctgctctgtcttagattatggtgctttacaaagagagtggtccatgaccacacttagtgagaaggagccacaagttgtggctgagagttccctgtgaacttgagtagttcatagagtgctaaggtgacactccaccaaccagagtgagagggcagataggcaggattctatgagtggttatacttaagggggacaaaactgcccaagaagaatcttgagaatacactctttcaaggtgggggagatactctttagagggtacactgagctaatactaccagttctttatgagcactggaatgtgtttgtaaaaggagtcctaagtttagcaaggtagtctacagaaccatgctcccacattatagataaagctgcttaaacttaaaagtccacaaagctacgccgaccagaaaaaaaaaaaaaaa

SEQ ID NO: 43675 - DNA, 657 bp, Homo Sapiens
cttttaattcaaagaggaaaccttggcttctgataactttgttgtgttgtatcttaatggcctatagctgtcattacttcctgtagctgcagtacagaattgttacagacctggattaatgcttccaaagacagaaggaccttggcacctaaactgaccagccctgtgatcctgcaccccacaggagtaactcatcaggacttaccagactgctgcttttgggcatcatctgctgggttgatgatttggtttggccaagagtcttgccaagactttaatctatgcctcttgttctacatgaattcttgggaattactcacgttccataggaagagtgcatccccaggtgatggtttttggttatggtatgatcctttcacaccgaggatttcattgtttaaaacgtgtttctttaaaagaagccttgataacgagagtgggggaaggaggcagcagactttgaagactgtggcctttggtgttctggagtagggggagggaaggagaaacatgttttccacatcatcgcaagtgtgtgccctttgccccttttcaggatccttagagttgcctccctccctccaccccgacagttttgcaataatgtgccttatcagttgtgagtttacaggtgaagcaatttcccaaataaatgga

SEQ ID NO: 43676 - DNA, 559 bp, Homo Sapiens
taagcttgatatcgaatcgtatcggcattatggccgggggcagcgtcgctatttttacctctttccaaatagacttgaatggagaggagagggagagtcccggcaaaatttactgacaatggaacagattctctctgtggaagaaactcaaattaaagacaaaaaatgcattttgttcagaataaaaggagggaaacaatttgtcttgcaatgtgagagtgatccagagtttgtgcagtggaagaaagagttgaacgaaaccttcaaggaggcccagcggctattgcgtcgtgccccgaagttcctcaacaaacctcggtcaggtactgtggagctcccaaagccatccctctgtcacagaaacagcaacggcctctagcacccagaaacagggagggtcctcgaggaggacacaccagggtctcagccttttggggtgaacgaggatgaggcatctgatctattcgctaccgggactcctccaggctcccgagaggagtcgggacccttcggcttggggtcagctcagctccctgccttgtcacatttgtctgcatta

SEQ ID NO: 43677 - DNA, 952 bp, Homo Sapiens
agaacaccagttggactggattttaactttaaccagcctcatttaagttaatcacctctttaaatgctcaatctccaagtacagtctcattctgaggttccagggtttctcaacgtaagaatttagggggacagaattcagcccgtagcagctgggcagcaggactcatgggtcccagttctcaggccccaaggactcagagcagcaaaggatacgtgacacaagcagggctgaactggacaccagactttctttggggttgtaaaaggagaagtgtgactccactgccaagggtaagcactcttgtcttatgctaccctttattcttgaaccttggggcagcctgtgtctcccttccctaaacgtcatctgttccgtttttccagtcttccagacctggtccttggactggagaccttcacccttcctattttgtggctttctcttcaaatccacctcgtccttcctccatgacttataagtcatcatctctgctggtttctgaaatgagatatgcttcttggggtcttcagtgaagaggaatagcaagtgaaaggaggatggtggcagggtacatgaacccctaacaggcttctaagctttccccctgcatggaagcagcctctaagttggccccaacattcctgcttcttctattcacaccttgtgtgggtcctttcccattgataggcctgacttgtgttaccctactattggagaatgagaggttggctctgagggtaggctacatactccggggtccggcttgggtcttgacgcctatgggggagccgttccggctggaaatccacgccttggtgtcccctgaggtggggccccccacccgggttgcttgaggccttcccaccttaccctccttcctggctggccacccacgggccacgcgttgtaaacgcggcgccgtcgcgtctcgtctcgtgttcctcacgtt

SEQ ID NO: 43678 - DNA, 700 bp, Homo Sapiens
ggggttttctttacagactccttgttctctagaagggctttttacttgaataaaacaatgcaacttagcaaaccaatttatggccttagagaaacatttttgcatgagttcttacaaactgtttgttatattttctggaatgataagtgagaattatttagaaaagacatgctccaaaaaaaaaacaaaactgataaaacagtttttcgaaacttacttttaaaagcatacgtgctatgactctctccagtttgaatatgcaattgttttcacaggcaggatgtctgttttctgcctgtatttcccagtgatttactctagggtaaggtagtacacatttggttcagaaattaatttttatttctcctatatcttgttttatcaagattttgttgtggcatttcaatgtaaattataacaccatcatttgagtatacataattcaaaagaactacttgatgcagtatagtcttaagggttctgcatacattttagaaacatcttagccgtaagttaggtcctgtgttaaactgtttagtgctctgtttttaagaaaacaaatgttgaacctcacacttttatgtggtgacagtgtaatttaattaaaaggtgtaaatgttttcatctcttaggcttgctgtctccctacgtcacccaagcagtggttgggatttatacacattactacttaaattatact

SEQ ID NO: 43679 - DNA, 572 bp, Homo Sapiens
tccgatgcaataagaaaatgtaaaggtttttgtctgtgaatatgatccctaatgtgtttcttttgacaccttagttccttactgtttacagtttaggagtactgataggggttcatgcttaataaacatgtcacaatacagtaagtaaagtggttttgtttgtttctttgagatggagtcttgctctgtcacccaggctggagtgcggtggcgcaatctcggctcactgcatcctctgcctcccgggttcaagcaattctcctgcctcagcttcccaagtagctgggattacaggcacgtgccaccacgcccagctactttttgtatttttagtagagatggggtttcaccatattggtcacgtcacgttggtcttgaactcctgaccttgtgatccaccccgccttggcctcccaaagtgctgggattacaggtgtgagccaccgtgcccggccaagtaaaatgttttttaaaatggttatgtgcattattcataaaaaataatggtgtccagtctttttaaacttgtaaagacacatcttattgaataaagagatgagagcttaaaaaaa

SEQ ID NO: 43680 - DNA, 581 bp, Homo Sapiens
tcaaaggctgttattgagacagcagatagagccaagctgcaacctatagctttaagctgtgtactgaatattggtgcttgtaaactgaagatgtcaaattggcagggagcaattgacagttgtttagaggctcttgaactagacccatcaaataccaaagcattgtaccgcagagctcaaggatggcaaggattaaaagaatatgatcaagcattggctgatcttaagaaagctcaggggatagcaccagaagataaagctatccaggcagaattgctgaaagtcaaacaaaagataaaggcacagaaagataaagagaaggcagtatatgcaaaaatgtttgcttagaaaggattcagttttgcttattgtgtgttgattgtataaatgcaataagaaaatgtaaaggtttttgtctatgaatatgatccctaatgtgtttcttttgacaccttagttccttactgtttacagtttaggagtactgataggggttcatgcttaataaacatgtcacaatacagtaagtaaagtggttttgtttgtttctttgagatggagtcttgctctgtcacccaggc

SEQ ID NO: 43681 - DNA, 475 bp, Homo Sapiens
tcaccttcttgtactgtgaacagttcaaccagtgaccgacttctctctcatgctgtttaccccacacacaatttcccactcaattctgaaaataagaacctgttaataggttggaaagctgtgtactctattcatatattgatctttcatgctagtggagagtggtgtcattagcatcttaattttagagttgtgaaatgattttaccaattaggaattgaatgtgtattttttttctgtttaataagaagagcaaatttgaataaataagctggtgtagataaacttaataatcatgctttttcttgtttggagataggtgatgtgttgtcatatcctgtgatacaggtcactcatctggccttctgtttctgaagtttaagtctggtttgaatatgtaataatactactcagcatttcttgttgcctaagtgagacgaaacttaaatgttatgatatttacttcatgtattct

SEQ ID NO: 43682 - DNA, 569 bp, Homo Sapiens
gcataaccagggtggtgagggcactaatcttgtaggaaacacttacttgatgttttatttgaacttttcctataggtttaacttttactgcatagaattaacactaggaacagtgtcatgaaatctgggttgaaggagaatacagtatatatgagaacacttaaagttcaaatagaaatcatttctgaagacaaaagcagaggaatattgtcagtgccaagtaatggaagaataagggcggcatttacactgtgcaagtattgagaagagtgcataaagacagggaactactctcatggagacagtttctctcttataatcaagtaactagaaggggaaaaatcatctaagttatgaaatccaacataggcgctatattacaaactgtgccggattatgcaaattgtagttgttactgatcaaagtttaattgcttcatttttgtttaaaaagggatactgatgtcagaaaatctgtaatatgttttattcaaaagatgtaaataatgtatacagacttgtatgtgatgggatgggaaatatttaaattctaggtgttttttttttttt

SEQ ID NO: 43683 - DNA, 761 bp, Homo Sapiens
ggggccttatatttaattccctatgcaattaatattttatatctgcattttttttaaaaaaatagatgttatataagtgattctcgtatgtagcacctgttgcttttccactgaaagaattacggattttgtactgtgatttatattcactgccccaattcaagaaatattggagccttgctacaatgtgaaatgttatagtcatggactccttccaaccagatttctgaaaacaccagagggatggtataattctgtctcacctataacatggtcctgtgacatagatattaagaccacaagttgtagtgaggctacaattatattcgtctgtcttggctttgcaacataatttagaaagcacgtatagttgttttttaaccaagttacatacaatctcatgtactgatttgagacttataacaatttttggagggggcatagagaaaggagtgcccacagttgaggcatgaccccctccattcagacctctaactgttgcctgagtacacagatgtgccctgatttctggcccattggccatagtactgtgcctaatcaatgtaataggtttattttcccaatcctcaaactaaaaatgttcataacaagatgaattgtagactagtaacatttgatgctttttaaatatttgcttcttttttaaacaaaaactaaaaacccagaagtggaattttttaaggggggattttttaaataaaaaaaagaattgcattttcccaaaaaaaaaaaaaaaaaaa

SEQ ID NO: 43684 - DNA, 828 bp, Homo Sapiens
tcaaatatgtgtaatgataaaatctgaattgtaaaattttgtatattgttaaaattgtaattctaaattgtatttcaaaaatgattatttctgatatgtttttatgtcacccatgatgaaaactggactttatatatctaaacatacaagtatgaactattctatttaaaatttttaatagttttttttctttttggtgcctataattgattggtcatttctgctggcttttctccaatgaacattgaaatcttcctgtatatgttaccaataagaaaactaccctggaacagtagaaaaacccaacaagagacttggcattcatcaagcacattatcagactttgagaacatattgaaggcattgactttgaaaatcatctctttttctcaagaagaaagcaatggagaagcaaatttgtttcattcagtgaatccccagttggggcttgtggggcttagagacattgtgaaatcaaatcttgtgttatacttttctcctggctcactttttttgagaaggtttatgggctatttggtggtgagacacgatccctcctaagaaaatgttaggtgctcagacaggtaaccactgctgctactgtttatcggtgttgtcactttattaaatgtctgttgtactacgatttacacactgtgcttatgcgcgttttaacccgaaaaaaaaaaaaaaaaaattttggggccgccccaaattttaaccctctggccgccaaggaaaaaatgacaacgtcaaaaccgccgacagtggttcacaaaccggcggttgacacagttcgttctttcagcacacaccgcgcggagggtt

SEQ ID NO: 43685 - DNA, 1086 bp, Homo Sapiens
gttcctggtgtttccctgtacagtagtcaaactcatgaagaaattttagcggaattattgtctcctacacctgtttcaacagagctgtcagaaaatggggaaggtgactttaggtatttgggaatgggagatagtcatatcccaccaccagtaccaagtgaattcaatgatgtttcccagaacacacatctgagacaggaccataattattgtagccccaccaagaaaaatccatgtgaagttcagccagactctctgacaaataatgcctgcgttagaacattaaacttggagagtccgatgaagactgatattttcgatgagtttttttcctcctcagcattaaatgctttagcaaatgacacattagacctacctcatttcgatgaatatctgtttgagaattattgaattaatgcttgttaacttttttcatataatatttattattattagaagaacttacaatgtgttcaggtagtgtttatacactggacttgtgtaattacttgtgtaataaccatgaacaaaatgcaaggtttaacctttggttctgcccatgaagcatgtaatctttcttacacattaaaatcactgaatgtgcttaacacacaacaaacaccaacaaacaaaaaaaacaaaatacacaaacaatatgaacacaacaacaaaggggggggccgcctatcaaaagaattccacgcgaggggccccaaatttatagcggtccaccacgtttttggtacaaagggggtccccactaaaggagcctatttataagcgagtgaacgatggtgggccgcagtgtttttaaacaaacaacatgtcggtgcagctggaaaaaaaaaccggtcagatcggcggcaactatcttggagagaaggaacaccacctttcctcggcgggcggggcgaccacattttgtgagccaacacccacccccgcgaggaaatatccagcgtcccggggcggaaataaataaaatatgaggagtgtgaaaaaggggctgccaaacaaacgaggagtatagacagagacgagtgaaaaacatgtgactccactggacttaatctttgagacaatttc

SEQ ID NO: 43686 - DNA, 887 bp, Homo Sapiens
aggtgtctatcaaaatgatgtagggggtatcttaaactgtccaaggcaatcatgcattgaactttattcctatgcagagccaaaacgaatagtgttgataaaatagctaaactttctaaactggagaggaggctacagtgccagagagttattgtctcttttgctttaaatggtaatcttaaaagttgcattgtgctcttcctttgttttgggatagatatatatagagagagatactataaggaagtttatttcttaggaagtacactgaataatgtatttcttttacagtgtaatatgggggtggggatatgcgaaagaaatgtgtatttttgctagttgcctaccttctgagataaataagcacaatcttgcaatggatccaataacccagttaggtattatagattagtatttaagtttgctgtagattgtgtgtgtgtgtgctaagtaaaagttccatgattcacaattttagtattaacccatgttgcaaaagctgttactggccaacagattgtaatgatgtgtaccatataacacaagcattaactaggcattaacgtttgtaaagccaaatataccatgcagaagtcttcatttttatagcagactgcattaaaacaagttaaatcttgctgtttggggggaaatagtcttgtttgtacaaagtgaaaaatggcacaatttgggcatattttgttgggaagagggggtggtgtaaagggagcacttgactgtggctttgacaaaacaaatgaagtcaatgacccatccaggttagactccataaggaactaagacattgatttttctttaaagtcttagagctggaaaaaagcctttacaataaatccagtctgtgatttttttaaacctttttggtg

SEQ ID NO: 43687 - DNA, 543 bp, Homo Sapiens
gatctttgaagtctatttaaatattcattccattacatctagactcaccaagaactacatgttatgatgttaagttgaagttgaaacatgatgttttgcattaaatttaagatatgcaaatttatgtagagaaaataaatgttatataccctataatctttcacctaattagtatttaattatatggatttgttttatattataaaagatgttttgattttgtcttttgatattgacaaaattgtttggatatccttatgttctcaagtctgtatctgcctcccctgccttatttcttatgttttgccacagttaacccattgtgcttctttgtaatcaaacagtttgtgggagaatgggcttattgaatgtctaaaaaataagtttaaagtgtttgttaccctaagttttttacatttttaaactctaattacatatgtgaatgttattactctcagtgaattgttattgtttgcaaaaatgcactgggcagtaacattttgtgataaatcctataagatataaaaaacaaacaaaaaaaaa

SEQ ID NO: 43688 - DNA, 746 bp, Homo Sapiens
accccgaggagaccgcggccgaggagagctgggactatgtgcagttccagctgcgctgctgcggctggcactacccgcaggactggttccaagtcctcatcctgagaggtaacgggtcggaggcgcaccgcgtgccctgctcctgctacaacttgtcggcgaccaacgactccacaatcctagataaggtgatcttgccccagctcagcaggcttggacacctggcgcggtccagacacagtgcagacatctgcgctgtccctgcagagagccacatctaccgcgagggctgcgcgcagggcctccagaagtggctgcacaacaaccttatttccatagtgggcatttgcctgggcgtcggcctactcgagctcgggttcatgacgctctcgatattcctgtgcagaaacctggaccacgtctacaaccggctcgctcgataccgttaggccccgccctccccaaagtcccgccccgcccccgtcacgtgcgctgggcacttccctgctgcctgtaaatatttgtttaatccccagttcgcctggagccctccgccttcacattcccctggggacccacgtggctgcgtgcccctgctgctgtcacctctcccacgggacctggggctttcgtccacagcttcctgtccccatctgtcggcctaccaccacccacaagattatttttcacccaaacctcaaataaatcccctgcggtttttggtaaaaaaaaaaaaaaaaaaaaaa

SEQ ID NO: 43689 - DNA, 773 bp, Homo Sapiens
gaaaaatgtaagattttatgaaggttgaatactgaagcacagttctgctttcaaaaattaaaattcaaacttgaaaaagctgtttaacccatggaagatatcatttagtaagatgtaaaagatttttgaaatctacacttcagttcatacatctttatcattatcaatactatataagttactgtgagcattttagagaattccataaaggtactatgagtgtgtctgtatgtgtgtgtatatatagcattgtatttaatcatagactaaatttaatttgatatagaaatactactttacttgtacattaaggtcataatttctgctggactcttttatatttaattaatggggattatagtcttccttcataaatgcatttaaacctgaaattgaacaccagtgtttttctttttctacttatgggaagttgtctgcttccccctttagagaaaacagtatttttatatttcgttaaaatattaactactttatgcctacacactatgctgtagatactgatcataattcttgggtgttcacaaacactcctagtgcctctttttggcccgttgaaagtgtaggtattactactttcactacagagcctatggccctctaataatgctgaggtgggctgatccttcccatttactgtcttcgggtcattctggtaggtcttcctcctccactgtcaaagtaagcaatacaggtccgtgacagggattggacatatgaaccaattaagtggatacacacagtgagaaagatac

SEQ ID NO: 43690 - DNA, 897 bp, Homo Sapiens
ttttattgtggctgaatttttgtgcctatctataaaacacactttcaaattatttgaattaccaagacgtctgcttttgtgacagtcagaaaacacacctggaatacgatgcagcccaccattaactcattcatgtagtttattcaagtgatttatgtatttaaactaaatattgaaaatgttagtcaaattgtggtttgcttgtcaggtatttatatcagtctgtagtggattcccaaatttcaaagctcttttaatgtaatggacaaaaataagatatgagaatattattgatgaattttcataaggtggaattgatcttaatctactaacagagaagggtagacagtttgtgttaaatgttggcatttacttgtattgaccaaagttttgcagctctactatattctgtgctcaggactaaaatgctgttaatttttttttttttttccagtgctgtgcatatattctgtgatgggaaacattgttgatgtcctaacagaaatatattttgatctattttcctatggagttgtttctattatgaccatttaattttgtttttatttaatagtagtatttccttcccttttatctaattttttatatgctgctaaatatattttaaatatactatgtttgcgaaccttggtagctatgatgagagctattatcatctgtggtgggaaaagctatgtaaataggtagattgtatagagagactatcttgtgttgtgcctgtatgaatttttaaaagttgttgactggattttgcaaaaggatgtataatatttctgtctgctcagaatattaatttgtaaattctgcaagtttaatttttatgtagatggtataacatttgaaaatattgtcttatgtgatttttcccygaaaata

SEQ ID NO: 43691 - DNA, 841 bp, Homo Sapiens
gtgggaaagttttctgtatattgcatagcattacacatttatgcctattttaacattaacttctaaagaagttttttctaagaaaatgtttcaaggcaatattttttttgaggctgccgaagacaaatgacaggattatgagtatacagtgtatgccttttccttcatgcagaattttgaaatgttttcagttgtatattgcatattcacatgatcattgctcactattttatgaactggccttctcaatgtttgatgattttttaaaagctgttatgttgaattcagtaaaataacattaccttattttttttcttattcaaattctggaactatagcaaataattcgttaaattgtcatattcaaaacaaatgtggatacagtcttggttctccatctgtaattttttttaacagtttgctatagcttactgcttaactaattttaaataaggaaataagtatgttagatgcagtagacgatacaggttgcatgtggacactcagtcacattaacaaactggggaaaaaaaatggcaatgttacggtggaatctcaaggtgaactttttttcagttataaaacatctatttctgactctgtcacttatctcacatgttttattaaggcatgtaataacctattccttgaaacctgtcgggttcgaattgaaaacttaaaggccctatgctaaagatggccttcggtcataacgcgaagcgcaaactgatttcattcttcccacataattctccacctgaataacacctaacttgtggtctttctgggccggtctaacatatcaagatatatccatctcccgtgttccactcccctccag

SEQ ID NO: 43692 - DNA, 556 bp, Homo Sapiens
aagcattctgccctcaagccaaggatcatcccctggaacccagtatgcacccagaggggactcagcttcaaagctgctccaccatgctgggtcccaggcagctttcctctgaaaagcaacctctcctgccacccagatcccatctcaagagctcgcccatgttacgagcatgtaaaggactgacttcctagtaactgttgcagtttacaacctgccctccagggacacgtctccatggtttttcctacacatgaatgcgagaaatggctgataagcacagtaatttaagattgcgtattcatgtagtgagatttagtcattaaccaacccggtctttgtgatgtgtgaagccttcccttcagttatgtcccatttttatgatgccaaaagctgccactgtgtggtattcgaggattattgcaacaaagccagtagttaaaccaaaaaaaattcactggccgtcgttttacaacgtcgtgactgggccctggcgttacccaacttaatcgccttgcagcacatccccctttcgccagctggcgtaatagcggggccc

SEQ ID NO: 43693 - DNA, 737 bp, Homo Sapiens
  misc_feature (687)..(688): n is a, c, g, or t
  misc_feature (707)..(707): n is a, c, g, or t
  misc_feature (710)..(736): n is a, c, g, or t
gataatgtaaatttaaatgcctctacatttgatacgaaacccacattcaggtgacactgaacgaggtggcttttgtcccaccagtgcctcatcagtgtgaggcgattcctctctgctttaggaaaatgatttttccccctaaacttgtgccaaccatcaacaacatctccatagatcttatggattgtagaactgttggctgtttcctaaatttattccaagttctcgtagaggcatatagatttcagtctgtgcttgtatgggatagatgatctgagtggctttctggcctcttttttgagtttaaaatccatatgaggttgacgtgtcatactaaggtaacatgtttgtgaggttattccactagtactgtgatcacgtgggtgtcagtatctttaacggccttcattcttggttgtgagattttatttgatatgcccactcaccctcgacgaatctgcccgctttgggctgtggtgcctgtgtatctttgcccgtctggtctccagttggtggaattaccttttttgtactgccacttctcagcatctttgaaatttgacataatgttgcttcatttcagtttttttagttctgtaatttgttgattgtatttaactatgtgagttctgttgtgatgtttactgtattgtaaagcacctcattcatgtgatgagtgctctatannatcaataatgatgacttangannnnnnnnnnnnnnnnnnnnnnnnnnng

SEQ ID NO: 43694 - DNA, 602 bp, Homo Sapiens
  misc_feature (9)..(9): n is a, c, g, or t
  misc_feature (528)..(528): n is a, c, g, or t
  misc_feature (585)..(585): n is a, c, g, or t
ccattgctntcttaggaagcagctatgaatccattgtccttgtagtttcttccctcctgttctctggttatagctggtcccaggtcagcgtgggaggcacctttgggttcccagtgcccagcatcttgtagtctcatcccagattactaacccttcctgatcctggagaggcagggatagtaaataaattgctcttcctaccccatcccccatcccctgacaaaaagtgacggcagccgtactgagtctgtaaggcccaaagtgggtacagacagcctgggctggtaaaagtaggtccttatttacaaggctgcgttaaagttgtactaggcaaacacactgatgtaggaagcacgaggaaaggaagacgttttgatatagtgttactgtgagcctgtcagtagtgggtaccaatcttttgtgacatattgtcatgctgaggtgtgacacctgctgcactcatctgatgtaaaaccatcccagagctggcgagaggatggagctgggtggaaactgctttgcactaancgtttgcctgggtgtttgttttaacgcacaacttgcctgtacagtaaactgtcctcngtactaattaactgtaa

SEQ ID NO: 43695 - DNA, 629 bp, Homo Sapiens
ccaccctcgagcggggttcccctcattgtacagatggggcaggacccagcacgctgctggcagagatggtttgagaacacatccaagccagtccccccagcccagcttcccctccgttcctaactgttggctttcccccagccgcacgggtcccaggccccagagaagatgagtctatggcatcaggttcttaaacccaggaaagcacctacagaccggctcctccatgcactttaccagctcaacgcatccactctctgttctcttggcagggcgggggaggggggataggaggtcccctttcccctaggtggtctcataattccatttgtggagagaacaggagggccagatagataggtcctagcagaaggcattgaggtgagggatcattttgggtcagacatcaatgtccctgtcccccctgggtccagccaagctgtgccccatcccccaagcctcctgggaggatccagccaaatcttgcgactcctggcacacacctgtctgtaacctgttttgtgctctgaaagcaaatagtcctgagcaaaaaaaaaaaaaaaacaaaaaaacaaaaaaaaaacaaaacagtttttaaaactgattttagaaaaagaagcttaatctaa

SEQ ID NO: 43696 - DNA, 749 bp, Homo Sapiens
  misc_feature (696)..(696): n is a, c, g, or t
  misc_feature (716)..(716): n is a, c, g, or t
ctgggactttctgcggcgcttaggggtctaccccaccaagaagcatttaattttcggagatccaaagaaactcattactgaggactttgtgcgacagcgttacctggaataccggcggataccccacaccgaccccgtcgactacgaattccagtggggcccgcgaaccaacctggaaaccagcaagatgaaagttcttaagtttgtggccaaggtccataatcaagaccccaaggactggccagcgcagtactgtgaggctttggcagatgaggagaacagggccagacctcagcctagtggcccagctccatcctcttgaaaggtggattcagagggacccccgggacaagggtctgagacccaaaggcacagtttagaggattgggggaagggagaacgaacccagggagcatattgctgtaaacgcttcaatgtgtgtagctttaggatgtgtttgcaaagttttgtttttttaatgttgtgttattttgctccagattttcatctataaacaaaggagcatttgttttgattttactctttttggtataaaaaattttgctagcttagtaaaacgaattggaaaacttgactatgatctggaacagataatgcaagaaggaacacataagtaagttgctttggtgccaagaaaataaaaaagctattatcaggtctcctaactaccccagnttgtaaggaaaaataaaagnttttataaaattaaaaaaaataattgcctatat

SEQ ID NO: 43697 - DNA, 631 bp, Homo Sapiens
cgcgtccttttttttttttaatttcaatgttaaatacaactacaatatgagcgagaactgcattttcttgggtgttgagaacttgtaccatggacttcagaccgccttgcagccgtatgctgcacaagcgtgtacaccccctgggcagcctcaaaaccccgcttacagcagcaacacaggagatcatctgtccattttagaaccattaatctctttatccattgctgaacgactgtgactattcagtaacgaagtaatagtaattaattagtatggtataatctttaataaatttcgtgccaaaatgcatggttttccacttagcattcaaaatgttgcatagagagtagttttcaatttcttatgtactcttcaaagtaagttgaaaatcagtttctacattttaattcgtttcctgttaaatctgttgcactctcctgggctgtctttttctccagcagacccctgcatgcagttgtgtaaggactttctctaattcttgtgaatcgtctcacccgcagtaaccactgaacgtcaatcagccctccatggggttctttcgatttttggtgaagtattttgttacctcagtcttgtatcaagttgctgtatttttcagcttgttacattg

SEQ ID NO: 43698 - DNA, 415 bp, Homo Sapiens
gcacgaggcccctcccaccttctaggcgaatagtccccagagctgtgttcctccaaggggtccgaggaatcactcactcctggaggctggcaaggagacagtctgaggccagggacacatgaagggatgtccccaccccagcactatcagggcctccccaggcttccagagttgaaagccaggagaaaatcggcaaagaccacccttccctaaacccaagcacccaatgatgcaaaaaacaaaaacaaaaaaaaaccaccaaatccccaaattcattccagatctatttttctaccagagagaggagcaaagtcctcctcccctgcgcccttacattctgcacttcatagttggattctgagcttaggatcatctggagaccccatggagggacttggaaaggggaactgggatt

SEQ ID NO: 43699 - DNA, 713 bp, Homo Sapiens
  misc_feature (16)..(16): n is a, c, g, or t
cctaggatcaatatanttttctgctatcaagtcatcctttatgtcctgacgcgtcttcaagcagaagaagagcaaaaacagcagcgtcagcttctgaagtgacatgaaaagagcctctggatgcatttccatttctctccttaacctccagcagactcctgctctctatccaaaataaagatcacagagcagcaagttcatacaacatgcatgttctcctctatcttagaggggtattcttcttgaaaataaaaaatattgaaatgctgtatttttacagctactttaacctatgataattatttacaaaattttaacactaaccaaacaatgcagatcttagggatgattaaaggcagcatttgatgatagcagacattgttacaaggacatggtgagtctatttttaatgcaccaatcttgtttatagcaaaaatgttttccaatattttaataaagtagttattttataggggatacttgaaaccagtatttaagctttaaatgacagtaatattggcatagaaaaaagtagcaaatgtttactgtatcaatttctaatgtttactatatagaatttcctgtaatatatttatatactttttcatgaaaatggagttatcagttatctgtttgttactgcatcatctgtttgtaatcattatctcactttgtaaataaaaacacaccttaaaacatgaaaaaaaaaaaaa

SEQ ID NO: 43700 - DNA, 836 bp, Homo Sapiens
  misc_feature (695)..(695): n is a, c, g, or t
  misc_feature (699)..(699): n is a, c, g, or t
  misc_feature (701)..(721): n is a, c, g, or t
ggacccaggcacatgccagcggcttacagcaggttcctcagctggtgcctgctggccctgggggaggaggcaaagctgtggctcccagcaagcagagcaaaaagagttcgcccatggatcgaaacagtgacgagtatcggcaacgccgagagaggaacaacatggctgtgaaaaagagccggttgaaaagcaagcagaaagcacaagacacactgcagagagtcaatcagctcaaagaagagaatgaacggttggaagcaaaaatcaaattgctgaccaaggaattaagtgtactcaaagatttgtttcttgagcatgcacacaaccttgcagacaacgtacagtccattagcactgaaaatacgacagcagatggcgacaatgcaggacagtagacctcaccctttccagactttagagcttgtggcttgaatgttaaaggtgtgaccaccgacaccactcatgtcaatggctgaaagttgtccatttccatgactcaaagacccattggaggctattttctgggatcagcactgaagagttgattagctaaaaatgttagccttgtaattcgaatatctggttttaaatgatagaggtttttgtgggaatcaaaatcccccaaatgttaaggtatatggtaaaaaaagaaatatctgggatcccgatgttcttaataaatcctgacttcccantaanannnnnnnnnnnnnnnnnnnnnaaaaacatgtcgggccgcctcggcccctccaagaaactttctaggaccatttcgttttggccgccgcggggccccggtagggtaaagtgaaacctgggcgcaataagctggcttt

SEQ ID NO: 43701 - DNA, 883 bp, Homo Sapiens
ccacgcgtccgcggacgcgtggggtgtaataaaaaagaattacctaggttgccaaaggtaatttaggaagggtctgatcatttagatgagagttctttggggcttattttctgggtaaggctcatctttaaaaactggcttcagaggggagaggggagaacaatgaattggctctattttctctattgggaattacaggaccattttgattcttagaatgtaaaaagcatatcgctaagtaaatcatcctggaggtcccaagtagctctatgcctgcaatcatggagacacaggcagacagataagcttcatggggaaggcatggggcatcctctgtcttgggatttgtatccatggtggtctggtccctgccttttaatccgtcctctacgcttgggcttttctgttaccaaacagcactatcccaggaactattgtctgcctgggaacactcagtagggagacactttggagacaggaggtgatgaacctttttatgtgcagctggtatgatagaaggaaattgggaaaacttgtatgctaggcacttttgtccagagcctgctgtcccatggagaaaaagttttaagcactgaaaaaatttgattaatgtatttaaatgtattatttgaagcatcattcacttgttcatttttacaatcccatgtcttaaaaaggatgaatcccatgttattggattggaaataatttagattattaaaatggattggttaaaaagttttaaaacagaaaagaccaccataaagggcggcccgctctaaagaatcccccccgggggcccaaacttaggccgtacccggctttctcttgaccaaaggggccccctaaggggagccctattataacactaagccctggccgg

SEQ ID NO: 43702 - DNA, 644 bp, Homo Sapiens
tatgcagttcagaagtggactttaggtaagtcatttattttaagctgttgatatagagatttattttctgtaaattttgacgtaaatagtttgagcattagaaatcaacttgaaacaataaaatgtatgcttccttgaactgtcatatcgttgacctgcaaaattcacctttggaacgtgacacaatgttaggcatacctccttttttctaatacatggaatacattttgttggaggtaatttatgtgattcatataccactgctacagtgttagctgacaacatatagtatgaggtaaggatctaattctgtttcctctcacatgattacttgatagctaagcatctgattggtttactgctttaccactgagctgaaatgccgtgttttccatttattaaaatcacacatggctcctgtttttgtcactcagcactttttctccatattcttcaagacgattgtgagtatggtacgtaacaggaattacatctggtaagttgtatagttttgtgtaggaactctatattcatagcatatttgtggaaatgatacctatggaggtttctcacactggtgtgtcattatacattaattgtacaatatgcattttcagtaaaatatttgaaaactgtaaaaaaaa

SEQ ID NO: 43703 - DNA, 656 bp, Homo Sapiens
ttttaggtcattttcagtgactaatagggataatccaggtaactttgaagagatgagcagtgagtgaccaggcagtttttctgcctttagctttgacagttcttaattaagatcattgaagaccagctttctcataaatttctctttttgaaaaaaagaaagcatttgtactaagctcctctgtaagacaacatcttaaatcttaaaagtgttgttatcatgactggtgagagaagaaaacattttgtttttattaaatggagcattatttacaaaaagccattgttgagaattagatcccacatcgtataaatatctattaaccattctaaataaagagaactccagtgttgctatgtgcaagatcctctcttggagcttttttgcatagcaattaaaggtgtgctatttgtcagtagccatttttttgcagtgatttgaagaccaaagttgttttacagctgtgttaccgttaaaggtttttttttttatatgtattaaatcaatttatcactgtttaaagctttgaatatctgcaatctttgccaaggtacttttttatttaaaaaaaaacataactttgtaaatattaccctgtaatattatatatacttaataaaacattttaagctaaaaaaaaaaaaaaaaaaaaggac

SEQ ID NO: 43704 - DNA, 861 bp, Homo Sapiens
  misc_feature (785)..(785): n is a, c, g, or t
  misc_feature (800)..(800): n is a, c, g, or t
ccaaaagaccacgccctttaacctaagacctgcctgtgacttgagggttaagaagaaagaggaatgaggaaaaaacgctgttgcccatttttgtagccagagaaattgaaaaacgactgtggcttgatgttgatacacatttgaattttttttaaaaaaagaaagttatcgtagccagcctgtaaatacttgatgcattcgtttcctcagtgctgcaatacatcgtggacttaaacatcttatttatctgataaactcagccttaccttgtggaatctgaagattgaaatatccaaaggtttaaacaagatggaaatcaatgaaaaagaggccttgtttatatatgggtagcttcacatttaatttataaagttaacaatctggaaactgtgagcccataaaacagtattttttagaagttgtgttacaactgtagcaaattttccttttaaaaaatccaggcaatggcattaaacattcttgctatcatttaccatggatttcctacatttctgagatccctgtattcaaaaacaaatgacagggttgttaagttgtactatattaaacaacttggtctggtttatatcattttaacaagttttttggaaatgtaaaagaaaaaagtaaagctccatttttgtgaattgcattgtttctaaaggaagtattttgagtattttcatctgtttgtattgtttcgactatgatatcagatatccagtgtgtccattctggcagtggttttgagttacttcatggaacttggacatacaccaccaggnccctttatgtgttgntcctcctgggagaacttcttttttttaaatgccaggggctactttctgcttttaccctcgt

SEQ ID NO: 43705 - DNA, 808 bp, Homo Sapiens
  misc_feature (738)..(739): n is a, c, g, or t
  misc_feature (765)..(765): n is a, c, g, or t
ttttttttttttttttgtaaaagatactattgaaggagggaaaattctcaaggttccatagtatcttttacaaaatggattaaaaaaaaaatgcctatgcaacttcaaatagtctgatgcctgcttccccaggacgagtgactcttccacggtgtgctgctttccctccgagcctgtggaaaggcagagccttgcagatacgaaagcaagcttttgccaatgatctttaatggagttaaaatgtttatggtaattgtaacctttcaaatgagttacgtgaaaagagcatctcacttttaatacacccagatattttcttcaagtctttgtgcattttagcaggacttaattttcttaatttattctttcctttcaattatagtgacatagagtagttggccttataagtagatcccatttagcccctgaacataataccatcccagtattataaaagtcatttagaaggtcagggggataatctagaggcaggattttggacattgtgaaggaaatgtgctccttctcagctcacttcaataactattttctgagactgaagttttttagacaagaataagaaaactttgctttcttcagttatcacatgtgaaagcttttgctttttgttaggaaaaggtgtggatgactctactgcgtggatggttacatttgctttccgtgaaatgctcagaaaatgtcaggacattccttttccaattgtgtgtcagtgcgtanntgtataaaactactgatttaaattanaaaaaaaaaaaaaaaaagctacagccgccctcgttccgaattc

SEQ ID NO: 43706 - DNA, 748 bp, Homo Sapiens
aacagctgtcggtcggattcccgggattgaaaatatagtacccatgagcatttcatgttagaaaccccatttaaagcactataaggctgaataggcacaagcgattaaaagtagatgccaggccacataaaaataaatgttttaatttacttagagctgtattcaagttgtttgataccagacagaaagctgacagtctgttctttgtaaactgcctttccctgtttttctgttttgttttgtttctcaagtttcattttttactaagccccttctgacacctaggcagataaagataagagtagtgcgcagtacaaatgtcagctctgaagaggaggaagtaaatcttcaatgctagggcagatcttcactatccgtgatccagtcttaatttgagcatgagagcaaaatttagtcatctacacaagaagcaaaagcaaggaatagttgttgggtttttgttttttggttgttgtttttttttttttttaggcaagaagtgttgccggtagggtatgtgtgctttctttgccttcctatttcctttcaaagaaatctcttgtaaattacaaaactgtgaattgggttgccaaaaactgttgcccttcgttagatgcttcaaacagtgtaaatcctatactgcaccctgtccacctctgctccctcctccctcccctgagagtgaggacctcatccgaccatgtaattaccattcgcttgctattaaagagcctttcaactcaaaaaa

SEQ ID NO: 43707 - DNA, 613 bp, Homo Sapiens
taggcattgtgtagacataaaagccagttcagtgttttggcagcaaatggagtttgttgatagcctgcatggccaacccaagatgccagaatggttatctacacacccttctcatggcaatcgagttgagtacttggatagacttatacctcaggctctcaaaattagagagatgtgtaattgtccaccactgtctaatccagaccctcgattactattcaaactcagcacgaagcatcttcttgaagaatcagagaaagaagacctaaatatcacgaagaaacagaaaatggatactcttcctattcaaaaacaggagcaaataccattaacatacatagttgagaaaagaacgggcagttgaattaaaatttatgagacacaagatatatgaagaatgttgcagtccttatcattttatgttactttttaaaaaatgatgtttgaagtgaaaaaaaaaaggatattcagggtcaaatcatgtacattacagatattatctaaattcttctagaatttatttttcatgaaatattgatgtattttaatctatgttaaaatatcttcaatgaggaaaatgtcacagaataaatttatattacacatcttaaaa

SEQ ID NO: 43708 - DNA, 941 bp, Homo Sapiens
tggatggaagaatttaaaaatgatatgctaactgagaaagatgcccgatacctggctgttaaagaagtgctttgtcatctaattgaatgcaataaagatgttccagggatctctcagatcaattgggttattcatgtggttgattccccaattattaatgccttcgtgcttccaaatggacaaatgtttgttttcactggatttttaaatagtgtaaccgatattcatcaactttctttccttctgggccatgaaatagcacatgcagtacttgggcatgctgcagaaaaggctggcatggttcatttgttggatttcctaggtatgattttcctcacaatgatttgggccatttgtcctcgagatagcttggcacttttgtgccagtggatacagtctaaattgcaggagtatatgtttaatagaccatacagcagaaaattggaggccgaagctgacaaaattggactactgcttgctgcaaaggcttgtgcagacataagagccagttcagtgttttggcagcaaatggagttcgttgatagcctgcatggccaacccaagatgccagaatggttatctacacacccttctcatggcaatcgagttgagtacttggatagacttatacctcaggctctcaaaaatagagagatgtgttattgtccaccactgtctaatccagaccctcgattactattcaaactcagcacgaagcatttttttgaagaattagagaaagagaccttaatattacgcagaaacagaaaaagtattctctttcttttcaaaacaggggcaaataccattacatacactagttggaaaagaccggccggtggattataatttatggaccccaatatttgaagaagttgccgccctatcttttatgtaccttttaaaaaagagtttgagggaaaaaaggatttcgggccaaa

SEQ ID NO: 43709 - DNA, 563 bp, Homo Sapiens
gaatatcaatagatatttaccttttattttaatgtttcctttaattttttactatttttactaatctttctgcagaaacagaaaggttttcttctttttgcttcaaaaacattcttacattttactttttcctggctcatctctttattcttttttttttttttaaagacagagtctcgctctgttgcccaggctggagtgcaatgacacagtcttggctcactgcaacttctgcctcttgggttcaagtgattctcctgcctcagcctcctgagtagctggattacaggcatgtgccacccacccaactaatttttgtgtttttaataaagacagggtttcaccatgttggccaggctggtctcaaactcctgacctcaagtaatccacctgcctcggcctcccaaagtgctgggattacagggatgagccaccgcgcccagcctcatctctttgttctaaagatggaaaaaccacccccaaattttctttttatactattaatgaatcaatcaattcatatctatttattaaatttctaccgcttttaggccaaaaaaatg

SEQ ID NO: 43710 - DNA, 927 bp, Homo Sapiens
  misc_feature (603)..(604): n is a, c, g, or t
  misc_feature (607)..(607): n is a, c, g, or t
  misc_feature (609)..(609): n is a, c, g, or t
  misc_feature (611)..(613): n is a, c, g, or t
  misc_feature (615)..(615): n is a, c, g, or t
  misc_feature (617)..(617): n is a, c, g, or t
  misc_feature (628)..(628): n is a, c, g, or t
  misc_feature (631)..(631): n is a, c, g, or t
  misc_feature (640)..(640): n is a, c, g, or t
  misc_feature (642)..(643): n is a, c, g, or t
  misc_feature (659)..(662): n is a, c, g, or t
ttttatctctgatatacttcattaagtgtctggagacctaattatcctaaaagatcatacattttctacctatgaattttgctgcatacagaaagtgccctttcctcaggaagttgctgtgtttcatttctttggatggactcttatctagaatacatagcagctctgcaaagaaacagtttttaaaaatgggaacttctacattgaaaagtccccatttttgtgccaactatgattagtgagaggaagaaatcttattctatggcatatgtatggaagggtgtaaagattcttttgaaaggtttattcacattgtagaacagcaaatgacatttttacagtatttttttgtaaagcaaactattttgtgccttgaatttggtatatgtgtattagtgaaacattgtaaaggtgaacttctacctctgtatctaaatgtataccatccacttgtaaatgactataaactattatgtgattgcttttttttttagaatgtcttgtttaaatagtggccaatgtttaaggctgttaaaataagccaacttttactaattggggagttttataaatgactgattaaatttaaagaattaacttacnnccncncnnncncncccccgccccntcntcccccgcncnncggcccccccccccannnncccccctcgaggggccccagcgttacccctggccgggctctctttggaacaagccgcgcccgcagccccgggcctctagaggggccccctcccccccctggagcgcgcggtggtcccccccaacagggaactggggcaaaaccgcgctatcgtccgggggcccccccggttataccaaaatctggcacctttgtggggcacaacacggaaagagtgggggggcaaacctcggtcgggacaagaacaactctccaagctcctgtat

SEQ ID NO: 43711 - DNA, 589 bp, Homo Sapiens
tccagaggatcccctgtggagattcgatcactcaggagacatccctcggaggaaaagaagagtttgttgccaccactgagagcaccacagagaccaaagaacccaagaaggcaaaaaggtcatccaaggaggaagccgagatggcctacaaagacttcctgctccagtccagcaccgtggccgccgaggcccaggacggcccccaggaagcctagacggtgtcgccgcctgctccctgcacccatgacaatcaccttcagaatcatgtcgatcctggggccctcagctcctggggaccccactccctgctctaacacctgcctaggtttttcctactgtcctcagaggcgtgctggtcccctcctcagtgacatcaaagcctggcctaattgttcctattggggatgagggtggcatgaggaggtcccacttgcaacttctttctgttgagagaacctcaggtacggagaagaatagaggtcctcatgggtcccttgaaggaagagggaccaggctgggagagctgattgcagaaaggagagacgtgcagcgcccctctgcacccttatcatgggatgtcgtcgaatcc

SEQ ID NO: 43712 - DNA, 812 bp, Homo Sapiens
gcctggacaacagacctctgtttggggagacgtccgccaaggatcgaatcatcaatttagttgttggcagcttaacatccttattgattctagtaacgctgataagtgcttttgttttccctcaactacctccaaaaccgttgaatatattctttgctgtctgcatctctttgagtagtattactgcctgcatacttatctactggtatcgacaaggagacttagaaccgaaatttagaaagctaatttactatatcatattttctatcatcatgttgtgtatatgtgcaaacctgtacttccatgatgtgggaaggtgaggctgccaaggagaagtacttaccaggactcttcaaaatgatacattaggacagtgagtaatttttggataaggtatgctgaagaatctcctgcagaagtctgatacatgattttcatgttaattgtaaatgttaattccctcttgcaagggagacatatcctagatcactttgctttttctttaaggagctgatgttgcacctaaacattccaacccttaaagctaaaacagcacaaaaaaatttcacttttgaaatgaaatttttataattgtatggcaaaaggctatgtaaaaacaaatcttgcatcttaagacaaatattcttttatttctgttaaactgaatatacaattgttccctaggcaaccaacttttgcttataactacaatttaatttcacgttgacaaaacaccgtgaaaagacaactttgtgaagatctaattacaataataaataaaataatttataccaggaaaaaaaaaaaaaaaa

SEQ ID NO: 43713 - DNA, 610 bp, Homo Sapiens
tgatctatgagttttgaaaaagtgaataatcaaaaggaaaataattccttgttgttcataaattaagcatcactaaagtctcttgaaaggcatttctgtattgggcaagatttaaaatactaaagccttaggtcctattcatatttaaagtagcatgtttgtaacctgttactatttggagagagaagcagttgcctgccaaattgaagactacctttcaaatagcaaaagagagagagaaggctgatatttcggcttttaaataaagatttgtgtggttctgcttttactgtaactgtcactttcccagtgaaaatgatttcatatacattgagggtcttacaggtatgggtaaagttctataaattgcaacaaaatgatacccaatttcattttatcctttttgtattgtgaaactggaaactttatgacattgtaaattatcagctggtttttctgaatataaagtgtgaaaacacagaacagtattttgatctatttgataattttgtgggttttttgaagaattaatgagcatgtacatagaaatagtgactgcttgaatactgtatttacttgcactctttcagtacatcaagattcctgtata

SEQ ID NO: 43714 - DNA, 697 bp, Homo Sapiens
  misc_feature (639)..(639): n is a, c, g, or t
ctgcagatgagtcaagctgagatgagtgaactgagtgtggcacagaaaccagaaaaacttttggagcgctgcaagtactggcctgcttgtaaaaatggggatgagtgtgcctaccatcaccccatctcaccctgcaaagccttccccaattgtaaatttgctgaaaaatgtttgtttgttcacccaaattgtaaatatgatgcaaagtgtactaaaccagattgtcccttcactcatgtgagtagaagaattccagtactgtctccaaaaccagttgcaccaccagcaccaccttccagtagtcagctctgccgttacttccctgcttgtaagaagatggaatgtcccttctatcatccaaaacattgtaggtttaacactcaatgtacaagaccggactgcacattctaccatcccaccattaatgtcccaccacgacatgccttgaaatggattcgacctcaaaccagcgaatagcacccagtcctgcctggcagaagatcatgcagtttggaagttttcatgtactgatgaaagatactctacagaacttgtcaaatctttgaaacttggaatatattgctttcataatatgaagttttattgcctatctatctgaagtgtctaatttttcaagtntgtaagtttattatgtggttttaacattgggtgtttttgttttgtttttactatgaaa

SEQ ID NO: 43715 - DNA, 574 bp, Homo Sapiens
  misc_feature (107)..(107): n is a, c, g, or t
ctcccgcgctggaccctcttgcgccattgaaccccctgatccgggggcctcggaccccagggctcaggaggactgaaccaagacttacccgaagttgccgcggggcnccttccgaatcccctaggccattgcccaagtctggccaggctgatgggaccagcgaggagtctctgcaccttgacattcagaaactgaaggagaagagggacatgctggacaaggagatctcccagttcgtatctgaaggctacagtgtggatgaactggaggaccacattacccagcttcacgagtacaatgacatcaaggatgtggggcagatgctgatgggcaaactagctgtgatccgaggtgtcaccaccaaagagttgtatccagagtttgggctggacatgaatgactgagcaggctcatcgccccttgtccacagctcccagggacagaagggtgtggacatgataaacactgagagcccaaccagcacacctacagagtttccagcgagacaatgccagaagcacttttctagagagcccaagcccaatcaggaggaggctagagaagaggcgggcag

SEQ ID NO: 43716 - DNA, 554 bp, Homo Sapiens
  misc_feature (453)..(453): n is a, c, g, or t
acgattgtgaaaacaaatgaaaacaaaatttgagcaaagctgacctggagccctcagggagcaaaacatcatctccacctgactcctagccactgctttctcctctgtgccatccactcccaccaccaggttgttttggcctgaggagcagccctgcctgctgctcttcccccaccatttggatcacaggaagtggaggagccagaggtgcctttgtggaggacagcagtggctgctgggagagggctgtggaggaaggagcttctcggagccccctctcagccttacctgggcccctcctctagagaagagctcaactctctcccaacctcaccatggaaagaaaataattatgaatgccactgaggcactgaggccctacctcatgccaaacaaagggttcaaggctgggtctagcgaggatgctgaaggaagggaggtatgagaccgtangtcaaaagcaccatcctcgtactgttgtcactatgagcttaagaaatttgataccataaaatggtaaagacttgaaaaaaaaaaaaaaaaaaaaaataggt

SEQ ID NO: 43717 - DNA, 674 bp, Homo Sapiens
atgactccaattctggtggtgagagagaaattcagcgaacaatgttggaactgctgaaccagttggatggatttgattctaggggagatgtgaaagttatcatggccacaaaccgaatagaaactttggatccagcacttatcagaccaggccgcattgacaggaagattgagttccccctgcctgatgaaaagacgaagaagcgcatctttcagattcacacaagcaggatgacgctggctgatgatgtaaccctggacgacctgatcatggctaaagatgacctctctggtgctgacatcaaggcaatctgtacagaagctggtctgatggccttaagagaacgtagaatgaaagtaacaaatgaagacttcaaaaaatctaaagaaaatgttctttataagaaacaggaaggcacccctgaggggctgtatctctaatgaaccatggctgtcatcaggaaaatggttgggagatttctcaatccctgaaagggatgaggttgggggagttgcccagaggaatccctgttcccactgatttttattagcaaaacatcctgtgtcttttggagtacgatgtgtaagtgcccattgggtggcctgttggtcactgtgcagcagtctgcttcccaataaagcgtgctctttcacaaaaaaaaaaaaaaaaaaaaa

SEQ ID NO: 43718 - DNA, 629 bp, Homo Sapiens
aaacttctagcagctatagatgatatagacagacctaaaagataatgaacacagctctctttcctcaatggcattgatcctcactcgacatatatgacctgaaagccagtttttttatgcacttctgacaactatctgctaagaaaactttgtgcatgtttttttgactggaaagtggaaaatattgaaatgtgtgtggtgttctcatgacttttatatgctgtggtctcttcaacttttggtctcatttgttgtaatctgaaatgatgttgccgccttgtcataacaatggttatgtgactacagttatacattttacagaagaatgtaccataagtatataattagaagaacagtggcttaatatatgtatgggaagtttatggaaaatgaagttggcacttttctaccctctgagcttggttcttaataagcataatgtgagggtgaatatgtagtatctcctaattatgagcactgcatgagaattaaaaaacacatgtaagtaaaatagttgaaaaatcagtatgttctctgtttttaaaatgtcaaagtttatgtcagggttaatttagttataacaaagtgatcataatggtgaaatttaataaatatactctagtatgatc

SEQ ID NO: 43719 - DNA, 689 bp, Homo Sapiens
agaggcaaaactgaaagcttcagggatttgctgtagctgaggagccctgggagcacagcccatcaagcaagggatgtgatggtgtcctaaatggagtgacagttctcctgggaaaagagatcacgtggattccggtcaaatcggctaaggcttgtggttctcttgagcaagtctgttccttctggaaaccaaaagtgcccttcatctttagagacattttactcttccatccaccttttcagactgagctgtctctactatttaggggttgaaaatccattacacagtcactttacgttaacattgggtcatcttatgtttgtatgagacggatgtgggatttgaggggaacattgtcattcccttaaaataactatcatgaaaaaaatagcaacagtatgtaaagggaccaagagtggcagcctttagggaaaatggagcagagaagagctgtgaacaaagctcatttatttgaaataagcgtgctttatttcacatagaggggcatcagacgttacatttcattcggacaaattactgaacagccgaagtgattgtttccaatgtaggttattataattattggatacaaagatttaactagtgtttctgggttggatttttgaaatagtatgcaagtcataagcacagtttcaataaaacacgtattctgaaaaaaaaaaaaaaag

SEQ ID NO: 43720 - DNA, 502 bp, Homo Sapiens
tggagtttaagtacagtgatggttggcttgagtacctttttaaatctagcccagtataaacattagcctgcttaatatttagacatttataggtagaattctgagcactcaactcatgtttggcattttaaagtaaaaacaagtgtgacttcgaggaccaaagaaattgtcagctatacatttatctttatgaactcatttatattcctttttaatgactcgttgttctaacatttcctagaagtgttcttataaaggtctaatgtatccacaggctgttgtcttattagtaaatgcaaagtaatgactttgtctgttttactctagtctttagtacttcaaaattaccttttcatatccatgatcttgagtccatttgggggatttttaagaatttgatgtatttcaatacactgttcaaaattaaattgtttaattttatgtatgagtatgtatgttcctgaagttggtcctatttaaattattaaactattgtaacttt

SEQ ID NO: 43721 - DNA, 787 bp, Homo Sapiens
  misc_feature (714)..(714): n is a, c, g, or t
  misc_feature (764)..(764): n is a, c, g, or t
  misc_feature (778)..(778): n is a, c, g, or t
actcttcaagttcttcttgaacccttggtgcacagatccatatataacctcccttttcagtattgctgtgtgtgaattaactacaacacatatgcatgcatagctgtgaattctgcactactttttttttcttttttccccccaagaatatctcttgggaaaagtttttagtacgttacttaactttattttgctgctaatttgcgcattagccggtaacttgcaagtctggagaccacttactgttgagggtagctggaattttagacccttggcagtatttaagatttagacatttagccttgtgaaagttaccacagtgctccatgtgattcattgactgtgagcctgttgtccattgcactcagccctgtactcacttcttcactcgctgtcctggttttactgttcagattttggtgggttctcaaagcagtaccactctcatctgctcagtacatctgcggcaactggctgccttcgatgctgtcattgcgttcagcccagcacatcacagccccatcagtgtgtagccaccgctctcgtttttctgtatcgcttttatctcctgaaaaagatgcaccaaataagagatcatctatatcaggaattgaatgtctaactcaaacctctcatttttgtttaataggtagatctcatttgaagtctcctatctgaatctctgaaacaattatagtttgattagacaaaggnttttaataacacttcttttttgctgtagtcaagcattaatagaaactagnttaattttcacagnggtaaatat

SEQ ID NO: 43722 - DNA, 858 bp, Homo Sapiens
gcacgaggagcatttctagacttccacaaaattatgctgcatttggctggagcccggtgttcagtggtttccctgcccgaggtcgctgcagccccatctaccacatcttcatgtggacattgagattcacatgctggctcctgaagggtgctcagtctccttggtgattaaggtcctgcttgaactgctgccaactccatgtcagggaagtcgcttttggtgcctggctggtttgcccagagccaagctggggcaaggggcagccagccctggcttccaaggctcccgtactgtctgtgtccttgtataaggagctttgctcttggaattactgaaagtctgtggcccaagagagagacacaagtggccttaagtctttttgaagtgttatttcatccagggaaatgcctcgagccatagagcctgaaatcatctttgttggctcagaaaataccttagcttcactcagctggactgcattgaaggcgaggctgccccttggatcaagcagaaaacaagagaaagaaagaacgttccctttggggatagtctggaaagttgggatttgcaaataaaggctctggaagcattgctggtcctgaagctttggaggtgggcagagagagcttcaagaagactagatgcaaacccctggaaaggattaaggctcaactctggagaaacaggccacagcctctcagagcagctgttggctgtaaatagaggtagcaaggccgctcccaggcccctgtgagtgtgggcacctgtgcatgcaatgctccgactctgcagaggttgccagtgccccctgctgggcccagtcccaaagagttagaaagtcaaggccctggcaactcc

SEQ ID NO: 43723 - DNA, 795 bp, Homo Sapiens
agcttgttgctgaggatgtcacatataagacaggatcaaacctgaaagacactaatggttcatcctctataaggccaacaaagaaaacaaattaatgtgatgtaacttgcatttatgtgcactctgcataggtttcccaataatactgtaatgttgctgaacacctttccctgttttccatttatacacatattaaagtcatattgggaaagatggcaaagcttttgagaatataaacacacctgttttgtttttcttaagttcaacatacttttgtagaatttgtaaaataaatgttcgtatcataattgagaatttatagccaaggatcctcaaaacagaagtttcatcttaggatagtgtttgatatatctaagaaagtccagtaacagagaagaaatgtctcaaatgtctcgtatcagttttagtgtttttcagtattagggaaaggtaatataaaaacaggtaaaatgtataaaaatagacctgatcaacatcataggagataaatattcattatatagcataggatattattacttgaatgttctcagggaggcagcaagtcagaaggctaggttctagtcctagctccatcatttaccaactgtgtgaccttacttcacctcttagccttgttctcctcactagcagtaaggaaagtaacactaccctgctactcacagggctgttgtgagggtcaatggtatatgtgaaacttcttcagaatgtaaagctatatgactggtaggatctttgcttgttccaggtatcaaatcggttaaaaacaaaaac

SEQ ID NO: 43724 - DNA, 639 bp, Homo Sapiens
  misc_feature (50)..(50): n is a, c, g, or t
attctttgttggaaatactgctcttgctgaactgtcttgacccttgactntgacacagtttcttatttatgtaaatacttgcatcacagtggccgacaggcattggatgcagaacctagagccagttttcaggaacaattgtaaacctgacatggtactgtgcatctattcataaaacactcaaaactgtgaaaatatggtttacatttaattgtacataaaggtaaagggagaactcaattcagtaccagttagtttgtacattttagggggcttttcacattaactgcccatttgtgtaatttatagtttgacatgatgtgtttgttttaaaaaaaaatgcatagtataaacccattaaggatctgggaaaagagaagaagtttaatatagaactaagcttttaaagtttgtttttgtttttaattctggtctcggtgcaaatgttagttatgccttattcatatcacagttagatcaccatgctgcaacatggtttatattcatgctgccctagaaacttttgtaattatttgttgcaaatttgtgactgtccttattaactttcttttatgtaagtaatttgtaaaagtttcttaaaatttttgcttttgcttatttaattttgaataaaagcta

SEQ ID NO: 43725 - DNA, 627 bp, Homo Sapiens
  misc_feature (540)..(543): n is a, c, g, or t
  misc_feature (545)..(563): n is a, c, g, or t
agcgatgggaagaggccagggactgtaacccttgtgctgtgtattctctgagcctctgctcactctcagggccaagcagctcccaagccggggccctctcttggccaaaatctgaggagcagtctaggttacaggctttttggtaggtaggttctggctgcctgttaatgcagttaggccccctgattaggtacagtgagaaacaagctagaacaaccctggcccagaagactgtccactccagcaagatccagggatgatagccttgcagggccactgggagtttgtgcccaagcttctccctcttctctccccagggggcactgggactggtccctgccctcatccttagcctgggccttccccagaggtattaaagagaagtatgattcctctgtcttcagttcttttcaggggcatcctgcccatagtacccagttcccaaggggcccccagtcacgtggtgaagcctagcactcatgcagctcttagggaaccaaaaaccagcactgaaataaagctgaatgactgactgaaaannnnannnnnnnnnnnnnnnnnnncctcgaggggggggcccggtaccccaaatccccccttattggggagtcgtatttacaaattaac

SEQ ID NO: 43726 - DNA, 766 bp, Homo Sapiens
atcacttctgtgagtggatgtatgattatagctatgaaaaatacccttttttcagagcaaacatccggaagtatcccaccaagaaacaacagctccattttatttccagttacttgcctgcattccaaaatgactttgaaaacctcagtactgaagaaaaatccattataaaagaagaaatgttgcttgaagttaataggtttgcccttgcatctcatttcctctggggactgtggtccattgtacaagccaagatttcatctattgaatttgggtacatggactacgcccaagcaaggtttgatgcctatttccaccagaagaggaagcttggggtgtgactgtggggaggactccatccacctcatcactggactgcatggggaggcagcagagcggggtcccctctgtgcttcgactactgctcctgtggcaggaggctttgggtggctcactactgaacacatgtgtatgatactaaagacggtattaaaatggagcgacgtttatttcatctcttgtttacgatttcactaggactcagaaacgagatcgggaagcagaaatatagtgcaatagtgcaacatctctgaatccttttaatctagagaaggcatttcatatttgggggctaaggtttccagtcagatgaggcaaacagcaagagtaagcagtgttacttgcaggtactttggttaatgttgatttaaattttcatgaatgtgctggtgaacactgtgaccaggcttttgtaaatggcgatgtg

SEQ ID NO: 43727 - DNA, 602 bp, Homo Sapiens
ctctgtgaccctcacccaagtgggggggtggtcagtggaagctggggaggcttcactcagctcaaccctgcagaccccccatatgagaacccccctcctcccaccagctgggggagatgacatcactgctctctccatggggagggggctcacagggcaccaagttcgggatcctaggactggcaggacctgctggagcctgagatgggccccaggggcctgaggttgcctcctcctgtccagacccagccttggcacctcccaagactgccaagggccctaccatggccccacagcccccagggctggcagttccatctaggagggtgcctctaggccccactctcaggctaggatggagaggcagatctgggcctggcgaggtgacctgcttctggaggggcagggccgcacccgagagcagggacaggtgcccgaacacagggtctccaggacgtagcgcccccccgcatacttgaatgtatgtgcgtatttattgctcacgtctgtgccatgttgtcaatgggtcctttccaacccaagaggtacatttgtttttctgtttttcctgaaaaataaagtcggccaagtgaaaaaaaaaa

SEQ ID NO: 43728 - DNA, 772 bp, Homo Sapiens
gcgtccggggaaacctttcaatgtgaggaatgtgacagcatcttcaagtggttctcagaccttactaaacataagagaattcacactggtgagaaaccatacaaatgtgacgaatgtgggaaagcctatacacagtcctcacacctcagtgaacacaggaggattcacaccggagagaaaccctaccaatgtgaagaatgtgggaaggtcttcagaacttgctcaagcctttctaaccataagagaactcattctgaagaaaaaccctacacgtgtgaagaatgtggcaacatctttaagcagttatcagacctcactaagcataagaaaacccatactggagagaagccctacaaatgtgacgaatgtggaaaaaactttacccagtcctccaaccttattgtacataagagaattcatactggagagaaaccctacaagtgtgaagaatgtggcagagtcttcatgtggttctcagacattaccaaacataagaaaacccatactggagagaaaccctacaaatgtgacgaatgtggaaaaaactttacccagtcctcaaaccttattgtacataagagaattcatactggagagaaaccctacaagtgtgaaaagtgtggcaaagccttcacccagttctcacacctgactgtacatgaaagcattcatacttgagaaaaaaataaacaaatataaaaataggcaaagccgttagtatctgctcgcatcccactttacatcagagttcagacttaataaagttatcata

SEQ ID NO: 43729 - DNA, 678 bp, Homo Sapiens
tctaatacgactcactatagtggaaacctggtacgcctgcaggtaccggtccggaattcccgggtcgacccacgcgtccggtttttaaaccaacaaacatgttactattcattggacagatatcattttatgtataaatactgttcacatcactgggaaaatgtaaactttaaacataatgccacaaggtcactaatttctagcaggtaaaattataaggatataaattccaataataaaccaaatgtatttagagtatttattagtaaatgcaaggtgatgttagttatgatcagttatactctaaatatttaatttgttttataaaggtagtgaaaaaatgaaaatttgctatttattaaaaaacattaaatttcattccaaatgagataagtgatattactataacatctaagcatcatctgatttgatattccctaaaaaacatttggaatatatgctatctatagattcagtatctactacccatatttactttaccaaatatatttctcctcactgcataaggactactcttctcatattttcttctttgatgaagatatttctcaccaaagtttatttcgtgatgccctcttggttttgatactttaaaatctgtggcacccgttctacatgaattatcaatatttgggtaaattcaatctgcattggttt

SEQ ID NO: 43730 - DNA, 551 bp, Homo Sapiens
ctgttttttgccatataagccatgtcatcaggcatgaaaagttttctcatatatgatgtaaacttgcttttaaggacaagtgtgaatgtgctttttaagcttaatttttgtcatgacaactaattttttttatctttggagaagtcagagttctttacaatcaaacgtttattaactggagtacttagaataagctagtaattgaatttagttcaagggctaagcaacacatttttaaatccttatttattgtagagtattagtatactgtcctacaaattatgtaaaatatggtttaatattagatgactttggattttgcaatgccttactgttgtcattctagcataaatatccataatgaggtactcaagttgatactggaagctgagctgatcatacactgacctgaagcattcatgaaaagctgctttattgaataaagtctgattggagttcttttcatgctcactttccccttattgctgaaagtagattgcaataaaaccccaataaaacgtttggtcggatatctacttaaaaaaaaaaaa

SEQ ID NO: 43731 - DNA, 642 bp, Homo Sapiens
gattcgcaagtgctgtgcgcttgtcagaccatcagaccaggccaaccaatcagaaggcaacttactgtataaattatgcagagttattttcctatatctcacagtattaaaaataaataattaaaaattaagaataaataaacgagttgacctcggtcacaaaagcagttttactatcgaatcaatcgctgttattttttttaatgtaatttgtacatcttttttcaatctgtacatttgggctgtctgtatgtttttatagctggtttttaaaaagcataatatgcctatagctgaaaaggaaacagggctgtttaagtcactgacttatgagaaagcaaagcactggtacagttatttaacaggcatacacaagcagggaaaagataatccatttagatctttaatgctttggaaatgcgtgtaacagtactgcaataatcacagctctgggaaaaacaacgaaaactttcccttggtggagaggagggattttcctgctctatattaagcaacatatttttagaccattaaaatatatataatttcgcaggtaattgttgacttttttaactatattaagtgttaagctgacaactgtcaaaagaagaccatgttgtcaaataatttgaactaaataaa

SEQ ID NO: 43732 - DNA, 633 bp, Homo Sapiens
caaatttgtggcatgctcaaagtttatgatcacataaaggcaagaggatacttcatgaataatacatttcaatgcaaataaacagatggttcacttctactagctatgagcctgtttttgtatacactgagttaatctactcaggctgtaggtcccagcaatgttctagagtctggtctttccctttcctgcagcttcgggtccttggacctttcctgtttcctattacttggagtgtctgtcagttgagcaccagttgttctggtgtttcatttgattctacttgtagcataatcatttatacgagctattgggaggttccaaaccctacctagatttgtgtaggtgatgtatcaaatgagcaatataccgttcatctgaaaatagtagcacacagccatatataggatatcattttctaaggactgtttcttcacattgagcagagcaggcataaatggtggttatttagtctaagtcttttatttttttatacctgattttcaacataacacgcaatgtggatgtcgagtagtgttaagaatggtgctgctcctgacaagtgtatgttaactgtttacattttctatctgcagaattattctctattactgaattttcctaagtaaatgt

SEQ ID NO: 43733 - DNA, 561 bp, Homo Sapiens
gagtcaaaggccaggaaggcagttatggagagctcctgcacctccagctgccccacagaaaagcctgcaagagtacttccaggcacaaggcctctcccaccctattccatttgtaagcaagggaggtcgaggaaaaggacatctccaaaagggagcataagaatagccatatatacaggggctgaaaaagtgctcatgagtccatcttttctggaaagcaaagaccagcctgaagcagtgggagctgctgcccaagcggtagtgaactggagagaaacaggccctggattttcagtgaggatgtggatctgaagagtcccccaaatgcctctgaagtctgacatctctgcttagccctaggagtctggttccctgccttcagttgcagagtgatgtgtttgtgtcattgttgatgtcacctcctaaaaagaccttcactttctggctgccacaaagccatatgtgttgctccccatatacagcctgacagagtaaatggagaggaagtgctggatttgtgtatcactggctatcagttcctcatgttgttaagcctcacac

SEQ ID NO: 43734 - DNA, 792 bp, Homo Sapiens
  misc_feature (739)..(739): n is a, c, g, or t
cctgaagcccctgcctggcaggccacaggacctctcctgcccacttggtgctatctcttccagtgaccacccagcacgggtgagcactggccagcctggagcctgcaatccaggtggaacagactgtcctccatgtcagttccttctggcttcaggccctcaattctttccctttgagcttttttagaccccagatctcctaggcccaggctctctcttgaccccagagaagccactgtcaggaaaggaagtgaaccctactgaagccagagaattcaccccggccaaagcaggccctctgggtccagcccctcattccacaccacaccagtattgcatccatctactgcagctacacatcctgagggcagcaccacccactctggcctgctggcccatcgcaggactagcccaggcacctgccgggcattgcaggatatccagtggggcctgtgactgctccctgatgcgtcagaagagaagtgttgcacttcagtggaggagctgaggagcacctgcccccttgtagcttgagttccttttggtaacagtagcagcctccatggtggtgtctgggatgcacgtgcacccgctgccttcagctgtatgtgtgtgttcctgctggagttgtgttactgacaggataatgacattacaaagaaattgtgttatattcaactttgccttgataattattgtaaacactttggtcattttttcttttttattcacaaactanatccaccaggaaattataaagttatttaaaaaccaaaaaaaaaaaaaaaaaaa

SEQ ID NO: 43735 - DNA, 862 bp, Homo Sapiens
ggactgggaaggaccgggtgagtgcaccggggacccaggccaggvgccccccggagcctgcggggggggccagagcaggagggggggkgtgtcctttttgtgggtgtggcatgcaaatcaagtggacaagaaaaaawaacaaaacaaaaaacaagaaaaaaaaaamamaaaaccccgtaaaatcacaaagaaaatccaacaccaaaggcgcagaagccggctggccgtggtgggggcagcgtaggcgtacatccctctcctctcacttagcctgttgactcttgttattatcatgatattcacaaaacgccgcatgtttaaaaagtcatagatgtcatcttctctctgcccccagggaggaaagccaccttctcttgccccttggcccctttgtcaggggccaggggtctgccgggtgggggtgccaacaggcctggccctttcctcccctgcatccagccatgggggcctctgcgattgccggaaggttgcatggctggtcccagggccagcacaggcccgaggccgggctgcctggttttatttttatttaactttattttctgttttatgagtgtgtgtssgcscacccccacccccttcagtgttaagtggggagccctgggggagtctctcctgcctcccagcctctcccaagacctcccccctcgtcaccagccatccctctggaccaggcagagggcggaccgggtgggcaggggcctgsagggtggctcgggccagcccaccagccaatggacccctcctcaggccgccagtktcgccctgcccctttttaaaacaaaatgccctcgtttgtaaacccttagacgcttgagaataaacccttccttttcttcca

SEQ ID NO: 43736 - DNA, 754 bp, Homo Sapiens
gcgtccgggatctcaaccaaaacagaagtcagatactgtgctttttccagcaaaggatctcaaggaaaaggaccttcattcaatatttactcatgattctggtctgataacaataaacagttcacaagagcacctaactgttcaggcaaaggctccattccatactcctcctgaggaacccaatgaatgtgacttcaagaatatggatagtttaccttctggtaaaatacatcgaaaagtgaaaataatattaggacgaaatagaaaagaaaatctggaaccaaatgctgaatttgataaaagaactgaatttattacacaagaagaaaacagaatttgtagttcaccggtacagtctttactagacttgtttcagactagtgaagagaaatcagaatttttgggtttcacaagctacacagaaaagagtggtatatgcaatgttttagatatttgggaagaggaaaattcagataatctgttaacagcgtttttctcgtccccttcaacttctacatttactggcttttagaatttaaaaaatgcatacttttcagaagtgataaggatcatattcttgaaatttttataaatatgtatggaaattcttaggatttttttaccagctttgtttacagacccaaatgtaaatattaaaaataaatatttgcaattttctacagaattgaatacctgttaaagaaaaattacagaataaacttgtgactggtcttgttttacattaaaaaaaaaa

SEQ ID NO: 43737 - DNA, 461 bp, Homo Sapiens
tgccttgaacagaccccccgaccctcccccacaagcctttaattgagagccgctctctgtaagtgtttgcttgtgcaaaagggaatagtgccgtggaggtgtgtgtgtccatggcatccggagcgaggcgactgtcctgcgtgggtagccctcggccggggagtgaggccaccaaccaaagtcagttccttcccacctgtgtttctgtttcgtttttttttttcttttttttctatatatattttttgttgaattctattttatttttaattctctcttctcctccagacacaatggcactgcttatctccgaaatggtgtgatcgtctcctcattgagcagcggctgccaccgcgctgtgggtagtgtgtgaccgtggctgtactgtatagtgaacatagttggcatatctttgtttgaagtttgttggtgactccaccaaactggtgtgaaaaaaaaaa

SEQ ID NO: 43738 - DNA, 612 bp, Homo Sapiens
cgcgtccggtacctggatcctgagtacatcgaccgcattgccatacctgatgcctctaagctgcaattcatcctagcagaggagcagtttatcctttcccaggttgcactcctggagcaggtgaatgccttggtgcccatgctggacagtgctcacatcaaagccgttcctgagcatgctgcccgcctgcagcgcttggcccagatccacattcagcagcaggaccagtgtgtggaaatcactgaggagtccaaggctctcctggaggaatacaacaagactacaatgcttctctccaagcaattcgtgcagtgggatgagctactttgccagctagaggccgccacgcaagtgaagccagcagaggagtgatagctgctccccatcccaaagtgggcctgggcagtcaggctccagggccctatgccaacctgcctttgttacaaggcagaggaagctttgtatttattggcttcaaggcccacctctctgtactctgggctctaaagttggaggtcaggttacctgaggtttgcaatttgcaacacccaccctccccccaatcagtgttcttatttcagtgacaataaaccatagagatgactggagaaa

SEQ ID NO: 43739 - DNA, 528 bp, Homo Sapiens
  misc_feature (494)..(494): n is a, c, g, or t
ttcctcaacaagaaggacctgctggaggacaagatcctgtactcgcacctggtggactacttccccgagttcgatggtccccagcgggacgcccaggcggcgcgggagttcatcctgaagatgttcgtggacctgaaccccgacagcgacaagatcatctactcacacttcacgtgtgccaccgacacggagaacatccgcttcgtgttcgcggccgtgaaggacaccatcctgcagctcaacctcaaggagtacaacctggtctgagcgcccaggcccagggagacgggatggagacacggggcaggaccttccttccacggagcctgcggctgccgggcgggtggcgctgccgagtccgggccggggcctctgcccgcgggaggagattttttttttttcatatttttaacaaatggtttttatttcacagttatcaggggatgtacatctctccctccgtacacttcgcgcaccttctcaccttttgtcancggcaaaggcagcctttttctggccttgacttat

SEQ ID NO: 43740 - DNA, 591 bp, Homo Sapiens
  misc_feature (429)..(429): n is a, c, g, or t
  misc_feature (465)..(465): n is a, c, g, or t
  misc_feature (519)..(519): n is a, c, g, or t
  misc_feature (540)..(540): n is a, c, g, or t
  misc_feature (585)..(585): n is a, c, g, or t
cctacctagtctttcctcacctcctgaactcacacaacaatgccagtctcccactggaggctgtatcccctcagaggagccaaggaatgtcttcccctgagatgccaccactattaatttccccatatgcttcaaccacccccttgctcaaaaaaccaatacccacacttaccttaatacaaacatcccagcaacagcacatggcaggccattgctgagggcacaggtgctttattggagaggggatgtgggcaggggataaggaaggttcccccattccaggaggatgggaacagtcctggctgcccctgacagtggggatatgcaaggggctctggccaggccacagtccaaatgggaagacaccagtcagtcacaaaagtcgggagcgccacacaaacctggctataaggcccaggaaccatatangagcctgagacaggtcccctgcacattcatcattanactatacaggatgaggctgtacatgagttaattacaaaagagtcatatttacanaaatctgtacacacatttganaaactcacaaaattgtcatctatgtatcacaagttgctagaccanaatatt

SEQ ID NO: 43741 - DNA, 983 bp, Homo Sapiens
cggctggaccggtccggattctccggatgtcactgaagacgccgtctccttcgcatcttcgtcttcactcttaggcactttgggggtttgagggtggggtaagggatttcttaggggatggtagacctttattgggtatcaagacatagcatccaagtggcataattcaggggctgacacttcaaggtgacagaaggaccagcccttgagggagaacttatggccacagcccatccatagtaactgacatgattagcagaagaaaggaacatttaggggcaagcaggcgctgtgctatcatgatggaatttcatatctacagatagagagttgttgtgtacagacttgttgtgactttgacgcttgcgaactagagatgtgcaattgatttcttttcttcctggctttttaactcccctgtttcaatcactgtcctccacacaagggaaggacagaaaggagagtggccattctttttttcttggcccccttcccaaggccttaagctttggacccaaggaaaactgcatggagacgcatttcggttgagaatggaaaccacaacttttaaccaaacaattatttaaagcaatgctgatgaatcactgtttttagacaccttcattttgaggggaggagttccacagattgtttctatacaaatataaatcttaaaaagtttgttcaactattttattatccctagattatatcaaagtatttgtcgtgtgtagaaaaaaaaaaacagctctgccaggcttaataaaaaatgaccgaactgaaaaatccacacaaccctagtttgtttcattcttgcggggcggcccccttcctaaagatatcccctcgagggggccccaagctttaacgcgtaacccgacttttttttgttacaaagtgggggcccctaaataggggaggtcggtattttataacgcctaaggccaccggggcccttctcttttttcaaaacggttcgggga

SEQ ID NO: 43742 - DNA, 600 bp, Homo Sapiens
gtctctaggccctgatcccctgaactattcctcagtgaagccaggtctgaacattagagaaaatcatgctctggtatgacagactatcagaggttccaaaggtcctccagggggcctcggtctgacactgtcttctctcaccatgctcagttttttctgaacccagagctctgagagccgagtgtgaagaaagctccagacttggccagaactccaaccatgtggaatctgagggcctggccttctagagcaggttctagaaggtggatgtgttctatggtataaagcatcccctttctggccaaactagctcttggaggaacgagcaaaacagaagcggtgcatacctcagagcctggataaatcacagactattgaacctggaactggctttgaccatgaaactgtgaatggccctaacttcaagggaaatgagaaatcgaaggaattggcccaatggcgaggagaggaaaggccaagggaagagaaaagtctgcgttagtctggagaagttggactagtgaggtaatggatgtcatcaatctcaggaatgctattacccagagcctctgagctactactttgcatctgtactgaata

SEQ ID NO: 43743 - DNA, 648 bp, Homo Sapiens
gaccctaagagcacccccacccccacctactatggctccctggccaggttctcagccttatcatctgctacacccacgtccacccaatgggcctgggattcagggcaggggcccaggctcccctcctctgtggctcaaacggtggacgacttcctgttggagaagtggcgcaagtattttccatctggcatcccgctgctcagcaacagccccaccccgctggagagcaggctgggttacatgtctgccagtgagcagctccggctcctacagcactcccattcgcaagtccctgtaggcgggcagcaccacctttcagggcataattgaggccaaccggaggtggctggaacgtgtcaagaatgaccccaggttacctctcttctcttcaacacccaagccaaaaagctactttgagcctcctgcagctgggccttgatgagcacaacagagtgaaggtgtatcgcttctgaggccctgagcaggggcttggggcagcccagcctctcgctccacccgagaccaagtgcctgaggagctgcctgccttcttccatctgagaaagcaccctccttccccctttgacttgcaggagcaccatggacccaggggttgagtggaaacagtaaagccagcacaattctgtga

SEQ ID NO: 43744 - DNA, 1031 bp, Homo Sapiens
  misc_feature (494)..(494): n is a, c, g, or t
  misc_feature (608)..(608): n is a, c, g, or t
  misc_feature (665)..(665): n is a, c, g, or t
  misc_feature (692)..(692): n is a, c, g, or t
  misc_feature (694)..(696): n is a, c, g, or t
  misc_feature (920)..(920): n is a, c, g, or t
  misc_feature (933)..(933): n is a, c, g, or t
gcctgggtggcgccctccttccacggatccatgtagcaggactgaattgtccccagtttgcagaaaagcacctgccgacctcgtcctcccccgccagtgccttacctcctgcccaggagagccagccctccctgtcctcctcggatcaccgagagtagccgagagcctgctcccccaccccctccccaggggagagggtctggagaagcagtgagccgcatcttctccatctggcagggtgggatggaggagaagaattttcagaccccagcggctgagtcatgatctccctgccgcctcaatgtggttgcaaggccgctgttcacccacagggctaagagctagcgctgccgcaccccagagtgtgggaagggagagcggggcagtctcgggtggctagtcagagagagtgtttgggggttccgtgatgtagggtaaggtgccttcttattctcactccaccacccaaaagtcaaaaggtgcctgtgaggcangggcggagtgatacaacttcaagtgcatgctctctgcagccagcccagcccagctggtgggaagcgtctgtccgtttactccaagggtggggtctttgtgagagtgagctgtangtgtgcgggaccggtacagaaagcgttcttcgaggtggatcacagaggcttcttcanatagtgctttgaagttgggggaatgcngnnncatttccctgagtcaccaggaaatggtaaagtcaggggggaaaggggactggcccccactcccgggaaaccgggttccctttgcccgtgaatccgtaaggttccctggaaaacccccgagaagggaatcggaactttccaccctgggaaggagccttgggggggcccaccttgggcccaatgttttcctcacaattttttccggggggggaaaaaacagtttgnaaagagccgccgnttgccttacgtgtgggaaatagagctattattattccccctctaaaccttgagaattttttttaagacaatggcgcttggggttcttcaagactaccg

SEQ ID NO: 43745 - DNA, 907 bp, Homo Sapiens
gtctccctcccagctccttgccaaagcctctgttgagacctgggcttcttgtagccccttctccctctggccagctgcacagcctgtgggaggtgcccggcccaggctgggtgtgggggaagctggtccctgctgtgggtggcgctggggacctaggggctccttctgaggttggccttgtggcctctgggctgtatgcctctggggtgtagggaagaggcgggaggagtcatggggatggggagcggcagggggagagaggggccctcgacaaaggcttgggaaatgaggggaggtggaggcagggcaggggaagcgaagagtcagccttggagagagcaccctggggcctccgtgtcggggtacacccagcactttgcgacctgcggccagcaggcgcggaggatggcggggaggaagccagcagcccctgtgtttactgtcgtcagaaaggtcttgtgttttggttttggggttttgttatgttgtgttttgtttggcttgtttgttttttaaggggaaaaaagttttgtaattatttcatccaaatctcccgttatatatctgtgaataataagagattttataatagcaagaaaatgatgtatattttagtttgttgacaaataagtcatcatgatcacgaaggacactgagaaaaaataatttagaaccctggttttttgtgaatttttttgtttgtgttcttgtttgagattgtgttggttggtttttgcactgcactaaggcaggagggttggagggctgggtgcagcctggagtccgatggtttcagcaggagacggggtgtccctgcaggggctaactgcagggctgaaattagtgtgaacatgtgggaagcccgatgcatgtgggtcagggatctgggggcccccaatgggggaac

SEQ ID NO: 43746 - DNA, 594 bp, Homo Sapiens
tgtcaccaccttcccagctctccctctggccctgccttcttcggggaactcctggaaatatcagttactcagccctgggccccaccacctaggccactcctccaaaggaagtctaggagctgggaggaaaagaaaagaggggaaaatgagtttttatggggctgaacggggagaaaaggtcatcatcgattctactttagaatgagagtgtgaaatagacatttgtaaatgtaaaacttttaaggtatatcattataactgaaggagaaggtgccccaaaatgcaagattttccacaagattcccagagacaggaaaatcctctggctggctaactggaagcatgtaggagaatccaagcgaggtcaacagagaaggcaggaatgtgtggcagatttagtgaaagctagagatatggcagcgaaaggatgtaaacagtgcctgctgaatgatttccaaagagaaaaaaagtttgccagaagtttgtcaagtcaaccaatgtagaaagctttgcttatggtaataaaaatggctcatacttatatagcacttactttgttgcaagtactgctgtaaataaatgctttatgcaaac

SEQ ID NO: 43747 - DNA, 582 bp, Homo Sapiens
aacaaaatccaagaagaaaaagggacacaagggcaaaaattgtattatttcttaaccaagtagtgatgcagagcatttgtttaaaacttagccattaaccgtctgaatcgtttccttttcttccgtaggaaagttgtgaaaatagcttaaagtgctttctttgcccatgtaaatgagaactcaactgctgtttacagtgtcagattaacatttgaaaggtgtgatttctccaatttaccctctttggatggtgccaggtggacgtgacatctcgtgcctgtccggtgcgggtgcgttacagatggacgtagctgctttggttttccagtcctcaagggaatactgaagatgctgactgaaggggattggatgttgattttagaagatggagaactccagccacctttgtaaagcactagtgtttgtcatttatgtaagtcaggtcggctcaggtcttgatagtccgtcttggtgtgaggcatgcctgtcacgatgacctagctaacactgtgcatcttattgtgaggccagcttgtcccctcgaaccctctttggccaggtaaacattgtattgtatcagcg

SEQ ID NO: 43748 - DNA, 625 bp, Homo Sapiens
  misc_feature (595)..(595): n is a, c, g, or t
  misc_feature (603)..(603): n is a, c, g, or t
  misc_feature (605)..(606): n is a, c, g, or t
ggggattcattttaggggctagctaagccaagaggcagtggtttgggcttgttgtttgtaacaagaaaatgatccacaccactcccccgattcccgggtgcagaattgtaactcggggttgggcctctatatggtgtgaccaaaatgccaaaattgtccatctgcctctgagtagggcaatggaaataccaaaccttctgactttgccaaaaagcatacaagcaacctggtcatacataggatgacaaaattctttctggttgtttttaaacaataaagcaataagaacaaatacaatacataggaagttaaaagcacaaaggaatgaacttattaatatttttgaaaaatgcactgggaaaaagttgatgtcaataacagtataaaacagccctatttcttgataaaaaatgacaaatgactgtctcttgcggatgcttggtactgtaatgttaataatagtcacctgctgttggatgcagcaataatttctgtatggtccatagcactgtatattatggatcgatattaatgtatccaatgaaataatcgacttgttcttgatagcctcattaaagcatttggttttgcaaanaaaaaaanannaaaaaaaaaaaaacatgtc

SEQ ID NO: 43749 - DNA, 499 bp, Homo Sapiens
cgggcacctcaacttccagatcgagcaccacctcttccccaggatgccgagacacaactacagccgggtggccccgctggtcaagtcgctgtgtgccaagcacggcctcagctacgaagtgaagcccttcctcaccgcgctggtggacatcgtcaggtccctgaagaagtctggtgacatctggctggacgcctacctccatcagtgaaggcaacacccaggcgggcagagaagggctcagggcaccagcaaccaagccagcccccggcgggatcgatacccccacccctccactggccagcctgggggtgccctgcctgccctcctggtactgttgtcttcccctcggccccctcacatgtgtattcagcagccctatggccttggctctgggcctgatgggacaggggtagagggaaggtgagcatagcacattttcctagagcgagaattgggggaaagctgttatttttatattaaaatacattcagatgtaaaa

SEQ ID NO: 43750 - DNA, 655 bp, Homo Sapiens
cagtaattgccttacatgacttgaaagatataaacagatcttctatcagtagcagtattgttacttctttccaggatgcaaggtctattatcccaacagaagagaaaatatttttatatttaaggattatgctgcactgtactacaaaattgtagtacttttttttgttttcttttttaaagaaatggaaaatgtttactattacagggacctcaacactgccctcccatacaggctggataaaactgtttttaagtcagtgattttagactgacctccatttaaattatgtttatatatgaactttactctgacctgtgatcatgtttcaggaaggaatgaaagagagttctttcttaataaagaaaaacactcaaggactttgttcatttccaaagctacttgtttacattgtacactgcgaccaccttgccgcttttcatcacaagcttgaatatttaaattctgtacttatatctgtaaaatagccaggaatttcctgtttgtgatctattatgcctttttacaaaaaaaatggctgtaaattattgtaaatattaaaggaactttccttacttccttccctttctcaggctttttttgactgttcctttccctaccaactcaggccttcttattaaaaaaaaaaaaatca

SEQ ID NO: 43751 - DNA, 503 bp, Homo Sapiens
aaaaaaaacaaaaaacattgctatttataacttagtatttcatagacttaagtgtattcctaatttaacggtgcaaatattaatgtatatactgtacagttcagattttaaagctgatatttttatatccctgaattgtaagccgtttgttacgctgcagtgctagatttgccagggaaccagaatttatggatgaactgattgcttatattttagtcagggtttataaatgtagatggtcaaatttacattgcctagtgatggaaaattcaactttttttgatttttttttccaatattaaaaaaggctctgtatgcatggtggggctatgtaagtactctttaaaactatggccctattaatcttacaagtgttacttatgggtcaagcaatgtaaactgtataaatgtaaaaacaacccctccacacacataacccctggaatatatggtaaaaacaagtagaagctgtttcagcgagtgggttttttccccctgcctgc

SEQ ID NO: 43752 - DNA, 394 bp, Homo Sapiens
gaacctgagacagaagctagtcccccctctgaattttactgatgaagaaactgaggccacagagctaaagtgacttttcccaaggtcgcccagcgaggacgtgggacttctcagacgtcaggagagtgatgtgagggagctgtgtgaccatagaaagtgacgtgttaaaaaccagcgctgccctctttgaaagccagggagcatcattcatttagcctgctgagaagaagaaaccaagtgtccgggattcagacctctctgcggccccaagtgttcgtggtgcttccagaggcagggctatgctcacattcatggcctctgacagcgaggaagaagtgtgtgatgagcggacgtccctaatgtcggccgagagccccacgccgcgctcctgcca

SEQ ID NO: 43753 - DNA, 522 bp, Homo Sapiens
gcagggatgtcctccaggtgacagagggtggcaaggtgactgacacaaagtgactttcagggctgtggtcaggcccatgtggtggtgtgatgggtgtgtgcacatatgcctcaggtgtgcttttgggactgcatggatatgtgtgtgctcaaacgtgtatcacttttcaaaaagaggttacacagactgagaaggacaagacctgtttccttgagactttcctaggtggaaaggaaagcaagtctgcagttccttgctaatctgagctacttagagtgtggtctccccaccaactccagttttgtgccctaagcctcatttctcatgttcagacctcacatcttctaagccgccctgtgtctctgaccccttctcatttgcctagtatctctgcccctgcctccctaattagctagggctggggtcagccactgccaatcctgccttactcaggaaggcaggaggaaagagactgcctctccagagcaaggcccagctgggcagagggtgaaaaagagaaat

SEQ ID NO: 43754 - DNA, 528 bp, Homo Sapiens
ggcggctgccacgggcagcggggactggaataccacgctggcctgcttcgtggccatcctcattggcttgtgtctgaccctcctgctgcttgctgtgttcaagaaggcgctgcccgccctccccatctccatcacgttcgggctcatcttttacttctccacggacaacctggtgcggccgttcatggacaccctggcctcccatcagctctacatctgagggacatggtgtgccacaggctgcaagctgcagggaattttcattggatgcagttgtatagttttacactctagtgccatatatttttaagacttttctttccttaaaaaataaagtacgtgtttacttggtgaggaggaggcagaaccagctctttggtgccagctgtttcatcaccagactttggctcccgctttggggagcgcctcgcttcacggacaggaagcacagcaggtttatccagatgaactgagaaggtcagattagggcggggagaagagcatccggcatgagggctgagatgcgca

SEQ ID NO: 43755 - DNA, 501 bp, Homo Sapiens
actattcagagccttgttttgacagccctcatgccttaaggttagaggagtatctgtccatcactaagacaaatctctggagtcctggcttccagaaacaggattgccaaattgtccctgtggggctagattcttaccagcttaagaaggatattgctatcttcttagtacccgtaccttaggatttccaactgttttgaaagggaaatagtaacagtgatctgcttagagtggattttcactcaagtccttagtaagtggattttggggaaaaaagcacctgggcttctggttctttttgataatatataaaattattcattatgaggttgcagttgtttgcaaaggagaggcactcaaatttgaaaggttattttaatgtgataatttggaagacttactcagatgttggtcattgaccactctgtgcatatatttctgcagagctctgtgaaggcaatgagtgtcacttccctctgctctaataaagcaataaataat

SEQ ID NO: 43756 - DNA, 405 bp, Homo Sapiens
aaggttggtttttggttttggtttttttttttttttgagacggagtcttgctctgttgtccaggctggagtgttgcagtgagctgagatcacacccctgcactccggcctgggcgacagagcgagactgtctccaaaaaaccaaaaagaaaaaaaaactggggcctgtgtagccagtgggtgctattctgtgaaactaatcataagctgcctaggcagccagctacaggcttgagctttaaattcatggttttaaagctaaacgtaatttccacttgggactagatcacaactgaagataacaagagatttaagttttaagggcatttaatcaggaggaaaggtttggaaaactaactcaggtgtatttattgtttaagcagaaataaagtttaatttttgcttg

SEQ ID NO: 43757 - DNA, 634 bp, Homo Sapiens
aagaggaacatttataccaggcagtcagagctggaagtgtatggagagcccagcccaccaggtcctgccttttgcggtgataaccttctctggcagagtgactttacaacttaactaggaaacccatgtgaggctcctcagacaggatcttgaacagcccaaagtatcattctcagataggggcacccaagctaagggtattagccaaagatgccaggatgggtagctagcccatgtttagatccaggtctccaattcatggttatcagggcatgtgttcaacaacccccaaagtccacgcaggtggcttgtagaaacctttgggcagcctcatgtctgctaaaacagccatcttcaagacagcccctgaaaagagaccagttcaggtcctgccctgctgttctttgctggagatgaggaacaggtgctggggctaaagtttggggtagagcacaagggacaagaggaactcttggagttggctgggtgagagggctctccatttgctacctgtagtagcctgcctcttaactggttgcttctccctagttccagccctgccctggtctgatgccccaacactgcccttgctttgttttccctgtcacctccctattattaaatgttttctaca

SEQ ID NO: 43758 - DNA, 675 bp, Homo Sapiens
gaagccaggggcagggtgggatggggaagaccaggagcagagtcgagcctcacagaagccagcgcgggtctctgctcagcaccccagccggggctctggacccagggtaacagccccagttcatcccaacccctctcagagcctcaagaggggtagctcggctgccggaagagaggggtgccctatccctggcaacccctccacgtagcgtaccccagcacctgccaccgcctttgccatttctttgagcttgaagttaactctcttagagtctaactttggttcatttctgcacaggtacaatagatgactttatttgtttaaaatgtttaatatatatacatacatatatatatatttgtctgtaagaattatgttttaaacagctgctgtagagtacctttttttaagtaaatcttacagtggagtatattttttaaagcacaaaattggtgccaagactgggtgagaaatgtacattacccccttattattttgacggttttttttttcggggcaggggaccttacctgtaagacttttaaagattttcctccctcctgtttcaggtgggtcacattctgatgaatgtttcccttgtacagatcccagcttatggccttgacccagccgtcctcacagatgccgggtgaccctctagctctctctgcatct

SEQ ID NO: 43759 - DNA, 716 bp, Homo Sapiens
gtcagatgaggcaaacagcaagagtaagcagtgttacttgcaggtactttggttaatgttgatttaaattttcatgaatgtgctggtgaacactgtgaccaggcttttgtagatggcgatgtgttatagacggtgctcactcccaagggacagcaagtgagcagagatgtactgcaaagtcgccagtcactgctgcaaggtggcctctgcctggggcctccagaagctgctcctttaccctcttggtcccatggctgaagctggagcagcggattgctctggagcagccaaggccgccagcgtgtggagcagagctctcccctcctgctgggcgtgtgtgacactgatgagtttcactgtactgcatgtgacttctcccctgcccttcctcctgatggagtgtgcagacagccatgcgtggccacgggggcagtgtgaggacctccctgtctcccggctcccctcccaggggagccagctgcttgacctagctctttgggcctctcctgccctctgctctgcctggagtgtcggatcctgtgagtaggctgggcctcccctgggcagggttctccaagggcccggtttcccggcccttacctttcctgatgcccctgacatcatcattcttgtgggagacagcagcctgtatgtggtgtggggcgtggatcgagtgtagctgtgaaatccatatatatgaaatgtcctgcgggata

SEQ ID NO: 43760 - DNA, 611 bp, Homo Sapiens
cgcgtccgcttgaactttatgacggagtcttcaatattttgatgtatatgaaacttttgttaaatatgttgtatacttcgctggctgtgtgaagtaaactaaaactctgatgaacactttggagtctgctttagtgaaggagaccaaagtgggaagggctttagggcactgatagaggccctgggtgtacttttcaatcctgtgtaatgtttaattcttgcaactgaatcaaaacagtgttaaattatggcaatatttgcactttgggaatgagtacataactgtatgatcacactctgcaaatgccacttttaaagctgttaatagactttgcaccttttctttgacaaggatgtgtcatatttaaatttttacattcatcatggctacaggtagaactggggaggggggaatgtaattttttatgggaattttgatatgaaaagaaactagtcatttatttatacaataggcttggctcaaaaagtgtttttcagacctcggtattcctaatgtgggatgtgactttattttatttttagtagcaaatttggatgtagactgacagacatagctgaatgtcttaataaatttaaatttgaagataaaaa

SEQ ID NO: 43761 - DNA, 761 bp, Homo Sapiens
cgcggccgtgggactgatgcgggatcccgagggccttcctgcccacatgccccgggagaaaccgaggcccctccctcctcctggaacagcttccggctctcaagcgtcaccccaggggcgtcagttttacggactcaaggtcacctcaggaagaggcagggccaggttttgggataggctttgcctccaggatgggctgctcctgggcctggtgagctactgcccccaacctactctctagaggggctgggaagggccgttctgggctcacctggcctgggagacccatctggtccctgcgtcctctgcccctcactgctctgtgcagatcctgtcgccctcagctgcctcctcccgagacctaatggtccctgctgggctcgagtctgcaggcccggctgcgtgtgccttggcctcactgtaccagtggttccctctctgcccagattctgagctcagtgtggtgtttggtgcacaggggttggtcaggggccatggccaaggccctgccacgcacgcccatccctcagatccactgtgagcaccaacctgctgcagtctcttgggcccctgctggcagctctgccacgtcaccgcctgcctggctcccacacagccatgcattgtcactctgcctccgggaccccagcttgggagctgtgggtctgccaggtcccacctcctctgtcccccatgccacaacctgggctcctggctacagcagggctccagggactccaaataaatgttcagtgactggc

SEQ ID NO: 43762 - DNA, 955 bp, Homo Sapiens
  misc_feature (906)..(910): n is a, c, g, or t
  misc_feature (912)..(912): n is a, c, g, or t
  misc_feature (916)..(916): n is a, c, g, or t
  misc_feature (925)..(926): n is a, c, g, or t
  misc_feature (932)..(932): n is a, c, g, or t
ccatgtcacagggatagatggacatttgttgacttggttttacaggtcattaccagtcattaaagtccagtattactaaggtaagggattgaggatcaggggttagaagacataaaccaagtctgcccagttcccttcccaatcctacaaaggagccttcctcccagaacctgtggtccctgattctggagggggaacttcttgcttctcattttgctaaggaagtttattttggtgaagttgttcccattctgagccccgggactcttattctgatgatgtgtcaccccacattggcacctcctactaccaccacacaaacttagttcatatgctcttacttgggcaagggtgctttccttccaataccccagtagcttttattttagtaaagggaccctttcccctagcctagggtcccatattgggtcaagctgcttacctgcctcagcccaggattctttattctgggggaggtaatgccctgttgttaccccaaggcttctttttttttttttttttttttgggtgaggggaccctactctgttatcccaagtgctcttattctggtgagaagaaccttacttccataatttgggaaggaatggaagatggacaccaccggacaccaccagacactaggatgggatggatggttttttgggggatgggctaggggaaataaggcttgctgtttgttctcctggggcgctccctccaacttttgcagattcttgcaacctcctcctgagccgggattggccaattactaaaatgtaaataatcacgtattgtgggggagggggagtccaagtgtgcccctcctctcttctcctggctggattatttaaaaaagcctgtgtgggaaaccccctattttattaaaggtaataggaatccgaaannnnnanacancatacatannacaaanaacaacctaaaaaaacaaccctt

SEQ ID NO: 43763 - DNA, 921 bp, Homo Sapiens
gctgtatctgcagtggcagcccttccccactttggctctgggagggtccagccagtgtcacctgggcccaccctttcctgcagctgccaggcccgtgcggtcagtgggacccggacgtgggcaggcgagctcgggaccctcccaggcagttcccacagctcttgcctcggctcaccagggtcacttccactgtcaggggcctgagggggcagctgtggctgcagggctgctctggactgaggggtcccaggccccgaggggtgcacgcctggctccccttggcacaggtgcgagtccgtttcttttcagcagaagggggaagaggtgtccgctgtgtgggctgctgactcctctgtgtgtgaggcccttcatctaagtgattgtgtattcagtttaattctcattatatttctatactgaaagaagatttttaacgaagggaaaaacaacagcaataacattcatatctctggagcagctaactcatacacgtaatgtctgcttttcgtacagaactagccaatgtaaaaacagttcacctgtaaatactttttcctttttcaccgttgtattatacatgtatatgctgggtcctttttcagaaactcttttcttacctgagagttgtcttgttctctgggctgtttttaactgaggaaaaaaaaaatgctttcctgccggggggcaggggagaccgaaaaacccatgtgcgtttcccatgtgaccccctcctccctgggggtctggacccccgcaccggcccattgcctcttcgtgacgagcccccacaccctatctcttcatggcagcgtttacctactaccatgttgcccccctgaccctatttcccccgcacagttaccgacgtcccccggccgcgtcctctctttacttcgtccgccttgacctctccgcgctgcc

SEQ ID NO: 43764 - DNA, 591 bp, Homo Sapiens
agatcccttaagaggcatttgactggtgctgccgtctgtgtcctcaaagcaatgctggtggcagcgtcctgtgtacacatgcagagctaatacccaaactaaaaactgggtaactggccctgaagtgcttcccaatcagtaagcccacagggaaatgtttgatttttatgttctgttggattttggtttgcttggcatatctaaaggtgcctttacttttcttttttttttttttctttctgctttgttttgtaggacttgttctaacatggaaaacaagtccagaagactctcctctgactgttacctttgccccaagccaccccaaacttttatgctcatgttttattaaagcaggtgctccctggaatctctgggacatttttgaggcatttgaagcagaatatagagtggtctcatctccttccttaatcttcctggtggttgggatgttccacttgtatcatagatttttttattacagatatgctccactgtttttaaatgtgaacttgtgcgcaaatgtgcagattcaatgttcttgttacagattgaataaatttttattttgaaaaaaaaaaaaaaaaaaaa

SEQ ID NO: 43765 - DNA, 726 bp, Homo Sapiens
  misc_feature (647)..(647): n is a, c, g, or t
  misc_feature (660)..(660): n is a, c, g, or t
  misc_feature (716)..(716): n is a, c, g, or t
  misc_feature (720)..(720): n is a, c, g, or t
  misc_feature (723)..(723): n is a, c, g, or t
catgttctctaattatcttgccaaattttgaaactacacacaaaaagcatacttgcattatttataataaaattgcattcagtggctttttaaaaaaatgtttgattcaaaactttaacatactgataagtaagaaacaattataatttctttacatactcaaaaccaagatagaaaaaggtgctatcgttcaacttcaaaacatgtttcctagtattaaggactttaatatagcaacagacaaaattattgttaacatggatgttacagctcaaaagatttataaaagattttaacctattttctcccttattatccactgctaatgtggatgtatgttcaaacaccttttagtattgatagcttacatatggccaaaggaatacagtttatagcaaaacatgggtatgctgtagctaactttataaaagtgtaatataacaatgtaaaaaattatatatctgggaggattttttggttgcctaaagtggctatagttactgattttttattatgtaagcaaaaccaataaaaatttaagttttttttaacaactaccttatttttcactgtacagacactaattcattaaatactaattgattgtttaaaagaaatataaatgtgacaagtgggacattatttangttaaatatacanttatcaagcaagtatgaagttattcaattaaaatggccacatttcctggggcaaanaagnaanaaa

SEQ ID NO: 43766 - DNA, 675 bp, Homo Sapiens
gaagaaatggaaaagaagccaacggctaatgaagaaggaacaaaacaaaattggtgtgaaactttcataacacatgttcaaattttatcatgccagtaggagaaatctcagctccacaacccaagcaacatttgtatggatttaagagtattttaagaagacatactgcttgattttaatacattgatcaggccatccaggacaccacgattctcccaaagtaccttgaactcttagtgattgagactcaaaaaaaacaaaaaagacttgagacaatgttttcttcaacatgctccaaatataagacatttgtttgctgtacagaaagtatcacaaatggaatatatcagtacctctcaagctagtgtttctagctaaataaatgggtgtatataattttatggtggaaaagaactgtactgtctgttatgatttccttcaatgtgcataatgataaaataaataattttaatattcttttgtttccatggttacctgacctaaattagataaattgtagggctttagctttcttatttttgtcaaaagttggtgttgacatacattccctctaatttgaactggtattgtttacgtttgatacaacattaaggaatttgatgattttcatttcatgaaaatgacattaaatgcaataattttacttatcataaa

SEQ ID NO: 43767 - DNA, 781 bp, Homo Sapiens
  misc_feature (1)..(1): n is a, c, g, or t
  misc_feature (666)..(666): n is a, c, g, or t
  misc_feature (701)..(701): n is a, c, g, or t
  misc_feature (732)..(732): n is a, c, g, or t
  misc_feature (745)..(745): n is a, c, g, or t
naggattatagatacttaaaggaacacgtgggtgagcgtgtgtggtggtactagaagctgatctgattggtccaacagtttgatgctgagtcatgcgtgttgaatcccacttcagtgcacctgtggcctctcagtcaaacaagttgtgcctttcacagcttctttactactgcaagttcaagactgaaatggcttctatgatcagaactgggaaaacagtgaatcttatggtggaagaggttctcagcaagtgtacagtatttaccttcctttgtcttacattggctttttaaattttccattaatttcaacataattatgggaacaagtgtacagaagaattttttttttaagatatgtgagaacttttcatagatgaactttttaacaaatgttttcatttacaggaaattgcaaagaaaattctcaagtgatagtctttttttttaagtgtttcgtgagacaaaaattgaataatgttttttgaagttctggcaagattgaagtctgatattgcagtaatgatatttattaaaaacccataactaccaggaataatgatacctcccaccccttgattcccataacataaaagtgctacttgagagtgggggagaatggcatggtaggctacttttcagggccttgacaagtacatcacccagnggtatcctacatacttctttcaagatcttcaaccntgaggtaaaagagccagttcaagaaccctanccaaatttgcttnggatttctttctggaaaaaaaataaaaatagtcctt

SEQ ID NO: 43768 - DNA, 1460 bp, Homo Sapiens
aggcttggcacaagtagaaccgaacaccccaaggcctacctgcacgtgcagtgtgactgcaccgacagcttcaacgtggtgtccacacgcggcagcctgcgtacccaggatagcgtgccacccctgcacaggcaggtcctggtgatcttgtcccagctagagggcaacgccggcttctctatcacccaccgcctggcacatcgcaaggcagcccaggccttcctcagtgactggacagcctccaaggggacccacagccccccgctcacgccagaggtcgccggtctgcatgggccccgaccgctgtgaccaccatgcctggggcaggggctgtgcacagacggaccccccacccccacacgcactttatgagggagaccccggacagaggacgcttgagccagaatctcaggaccccgcccagggagctgccagcccagggctcagcttcccatgggccccccgcccccctccttcccctccctgaaccccacagtccgcctggccaggcctcctggccgccacgcagaatacctcgaaccaggcgggctgtgaaccagccccgctcacctgccagccccaacacccgacgggggccgaggccaggctgcccctccctgtgggctcagggtctcctgcgggctaggcagccaggagctctgtccgcaaaaccaaatctgggtgtcagaggccaagaccctggggtgggatcagggaccacccctcacggggcataaggtcagttttcccccagagcccgggtccctgtcccccacagggcaggcggggtccctggagccctggtgtggagcggcgagtcccggggcggtgcctgtctcagaagaaggggcccttggccagccccccagcgacactatgcaaatcctggagtgcccgccaggatcgaagccatgactgggtgcaggcgggcgccaggcccgctgtgggtgggcaccagttctcagcaccgctcactgctgccgggcacactgggaccagcaggctcctcagccaaccctgtccctcggcccggccctgccagagagggaccccagcacatcgtgggcacgggcagggctcagccgctcccacctccccacagaagcccaggagtgtgtggacgtctgagcccagctttctgcgtgccctcctggcccctcactcccggcagcgggccggcctcgcccccactccccctcctaccccggcaggggcttccggggccttttcacctggagaaacattcccactcccctttggcctccctgtactctgagctgtgaatatttttaaccctgtaaatacggccagctcttgtgacacagagactattttatcaattgtcagtcccgttcctttaccataggattctccacagtggcttccgactcaggctccaatggaccaaataaaagcgttttgttttgtaaaaaaaaaaaaaaaaaaaaaaaattctgcgg

SEQ ID NO: 43769 - DNA, 1063 bp, Homo Sapiens
  misc_feature (642)..(642): n is a, c, g, or t
tttaaaatagtttaaagtcttgttttatgggaagaaagtgatcctccaatgctatttgtttctgaggtcagtaagagaaggagttaaaacaaggcagtggggaagggaatgaatcctgcactggaggcaaaagctgacaaggaaagagccattaattaagacaatttcaaagtcaactgattgtgatcattaatgtcacaatagatcaaaacctaattatcacagcctaggtaagagccatcagtattaatcggaaaatctaataggaaactattatcaagaaattaggccaaattgaatgcagtgaactttttatcttggcattctctatttttttgtgatgtcccctggcattggcaggtgtgaccctaacagtcgattcaaggccaagtggtcagtttgtcagccttttttaagggatttctttttatttttaggaattccaaacagagttaacctaaactgtcattgccaaaagatcagtcttaaactttcttagcacctgtacctgtttaatgtgatcagctatcagtgaggaaaaaaaaaaatctatttaggtcttggaatggttcctgtacctagagtatccatattgaacctttttttttttttttttttgagatggaaacttgctcttgcccnagctggagtgcagtggcgtgatcttggctcactgcaacctccgcctcccgggttcaagcagttctctgcctcagcctcctgagcagctgggaatatagggcgctgccaccatgcccggcttattttttgaatttttaggaaagacagggttccccatcttggccgggctgggcttgaactcctgaccttgggatccgcctgccttcggcactcaaatgcttggaattgaagggggaacccacacccgggcacagtatcctttatacagctcactgcaagcctaattcccctggggctcaaatggatcctcctgccctcaccctcccaaaaggttggaaaataacggggggtgaggcaccacgcccccaaggtttgggttaaccttttaattcccataactcccccccccagaaaaaagggg

SEQ ID NO: 43770 - DNA, 684 bp, Homo Sapiens
  misc_feature (684)..(684): n is a, c, g, or t
tcaagaggtcctgagaccacgtacccatgatttttttcttgctctgtgatacccaataactccttcacctaagccctgttgttgattttgaagtgcttcctaggccagtgattttagcttctgccagctgcttttgccagtagattaacgtgtttttatttttcaaactccgtgtttcctaacgtggagtgtatgggtctaagagagcctgctgtcctccctgccttccaccttggagaggaggctggacgcatcagcagtggccagggcaggtcgcaaaatctcccagcctagagaccacacctgaaacggctgaagccagcttgcacaagggctgctgtccctctgcggcaggcagagctggtgggggcaggggtcacagagcagtcatagacaccatggaccagggcaggagaagggcagatggcacatgggcacaacagggccttgtccttagagcactggggggtcatggctgggaggggcatggcaggggctggcatccctgtagagccagaggggccacccagggcagtgacattccagatatgttgggctcacctcatccttgctgtgagactggagttccatggggacatgaagtcagtacaccgcagagctgctcagctgctctacctctcgctgacttttttgttgcacatatacattttctttcaattaggn

SEQ ID NO: 43771 - DNA, 711 bp, Homo Sapiens
gaggaaagacagagagaagcaaattaaagcagaatttagaagaacagttggatagactcatgcaacaattacaagatctggaggaatgcagagaggaacttgatacagatgaatatgaagaaaccaaaaaggaaactctggagcaactaagtgaatttaatgattcactaaagaaaattatgtctggaaatatgactttggtagatgaactaagtggaatgcagctggctattcaggcagctatcagccaggcctttaaaaccccagaggtcatcagattgtttgcaaagaaacaaccaggtcagcttcggacaaggttagcagagatggatagagatctgatggtaggaaagctggaaagagacctgtacactcaacagaaagtggagatactaacagctcttaggaaacttggagagaagctgactgcagatgatgaggccttcttgtcagcaaatgcaggtgctatactcagccagtttgagaaagtctctacagaccttggctctggagacaaaattcttgctctggcaagttttgaggttgaaaaaacaaaaaaatgacatggtgcagaagcttgtaacattgatcacattcttaatgtaaatggtgtctttcttctggggtttcagttattgcaaagaaatgaagagattctggaaatgcatcaatacctaagaaaagcgactaaaaatatacttatggttgtga

SEQ ID NO: 43772 - DNA, 801 bp, Homo Sapiens
  misc_feature (574)..(574): n is a, c, g, or t
ctgggcagacctcaacaccaacatcgaggatgaaggcagctccttctatggggtctccagccagtatgagagccccgagaacatgatcatcacctgctccacgaaggtctgctctttcggcaagcaggtggtggagaaagttgagacagagtatgctcgctatgagaatggacactactcttaccgcatccaccggtccccgctctgtgagtacatgatcaacttcatccacaagctcaagcacctccctgagaagtacatgatgaacagcgtgctggagaacttcaccatcctgcaggtggtcaccaacagagacacacaggagaccttgctgtgcattgcctatgtctttgaggtgtcagccagtgagcacggggctcagcaccacatctacaggctggtgaaagaatgagagactcggggagcagggaggggggaagagacgtgtgtgcaggaaacggggacgtggggaggggacctgcaggggcagccccctgaagtgccaagagagctgagaggagcagttgtgactctacccaggaacaaactgtggcctgaacctgaggtgcccaanccccaaataaaacccaagatgcctgtgtatttttcagaggaaaaaaaacacacccacaaaatccaaaaaaaacaccgcgggcacaataactgccgggggggcgcaccaaaaggttctgacacacgggccgctgggctcacggctgtgccgggcacccgttttgtgccaaggggggaatcggggggcacccaaagggagcggcaaaattcggaaacgcggtacggtag

SEQ ID NO: 43773 - DNA, 957 bp, Homo Sapiens
gaaaccagagagccttttgttttctcttttttcctgtctatgctctgtctcacttaacactacgttttctgctatggtctgtggttgatgacctcaatatgagtttcgattgtyaacgtgtttttgtttgggaagtaattttgtttgaaaatgctctcacatacaggaattagggcctagattgtaagctcttgcagcagttacatttgttcccgggctttggtggttatttctaaatttttgaggtgctttgctatctcttgtgtgacctgatagctccctggaactttgggtctgtgtgtgacacatgagactcacagttggagttctccagctctggaggtgctgaaggagctgcattaattctggaagacgactccatgcagcaactactgaagaaaggaccagacttcaacggggagtgtggatgggccgacctggctgggactcgtgaatttggagaagagctggagaatggatagtattgtctgtatttggagactttaatttctgtgtgagaccaaaggaggagagatgtgttttgttcaaaatttaaatttgttgtggtacactatcttatgtaacctgtctggtgagtttgtttggacaacctaactcagctttatttgacatggaacctaaaatagaagataagatcttgatattctgtacaagttgatgtaataccctgatgcgttttagaggacttggcataaaatgaaagattggcaaaggcccttgaggggcttggggatgagagtatggaactgtctgcattggaccctaaactggactagaagaggcatcttcaaggttcatacgttgtccagctgtaagttcatttgagtagcagacctaacaaatatttgaggtcagaaccctaccatgttaaaacaaacaaaaacttaccatgttaataaaagtattcatttgcttgaaaaaaaaaaaaaaaaaaaa

SEQ ID NO: 43774 - DNA, 693 bp, Homo Sapiens
caaacactccccatctctggtagtcagactggcagctctggagtgatctcccctcaagagttactgaagaagcttcagattgtacagcaggagcagcagctgcatgcctctaaccggccagccttggccgctaagtttcctgtgctcgctcagagctctggaacagggaaacccttggaatcctggatcaacaagacacccaacacagaacagcagactcctcttttccaggtcatctcacctcagcgcatccctgctacagcagctccgtctctgcttatgtcccccatggtgttcgcacaacccacctccgtcccgccaaaggaaagggagagcggcctcttgcctgtgggaggccaggagccacctgctgctgccaccagcctcctcctgcccatacagagcccggagccctccgtgatcaccagcagcccactcaccaagctccagctccaggaggcactgctgtacctcattcagaatgatgacaacttcttaaatataatctatgaagcctatctcttcagcatgactcaagcagccatgaaaaagactatgtgacagcaaggccttttaaaactgattttcaaggtccttctagaactccggcacaaggttctttcatgttgagtgttgtttccttcaatgtttctgccttttttaaaagaaaagtatgtgtaatatgaagtaaaa

SEQ ID NO: 43775 - DNA, 673 bp, Homo Sapiens
ggttaaagctggtacgcctgcaggtaccggtccggtatttcccgggtcgatccacgcgtccggtttaacccaaatatctgaatggtcatctggtaactcatgggtttttggcctcataagatggtccactctgtacacaggcattcctcctgcaataatgttgtatctttgagaccgttgtcagtgtacacaactcacatccttcatattgaaggtgactcatttttctgcacacttttttgatgtgatgcttgacgtgaggcccgacactaggattctcaatgcaagaatccagtaccttgcacatagaagtagcaacccatcccttgcctattttcatcttgctgttttcttttttttaaaaaaatggatgtgacttgttttgaatgttttgtattatacttgtttttgtgtgtgcataaattcattctgtaggatcttaagaaaaagagtcccagaatgttgcttctattattgtgcacaaccattgagaggtgttacaagaatgcagttaattttaacatgtgtgatgtgccatggtggaaaagtactatcggaataactctgcagtgacagaatttgaagtttggctagcatccatacttttctactgtaaatatttcactctcctctagctatccttgatgagcttctcactttaagaataaatgtg

SEQ ID NO: 43776 - DNA, 946 bp, Homo Sapiens
tggttttacacccaccccctgggcagggagtttgcacgtagttgtgagctgtgagtggttagtgcattgctggtattgctgaaggcagggttgatccctcacttgactgatacttggattcaagagaatctagattgtgttgggggagggactgactgtactcatggctaacttaaagtattaaaataaggctgtcccctacaaccttcttagtcacacaggatccctgtagccaaaacagtatatgatccagctgcagagagcagactgctctcagcttgcacagcaccttaggcgagggaagaatatacggatagggaatggggtggagaaaggatgggaatgttgtcatccaggtggctttagggtcctaaggagtggagaaggatggcactggggaggtctggatggatctgtgtaggagttccctgtagataaattactgatcccccatctactatccccagtatgtaatggctgaattaatatgtaatcaactgcattgtatctaaagccttagaactagtcaggtgctccctccacccaataccatttcttaccctctaatcctacctgatctttaacaaagcattaataattctaaggataatctctattttggtgtgcttttttgtaactgttttaaataaatcaatttgtactgtatatttggacttttgtgagatccttttttgctggtttacccatttttaagtctccggtactttgggctaccccccgaattggaattttttatgggtaatggcctcctccttatgggataacctgccattttaactttgggggactattgttaaaccccaatattctaatccataacccaaaaaatcaaatatatcctaccccatataaacctaacctagcctttttcaaaaaagcgggggcaatcccccccaaaaagggcggcccgcctccaaaaatatcc

SEQ ID NO: 43777 - DNA, 623 bp, Homo Sapiens
ctggctatcaccactggcctctggggtcttcatatcttgccatctcatccagggttccatgaaagttacccagggtcctcatgtccttccttagagcctgagtggtgtgaggtgacaggtctctctctccactgcccctttctggtttaaaaaaatggtgcttgatgagggaaggtagactcttccctaggactgacgagttacggctgccagatgcctgcatgggaagaggtggacatctgcatcttccattggtggtcaaggatgggtgtgggagaaccacacctagtgcaagcctggtactcagtaaatatttgttgaaatgaatgataagagcattggtccccaagccagagagccagaagccatcacctaatgaccgccccttccttccggtctacaagagctctcaaggctgggtctgccaccactctgctttgcccaagtgtgacagcactggggaggagagacaggataaagggcagatgtcagcaatactaagggcttcctcatgggagggcatgaggctccactcattgtcttgtgacttccatccctgctgaatggggctgcaaggccaaggctccttaggggagaggtccttacctctgatccacttagag

SEQ ID NO: 43778 - DNA, 810 bp, Homo Sapiens
tggagctgtcactgagaaagggagatagagttattcttcttaaaagagttgatcaaaactggtatgaaggtaaaatcccaggaaccaacagacaaggcatcttccctgtttcctatgtggaggtcgtcaagaagaacacaaaaggtgctgaggactaccctgaccctccaataccccacagctattctagtgataggattcacagcttgagctcaaataagccacagcgtcctgtgtttactcatgaaaatattcaaggtgggggggaaccgtttcaggctctgtataactatactcccaggaatgaagatgagctggagctcagagaaagtgatgtcattgatgtcatggaaaagtgtgatgacggctggtttgtggggacctcaagaagaaccaaattctttggtactttccccggaaactacgtcaagaggctgtgaattgcgctccctccttctgtagaggccgcctgccagccatgcacctgcgtcaacgcgcctgaaacaccccgcgggcctcccgttgtcatgccttacggtttccaatgcgccgtcaccatctccacctgccaccaaaccaccagcagagtagccgccgctgctgtgagcctggggacgacatggcaggctggtccccctccgtgaaagtgtggattcctacttcctgctctaagctttgacacgtcaaaatgtgggatcagaaagaaaaaaatcatgatatttaaaaatggtcaaatatttgaggcaaaaaaaaaaaaaaaagtgtctccaggaggctgtccagcctcgtggctccatttcaacatctccc

SEQ ID NO: 43779 - DNA, 571 bp, Homo Sapiens
  misc_feature (549)..(549): n is a, c, g, or t
caatgcaggagatcagcctggagcttatcttggccctctgatcactcccgaggccaaagagcgagtctgtaatctgattgatagtggaacaaaggagggagcttccatccttcttgatggacgaaaaattaaagtgaaaggctatgaaaatggcaactttgttggaccaaccatcatctcgaatgtcaagccaaatatgacctgttacaaagaggagatttttggtccagttcttgtggttctggagacagaaacattggatgaagccatccagattgtaaataacaacccatatggaaatggaactgccatcttcaccaccaatggagccactgctcggaaatatgcccacttggtggatgttggacaggtgggagtgaatgtccccattccagtgcctttgccaatgttctcattcaccggctctcgatcctccttcaggggagacaccaatttctatggcaaacagggcatccaattctacactcagttaaagaccattacttctcagtggaaagaagaagatgctactctctcctcacctgctgntgtcatgcctaccatgggccgt

SEQ ID NO: 43780 - DNA, 553 bp, Homo Sapiens
gtgaacattccagctgtttttttctggcagatctgatgctgatttgatgctgtatgatcttttttttttttttagttaaattcatttagtgaatgttctattattttatacatacacattaagtactcagctaagtaatggcactatgaggattttttttttctttcctgtcagcagcagttctgtgaatgcatcttaggtataaaaatgcaatacagatttttatattttggtgtggacatggctcattttgttttaccagttatttgcaagcaaaatgtaatttaatgtatagatgatttctaatgtctcctgacaaactgtaaatactgcatttcttttgcgtatataattgcttacagcttttctcatttgatatatagcattgtacatatgacaagtcttttgcaaaactgtgtgatctttgtgaaagtagtacagtatatgacctttaatttcttttttattttaaatatactgtcacactgaagcactggttgggcattttaattcatgttaataaatcacaattatgtcagttttaaaaaaaaaa

SEQ ID NO: 43781 - DNA, 557 bp, Homo Sapiens
cattttcattaatggatgaaaacttcagggcttcttttctgtatataacaaattaagtctgtacatatttttgtaccttttatgtaaattttgcacagaaatttttggcataagtttattttctttcagtttagttcagtgcatgcactaataaaactggttgtttaatttaaaaggaatatataagactttacccatgttattttcttggtttttatttcagatgtagattttgtttttgaggtaaattcgttcttcagggattgaacactattgttagcaagtgcctaaaaaagatgtgaaacagtttacatatgtcaactgtaacagtaggtcccaaatgggcccattcccctaatagttttatttttaaagaaagccatacatagaatgcttcaagctatcttgctatgcacattatacttgtactgttttgtgcagtttgtctactttcttagtgaagtattttttgtataaaatgttacaattgtgtttcttaaattgagcctaagaatggagttaattggaaatatacagtatatattaataatgtacat

SEQ ID NO: 43782 - DNA, 650 bp, Homo Sapiens
agtacaagcacagaaacatctttacggtggcatcatctcattttttaggaagacatgataatactgcccatcatattcatgtgtaactactgttctttcttctgctttcttcaccataataaactttggacaaccaagcaagctctaaccgcaatgccagatggccttgtccgagggcctagtgtttgcacggcagtgggaactgggcctttcctacaggacaactggcaagtttgctgggaagtcaaataatacattccacctggcagctgaaggcagccagtcagtctgtcccagaaagggcccttttcagcacccaaagctgggctggctgggatgcctctggctggtgaagttctcacataggctgatttaaatccagcaaaggtctatagaaaaaggcttgcgtgttcgttgagtaatcattgtttcattttcatttttacgagagtttgaaaatagacacactgttaacacttctgccagttttttctgatctttccagccccaccccctttctctttctctctctctctcaaaaaaaaaaaaaatgggagtgcaaaaaaaacaaagccaaaaaatatatgaaggatagctgttcttctgtgttctctcattatggactttgtgaagtagaaacataatttttt

SEQ ID NO: 43783 - DNA, 1766 bp, Homo Sapiens
  misc_feature (881)..(881): n is a, c, g, or t
  misc_feature (1122)..(1122): n is a, c, g, or t
  misc_feature (1198)..(1198): n is a, c, g, or t
  misc_feature (1223)..(1224): n is a, c, g, or t
  misc_feature (1233)..(1233): n is a, c, g, or t
  misc_feature (1297)..(1297): n is a, c, g, or t
  misc_feature (1380)..(1380): n is a, c, g, or t
  misc_feature (1451)..(1451): n is a, c, g, or t
  misc_feature (1467)..(1468): n is a, c, g, or t
  misc_feature (1510)..(1510): n is a, c, g, or t
gcagcaagatccgccggctgtcggcctgcaagcagcagtgaggctggccgcctgcagcccgtgtccaggagccccgccaggtgcccgcgccaggccctcagtcttcctgccggttccgcccgccctcccggagaggtggccgccatgcttctgtgccgaccacgccccaggacctccggagcgccctgcagggccgggcagggggacagcagggaccgggcgcagccctcccccctcggccgcccggcagtgcacgcggcttgttgacttcgcagccccgggcggagccttcccgggcgggcgtgggaggagggaggcggcctccatgcactttatgtggacactactggccccgcccgtggcctcgtgctccgcagggcgccctgcgccgtccggcggccccgccgcaaaccagctggcgggtgtggagaccacgctccctgaccccgtcatggcctgcagcgccacctggaagcccgcgcggccgctttggttttttgtttggacggggcccatctcccttttcctctgtcttttgctaagacaaaataaaagggtggactttgcaaacaataaaaaaacccagagcttcatacgcgccttttacgttcagggcgcgtgtgcacatcctagggtatatggaaacatgggcgacctgtgggcccgtgggtcggtttgccttggacacctccaccttctcccttggccgccaacagactgggtacagattcccggcccggtgctccctcccgcattaatagggcgcgagtgtccgctgatttcgcgaccgtccccgaatatccaaccgcctacgttatcttgacaccccccgcgtcttttcgcaaaatgcgaaaaaatcgccgagatccgtgctgctgaanacttaaaaccgccgcgggggaagagaaattacatacttgcatcaccggctgccggcctatcaacgttttaattttttggtgaccacgcggcgcagggcccccccgcccgatcagccactcgagatctgaacccctacccggctatggttgtaggactcaaatacctttaaacgttggacgcctacacttcggaggcggccgggtttgttgtccgcccgattggtcccgcgggcctcttttnattcaacaataaggagcaagcccctcggtaagggactgggacccaaaaaaattataatattgaacggtaacccgantgggcgacgaccccgcgcagagcgnnacaagaccnccctacgtcccgtttgttccgtgtttacctacacgcgaccttatgtactgtggtccatccctcnacccaccttttagtttttttgaatccagggcccccattttttccctccaacccaccgacgcgccgacgcctattataattaantattccacatcactccgtgttcgcgccgtgaattgcccgccgctcgacccacctatttttacggacgcccnagggacaatcattggnnatccctttaccaatttcccaccgccagccccgtttcagtaanaacgcaatgcctttattttgaccgcccgggaaggaaggggtccttatttgtttccccgtctcaattttcttttactgtgagaggatagccgggatgaggtgggctttgtgtccgccccatgacccgcaacaatgaggccgcctgagattcgtcagactagggtcggcaaaaaaatcggcgccacatctaggcgatgtttggcgcgtatcagttgtatagttccctatcccgtattaagcggcagatggtacgtttg

SEQ ID NO: 43784 - DNA, 572 bp, Homo Sapiens
cactaagtaacacccagtagataattcctatggagcagtggtgttccaaattctccattacctctatgcctaatattcatcagccttcattactctctagcatattcaccttgattcaacagattcaaacttcctacagccttctactgatgtcttacaagctcttgcctctgtgcctttctcatgctattctttttgcttagattgctctttggtcccagctcatgttcatcactcccttcaaagcctttcttcctttatatcttctgactgagctctccctgattgacatcacctcatgcgatgacctccctcattctgtgctgcctcagcacttatcttttgagtttgtactgtggtccatgtacttactaatatgttgctttgtaattattttctagcactctgtgttacagtttcatatttgtatttatttccaaaattaaattgtaagctccttgagggcaggaataataacttttacatttgtatctctgcacccccgagtgcctagtatagtgctgagcacatagtaggcgtttaataaatgcttgttgaagtaaaaaaaaaaa

SEQ ID NO: 43785 - DNA, 881 bp, Homo Sapiens
  misc_feature (785)..(785): n is a, c, g, or t
cagtgcccccagcccatgacaagggagtcttgttttctggcttggtttggggacctgcaaatgggaggcctgaggccctcttcaggctttggcagccacagatacttctgaacccttcacagagagcaggcaggggcttcggtgccgcgtgggcagtacgcaggtcccaccgacactcacctgggagcacggcgcctggctcttaccagcgtctggcctagaggaagcctttgagcgacctttgggcaggtttctgcttcttctgttttgccccatggtcaagtccctgttccccaggcaggtttcagctgattggcagcaggctccctgagtgatgagcttgaacctgtggtgtttctgggcagaagcttatcttttttgagagtgtccgaagatgaaggcatggcgatgcccgtcctctggcttgggttaattcttcggtgacactggcattgctgggtggtgatgcccgtcctctggcttgggttaattcttcggtgacactggcgttgctgggtggcaatgcccgtcctctggcttgggctaattcttcggtgacactggcgttgctgggtggcgatgcccgtcctctggcttgggttaattcttggatgacgtcggcgttgctgggagaatgtgccgttcctgccctgcctccacccacctcgggagcagaagcccggcctggacacccctcggcctggacacccctcgaaggagagggcgcttccttgagtaggtgggctccccttgcccttcccctccctatcactccatactggggntgggcctgggaggaagcccacaggcccagcctattggaaaaaagcctttttattttttagtaaaaatattaccggaaaagttcctttttttcctga

SEQ ID NO: 43786 - DNA, 803 bp, Homo Sapiens
  misc_feature (1)..(1): n is a, c, g, or t
  misc_feature (24)..(24): n is a, c, g, or t
  misc_feature (760)..(760): n is a, c, g, or t
ntttttggccctacgaccccagtnattcggcacgaggcagaaaaacatttcagctgcagtcaccaacttgaaaagcgagtgagtaggagtttgtcacactgccatgtaccagactggaaatgcatttcctaccaattacacatttggtgtgggggaatggtgatgtcattttttgacaggattttattttgtgtgcatgcattctgctccaagtgtcacaattctggttacaataattataatatttggagttactactaagactttcctgaaagaggtgtattgtaccaaattttgtaacataaaaaaatactaaatgatcttaaagcttcctaaattgtgaaaagggtatgtgctaacatctcagaactttagccctgcttgttgtcatctttaccgatctctgatgataaatgcagaagggatctgagagtttttaaagcaagtagagtcaatcagagttttgaacatcatagtaatacttccgtgattcagagttagatcatataaatcaaagtaacaatttggattttttttaaacaacaatatcataactgtcataaaacagatggtccaaccccaggagcagataataacttgggcagctctgtggggaacaagacggggaaaacaactgttctaactgcccactagaacagtggtttcaactactacaattctcagtgtttgagaggtacaagggaagaaaggactatgtggatcccttgtggctatgcagatacctacctcacagagttgntgtagaagactggtggtttggttcaaaccttgtgattaaagag

SEQ ID NO: 43787 - DNA, 766 bp, Homo Sapiens
  misc_feature (751)..(751): n is a, c, g, or t
  misc_feature (755)..(755): n is a, c, g, or t
  misc_feature (760)..(765): n is a, c, g, or t
gaagctgaacctgattgcagagttggagtccagagttctggctgagcctgtccctctgccagccgacccaatggaactgaaaaatctggagtataggccagtgaaggtcagggggtgctttgaccattccaaggagctgtatatgatgccccggaccatggtggaccctgtccgggaggcccgggagggcggcctcatctcctcctcaactcagagtggggcctatgtggtcactcccttccactgcaccgacctgggagtcaccatcctggtaaatagagggttcgttcccaggaagaaagtgaatcctgaaacccggcagaaaggccagattgagggagaagtggacctcattgggatggtgaggctgacagaaaccaggcagccttttgtccctgagaacaatccagaaaggaaccactggcattatcgagacctggaagctatggccagaatcacaggcgcagagcccatcttcattgatgccaacttccagagcacagtccctggaggacccattggagggcaaaccagagttactctgaggaacgagcatctgcagtacatcgtgacctggtatggactctctgcagctacatcctacctgtggtttaagaaattcctacgtgggacacctggtgtgtgacagatcagctgctgaagccctgtccctggataatgcagtatttcaagactgcctttatgctggatcatgtgctactggtataaagttctggccttctaccttaanaaanaaaannnnnna

SEQ ID NO: 43788 - DNA, 659 bp, Homo Sapiens
  misc_feature (628)..(653): n is a, c, g, or t
gggggttcttccactcacccttttctcaaaaacaacaacaaaaaacaaaactcattttatttttctactttatagtaggcctgacagaaacatagtgaagcaatctgggaggcaacctgtggtagattttatgctaaatgttaatgtaacctctgttgattttttaaaaatgtgtttatatataagatttgaaataaaaactttaatacaggctagaataaggaattttacaaattctctttagagcaaccaacattaaagttttagagttgaattttgctctatttcaactcccttacctctctagttttcagtttatattaagttttaataactttgcggggccctgcaaattaataatctacatgaagtatattattagagggaaactaatcttactgctaagcagtgtgttgtactacatagtgaatgttcgtgttttggaatttaaaaattatttaaggtaatggtgttacgaatggtttaaaaatgtctggtgacttgcttatttttaagtgatcaccattaagtcagaaaaatgtatttttaaatgtttcttgaagtgccttttgaacatttttaaacagcggatttaaataatgcataaaataaattgccatggttcaannnnnnnnnnnnnnnnnnnnnnnnnncttggt

SEQ ID NO: 43789 - DNA, 539 bp, Homo Sapiens
aacaatgagcccagtgactcaatagggcccaaacctttttattttacaatatgagctccaagacacttgctgatctactgtgaatataaaatgttattagccttatcaaataaataaatgagcacagctctttgttcgctctattgaactgggtgataattatttagatgtgaatgttaggtcagttctactgtaataactaatcgtaaaagttgtaaatttgtttaatggatgaaatgtacactttttgtattctgtacagctttgtcttttttaaatatgaagtacttaaatgtacttactatgataggaaatataatgtgtgccttctaggatttgtgaagtggtttcatgaactctaaggaatttgttttccctatcctaactcagtaacagagggtttactccgattatgtatagaaccttagtttgagaaaatgaattttactatgtactgaatttagaggttgagaataataggatctgtgttattcttagtacccactgataaattgtgcaataaataatctttcgcaagt

SEQ ID NO: 43790 - DNA, 603 bp, Homo Sapiens
gccaacacccagaggagagtggctgaaggccacaaagcaagtttctgtcttgaagacacatcctgtgactatggctaccacaggcgatttgcatgtactgcacacacacagggattgagtcctggctgttatgatacctatggtgcagacatagactgccagtggattgatattacagatgtaaaacctggaaactatatcctaaaggtcagtgtaaaccccagctacctggttcctgaatctgactataccaacaatgttgtgcgctgtgacattcgctacacaggacatcatgcgtatgcctcaggctgcacaatttcaccgtattagaaggcaaagcaaaactcccaatggataaatcagtgcctggtgttctgaagtgggaaaaaatagactaacttcagtaggatttatgtattttgaaaaagagaacagaaaacaacaaaagaatttttgtttggactgttttcaataacaaagcacataactggattttgaacgcttaagtcatcattacttgggaaatttttaatgtttattatttacatcactttgtgaattaacacagtgtttcaattctgtaattacatatttgactctttc

SEQ ID NO: 43791 - DNA, 584 bp, Homo Sapiens
  misc_feature (78)..(78): n is a, c, g, or t
cagaacaatttcttcatcagcagctaaacaggtgtttgaggaactgtggaagagggaaggcaagactccagggcagantgtttcagaaaagcagcttgaactgatgcaggaccagggggcactggagcagctctgccactctgtgatggaggcccatcctcaagtggtaatggatgtgaagaacagaaaccccagagctataaataaactgattgggttggtccggaaagcgactcaaagccgagcagatccagtcatgataaaggagatcctggagaagaagctgtcattgtgagatgtttgggatccccttgcccaagggacaacaacaaacagtgcagcctgactgggaacaggatcctgtgaaagctgatgcccatgtgccctgagagctgcctctcaatccctgtcccaagccacagctatggcgttaatgtcaccagtgttctcaccctctaggccctgtgcctggaggtgcctccacagccgaccagcagccaccccgcctgcttcatccacatcaggagggtccggtgaggctgcagcagtggttaaggagtaacaccttcttgtattaaggaatc

SEQ ID NO: 43792 - DNA, 554 bp, Homo Sapiens
cagaatatttagaaaagcatctaatagaattatccacttgttttccttcatcttcattttaatatgttctagaagtaggatcagcctgttccaatttgccaagcattattaaggtggaataattccataccatgtaaaataccatgatatgctgattatactacattaacaaatttttaagttgcgttcactaaattctgtcctgtttcttcaaaataatatagcttaaattgcatgttaattgtatatcttacctattttgtttttatattattcttacaatataatcatgtatattaacaaacagccctgggattctaatcttcctctgcaactgtcttccaggacttactggcacttattacactgtgataagtggcagaaaagtagaatgaaatattctttttccattagatttgttcttatgtgaccatgtaccaagccagctataaagtattgtatttctgtagaatatggaaaatagtatttgtcttacctttgctaaatgtttgcaatttctaagtaaaccttttatctccgaaaaaaaaaaaaaa

SEQ ID NO: 43793 - DNA, 759 bp, Homo Sapiens
ctgcctggcctcccaaagtgctgggattacaggtgtgagccaccacgcctggccggcttatttttatccacagtaaatcttcagcaactcatgtctccaccagatagtatttttctgtaaatgaaatgctgacttcgcctcttcctgctgtatgctcatccctgcactgagcacagatatgacaagcagtagccatgggggaggtgggtgacaaagataggaccccgggagggggcgcaggtacatgctagtttcaattaccacagtattctagagacgggttgcaatgacaaggggggcaaatgaaatcaatgcaagatttcttaataatgggcagacagaaaaatgtaaaaccacacaaaacggactgctgataatattttaaaatatacttattgtcttcttttgcattgtgaaaaaaacaaaataaatttgtgtgataatttgatgatgaaaggtggaagttctacctagatttgaatgagtgtttttttaagggaatgagaatgtcatggtgctaaacctgacaaataagagatcattgaaatgctgaacaattttaacagtcttcttaaaagtattgagggggcaaaaattaccaattatggtatacaaaaataagcctataaatgtgtttcacattgctaacttgagtttcagttgattcagttgtaataactagtaatgagcttctgtttacataaaaaattctgtacatgacaacacgacccccaccacccaacccccccccacaacggg

SEQ ID NO: 43794 - DNA, 920 bp, Homo Sapiens
gctattattttctccgagggatgatggtggggggtgtgggaagggtaccacagatcaggccggggcagctgtaggggcgggggcccagacagccaggccgccaccagagcagccccatggggtgccccagacgcgggcctccaagaagccaagtcccagtctgttttctggcatcagacaccggcccgtgttccttgtcagacagacagactctcaggcctgcctggggagtcgtgtccctcagctgcagggcactgtgttgggaaaccattggctgggcctttgaggacacagatcagaagaaagaaagacaactttcctctgcgcggaacactcacacggaagggctggccgcctccctgagccggctgggagtggacgacaggacctacctccccagagcaagggcctggggcttcccgccaaagctgccgcggaaccccgctagtgcgaccaccctccctccgtcggtatgtcctgctttccagctgaaccctaaactacaagtgggtttaaacacaaataaacaaaacaccaatcagctaaaatacaaatattcactatctactctaccgcccgcagatcttctcaccactctctcttctccttctctcctctctcactccgttgccactccacaccacacatcatcacaccacaccgttataccaccccaccttgccccaccatcacccgccctctctccccaccaccatcttcaagtcaacactcactcctccgcgcccctcaccccgcctcgtcatcaaacatacccagccaacaccctcgctccaccctccctctctcacccacatcaccacgaaacactcagtctccctctcaccctcttccccccctcctcctaacactatccaacacccttcttcctcccctcctcctcctcctcctacctctatctc

SEQ ID NO: 43795 - DNA, 555 bp, Homo Sapiens
taaatgtaaagttctcctgttgcttctgtgagccctatgggtatcagcttgggagtggccatagatgaccgcatttccatgacctaactgtatttcacccccttttccttccctactgttcttgccccaccccaaccagttcctgctgctgcttttggcttcttggaggtgaagggcttaaaacaaggcttctaagcacccagctatctccatacatgaacaatctagctgggaaacttaagggacaagggccacaccagctgtctcctctttctgccaattgttgcccgtttgctgtgttgaactttgtatagaactcatgcatcagactcccttcactaatgctttttgcatgccttctgctcccaagtccctggctgcctctgcacatcccgtgaacactttgtgcctgttttctatggttgtggagaattaatgaacaaatcaatatgtagaacagttttccttatggtattggtcacagttatcctagtgtttgtattattctaacaatattctataattaaaaatataatttttaaaaaaaaaaaaaaa

SEQ ID NO: 43796 - DNA, 739 bp, Homo Sapiens
ggtataagaggttaaaataacagttcgcccaatttaagcccagtagtgtcagttttcctaatctcagtccaggtaggaattaagaaatatctcaagtgttgatgctatccaagcatgttggggtggaagggaattggtgcccagaaaatgggactggagtgaggaatatcttttcttttgagagtacccccagtttatttctactgtgctttattgctactgttctttattgtgaatgttgtaacattttaaaaatgttttgccatagctttttaggacttggtgttaaaggagccagtggtctctctgggtgggtactataatgagttattgtgacccacagctgtgtgggaccacatcacttgttaataacacaacctttaaagtaacccatcttccaggggggttccttcatgttgccactcctttttaaggacaaactcaggcaaggagcatgtttttttgttatttacaaaatctagcagactgtgggtatccatattttaattgtcgggtgacacatgttcttggtaactaaactcaaatatgtcttttctcatatatgttgctgatggttttaataaatgtcaaagtttctcctgttgcttctgtgagccactatgggtatcaccttgggagtggccataaatgaccgcatttccatgacctaactgtatttcaccccccttttccctcccaactgttcttgcccccaccccaaaccagtttccttgcggcc

SEQ ID NO: 43797 - DNA, 857 bp, Homo Sapiens
atttttataatattgctgtgaaggagcttgctattgaaccacagaaatcccttaatattcaggttttaaaactggcaaattctcacaggacctcaggcacagattattgaggttgggagagagtgagtagatgtagaaaaggagaaaaacaacacacgccctgttctctacagtacaactgtgtgcaattaagcaatggtacttgatgtaggctctaacactcatcaataaataagtgttgtaaaataatttataacaggtaatcgatagtgtgtaatgaatggactattaataattgattatctagaaacgaactgctttcgtgggcttttaatattttaatgtgaagcatatgcagtgtgctttctgcatttatttttctaccaaataatacagataatgagaaattggtgaaaatgcctacgcaaagtgttgacagtgtgaaagcagtgcgagtgcggccttttagtcaggttagtgatggatgttacgctgccttgttgaaaatttcactgactttgattttattacttttttaatgatagttatcaaacttgtatttaagctgcttgtcatttatggaatattgaacttatttaaatgaacttgttaaatgaataaagagctaaacataattcagtaaacaattcctttgcgcaagtagcacaataaacatggatgcaacgtatgtcaagttaatactttttttaaccaacgcaatttggtgaatatagatgtgtgggtaccctgttttttaataagtgtaccttttttttccccccctccgtggaatggtagatccataagcgcaaaccaaatttgccttgggtcctaaattgaaactttttaccattatc

SEQ ID NO: 43798 - DNA, 602 bp, Homo Sapiens
ggtggcgatggacggctgctgtggccccttcagacaatgggcagtgcccaccccgcccactggcatctgcgtgtgagggctaggccgccctgccacacatcccgccccctcccggaggcagcttcaggacaggacaccaggctggctgctttttttagcctgcccctggcccaggcccagtccttggtgtcagggagcccccaggccgcaggtggagggtgataaaatatgttctctgacaggacccagccagccacataggtggaggttttccatgtccaaatgaggtcaagatgccgaaatcccagatctgacttcacacttcccttttctagaaccttttgtaaaagttggtggcagcagaggcagccccaggccgggctgcatctctctgtgtctgttgtgccttgcccggcgcctcacggatggcaaagctctcctcacccatgggactgtagtgcaattaaacccgcgtctaggtgatgcttttaaagttgtagcttcgtgctttgtacagttttctttctggttttaatttttagttgtgctttgagtcagtgcaataaaactagactttttcccaaaaaaaaaaaaaaaaaaaa

SEQ ID NO: 43799 - DNA, 523 bp, Homo Sapiens
gacctgtgagtctgaccacgaggcggaccccttcaccttggctgggcctggtcctggtccttaggttttgtcaggttgtccttgtttggatccctcaactaggtgataagcactggagggggatgacccgccttggacgtgtttctttaacctcatccatataatagggccgtgggatggttgtagaggtaaagcaggatgatggtgttttaagaccagagcttgggaccagggctcctacacctaattttctctcctggtagctgaacaaaggtctaaattagcttaacaaaagaacaggctgccgtcagccagagttctgaaggccatgctttcagtttcccttgttgacaattgctctccagttcctatgaaagcacagagccttagggggcctggccacagaacacaaccatcttaggcctgagctgtgaacagcagggggttgtgtgtctgttctgtttctctgcttgccgaactttctcaataaaccctatttcttatttataaaaaaaaaaaaaaa

SEQ ID NO: 43800 - DNA, 696 bp, Homo Sapiens
  misc_feature (631)..(631): n is a, c, g, or t
  misc_feature (655)..(655): n is a, c, g, or t
aactttgatgtctacaaggtggagacgattggggatgcttacatggtggtatctggcctcccaggccgaaatggtcaacgccatgcaccagaaattgctcgtatggccctagcattactagatgcagtttcttcctttcgcatccgccaccgaccccatgaccagctgaggctacgcataggggtccatactgggccagtctgtgctggggttgttggcctgaagatgccccgttattgtctttttggagacacagtgaacactgcttctcgaatggagtctaatggtcaagcgctgaagatccatgtctcctctaccaccaaggatgccctagatgagctaggatgcttccagctagagcttcggggggatgtggaaatgaagggaaaaggaaagatgcgaacatactggctcttaggagagcggaaaggacctcctggactcctgtaaacccccattctttccaagtcagatagtcttctgctgctggtacctgggtgggcaatggccaccatgtctgcacacaccagaaatggacattttcatatgcaatggaaaacagccacaaaaaaacctaccttatatggaagttgtagccctctgcagctcagccctgtacatatacctgtcnctctctggcttggtcccttcctcnctactttctgtaaatatctgtatctaaaccagaatattttg

SEQ ID NO: 43801 - DNA, 757 bp, Homo Sapiens
  misc_feature (669)..(669): n is a, c, g, or t
  misc_feature (726)..(752): n is a, c, g, or t
agatttgtctaagatgacgcaccgaattcaggctaaagttgagcctgagatccagctctcctaaccctcaggccaggatgcttgccatggcacttcatggtccttgaaaacctcggatgtgtgcgaggccatgccctggacactgacgggtttgtgatcttgacctccgtggttactttctggggccccaagctgtgccctggacatctcttttcctggttgaaggaataatgggtgattatttcttcctgagagtgacagtaaccccagatggagagataggggtatgctagacactgtgcttctcggaaatttggatgtagtattttcaggccccacccttattgattctgatcagctctggagcagaggcagggagtttgcaatgtgatgcactgccaacattgagaattagtgaactgatccctttgcaaccgtctagctaggtagttaaattacccccatgttaatgaagcggaattaggctcccgagctaagggactcgcctagggtctcacagtgagtaggaggagggcctgggatctgaacccaagggtctgaggccagggccgactgccgtaagatgggtgctgagaagtgagtcagggcagggcagctggtatcgaggtgccccatgggagtaaggggacgccttccgggcggatgcangggctggggtcatctgtatctgaagcccctcggaataaagcgcgttgaccgcccgannnnnnnnnnnnnnnnnnnnnnnnnnnaaaag

SEQ ID NO: 43802 - DNA, 909 bp, Homo Sapiens
  misc_feature (39)..(39): n is a, c, g, or t
  misc_feature (84)..(84): n is a, c, g, or t
  misc_feature (678)..(678): n is a, c, g, or t
  misc_feature (688)..(688): n is a, c, g, or t
  misc_feature (691)..(691): n is a, c, g, or t
  misc_feature (766)..(766): n is a, c, g, or t
  misc_feature (776)..(776): n is a, c, g, or t
aaatagcagtggccagtatattggccatttacccagggnaggagcaatacagctggctaacaatggtaccgatggggtacaggngcctgcaaacattaaccatgaccaatgcagcagccactcagccgggtactaccattctacagtatgcacagaccactgatggacagcagatcttagtgcccagcaaccaagttgttgttcaagctgcctctggagacgtacaaacataccagattcgcacagcacccactagcactattgcccctggagttgttatggcatcctccccagcacttcctacacagcctgctgaagaagcagcacgaaagagagaggtccgtctaatgaagaacagggaagcagctcgagagtgtcgtagaaagaagaaagaatatgtgaaatgtttagaaaacagagtggcagtgcttgaaaatcaaaacaagacattgattgaggagctaaaagcacttaaggacctttactgccacaaatcagattaatttgggatttaaattttcacctgttaaggtggaaaatggactggcttggccacaacctgaaagacaaaataaacattttattttctaaacatttctttttttctatgcgcaaaactgcctgaaagcaactacagaatttcattcatttgtgcttttgcataaactgtgaatgttncaacacctgnctncactttccccttaagaaatttcaacgccaggaatatgaagagacttctgctttcacccccacccttctcagaagnaataatttgnttacttggaaattgatggaggaatgaggaaaagaaaatcttttaaaaagatttcaggttgggctgagctcctgattgccttagggcagaataccccacctttgagctgagtaaggggggcccatgctaaagta

SEQ ID NO: 43803 - DNA, 713 bp, Homo Sapiens
  misc_feature (656)..(656): n is a, c, g, or t
gaaaatctttttaaaaatgatttcaaggtttgtgctgagctccttgattgccttagggacagaattaccccagcctcttgagctgaagtaatgtgtgggccgcatgcataaagtaagtaaggtgcaatgaagaagtgttgattgccaaattgacatgttgtcacattctcattgtgaattatgtaaagttgttaagagacataccctctaaaaaagaactttagcatggtattgaaggaattagaaatgaatttggagtgctttttatgtatgttgtcttcttcaatactgaaaatttgtccttggttcttaaaagcattctgtactaatacagctcttccatagggcagttgttgcttcttaattcagttctgtatgtgttcaacatttttgaatacattaaaagaagtaaccaactgaacgacaaagcatggtatttgaattttaaattaaagcaaagtaaataaaagtacaaagcatattttagttagtactaaattcttagtaaaatgctgatcagtaaaaccaatcccttgagttatataacaagatttttaaataacatgttattgtcctcaccttcaaaaatatctatattgtcactcatttacgtaaaaagatatttctaatttactgttgtccatgcacttacatanccacacaagaaagccttcaagatgtcaataagcaagtgatatatatcggcatgaacg

SEQ ID NO: 43804 - DNA, 1041 bp, Homo Sapiens
  misc_feature (820)..(820): n is a, c, g, or t
caaagcatggtatttgaattttaaattaaagcaaagtaaataaaagtacaaagcatattttagttagtactaaattcttagtaaaatgctgatcagtaaaccaatcccttgagttatataacaagatttttaaataaatgttattgtcctcaccttcaaaaatatttatattgtcactcatttacgtaaaaagatatttctaatttactgttgcccattgcacttacataccaccaccaagaaagccttcaagatgtcaaataaagcaaagtgatatatatttgtttatgaaatgttacatgtagaaaaatactgattttaaatattttccatattaacaatttaacagagaatctctagtgaattttttaaatgaaagaagttgtaaggatataaaaagtacagtgttagatgtgcacaaggaaagttattttcagacatatttgaatgactgctgtactgcaatatttggattgtcattcttacaaaacatttttttgttctcttgtaaaaagagtagttattagttctgctttagctttccaatatgctgtatagcctttgtcattttataattttaattcctgattaaaacagtctgtatttgtgtatatcatacattgttttcaataccacttttaattgttactcattttattcactaagctcgataaatctaacagttactctttaaaaaaaaaaaaagactaacgtggattttaaaaattggaaactgacataatgttagggtataatttcctcatttggagccgggcgcagtggctcacgcctgtaatcccagcactttgggaggccaaantgggtggatcacctggtggtcaagagttccaagaccagccctgggccatccatggtgaaaaccccactcttctactaaaaaataccaaaaatttacccccggccgccgggtgggctttggcgccctggttaactccccccgcttacctcccggaaaggttcgaagggccaaccaaaaaaatggtttttggaaacccccccggaaagggctatataagggcc

SEQ ID NO: 43805 - DNA, 669 bp, Homo Sapiens
gtcaggcaagggggctttgtgccacatggggggcaccttcagtgcacaggaggaagggcaggggcggacagacaccctgagcccttagacttgtgggagccaagctgaccagagtgaggttttttttagcctaacggaattagagtattcgctggttatccggatcagaagggacggtggcctggccggacttagaggaaactctggggcacaaggaggtgatgcctgtcacttggacatgggtgcagccgccagagccgccctccagggcacagggtgggcccgggtgagcttgtgtgctcacacctgggcaggccccgcggcagcaatggcagctctcctgtacaggctgagtttcagccacaccaagaagtcaaagctaaccgaggctgtgccttccgagacccccgggatggcccctgggaggccaaggagtcggggactgggtacccggagcagagtcactgtggccacggagaaccgcagctgagctttatgaagccacgtggccacacctcccggtgcctccaccccaagcaaacacagatcgctcagaaaatgggaacccagggcaaatcgtatgtgctccttactgggttgtcactaagtgtcacatgtttctataataaaacataggtgatttcaccttactatcatctccaccccaca

SEQ ID NO: 43806 - DNA, 500 bp, Homo Sapiens
tcctcaaatatgaagaaccaagagtgtgactgccaaaacttagtgtggcatcagcaccaacagcacagttcttcatatccacgccactctcagacaaaactagatgtccagattgttgcatttccgtaaagtttgtcacgagacattttttaaaatctcataacccacatgttcagttatccatgcaagaaacttgactctacatgtattgctgaaagaattttcttaacagtgaaatctgatcatatatttttaccacactgccacataaagcccaagaaattcagctgacaagacagatttagcattatcaagaaatcccatttgccctgaaaaagctgtcctccattgtactgaacagacagtcctgtcgattgtgttatttagaaacatacactgaatgtgggctgaaatcatcatctttccataatgaaaactgagaaactattcacaatgcattccttataaataaatgctacatttagtaactcatttcaccc

SEQ ID NO: 43807 - DNA, 830 bp, Homo Sapiens
cgggatccggatctgcctctgtcccaaagatgagggaaaatgatgactgtgctgtgctctctacttcctgcggttactgcgtgattctaaagctgccactcggaacagcgagtcctctgccgtcgagagcagggaggggtagggtggacaggcgatgccgtggaaagacgtctcggtggaaactgccatggtggaaaggtggcgcgcttctcacggctgagttgctgcgcctgcagacggaagctccccacaggcagagctgcttggatgtgtgagtcatgaagccagagaagccccgctccatgagcagtgactccccaggccctgtgacctccctcctgtcttgcagctcctcctggcaccagtccccagggctctcctgttggtagttcctgcttttcttcttggaaattcctcgtggacctcgagatctttaccctaaaatagttctgttgaatttcaccctggcaatgtaaattgatagcttatcttcacagatgccagacaatggacaactcaccatcagtcctctgctcacctgagacaaatgcatgtctgattgcttcctctgccctattgtttatgtgaaaatgcagattcactgagccagactaaggcatcagtgactgttcctctacctgcctctcacatggagattgtgtattcagtgaaaggctgatcaaagacccaaaggaatgcaacagtttatctcttatctacctatgacctgcgagctgcccaccacccccagttgttgcgcctttccagacagaaccagtgtacatcttacacgtattaattgatgtcctgtgtctccctaatatgtatca

SEQ ID NO: 43808 - DNA, 751 bp, Homo Sapiens
  misc_feature (702)..(702): n is a, c, g, or t
  misc_feature (748)..(748): n is a, c, g, or t
ataacttatcagcaaccaaaacttacagcatggtatggagaacttccttacacttattcaagaatcactatggaaccaaatcctcactggcaccctgtgctgcgcacactaaagaaccgcattgaagagaacactggccacaccttcaactccttactctgcaatctttatcgcaatgagaaggacagcgtggactggcacagtgatgatgaaccctcactagggaggtgccccattattgcttcactaagttttggtgccacacgcacatttgagatgagaaagaagccaccaccagaagagaatggagactacacatatgtggaaagagtgaagatacccttggatcatggtaccttgttaatcatggaaggagcgacacaagctgactggcagcatcgagtgcccaaagaataccactctagagaaccgagagtgaacctgacctttcggacagtctatccagaccctcgaggggcaccctggtgacgtcagagctttgagagagaagcttcactgaaacggagcaaaccttccactgagaagccacttcaagaggctggtgctgctagatctcatgatgtggctgttgggaagatggtggggtttgtttgccagcttggagtcctattaaatgaaagccagcaactcatgttggtaataggtctactgtgggaacagttatccctaaccacagctcanaatcgctatcatctttaggcaaattaaaatctatgtggcagtgctnctg

SEQ ID NO: 43809 - DNA, 710 bp, Homo Sapiens
aactggaaccactcgcggtcactccagatgctgcaagccagcccctcattgaccttcctctcatcgacttctgcgataccccagaagcacacgtggctgtaggatctgaaagcaggcctctgatcgacctcatgacaaacactccagacatgaataaaaatgtggccaaaccttcaccggtggtgggacagctcatagacctgagctcccctctgatccagctgagccctgaggctgacaaggagaacgtggattccccactcctcaagttctaagccgaaccaaatcctttgccttgaaagaacagccctaaagtggttttcaaccctcagaaacaagctttaggctggtcgcagtggcttacacttgtaaccctagaacttgggaggctgaggtgggcggattacttgagcccaggagttcgggaccagcctgggaaatatagtgaaactcctgtccctacaaaaaatacaaaaattagccgggtgtggtagtgcatgcctgtagtcccagctacttgggaggctgaagtgggaggatggcctgagctcaaggagatgcaggctgcagtgggctgtgattgtgccactgcactccagcctgggcaccaatgtgagaacctgtcttggaaaaaaaaaaaaaagaacatgttttagtagaagtttatttgaaaaagaaaatagcataatatattccagtgctggagaggg

SEQ ID NO: 43810 - DNA, 706 bp, Homo Sapiens
gggtctggaagtcttggaactacccttgaaaacaggaattgtacagagtacgagaggacagcacttgagaacacagaatgagccagcagactggccagcgcctctgtgtagggctggctccaggcatggccacctgccttcccctggtcagcctggaagaagcctgtgtcgaggcagcttccctttgcctgctgatattctgcaggactgggcaccatgggccaaaattttgtgtccagggaagaggcgagaagtgcaacctgcatttcactttgtggtcaggccgtgtctttgtgctgtgactgcatcacctttatggagtgtagacattggcatttatgtacaattttatttgtgtcttattttattttaccttcaaaaacaaaaacgccatccaaaaccaaggaagtccttggtgttctccacaagtggttgacatttgactgcttgttccaattatgtatggaaagtctttgacagtgtgggtcgttcctggggttggcttgttttttggtttcatttttattttttaattctgagtcattgcatcctctaccagctgttaatccatcactctgagggggaggaaatgttgcattgctgtttgtaagctttttttattatttttttattataattattaaaggcctgactctttcctctcatcactgtgagattacagatctatttgaattgaatgaaatgt

SEQ ID NO: 43811 - DNA, 835 bp, Homo Sapiens; identical to SEQ ID NO: 10129

SEQ ID NO: 43812 - DNA, 696 bp, Homo Sapiens
tgacctgggtgtttctgggtgggccgtcaggcatgggcctgtgcaacacagagcccgttcctcaggcgagtggtgctgaggtgctctgtggtgatgggaacggcagaggctggcaggtgactgaacttagcccaggcagctccacatcctgggaacactttcatgtaaccccttctagttttgaactctgcagcaggctggtgctgtgtagtggccacccagtcaccacccttggaagggtgtcagggtctgggctcgcatgcaccctgctcccttctgccagcctgcatcctctcctcaggcctccttcccacatcatctgtcttctctaagttagggaaccatatttgagactttcaaaaagggaacttctaggtttaagctcctcccagtagattcctgaacccaattatcaggaaatcatcctgagcactcacaggttcatttaacactcactcatcaagcaccttcctatgtgctaggtgctggggaaaacttgaccaaggaagagttcctgtcctgaagcttccaggacccagctttccttttctggtgtggccttgtagctagtgcctgggcacaggtgtttttctttttgcagttttacctagtgctgggagttcagttctttttcctctagaaaaatacctctgtgctccagagcctaatttttcccagatgcatattagctctagg

SEQ ID NO: 43813 - DNA, 815 bp, Homo Sapiens
  misc_feature (603)..(742): n is a, c, g, or t
  misc_feature (744)..(814): n is a, c, g, or t
gatgcccccctccctggctccaagcacagcccagccacccaagcaggcccagaaggagcagcggaaacagatgaaggggagagggcagctggagaagcccccagccccaaatcaagccatggtggtggccgctgcaggagatgcatgtcccccacagcatgtgcccccgaaggactcagcccccaaggactcagcccctcaggatttggctccccaggtctcagcccaccaccgctcccaggagagcttgacgtcccaagagagtgaggacacctacttgtaaccctggcagctaaggcctccagggcggggtctccatataactacacggttcatgaactgacattccacatcctgcccaccctctgagggccaagctgcctggccactgggctgggctggagtctggctggtccaacacagattctgcctggtccaacacagattctgcctgagcctccttatttattttctttacagtggcactcaggctggcccagccagggcaggcagaagctagggcctggggggtggggcctccttcagccccctcctcctgggggatgctccccagggttagggtgctggtgtaggggaaagggnnnnnnnnnnnnnnnnnnnnnnnnnnnnnnnnnnnnnnnnnnnnnnnnnnnnnnnnnnnnnnnnnnnnnnnnnnnnnnnnnnnnnnnnnnnnnnnnnnnnnnnnnnnnnnnnnnnnnnnnnnnnnnnnnnnnnnnnnnnncnnnnnnnnnnnnnnnnnnnnnnnnnnnnnnnnnnnnnnnnnnnnnnnnnnnnnnnnnnnnnnnnnnnnnnnt

SEQ ID NO: 43814 - DNA, 667 bp, Homo Sapiens
  misc_feature (650)..(650): n is a, c, g, or t
tggagaagagcaagaagttcgatgatgacaaccgccccaaaggccgagaggaacactacgaggaggaagaagaggaggaagaagacggggctgcagttgctgagaaatcacatcgaagagctgaaatgtagcggcacccaatttctagacaacgctcagccaacggattcttttcaagctgctcaaacataaatctgcctactgaactctaggatatttaattacaaaaattaagaacttagactttgttaaaacttttgtattagaaatgcgcatacatttatatgaatatattttgataacgtaggtctagagcttcttttatattcaagctaaacatgaaaaagaagaaaaacaataaagtaaacctgagcccccacgtcccaatttttttaatagattatgtgatgttggaaagctcattgattttgtatatgtttcagcgtgttacctttctggcttccagttcccaggtgttctttgtttgcctttgataaaatacaggatttaagaacagagagtactgcaaaatgccatgcagactttaaagagaatggcctgtgtactaattgctgcccttctgatgtctttatgtatagctctgatagaatttcaccagtctatgtatctctggagtgagatctatgtancaagtgacatacaattg

SEQ ID NO: 43815 - DNA, 580 bp, Homo Sapiens
tgttaagtttcttgatgccttgattgacacgtacctgcctggaattgatgaagaaaccagtgaagaatccctcctgactcccacatctccttaccctcctgcactgcagagccagcttagtatcactgccaaccttaacctttctaattccatgacctcacttgcaacttcccagcattccccaggaatcgacaaggagaacgttgaactctcccctaccactggccactgtaacagtggacgaactcgccacggatccgcaagccaagtgcagaagcaaagaagcgctggcagtttcaaacgtaatagcattaagaagatcgtgtgaagcttgcttgctttcttttttaaaatcaacttaacatgggctcttcactagtgaccccttccctgtccttgccctttccccccatgttgtaatgctgcacttcctgttttataatgaacccatccggtttgccatgttgccagatgatcaactcttcgaagccttgcctaaatttaatgctgccttttctttaactttttttcttctacttttggcgtgtatctggtatatgtaagtgttcagaacaactgc

SEQ ID NO: 43816 - DNA, 466 bp, Homo Sapiens
cacgaggcctcgtgaagcagtggtaacaacgcagagtacgcggggacgcttttcatctgtcccgctgcgtgttttcctcttgatcgggaactcctgcttctccttgcctcgaaatggaccccaactgctcctgctcgcctgttggctcctgtgcctgtgccggctcctgcaaatgcaaagagtgcaaatgcacctcctgcaagaagagctgctgctcctgctgccctgtgggctgtgccaagtgtgcccagggctgcatctgcaaagggacgtcagacaagtgcagctgctgtgcctgatgccaggacagctgtgctctcagatgtaaatagagcaacctatataaacctggatttttttttttttttttttgtacaaccctgacccgtttgctacatctttttttctatgaaatatgtgaatggcaataaattcatctagactaaaaaaaaaaaaaaaaaaaaaa

SEQ ID NO: 43817 - DNA, 692 bp, Homo Sapiens
acctgtcagcatcctttagtctaaggtgatgagaaatccatgttaccgatatagaagccaaactctaagccaagatcacataaagagaagaaaaagtacaacttctgataattcctctttgagaggcatgacagcagagctcagggatcttcttgcatttctacagaagatgcactggctgccctgggtttgtatctttcacaacaaagagtcttttccaagcacagaccagaggtcaggagaggactgtcaatccagtttgcactgaaataggcattagctgcctctaaattataaattatctcagccatcccttgtccttaggattagtaattaatgaaatgctaagagaactgatgaaaagatacaactgtttcttaaaaagattcagacaaatttattatgggtttacttttcctaattaataaagacttttacatcatagaaagcattaccttccttaggtttcacaattggtttttccttaggtggaataaatgctttgtttctttcctcttgtctcttactgatggcttctgcttgtttagcctacattaataaataaaaaattatcagttaaatgtatttatagttaaataattcaagtttctatgaaacttgctattcatgtgaaccaaaactaaagtgcccgaccctttatggtttcccaaaaaaaaaaaaaaaaaactcgg

SEQ ID NO: 43818 - DNA, 1020 bp, Homo Sapiens
tattttttttaaataataaattaaaacattttaaatagaagcaaattgagttgtttgttggcgctgagatactgcccactgtgaaacaaagctttgactagttttttgtttgtttactttcttcaggggggaggggggcaagtttgggtaggaaagaaagcataaatgaacgtgaccctgaggtgaagaggtatatgaacagcctttgcaatgtacaaaaagaaaaaaaaacaaaaaacaacaaaaaaaatagagcaagtgaaaccaaaaatgatgttcttggtgtttttctataatgtagtcttgttagcttttttgttactgtaacaatgctgatctcgaactgtaccaaaatacatggagactaacaaacagaaccacatggaactttcaaactgaaaaaaaaatttgtcacaaaaactttgttgtcatagttaagttgattgtagatggtaattgaatatactcctttgaaaatatttcatcaagtatgtttcctgctcattgtgatacattaaaaaaaaaatatgagccgacacaacagccaattcgtttccccccccccaacaactaataactgggggcggcccgctctaaaaatatccctccgagggggccccaagtctttacgcgttaccccagcttttttcttgtacccaaagtggcccccctaatcaggggagccccccatatataaagcttagggccccttgggcccgctccttttttaaaaaaccgttctgtggacctggggaaaaaacgtggctaaaccttgtgggaatttcttttgtggaaaaaggaaaaccttttacctttcctgggtggggtgttggaaccattaattttgggcgaacaaaaaccctcaccccctctacaggagaataatttttacagaagcccttccccagaggggcgaaatactaacatcataaaactttgttcttcttatagacggggagacataaaaaatagtgaggggttagtaaacaaaacacaacacgcgtggctgcatttatatgt

SEQ ID NO: 43819 - DNA, 634 bp, Homo Sapiens
cctcgagcacctgcggccccttccggaccctggacaccatgtacgaggccggcagggtgtgggtgcgccacctggaggcggcaggccccagggtctcctggctgccctgggtgcaccggtacctgatggaaaacaccttctttgtcttcctggtgtcagccctgctgctggccgtgatctacctcaacatccaggtggtgcggggccagcgcaaggtcatctgcctgctcaaggagcagatcagcaatgagggtgaggacaaaatcttcttaatcaacaagcttcactccatctacgagaggaaggagagggaggagaggagcagggttgggacaaccgaggaggctgcggcaccccctgccctgctcacagatgaacaggatgcctagggggacggcgatgggcctcacgggcccgcccagcaccctgagaccacactgttgcctcccagtgaccctgctgggacaccaggacaaggaagacagtttcgcctctcgaaagccgcagctgcgcctaggctggagctggaagggtgggtgaatccggcttgggcatccccaatgaactctgccctgcctgggactctatttattctgattaaaggggttttgcaaatggaaaaaaaaaaaaaaag

SEQ ID NO: 43820 - DNA, 618 bp, Homo Sapiens
acttcctctaatatcaaaacgaaaatttaaagttttccaaatattaattcaatattaattgaatattcaatgaattcatttaatgttagattaattcattgaatattaattcgatgaatgactaattaatagtattttaacaagattttggtatatttaacaacattttggtaataaagacaataatttgagagtgtgtggaagtccccctaatagaagccaactatctaatcaatgccaaaagtgtgaacaaaatagagaaaggaagcagtgaaaaagaatgcaactttttcttaccattcaaagtacaggatcacagcataaaagaatcataagataaaacatcaaactacccagcaacctgagaagcacagagtgttaaagcctccaccgtgtggagaaactaaattagggtaactagctattgagtatattgagtaccttcaaagcactcaactgacaggttttacagactggaaattataatacttatgacatttctaccttttatataaccaataatctaccatagaatgtagtatttttaaagctattaacaagcaatatattaaaataataatgtattatatctgtttctgacccagtctatgtacaata

SEQ ID NO: 43821 - DNA, 909 bp, Homo Sapiens
  misc_feature (723)..(868): n is a, c, g, or t
gaccggtccggattcccgggaatcgtcgaccacgcgtccggtgacacttggatttctgatcagtgttgcaaaaaattgctactttgagatttatttccacagtgatatattaaacccaaaaggaatcatcatatttggatgcttaaaatagagtatacaagttttttagacccaaagaaaaaaacagcagagtctcagcatgatcagtcctgattgaatttcattatgtcacagtgatgcatgtcttagcactgattattggttttacttaatattccctaaaaacttgaggaaggaagatgatagaacatgagatactctttgttttgtacatactagaaaatacagctatcttctgatgagcaattgtgttgattttctttgcttttttcctcttatggagctctcagtgtgtgaaagttctaaagccacaagaatcaatgatgttttagctgctaatatttagtattgatcgtttcttttaaaaatgatttggggaacttgatctgtactgtaattttactaattccttgtgcagaggtgggtatggcaattagaagtcaagaaatgggttgtttagcttggtttgtttccctaacttctgattaactctctgtatgacaactctacagaagttgtgcgcgtgctttctcagcagcatttttccttcaaaatcatctttttaatcaacagtcattaataaatgtacatgtacgatattcnnnnnnnnnnnnnnnnnnnnnnnnnnnnnnnnnnnnnnnnnnnnnnnnnnnnnnnnnnnnnnnnnnnnnnnnnnnnnnnnnnnnnnnnnnnnnnnnnnnnnnnnnnnnnnnnnnnnnnnnnnnnnnnnnnnnnnnnnnnnnnnnnngggggggccgccccacaaaaaaaccccccggggggggcccc

SEQ ID NO: 43822 - DNA, 614 bp, Homo Sapiens
ctagaaactgctgctgatggagaccaggacagagcccgcccccacccggcccgcagcccctcctgcccctcctgccaggccctccctcccgggtggtggccggcacctctgctcctcacgtgggtcgcggggcgggcttgtcccaggtttgtttgagacagtctttttttattttgtattgttatttttattatttttaatttaaacctgatgacttgcacagcatctttcccaccgggaagagcgggcctgctgccttccctcctgcggggtgggggtgggacagaccccagtgggggccagggccacactcagcgcagtgtgggctggacccgcctctgtgctccaggggctggccggtcttcgggggcgccggcttccaccactcgccgccccacccctgcactccgtgacctctgagaacccagctggcccctcgttagccccagggtctgccgtctagagggagcccaccggcctccggacactgtcttcccgctagagccccgtcctcctctgcggggctctccggacccccttccccctcacctccaggcagggacagaataaatgtttgtatggattttaaaaaaaaaaaaaaaaaaaaaacgcgg

SEQ ID NO: 43823 - DNA, 452 bp, Homo Sapiens
tgtttcatacttcattataggaatcaagtaatttgatgactaatgtggattatatttcagtcaaagctctgctttcaatttctctgatttgctcactaatgccttatgtgtgttttactaaccttttatatcttgccttcaagtgagaaggaacaaacaactctcagtggttactacttgcttttatatgctggctgtgaaggttaaaagaaagaatggtctgtaccattttttctgctttgctgcccttttattgtaccccaggcctcctagaggactcctgcagattctattgttgggtgggaaatagtgttggaatgtgtttgcacagtcttatgatattcagtctcagtctgctataggtatttgttattcttggatactacacacctgctcagactgagtaaacatttgtggtgctgtcaacctgatttcttgactctcaaatgatt

SEQ ID NO: 43824 - DNA, 722 bp, Homo Sapiens
attaccagtgtaactaaacataaatattccagtttagagtgcttaaacgtagctatctttcttaaggccaggagggtaactttgtggtatctaaagggcttaaatttcagaatgcagaataaattgcctttttaaaaccaagcattttgtacaagcttttattttcagttttttaactaccaaataggtgtgatgtactttagaagtaaacaaagatgttcacccatgataatggatgttaaagctcctgcagttgttcttttcgtgtttaaagggtatattctaatagtggaagcatcaaacatgtcagtgatttcatctcattcagaaataaagagattaatattggtctttattttttggcattttaagttttatataaatggatgcagatggagattatcacccacaaatatatttaaatggatttttcttaatttgaatttcaagtaatctttttatttcaagtaattagttacgcatttagttacattgccagttttttttttttatcaatttcagtaagacaaaatatactaaaatgtttaaatagcctcattcaatcttacattttgacatttcagcaatcattctggcttacagtaattagatcccctgttacgacacatgcccctttgttcttaataactagcaaaaaaaaaaaaaaaaaaaaaaaacctttcatcttgttaaaaatactttgcccaaatgaaatagactag

SEQ ID NO: 43825 - DNA, 607 bp, Homo Sapiens
  misc_feature (526)..(526): n is a, c, g, or t
  misc_feature (581)..(581): n is a, c, g, or t
  misc_feature (586)..(586): n is a, c, g, or t
  misc_feature (593)..(593): n is a, c, g, or t
  misc_feature (597)..(598): n is a, c, g, or t
  misc_feature (602)..(603): n is a, c, g, or t
  misc_feature (607)..(607): n is a, c, g, or t
ggaagagtgatgggaaagaccctaggtgctcataactagagtatgtgtatgtacttacatgggtgttttgatctctgttctttcatactacatttgaacagggcaaaatgaactaactgccatgtaggctaagaaagaaatgctaacctgtggaaagttggttttgtaaaattccatggatcttgctggagaagcatccaaggaacttcatgcttgatttgaccactgacagcctccaccttgagcactattctaaggagcaaataccttagctcccttgagctggttttctctgatggcacttttgagctcctaagctgccagccttcccttcttttcctgggtgctcagggcatgcttattagcagctgggttggtatggagttggcagacaggatgttcaacttaatgaagaaatacagctaaggccttgccagcaacacctgccgtaagttactggctgagtgagggcatagaagttaaaggttactgtttttatcctctatccttttttcctttcctgatncaggtgctcttctcattttttcctgagaaccttagccatcagatgaagctccttnagttnatgtggntggnntgtnnttcn

SEQ ID NO: 43826 - DNA, 592 bp, Homo Sapiens
  misc_feature (31)..(31): n is a, c, g, or t
ccatatatttccactaagtccatgtgtgcanagctgggtattgtcatgttgggaacatgctagacctcagtatccttgaggatgctgccttgggtctggaaactgttagaggaaaccccaagaggtgcaggcactgagcctctcaagacaatgacctggggtcccagctcccctggaggggcctcctcatgattggttgggggttgatcacagaccaagagtgacgagtgatgtcaccctgtgactcatggccggaccttcttgcccctattgtctcagcacaacattattcgacttttccctcagcgtgggtgggcagaggaaaagccctgtggctctggggacttgggatccagagttgaagacccttcagctggctctgccctgccagtgccacagagtgccatggctcaggaagacaggttttcttccatctaggccaggccatccagtggccatcctccgtgtcctcccgcctcctcctggtgtgacttctgaaaaccaagaatttgttcctgttgactttttctgtgctatggaccattgtcctctcacccactcaataaatcttgaaacatgaaaaaaaaaaaaa

SEQ ID NO: 43827 - DNA, 678 bp, Homo Sapiens
atttgtgtgattagaacttagaaaaatatttactagttgaagttattatcagtttttaatttagttcttaaactcatttcacttctaataatttctgttataaatttccagcattttaatgaaaatctaatgatgtaataggcattttctttatttgaacctacctcttttattttctgaaccaaagagaaagatggactggtgtttgtgaaacatttttaaaaatgtagtttcatttatattagttatgtttgataaatgtctcagtatttttataatatgataagcctgggattctacttttagggttatttgtacttttgagtaatatataaagtgacaatattaaggtacatgatcagctctttctatttttactcgtaaaaattatggaaatgaataattttgctaacaactttgaaatttcaaacttctggaaaatatgaaaatattcattgttcattatgaatttaaattgtaaggtatgaatgtgatttgtctgtacatcttgtatcttttccaaaaaatgattctgtatcttttggaaaaaagccgagagttgaagatagtatatctctggtagtactgaatatttacttacaggtttctatcaaaaatatatatgtcgctttcctaacaaaaaacaaaccaaacatttaaaccaaacccaaaaagggc

SEQ ID NO: 43828 - DNA, 653 bp, Homo Sapiens
tgggccacagtgaaccaaccaaaccaaccccgaatcatcgctctcgccatgtgcgtttctcttgttttttttgccagcccaatggtagtttctgaacctattgacattgttcaaaatggatcatgtgccatattttgttagttgacatctgagttttcagtaaaatgattatggaattaatcagcaaatgtagaagaatatattcaaagttaaaattcagtggcagcacagattatttttatcagagctgtaaagaaaacaactgtccttttctccccaccacccctcctgccccactttggcccagaaaccaaatgtgaacttcctgtctcccacctcagcactagtccatgccaggacaccagctgacaatttcttggttttactgtcaataattgtaccatgtgatcaattactgtcctcacttagaacaaagcctgagtccgagaatatttatattttaccaatatatgcctgttacaagagaaggaaatatgagttatttaagtttaacttttttatgtgaattcagagtttatttatcgagggaaatatgtacaaagaagcttcaaatggaatatttaccgacattccttatacatgacagacacttggctacatgggaagatgatgttaataataaaatgattttt

SEQ ID NO: 43829 - DNA, 765 bp, Homo Sapiens
gggcagtagcattcttgcagatcgtattcttctcatggacacattcttccagattttgatttatcatggtgagaccatagcacagtggcggaagtcaggataccaggatatgcctgagtatgaaaatttccgccaccttctgcaagccccagtggatgatgcacaggaaattcttcactccagatttccaatgccaagatacattgacactgaacatggaggcagccaggcccgtttcctcctttcaaaagtcaacccttcacagactcataataatatgtatgcctgggggcaggagtctggagcacctattcttacagatgatgttagtttacaagtgtttatggatcacttgaagaaacttgctgtgtccagtgctgcttgaagtgctaataatgttaaagacacttaagaagatgaaataatattcaaatttcattttttcctttttccatttatctgtggaaaccaacagatattgctctatattttttgtattagtatggtttgagacaacatatggaaaatgttcacatttgtagattaagctggaattataatgagagcaataagaacaaatttattttgcttaccacagtgttatagctggttctagaaaatttgaagtcttttataactttaaattatggtttaataaaaaattagagtctgcccttcgtactacaagaatgtaactcattttgtaaaattggcagaaccggaccccaaaagtgggcacctggattttttcttggctcaaccttt

SEQ ID NO: 43830 - DNA, 614 bp, Homo Sapiens
cgcgtccgtgcagatattacttttttttcagtttatgaccaggtatttatgaaggactattggcagggaaaatatgaatatgttaactttagcttatggcatcaatttactaaggaacaacaggctcaccaactgatgtcaaacataaaaacccccacatcagtctgatacgatatggtactactttgaatctgttactagtaccatcttgacagaggatacatgctcccaaaacgtttgttaccacacttaaaaatcactgccatcattaagcatcagtttcaaaattatagccattcatgatttactttttccagatgactatcattattctagtcctttgaatttgtaaggggaaaaaaaacaaaaacaaaaacttacgatgcacttttctccagcacatcagatttcaaattgaaaattaaagacatgctatggtaatgcacttgctagtactacacactttgtacaacaaaaaacagaggcaagaaacaacggaaagagaaaagccttcctttgttggcccttaaactgagtcaagatctgaaatgtagagatgatctctgacgatacctgtatgttcttattgtgtaaataaaattgctggtatgaaa

SEQ ID NO: 43831 - DNA, 721 bp, Homo Sapiens
  misc_feature (697)..(697): n is a, c, g, or t
gtggcgtggttgctgtcacctgggagcttctgagcgtttggttagaaccctgttcagcttggggtcagccctcccctagtcactgccctttagcctggatgtgtctgggcccctgcacttcccgtgcttgagtcacgtggctgcatggccgggcgctggccggatggaacacctcccccagcaagggaccagggaccagagccctggcctgccctgctgagccctgctgtgcagagggcctggcacagatgaatttgagattttgccgcaaggtgttagcacttcacacccattgagtctttgagattttaagtgaatgtaagcagaaaaagtcagatccaatttacagaaatcagagttagctacagctaggactcgtttggttggggttttttagtttgtctttctaaagtcatgtggaccttaatttaattacaaaagtctaccctggtggtcataaaataggcaggcctatgaagaaaggccttttactcttccatctcgtcccagccccgagttgacccacgttgctgctcctcacaccatggtgatgcaggtctcgtagtgtgggcacaggcctggctacctcatctttttagtgcctctctcctcttccacaggatggggtcccacagctgcagcagctggccccgtagttgagcatgtgtggttatcctgtagagcttttcccaagaanggtgtttgaacttagagccttaat

SEQ ID NO: 43832 - DNA, 694 bp, Homo Sapiens
aagcttaccttagataaggttcatatttgtttcctatagagtaaataaacttccccttcttaaattgtgtaataagcaccaacgtgtggttgcttggcagaatgagaatgttaagggagattgttggatgtttggagtttcattatattttttgtttttattttttgatacctaggtgctttttaaaatattcagacaaatatctatcttacattgattaaacccgtgtaaattcatttgcagtatctacatcgaatgtcaaaaaagtatacttatttttgttccatacttatgtacaattttttccctcttcaggctttttcatttacctttttgaaaaagcacttactctccccttccctatcacccctcccccaaggtttctttatttaaatttttattgagagttgttggagctctaagacaatacaaatttagagttgaacaaaagtataatctgctttacaactagtatagacctaaggtcatttgctttcaattagaggctccagagtcttcatagtggaaagaatgctttgtatttaattggtcttagttaagttgtagcacgtgaatacttacttacatggttttggttaaaaaatacttcttgcataggttaattttttaaaaagtggatctaataaaatgtcttttaaccattattacttgactatatggtgtattaaatttg

SEQ ID NO: 43833 - DNA, 365 bp, Homo Sapiens
gcacgaggaaagatgctgccttgtgtgtcctaattgatgagatgaatgaaagaccatgaaagatgtttctttttctttttttccttttgataatagcatcatatattagttcattttcttttggacagtcttaagagaagtttcactaaaaatgtaaacagctttaatcttgactccaaatttttcaattatgagatgtcataggcagtaatttcgctgtataacaagcatagacaaatgagtgtccctgcactaagaagaatcactttaaaaagcaaagtgttagctgctgttgtatgggacattcctatgttttagagttgcagtaaaactttgatgataacctcaaaaaaaaaaaaaaaaaa

SEQ ID NO: 43834 - DNA, 908 bp, Homo Sapiens
ggacgcgtggggcaatatatcaaggaatatacggatgaaaatattcaagaaggcttagctcccaagcctccccctccaataaaagacagttacatgatgtttggcaatcagttccaatgtgatgatcttatcatccgccctttggaaagtcagggcatcgaacggcttcatcctatgcagtttgatcacaagaaagaactgagaaaacttaatatgtctatccttattaatttcttggaccttttagatattttaataaggagccctgggagtataaaacgagaagagaaactagaagatcttaagctgctttttgtacacgtgcatcatcttataaatgaataccgaccccaccaagcaagagagaccttgagagtcatgatggaggtccagaaacgtcaacggcttgaaacagctgagagatttcaaaagcacctggaacgagtaattgaaatgattcagaattgcttggcttctttgcctgatgatttgcctcattcagaagcaggaatgagagtaaaaactgaaccaatggatgctgatgatagcaacaattgtactggacagaatgaacatcaaagagaaaattcaggtcataggagagatcagattatagagaaagatgctgccttgtgtgtcctaattggatgagatgaatgaaagaccatgaaagatgtttcctttttctttttttccttttgataatagcatcatatattagttcattttcttttggacagtcttaaaagaaagtttcactacaaaatgtaaacagcctttaatccttgaatccaaatttttccatttatggagatggcattaggaagtaattttcccctggaataacaagcatagaaccaaatgagtggtccccggcccttaagaagaatccccttttaaaaagcaaa

SEQ ID NO: 43835 - DNA, 636 bp, Homo Sapiens
cggacgcgtgggcggacgcgtgggggaattaattagttgatctgtaaaataatcagcttcaaaacgttatggctaaatctgtagaatgtatgcccaattgctaaacggatgttgtgcccagaattttatctagtgactacctcaacatacaggccaagcgttacctacaccaacacccaagccattaatttgaggtgccatgagaataggtgaaccacagcctaacaccatttaggttttgtgtttttttcaggcttgcctctacttaaatatatttagatgagagagttctcttagacttctttctttgtaaggaagggttatttggggaagtgtggaaaaaagattagggcagggtacccttagtttatatagggtacaaaagaatgggaaacatcttccctttcttctttaatctctgaagtcatgtttggaattacatataatgtagcaggtactggagaggacctgaatttcaagcttctgatttagctgtttgtaaacttccaagtttgcttgactaaagaatgctgatctttttgggagtctgatctccttctaatatcagaaagtgctttttatattccagaatgttgaatttaaactgtttgatttacagaacaaaaaaaaaaaaag

SEQ ID NO: 43836 - DNA, 781 bp, Homo Sapiens
gccaagttgtcctgagcccttctgcgttgttatgccacttccctactgctcatatgcacgctggctcccctgggcacgcaaggatgagtatgggccatgggcccctgtagagctgcttacctggtgatgaccatgcaccttacaatttctgaacagttaaccctatagaagcatgctttatatgagtgtcttctgggaagaggaaccttcttaatctcttctgtgggattttcaaaatgctaaagactcacactgcagcaatcatcccagatgattaaattcaaagaaataggttcacaacaggaatatactgaagaactagagtgtcactgctggtgaactgtggcacggttgctcaacacatcacctcggacaaattcaggaagcatttctttagcccacaagtccagacccaggtgctctgtatgtatgtttttaatattcatcatatccaagttcactctgtcttcctgagcagtggaagatcatattgctgtaacttcttttaagtagttgatgtggaaaacattttaaagtgaatttgtcaaaatgctggttttgtgttttatccaacttttgggcatatatttaaagtatgtcatggcatggtttgcttaggagttcagagttcccttatcatcgaaatagtgattaagtgatcccagaaccaggaatactaaagtaaaagcgaccttttttcacaaaaaaggtaaaaaaacttcaggggggccccggtcccaatttgccttataggagtgtattacattcacttgcccgcctt

SEQ ID NO: 43837 - DNA, 607 bp, Homo Sapiens
gtgaaatttgcaaactctcgaacaagtttaatagtgtaattcctgtgagatctggccacgaagacctggaacttttggacctttcagcaccatttcttatacaaggaacaatacatcactatggatgtaaacagtgttctagtttgagatccatacaaaatctaaattccctggttgataaaacatcgtggattccttcttctgtggcagaagcactgggtattgtacccctccaatatgtgtttgttatgacctttacacttgatgatggaacaggagtactagaagcctatctcatggattctgacaaattcttccagattccagcatcagaagttctgatggatgatgaccttcagaaaagtgtggatatgatcatggatatgttttgtcctccaggaataaaaattgatgcatatccgtggttggaatgcttcatcaagtcatacaatgtcacaaatggaacagataatcaaatttgctatcagatttttgacaccacagttgcagaagatgtaatctaatattgccatccaatttagcatacataaaatgttgccactcaccttccctgttagagcttcttttcctgacctgagttttgtat

SEQ ID NO: 43838 - DNA, 903 bp, Homo Sapiens
cagttctttgggtagtctctgaacttaaaatttgtaggagttgtagactacctaaatttttaagttatggtatttgttcataggttgtaggggtaggtaaagaaggaaacagacaagaaaatggcttcttgaggtggcagctgctgagtggctaaatcttaccactttctttctactttttttggaaattttcccagcttagcatgaacatggatcatacagtgtttgattttatgtgattgagatttttgttttttatttttggagggaaggtcttggagaaacattaaaaagttggtgtatgtgcaaaaatacgaaatgttaaacaaaggaattttttcttatttaatctgaatggtaagcaagaactttttctatatacccttctgctgcagcagacaactaaactggtaggtggcagcagaggaaggaattcttcagattgatggctactgacttaaagtctgcataggagaagagatagagcatgacataccaagtgaagcaagggggacaaaaatggaaacaggactaagattcctgcattttgactctacatggttcttttgaagtaaccagcgaatcttttttgcttaccctcatcaacagaatggatgaagatagatttgactgtgggcttttttcaagtggagaatatgaattattccgaaccagaaggccataactccaaactggttggattcccgccggtttttcttaaataaagacacctatggccgctggtgattccacgaagcgaaaagcttgaagggtggagaaacaaaaacaaaagtggccccccccaaacgggtacaccccctttccccccttttttgttgcactcgccacaaacgggcccaaaaacccctcccgtgtcccccctccaaacagcagccggtatgg

SEQ ID NO: 43839 - DNA, 634 bp, Homo Sapiens
actcatcaagcagttctcagagaacatttatgaggccttcctggtggggaagccctcggactgcaccctggcctccgcccagtgcaacgagtacagtgaggaggaggagctggtgaagggcgtgctgatggccggcctctaccccaacctcatccaggtgaggcagggcaaggtcacccggcaggggaagttcaagcccaacagcgtcacatataggaccaaatcaggcaacatcctgctgcacaagtcgaccattaacagggaggccacacggttacggagccgatggctgacgtatttcatggcagtcaagtccaatggcagcgtcttcgtccgggactcctctcaggtgcacccgctagctgtgctgctgctgaccgacggggacgtgcacatccgtgatgacgggcgccgggccaccatctcactgagcgacagtgacctgctgcggctggagggtgactcgcgtaccgtgcggctgctgaaggagctgcggcgggccctgggccgcatggtggagcggagcctgcgcagcgagctggctgcacttccccccagcgtacaggaggagcacgggcagctgcttgcgctactggcagagctgctgcgaggaccctgtggcagctttgatgtg

SEQ ID NO: 43840 - DNA, 650 bp, Homo Sapiens
gactcaactgagagctaaagagactagaaaagagataagctgccaactcaactgagaacaagaaactagaagagatttatatataaagcttcttccttctcccagatgcaggatgttttcaaccagtaaattttattgctgttggtgccagagaagagtcctttcttctctacatccaggggccttttctccaataatgtgcctttaactctagggacctgcctcacggaccttagggaaaaacctcaacctgaaagatctcttcctttctggagctcctttaatcttcccagcaggtttttgccttagacgtgctggccccaggacagtgatgaagacagagcctgtctcagctctaggctgtggggatcaatgccatcagtccctgttattgagggattatcccttagccaacattcctatctgtgggtgggcgtggagagtgtatctttttttggggtgtgtgtgtatatgtgtgtgtgtatgtgtgtgtgtgtttaatagttcgtgtttgtaaactcttttaataaaagttgtgcctcaccatacttgaagctcccaggacaagggttgagaggctcaacccctctttcagcttctatgtggtgtcggaggtgctggtatcgtgttcacacaagaaaaaaaaaaaa

SEQ ID NO: 43841 - DNA, 734 bp, Homo Sapiens
  misc_feature (734)..(734): n is a, c, g, or t
caagtcacccgcactccctgggcctcggtttccccatctgtaaaatgatggtaataatacttcacctacctcataggggaggttgtgaggccaccatcacctgacctgggggtcaaggcaggaggactccgaaggtgctacccgtgagcaaagtgtaattaccgaatcctgactgcaaggcccacctgcccctcccccacagagcctccagagctagctgaggccaacgcaggcccatccgtctcttcactctgtcgcaggccctttcatgggcttcgtctgccatctttgtgggtgccctagacttagtccttatcttgtcctggtttcctttcttgtgaccatctccccatgaaagtgctgtacaaattccacccgccccaggacccccgcacctgccctctggcaccagatgccagggaagggacagaggaaaacagccacaaacaagccaggggggctccccggagccccaggggtggggattggtggccactgtttgtatgttcttgagtgcaagtgttttataaaaaataaaacaaaaacccaccatcacaaaaaaaaaaattttgcagcgaagagaaatgaagaaaaactgaagaaaaaaaaaaaacaggaaaaaaagaaccatacaaaatttttccaccacacataccctctaagccagcaagatttcctctttgcaaaatcatatttttgtgggaatgggccctgctttttgtggcaaggcctgn

SEQ ID NO: 43842 - DNA, 679 bp, Homo Sapiens
  misc_feature (677)..(678): n is a, c, g, or t
gtaagaactgtctttagattttctttactttgataacttgtgattgtttagcttaagacccaagaaatgctgtttgctcatggtaaacagaaacagcatcttcgctacaaccactgacaccagctggcgtcataggtagctagatcattgcatttgttttgaaatgttaatatgttaaatactaaactgatatttcaaaaatgtgtatatatgatttctatatccttgtttttcagatagcctgcttataatttaatataaattaactgatgcattcataagatttcaataatgaaatggttcccttttaaaaaataaaaatactttgtagattaaaaataaatcagaatttcaaatttaaaattgtccacacactaggaaatagaactgtgttaatatataagaaatttggggataattaagaatgaaggacttttctatcatttccattttataaattgccacctgtgaaaatggtttttgcacattatttgtatttttctttgtatatgaaataattttttgtactttgtaaaatatggagcccattgtaccttcaactatttgagactatacacagtgcttcttttgtaactggattactttaactttcgtgaaggcattacattgcctcacattcactaaccaccttgaattaaatttatttcttttagaanna

SEQ ID NO: 43843 - DNA, 652 bp, Homo Sapiens
ctggcctatgagctgctgccggcactggacgaggtgctggctagtgacagccgcttcttgctgggcagctggctagagcaggcccgagcagcggcagtcagtgaggccgaggccgatttctacgagcagaacagccgctaccagctgaccttgtgggggccagaaggcaacatcctggactatgccaacaagcagctggcggggttggtggccaactactacacccctcgctggcggcttttcctggaggcgctggttgacagtgtggcccagggcatccctttccaacagcaccagtttgacaaaaatgtcttccaactggagcaggccttcgttctcagcaagcagaggtaccccagccagccgcgaggagacactgtggacctggccaagaagatcttcctcaaatattaccccggctgggtggccggctcttggtgatagattcgccaccactgggccttgttttccgctaattccagggcagattccagggcccagagctggacagacatcacaggataacccaggcctgggaggaggccccacggcctgctggtggggtctgacctggggggattggagggaaatgacctgccctccaccaccacccaaagtgtgggattaaagtactgttttytttccacttaaa

SEQ ID NO: 43844 - DNA, 695 bp, Homo Sapiens
aagagctgctctgactgtagggccccctatttgttgtcctaacccagaagcagctctgggctgccaggatggtggatggaataccagagagtaacactagggaggaagcaatgcctgccccctggagtctcctagggggcagcagttagaataagggaagaggatttgctggtcactgtttgctgacatgggtttccatggtgagttcaggcctgaggacagcagtgtctgcaaaaccacatggcccttgagaaatgtccttgcacattgggcttcaaactcctcttctagggaatccatcttggcctgaaagcagaggtacaacaccagccccaaaggcaattctgttttcagattggttgctctggataggaaggctggggtgagggggcattttacttgcacagaggctgaccctgcctcccctcttcactgaccccatctccaaggtagacctcagccatgtcagtccctgttctgggaggtgctgggctgggccacagccagggttatgtaggtaattaacctgtccaaccctgagcctcgcctccccacaccagcaacacagtggtctctctgtggtgaccattcacagcataacattctgcttagcctcagactgaaagcattgcaactgatgtcaaaaccagatgagatcttacagggagagagattgggtgcaatttgcctctttc

SEQ ID NO: 43845 - DNA, 808 bp, Homo Sapiens
  misc_feature (724)..(724): n is a, c, g, or t
  misc_feature (748)..(754): n is a, c, g, or t
  misc_feature (756)..(775): n is a, c, g, or t
  misc_feature (784)..(784): n is a, c, g, or t
ggtagctgggattacaggtgcgcactaccacaccaagctaatttttgtattttttagtagagatggggtttcaccatcttggccaggctggtcttgaattcctgacctcagttgatccacccaccttggcctcccaaagtgctagtattatgggcgtgaaccaccatgcccagccgaaaagcttttgaggggctgacttcaatccatgtaggaaagtaaaatggaaggaaattgggtgcatttctaggacttttctaacatatgtctataatatagtgtttaggttcttttttttttcaggaatacatttggaaattcaaaacaattggcaaactttgtattaatgtgttaagtgcaggagacattggtattctgggcaccttcctaatatgctttacaatctgcactttaactgacttaagtggcattaaacatttgagagctaactatatttttataagactactatacaaactacagagtttatgatttaaggtacttaaagcttctatggttgacattgtatatataattttttaaaaaggttttctatatggggattttctatttatgtaggtaatattgttctatttgtatatattgagataatttatttaatatactttaaataaaggtgactggggaattgttactggtgtacttattctatcttccattttattatttatgtacaattttggtgtttgtattagctctactacangtaatgactgtaaaattgcccaannnnnnnannnnnnnnnnnnnnnnnnnncttgtcggnccgcctcgggccctcgaaaaaact

SEQ ID NO: 43846 - DNA, 533 bp, Homo Sapiens
  misc_feature (420)..(420): n is a, c, g, or t
  misc_feature (505)..(505): n is a, c, g, or t
  misc_feature (531)..(531): n is a, c, g, or t
agagctgagccgaaatataagaataatatatttgtgcttcgagttggtgtttctttcagtgtaatgcatgcagtggtcacaacccagttactcataatatttggattgtatttgttcgtagatatgcccagaagactagagaattagtgttatataccatatagaacttactgtcagtcaactataaacaggcccaattaaaaactgttccattactacgcaaacacatattagaggcctttgctgatgacacattagctggatcttagccaccccagaaagggtttgatttgaagctgattgttgccagatatgcatattggaatcccatctacccatagttcctctgaaggtgattttgtaatttgcaaaagggtataggaaaatatacctaaaagcgaatttgtggctgagaggatnaacagaagctgtttgctcatgttctgtgcccacacccaccaatacctaaatctgttaaggaagacagaaatgttttctttgtgcncattgagtagttccagacagaagagnat

SEQ ID NO: 43847 - DNA, 581 bp, Homo Sapiens
ggtgttctgtctagaggatacaactgaatgtttttaatttgctgacttacagacacaggctgtttacaaaatgctagctggaaagtctgtaatgttcatgtcataacttttagttaattgccattgagcacctgttctgaggaggtgagatgtggacttgtgcttataaactggagagtttagtcataatccctcctggctttgtgtgaatagcttgctcactttgctggcctttgaaatgtgttctccgtgataagctatccatgtgtttgtgataagagtgcttgtcaaccatgaccatctttgagccttcctagtcctccacctggcacagtatttgaaatggcaaaggatgtgcttcatcctctaacagtgtacactcccagagctgatattctggattttgactgtgcacatttcctctagttcatgtctgtagtccctatagaatgatctgtaataaaatagtatactggactgtgcatcaaagggatgtaaaattacagtattccaaaggttgaagttctgctgttttgttataatgcctgatacacatcttgaataaagtcttaacatttttc

SEQ ID NO: 43848 - DNA, 636 bp, Homo Sapiens
  misc_feature (571)..(571): n is a, c, g, or t
  misc_feature (603)..(603): n is a, c, g, or t
gagtctgccctctccgttacctaatctcggacctcagggcccggccctcacgcctgaacaagaaaacatactgcataccacccagacagactgctataacaatctagctgcttgtctccttcagatggagcccgtgaactacgaacgagtgagagaatatagtcagaaagtcctggaacgacagcctgataatgccaaggccttgtatcgggccggagtggcctttttccatctgcaggactatgaccaggcccgccactacctcctggctgccgtgaataggcagcctaaagatgctaacgtccggcggtacctccagctgacacagtcagaactcagcagctaccatagaaaagagaagcagctctacctgggcatgtttggttaacaaagaagaaagatgctcctccagttgaacttaggtggaccattaaacatgcatgaaggagaaatctgagcctcagcaagagaaattaaccctatacctctgacccaggtggatttttgtttctagttctgcacaaacttcactacttagacagtctgagtctttttctgtctatccatctgnttatttctatacctttcaatacatgttattgntgcagatatttggcttgagaaatataatcagaa

SEQ ID NO: 43849 - DNA, 580 bp, Homo Sapiens
taattcttcagcaagaggtgaccctgggagcgtactttaaaataattgctgtacagccattgagtactaacatgatgataggttttcaaaatatctttgtagtggatgctgcataattacattcacttctcttagactgtaaaagactttcttgacttgttttaacagtagagatagcagtacaatttgaatttatggtttaggctctgcaattagaggaacaattgcagtttcctcctacccttcatatggtctgtgtaaaactgatgtttgcttaacttattttaaaagttgattacgttttcagaaaataaagataatcacttttgccatggttataatcaaatctaagctttcagacttgagagccatggtgtaaaactcaaggaggtttatttaaattatgctgactttgctagaattggataaattctgtataagccaagtatgagttcacatgtactcgaatatacagttttcacaaagctattactctcatcagtcaggcttgtatgatctattccttaccacaaaagaagtagacaattgccacttttatttctaatccttaagttgaatg

SEQ ID NO: 43850 - DNA, 789 bp, Homo Sapiens
  misc_feature (717)..(717): n is a, c, g, or t
ggggacaactgtttcatatagattttggacactttttggatcacaagaagaaaaaatttggttataaacgagaacgtgtgccatttgttttgacacaggatttcttaatagtgattagtaaaggagcccaagaatgcacaaagacaagagaatttgagaggtttcaggagatgtgttacaaggcttatctagctattcgacagcatgccaatctcttcataaatcttttctcaatgatgcttggctctggaatgccagaactacaatcttttgatgacattgcatacattcgaaagaccctagccttagataaaactgagcaagaggctttggagtatttcatgaaacaaatgaatgatgcacatcatggtggctggacaacaaaaatggattggatcttccacacaattaaacagcatgcattgaactgaaaagataactgagaaaatgaaagctcactctggattccacactgcactgttaataactctcagcaggcaaagaccgattgcataggaattgcacaatccatgaacagcattagaatttacagcaagaacagaaataaaatactatataatttaaataatgtaaacgcaaacagggtttgatagcacttaaactagttcatttcaaaattaagctttagaataatgcgcaatttcatgttatggccttaagtccaaaaaggtaaactttgaagattgtttgtatctnttttttaaaaacaaaacaaaacaaaaatcccccaaaatatataggaaatgatgggagaaggggaaaaagtga

SEQ ID NO: 43851 - DNA, 623 bp, Homo Sapiens
cgcgtccgcgggacagggcccgagaagattgctcatataatggggcccccagacaggtgcgagcacgcagcccggatcatcaacgacctcctccagagcctcaggagtggtcccccaggtcctccagggggtccaggcatgcccccggggggccgaggccgaggaagaggccaaggcaattggggtccccctggcggggagatgaccttctccatccccactcacaagtgtgggctggtcatcggccgaggtggcgagaatgtgaaagccataaaccagcagacgggagccttcgtagagatctcccggcagctgccacccaacggggaccccaacttcaagttgttcatcatccggggttcaccccagcagattgaccacgccaagcagcttatcgaggaaaagatcgagggtcctctctgcccagttggaccaggcccaggtggcccaggccctgctggcccaatggggcccttcaatcctgggcccttcaaccaggggccacccggggctcccccacatgccggggggccccctcctcaccagtacccaccccagggctggggcaatacctacccccagtggcagccgcctgctcctcatgacccaagcaaagcagctgc

SEQ ID NO: 43852 - DNA, 923 bp, Homo Sapiens
  misc_feature (664)..(664): n is a, c, g, or t
ggatgaaaaaccccaaagatggtataatctttaagtgtgcacgttcgtttatttctgcatcttccctccaaacttgcctttgcatcttaaatatttcactatgcacactcccattcctcttgggtttcatcttgtcgtttaagaaatgtactgaaataatcattggaatatttgcattttgcacaatgactggtatgatagctcttgacaaataaggaaagcactgaaatgttgtgattgggtctcgggaaatgctcagattgatgtcttaccagcatttcttctgggcttgtgatgttgagctgtagtcttgtagccataatgagcaaattgactaagagaagcaaaggtttcttggggttattaaccagtagtgtggaaatactagttttatgtggccaaggaaaagcaaaggcttttcttttcagtttgtgttatttggaagacagaaaaacatcttgtctacatcctttggctgtttgtaggatcacgttgtccttacgatactgaaactttacagctgctgtaaattttttataaatgaatttcaaaatgttataatgggactgtaggttgtttttctacatcttcattatttggacctaaaaccagtttttaataagaaagtttatctttactctttctgaaattatgactccagaanaagaaaaaaaaaatacaagtcatggaatcagcaatctggtaagaaatgctgccaagaatgtggcagtagctgtcctgacagactccaactgtctttactatctgaagaatcctaaggctcacactgagagcagaaatggatcagtcttatccttttctagaaatgggtatcctggaagtttggtagccacaaaaaaaggaaaaaaggaatccataatttagcagaatttccttattaaactaatttgggaatctaaatt

SEQ ID NO: 43853 - DNA, 695 bp, Homo Sapiens
gtaatttgcattaaataaaaagtaggttagcctggaaatgaaattaaaattcacaagtgtgtggtctttatttcagtacccaaccctcttccttcaccctactattttgccgctgcaatatgtagtcacatcaccatttccattcctctaattagggaaacattaatctttgttatacagaacaagatatcaataccacttcttgttctttccaatgattttattccattgtgtagccccaagaggtgcagcttccaccttggaaacctttggatttgatgtagaggaagctttgcagacactgcttagaaaagaaagaaaacaactctgaaagggacagtttttaaatgtgtataagctgctgtctttgattactgtgttcatgatttggtgtggctgtattttcttttaactttcatcctattagtaatggtctttgggggtctctgtaaaatatatggacaccacgaacagtggggctgtacctcccaggtaaccaacacatgttgtgtttgagtctgctcatttccaatactggatgatgtatgtaaacatgttatgtctcttagtgcaaaaagaaacatcatttttttagggctggctcactctgtcaggcctaatctaaaggctagatataaggtcatgtgactgctgcttcaataaacaacatttatattcgacaaaaaaaagaaaca

SEQ ID NO: 43854 - DNA, 588 bp, Homo Sapiens
gccactaatctgtaacattttaccagttcagatgcctgtaatgtgtgactttatgtgtgtctgtgttgttttgaagagaataaaggaaataatactttgcaaactgtttaaacaagtgtttaaacttctattggcaacatttattgggctaagcagttattgaaaactccgcatagttttattttccatttgaaacttcaatcaaatcaagactattatattcattagggaattaaagactaatttgctttttaaatgtgaagttgaacactgtgtggaaagtaaatgtgtgatgaagcaaaatgtataaagtatgaaatattatacttttaccctggataattattcaggaccccagttggcccaaataggtgcaatttttaatcctttgaaattagccagccagacctaatgctaaggtaaatgtaaactgttttaattaattaagatctttctgctttcgaaggtataatgtatctatttctgtcaggaatgatatttccaaatgaaaatgtaaagaacattgggaaataataaactttcctttcaaagtaaaaaaaaaaaaaaaaaaactcgagggggggcccg

SEQ ID NO: 43855 - DNA, 618 bp, Homo Sapiens
aattctaaattataagaaaatatacatttgcacttattaatatagaaattcattttgtgtatatttaacatagcttttaaactattttacattagctacttcattatggtttcttgaacttctgaaaaaaattagaaatgtattaaacttatcagtagcataaaaacttattttgtttcacctaacgaatactgcgtttgtaaaaataaatttaatatagaatatatttttaaattaaatatttgaatataaaatagctctaagaaagaagcaaattatcactgaacatatttcttattatttctggctttgaattatacgtaacttaaattgtcttaaatgatacagaatattggagaatatgatactttcacataatatactatgaacctgttcatataactctgattgactactaacttctgttttatgcatttattgagctgacactgtagtttgtggtgagatggttattcttctaacagagcttataacagttaggacatggcatttaattaatgcatcattctgtttagcagcaggcgctaatcaatatgtgtctgcttatgccgaccccctgcccctcacaggctgcgtgcccggaggctgtcctcctct

SEQ ID NO: 43856 - DNA, 845 bp, Homo Sapiens
tggagggtgacgccatgggtggggcggagcgtctgggatgcgctgggagcctaggatccccgacagttttgcagaacactgaaatctatggactctaaaatggacttcatttaaagaaacccacggaccattaatggacaaaaacatgagtcaatatgtattgtggcattcaaatcctagcactctgggagagcatcaagtaccacgtttttgaagaccatggcctatcatcattatgcattcaagatttgagtttgaataacctcatcaagacttagatcttcttcagaagcttcaagtctcatctgcattaaagctctccattgaaccctctcacaaaagtacaagcttaaaggggctaaaatccattaatacattccattttatatcccttcctctgacttctcttcaatttccttggcctctagggtccttcatattgcttacgttcctttagactagagccaaggagacagtgctttccaaaaaaaaaaaaaaaaaaaaaaatgtgtctctgtggccataagttttcattgatagagaagcataaatttggtgaatttagaattaggtcttttatcatatcctataaaaagttgagttaacaggctgggcacggtggctcatgcctgtaatcccagcactttgggaggccaaggtagctggatgccccaaggtcaggcatttgagaccagcctggccaacatggcgaaaccccatcttttactaaaatacaaaaatttatccagccttgttgggcaggcgcctgtaaatccacctatttgagacactgaggcaggagaattacttgaaacccaggatgcggggctgccatgagccaagat

SEQ ID NO: 43857 - DNA, 452 bp, Homo Sapiens
gccgtcgtctgtctggtgaacatctttctcaccgggagactcagcagtgcggttcctgcaccgctcatggacacaggcagcaccagggcggccggagacaggccccccagtgcccccggccgtgcaccggaggtgggaccttcagggccacccttgccctcgggcctgcgagacccagagtgcaggcccgtggacaaggacagataggtctgcagggagccactggcagacggcccagctcctgcagatgcacctcgggagccctgctcagcccaggacccgcacccccaggtctccactgccagcagcaccctgggcccccactcgccagagccactgggggtctgcaggaaccccccgcccccctgctccccaatgctggaggccagcgatgatgaggccctgttggtctgttgaccgctgggctcgctggtgaccgccacagccccgct

SEQ ID NO: 43858 - DNA, 582 bp, Homo Sapiens
gtgctgggcgtgcgcggctgcggtacggcgtgttggtcccagcggttcagctgaggtagggacgtgccgtaggccggaatgttaccggctgttggatctgtggatgaggaagaggatcctgcggaggaggattgtcctgaattggttcccattgagacgacgcaaagcgaggaggaggaaaagtctggcctcggcgccaagatcccagtcacaattatcaccgggtatttaggtgctgggaagacaacacttctgaactatattttgacagagcaacatagtaaaagagtagcggtcattttaaatgaatctggggaaggaagtgcgctggagaaatccttagctgtcagccaaggtggagagctctatgaagagtggctggaacttagaaacggttgcctctgctgttcagtgaagtgaggaatgtgtttactgtgtacatggtttactagaaatgtttattgattatatttccagctttaattttcttgagtaatttaactgaatttacacagtttgcttcattgtattttcaaacaaatagaaaataaacttattaggaagcataaaaaaaaaaaaaaa

SEQ ID NO: 43859 - DNA, 583 bp, Homo Sapiens
acattgcactgtaccagagccagagggcagtgctgaaggagcggcaccgggagaaggaggagtacatcagcaggctggcccaagacaaggaggagatgaaggtgaagctgctggagctgcaggagctggtcttacggcttgtgggcgaccgcaacgagtggcatggcagattcctggcagctgcccagaaccctgctgatgagcccacttcaggggccccagccccccaggaacttggggctgccaaccagcagggtgatctttgcgaggtgagcctcgccggcagtgtggagcctgcccaaggagaggccagggagggttctccccgtgacaaccccactgcacagcagatcatgcagctgcttcgtgagatgcagaacccccgggagcgcccaggcttgggcagcaacccctgcattccttttttttaccgggctgacgagaatgatgaggtgaagatcactgtcatctaaaagccggctactgtcagcaaagcctgaagaagtggggctggataccctgcccccaccatatccctaccatcccttctcagtcaaccctttacccttacagtagcaagcat

SEQ ID NO: 43860 - DNA, 440 bp, Homo Sapiens
tatgtcatgaaatgttggagtctcagggttgctgattttctgctaatgggaaaaattgactaagtctttaaaatagtttgcagccttctcccacaggagacaagtgaaagataagtgtgattttagatctttcttgtccatagttgttttcagtggagtcttccattctgtatcttaccctaagatctggttctctcctccccatccccaccccccacccaccgcctgccagctcacactaatagatgattcttaattgccaaatgtgttagagtttgtatatcctactcctgggccttacatgtcgcctgttggggcttaagaccaggttgataagtaggaactgaaagtcttccagattcacagtagaaaattttatagacatttctgttaaagaaatatatcgattttatgtttttcaattatgttactgtaaatac

SEQ ID NO: 43861 - DNA, 813 bp, Homo Sapiens
  misc_feature (758)..(758): n is a, c, g, or t
cggagatggaggatttgctcgacttggacgaggagcttcgctacagcttggctacctccaggccaagatgggtcgccgagctcaacaggagtcagcgcaggccgagaatcacctcaatggcaagaattcctctttgactctgactggagagacttcctctgctaaattacctcgctgccgacagggaggctgggcaggtgattccgtgaaggcttcgaagtttaggaggaaggcttctgaagaaatagaagatttccgcctcagaccacagagcctgaatggatcagattatggaggagatattcctatcattccggatctggaggaagtacaggaagaagactttgttttgcaggtggcagcccctcccagcatccagataaagcgggtgatgacctaccgtgacctggacaatgacctcatgaagtactcagccattcagacactggatggggagatcgacctgaaactcctcaccaaagtgctcgcgccggagcacgaagtccgggaggatgatgtcggctgggactgggaccatctgttcactgaggtgtcctcagaggtcctcactgagtgggacccactgcagacggagaaggaggaccctgcggggcaggccaggcacacctgagcccgtcacccatgctctagacatgaagaaatgcaatgagcttaaagctaaagaagcttgtaagcagctccgaatttttacctggaatattttgtaataaaaaatatttatattcagtcaccacatnggattattcaattgcaataattgcttattctgtgcaaaaaaaaaaaaaaaaaggg

SEQ ID NO: 43862 - DNA, 922 bp, Homo Sapiens
  misc_feature (626)..(626): n is a, c, g, or t
gggaaggtgaccgagaaagatatctgggtacaagaacctgaatcaaaggacgttccagcggtagaaatcacccacaccttctgggaaaggaacctgccctctgtttctggcctgctgaagatcattggattttccacatcagtaactgccctggggtttgtgctgtacaaatacaagctcctgccacggtcttgaagttctgttcttatgctctctgctcactggttttcaataccaccaagaggaaaatattgacaagtttaaaggctgtgtcattgggccatgtttaagtgtactggatttaactacctttggcttaattccaatcattgttaaagtaaaaacaattcaaagaatcacctaattaatttcagtaagatcaagctccatcttatttgtcagtgtagatcaactcatgttaattgatagaataaagccttgtgatcactttctgaaattcacaaagttaaacgtgatgtgctcatcagaaacaatttctgtgtcctgtttttattcccttcaatgcaaaatacatgatgatttcagaaacaaagcatttgactttctgtctgtggaggtggagtaagtgaaggcccagcctgtaactgtcctttttcttcccttangcaatggtgaactgtcattacagagcctagaggctcacagcctcctggaggaagcagcctccactttggatcaggaaatagtaaaggaaagcagtgttggggttagcggcatgcaagccctcagaccagaatggggaactcttgtgggcctgcttgcctcaggaatctcctgaccacttgtaagtcccctccgacttctctagacctctagactcagggctaaccctaattggatttttccccctttcccttcttaaggaggagaatgtttaactggagtcaaaatgctccaaccg

SEQ ID NO: 43863 - DNA, 672 bp, Homo Sapiens
tgaagagaagaactggtgtgaggagcagtactctgggggctgctacacggcctacttcccgcctgggatcatgactcaatatggaagggtgattcgtcaacccgtgggcaggattttctttgcgggcacagagactgccacaaagtggagcggctacatggaaggggcagttgaggctggagaacgagcagctagggaggtcttaaatggtctcgggaaggtgaccgagaaagacatctgggtacaagaacctgaatcaaaggacgttccagcggtagaaatcacccacaccttctgggaaaggaacctgccctctgtttctggcctgctgaagatcattggattttccacatcagtaactgccctggggtttgtgctgtacaaatacaagctcctgccacggtcttgaagttctgttcttatgctctctgctcactggttttcaataccaccaagaggaaaatattgacaagtttaaaggctgtgtcattgggccatgtttaagtgtactggatttaactacctttggcttaattccaatcattgttaaagtaaaaacaattcaaagaatcacctaattaatttcagtaagatcaagctccatcttatttgtcagtgtagatcaactcatgttaattgatagaaataaagccttgtgatcactttctgaaa

SEQ ID NO: 43864 - DNA, 579 bp, Homo Sapiens
agggggctgtgggcctgtacccccaggcgcagcagctccctccggctgggcccaggctccactcagtgacacggctcaagtctacatggagctgcagggcctggtggacccgcagatccagctacctctgttagccgcccgaaggtacaagttgcagaagcagcttgatagcctcacagccaggaccccatcagaaggggaggcagggactcagaggcaacaaaagctttcttccctccagctggaattgtcaaaactggacaaggcagcctctcacctccagcagctgatggatgagcctccagccccagggagcccggagctctaactcatcatccccatcagttttcctccctctcagacctgtctttgaggacaaacagatttgtcagctgtcagggtgcagtgggacgtcagagactatgtggtccatcgccttcattgtgtaaatgaggacacagactggcttggtcgcagtgactgtggtgtccttgagatgctcacattactgcccggcctgcctcccacctggaagtctgggaatgaggagattgagataaacttttgaaatcccaaaaa

SEQ ID NO: 43865 - DNA, 639 bp, Homo Sapiens
cacgtgaactagtgtggtggctgcctgcggacaccctcctgttctgagccctgggcctgtgttcttctcagacactcccagactgaggggtggtgtgtggcgggtggcagggtggctgtggagactggggatctggagcctggtgctggcacctggcctgagtttccgtgggcagctggcggggacctgtgctgctgctgctgactgtgggtgggcgggcggcgcctgggagtggctcttgctcaggaattgataggaaccctaaaaactaggataccccctcctcggcccatgaggcacgcacagtgacttatttaagacttcccccttaatttatctgcccccaggatgcgtcagtctgttcagtggtcagcaggccccccaccccccgccgactgccctcgccatcgtggtcagacccccctcccaacacaacacgctgctggtctgtgtcagcctttgtaacgtgggaggctctgccgtgtcttccgggtgaactgtatttggattgcgcgcattgtcacggtccgcccctgggctgcaggcgccccttcctctgggcacccctgcattctgcatccccacctctagacgctgtaataaacagactgttttcactcggaaaaaaaaaaaaaaaag

SEQ ID NO: 43866 - DNA, 648 bp, Homo Sapiens
attgaatttaggtgacactatagaagagctatgacgtcgcatgcacgcgtacgtaagcttggatcctctagagcggccgcctactactactaaattcgcggccgcgtcgacgcctatttatcagccctctgaggtcatataaaagttgcaccttttgaaccaagtatttgtatttactatgggaaaggtgtggactacagattcgtattatattattttaatggattttaagtaatttataagtatgctgagtgtaaattttttttaaaaactgtattataaaaggacatatcctgtgaaatataacattttactgtttaatagaataattctataagaagaatgatttatctcacccacggaactgattacattccggatgcaatcaataggcactttgtaatttcctttttgtttttttttctttgctggggggttgaggggtaacaagataccatctgtataaagtgcagtttgtgtcactcaaaatatgcactgtatggctacacaaaagcagcttgatgaacaaatcaccccatggctcattaaaggtcgacgcggccgcgaatttagtagtagtagtcgacccgggaattccggaccggtacctgcaggcgtaccagctttccctatagtgagtcgtattag

SEQ ID NO: 43867 - DNA, 586 bp, Homo Sapiens
  misc_feature (569)..(569): n is a, c, g, or t
gcggctctgaggtgaccgcatagacttctcagaccaagggacctggatgacaggcaatcaaggcctgagcaaccaaaaggagtgccccatatggcttttctacctgtaacatgcacatagagccatggccgtagatttataaataccaagagaagttctatttttgtaaagactgcaaaaaggaggaaaaaaaaccttcaaaaacgccccctaagtcaacgctccattgactgaagacagtccctatcctagaggggttgagcttttttcctccttgggttggaggagaccagggtgcctcttatctccttctagcggtctgcctcctggtacctcttggggggatcggcaaacaggctacccctgaggtcccatgtgccatgagtgtgcacacatgcatgtgtctgtgtatgtgtgaatgtgagagagacacagccctcctttcagaaggaaaggggcctgaggtgccagctgtgtcctgggttaggggtttgggggtccgcccttccagggccaggagggcaggttccctctctggtgctgctgcttgcaagtcttagaggaaatanaaagggaagtgagagac

SEQ ID NO: 43868 - DNA, 676 bp, Homo Sapiens
agattctgtactgggacccggctacctgtaagcagatcaccagtgcggatgctgtgaggaacatggaatgggccacagctacttgtgtcctagggtttggggtgtttgggatctggtctgagggggcggacggcactgatatcaacgctgtggcccgctctcatgatgggaagttgctggcttcagctgatgactttggcaaagttcacctgtttagctacccctgctgtcagcctcgagccctcagccacaagtacggtggacacagcagccatgtgacaaatgtggccttcttgtgggatgacagcatggccctgaccacagggggcaaggacaccagtgtgctacagtggcgggtggtctgatgcggccaggaagagtcaggtgtcagggcaggaattctattttcgggagatgtctattgccgagtagagtaatatatacccagagtatgtctatagcagagggggttatgggggcgggagggtagactgacatacagaagtctctatttatccgggtgggaagagggagtcacatcgctttggggatccattggtgttggtatgggtgttcttaagtcttttcttttatatcatccagaaataaagacacgtacactagaaaaaaaaaaaaaagaacataccacacaataaacaccaacaaaaaaaagggg

SEQ ID NO: 43869 - DNA, 807 bp, Homo Sapiens
  misc_feature (738)..(738): n is a, c, g, or t
ctacaccacacatgcttataacaggcactagaataaagagggacaacaaaatacacagccagagcagcaagccttagcattaagaatatacaatatgccggaattggggttcgtgcctcctagcctaggaaacttaaaagaaatatccttttgacacaaaacacaaaatgttttccaaaacaattgacataatgatacattacgcctttgcagtgagctaataataagctaacctttgtgcacaaataacattatatatattatatatctattctgcataggtattttgactttgtgcaggacagaaagttgtgtaggtatgactgttctactttttcagttttctttttttttaatatattttattttctctagaaattactcaaacaaaagcagccttctatcttgccttgtcttaatgctttaaaataaccaaactggagatctaactaccaaactgttcattatattattaaataccaactttggttacagtatagtgtctttactttagctgatggttctgtaaccttgtgctttttaaagcaatttttatgttttggtgcaaaagttgtccagtgtctcttgttcccttcactagagaacatgcttagaggtatgtttgtaggtatttttgtttagaagaactatttcatgcgctccattttatttattataataggtaaaaagaaaaaaaaaggttgtaattcatcacccatgtaaacatgctcatgaagnttgaaagtaattaagatttgatacactgatatcaatttatttatgtaactaaatcactggtttataaac

SEQ ID NO: 43870 - DNA, 1088 bp, Homo Sapiens
  misc_feature (725)..(725): n is a, c, g, or t
agcgaggcctgggtggcgtctttgagaacatgagaaaccgaagtatgtgctgtgtgtgacctttttggaaggtggcgacgtggtcacgggggactctggggggaacctctatgtttggggcaaaggtgggaaccgtatcacacaggcggtgctgggcgcccacgacggcggcgtgtttgggctctgcgccctgcgggacgggacgctggtgtctggagggggccgtgatcggcgggtggtcctctggggttctgactacagcaagctgcaggaagtggaggtccctgaggactttggccctgtgcgcaccgtggcagagggccacggagacacactgtacgtggggaccacccgcaattccatcctgcagggctccgtgcacacaggcttctcactgctggtccagggccatgtggaagagctgtggggcctggccacacaccccagtcgggcccagtttgtgacctgcgggcaggataagctggtgcatctatggagctcagattcccaccagcccctgtggagcaggatcatcgaggaccctgcccgctcagccggcttccaccccagtggctctgtcctggctgtgggtacagtgactggcagatggctgctgctggacacggagacccatgacctggtggctatccacacagacggcaatgaacagatctcagtggtcagcttctccccagacggggcgtacctggccgtgggctcccacngacacttggtgtacgtgtaccggtgggaccagggcggccgcaaagtcagccgcctgggccagtgctcgggcctttccagttttatcccccacctggattgggcccaggacagcagctgctttttccccaactccggggactatgaaattctgtacggggacccggctaacctgtaaccaaatcccccttgccgatgctgtgaaggaacatgggatgggccccagctccttgggtcctaaggggtttgggggggttttgggatcttttcccttggaggggcgcaaccgccgtttattttccccttttttgcccccccctctttcagggaaacgcgccgggccttgccccgcagagaatttgggc

SEQ ID NO: 43871 - DNA, 529 bp, Homo Sapiens
caaggacacattttcatgccttctctcacagggctctgcggctccggttcacttctgtgtctttacactcccttcacagagacacttgctcccccttctctcgttcttggcatcccctaggaacttgcacacccaggtctctcgacttctggacctgcttcttaccatgccgtcttaagcagtcaggagtcgctgcctgggttcgagtcctagttaaattacttagtgctgagaccttggggtaggtaaacttttccaagccaggtttatctcagtttcaaaatagggttaatcgtctttatctggcaggtcaggtgggatgtctcacaggtaagcaccagatgccatttgaaaggcttgaagcaaagtcaataaagcattcatgggaaaatacaactggaggcaccactagattttcgtatacattaggttcccacggggaggaccgaagagagaagaaagaagtggaaagggaggagcgtgcaggagagacaggagaagagaataactaaacaaagacattaaagac

SEQ ID NO: 43872 - DNA, 721 bp, Homo Sapiens
aaaatcgagagtcctgctcccagtgagtaatggtagtgaatgtttctgtcactttttgcaaccgtccattcatttgatcctcacaactccctgtcctgagccaggaccggccactgccactcccagggaaacagaggctgtcaagaggctccacagattgggccccactggatcattgaacccctgttccctgagttctagaggaagaattgtacctgtctcagtcccggccacctccagaaggcctccctctgcatttctgactttgctgtgccggcagcctggagcctcccaggtccctgctgtcatcttttctagccactacagtctctgtctttcctttcacagccaagcttcttgaaaggcctgtctacacttgctgtcttccttcctcacctccaatttcctcttcaacccactgcttcctgactcgctctactccgtggaagcacgctcacaaaggtaaagacttttctgtggcttaatccttgtcatgttttcggctcatggacacaaggacacattttcatgccttctctcacagggctctgcgtctccggttcacttctgtgtctttacactcccttcacagagacacttgctcccccttctctcgttcttagcatcccctaggaacttgcacacccaggtctctcgacttctggacctgcttcttaccatgccgtcttaagcagtcaggagtcgctgcctgggttcgagt

SEQ ID NO: 43873 - DNA, 684 bp, Homo Sapiens
gaccgccttatgtggcctcccctgacctctggtcccactgggaagactcagccctgcccccaccaagcctgaggcctgtgcagcccacctgggagggctcctcagaggcaggcctggactgggctggggccagcttctccccagggactccgatgtgggcggccttggatgagcagatgctgcaggagggcatccaggcctcgcttcttgacgggccagcccaggaaccccagagcgcaccatggctgtccaagtcctctgtctcctctctgcggctgcagcagctggagcgcatgggcttccctacggagcaggcggtggtggcactggcagccacaggccgtgtggagggtgccgtgtcactgttggttggaggacaagtgggcactgagaccctggtgacccatggaaagggtgggcctgcccactccgagggtcctgggcctccctagcccaggcagagagtggggcacaggcaggcccttgggtgctaagggctgggctgcatttgggtagcccgagctcctactctgtctaaagagggccacagtggggagcaggggcacctctggaggcaggagaggccccccagcatgctgccctagtacgtgtttagaataaaaaccagtttgtttttcaaaaaaaaaaaaaaaaaaaaaaaaaacaaaaaaaacaaaaaacaaa

SEQ ID NO: 43874 - DNA, 660 bp, Homo Sapiens
  misc_feature (590)..(590): n is a, c, g, or t
  misc_feature (597)..(597): n is a, c, g, or t
  misc_feature (607)..(607): n is a, c, g, or t
  misc_feature (648)..(648): n is a, c, g, or t
ctgtgttggggtttgactgacctcaagctgatattattggaccttgtgcagctttgataacccatgtgagagtctaggcaggaccagtggggcccaaatcttgctgctcttgtacttttaggcactgcccttgcagactcacctttctccacctgccctggagaaaggtagggtgtgctgggcctgccccttgcaaatgggattcaccagtttcatttatttgactctactgccacagtgaaaagagcaaacagctattgggttgcaaacctcctttgacattaggaaatgttgactttgtaacaataaaactttggtcctagaaagacacggttgtcctgggagtttgtagtgttaagttgcaacaacaacaacaaaaagcaacaaaaccagcttaggataacactttttggtgcttgttcttaaagatgtctcactatgattaaaacccttttcattaatgtagtgaaagccacacaggagttccttcttccaggaggagaataccaagcacatcactttctctctgcatcagtgatgtcaaatacgcatcagtgagaaagagaagcactgctgcttgtctggatatnagctgangatgattganagaagctcgtggaactgacacaagggtctgcataggtcatnctgtgaccctgg

SEQ ID NO: 43875 - DNA, 583 bp, Homo Sapiens
tactcaagtgcctgttgccttcaggtatagaagaggtttcctgaagaaacagacctaactgtacaacagcagaggaaacccatgccaactgttatacaagttaacagttatgttgattcttaaatgggaatggtgagttagaaattcccagacatgggcgatggggagggaagaggaataagaaaagtcacgaggtagaattaggggccttgaaaatatgacaaactctgagggaaacaaagacaatgtggaaagaataacttaattttaattccatctccagagagatttgaggtgtatttaagatgaaaaacaggatactacaaagaaacggaaaactcaggagttcaagaccagcctaggcaagatggcaacatcccgtctctacaaaataatttttaaaaattagccaagcatggtggcatgtgcctgtggtcctagctacttgggaggctgaagtgggaagatcacttgagcccaggagttcaaggcttcagtgagccatgatggtgccactgcactccagcctgggggacagagtgagaccctgtctcttaaaagcaagaaaagaaagagaagactg

SEQ ID NO: 43876 - DNA, 916 bp, Homo Sapiens
gatgaaccatggcgaataacagataatgagcttgaactttataagaccaagacataccggcagatcaggttaaatgagttattaaaggaacattcaagcacagctaatattattgtcatgagtctcccagttgcacgaaaaggtgctgtgtctagtgctctctacatggcatggttagaagctctatctaaggacctaccaccaatcctcctagttcgtgggaatcatcagagtgtccttaccttctattcataaatgttctatacagtggacagccctccagaatggtacttcagtgcctagtgtagtaactgaaatcttcaatgacacattaacatcacaatggcgaatggtgacttttctttcacgatttcattaatttgaaagcacacaggaaagttgctccattgataacgtgtatggagacttcggttttagtcaattccatatctcaatcttaatggtgattcttctctgttgaactgaagtttgtgagagtagttttcctttgctacttgaatagcaataaaagcgtgttaactttttgattgatgaaagaagtacaaaaagcctttagccttgaggtgccttctgaaattaaccaaatttcatccatatatcctcttttattagacttatggaaatgtcagagacagaaaattatgacaataaagtaaaattaagaagagagcggaagaaagtgatgtgacgtaagaaaataaaagaacataaaagggggggcgctcataattaacgcgggggggaaaataggtgacagattattgagacgaccaggtgagatcaaaaacagagggggaataaaaggaaggaaagaggttggattatgaacactttggtggatatgaaccaaatacgtgcaaaatggtgtgcgaacatcccggagtgatataaggaa

SEQ ID NO: 43877 - DNA, 621 bp, Homo Sapiens
tatttttgtaaaattgtttaaaagttatttatgcaaggtttgaatgcataccagtgtttttattgttttgagattgccaattttcctgatttccttaaggtaggagagaatttaacgtgtacttcatcgacacaacccatctacaaatgtgcccagatctaacaaagtaggctaagaccttccacttaaaagcatgtttaactggaagttgagagtctgctttgtacctcaagagttacatgagcatgttgtggataaatgtaaattatagtcaaagtaagatactctgccaagtttcctctgtagagaattcacttttctcaaattttaaaatttcgacttcagcctttgcactcaggaggttctgctccagcatgagctcttgtacttacatagatctaatttatacagtgagtcaagacgtagaataaatgctcccacatagcctttcttttgcttttgcttctctcctctgaagtgtgagttgagttctcatttaggtttgtaacatggctatttcctagttgtaaagttctgcatttataagtgccattgttgtaaggtggtgtttcctagaccttccctgatgcgattttacctttgttgaatttgtataaacaa

SEQ ID NO: 43878 - DNA, 665 bp, Homo Sapiens
  misc_feature (601)..(601): n is a, c, g, or t
ggcctgagagcatctgacggtcctcagtactgaactcccggaagctgctctgagcccggtgacctcatctgggccaggtgtggtgcctgagctgaatgctcaggtgcttacagtgttgcaatccctaagagagtagagtctggaggagaaaccgtgaaaaagaccttacacaccaccaagaacttccgaatgggcgtgaatccaccgtttcttctctttgcaaaaagaaccaccacagctgctcaaagaacacagtgaactcatcactttggttcatcaaaaaatcatcgcccatgcgttattcctgagtgcattttcttacaactttttgactgcttccttttcttcttctcttaagagttgtgggcttaagaatgggatagagtcataatggcaacctccaagccctctcaattcttgattaagaacacaggtagacatgaatcccaattgtctattgctatcttatttatatgattcgggaaaatacagcatgtaaaaatattgctgaggagcctcagtgattgggtacaagaagcaagagtacagaaattatttttgccaatttattttgtaatatgagggtctgtactaaatttanaaaaaaaaaaaaaaaaaaaaaaacatgtcggccgctcggcctcgagagcttctagacattcgtg

SEQ ID NO: 43879 - DNA, 667 bp, Homo Sapiens
ggagaaagatgttgtcatacacagatttgtttgtgagggaacagtagaagaaaagatcttacagctccaagaaaaaaagaaagatttggccaaacaagttctatcagggtctggagaatctgtcaccaagctcaccttggctgacctcagagtcctttttggcatctaacctcctgtggataagggctcaaaatagcaccattgctgctgatgatgggagaaccagttactaccttctctaacacaggctccatcctatctcttcatctcttcttgccagtgatgttgcacctgtaaccatctttttatgggtggagcagagagtcaatccctgcagccaccctgcagccagccatctctgcagttctctcagtgcaggcagttcttcctctcaggctgaagatcaaggagatgctttgtacatgaacagatgctgagtatctgttatcattgtattgtttagtgtcagtgtatcatttagtatttgtatcactgtaccatttagtgttgtatatcactcagtcatttaatattggttatcaccatacagtttaatatttgtatcatttggttcattgtatcgtttagtatttctattataacatttctatttgtagtatttgtataatatttgtgtcatttttaatagtatttgtatttttacaaa

SEQ ID NO: 43880 - DNA, 625 bp, Homo Sapiens
  misc_feature (11)..(11): n is a, c, g, or t
  misc_feature (34)..(34): n is a, c, g, or t
aacactctaantaaaaccagcatgacataaaaanccatatctgtaaaatggatccttttatgagtgaatttttctgctaattgcccaaggctaaatccaatttaaggattgcttagtttctttattttgtttatggtctctgaactggtatttttttataaaccaggctaattcacaggtcataccatttcattcttgtcgtgttggcttccagtcactggaaaagcttttgcattttaaagatttttagagccatgcaaaactgggcattaaatgttgcataaagcaaatcttttaagtaaggtaaaatgttgaagtcttaaccagaattcctacaactaattactaaaactgctatttctaactcttcatgaaagcattacctttggaaagttaaactttttttttcctttcatcaccgtctttgaaacaaattattttccaattcataagaactttggtaaaaaaaaaaataaaaggaaattatatgtttttctttggacattcattggaaggcttgttgaagacatgatcccccagaagccttagtgacccagatctcaaccagagactcaagatagcctcaaatacagtgaaagattatgtatccaaaaaaaaaaaaaaa

SEQ ID NO: 43881 - DNA, 806 bp, Homo Sapiens
aaaacctgaagagctactttcagccctcccctagctgtccccaagcctctcctgacatagagctgcctagcctaccactgatgagcgccctcatgaccccgaagactccagaagagaaggcagtggccaaagtggtgaaggggcaggccaagacttcagaagccaaagatgagaaggagttacggacctcattctggaagtctgtgctggcggggcccttgcgcacacccctctgtgggggccacagggagccatgtgtgatgcgtactgtgaagaagccaggacccaacttgggccgccgcttctacatgtgtgccaggccccggggtcctcccactgacccctcctcccggtgcaacttcttcctctggagcaggcccagctgaaccaatggaggcctggggacatctggcatggtcacccctgcacatgatctgaggccagctccccttccctgagctgcctcctgcttctccctcaaagtctcctacccttctcttcctcttttaagccctctcttcctcgctttccttcctacctagctccttgttggtgagcttcttgtgccttaatcctgtgacccagccccttacaccactttccaccttcctgtccgaagtacacggacactagctgccccaggaagttgtgtgattttaaatcacttctgtctttgctggaaagtgtatttgtgcataaataaagtctgtgtatttgtttcagggttgcactttggacattgtggaggtactccataaagttgagtcagagaagctatctcaatacttggtttgccggctggctgt

SEQ ID NO: 43882 - DNA, 655 bp, Homo Sapiens
  misc_feature (449)..(449): n is a, c, g, or t
aaatgcatgtattataatcatataatcataactgctgttaattcttgattatatacctagggacaatgtgtaatgtaagattactaattggttctgcccaatctcctttcagattttattaggaaaaaaaaataaacctcctgatcggagacaatgtattaatcagaagtgtaaactgccagttctatatagcatgaaatgaaaagacagctaatttggtccaacaaacatgactgggtctagggcacccaggctgattcagctgatttcctaccagcctttgcctcttccttcaatgtggtttccatgggaatttgcttcagaaaagccaagtatgggctgttcagaggtgcacacctgcattttcttagctcttctagaggggctaagagacttggtacgggccaggaagaatatgtggcagagctcctggaaatgatgcagattangtggcatttttgtcagctctgtggtttattgttgggactattctttaaaatatccattgttcactacagtgaagatctctgaattaaccgtgtactatccacatgcattacaaacatttcgcaaagctgcttagtatataagcgtacaatgtatgtaataacatctcataattattaaatgggtataaaagaaaaaaaaaaaaaaa

SEQ ID NO: 43883 - DNA, 850 bp, Homo Sapiens
gggaaattgagaaaaaaggtttgggtaaatacatcagacattatattggttggtctacgggactatcaggataacaaagctgatgtaattttaaagtacaatgcagatgaagctagaagcctgaaggcatatggcgagcttccagaacatgctaaaatcaatgaaacagacacatttggtcctggagatgatgatgaaatccagtttgacgatattggagatgatgatgaagacattgatgatatctaaattgaaccaagtgtttttacatgacaagttctctgaggatggttctacagttgggattttggccatcatcaaccaagaagagaaattcatttagtgtgtagtttctgaaagcaaactgatttattttcattgttttaaagtatttatttctttaaaagctgaggacactgaattaccttaagttaaatgttaatactttattgttttgatgtaatggaacttaaggataaaagaccataatatttgctgttaaaataaataaacgaggtggcctttcctactgtacaaaaaaaacaacaaacagacaaaaacactttttgtgggggcccctcgggcccccgaaaaaagcttcttcttaaaaacccattcgcttggggggacagagggacccccgatgagatgagctgcgacaacaggcgctcagacggtgttccccagagaagaaccccgggggccacagacaaaacggggcgtctgggattctccgccaatgtagaaaaaggccggggggaagacagcggcgttcggcaacaaatccccaagaggaggtcgcgcgagcacaccagggactacaccggagccgacggaagcccaaatcaat

SEQ ID NO: 43884 - DNA, 532 bp, Homo Sapiens
cagatcttgttcccagggagtgggtcattggccaaagggaacataaggtaggcagaaaacttaaaagagtttgttaaagtgaagactggagaaattcctcccttcctctgagctgtgaatctctcttcatgaaagccaaaggtagagacagggaggacagggccaggttagggccttccacacacaaacacttctagagttgcccattcctgttatgttcttggaccctaagatacctcctgtcccttttaaatccagattaagagaaacgtccaggaagagctctttgaagccctcaatatttgttggagggactggactcctctccagctccccaccctctgcctccagtcaccatgtgcaagagaggtcctgtacagatctctctgggctctcctttctcctttggaataacttgttcctatttcaggaaagggaaatggtgtcactcaggccctgggactgcttctccagccaggctggggccacaggtcccactctagtgaaggtcaatgtctcagaataaaagctg

SEQ ID NO: 43885 - DNA, 535 bp, Homo Sapiens
ctgggcctggccctcctctcctgactcccagatccttccctgccctcttgtgtgcaaggacagattttgcagggaaagttctgtttcttctttgatacctttgttctgtcccctgccccatccccagcactcatgatcttgaagcccctatcacactctagttcagtcctgtgaaccatgtcctgagggccttgcagggaagtaggaaatagaaactcctccacaaagagccgaggatcagagaagacccctgagatgaatcagggccctgccctgcccaccaactcttttctagcaatcatgtcctgcccaggctgcaggcttcattaggctcctgctgtcctccatgatgtgactagcacaaggtgtatatatgttttgtacctctgccgatggctgtacatagtgtatgaaagttatttaagccccatgttgtacatttctgttcctagattggatgtgtgtgttctaagaagttgtcataaataaaacctgaatgaccaatgtcaaaaaaaaaaaaaaaaaaaaaacgcgg

SEQ ID NO: 43886 - DNA, 674 bp, Homo Sapiens
gtccttctggtgctatttttatttaagtctttgtttcaaaccacctttccctgaatcttaaagataatgttttgcatgtgagtacatgcagcccagcaagaaactaaactgaactctcttctcctatcctagtccattaaggagaagaaccagcattgcttttgtgtttggtgtgaatattcagtcaataaaaatgatttaccattataaagagctgtgatcttttcaagtatctgaaataaaacactgtgctgctgagttcatctcaaacattcttgaaagcagggcaccagtataagttaactgtattcctgtgggttaggccgtgaatgaatcatttcttttatacaatattcttttacaactaatagagataggaggccccaaggcaagaagtttggcaggtttacagaaaatttggtaatttatttgttatataccttaatttttaaaaacccatttttattgtggtgtttggttcacatatcaactgtttaagccataattttagccaatgaatttaaatattcagtataactatttgaggtttactagatgcatttattaataaattatttgctgaaaccaaaacaagtcattgggggtgtgggaataaaatcaacctttgcttgtaattaaagttgctgctatttctgtaatgggtatttttctcc

SEQ ID NO: 43887 - DNA, 586 bp, Homo Sapiens
  misc_feature (555)..(557): n is a, c, g, or t
  misc_feature (559)..(571): n is a, c, g, or t
  misc_feature (573)..(575): n is a, c, g, or t
  misc_feature (578)..(580): n is a, c, g, or t
ggacaccaaactgttgatggtatttaaatgtgacttcaagttagtatttctgtatatattatagattactggtttgtttttagatatgtaagtctgttctaatctacagttcacatatcgacagttactctggtaataatagaatgttagtgatgatcacttggtggatgttgattaagtgcctgtgttttgtttcctcctctggataccaaataggtgtatgctacttttttggtgaacttatttcttggaagatttggctatgctattcagggtttttattcttatgtttttcttctaaatttaagtagcatcctgctgctaccatattaaagctaaaatttaacttttgctgaagaatcagctaattcaggtaatccaaatatttgtggaaaaacatctggataatttattgaacacattagtattgtgttagctttgatcattcccatttcataggtttttattgtggaatagtcaacttaatatagattcactttcaatttgcatgtataaagtaatactcaataaaatttttttcatttattttgaaannncnnnnnnnnnnnnnannnaannncctgtt

SEQ ID NO: 43888 - DNA, 636 bp, Homo Sapiens
cagactcccacaccgggttttcttgcccgtctttaaggcactgtttctaaattttgaacttagctctgaatccccaagaacttgagcacagcaagggttgctgagctgctgtcgccgcagccctggcccctggtgctggagctgcagcacctttgggagaggtcctgcgtcgtcctcagctgcgtcgctgtgaactcccgctctccactgtgttcctcagtgtctgcttttcaggaagtctgctgtgacctttgcccaacttctgagctcctcagggactaggaacaatttcagtagctttgccctgaaccaaacgagaaaacaaaagggaactcccgtatgacccacgtcacgtggtgcactcagagtgtgtgcggcatgatcctcggttgctcctcctctcactttagtagagtacgcggtggacagctgatctccttcagtcgtctacccacttccgtcattgtcctccgctagaataacagagtagttggtagtcatggccagaaggggggtgggggcagtgtgaggacttggggtttctgtgctgtgtgacacaaggagataagtgacaatcttgaagtcctaacttccactattctagaaagtatagtggtgatttgtgtgcaagatttg

SEQ ID NO: 43889 - DNA, 821 bp, Homo Sapiens
  misc_feature (794)..(799): n is a, c, g, or t
  misc_feature (801)..(802): n is a, c, g, or t
  misc_feature (804)..(804): n is a, c, g, or t
  misc_feature (811)..(812): n is a, c, g, or t
  misc_feature (818)..(820): n is a, c, g, or t
atcagcaggctccgggctgaagattgcttctcttctctcctccaaggtctagtgacggagcccgcgcgcggcgccaccatgcggcagaaggcggtatcgcttttcttgtgctacctgctgctcttcacttgcagtggggtggaggcaggtaagaaaaagtgctcggagagctcggacagcggctccgggttctggaaggccctgaccttcatggccgtcggaggaggactcgcagtcgccgggctgcccgcgctgggcttcaccggcgccggcatcgcggccaactcggtggctgcctcgctgatgagctggtctgcgatcctgaatgggggcggcgtgcccgccggggggctagtggccacgctgcagagcctcggggctggtggcagcagcgtcgtcataggtaatattggtgccctgatgggctacgccacccacaagtatctcgatagtgaggaggatgaggagtagccagcagctcccagaacctcttcttccttcttggcctaactcttccagttaggatctagaactttgcctttttttttttttttttttttttttgagatgggttctcactatattgtccaggctagagtgcagtggctattcacagatgcgaacatagtacactgcagcctccaactcctagcctcaagtgatcctcctgtctcaacctcccaagtaggattacaagcatgcgccgacgatgcccagaatccagaactttgtctatcactctccccaacaaacctagatgtgaaaacagaataaacttcacccagaaaaacaannnnnnannanaaaaaannaaaaannnc

SEQ ID NO: 43890 - DNA, 564 bp, Homo Sapiens
gcacgagacaaagcaagttatacacaaatttcccccacattcacactgatgccgtacttagtaattctggttctaccattcccttttgcactttttgcaagtcaaattcatgtggaaaaatgttctgtttgtagaactcatagtattcacttatagtgctcatgtcaggaatggcaagtgagtaagagcccctgataatctgcttttgttagaacgtaatgcaaagataataaaacatgtccacttcttttctagttctaatcagtttttagacatcaagatttatttactttgcatgagatttgtttcctattatttgaatatgtgctatacacttgaattagaaaaacctgcttgaatgtattgtcagttattaaagcacatgtgactaagtttgcatttgtcagtattgttctactgtttgtactgaaagtctcattttaaaattgctacttaacactgtactataccttgtaattttttagattctccacttgtattctttaaatgtttccagatgcctttagttttagctgctgtaagatagctactttgcgttatttg

SEQ ID NO: 43891 - DNA, 549 bp, Homo Sapiens
taaatctagaattatttataagaattactcattgaactaattctactatttaggaatttgtaagagtctaacataggcttagctacagtgaagttttgcattgcttttgaagacaagaaaagtgctagaataaataagattacagagaaaattttttgttaaaaccaagtgatttccagctgatgtatctaatattttttaaaacaaacattatagaggtgtaatttatttacaataaaatgttcctactttaaatatacaattcagtgagttttgataaattgatatacccatgtaaccaacactccagtcaagcttcagaatatttccatcaccccagaaggttctcttgtatacctgctcagtcagttcctttcactcccaattgttggcagccattgataggaattctatcactataggttagttttctttgttccagaacatcatgaaagcggcgtcatgtactgtgtattcttatgaatggtttctttccatcagcataatgatttgagattggtccatgttgtgtgattcagtggtttgttc

SEQ ID NO: 43892 - DNA, 1018 bp, Homo Sapiens
cccgccccgctgaggcctgtctgcagaatccacagcaaccagcaccatgcccatgacactggggtactggaacatccgcgggctggcccattccatccgcctgctcctggaatacacagactcaagctacgaggaaaagaagtacacgatgggggacgctcctgattatgacagaagccagtggctgaatgaaaaattcaagctgggcctggactttcccaatctgccctacttgattgatgggactcacaagatcacccagagcaacgccatcctgcggtacagagaaactgaaaccagaatacctgcaggcactccctgaaatgctgaagctctactcacagtttctggggaagcagccatggtttcttggggacaagatcacctttgtggatttcatcgcttatgatgtccttgagagaaaccaagtatttgagcccagctgcctggatgccttcccaaacctgaaggacttcatctcccgatttgagggcttggagaagatctctgcctacatgaagtccagccgcttcctcccaagacctgtgttcacaaagatggctgtctggggcaacaagtagggccttgaaggccaggaggtgggagtgaggagcccatactcagcctgctgcccaggctgtgcagcgcagctggactctgcatcccagcacctgcctcctcgttcctttctcctgtttattcccatctttactcccaagacttcattgtccctcttcactccccctaaacccctgtcccatgcaggccctttgaagcctcagctacccactatccttcgtgaacatcccctcccatcattacccttccctgcactaaagccagcctgaccttccttcctgttagtggttgtgtctgctttaaagggcctgcctggcccctcgcctgtggagctcagccccgagctgtccccgtgttgcatgaaggagcagcattgactggtttacaggccctgctcctgcagcatggtccctgccttaggccgacctgatggaagtga

SEQ ID NO: 43893 - DNA, 723 bp, Homo Sapiens
  misc_feature (549)..(550): n is a, c, g, or t
  misc_feature (565)..(565): n is a, c, g, or t
  misc_feature (577)..(577): n is a, c, g, or t
gggacacactcgcttctggaacgtctgaggttatcaataagctcctagtccagacgccatgggtcatttcacagaggaggacaaggctactatcacaagcctgtggggcaaggtgaatgtggaagatgctggaggagaaaccctgggaaggctcctggttgtctacccatggacccagaggttctttgacagctttggcaacctgtcctctgcctctgccatcatgggcaaccccaaagtcaaggcacatggcaagaaggtgctgacttccttgggagatgccataaagcacctggatgatctcaagggcacctttgcccagctgagtgaactgcactgtgacaagctgcatgtggatcctgagaacttcaagctcctgggaaatgtgctggtgaccgttttggcaatccatttcggcaaagaattcacccctgaggtgcaggcttcctggcagaagatggtgactggagtggccagtgccctgtcctccagataccactgagctcactgcccatgatgcagagctttcaaggataggctttattctgnncagcatcaaatatanatctattctgcntagagatcacaaaaaaaaaaaaaaaaaaaaaaaaacatgtcggcgcctcgcctcgagagcttctaacatcgttgcgccggccatagtatgactgtcaactgtcagaatcgcagacagtgatcccaaaacgcgcgacagtcaatcag

SEQ ID NO: 43894 - DNA, 405 bp, Homo Sapiens
cttatgaagacttcctttttctttctgaagagctgccataagtcttaaacatttaaatcatcagaaccttttcttgtagcagaaatgtgaatgttttcttgaagtacaggttacggttttcatggtacaagtgcttacctacgacgataagagaacaaggcttaaaatatccctcaaaagaacaattgtgagaattccatgttagcggctgtctttaaacgactaccctcaggcagatctgggtttttatatctttatcttcattcagtgaagcaagccaaaagcccacatttgtatgccttaggtcttcttaaaatggtatctgtaaacatgtgtccaatataaaaactatttttaataaaaagttacatgaaaaaaaaaaaaaaaaaaaaaaaaaaaaaggac

SEQ ID NO: 43895 - DNA, 618 bp, Homo Sapiens
ctttttttattctttatgcttgaaaataaatttatggggatcctatttagctcttagtaccactaatcaaaagttcggcatgtagctcatgatctatgctgtttctatgtcgtggaagcaccggatgggggtagtgagcaaatctgccctgctcagcagtcaccatagcagctgactgaaaatcagcactgcctgagtagttttgatcagtttaacttgaatcactaactgactgaaaattgaatgggcaaataagtgcttttgtctccagagtatgcgggagacccttccacctcaagatggatatttcttccccaaggatttcaagatgaattgaaatttttaatcaagatagtgtgctttattctgttgtattttttattattttaatatactgtaagccaaactgaaataacatttgctgttttataggtttgaagaacataggaaaaactaagaggttttgtttttatttttgctgatgaagagatatgtttaaatatgttgtattgttttgtttagttacaggacaataatgaaatggagtttatatttgttatttctattttgttatatttaataatagaattagattgaaataaaatataatcctcgtgc

SEQ ID NO: 43896 - DNA, 521 bp, Homo Sapiens
aaaaaaaaaattattaatacttttaaagactgagctgtttaagaattttttggggaacatttctagcagtgatttttttggcctttaatgatagcgtaaagacaggagccttacaacttaggcaaagcatttcacatgcagtccttcttccatctcaaaatatgtacttattttacatacagaattttacactaaccattgaaaaataaagtaggatctgctacagtttcacctgaaaatttataaaaagtgttgagattggtagaaggtagtttttaagtacatgtgcactaccctaaaagacttgtctattgtcaataaagtgttagtatttgtgaaattattattcctgttcagaaatactatttcttaaatctcctgggaatttgtggcataataaagcacattcaaagttctaatgtatttatgagctcattttcaaaatagtaagtttgtcatctttaaaatgaacatgacttgcctccttgatttctgaaatgaattaattgaagattgctata

SEQ ID NO: 43897 - DNA, 706 bp, Homo Sapiens
cggcacgaggaacaaattggaaaatttaaatttttattcttagctataaagcaagaaagtaaacacattaatttcctcaacatttttaagccaattaaaaatataaaagatacacaccaatatcttcttcaggctctgacaggcctcctggaaacttccacatatttttcaactgcagtataaagtcagaaaataaagttaacataactttcactaacacacacatatgtagatttcacaaaatccacctataattggtcaaagtggttgagaatatattttttagtaattgcatgcaaaatttttctagcttccatcctttctccctcgtttcttctttttttgggggagctggtaactgatgaaatcttttcccaccttttctcttcaggaaatataagtggttttgtttggttaacgtgatacattctgtatgaatgaaacattggagggaaacatctactgaatttctgtaatttaaaatattttgctgctagttaactatgaacagatagaagaatcttacagatgctgctataaataagtagaaaatataaatttcatcactaaaatatgctattttaaaatctatttcctatattgtatttctaatcagatgtattactcttattatttctattgtatgtgttaatgattttatgtaaaaatgtaattgcttttcatgagtagtatgaataaattgatt

SEQ ID NO: 43898 - DNA, 643 bp, Homo Sapiens
cggccgccaactttttttttatctatatgtcaaaatacttgtaaattggggaacaaacttctctcagcttcttgaagttgttcaactatccttgccactggaagaccaaacaaggttttcactgcttttttttttacataatatgctgagaattatttcttatgctttttactacaaacaaaattactcacctggattaaagattaaggccttaatctgtttagattatctttaatctccatgaaatcgtgaaataagacaagaatagtgtttcagctgtaggccattttacagctaattgcccataaattgtagcatttattgacctgaagtactaagctaattgtcttgactactcaaagcccctgaattgttgtcaactttcccctttgtgttgtgtagccctaacgtcatttagcttgttgtctgatgcctccagtaggacacctccgatggagctttgatttctgagcagcgaaagctcccttcctaagatgcatctcgcataggctgcctatgatgaaggaccgtgcacctccactccaacagagtgctgagtttaaaagttgacctgtgtttgtaatttcactttcatcttgcttaataaatatctgctggattctttccctcgtgccgaattctt

SEQ ID NO: 43899 - DNA, 660 bp, Homo Sapiens
gacgacgctgcttggtcccagcctccccagagcaacacgtggaggtggataaggctgtggcacagaacatggactctgtgtttaaggagctcttgggaaagacctctgtccgccagggccttgggccagcatctaccacctctcccagtcctgggccccgaagcccaaaggccccgcccagcagccgcctgggcaggaacaaaggcttctcccggggccctggggccccagcctcaccctcagcttcccacccccagggcctagacacgacccccaagccacactgaggtgccgctgctggagatgcgtgcccccggcggctacccgctggaccggccactctccccagcccccttgcttctctccagccctgtccagcaagtgcagggtgcctgcacttcaccctgtgcagagaggtgggatggggccgtgcacacagggatgcccgctccacatcctgcctgcccctcagccctggcccaggccccttttggaggcagctgaggaaggatgctggggaaagccctcttctgcagctttgtggaaggctgatcagtggctgctgggtggcgggtacccttgctcagatgcctggcagggctgggtggcgattcataaagacctcgtgttgattccccgaaaaaaaaaaaaaaaaaaaaa

SEQ ID NO: 43900 - DNA, 660 bp, Homo Sapiens
  misc_feature (660)..(660): n is a, c, g, or t
ggtgtctggggagcggctgccggccgggcccgcgcgagccgcttcactcctacaagcccggctcactagttccaagctgctggactttgaccctcgctgggaagcttgatcgccgcctgttctcgccaatctctatgcctttgcactgcccagcaacccggtcactgcccaggacctgttaaaagttgaatggacctcccagaatcacgccgctgccaccgccgtttctagagacggcttttggccacctttgagaatcagggtcaaacttggaagggcctgcatttgtcacacttcctcggacactaatttggatagttcaggcccagagacggcttcccgggttagtgtgcctgacaacactgaagaaaaattgtgacattttccttccccagaattacttcgttttatacatttcacttctcttctgaaatcacagcaatgccagtttgcgccttttggtctgaggaacgcaggccctggccactaccaggaaaaagtatttacttttaaaacttgaatgtatatctttaccgtatgcctagtacagtagtgcttggaagaacagattagtaagacaaaatatatgtctttcagaacacttacgttctgagaaagattctgatgcagatctatgtctggtaaagctttacgtgtaan

SEQ ID NO: 43901 - DNA, 867 bp, Homo Sapiens
  misc_feature (371)..(371): n is a, c, g, or t
  misc_feature (423)..(423): n is a, c, g, or t
  misc_feature (495)..(495): n is a, c, g, or t
  misc_feature (498)..(498): n is a, c, g, or t
  misc_feature (505)..(505): n is a, c, g, or t
  misc_feature (526)..(526): n is a, c, g, or t
  misc_feature (532)..(532): n is a, c, g, or t
  misc_feature (534)..(535): n is a, c, g, or t
  misc_feature (552)..(552): n is a, c, g, or t
  misc_feature (566)..(566): n is a, c, g, or t
  misc_feature (572)..(572): n is a, c, g, or t
  misc_feature (579)..(579): n is a, c, g, or t
  misc_feature (589)..(589): n is a, c, g, or t
  misc_feature (592)..(592): n is a, c, g, or t
  misc_feature (608)..(608): n is a, c, g, or t
  misc_feature (614)..(614): n is a, c, g, or t
  misc_feature (654)..(655): n is a, c, g, or t
  misc_feature (664)..(664): n is a, c, g, or t
  misc_feature (666)..(666): n is a, c, g, or t
  misc_feature (672)..(672): n is a, c, g, or t
  misc_feature (676)..(676): n is a, c, g, or t
  misc_feature (690)..(691): n is a, c, g, or t
  misc_feature (701)..(704): n is a, c, g, or t
  misc_feature (711)..(711): n is a, c, g, or t
  misc_feature (720)..(720): n is a, c, g, or t
  misc_feature (738)..(738): n is a, c, g, or t
  misc_feature (740)..(741): n is a, c, g, or t
  misc_feature (745)..(745): n is a, c, g, or t
  misc_feature (758)..(758): n is a, c, g, or t
  misc_feature (761)..(761): n is a, c, g, or t
  misc_feature (765)..(765): n is a, c, g, or t
  misc_feature (777)..(778): n is a, c, g, or t
  misc_feature (786)..(786): n is a, c, g, or t
  misc_feature (788)..(789): n is a, c, g, or t
  misc_feature (793)..(793): n is a, c, g, or t
  misc_feature (798)..(799): n is a, c, g, or t
  misc_feature (804)..(804): n is a, c, g, or t
  misc_feature (810)..(810): n is a, c, g, or t
  misc_feature (850)..(850): n is a, c, g, or t
  misc_feature (853)..(854): n is a, c, g, or t
  misc_feature (858)..(858): n is a, c, g, or t
  misc_feature (860)..(860): n is a, c, g, or t
gaattcggcacgaggcaacatctatgccaaatactgtgcattctacaatggtgctaatctcagacctaaatgatactccatttaatttaaaaaagagttttaaataattatctatgtgcctgtatttcccttttgagtgctgcacaacatgttaacatattagtgtaaaagcagatgaaacaaccacgtgttctaaagtctagggattgtgctataatccctatttagttcaaaattaaccagaattcttccatgtgaaatggaccaaactcatattattgttatgtaaatacagagttttaatgcagtatgacatcccacaggggaaaagaatgtctgtagtgggtgactgttatcaaatattttatagnatacaatgaacggtgaacagactggtaacttgtttgagttccccatgacagntttggagaccttgtcaatagcaaatccatttttggtatttaaaattttttggacctggatttggaaaaaccnccnttaaaantatcttttaaaaaggtaaaanactaanannaaaaaaaaaaaccccgnagggggggggcccngggtanccccaanttccgccctnaanaggtggaggcccggtntttacnaattccactgggccggcccggttttaacaaaccggccggnnccctggggnanaccccngggnggtaccccaacttnnacccgccttnnnnggaaatnccccctttncgccaagctgggggaaananngganaggcccgccccgntcngccntcccaaaagttnncgcccctnanngggnatggnnaattntaccgngtaaattttggaaaaatcccgggaaattttggaaaccagnccnntttnanccaaggg

SEQ ID NO: 43902 - DNA, 655 bp, Homo Sapiens
  misc_feature (651)..(651): n is a, c, g, or t
atggagcaacaggatcagagcatgaaggaagggaggctgacgcttgtgcttgccctggcaaccctgatagctgcctttgggtcatccttccagtatgggtacaacgtggctgctgtcaactccccagcactgctcatgcaacaattttacaatgagacttactatggtaggaccggtgaattcatggaagacttccccttgacgttgctgtggtctgtaaccgtgtccatgtttccatttggagggtttatcggatccctcctggtcggccccttggtgaataaatttggcagaaaaggggccttgctgttcaacaacatattttctatcgtgcctgcgatcttaatgggatgcagcagagtcgccacatcatttgagcttatcattatttccagacttttggtgggaatatgtgcaggtgtatcttccaacgtggtccccatgtacttaggggagctggcccctaaaaacctgcggggggctctcggggtggtgccccagctcttcatcactgttggcatccttgtggcccagatctttggtcttcggaatctccttgcaaacgtagatggctggccgatcctgctggggctgaccggggtcccacgcgcgctgcagctccttctgctgcccttcttcccgagagcccangtac

SEQ ID NO: 43903 - DNA, 728 bp, Homo Sapiens
  misc_feature (18)..(18): n is a, c, g, or t
ggcagccctgtgtgagtnggtgtgtgtcatcgatatcctcattttctatggcaccttcagctacgagtttggggcagtctcctcagacacactggtggctgcactgcagcctacccctggccgggcctgcaagtcctccgggagcagcagcacctccacccacctcaactgtgcccccgagagcatcgctatgatctaaggtctggggagggtggctggcccggcctccacagcaccccaccccatatcttctttccatttatttcgtaccaaaaacaattttgagaaagtattctgttgggatctgggcttcctcacttctggagaagtggccatcccatgcccacctgtgccatggaggagtgggccctgccagctgccacagctgcatgacctgcttccccaccccacggtgtcgttttgtttttaaaggtcacctgtcctcactcacccagccagcccttcaggtgccttctactcccagtgccaaagccagaccactggggtttcctgctgcaggaattgggggctgggaacagcagaggggatagaagtctggtggaggtggagtgggcacgccttagcctacggaaaggcccatttctgggcccactgagctgcactgggattcttcactctgcccctcacttcctttagggcaaataacacagcagaaccacgtgggtattttagtacttttttttatattaaaagaattctaatttgca

SEQ ID NO: 43904 - DNA, 697 bp, Homo Sapiens
ttcctgcaagttgctgccggatggccggagtctgatcgtgggcggtgaggccagcaccttgtccatttgggacctggcggcgcccaccccccgtatcaaggccgagctgacttcctcagccccagcctgctacgccctggccgtcagccccgacgccaaggtttgcttctcctgctgcagcgatggcaacattgtggtctgggacctgcagaatcagactatggtcaggcagttccagggccacacggacggcgccagctgcattgatatttccgattacggcactcggctctggacagggggcctggacaacacggtgcgctgctgggacctgcgggagggccgccagctgcagcagcatgacttcagctcccagattttctccctgggccactgccctaaccaggactggctggcggtcggaatggagagtagcaacgtggagatcctgcacgtccgcaagccggagaaataccagctgcacctccacgagagctgcgtgctgtccctgaagtttgcctcctgcggacggtggtttgtgagcaccgggaaggacaacctgctcaacgcctggaggacgccgtacggggccagcattttccagtccaaggagtcgtcctcagtcctgagttgtgacatctccagaaataacaaatacatcgtgacaggctcgggggacaagaaggccaccgtgtat

SEQ ID NO: 43905 - DNA, 974 bp, Homo Sapiens
tccggaattcccgggatctcctgctcagcatggctgctttagggactgttctcttcacaggtgtccggaggctgcactgcagcgcaccgcttgggcgggcggccagtggcgactacagcagggactggctgccaacccctccggctacgggccccttaccgagctcccagactggtcatatgcggatggccgccctgctcccccaatgaaaggccagcttcgaagaaaagctgaaagggagacgtttgcaagacgagttgtactgctgtcacaggaaatggacgctggattacaagcatggcagctcaggcagcagaagttgcaggaagaacaaaggaagcaggaaaatgctcttaaacccaaaggggcttcactgaagagcccacttccaagtcaataaaaagcaactcctgcctcccttcctcaccctgtctctggatttcttttctatcacctagatgcttcatccagccagaagatagccttcacgttccccatctgtcttcagagcaaaagagctgggacaccaagaacaagctgttagatcactgcctgggaggcttggcttagtactctcatctctggttccattccagttcagctaagtcttgctttaaaatttttacctcctagctgggtgcggtggctcacgcctgtratcccagcactttgggaggctgaggcgggcagatcacaagatcaggagttcgagaccagcctggccaacccagcctggtcaacatggtgaaacctgtccctactaaagatacaaacaattagccgggcgtggtggggtgcgcttgtaatcccagctactcaggaggctgaggcaggagaatcgcttaaactccgggaggtagaggttgcagtgagccaaggtcacamcattgcactccaacctgggcgacagggcgagactctgtytcaaaaaaaaaaaaawttacctcytctgcaggcawaggatagcccactat

SEQ ID NO: 43906 - DNA, 525 bp, Homo Sapiens
cttagcgactcagatatctcaaccaatggctgctttgttgtctgacaagggagaaggtggcacttccgttcagattcattttgctaatctctccactccctgttcagttggttctttttttggggttttgttttgttttgttttgttgttttgttttttcctttaaagaggatttctgtctctgggaccctcgctgcacctacccctcccattgcaaagccaacttggactgggaagggcccttcaggtcaccaaacatccacctggagcggcgagctagaggcctgttggcttgtgaaatgagccctcctgccacacggggcctctcccaaaggctcatcccttggccgcccccttcctaaacacaaggatccccagctggactccccaccccctggcttccccacctctccaggtgtcaaaggtgaaccgagtccagtattagctgaatgtcatttcgtacaccacagctcagtcagcccatggccttcgtgaactttgctccaacacactgatgtgtgggct

SEQ ID NO: 43907 - DNA, 594 bp, Homo Sapiens
ttttttttttttttttttaacaatggaagacactttattattattatttttaatcatctctcaacatttcaactcttggtagaaatcaaatgtaaaacatctgcatttttaaattagcatgtatttaactatctcaatcacagcaacctcatccagtaagatgcacacctgggagcagggctgtagtatttcgtattccagtctgtgaccacagtgcgtccgtgatgacaggtacactggactttccctcctaggatgtgttagtcattcctgcttttgtccatagggtaagttacgtggcatcacggttggttagaaagagttagttactgtaatgctggcgcaatctggaaatggaaaactagaaaactagagctctcaggagtgggccaggcattgccgattctgaaatgtgaaaaggaagaacatcaaagatgaatgccctgctaggctggtcttagttgtaaagttggttgaaattctgcttaatatacacactgtacatctacatgtgatctaccagatagatatatatatatatatatatatatatatatatatatatatatatatattaaaaagagagccatagaa

SEQ ID NO: 43908 - DNA, 620 bp, Homo Sapiens
acaaacctcattcttcattggataacttgaaggctttgatttctttaaaaatttaaattttagtgtgtatatgactttgacagttccctcatctttgagatgcactgatcactgtgcttgaaaaagacaatactgaagattgtactatgaagtttattgaataattttcataaattatttatccaaatgagagatttttagatttttgtattctgcttagttttaaaaaaaaaaaatagtagtttaaaagagaggctagtaagtttgatgctattcttgccaaacaaactcagccaaaatctttaaagtaacaagagggaaaaggatgactaatcgttctgcttctgagtacattttccaaaacgttggaaagaaacttctgaattgaaatcttgaatgtattgaatctgtcaaggtacacagcggtgcctttgtaaatgttcattactttatttaatcaggtgataagtggtgtaatgtagcaaagcttaagaatagaactcaattatcactttttgtgaacaagttggaattgtcatgttactgtgtaattgatttgctttacaatgaacaataaatttaataaaataaaaaaaaaaaaaaaaaaaaatcgctcatcg

SEQ ID NO: 43909 - DNA, 604 bp, Homo Sapiens
ccacgcgtccgataaaatatataaatatatatatatatgtcaaaaggtaggaaatgcaaaaaagaaaaaaaaaaaaggtgacagccgcagttggtgctgtgatggccgtgaagtgtcctgggcctcccgaggcctctgacaaataaacaagccatgagtggtgaggacacagtctccttacagtttccattgccaacaacagccatccatatttcttttttcctttgtctttctttttcctttttttttaaaaaaacaaaacaaacaaaacaccttgaatcaagtttgtttgtatatggaggttccacgtctttctttaggcagggaccaggcaggacttcagaaaaaccctcatgagcacattgcaaagatgttagacatgaaattttaaatgtagtttgtacagaagtcacacttttttgtccacctcacagatgtgaactttactttgttttaaaactgatcagttttgccaaggggccagaattattccttgttagaattgctccagttcaagtctgctgctttcctacaatttttcaaattttataatgtattaaatacaataaactctgtttaaaaaaaaaaaaaaaaaaaaaaaaaa

SEQ ID NO: 43910 - DNA, 651 bp, Homo Sapiens
ggtcttctctgggctgcgtggggccggagcagaggtgagcagcaatgcactggttcgggagcccccatcagcctccttgtgcaaactgggcccccatgccacagtctggctttccctccatctgccccaggacaagagcaagaaggacatcagttgcccagtcatgtgatcccctgccatcttgccttaggaacagccttcccccaccagcagccatggctggctggggctttagccaagccacctactgccaggaattggagcctcagttccctcctgtgtcaagtagctaactgcagcagctggactgagggcagagtctgtgggtgcagagaccctgcatgtaggtcacaggttgaggcccagccactctccctggggcctggtgggtaggcaagtagctctggggccacctcaagtgaccaaatgctattaatttccatcctttagcaggctgggccctaggcaggaagctggcttctgggagaggagtgagaacgtgcagggcctgcctagcttgcgtgcttgaggaaggtggcattccgtgcttgcctccttgaggagggtggcattctgtgtcttctgcttatgaagcgcctttcttacagtttggcaataaatccatttttatggaaaaaagaagaaaaaaaa

SEQ ID NO: 43911 - DNA, 971 bp, Homo Sapiens
gatgaaagatggaagcaggacagagaaactggtcgattttcaaggccctgtgagtgcctcgtcgtgcgtgtggccccagacctcggagaaaggatcacgctaagcggtgacaaatccttgatagaagaagtatttccagagatcggcgacgtgatgtgtaactctgtcaatgcaggctggaatcacgactcgacgcacgtcatcaggtttccactaaatggctactgtcacctcaactcagtccaggtcctcgagaggttgcagcaaagaggatttgaaatcgtgggctcctgtgggggaggagtagactcgtcccagttcagcgaatacgtccttcggcgggaactgaggcggacgccccgtgtaccctccgtcatccggataaagcaagagcctctggactaaatggacatatttcttatgcaaaaaggaaaacacacacaaccaataactcaaacaaaaaagggacatttatgtgcagttgggacagcaaaccaagtcctggacgtaaaatcgaataaaagacacatttatatccaatagagaccacacctgtattcatatgggaacaattggaatagtgatatcctcaaggtgtaaaaaatatataaatatatatatatatgtcaaaaggtaggaaatgcaaaaaagaaaaaaaaaaaaggtgacagccgcagttgggtgctgtgatggccgtraagtgtcctgggcctcccgaggcctctgacaaataaacaagccatgagtggtgaggacacagtctccttacagtttccattgccaacaacagccatccatatttcttttttcctttgtctttctttttccttttttttwaaaaaacaaaacaaacaaaacaccttgaatcaagttgtttgtatatggggttcmcgtctttctttaggcagggccagcaggattcagaaaacctcatgrgccwtgcaagatgtarmatgaatttaatgtgttgt

SEQ ID NO: 43912 - DNA, 904 bp, Homo Sapiens
tggccggagtagtcatcattgtgatcctcctgattttaacgggtgctggccttgccgcctatttcttttataagaaaagacgtgtgcacctacctcaagagggcgcctttgaaaacactctgtattttaacagttagtcaagcccaggaactagtgatatgaaagatctcgtgggcaatattgaacagaatgaacactcggtcatctagtacctcaatgcgattctgagatatttgaatttcataaaattgtaactgaaatttaaaatttttagttcaatgtgattgttttctttaaaatgagtactgaattgtactggtctgtccttttttcctttgcctaattgaagaaataattgcttgttttctagcctggcaagatattttcataaaagagggataacaatgctgattactaccttttaaaatattttagataaatgcacagcaccacagcaccacatctaagcattagtgatgggtagctgatgtcagcttcatgtggattttaagcactctagaaacaatgaagcttcttggcatattttaaggagctcccaaaatgtgttacctattaaattgtaactcagcaagtagaagaccatttgaaaagtcaggtacaaatatcctcaagtggcataaaaatgtagtcagttttctcttttaccagtttttatttccactccaattatttagaactttatttgtacatgtgcagaagaataaggcagctgagaatcttgtttcccccaagagagttttacaggctgagtgttgcaaatgtgttctttgtcctgttatatgtatatcaggaatacaaggatgtgaaataaaactgtaaatttgcataactggatgtacttagataatgtgaaataaacattaaagacaaggtctatttttaa

SEQ ID NO: 43913 - DNA, 634 bp, Homo Sapiens
tcaggtgcaattgagagagcgttacagccctgcatttgagataagttgccttgattctgacatttggcccagcctgtactggtgtgccgcaatgagagtcaatctctattgacagcctgcttcagattttgcttttgttcgttttgccttctgtccttggaacagtcatatctcaagttcaaaggccaaaacctgagaagcggtgggctaagataggtcctactgcaaaccacccctccatatttccgtaccatttacaattcagtttctgtgacatctttttaaaccactggaggaaaaatgagatattctctaatttattcttctataacactctatatagagctatgtgagtactaatcacattgaataatagttataaaattattgtatagacatctgcttcttaaacagattgtgagttctttgagaaacagcgtggattttacttatctgtgtattcacagagcttagcacagtgcctggtaatgagcaagcatacttgccattacttttccttcccactctctccaacatcacattcactttaaatttttctgtatatagaaaggaaaactagcctgggcaacatgatgaaaccccatctccactgcaaaaaaaaaaaaaaaaaagg

SEQ ID NO: 43914 - DNA, 523 bp, Homo Sapiens
gggagtgcattgagagatgatgtccatctgatatattcctgtgaaataaactgccagcaaactttctaacttgtattttaactgttaaagaagagattaaaaacttcggctttggacatgtccacattatggactgtcatcttatttttaaaagtcattctttacgtttaaaattttaaaataaaaaccttctgaggtattgatgtagtccaccgtgtaaatgttaccttctctccatgctgccattatgccaaaacaaaagctgtgataaaaaaagtgcttgagagagtgtgttgataagaaagtgatttatttacagatggaagtctttgtttcatgaagctaccaaactttaaaaagaatgtcacccttttttttgtttgttatggaaaccagagattgtaaaatggaaaaagaatcgttttttttgttgactttttgatgctggcacgaggtttttgtccacttttttcatatatctgtgtataaaaaaattgttgtttactatggaattagtattaca

SEQ ID NO: 43915 - DNA, 608 bp, Homo Sapiens
  misc_feature (186)..(186): n is a, c, g, or t
  misc_feature (512)..(512): n is a, c, g, or t
gcacgaggtcttgctgtttaatagttacattatcacaaaaacaagccctattcatgattgaggactatgggaatagtgacttcttgaaggagggaccaaactttcctaaaactgggtactctcaaatagtgggtggtatttcctattctatttcagtgacgtaggttgggggtgaatgtaaaatanacatcatattactaaatagaatcctataaaatgcaatcacaggtgggcgggagtactagttttaaacatttccttaacaaggagaagaatccagcaaaaagctttctttctctatacagtgtatatctctaaactttttttcctcagttttagagaacatctgttttatctggtggttctttgtttgaatgcaaactcataactttcaagtctccggtggaagagcataatctacagatcatgggcaaaatctagccacagtcctgagagtccaggcttctgggatgcccagctgggtataaaagtccctactaaccctgtttcanattcagaggtttctttggtttagaatgcctcaatgagattttgatacatccaagagagaaaaaaaaaaaaaaaaaaaaaaaaatgcgggattgggg

SEQ ID NO: 43916 - DNA, 693 bp, Homo Sapiens
gttcttccggaacttcagacagattcagccgaatactcaagcacatcttgacccagaggagctactacccactctacccgccccaagaagacatggccattgactatgagtcgttctatgtttacgcacagctgcctgtcaccccagatgtcctcatcatcccgtcagagctgaggtacttcgtgaaggatgtcctcggctgtgtctgtgtgaaccctgggcgccttaccaaagggcaggtgggaggcaccttcgcccgactctaccttaggaggccggcagcggacggggcagagaggcagagcccatgcattgctgtgcaggtcgtcaggatctgaggcttctgtcctctgctgttctctgctgtgtgggcccttaaagtcttagccaagagccaagacatagccctgtgacaaggtgaacagttgggtgggaaaggagagaggagccagccagggaggggcagctgcagtgaccaggcccagcagggaggacttgtgcagccgggcctgcctctgagtggtgcctctcctggaaggaagctcttgcttctcagtccatgctccgtgtccagaagtaagccagctgtggatcccgcccactcagaaaaggcgagaaggctttgtgattttctacatgaatcaaacacagagacaacttttggagaaattaaattctgagtgtgactkctga

SEQ ID NO: 43917 - DNA, 853 bp, Homo Sapiens
  misc_feature (705)..(705): n is a, c, g, or t
  misc_feature (758)..(758): n is a, c, g, or t
  misc_feature (762)..(762): n is a, c, g, or t
  misc_feature (772)..(772): n is a, c, g, or t
  misc_feature (790)..(790): n is a, c, g, or t
caccaaaccatttgtagagctacaaaaggtatcctttcttattttcagtagtcagaattttatctagaaatcttttaacacctttttagtggttatttctaaaatcactgtcaacaataaatctaaccctagttgtatccctcctttcagtatttttcacttgttgccccaaatgtgaaagcatttcattcctttaagaggcctaactcattcaccctgacagagttcacaaaaagcccactttagagtatacattgctattatgggagaccacccagacatctgactaatggctctgtgcccacactccaagacctgtgccttttagagaagctcacaatgatttaaggactgtttgaaacttccaattatgtctataatttatattcttttgtttacatgatgaaactttttgttgttgcttgtttgtatataatacaatgtgtacatgtatctttttctcgattcaaatcttaacccttaggactctggtatttttgatctggcaaccatatttctggaagttgagatgtttcagcttgaagaaccaaaacagaaggaatatgtacaaagaataaattttctgctcacgatgagtttagtgtgtaaagtttagagacatctgactttgatagctaaattaaaccaaaccctattgaagaattgaatatatgctacttcaagaaactaaattgatctcgttanaattatcttaataaaataatggctataatttctctgcaaaatccagatgtccncatnagcgaatggntaatacctaataaactgncctcaattaaatccatggttaataaaatgtggtttctacattaaaaaaaaaaaaaaaaaaaaa

SEQ ID NO: 43918 - DNA, 514 bp, Homo Sapiens
taaaattaccatattgtttttttatcttatacttagctctctggctattgaacttccttttcttgtttgaagttagcttcaaatttgctcctatgctaaattacctgtaaatattctggataggaactacttgaaatagtaatttgttaaaagatatgacaaaatgaaaatgcttaaactacagaaatttaaaaatgccataacaatcttgcaagactaactttaaaatatactttaaatgattattatgattttggtggtaacgatcccccacacacaaccactatgaagaaataatgccgcatttttcccccattgtaccaaaaagataaaaaaatggtaaacactgatcaaggtattttgtattgtcaaggcatgcatattctaaagaattaaatgctaacttaacagcactggctttctggctggtcaactatatgaaaccttgttcattcctccgagtactgtaatgttcacacttgtacaatcttccctgtcatgactttaagttcta

SEQ ID NO: 43919 - DNA, 934 bp, Homo Sapiens
  misc_feature (564)..(569): n is a, c, g, or t
  misc_feature (612)..(612): n is a, c, g, or t
  misc_feature (618)..(618): n is a, c, g, or t
  misc_feature (636)..(636): n is a, c, g, or t
  misc_feature (647)..(647): n is a, c, g, or t
tctctttttactctcttcctcccacccccaagactgagttttggggggcaaggtggagagagctggcaactactgtgagcaagtcccctagcccctgaccagcctcctcccatgactggtgactgtttaatgagctgtgcatcccccacaaaaacatgagtgcccctctgtgtggcctctaaccctctgcacagcccttctgggtggtcctcaccaggtctctgagctgggtgggaggccatcctggcgaccactgcccattccattcacccctcactgtacctgccctagaacctgggcctaggccacaggggcagggagaagagaaggcattagtaagaaaaaaatagaaaaaaatatgaacagactcagctttgggacgtccaaccacaaaagaaattatatataaatatatataaatatatatctctaccatatgtgatggaaagactttttgttttcctttcccaaagaaataaaacggaaaaagccaaaaaaaaaaaaaaaaaaaaaaaaaaaaaaaaaaaaaaaaaaaaaaaaaaaaaaaaaaaaaaaaaaaaaaannnnnnaccccaaaaaaaaaaaccacaaaaaaaccccaccctccccccnaccccnctcccccaacaaaaaacncccccaaaacncaaaggggggggccgcccaaaagaatcccccggggggggcccaaatttggggccccccctttttttttagaaaaagggcccccccaagggggcgttattaatagggggggggcggggggcgcttttttacacccggggggggagaaaccccacccgcctggggatatcttgaaagagaaacactattttgtgggggggggggaatttgggcccccccccccccccgaaggctctcccccccgcggggaaaaaaaaaaatttctcgcgggggcggggggcgccacccc

SEQ ID NO: 43920 - DNA, 839 bp, Homo Sapiens
tctagcgaggtgacagcgtagaaccaggcagcagcttcacaaggggccccaattcaagcaggtttttgagatctccagtggagaagggtttttagacatgattgataaagaacagaaaagcattgtcatcatggttcatatttatgaggatggcattccagggaccgaagccatgaatggttgcatgatctgccttgccgcagagtacccagctgtcaagttctgcaaggtgaagagctcagttattggcgccagcagtcagttcaccaggaatgcccttcctgccctgctgatctataaggggggtgaattgatcggcaattttgttcgtgttactgaccagctgggggatgatttctttgctgtggaccttgaagcttttctccaggaatttggattactcccagaaaaggaagtcttggtgctgacatctgtgcgtaactctgccacgtgtcacagtgaggatagcgacctggaaatagattgaactgatagtctagttgcatagatttctcattgtttgggttggaatacacgtcattgtttatttttgttcctttgtcttctggcttttcagctgttctttgtagtcccttttattatgcctaaaataaagaaattcctagattaaatcggaatgctgaataaccttgtagctagcaataaggtgaacttacgttgtataaacagggaagcccgggcttttgaactggtttacttaaaaattcgggggtgtggacatccccggttatttggtttccagtcaaatattttaaaaagcattcctaaaaacaagggcctttggaaaattgttcttccaaaggaatcttagaagggct

SEQ ID NO: 43921 - DNA, 593 bp, Homo Sapiens
aaacttgatttaactcagtaagaatgtgaattatttgttctacttgggtggtttaatttaatcgttctgaatatgaacaaaaggttttggattttctaaagatgcagtgttgtttctgttcatcagggttaatatttctaactatattgcttgtaggtgaccccattctggatttgtttggtttggtttggttccagttaaaagagaggacaggaactaaatggggctaaccacttcaggtgcagcttgtgcgagggtagatggttcctgcacacagaagttaccacaggggtcaggttactttcttcaaatagcagatttcagtactttatcctcattgtggaaacaagccaaaccaaatgaactctggaaaacctaaaacaaatgtacattttcctttgtgtatgtttccgtggtccaaatggcaatataaatccagtctttattctccctttgttgtatttatgctgaatcttccctttgccttttcaggatttaggcctgtaagaaactatgcctgattctgtaaaataagtgtaaagaattatatgtacatctctggattttgtgatgaaatattaaaaatattgagc

SEQ ID NO: 43922 - DNA, 574 bp, Homo Sapiens
cttcggctggcgctccacgctgctgaaacatcgcagcagccacagcggggagaagccgcaccactgcccggtgtgtggcaaggccttcgggcacggctcgctcctggcacagcacctgcgcacgcacggcggcccgcggccccacaagtgcccggtgtgcgccaagggcttcggccagggctctgcgctgctcaaacacctgcgcacgcacacgggcgagcggccctacccgtgtccgcagtgcggcaaggccttcgggcagagctcggcgctgctgcagcaccagcgcacacacacggccgagcgcccctaccgctgcccccactgcggcaaagccttcgggcagagctccaacttgcaacaccacctgcgcatccacacgggcgagcggccctacgcctgcccgcactgctccaaggccttcggccagagctcagcgctgctccagcacctgcacgtgcattcgggcgagcgtccctatcgctgtcagctctgcgggaaggccttcggccaggcctccagcctcaccaagcacaaacgggtgcatgagggtgcagccgctgctgcagctgcc

SEQ ID NO: 43923 - DNA, 800 bp, Homo Sapiens
  misc_feature (701)..(701): n is a, c, g, or t
  misc_feature (786)..(787): n is a, c, g, or t
  misc_feature (800)..(800): n is a, c, g, or t
gatgacagcaaaacgtaaacagaaattgaaaacttgaaggatatttcagtgtcatggacttcctcaaaatgaagtgctattttcttatttttaatcaaataactagacatatatcagaaactttaaaatgtaaaagttgtacactttcaacattttattacgattattattcagcagcacattctgaggggggaacaattcacaccaccaataataacctggtaagatttcaggaggtaaagaaggtggaataattgacggggagatagcgcctgaaataaacaaaatatgggcatgcatgctaaagggaaaatgtgtgcaggtctactgcattaaatcctgtgtgctcctcttttggatttacagaaatgtgtcaaatgtaaatctttcaaagccatttaaaaatattcactttagttctctgtgaagaagaggagaaaagcaatcctcctgattgtattgttttaaactttaagaatttatcaaaatgccggtacttaggacctaaatttatctatgtctgtcatacgctaaaatgatattggtctttgaatttggtatacatttattctgttcactatcacaaaatcatctatatttatagaggaatagaagtttatatatatataataccatatttttaatttcacaaataaaaaattcaaagttttgtacaaaattatatggattttgtgcctganaataatagagcttgagctgtctgaactattttacattttatggtgtctcatagccaatcccacagtgtaaaaattcaggaattcnnatgaaaaagtctn

SEQ ID NO: 43924 - DNA, 596 bp, Homo Sapiens
cagtccaaagagcaaatcatattacataattacattttaattaaatatagaatattctactgaattgcaatttattaaatattcttatcctcttaaataaaactgctcaacagttaatcagcagtgaatcatcttgcagctatgcaatttaaaaaaaatacagattaccaatttcaagtgctgccagctaaaataactgttttaacgggtatcttttgtttgttcttttcacttaattattttattgtgctttgcatctccaggcagttctctcacatttgggtaaaatgtttagcaggctgtaaacttaagaaaagggtaaaataaaattttctggagaggaacttggaatttgagggagattttatatacctttaaaaactgtaatttaattgggatgccaggtttatagcaatttgcaactttaattttccagataatctcgaggttagcatttgataaatgattttttaaagttagatttgaagatttttgtaaattataaattattcatggggtattaccggaattgaaaatgttttagcacttttaaattcctttgtgtagaaaagaatgtggtaaacaaattatgttaa

SEQ ID NO: 43925 - DNA, 957 bp, Homo Sapiens
tttgtgtcgctcttccgcatccgcaccatcatgaagcacgatggcaccaagaccgagaagctggagaagctcatggtgcgcattggcgtcttcagcgtgctgtacactgtgccagccaccatcgtcatcgcctgctacttctacgagcaggccttccgggaccagtgggaacgcagctgggtggcccagagctgcaagagctacgctatcccctgccctcacctccaggcgggcggaggcgccccgccgcacccgcccatgagcccggacttcacggtcttcatgattaagtaccttatgacgctgatcgtgggcatcacgtccgggcttctggatctggtccggcaagaccctcaactcctggacgaagttctacacgaggcctcaccaacagccaacaaggcggacactaccagtctgagacccggggctcagcccatgcccaggcctcggccggggcgcagtgatccccccaacccagcgccgcgcgattcgtgccaatcctgacatctcgaggtttcttcactagacaactctctcttccaggctcctttgcaaaactcagcctccctgcacaagctcccgttccctgcccgcaaaaggacacgagggccccgactgccacagggcaggattggacacacctccttgtcctcacactttgggcccaacgcactgtctccctttttatgaatcgcaccccacccccgggcaaagacttctttggaaagcacccttccgtatcccaaactgagcgacccggatttcacccgctttcttcccttcttacaaaaggtctctgtactccactctcacgcgcgggccttcaaccccttttgaagggcctccttccctttctttgcgccgtttcctccgcgactcatttctcgcaatcgccgctgttcaccactgcggtgttcgcgccaacccgcccaccccgtgtggcctgccttgtgt

SEQ ID NO: 43926 - DNA, 607 bp, Homo Sapiens
gggtgataacgttgtagacagtcacgtcatgttaggtgtctgtactccatgaggatgagaactctaaatgaggtggtgtatggaaagccgatcataattcatagagtagagtgaacctatgactgcagtggatctcaaaaacttttaaaaccatagacaagccttatagagtagaacattcacagcaaagaagaatcctgtgaatgtccaaaagccttccagaagtcaagtctcttaagctattagaaatattcccactggggatgagggaaaaccccatgaatgcgggaaatgaggcaatatttttaagaaatgacagttcattgtacataagaaaatgctcttaggaatgaagttctatgaaagtactaaatatgggacagtgcaacaagtaaccagactatttgtattttggagaattcatattatggagaacctaacaatttaaagacactgggaacacttgcccctcagtatagtactgtcaagggaagccatacactttttgtagacatgggtaccaaaaatacccaattctaagtggttgacagatgttcactttgaagtgtgaagttttaaaaatacgtgaataaataggttattgaaa

SEQ ID NO: 43927 - DNA, 751 bp, Homo Sapiens
  misc_feature (616)..(616): n is a, c, g, or t
  misc_feature (696)..(696): n is a, c, g, or t
  misc_feature (729)..(729): n is a, c, g, or t
cttgctctgttgcctaggctggtcttgaactcctgggctcagatgatcctcctgtcctcagcctcccaaaatgctgggagccaccaggcaccaggtgtgatctaccacacctgtctaaaaagtatgtatttttaaatttttttgtagagacaggatctcactatgttctccagctggtctcaagctcctggcctcggcctcctaaagtgctgggattacaagtgtgagccactgtgcctagtcactttaattgagatattggcaagtcaactgccatgcagagcccagggcactggttatattcagtaagaaactgaactcagcactcagaattttaaattaaatcaatgatcttcaagtatttgccactttcgagtacagctaattggataatctcaaaccctttagtgaaaatatcttaaatgcattgagaatattttctaattacctgtgtatgctacagtacagacattaattctataaacatgttcataggtcttccccctcgccccgcccgtcttctaagggcattttctttttagtgagttcatgaatgtttaacggttctggtgcaaagctttcttgcattctgagcataaaaataataaaacccacnttatatttgcttgagtgtgtttacaagtcaatttccttttatgtagcttgctttttcatttgctataattgatccctgcnaggtgtgtgaattattaaactaacgctcttttnaaccacaaaaaaaaaaaaaaag

SEQ ID NO: 43928 - DNA, 592 bp, Homo Sapiens
gtgcttggaagtgtcatctaccctggccatccccgggatccctcccctgctaatctgaactgtgtcctgaaccccagctattggccaggcccctgttacaaactgcgcagaccacccgtagccctgctgctgccacctgccctgctgccaggcttacatcttcccagagaactatgctgccacttcacatccactcaccacatcccacctacagactaccacctttcgagatcaggaccaacctggaaaatgccagagttggctatgccttttcagacattgatttggacagctcaccaacccctgaaggggccgttcagcctggttagttttctacctactccgagtgtcctcccctgccccaccagattgctgcaggggcgcggtgtgcctggcagccaaattgttgacacttcttttttcctatgcactggttttacacagctgtcatttttctttcaaaattgcagcagtcccacagatgtgtgcatttggacaaatagtacttaaaaacaaaacaaacaagcactcagcccagctcctcaatactacctggaaaaagcattggcattattttcaataaatatcaagc

SEQ ID NO: 43929 - DNA, 571 bp, Homo Sapiens
ccacgcgtccgtcgacccacgcgtccgcccacgcgtccggacccacgcgtccgatcccaacccatgactttggagatatacctataaaaccaatataacagcagggttattgaagcagctttctcaaatgttgcttcagatgtgcaagttgcaaattttattgtatttgtagaatacaatttttgttttaaactgtatttcaatctatttctccaagatgcttttcatatagagtgaaatatcccaggataactgcttctgtgtcagtcgcatttgacgcataactgcacaaatgaacagtgtatactcttggttgtgcattaacttacatgtataatttttggcatctgtgttcacaaatgcatgtgttagcaaatcacctttatttataagtgacaataattgaagttaaggatataaagaaacctgcatttgtagtccagcgttttcatttggtccataacacaatgtatggaaatgtgaaagacaattttgtacatttgtttgttactaactcagatcattaaaaatgaaaacaatttttttaaacaagaaaaaaaaaaaaaaaaag

SEQ ID NO: 43930 - DNA, 644 bp, Homo Sapiens
cctaaattggttttggataagtttgagcccttgaccttaatttcattgctaccactctgatctcttagcacatttcttaggattaagggtccaaaaatgctgatctaaggggttgccatggtgttgaacaatgcaactttttatttaaaaaagctctgcactgccatgtatgaaagtctctttatgatgtttgtttttttgtcatttttgttctttacatcaagaaattttatgtttaaatatgcggagaatgtatattgcctctgctcctatcagggttgctaaaccctggtacatcgtatataaaatgtattaaaactggggtttgttaccagttgctgtactttgtatatagaatttttataaattgtatgcttcagaaataatttatttttaaaaagaaattaaaagttttaaactcacatccatattacacctttcccccctgaaatgtatagaatccatttgtcatcaggaatcaaaacccacagtccattgtgaagtgtgctatatttagaacagtcttaaaatgtacagtgtattttatagaattgaagttaacattcttattttcaagagaatttatggacgttgtagaaatgtacaaatgcatttccaaactgccttaaacgttgtatttttat

SEQ ID NO: 43931 - DNA, 623 bp, Homo Sapiens
  misc_feature (513)..(513): n is a, c, g, or t
aggaacctccgaacagccaggaaaagccatgagttgcaaccaaaacgcggctgaggatggaactcagaatgaaactgcaacccacctgcccccagccctgcccctcgccctgatgcgaagctggagaggggcgtgctgcggggccctgatgcccccacccacctcggtccagcgcggccctgcccaggaggcggcagccgggtgcaccctcgccagccctgctggagtttgctgtgggcactgaggcgcgggcgcccttccaaagcacatactcaccgaatgtttacagactggctgtcctggcagggctttcaactgcacatgttttttatactttcctttttttttttttttttaatattttttacaaaaaaaaaagattttatacaagcaatatatatatggatttctataatcactcgatgtgatacagtataaatatgctatggtttgtttgttatgaacagatagccaccagttacggccattgtgtgtaactcctaagtactgtantctctgggtgtcgggggtggccaaggcgggggcggggtgcatttccatccttgtaaacccttcatagtactcagtcctgtatcgctcagtaaacattgctcttacttaca

SEQ ID NO: 43932 - DNA, 907 bp, Homo Sapiens
  misc_feature (715)..(715): n is a, c, g, or t
  misc_feature (799)..(799): n is a, c, g, or t
  misc_feature (823)..(823): n is a, c, g, or t
  misc_feature (871)..(871): n is a, c, g, or t
aagaggaccagtcaacttcagtatatatacaaaggaaagacaaagagatgataaaccaaggctgaggaaatttttctgatgctttcttcatttctctaatataccttttgcattctttttctgataattgtgctattaggcagaagacacaagttaccacgttgtgtattaaaagcagtaggtaggttgtgccagtattttttcagccagtaagcatatacagttaacttatataattaaaaattggtttaagatagtgattaaaaatacctgaatattatgttaaaagtatacaatcattgtttctgtaatgatgatgggtattctgcttcttgtttttcattgtaattacaggggaagattgtttttgaaaatgtatattgccatgcttttggggtaagcagtaatgtgaaaagaaaaaagcattatgttattgtatgaaatataagtgttcagatttgttttgtctggggtgttgcctaagaataccctaaagctatggctgttactgcattgaaatcttttttttttttaatagtagccatatgttattagtggagtactttatatttgacattaaagtgaagaagaagagtagtacttcacttttaggtttttagtagtgaaagataaaattggaaaaatagggaaagagcatagggaggaatagaatggaagtcaagtaaataaaaaactacaacctgacagttttttnaatcactttgaaaagtacattacttttatcaaagagtttctaattaaggcaaactatgcattatgccaaatattaagaacattntaaaaaatggattgggatactgtntaatttcttttacttaaataattttgcaattttcctgggattataagnggcctaccaggaattcctagaatagattgaatctta

SEQ ID NO: 43933 - DNA, 940 bp, Homo Sapiens
  misc_feature (812)..(812): n is a, c, g, or t
  misc_feature (890)..(890): n is a, c, g, or t
tagagcctagaggttacttgggaccacctcatcagggtccacccatgcaccatgtccctggccatgagagccgaggaccacccccacatgaactgaggggagggccattacccgagcccagacctctaatggcagaaccaagaggacccatgctagatcagaggggtccacccttggatggcagaggtggaagggatccccgaggaatagatgcacgagggatggaggcccgagccatggaggcaagagggttagatgccagaggattagaggcccgtgcaatggaggcccgtgcgatggaagctcgtgcaatggaggcccgagcgatggaggcccgtgcaatggaagtccgagggatggaggccagaggcatggataccagaggcccagtgcctggccccagaggacctatacctagtggaatgcagggtcccagtccaattaacatgggggcggttgtcccccagggatccagacaggtcccagtcatgcagggaacaggaatgcaaggagcaagtatacagggtggaagccagcctggcggctttagtcccgggcagaaccaagtcactccacaggatcatgagaaggctgctttgattatgcaggttctacaactgactgcagaccagattgccatgttgcctcctgagcaaaggcagagtatcctgattttaaaggaacaaatacagaaatccactggagcaccttgataggttttcaaaaatacctggcaagaaatctggaaattctataattttgttgaaatattgaaaaaagatgacctgcatcctaacccttgaatgactcanatcagtgcgccaggtggaggactccccatcacctttctctcagaaacaaaatcaccttcatttttaattggctttagntttggaatattttcccgggggacttgaaaataaaacttttgaaccccaac

SEQ ID NO: 43934 - DNA, 928 bp, Homo Sapiens
  misc_feature (672)..(672): n is a, c, g, or t
  misc_feature (676)..(678): n is a, c, g, or t
  misc_feature (680)..(680): n is a, c, g, or t
  misc_feature (684)..(684): n is a, c, g, or t
  misc_feature (702)..(702): n is a, c, g, or t
  misc_feature (704)..(707): n is a, c, g, or t
  misc_feature (709)..(709): n is a, c, g, or t
  misc_feature (711)..(712): n is a, c, g, or t
  misc_feature (716)..(716): n is a, c, g, or t
  misc_feature (730)..(730): n is a, c, g, or t
  misc_feature (733)..(735): n is a, c, g, or t
aaagatagtggcaatttcatatatttcatggatacttgagtttgtgcttttaaggtgtttgtttagggatacaatgaccactagatgtcgctgtttatccagtagactaagattgagtgttctttttgttcagcaactcttctaaaatgtttcaagcaaagatagtaatgacctcagtttctgaaataagggcatcttcatcagattattcttctgttttaaaaaaaagcttgaggcaaatgtgagtgatttccagtgctttgaaagggattacagtatcacacaatgtcaagctagagttaaacacagtattagctaaataggcacttatgtgtattttctttttcatgattatcggtgactggtcagtgtactcatcaatttccaaaatttgtataaatatcacaattagaaaaatgcctgaggtactaaagttatgttggctttttgtgtcttaacacacataaatactattgttattgcagcagatgccttttgaatccattttccataattgcggatagtcataaattgcttgctcaatttttagtaattattgctgttgacaccagcgttgtagatttttggtgttgttgaatgcagtagagagaccaagacactattctgtaagatcaataaaagtaattggaaaataaatatgaaccctaaaanaaannnanaaanaaaaaaaaaaaaaaaaanannnnanannaaanaaaaaaaaaaaaanaannnaaaaaggggcggccgcctctagaaggttcccctccggggggccccaaggttttagggcgtaccccagctttttcttgtacaaagagtgggtccctaaatagggaggccgtatttataaaccttagggcactgggcccgtccctttttaaccaccctccgtgacgtggggaaaaaacctgctttccttgggggt

SEQ ID NO: 43935 - DNA, 897 bp, Homo Sapiens
ggacgcgtgggctgaggggctccaaagaagacaatagttcccactcatgattttccgttacaaacaggcagctggggcatggttggcctccaatgatttcattcaaggccaaagtcctgagccccctccgctggtcccagtccagctcttatcaactccccaaaggaaaacccactggttcttagctctgtgggtaggaaggggccctagaaagggcctagttactatcctgtcagttctaacagtagtggaacaggagaatctgggccctaggagccctgtaactcccaggagagaccactgaaaatactggagcaacaatgcccctgcttccatttctccccacctcactctcaccaagtcaccagagggtggttctgtaggacctcttttgttgcttaagatgcagatggctcttaagaatcaggcagtcgcccacttctctccagatgaagggaagacattcataggtcccaaatctgcccattcagatgtcacataatatggtgggatatcaatttacttcttccacacatgtggttgtgcacatgtgagcttgtgtgcttttggagagaatgttgattggcaaaagcagcacagtattaatatttagagtaggatgcagcctcttatgcaccacagttaaatctagaacgaacaaaaatttcagagctcaagacatggggacatttaaaatcctcaagggagtttgggaaccaaaattaaacagaatctaaaaaaatttaaaaaaaaaaaaaaaaaaagggccgggcccgcctccttaaaaataatccccctcccgagagggggcgcccaaagcctttaaccgcgggaaacccccaagcttttttccctttggaaacaaaaaggtgggggtcaccccctctaataaggtgc

SEQ ID NO: 43936 - DNA, 720 bp, Homo Sapiens
atttttttaaatttatatttctgcctcctcgtacatccttatatatggaaaaaaaagtaagagttcctcagatcagagctcagtagctgtgtcaatttgaagttcaatcagtgtagttgtcctggggtgatcgctgactctgctctgtttcatatttcagttgcttgctccaaggagagaatttctgagaacaatgggtgttagcaactttaagttactccccaaacgtttgctggccacattctcatttctaaacatctggatctgggtaaaggtttgaatagatgtagggaacaaaattggtttttccatggtgtagtctaattttgccaaatcacccaagaaagaaagtatatgacgtgtggagtttgcatttcttggatgggacctatcgggtcacccagcccagtcttacagtcataaattcctacctcttagttcctgccaaagggccttcagcctctgtgtgcacacttattgaatgaatgctttgcctaaagtttggccttttgaagaaaaacagcatgtgataatataaaaatatgagagtttaaaaaaaaaaaagatctctgcctctcttctctctgcctcgtcccaccttgctgtctgtctcattgtctttctctcccctcaccatgcgctgaattcagatttctctttcttttattataggcatgttgttttgaatgtggactttgtgggagggagaggattgttctg

SEQ ID NO: 43937 - DNA, 676 bp, Homo Sapiens
gagcaaaagtcattacactttgaagtattatattgttcttatcctcaattcaatgtggtgatgaaattgccaggttgtctgatatttctttcagacttcgccagacagattgctgataataaattaggtaagataatttgttgggccatattttaggacaggtaaaataacatcaggttccagttgcttgaattgcaaggctaagaagtactgcccttttgtgtgttagcagtcaaatctattattccactggcgcatcatatgcagtgatatatgcctataatataagccataggttcacaccattttgtttagacaattgtctttttttcaagatgctttgtttctttcatatgaaaaaaatgcattttataaattcagaaagtcatagatttctgaaggcgtcaacgtgcattttatttatggactggtaagtaactgtggtttactagcaggaatattccaatttctacctttactacatcttttcaacaagtaactttgtagaaatgagccagaagccaaggccctgagttggcagtggcccataagtgtcacctaaaagtttacagaaaccttaaaaaaaaaaaaaaaaaccagccccaaaaaccccaaaaattttgggggccctcgcccaaaaagatttttaaaccactttgtggggggggggggcccc

SEQ ID NO: 43938 - DNA, 801 bp, Homo Sapiens
gtttcccccaacatataaaataatgcaaagaatccctagactttaggctttcagcttacacaaatctatttaattaggaaaaaaactattaaggatgtagcttttcacctttactttagaagcacagtaaatatcccaaactgtgatgaagccgaccttagatttagtagtgtaagctagaagaagtgagtgtttctatgagtggaaaaagccaaggtgtcatttatgtgtcagttcatttgtggtgatatagaattagctttttcatccccttacccttagaatccacgtattccccttcccactagcctaggtcataaagaggcgttgctttcactctcctatgccttttacgagtgctaagtgtaggatattttgtcaccagaacacaatgctaccgccccaaagtaaaagaaaccacttctggtcaatcaacactaccagcgtatatataagaaagacatctttctcttttctaaaagacttccctaacacttaccccatggctgcacagttggtggggtcctgccggagaggaagagacactcagaccagagaaggggtgtgcatgcgcctactcgcttgctagaagtagattctggacagtcagctcttcatctgcccaactgtgtagcatctgcattgcccagtctttcatgtgtgccaaggctgatgcaggatttgttctctgtccagcagtcacttcggccagagctgaagagttgcccgtctctgttccatgtctcctttaagagctctggtgataaggacatgatgcttttactgaactttcttatctag

SEQ ID NO: 43939 - DNA, 488 bp, Homo Sapiens
cggggccggacccggtcagggttctcaagctgtcgtccctatggggctgtgttttccttgtcccggggagtccgcgcctcccacgccggacctggaagagaaaagagcaaagcttgcagaggctgcagagagaagacaaaaagaggctgcatctcggggaattttagatgttcaatctgtgcaagaaaagagaaagaaaaaggaaaaaatagaaaaacaaattgctacatccgggcccccaccagaaggtggacttaggtggacagtttcataaagcataacatgagtagaagaatctactgccaataactgtttattatctgcaatcaagtgggcttcatcaatttaatttcttctctttgagtaaatgaagattcagactttgtaatattattgcccttaagtgcaatgctaaaaaaacgttgattttcaagcttagagaatggctagacttttcattaaatactgattttcctacaaaaaaaaaa

SEQ ID NO: 43940 - DNA, 581 bp, Homo Sapiens
cagtagcctgtaaataaaacactcttccatatgatattcaacattttacaactgcagtattcacctaaagtagaaataatctgttacttattgtaaatactgccctagtgtctccatggaccaaatttatatttataattgtagatttttatattttactactgagtcaagttttctagttctgtgtaattgtttagtttaatgacgtagttcattagctggtcttactctaccagttttctgacattgtattgtgttacctaagtcattaactttgtttcagcatgtaattttaacttttgtggaaaatagaaataccttcattttgaaagaagtttttatgagaataacaccttaccaaacattgttcaaatggtttttatccaaggaattgcaaaaataaatataaatattgccattaaaaaaaaattcactggccgtcgttttacaacgtcgtgactgggccctggcgttacccaacttaatcgccttgcagcacatccccctttcgccagctggcgtaatagcgaagaggcccgcaccgatcgcccttcccaacagttgcgcagcctgatggcgtg

SEQ ID NO: 43941 - DNA, 540 bp, Homo Sapiens
  misc_feature (508)..(508): n is a, c, g, or t
caagatttttttttttttcctctttctttctttctttcttttcacatccccaccctcccctctcctgagcctgtctctccctaccctcttctcagctccactctgaagtcccttcctgtcctgctcacgtctgtgagtctgtcctttcccacccactagccctctttctctctgtgtggcaaacatttaaaaaaaaaaaaaaaaagcaggaaagatcccaagtcaaacagtgtggcttaaacattttttgtttcttggtgttgttatggcaagtttttggtaatgatgattcaatcattttgggaaattcttgcactgtatccaagttatttgatctggtgcgtgtggccctgtgggagtccactttcctctctctctctctctctgttccaagtgtgtgtgcaatgttccgttcatctgaggagtccaaaatatcgagtgaattcaaaatcatttttgttttcctccttttcaatgtgatggaatgaacaaaaaggaaaaaattcanaaaacccagtttgttttaaaaataaataaata

SEQ ID NO: 43942 - DNA, 666 bp, Homo Sapiens
  misc_feature (487)..(487): n is a, c, g, or t
tttaatgtaccttcagctctctaaactgtgtgcttctactagtgtgtgctcttttcactgtagacactatcacgagacccagattaatttctgtggttgttacagaataagtctaatcaaggagaagtttctgtttgacgtttgagtgccggctttctgagtagagttaggaaaaccacgtaacgtagcatatgatgtataatagagtatacccgttacttaaaaagaagtctgaaatgttcgttttgtggaaaagaaactagttaaatttactattcctaacccgaatgaaattagcctttgccttattctgtgcatgggtaagtaacttatttctgcactgttttgttgaactttgtggaaacattctttcgagtttgtttttgtcattttcgtaacagtcgtcgaactaggcctcaaaaacatacgtaacgaaaaggcctagcgaggcaaattctgattgatttgaatctatatttttctttanaaagtcaagggttctatattgtgagtaaattaaatttacatttgagttgtttgttgctaagaggtagtaaatgtaagagagtactggttccttcagtagtgagtatttctcatagtgcagctttatttatctccaggatgtttttgtggctgtatttgattgatatgtgcttcttctga

SEQ ID NO: 43943 - DNA, 636 bp, Homo Sapiens
gctggtacgcctgcaggtaccggtccggaattcccgggtcgactactactactaaattcgcggccgcgtcgaccccaaatggagggctgtggtggccagatctggttggcttttgtgggctgacccagacatttaatcaccatctcttatgttgttgccttaagaaatgcattccaggttgggacttgggatcctgagagcacattcgccccctgtggtggccgcttgccaccttgcaagatggaagcccagtctccttactaccaaactgtagttgtaagcagagggaggggtgagatgtttataggacattccctaagctggggagtgatttttatcactattcatgtcaactgtactttggtatagactccctatcaatttaataatatgaaaagcctaaaataaaactatgcatgctattctatgtgctattttatatcagtaaataagcttatgcttgccagttgtatacacagttatgaggtgtatagaactgactttgacagtattttttgcactgtttcctatctgtttttataaagtcttatttagatattggaccttggtgtgttctcactgcccttgtgcttgctattaaatgtttcatatgtgcctttacaaaatggagatctt

SEQ ID NO: 43944 - DNA, 556 bp, Homo Sapiens
  misc_feature (399)..(399): n is a, c, g, or t
  misc_feature (508)..(508): n is a, c, g, or t
ataatttgaaatgtgtgaggtgactccccggagggccttgggcttgggcatttgggaaaagaatgatgtctggaagggcttaagggacacagtggacgaggggagagtcctcatctgctggcattttgtggggtgttagtgccaaacttgaataggggctggggtgctgtcttccactgacacccaaatccagaatccctggtcttgagtccccagaactttgcctcttgactgtcccttctcttcctacctccatccatggaaaattagttattttctgatcctttcccctgcctggtctagctcctctccaaacagccatgccctccaaatgctagagacctgggccctgaaccctgtagacagatgccctcagaattggggcatgggaggggggcntgggtccctgccttacccaatgtcttcgtttgccccgctaggttccccacagagaccaatgacattttgccacttgataccataaataaagttttttgggaattggtgnaaaaataaggggggtaatgataagtattctttcgtgggggggctggga

SEQ ID NO: 43945 - DNA, 814 bp, Homo Sapiens
  misc_feature (660)..(660): n is a, c, g, or t
  misc_feature (692)..(692): n is a, c, g, or t
  misc_feature (773)..(773): n is a, c, g, or t
  misc_feature (790)..(790): n is a, c, g, or t
ggggggagccccacgaggtaatattttgtggtggtgatcctagctcctaagtggagcttctgttctggccttggaagagctgttaatagtctgcatgttaggaatacatttatcctttccagacttgttgctagggattaaatgaaatgctctgtttctaaaacttaatcttggacccaaattttaatttttgaatgatttaattttccctgttactatataaactgtcttgaaaactagaacatattctcttctcagaaaaagtgtttttccaactgaaaattatttttcaggtcctaaaacctgctaaatgtttttaggaagtacttactgaaacatttttgtaagacatttttggaatgagattgaacatttatataaatttattattcctctttcatttttttgaaacatgcctattatattttagggccagacaccctttaatggccggataagccatagttaacatttagagaaccatttagaagtgatagaactaatggaatttgcaatgccttttggacctctattagtgatataaatatcaagttatttctgacttttaaacaaaactcccaaattcctaacttattgagctatacttaaaaaaaattacagggtttagaagaagttttttggtttttcctttttactgtntgggaaaaactactttcccatttttggcaggnaaatttaaccctattttaacaatttagaagctaggcattttcatggttagtctgaaaatttcctaaatggggttcctctgnattttgaggggaagggntaaaaccattcaaaaccaggtttt

SEQ ID NO: 43946 - DNA, 921 bp, Homo Sapiens
agagaatcaagtcagccagctaaagtatcctactgttaaatccttaaacctaattttggaaaagagaaagttaatcaatgtatttaccttacatgttggaaagaactatgttaggtctgattcatgtgaagaagatgttgcaaaggatttatttcacaaattttaaaggagatatgagtaaaagtttttatcttttcttgactttttctcctgaacacttatgtcttagcaagtggtcaacatgaggatttgaacgcctaattgttggtaaatggttgaggcatgacaaaaatattaatatccactgtttaccatcatgttatttgaaacaaaagtgaccatgtatactatcttgcttgaagaagtctttgacagaaaaagcaatatcatgtcatttataaattttcttgttctaaagaaagcagttatatatatatattaattatgtaaataaaagttattttatatcaaaaaaaaaaaaaaaaaaaaaaaaaaaaaaaaaaaaaaaaaaaaaaaaaaaaaaagaaaaaaaaaaaaaaaaaagggggggggaaaaaaaaaacaggggagaatataacatttataaaagcaaaagataaaatgaagagagagccagcgtctatcaaaaaaacagaccgatcgaagaaagaaacagaacaaagaggttaaaatctgaggacgagaaccaatttgaccggggattaaaaaagaggacaccaccgcacaagaattcccgcaggggaaataaactaggagttgtactacgaaccaccctaataacgcagcaagacgtgccgacattaaacaataagcggcgaaatctacagggagaagaataacaggtaccgaggatacacgatagcagcgagaggagaagagtcaacacgacaacgtagaggcagaacacacggcacagagaac

SEQ ID NO: 43947 - DNA, 589 bp, Homo Sapiens
cacgaggcctgccttggcctcccaaagtgctgggattacaggcgtgagccaccatgccccgccccagatggattttacatttgctcttttgtgtttcgctccaaagggttgtcttcctcgccaaaaggagggagggactttgaatttgatatgaatctttaaaaccagaattggctggatatttcccatgattgggaaaagagtgaaatgaggacattctgtaaactgtccctccctaattccaaggatcagaaactccccgttttgctgactcattccataactggagaaagaagctccattgaccgaagccacagggcagcatggaagtttaaattttctctaaaattaaaatgccaaggataaagctggctgcttccaggagcgggaagaggagtggggagtgggcggtgaaacttttccagatgaacggaccataaatgtgttactggctttgtgcctgtagctcattttattatgacctatatgctcctgatttaaagagatctgtgtactgtttacttcccacttcccagaatcccttgtatctcctttctcgggaattgtattttctaataaatgacatttg

SEQ ID NO: 43948 - DNA, 762 bp, Homo Sapiens
  misc_feature (681)..(681): n is a, c, g, or t
agaacatggggtccctctggtttcttgtgttgaatgaggcaagggtaatcatctgattccgagctgaagacctctggtcctcttaaggagggagagtgcatttttagagcttttagcaaaatgtgaaaagctgatgtttgcgccttgctttgtgaatttggctttgttttacttatacattaactcatgtaatctcttaaatcttacaagcattgatccatttcaacaaaaaggtaaatttaaaatgcagactttgttatttgccaaagaagattcatgaaaaatttacgtccaattattttgcaaatagttaatttcatttggctttttaccatgttccttcctttctttttcccgcttccttaatgtaatttaaaccctggcaaacattctttagaaaccaagaggaaagaaagaacaaatatcaaaaaagacatagaatttaatattgatacaatttcacctctaaaatggatttgaagaaatgcaactttatatcaaaaaatgtcatctgatttcctttgtttcttttttaaattatgtaatcagatgattttatgtttttttttcaggggagcggaatattggtttcttttacgtgttgttttcagttttctctgccattcatgtttcttttttgtgttcagtgtttcaaatacaatttgtatttaaggattttanaataccaaactgtaactgagtacagtggatcgttttctgttaggatgttaatattatacaatgaaatctataaagtgttgt

SEQ ID NO: 43949 - DNA, 619 bp, Homo Sapiens
agatttcaacagaacttgttggaacaaatactcacttaaaacttcagcagaagaaaaattacttagtccttaggccaaccaatttaactgcagtgtcatgtttcacaggccttcctacatttagaaatcgtcacacagctgtgataagagtagattattttactatgaaataattctgaatagatgaaagcataaaatgtgagaaactgaatgtattattcaggaagaatactgagtgccttcatttaactaaagttgaatgtaaaagtcaatttgcacttctttataatcctctggtttagaattataaattgttaaaaccttgataattgtcatttaattatatttcaggtgtcctgaacaggtcactagactctacattgggcagcctttaaatatgattctttgtaatgctaaatagcctttttttctctttttactgcaacttaatatttctatttagaacacagaaaatgaaaatatttagaataagtcgtacatttgatgacaaataaatcactattaaaacaaaaaaaaaaacaccaaaaaccagcccaacaccacacgacccacaccccaccggccgcccatgggggccccccccccccccccaccccgc

SEQ ID NO: 43950 - DNA, 630 bp, Homo Sapiens
cgcggaaatgctcttaaataaacccctgcatgatttccaagttgcatatttgcatactaaatttgaaaaatgttttttaaatcaaatatcctgatatttagttgttttttttttcctccagcgtgtttaattaaatatgttactgtattagcaaaacattttcatttttaaaatctgctaattttaaacttggactgtgttaagtaaaagttaaatcatacactgcaaggtgtaggaagatttgttttaatgaatccagtgatacagatttgattactaagtttgaactgttaattgtttaacaattttagacttgtggctttctttctttggtttatttgtttttgcttttactcctatgctacactagtttgccatgtagcaattgcactgtgcaatattacaataaggactgggaaaattttatggatgtaatgtctattacggtttgcgatagtatttctctctagttctcagtgatttaaatgtgaccaagccttctgtactttgtcacaaaaagcgggttttccaggtgactattttggtgagtgtcaaaataagaatttatggtgtattactgtcgattcactttgaattaaaatatatattgcagccaaaaaaaaaaaaaaa

SEQ ID NO: 43951 - DNA, 698 bp, Homo Sapiens
tatgcctggcggtcttcatcttcctggagtatgtgcgctacttccgcatcaagcctttgggtcacactctacggagcttcctgtccctttttctggatgaacgagacagtggaccactcattctgacacacatctacctgctcctgggcatgtctcttcccatctggctgatccccagaccctgcacacagaagggtagcctgggaggagccagggccctcgtcccctatgccggtgtcctggctgtgggtgtgggtgatactgtggcctccatcttcggtagcaccatgggggagatccgctggcctggaaccaaaaagacttttgaggggaccatgacatctatatttgcgcagatcatttctgtagctctgatcttaatctttgacagtggagtggacctaaactacagttatgcttggattttggggtccatcagcactgtgtccctcctggaagcatacactacacagatagacaatctccttctgcctctctacctcctgatattgctgatggcctagctgttacagtgcagcagcagtgacggaggaaacagacatggggagggtgaacagtccccacagcagacagctacttgggcatgaagagccaaggtgtgaaaagcagatttgatttttcagttgattcagatttaaaataaaaagcaaagctctcctaaaaaaaaaaaaaaaaaa

SEQ ID NO: 43952 - DNA, 749 bp, Homo Sapiens
  misc_feature (684)..(684): n is a, c, g, or t
  misc_feature (712)..(712): n is a, c, g, or t
  misc_feature (738)..(738): n is a, c, g, or t
cctctgctcacctcccaacaagactaacagtctttttagaagtaaatatattcaagacaaacgagaaaatcctggctacccaagtcgagtatatacaggaatacaaatcggtaaccagcagctgttcctcaggttgtgactcactgagcaccacttgtcctggaggctggatgatggaggacatctggttataggtactgtagcagggataggtgccacaggaggataggaactacagcagatcgctgtttccagaacggggaggagtatctcattgtgaaacagactctagagtggttctatttggtcttcagtgttttagcctcattagttcatatttggcatgcagcttgtggtgagtactgttctaggactggccaaaaatgggcaaaatgtatcactccaaacactactgattcagcattgttttcatgtcttaaaattgccacctgcactttgtttctgcactattatgtagtgcattttaacttaaattttttccagcaacatgttacttatttaagatacattactgatatttcattataattagttcatcttccctgtcaaacaagagaattgtaaaatgttgtggaaaatgatacatatgtggatgctaatgaaatcatagtattttgtgtagcttctctgaagaccttagagacctgcagctttggtttatangtgtttgggcctttatcagccatctgantcagatcaatattttttttgaaactngaaaaaaaaaa

SEQ ID NO: 43953 - DNA, 584 bp, Homo Sapiens
  misc_feature (551)..(552): n is a, c, g, or t
  misc_feature (576)..(576): n is a, c, g, or t
tttcattgcgaatcttttttagcataaaattttctactctttttgttttttgtgttttgttctttaaagtcaggtccaattcgtaaaaacagcattgctttctgaaattagggcccaattaataatcagcaagaatttgatcgttccagttcccacttggaggcctttcatccctcgggtgtgctatggatggcttctaacaaaaactacacatatgtattcctgatcgccaacctttcccccaccagctaaggacatttcccagggttaatagggcctggtccctgggaggaaatttgaatgggtccattttgcccttccatagcctaatccctgggcattgctttccactgaggttgggggttggggtgtactagttacacatcttcaacagaccccctctagaaatttttcagatgcttctgggagacacccaaagggtgaagctatttatctgtagtaaactatttatctgtgtttttgaaatattaaaccctggatcagtcctttgatcagtataattttttaaagttactttgtcagaggcacannagggtttaaactgattcataatanatatctgt

SEQ ID NO: 43954 - DNA, 686 bp, Homo Sapiens
agaaaatactgttttttaatcctaaaatttttcttccactaagataaaccaaatgtgcttacatatatgtaaacccatctatttaaacgcaaaggtgggttgatgtcagtttacatagcagaaagcattcactatcctctaagatttgtttctgcaaaactttcattgctttagaattttaaaatttcaccttgtacaatggccagcccctaaagcaggaaacatttataatggattatatggaaacatcctcccagtacttgcccagcccttgaatcatgtggcttttcagtgaaaggaaagattctttttctaggaaaaatgagcctattttattttattttattttattttttgacacaaactgtagattttagcagccctggcccaaaggaatttgattactttgttttaaacagtacaaaggggacactataattacaaaaacatccttaactgatttgagttgtttttatttctttggatatattttcagagtggtaaattgtgtgtgagaattacaaatgattattcttttagtggtttcttagcctctcttacagcccacggggatagtactgtacatcaataccttcatatgaaatttttatatgcatgaaaattaaagcagggttgatctgcctaaaaaaaacaaaaccacactacccccaccctaaaaccaaaag

SEQ ID NO: 43955 - DNA, 597 bp, Homo Sapiens
atcgcgagaaaaggttattggcagccacattcctaagactggggaatggtgtgtccttttaaatttgaagataactttaggtaattatggaaactcctcaaagaggagaaagtaatttttttccagacatttttctcattctgtgtctttcacacactagtttccatagttcgagaattctgttttttaccattgggctgtgaatgttcacaatatcagtcctgttgaattcctatgaggtaatcacaatgtgtatatgttcattttctaggtatgataaaagaatgtatggctttttattctgtggaagtaaaatcctgaacgtttacaacttttccttaacttgtaaataaaaaattgtaagttttttctttttttacagaaaacttagcttgtgtaattctgttagtttcagatttctctcctgtttttgcaaattgtgggaaagattgacaatgcaaatgtgtcaaagacatactgttgggtgcaatattaacaatattaaatgcaaatttctttggataaattatttctatattctgtaaatctgagatttaatgtatattttgtttaaaaaatgatttagtaaaatctttg

SEQ ID NO: 43956 - DNA, 794 bp, Homo Sapiens
  misc_feature (597)..(612): n is a, c, g, or t
  misc_feature (614)..(660): n is a, c, g, or t
ggggattatccatcttgctaatggcctattatttatttcactttttgttggtctttatatccttttattaatgtgctaaaggaacctgtatatctattttggaactctttgaatagtctaaaatagactaaaaatggagtattttatagtttaaattacaaaccaaggtggttccccctaagatatatatcttggtttaccatgattccaaacaaaactaacttgtttaaaaatatttggagtaaagttttatttgcattacaaataggatacaaaaatagttgaatcaggatacagaaatctgctgtgttttgactagttatccctgttttatttttttagatgtgcttaattttatggtgtaactaaagattttgtttgtgtaatgcatgattaagacaataaagtattttttctagtcttccgagaaacttttctgatcagtttgcgagttttgatgagttttgtaaggtttttgttttacaaactatgaatcagcaaatttttaagattgtaccacatagcaaacatacagctgttgaaaaataatgtatataaaatgcatataataaatattaaattgtgtacctgtaaaannnnnnnnnnnnnnnncnnnnnnnnnnnnnnnnnnnnnnnnnnnnnnnnnnnnnnnnnnnnnnncttgtcgggccgcctcgggcccttggaaaaatttttctaaaaccatttcctttttggccgccgcggcccccccaaagggtaaaagggaaacagtgggcccataaccctggttttccctaagagaaaattcccgg

SEQ ID NO: 43957 - DNA, 548 bp, Homo Sapiens
ttaaattttagaatattttaatgtccatttcttcagtgaatgcattttgaaattattagaattaacaatttaaaaagagcagataaaaggatatatggaaaatgcaaacagtcggttcttgctaattcaatttcagattctaggcatgatgtgattttccaaacaaccaattaaaaaaaactccttacctcgaaaatctagaaattcaaatgcagacgtgtctttggaaactacaaatgattacagcccatgtgacaggaagcacgcggccttcggctctccggatcgtgtgcaaatgtgcagggggagcccccgcgggtgacgtcagtgtggatgaagtcacgggtgtggcagagcctgtggggctctcaagctattcgagggttttgtaactgatgctctacatttgtttgcattggataaaattgtgtgtgcttgtttaccatatatatatatatatatatatatatatatatatatatatggatatataattcgatctgagctgggactgagaagaaaatagcaattgcaactcaaagcaacta

SEQ ID NO: 43958 - DNA, 598 bp, Homo Sapiens
cagatgggtaaatatctagcctgcacttggatgttagagaatcaaacctcacccttgctcgttctaaacccacatgagtagttaactgtcttttgacataatcagagtcaggatttccctttttccctacttgagtcgtcttccatgtctgttacatccaagatcatccctctgggggatgtgtcaagtagttctcctactcagaatagaagctttgcgaattatcattcccacctctagattttaaatgaatgtagagttgtctaacattatatgggtgggaggctctttgcctctgtgatcagtagggtacctgcctctgaggtgctactgcctggagggatcactcccatcaaaagactggtgagttggaagctaagagcacatgcgcatagccagctcctctcccaggctggcagtcatgattacgagcatcattccagaatctttggcttctagaaccaactccattctgaagaacattttaacatctatgaataccttggtaataatcttttatacacaggagttttgtagcatgactttatgactaaacttattgtgaattaagttatttagaaatgttgagtttctgaat

SEQ ID NO: 43959 - DNA, 796 bp, Homo Sapiens
gggaaccttctgctcaagaagaagtactttctgactctgaattatcaagaacatacctaccttgagcccgctgccatctcttgttaactgcaaagaataaatgaaatatcttggtttttatttcccaggaagcttgagagagatgagtttatacagagctgactcaaaaagacaaaaagtaacttgggccagtttggtttcaagataataaatgtgttattaattaatgataaaattggcgcttgttttattttcgatattcaatgcactttatgtagcattgaatgatcaaatattggatttacctttaaaaaaaaaacctgagtatcattgcatgaatttttatctccctatggttatatcctgcatcaagtggataattttgaagtgtgttcagaatataaaattgaaattttagagttgttgaaaatcctgacttgttgaaaactaatatatatgtacatggatttctatagatgtgtttgtttagaagtgggtagatattgcagataagactgttcttcagaatcatgttaactattgggttgtgactgaagtagtccagggtttgccttgaaaccattacattctacatttaccaaatttacacaataaaaactgtattaaatggtgcccgcccccccgaacctttcacaccatacacccacctatggcgccgcccaatggaaattccttgttcggcccgccctcggccccccgaagaaacttttcctaaaaccatttcctttttgggcgccccgggggccccgtgttagctaacggtgaaaccgtggcc

SEQ ID NO: 43960 - DNA, 776 bp, Homo Sapiens
  misc_feature (569)..(569): n is a, c, g, or t
  misc_feature (706)..(706): n is a, c, g, or t
  misc_feature (742)..(742): n is a, c, g, or t
  misc_feature (745)..(745): n is a, c, g, or t
  misc_feature (751)..(751): n is a, c, g, or t
  misc_feature (773)..(773): n is a, c, g, or t
tatacttttatttcctgtttattcttaggtagattggaagggggaaacagtctgttctccctaattaaattttttctaataacgattagtagaatatggacattctatatgacagtgacattaaaagaggctctttggaagtatatacattattaacataatgtgtacaagtccttttgaaatgacaactttaatgggtttcagctcttttatctagagcttgagataattcaagctgagtttttcagggcatatcacaacggcaaagtgttcagcagtgggatatcaatgcttatttacattttcctactgctatttatataaaatgttattccattcagaggatgccttttatccccacattaaagcacagatcattaagcaataaaaaccaaattgtctgtcattcaaattataactgcagttatttttgcatggtaagagtgaggtgctaattttgtgtgagatgaactttgtaaactactttgggaaatgttctttggaagtaaggttttttctcctttagtcttatgcttccacttttgtctcaagattcacaatccattaanacatggggaaaaaagaaaaggtaaaattgagagacttttgttagaggagctatttggatgaaccaacatttcagattttccaaaatgtaagttaggaagctccaatggcccctgcattaacaaaatacactgttacnacctaatcccaagagtgtcattacagtgagaatccncanttaaangcattccagtggaaattataanaat

SEQ ID NO: 43961 - DNA, 581 bp, Homo Sapiens
ttactttgtagactgtttcacattgcactcatcatattttgttgtgcactagtgcaattccaagaaaatatcactgtaatgagtcagtgaagtctagaatcatacttaacatttcattgtacaagtattacaaccatatattgaggttcattgggaagattctctattggctccctttttgggtaaaccagctctgaacttccaagctccaaatccaaggaaacatgcagctcttcaacatgacatccagagatgactattacttttctgtttagttttacactaggaaacgtgttgtatctacagtaatgaaatgtttactaagtggactggtgtcataaactttctccatttaagacacattgactcctttccaatagaaagaaactaaacagaaaactcccaatacaaagatgactggtccctcatagccctcagacatttatatattggaagctgctgaggcccccaagttttttaattaagcagaaacagcatattagcagggattctctcatctaactgatgagtaaactgaggcccaaagcacttgcttacatcctctgatagctgtttcaaat

SEQ ID NO: 43962 - DNA, 583 bp, Homo Sapiens
tgctagacggaaactgaggctgaagattttatagtggatgttatcaacatggattatggaatgcaagaaaagaatccaattgatcatgttagcttctattgtaagactgcccccaacagagcaatcaggattactaaaaaccaggtttcacaacttctgccagagaaatttgcagagcagctgattcgagtatattgtaagaaggtggacagaaagagtttgtatgccgcaagacaatattttgttcagtggtgtgcagacagaaatttcaccaagccgcaggatggcgatgttatagccccactcataacacctcaaaaaaaggaatggaacgacagtacttcagtccaaaatccaactcgcctccgagaagcatccaaaagcagagtccagctttttaaagatgacccaatgtgaatgtctgtagtcagttgtttacaaactccctctcctgcacaattcatttagaggcttcaatcatagaattctgcaaattaatgacaactcatgctttaattttgtattttgaatgtacacgcatgctgaagctaagtaacttttaatcaaagaaataagatggtat

SEQ ID NO: 43963 - DNA, 937 bp, Homo Sapiens
gctgggtgctgctcagtcccccttcaatgacctcaaccggcagctggtgaacatgggctttccgcagtggcatcttggcaaccatgctgtggagccggtgacctccatcctgctcctcttcctgctcatgatgcttggtgttcgtggcctcctcctggttggccttgtctacctggtgtcccacctgagtcagcggtgacctctgagggctgataggggtgggtttgttgagagggacttgctgggccttggtgtgagagcaggcatatttggaggggatctggtggtgccttgaaggtatgatcagagaggggaccacaggtgtgtgtttcccctttgtgttaagcgtgaggcagagggagacgttagtccagcatttccaaagtgtgggtgggtccgttggttcccaagatacttttaggtggtatggggcctgcattaagtggcacaaaatcagagcaagaaagcgatgcccttcccaattctctcaatccttttatgccgagaagatctcagctggatgccaacatgttccgatgcctgtggaagacatgccgacgtctcctctgcctagggagcacgacttgggcttagggcaggtggaaaaaattccagacttttttagcactgtttttgtcttaatggcatatttttattggctacctcatcgtttaggacacgtggtaccgccattcccacctaccgtgaccttttcaataaacacaattcccccctaaccaacccaccgggctggccgcccccaaatatcccttccagggggcccaagccttacccctaccccctcttttttttgtcaccccactgtattccccccattcgccccccttttttttcacccctccgtattttgttgccccccctctcttatttctttctctctttttgtccaccacacttgctcatgctacgcggaact

SEQ ID NO: 43964 - DNA, 655 bp, Homo Sapiens
ggaaaggcaggacacgaagctcctcttcctcctcagatggaagtccagaggccaaaggagggaaggctggctcaggtcgccgtggagaggaccacccggctgtgatgaggctgaagcgctacattcgggcctgtggtgcccatcgaaactacaagaagctgttgggctcctgttgctcacacaaggagcgcctgagtatcctccgggcagaactggaagcgctaggcatgaagggtaccccttccctagggaagtgtcgggccctgaaggagcagagggaggaggcagctgaggtggcctccttggatgttgcgaacatcatcagtggctcgggccggccacgcagacgtacagcctggaaccctttaggagaagcagcacccccaggggagctgtaccgacggaccctggactcagatgaagagcggccccgtcccgcacccccagactggtcacatatgcgtggcatcatcagcagtgatggcgagagtaactgagctctgccacccccaggagggacccttgatacatgtacaaagcatacatagcaccccttgccctgtgtctgtggaacagaagcagcttccttcagagaagactgcagctcccaaggacacaagctgttgggatgctacttctcagcttcacgctgtcc

SEQ ID NO: 43965 - DNA, 744 bp, Homo Sapiens
cccacgcgtccgctctggctctggggcttggggcttctcaggatcctggatggcagagactgccctcagaagttccttgtccagggtgggcacccacagtgactcagaggacagggctaggcaggagacctgctgctcctcattggggggatctcttggggggcagacaccagtttgccaatgaagcaacacatctgatctaaagactggctccagaccccgggctgccaggattatgcagtccacttggtctaccttaatttaacctgtggccaaactcagagatggtaccagccaggggcaagcatgaccagagccagggaccctgtggctctgatcccccatttatccaccccatgtgcctcaggactagagtgagcaatcataccttataaatgacttttgtgcctttctgctccagtctcaaaatttcctacacctgccagttctttacatttttccaaggaaaggaaaacggaagcagggttcttgcctggtagctccaggacccagctctgcaggcacccaaagaccctctgtgcccagcctcttccttgagttctcggaacctcctccctaattctcccttccttccccacaaggcctttgaggttgtgactgtggctggtatatctggctgccatttttctgatgcatttatttaaaatttgtacttttttgatagaacccttgtaagggctttgttttcctaatagctgactttttaataaagcagttttattt

SEQ ID NO: 43966 - DNA, 792 bp, Homo Sapiens
  misc_feature (716)..(791): n is a, c, g, or t
gtccggaattcccgggatgggtgggaagcggccaggcagaaagagctccaggctcttgtgtcgcccacccagccctcccatactcactcctgacagctttcctgcactgcagcttcctgctcctctgactctagtgggaacaggccccagctcagcctccggcagggaggtcacccctccacttcagcttgccctgacctccgctcgcaaaccccgagcttccaagccttttgctccagccctgcggcttccccagaagcctgggcttagggtggagatgccgcctacacacgatcctggccctccacctgcctccaggccacgaaatgggaattccagcactaagccaggcaccgggcagaagctgggccttccgcctcccttggatggggtcaagaggccaggcctggcacattttggagtgtcctggctaccagctctcacctacacccacgcacccccccacacactatgctctctcaagaatgtaatttattggggcccccccagctgctttcctcacctgcccctgccctaccttacacccccagcttgacttctttccagtccacgtgtgtatataatgatatctatatttttgcccaggtctgggtattgctcctgcccagaccctgacatccctttccactgtgtgtgtgaccatgctgggggagggggactctgcttggaattaaaaggttgcattgggtccctannnnnnnnnnnnnnnnnnnnnnnnnnnnnnnnnnnnnnnnnnnnnnnnnnnnnnnnnnnnnnnnnnnnnnnnnnnng

SEQ ID NO: 43967 - DNA, 623 bp, Homo Sapiens
  misc_feature (516)..(516): n is a, c, g, or t
atcgaattcgtatcggccattatggccgggagagcgactcccagtaagccttcaggactcagtttactccccgattatgaagatgaggaggaggaggaagaggaggaggaaggagatggagaaagaaaaaggggggacgccagcaagccgctctccgacgcacagggcaaggagcactcagtttcctcttcacgggaggtaacaagtagtgtgctgccaaacgatttctttagtactaatcctcccaaggcccccataattcctcattcagggtcaattgagaaagcagaaatacatgaaaaagtggtggaaaggagagaaaacaccgcggaagcgttaccggaaggtttttttgacgaccctgaggtagatgcaagagtacgaaaggttgatgctccaaaagatcagatggacaaagagtgggacgaattccaaaaagccatgaggcaggtcaacactatttccgaagccatagttgccgaagaggatgaggagggacggttggaccgccagatnggggagatcgatgagcagatagagtgttaccgacgggtggaaaagctacggaatcgccaggatgaaataaaaaataaacttaaagaaatcctgaccataaaagaact

SEQ ID NO: 43968 - DNA, 899 bp, Homo Sapiens
aaaggagtctgtaactttatttatacttatgaatatatccagggactacttctcattgctgagcagcttttaatacacctctgcttgaggagaaagtctagttcattgctactgccaagagctagttcttgtgttcatatagtaactgcacagggcttatagctgcttcattctgctactttgtaactaggagccattgcatttattaaatgtccctcagtaacgttaagtgctagttgtgattttatacataaaggccagaagctgtctgaggcaatcatgattgattgtatgtatcacttactgaagaatacctgaagtgatcatgtaactacttataagggatatccatttgtttgattacatgggtaaataatttgtcattaaacttgtgtttgaatcatgaattcccttgtttcaaaagacttgcagctaatctaaaaaactggtgatatttaatatgcatgtatgtatctaaacacccacatatatttgtggtttaagtgtgagaaatcttgctaatctatatgccacagaagagcaaaattgtatccaaatttatgccacttaaatttctttaccacgagggatagagcatgcatactggttttttttcttgatttgcccatataattggtaatggataacttaataaatttgtgtgatataaaagtagtgtatcatgttctactgtgtgatcttatcccttcccaattttctgcaaaggtactgttagctggaagaaaaacattttggttagcmttgtatgacagtagtctttcccyttatagtttctctataraaamtggktttaaaatcacgtggaaagggcaggttgtatyaaggtgtattmawctgaaattgagcammcygcctgccwcgctgttcytcaactgrgt

SEQ ID NO: 43969 - DNA, 612 bp, Homo Sapiens
ggtccaaaattgtcaatcagaaatgaacataaaggactccagagcagtgggactgtctgtcaaaagactctgtatatcttttgtggatgagttttgtgagagaacagagagaccattgtacctggcacaagggctcttcatgaaaagggagacttactgggaggtgcaagacagtggcatttctcctctcctcttgctgctcagcacagccctggattgcagccccgaggctgagaccagacaaagcccgggaggcagaaagatgctccaagaaccaacactatcaatgtctttgcaaatcctcacaggattcctgtgggtccagctttggaactgggaaacctttcttcggatccgcactcattccactgatgccagctgcccctgaaggatgccagtactgtggtgtgtgagtctcagcagccgcccacacgctcctaactctgctgcatggcagatgcctaggtggaaatagcaaaaacaaggcccaggctggggccagggccagaggggaaggccctggattctcactcatgtgagatcttgaatctctttctttgttctgtttgtttagttagtatcatctggtaatagttaaaaaacaacaaaaaa

SEQ ID NO: 43970 - DNA, 526 bp, Homo Sapiens
ttgtagaagcactggatttattgagtgaataaacttaatatagcttgccagccataactttatattagaatagtttggcttgcctcagtgcttggaaataggggtggagtcctcaaatgtccccccacatccaagtcaacagttcatctcttctctctaccaaaagcttgaacgtctctcagcatttttggaagcataaggaaaggttcagaaattagaatacacattccaaaagcacttattcagcacttgctatgtgtattgcttgctatttgcactggagagaaacaagaaaagtaaaactaagagaacttagcatctgactgactgttccctttcttttatcccctatacgtcaaaggtcctaaagcttggaatttatgttatttcaaggatattggttccatcaaatacataatgaagattttgtgaagaaaaagcgatggtggtttgaacattgagaggttgaagttcccctatgggggcattcagattcagcattccttcagattggtgcttgggagat

SEQ ID NO: 43971 - DNA, 537 bp, Homo Sapiens
ccgccggaaccggccggccatcgcccgcggcgcggccggcggaggcggcaggaaccgaccggcgccctacagcaggccaaaacaacttcccgacaagtggcagcacgatcttttcgacagtggcttcggcggtggtgccggcgtggagacaggtgggaaactgctggtgtccaatctggattttggagtctcagacgccgatattcaggaactctttgctgaatttggaacgctgaagaaggcggctgtgcactatgatcgctctggtcgcagcttaggaacagcagacgtgcactttgagcggaaggcagatgccctgaaggccatgaagcagtacaacggcgtccctctggatggccgccccatgaacattcagcttgtcacgtcacagattgacgcacagcggaggcctgcacagagcgtaaacagaggtggcatgactagaaaccgtggcgctggaggttttggtggtggtggaggcacccggagaggcacccgcggaggcgcccgtggaagaggcagaggtgccggcaggaa

SEQ ID NO: 43972 - DNA, 1152 bp, Homo Sapiens
  misc_feature (759)..(761): n is a, c, g, or t
  misc_feature (763)..(763): n is a, c, g, or t
  misc_feature (768)..(769): n is a, c, g, or t
  misc_feature (792)..(792): n is a, c, g, or t
  misc_feature (797)..(797): n is a, c, g, or t
gaattcccgggatggatggtcagggggaaggaggaatgacgctcaacctgcccaggtttggacacaactacaaagaacagcaggacacagaggtgacctctgtcctgaggcttctcaacagatgggaagtggctgtggtctcactggatccccactggcaccagcagtgtgggtgggcctcatgtaacatctgggaggggcttcatccccccacccaggacctagtgcatgccagcagctatctggggccctgggaaaaatgtgcgagtcttgagcgcggagccgctcaagccacagctcccaggcccctggctcaaagacgcagacaaggcctgagcagtgctctcggcatcggaccaaagcctgggcacaccctgcctctctccccagagcagggtccctgccgaggactggcctagagcaagcactggaaaagaggccctgccatacaccctgcgtacccactgccaggaccctctcagacaagcgtggcacagccatgctgaccttccatctggtgaaccaagtggcagccccaggggcctgccctgcaggtcacagctaaacaagtctggcagaagccacgcttgttccccatgtacctctagagaagcagaaaccaaagtccccctgtgccctgggagggtggggccgtctaatttattactgcccagcattccttccaacgggaagtagatgggcgactgctttgttcacacacatttgattaaaaattaacaaacagcatctcccccaaannnanaatannaaaaaaaacccaaaacaaacaanaaccnaaaaacccccccataaaagaaaacttctggcgggcccccttctatatctcccccccaaatgtcctccacttaaagcgctgaccccaatattttttttgacactttggtgccccaaaaaagagggacccctattctcaattataaactccatgtggcacgccactttttaacccccctgtacactcgccaacaagagcggcatactttgtgcaactcttaggggaaaaacatatcgtttaagtctaggcggccgccgcaacaatatgtgcgcgccaaatggaggcttaacacacatcctatctagcgtctgacagaaacgcttctaaatcgtatttcagcgcgtttaatatacggg

SEQ ID NO: 43973 - DNA, 630 bp, Homo Sapiens
atgttaaaaatggttacacactctgctggccacattaaaaattagaagactcatgttaaattatctcctccaaaggactttttatttacagcttttcttttcctggactctacctgcttggttcagtgtcctgaagagttatttaaatgaaccactacttagtaattagttcttttttaaagtatctacttctaaaattacctagttgaaaatatgaaggatatgcttagttttagaaatatcatgaagcaaggatctagtcagtgttacagggtaaaggtggagttttttaaagtctgtatttaaatggtgcactgatggattcatttttaatttgcattacaaaaatgttgctcaggtaatcagtattttcttccacgtatgtgcatattgcactgttagatcatagaaatatctgaatgctttaatttttatgtatgcaaaatctataaatcttttgtataatgtattttatacaaatgtaactgtagaacattgttagcatgtgtatctgtaaaaccagtttttaaaattttttgccccttatttttcatattttgaaagatctccaacatgtaataaagtttctcttattcaatctaaaaaaaaaaaaaaaaaaaaaaaaaaaaa

SEQ ID NO: 43974 - DNA, 688 bp, Homo Sapiens
cgctcaaatctcctcccacctctctccctgcttttgccttgctctgttcctctttggtcccaagagcagcagccgcagcctcctcgtgatcctccctagcataaatttcccaaacagtccacaggtcccatgcccactttgcgtctgcactgtgatcgtgacaaatcttccctcctcaccagctagtctggggtttcctctccctgccccaggccagaactgccttcttcatttccacccacgctcccagcctcttagctgaaagcacaaatggtgaaatcagtagtctcgctccatctctaatagactaaacctaaatgcctctaggacggactgttgctatccaagcgtttggtgttaccttctcctgggaggtcctgctgcaactcaagttccacaggatggtcaagctgtcagacatccaagtttacatcattgtaattattactggtatttacaatttgcaagagttttgggttagtttttttttttttttgctttgtttttgtacaaaagagtctaacattttttgccaaacagatatatatttaatgaaaagaagagatacataaatgtgtgaatttccagtttttttttaattattttaatcccaaacatcttcctgaaaataacattcccttaaacatgctgtggaataaaatggattgtgatgaaaaaaaaaaaaaaa

SEQ ID NO: 43975 - DNA, 547 bp, Homo Sapiens
ggcacgaggagaatgctgacagcgatgatgagggggaactacaggatttgttgtctcaggattggagggtgaaaggggcattgttatagggttttaaagacccaaggtttctaacagcctctgctgttgtataaaaagtgctgtctctcagtagtatagcggttacttcatgcctcaagatttgggtacctggattgctaaactggattgttgagataaaatgagccagtgagctacagcactttggaaaatttgtgtaacatgtttttgaggtaaagttgtttttgaaatttctgaagtgttatataccaaaatgccaacatttccacgacagacttaactgtataatttcgttgtaaaatctgtaagttgtaaatattgtacatagttaaatctgtattctgttttgaatttttttaattaatagaaagaccaaccggcaaactttcagatgaatgcttactgtggtatttggaatgtatgtatcttctgaaccctacatcaagttgaaaaggtttgatatcttgattctttggtttttgtatgg

SEQ ID NO: 43976 - DNA, 782 bp, Homo Sapiens
  misc_feature (581)..(602): n is a, c, g, or t
  misc_feature (605)..(606): n is a, c, g, or t
  misc_feature (765)..(765): n is a, c, g, or t
gggaccgtccactcaccaactgctcgatcatcaacagtggcaagatagacgtgaaaacgccttttgtggttgagatcgctgattggtgacacaactggcagaaaacaaggatatgctttggcaggggtgtgtgtgtgtgtgtgtgtgtgtgtgtgtgttgtgttgtctttcaattatttgctttttttttttactttctttttgtattctatcccagatcacaggaaagttataaaaatcaaaccgtcaccctttagtttgcttgaactttagtaaaccacctgcttagggactttgaacttaaatatatccccttcctcaagtggtgctattttaaaactaaaaaaaactttgaattggctatttttttaatgcaatattttttttctgaattcattatgatccccatattgggtaatgctgaacatttatctgaaacagatgaggatattattattttgtatccaaacagaaattcagataaagggaaatttgactagtgtaatctgagatatgtcatagggatttctttctgacaaaagggtgctttgctgttctttatattaaatacttttagagcnnnnnnnnnnnnnnnnnnnnnnaannaaaacatggtcggcccgcctcgggcccctcgagaaggctttctagaaccatttcgttttgggcgcgcggggccccagtagggtaaggtgaaacatggggccatagcctgttttccctaagggaaaaccctggggctcatgaaacttaaggggctttggnaattccttcaacccaac

SEQ ID NO: 43977 - DNA, 516 bp, Homo Sapiens
atgtttacattgcaccttcccgtgctgtaattggcttgacaaagacaagcaggcttctctgttgagacttattgtgtttttagttttcatagacacttattttttttttttaaattgtacagcaaggtgctctaagtaatattcgataaaatatatttaatagaaatttgcgtttgatattcatgaacatgaatacatgtatttttttaagaaataagtattgtgtaacactatggcattgcttctatagccaaagtataaaaatttctggaatactgacatgtaaagactacagttaattctgacactgtatcttattaaaataggatgatttgcattttgtaaaattatcctgcacatcaagctgcatgccttaaagcggaaactctaggactgtgttcatgggagagcagttcatctgttcagaacagtgaggcaaggtctgtagtgcttctttaactacctttggaaatactgtacaatgttagaataatttattttgctttacaggagttt

SEQ ID NO: 43978 - DNA, 872 bp, Homo Sapiens
  misc_feature (779)..(779): n is a, c, g, or t
ccgggagtcccgtcagctgtcccagagcctgtgtcgcgcccgtgccggtagcgcccgtgccggtagcgccgctgccaccgctcaccatgggcccgggtcctcggctgctgctacctctcgtgctttgcgtggggctcggcgcacttgtgttttcttcgggggccgagggcttccgcaagcgaggcccctcggtgacggccaaggtcttctttgatgtgaggattggagacaaagatgttggcagaattgtgattggcctctttggaaaagttgtgcccaagacagtggaaaattttgttgctctagcaacaggagagaaaggatatggatataaaggaagcaagtttcatcgtgtcatcaaggatttcatgattcaaggaggtgacatcaccactggagatggcactgggggtgtgagcatctatggtgagacatttccagatgagaacttcaagctgaagcactatggcattgggtgggtcagcatggccaacgctgggcctgacaccaatggctctcagttctttatcaccttgaccaagcccacctggttggacggcaaacatgtggtgtttggaaaagtcattgatgggatgacagtggtgcactccatagagctccaagcaactgatgggcatgaccgtccactcaccaactgctcgatcatcaacagtggcaagatagacgtgaaaacgccttttgtggttgagatcgctgattggtgacacaactggcagaaaacaaggatatgctttggcaggggtgtgtgtktgtktgtnttttttttttttttttgtgttgtctttcaattatttgcttttttttttactttctttttgtattctatcccagatcacaggaaagttataaaa

SEQ ID NO: 43979 - DNA, 691 bp, Homo Sapiens
  misc_feature (649)..(649): n is a, c, g, or t
  misc_feature (653)..(687): n is a, c, g, or t
ggctggcaggcatctcggcttgtaggaggcaactgctgagacctcttctccatcccccttattcagtggaagatgacgggggatctgaggctgtgtctctgccttgtctttagaggacttcagcgtccaagactggggcccacccttctcaccagcactaaatgcactaacaaggactccagacctgcagccccagacccgccgtagtataagcctaacaagcaacacgtagcaccttagtctttgttccaggagagctgagcaagctggtgaaaccactctccttcctttaaacaccgtttcaaccaacctctccctggagccaacctgtaaaaagtgggttgattgctgacagcatggtcttccctccctgcatttcagacataccagttactgaaagcaaatcagttttaagtgatttctcagtgctgaaaagcctgtccaggtttccttccctttcccaagcctctctctgtaatactccctttgggcgaagctaacatcggtgcctccccgaccttgctgactaggcacatgggacgcaaaggagggagggaagcaaggccttgcctggcgagttgtcatgtggttggtggtgactgttttattttttttaataaaaataaagatgagagaaattatttggacnggannnnnnnnnnnnnnnnnnnnnnnnnnnnnnnnnnnaaaa

SEQ ID NO: 43980 - DNA, 722 bp, Homo Sapiens
cgcgtccgcatgaaagaagctaaagaaactcctgggatttctctcagattttgttgtgaatcaaaacacctcaggagttaagcattcctaatgattagaggtcagatggaaaatatcacaagcaaattaaaatagaagagaatgcaacaggtttcagttatgagtcactttttcgcgaataccttaatgagacagttacagaagtttggatagaagatccttatattagacatactcatcagctgtataactttcttcgattttgtgagatgcttattaagagaccatgtaaagtaaaaactattcaccttctcacctctctggatgaaggcattgagcaagtgcagcaaagtagaggcctgcaagaaatagaagagtcactcaggagtcacggagtgctgttggaagttcaatactcttcttcaatacatgaccgagaaattaggttcaacaatggatggatgattaagattggaaggggacttgattattttaagaaaccacagagtcgtttttcccttggatattgtgattttgatttaagaccatgtcatgaaacaacagtagacatttttcataagaagcatacaaaaaatatatgatgggtggtagcctaatttgtattatgtctactttaagtgaatattggattttttttaaaagatcacttttataatgtatgaatttaacaataaacttttatatttctactaaaaaaaaaa

SEQ ID NO: 43981 - DNA, 552 bp, Homo Sapiens
tgttaccattctgagcaaggttcaaccagtcaagaacaggccttatctgctcagcaagctgctgttattaaccttactggagtaggaagttttatgcagtcacaggcagctgtgttgtctcagcttggctctgccgagaacagacctgagcaaagccttcctcagcagagattccagctctcctctgcctttcaacagcagcagcaacagatacaacagttgcgattcttgcagcatcaaatggctatggcagcagcagcagcacaaacagctcagctacatcatcatcggcatacaggcagccagtcaaaaagtaaaatgaagagaggcatgccaaccactccaaaattttgagtcttgcattactttttgttccttttttaaaaacacaagagcactgaatcaaaagaattgagtttctactttttgttttttttaatgtgtcagtattttacattgctagatgtacaaactttatacagaagcacaaccttatcatttttaaataaaaacagggaaatggtttaacaaaaaaaaaaaaaaaaaacgcgg

SEQ ID NO: 43982 - DNA, 739 bp, Homo Sapiens
  misc_feature (644)..(647): n is a, c, g, or t
  misc_feature (649)..(660): n is a, c, g, or t
  misc_feature (662)..(663): n is a, c, g, or t
  misc_feature (665)..(665): n is a, c, g, or t
  misc_feature (667)..(668): n is a, c, g, or t
  misc_feature (670)..(670): n is a, c, g, or t
aaaagccaggtgtcctcactcatcacagaagccgccttagctcccgttactcacagaaacagcattacccttgcactacatggcgacatcaactggagagagaggactcggggtcttctgatatcgcagctgcatctgcacctgaaatgctcatacagcattccctttggcggccagtgagaaacaaagaagggataaaaactggatatgcatctaaaacaagatgtaagtcactgaagatttttagaagaccaaggaaactgttcatgcaaacagtttcttcagatgattctgaatcacacatgagtgaagaaaaaaaggaagaagatttactaaataattttatgcaatcaatgtcaattgaagaacagggagaacatctgatgttaacttgacagtcttgtctcgtgtattgaattcgtgccaaaagtgagggtaaggggttgtgagttgtgtcctgtatgtttatgatggtattgttatttattaaatcattaagtaattttggtttgttcggaaacttaaaacaatggaattggtctgatgtagttccatgtaccaatgataggtatgtaagaaaatttacatgtaacatatacttgtacttctaactagataccattaaaactttttcttgcattcgnnnnannnnnnnnnnnncnnanannanaaacatgtcgggcgccctcgggccctccaagaagctttcctaaacccattcccttgggggcgcggggcc

SEQ ID NO: 43983 - DNA, 1069 bp, Homo Sapiens
acaaggggccggggtaccggtccgggattcccggggatgtccaggaaaggctggaccacctgctgtgctggctcctggaacaccgaggccggttggaggggggtccaggctggctggcagaggccatagtgacgtggcgggggcacctgacaaaactgctgacgacaccgtatgagcggcaggagggctggcagctggcagcctcccggttccagggaacactatacctgagtgaagtggagacaccgaacgctcgggcccagaggcttgctcggccaccgctcctccgggagcttatgtacatgggatacaaatttgagcagtacatgtgtgcagacaaacctggaagctccccagacccctctggggaggttaacaccaacgtggccttctgctctgtgctacgcagccgcctgggaagccaccctctgctcttctcaggggaggtagactgcacagacccccaagccccatccacacagcccccaacctgctatgtggagctcaagacctccaaggagatgcacagccctggccaatggaggagtttctacagacacaagctcctgaaatggtgggctcagtcattcctcccaggggtcccgaatgttgttgctggcttccgtaacccagacggttttgtctcttccctcaagacctttcctaccatgaagatgtttgaatatgtcagaaatgaccgtgacggctggaatccctctgtgtgcatgaacttctgtgccgccttccttagctttgcccagagcacggttgtccaggatgaccccaggctcgttcatctcttctcttgggagcctggcggcccagtcaccgtgtctgtacaccaagatgcaccttacgccttcctgcccatatggtatgtggaagctatgactcaggacctcccatcaccccccaagactccctctcccaaatagtaatggctttagagggaggcagtcatatctctgtgtgcagataataaaagcatattttctaaaaaaaaaaaaaaaaaaaaaaaaaaaaaaaaaaaaaaaaaagggcggcccctctaagatattccctcgagggg

SEQ ID NO: 43984 - DNA, 587 bp, Homo Sapiens
  misc_feature (527)..(527): n is a, c, g, or t
  misc_feature (562)..(562): n is a, c, g, or t
  misc_feature (568)..(568): n is a, c, g, or t
  misc_feature (586)..(586): n is a, c, g, or t
atgtggaaaagccattaataaccactcttttatttttttgcaataacaaggtgaaatcaatattgttgagaagattcttccatctggtaatgttgagaagacttcatttggtaggagtcccttactttacgtgtgtaaattcctaccaggaaagaatacatatccaatagattggagaaagccagagattagccctcattccgcatctgtcaaccaggacagaatgcatggacaagggatgagctttacaaagatgatgcactttggagatcagaaaattcatatttaagcaaagtgatacaaacacagtgatttgggaatgccttcatttacaatgcaatacttaaattttaatactcttgtaggagaaaaagcaactgtataaatgaatgtagagtgactttctgcaatatttcaaaccatatcagagaattacactgtgggaaaactaccttggtaataagtgtagccaaatctccttatatatctgaaagtctactggatggaatctgtagggaaacggttcnatttggagggaagggggattcctttgttttttagngaatcngaaaatgtataaattaant

SEQ ID NO: 43985 - DNA, 559 bp, Homo Sapiens
tcttaatttggagatgcaggggcaacctgtgaccctttgaggcaagagccctgcacccagctgtcccgtgcagccgtgggcaggggctgcacacggaggggcaggcgggccagttcagggtccgtgccaggccctcctcagtgccctgtgaaggcctcctgtcctccgtgcggctgggcaccagcaccagggagtttctatggcaaccttagtgattattaaggaacactgtcagttttatgaacatatgctcaaatgaaattctactttaggaggaaaggattggaacagcatgtcacaaggctgttaattaacagagagaccttattggatggagatcacatctgttaaatagaatacctcaactctacgttgttttcttggagataaataatagtttcaagtttttgtttgtttgttttacctaattacctgaaagcaaataccaaaggctgatgtctgtatatggggcaaagggtcagtatatttttcagtgttttttttctaccagctattttgcatttaaagtgaacattgtgtttggaataaatactcttaa

SEQ ID NO: 43986 - DNA, 584 bp, Homo Sapiens
acggaatttacaacgggaatgattttaccaacgaaagctatggcaacccaggaattgactgtcaaaagaaaactgagtgggaataccctgcaggttcaggcctcatctccagtggcactgggtgtaaggattcccactgtggctcttcacatgatggaactgtttgacacaactgtagagcagctgtatagcatcttcactgtaaaggagttaacaaataagaagatcatcatgaaatggagatgtgggaactggccagaagaacactatgccatggttgcactgaattttgtgcctactctagggcaaacagaattacaattgaaggagttcctatctatctgtaaagaagagaacatgaaattctgttggcagaagcagcattttgaagaaataaaaggttcactgcagctgacccccctaaatggttgaattaaaatttattataaggcattactttttgtaagcggaaaaagtgtcacatttacctcttccctatcttttgtttaaaaggactgtctttattttatattggatgaaatctatgaacatatatacaatgtaaagcattgtttgacctcttt

SEQ ID NO: 43987 - DNA, 933 bp, Homo Sapiens
ggactgtctcccttgaacatattttagcttcacttctgactgaacagtcattagtcaacttttttgaaaagccactggacatgaaatccaaacttgaaaatgccaagatcaatcagtacaatctcaaaacttttgaaatgagccaccaatcacaatctgaacttaagctgagtaacttgtagcaagacagcagctgctatgcacactggagtccaccataccaaagcacgaaccagactgtttcttggggtcagccctaaaccgagatttcagtctaccttaccaatggggcatctggctaaacaacctgacaaactgtggccagggaaccgacacaaccctcaagcatttctatgtattgagaattgtcagtgccctaaggtatccattggttcccttgatgccaacttacaatttttaccggatttgctgaaatgggcacttctgctgtgatgctagtgttgattttgctctcagatgaacacaatgtctcatactaaccaagaagcaagaaaagccccatgctttcatttttcacttggagtgacaatgggagaggtcaggaatcaagttcactttcaagatctaagggagtccactatctgtgcaatgtatttggcttttttttgcactgtttcaatgctggtaattgaaaccattttaatatattggttgtattcactttatatgtccttccaaaaatgttgttgtgtacataccatgctttcaatgttgggcttccaagttttttaataagaaacttttgtatttacttggtccttttgcttttaccttatagttaagtgtcttaaagctgtagacctggcgcagtgaatgggtaagctggaaagttgctgctggccatccagggtttggggtgggcaaccctaactaggacttctcaacctgcctggtttccctaaggttgagacc

SEQ ID NO: 43988 - DNA, 721 bp, Homo Sapiens
atcttccctcgcactagaaaccatccagattccagccagcctcggcctgggcttcatttcacgggtctgaaagtgatgtccaggcaaaaattgacaatacatttcttgcccgaaataagaacccattatttccagtgagttactgaaaatacatttttaaagagaaagtactgattatctcccaaatgagaagtcattaactggaaatctccctagaatactttcatcactttggaaacaaagataggctctttcgtgctgtgttatctttatagcaacactcatccttaaccaactaggtaccgtgagtttacatacaggagaatgatggaaggaagggaggaaggaaaggaggagaaaaatgtgtcttcagctggcagcatttattttaaatccttagcactgagtttgaatggtataaaaagtataacttccatagatgagctgttgttaggaaggcaccaaagaacctcctctgcactaaacaggagaatggaaagaaaagtctccattgagtacatatcatgtcagtttagtaatcaattatgttgatattgttaaactggttcaaagaaataaactggcaatatgtaaagtaattcctcatttgtgtcactatgatatagagatattaaaggaatgttggtttgctaaatagtatagatgtccatttgtactatagtttactgagcattttaaattgctgctacatactgtcttc

SEQ ID NO: 43989 - DNA, 814 bp, Homo Sapiens
  misc_feature (643)..(643): n is a, c, g, or t
  misc_feature (660)..(660): n is a, c, g, or t
  misc_feature (726)..(726): n is a, c, g, or t
tgtagcatggtctcggataaaagtcctggattttcattggttttataatgggtgtttatatgaaactactaaagactttttaaatggcttgatgtagcagtcatagcaagtttgtaaatagcatctatgttacactctcctagagtataaaatgtgaatgtttttgtagctaaattgtaattgaaactggctcattccagtttattgatttcacaataggggttaaattggcaaacattcatatttttacttcatttttaaaacaactgactgatagttctatattttcaaaatatttgaaaataaaaagtattcccaagtgattttaatttaaaaacaaattggctttgtctcattgatcagacaaaaagaaactagtattaagggaagcgcaaacacatttattttgtactgcagaaaaattgcttttttgtatcactttttgtgtaatggttagtaaatgtcatttaagtccttttatgtataaaactgccaaatgcttacctggtattttattagatgcagaaacagattggaaacagctaaattacaacttttacatatggctctgtcttattgtttcttcatactgtgtctgtatttaatctttttttatggaacctgttgcgcctatttatgaaantaataaatataggtgtntgtaagtaaatttgttagtatttgaaagaggtttctttgatgttttaacttttgctggcaaaaaanaattcacgcttggtgtgaatactttattatttagtttttacagtaacatgaataagccaaacctgcttttatttagcagcaaaaaaaa

SEQ ID NO: 43990 - DNA, 620 bp, Homo Sapiens
ttttttttttttttttttgagaagcttgtggtttattgaagagagcaaggctggcgggaggtggaggttgcagtgagccaagatcataccacggcactccagcctgggtgacagtgagactgtggctcaaaaaaaaaaaaaaaaaaaggaaaatgaaactagaagagatttctaaaagtctgaaatatatttgctaaatttctaaagaatgtgttctaaaacagcagaagattttcaagaaccggtttccaaagacagtcttctaattcctcattagtaataagtaaaatgtttattgttgtagctctggtatataatccattcctcttaaaatataagacctctggcatgaatatttcatatctataaaatgacagatcccaccaggaaggaagctgttgctttctttgaggtgatttttttcctttgctccctgttgctgaaaccatacagcttcataaataattttgcttgctgaaggaaaaaaaagtgtttttcataaacccattatccaggactgtttatagctgttggaaggactaggtcttccctaacccccccagtgtgcaagggcagtgaagacttgattgtacaaaatacgttttgtaaatgttgtgctg

SEQ ID NO: 43991 - DNA, 633 bp, Homo Sapiens
atgttactactgatactgtaaagaaacttccaaatcactggtttgggagggggtggatacatcctcattttctgtacatgatgcatggggaaaaacagtagttactgcatcatatagttccaagtaaatcatatagttccaagtaaatttgacatggaaataagtgttaactacaaaaatagaacatatacattccaatgtttggaaaagaagtggtaaaaagaaaaatagcaaaaagacattaaaattagcaaaaagtagattgacagtacagatgacctataaactggttaaatagccctattacaattgaaattgggtcaaaaatcaacctctaacctgagatacatttgtataaaacaaatgatcaaagagtttaaagataatggaaactataaatcatagaaatagcaacatttttcttaaaatctaaacataagacattttatgtaaaacatacaatataggatgtaacatttaacaaactatatggtaaataatatgacattaatatataaaatatatgttccagatcttgatgtgggtgatagttttacttatgtacaacgatatacatctatttaaaaacatgtacatttaaattgttgcattttatgtatttaaaattttatt

SEQ ID NO: 43992 - DNA, 612 bp, Homo Sapiens
ctgttgttactccttaagcttcaggctttctgcgaaagctctaagaatatcttcactactatgcttggtcaactggaagatggtattaataaggtcagaattaggaattggattgctctgtgggtcctccggtattgtgcagaggaaagaaaaatgtctttcacaccacaaactgtgtgtctgaaccccagccaaacaaatgtgttccattggtccaatatataagcattaacaacaacaacaaaaaatttaaaacaagtaaattaatgcattcacatgatcacttcttgaaaatggttcaaagcatgttttcctgatggtgggattgtttaaatgacatgttttaaagtttttaatactttattagttatgaagtgcttcttttatatgttaagtttaggttgccagtactcataatttttatttctgcaattatgttataatgagttgtttgcatgcctacttaacccaagtaaaacgatgctgtttgctctggaatgttcatcttttagacaggttttggctcatttccaatcatggtgcaatatagtgtaacattcatttgttttcattcaacagttttatttttgtcataataaataattacttttc

SEQ ID NO: 43993 - DNA, 481 bp, Homo Sapiens
  misc_feature (453)..(453): n is a, c, g, or t
ggaaagcacttgccttctaccaaccccagcttgcaatcactgggccttcccctcctatccaaggggttggaggggccccttggctctccttttggcaggaggagcctgcttcattacaccaatgactctgccatccccctccctggccctagaccccaaacacatctccctctacccaatttactcttctcgccccacctagggacagattccccctgctctttttgtcctagaaaccccgctagtttgggatggtagcgtctggggtggggagggcttccccttccccactcgagggtgcgggtggggaagggggggtgggtggagacagccctggggcagggaggatggtctctccactgtagaaagtagagtaggattgtggtcagacttaatttgaggcatctagtgaagacacgtacaaatccaccaaggaaaaagattccaaaaaanaaaaaaaaaaaaaaaaaaaaaaacatgt

SEQ ID NO: 43994 - DNA, 933 bp, Homo Sapiens
  misc_feature (933)..(933): n is a, c, g, or t
gatccctctcctttggtcagattattatgttctcagttctctctccctgctacccctttctctgcagatagatagacactggcattatccctttagaagaggggggggcagcaagagagcctatttgggacagcattcctctctctctgctgctgtgacatctccctctccttgctggctccatctttcgtctgcactaccaattcaatgcccttcatccaatgggtatctatttttgtgtgtgattatagtaactactccctgctttatatgccaccctcttccttctctttgacccctgtgactctttctgtaactttcccagtgacttcccctagccctgacccaggcactaggccttggtgacttcctggggccaagaaactaaggaaactcggctttgcaacaggcattactcgccattgattggtgcccacccaggcacactgtcggagttctatcacttgcttgacccctggacccataaaccagtccactgttatacccggggcactctaaccatcacaatcaatcaatcaaattcccttaaatttgtatggcactggaactttggcaaagcacttttgacaagttgtgtctgattggagcttcatgatagccttgtgacatctttagggcaggattcttatccccattttgcagatgaaaaccctgagtcacagattctgtgggactgtggatctcactggaagctatccaagagcccactgtcaccttctagacacaatgatagggctagacagctcagttcaccatgattctcttctgtcactctgctggcacaccagtggcaaggccagaatggcgacctctctttagctcaatttctgggcctggaggtgctcagaattgccccaagatcaaatctctcctggctgtagtaacccagtggaatgaatttggacatgccan

SEQ ID NO: 43995 - DNA, 581 bp, Homo Sapiens
aaatttcctaatattaaaaatgcaactttgacttagttcatgctattgtattagcaaaactgttttaattgcatgtgtccttatagcagcagcattgtgtattagtagccttttaagagaactgtgtagaagactataaaaagggctttataactgatcttttgacatactcactttgagtggcatatgcccaggaaaatatttaaaagaaagaaaagctatttgtacaaagttttctagcagttccactcagataactttaagggggaaaaaagcccaacgattggaaatggttaagtaaattttggtgtattgctagtgctatcacagaatgttatatagccattcaataatattgatatatgtcaaattgtatgcaaaaaagtgagattcaaaaatgttaataagaacataaattgtgtttactgatacatgtgaaaatttaggtctacattgaaaagaatcagaagataacatgtaattcagtttaacattaggggttctttatttttcttctgttaaatattgatgtatgcaataaaaaataaaagattaattggtaaaaaaaaaaaaaaaaaatg

SEQ ID NO: 43996 - DNA, 748 bp, Homo Sapiens
ggtaccggtccggaattcccgggatcacagaccgccactcccttcatgaggaggagaacaacatctttaagcggtcaaggaagaaggagcgacagatattgcctgtkctgcaagtgcagcttcttgcggctggactccttgccaccaaaccaggaggccatgttgtctattctacctgctcactctcacacttacagaacgagtatgtggtgcaaggtgccattgagctcctggccaatcaatacagcatccaggtacaggtggaagatctgactcacttccgaaggttttcatggacacattttgtttcttctcatcctgtcaggttggggagctggtaataccaaacctcatggccaattttggccccatgtacttctgcaaaatgcgtaggctgacatagtatcacccaatccctgaagcaagaatacaaagggtatactctgttggatgcaccagaaactggaaactgggaccagtggcagagatgcactctcggtcctgtctccatcctgttcgtgtctttctgcagttttcggcaataagaagtagaagatttgctgtcctgctgtccaattgtggagcmtcmgcmggtttccmactcactcattaacccctaccccatctccaggcctgtactaaagtttgctgcccgcttaggggcttagaaggagmagccagtgagcmggctcmcmctaagttgtaaacataggagmagcatttggccmatamagttgttgaaamtcta

SEQ ID NO: 43997 - DNA, 623 bp, Homo Sapiens
cagcgcgtccgcatcagagtaccaaaactgatctatttctcagtaatgagtgtgtgcctcatgcctgtttcaatattgggttttggagacattattgtaccaggcctgttgattgcatactgtagaagatttgatgttcagactggttcttcttacatatactatgtttcgtctacagttgcctatgctattggcatgatacttacatttgttgttctggtgctgatgaaaaaggggcaacctgctctcctctatttagtaccttgcacacttattactgcctcagttgttgcctggagacgtaaggaaatgaaaaagttctggaaaggtaacagctatcagatgatggaccatttggattgtgcaacaaatgaagaaaaccctgtgatatctggtgaacagattgtccagcaataatattatgtggaactgctataatgtgtcattgattttctacaaatagacttcgactttttaaattgacttttgaattgacaatctgaaagagtcttcaatgatatgcttgcaaaaatatatttttatgagctggtactgacagttacatcataaataactaaaacgctttgcttttaatgttaaagttgtgccttcacattaaataa

SEQ ID NO: 43998 - DNA, 890 bp, Homo Sapiens
tcaacttttggctataccctactggcagccatagtagagagagcttcaggatgtaaatatttggactatatgcagaaaatattccatgacttggatatgctgacgactgtgcaggaagaaaacgagccagtgatttacaatagagcaagattttatgtttacaataaaaagaaacgtcttgtcaacacaccttacgtggataactcctataaatgggctggtggtggatttctgtctacagtgggtgaccttctgaaatttgggaatgcaatgctttatggttaccaagttgggctgtttaagaactcaaatgaaaatcttttacctggatacctcaaaccagaaacaatggttatgatgtggaccccagtccctaacacagagatgtcttgggataaagagggtaaatatgcaatggcgtggggtgttgtggaaaagaaacaaacgtatggttcgtgtagaaagcaacggcattatgcttcacatacyggaggggcagtgggtgccagtagtgtcctgctggtccttcctgaagaactggatacagagactataaataacaaggttcccccaagaggaatcattgtttctatcatatgtaacatgcaatctgttggcctcaatagcaccgctttgaagattgcccttgaatttgataaagacagatcagactgataaccttaacaccataggtgcaaaatgagttgttctgaggtttttttgaaacattaaagttccaaaacatgacatttttaagaataaatttgaaatagagtataattgaatgcagagaattatgtacctctaattgcttaattttgtaatggtcttttattgtagaattggttctttatactcagggaagtaattatattgtttttactttttga

SEQ ID NO: 43999 - DNA, 800 bp, Homo Sapiens
tgtggagtctgtgcagagccagccccaggagcccgtgagtgtgccccagacactgactagcacgctggagcacattgtgggccagctggatgtcctcactcagacagtctccattctggagcagcggttgacactgacagaagacaagctgaagcagtgtctggagaaccagcagctaatcatgcagagagcaacaccatgatcaggggagcaggaatcaggagctcggtggatttgcaggtggcaggccagggatttgtaccatgggacttgggtaaataaaggggactgaactctgtgggaatcacatccatactggagccctggatttttgcagttctgccctccaccttgctatctgcaccaggaggctctccacctggcagccagaggtccccagtgggccgggctcacacacaaatgatgcttcagacccgaatgagaggaccacattttgcttaatgtaaaggagccacttgaaaatgtctgctccttcggggtcctgagattgtggctccccctctggaggaggtggctccacgatgccttgattttcactcatcatttggacatgtgactggcttttcctacctctgccatggtgtagaaattgattgcacattgattggatgagccgggggttttctctaaatctgactaaaggcccaaagtgggcccatctgagtcaggtttgttgagaacaagccctctcaagtgggtggtggcttttcagtggccctgatttctgttccacacgtgttcactggagccaggtgacttcctccttgcgtgagtgaggg

SEQ ID NO: 44000 - DNA, 921 bp, Homo Sapiens
  misc_feature (871)..(871): n is a, c, g, or t
gagagacgatgggctgggtttgtttactccaacttcccttctacacccctcctgcaggacagtacgatttggggagaacccagctccccactttatctgcagactctgggacctgacaaaacagtcagagcctgagtgcactgcagcctgaactcccttgagcagcgctataagggactttgcactttaaaaaggggatgcctgtcagtaaatcccctgtgcattgactagaactggggggctgcgcccgctccctccttaatcctagatgatttgctcatgaaatagaggtgggggacgaccgcatgcactctgggaggtgcagccctaaggggtggactccagatctccctgcaagagacagcttggcttggctttggctgttggggaggagtccctgccatcccggtgagcctggggctgttgcttagggtcttctgggtggacacgtggagaaagagaaggcaaacgttggaacactaggaaaagctagaaattcagacaacacacatggatccccttaaaacatgtaaatgtgtcagaacacggttgacctgccgccttcttgaacctggtggcccccgttggaactatcagtggcgtctcccatgcacacgccctctgctttctctttcctagactcgcggtgctcacatccagacattaccttgttggtagcccccaagtggcgtgcagtgacaccagtatcttctctgttgcatttttgcaatcttgtgtcccgctcggtgatgttctacaaactctggttttaaggttgagaaagtttcaagggtgaagatctcaaaacagtgctaaaatcaaagggtgtttgctgtgaagaacaaacatgtgtatatattgcacctttganttggccaaaaagtaaaaaactggaaataaactacctttttaaaaaaaaaa

SEQ ID NO: 44001 - DNA, 777 bp, Homo Sapiens
cgcgtccgctatatttatttttgattcatttgaattactagttataactggagaaattttgttacctctatcctggcttgcctgactggctgtataatagcagcagcctcttttagagcatcttaatgaaaacatggatgaaaggaattaatgatgatatctgcagactgcgtagaaaatggcttttgttcccagcgttaacattttcttctcaatcacatttcaatgtttgtggagagtggcagattcacaccagaaacactaggtgttcatatccatagcatggatgcagaataagcagttgggagagaagcttcttcctacctggtactcctcccattcacctcagcccagccccagacaggcgttagcattcagtgtgggccctcaggcagccctgaagcctggctgggtcatcagatgggggcagcctgtgacgggcaccagcggcctgattccagggaagagttcctggagggtgttggctgtttttgttagctcagtttttttctgggctccaccattcctaactccaggtagacaagatagatgtcacacacaacaattttaaagtattttgcttagtgcattttgtttatgattgcagtgtttgtttcttatttaataggctttttacttcattctattaaattttagtgtttagaagaggcgggtactgtcactgtgtaaaatatgtaatattttatatgttataccatgtcatatatacttgcaatatcagaccttgcattcaatatacaatgcaattgactcttt

SEQ ID NO: 44002 - DNA, 862 bp, Homo Sapiens
  misc_feature (835)..(835): n is a, c, g, or t
  misc_feature (838)..(840): n is a, c, g, or t
ctggcatctgacctcctggacaacaaccgcatcatcgaacggctaaatagagtcccagcacctcctgatgtctgagctccatggggcacatgaggcatcctgaagcattagaatgattccaacactgctcttctgcaccatgagaccaacccagggcaagatcccatcccatcacatcagcctacctccctcctggctgctggccaggatgtcgccagcattaccttccactgcctttctccctgggaagcagcacagctgagactgggcaccaggccacctctgttgggacccacaggaaagagtgtggcagcaactgcctggctgacctttctatcttctctaggctcaggtactgctcctccatgcccatggctgggccgtggggagaagaagctctcatacgccttcccactccctctggtttataggacttcactccctagccaacaggagaggaggcctcctggggtttccccagggcagtaggtcaaacgacctcatcacagtcttccttcctcttcaagcgtttcatgttgaacacagctctctccactcccttgtgatttctgagggtcaccactgccagcctcaggcaacatagagagcctcctgttctttctatgcttggtctgactgagcctaaagttgagaaaatgggtggccaaggccagtgccagtgtcttgggggcccctttggctctccctcactctctgaagctccagctggtcctgggacatgcagccagggactgtgaagtctggggaacgtccaaaggcctgcacccttccaaggaagtgggaaataaatggggggccttttggccttcctggnccnnnaacacaaaaccccccgccataa

SEQ ID NO: 44003 - DNA, 969 bp, Homo Sapiens
ggcaacatggccgagagsggggcctccgggcggcgccgtgtccgcgaccgcgtaccctgacacccccgcggaattccctccgcacctccaggcgggtgcgatgcggcgccgcttttggggcgtattcaactgtctgtgcgccggcgcgttcggggccctggccgccgcctccgccaagctggccttcggcagcgaggtggtgagcatgggtttatgcgtcttaggcattattgtgatggcgagcaccaattctctgatgtggaccttctttagccggggcctcagtttctccatgtcttcagccattgcatctgtcacagtgactttttcaaatatcctcagctcggccttcctgggctatgtgctgtatggagagtgccaggaggtcttgtggtggggaggagtgttccttattctctgcggactcaccctaatccacaggaagctcccacccacctggaagccccttccacacaagcagcagtagcaccacttggctagacggaccagctggaaagatcatgatggtggcccagccttgggatgtcatgtgggactgtatcctagggcgatccagttgtgcagccttctgaccatcagccaagggaagcaggcctctgatggagcaggctctggctctgtaaggagaggtgcagctgcagcagtgttctaccggaagtgttttgatcatctgtacagtgctttggattcttcctcccaggcctaccccagtgagccttcgcagatgctggagatcctggggttggtctgctttgtgtatggtacttgaaaccacgctgtaattattgtcctgttgccaaacaaaagccagtcatgtaactctagaagcagtgactggtgggggctttctgacagttccatgctgatgtatcaggccatctgtgtcatgcttatgtattatggcaagaagaggaaactggattaataatacgtttttggtagtwaaaa

SEQ ID NO: 44004 - DNA, 580 bp, Homo Sapiens
  misc_feature (37)..(37): n is a, c, g, or t
  misc_feature (81)..(81): n is a, c, g, or t
  misc_feature (98)..(98): n is a, c, g, or t
  misc_feature (410)..(410): n is a, c, g, or t
  misc_feature (465)..(465): n is a, c, g, or t
taaatatctgcactcatcaaagggaatatagcaaatnttgatcatctgtcagcagttttgcatgtgacacctttatatganttattttcccaattttngctctatgtaatgggtcaccataaaactgtaagacttggcaaatgctatagaaaaggttcaggtttcagtattctctctgaaggcatcattcctgggcttccggcagcatcacacgcttccagtgcctgcggggtgagggtgtgtggcacagaggcaagcagctcctctcttctgtagggagctttgggttttcagagggtgcagggaaggcagtttttacaggttaccgttaaaacagaggtttccgttccagtgttccttatgatgcctccccatttttaaaaaggaaaagaggattcttatgggaaaantggggaatgtaatgtggggttctgttcagagcttcctacagagcaccagttgccntttaagttttccttttaaaaggatggtaaaaattattggtattaattaccagttttggtcccctaccaacaattggtatttttgcccaaggctttaggtggcaatttattggtta

SEQ ID NO: 44005 - DNA, 689 bp, Homo Sapiens
ggctttagatcatttactttgatctaggaattactgtctggcatttcgtggtgtagggtaggtgtctccagcactgtataggtgtctggaattgagataagaatcaatttcaatacaaaatacattttttgcttaaagcacgcaaggattctatgaattcaggtaaattcacagggtggaaaacaggaactaatgttatatattcctgtagttatcttcataatgaagcagaaagaaaaacaaaaaagttacaaaaataaatgaaaagaactgtattttctagaattgaaaaataattcttttagatgatagataagatgtttacatcaacctgcaaaaagtcaatgttgaagaggtctcattgtatctcacagaattttgatttgcctactcacccacaggagacatttctgggacagtagcaacataaggtccatcccaaaactttggctcattatcattaatatcctgcactttgatgatgaattctgattcaggctccaggggctttctggtttctatgtccacagcctgagcacgaagagtgtagaaaggtttttcttctctatctaggctccttattgcatgaatgtcccctgtggtttcatcaatggtaaaaacggtgccagcgccatctcctgagagggtgtatttcgcagtgccctctcccttgtctaagtcggaatgga

SEQ ID NO: 44006 - DNA, 520 bp, Homo Sapiens
ttttttttttttttttgtcaagattgatttttagatgcaaggacttgaaaagacccagaaggatgccaccagtttttccttgaggcctaggattttttattctgtcccgagcagaggtaattcctcacaacttagtgcaccagtagcaccagccattttgagcagagtacctctttggggagcttttcgttttgttttgtttttaattctctttccttagcagcaaggtcttttttcctagagaatctactccgttgcagaatcattgcaacctcaggagccctcactgattgagtgctgtcagcctgatatactactttggactctggaaacagatatgggttctattctctatttctactgtgtgtcgttaaacaaccgtcggagaccagatgacctgttagatggctagtcctgtataactcgactctgtatgtttcaatgtatgttactgtaatgcttcacctgctgtacagtgtttgtgagatgctctttgaagatgggacttttatattttttc

SEQ ID NO: 44007 - DNA, 718 bp, Homo Sapiens
  misc_feature (12)..(12): n is a, c, g, or t
  misc_feature (17)..(17): n is a, c, g, or t
cctaactgaaanggatngcatttcggcttttaaccagtttggttctgatcattgcaacctctgtgcttttataattcaaagaacaaggatagctttcttcggtatcttttaatataagaacactgaattttggcttgaaatattgtgactaaattgcacaatctctggctattagcactgttcactacattaacatgcaagagagagagaagccttgttacatttcctgctatttaacaaactgtccaattaggtcagcaagcctgttagggccttcactgctacgcccctggccccaaaacagagagcaagacagttgtccagagaatttagatatgagttaagagctgccagatttattttaaggcatgtagagaatctcataatctatgtgaaagtcacttgccaaaaaggttttggttatgaaagtgaatgttatatatttaatattaagtgaacctcccgtgccttttaaaaaataccaacattatgaaatttaaaagcttaaatatatttgcctagttgataaagaggctgtggaacaactgaaggagaactttcagaccctaaaacagttatattacttagatgttaacattttctagtggggctgtgcaattgctgggttgtcccccccaacatattttaatatgttatttaaaatgattttaccccaacctaagtattaaagtatatgtgcaaaaaaaaaaaaaaaggc

SEQ ID NO: 44008 - DNA, 945 bp, Homo Sapiens
agggctggtaaaccggtccggaattccctgggataataaaaattataatttaaaattgtccttaaagctggaattcttaacttattgaccttatatcctacatattataggactttgtaaatttaggctgatatggaaatgtatatttatatcaaatttaaatttttagaatgatggtgctactatattctaattgttaatttgataattgtaattgtaatttgttaatttgttctaataatattttcatgacattattcatttgctgcttggcttgatggcataacaagtatgggttatttaccctgaaaaggaaacagtatcacccttccagaatctctatttacagctacagaagatgcaacacacctgtttctggaccacttccagatcagatgtgatgcatgctttagatcatttactttgatctaggaattactgtctggcatttcgtggtgtagggtaggtgtctccagcactgtataggtgtctggaattgagataagaatcaatttcaatacaaaatacattttttgcttaaagcacgcaaggattctatgaattcaggtaaattcacagggtggaaaacaggaactaatgttatatattcctgtagttatcttcataatgaagcagaaagaaaaacaaaaaagttacaaaaataaatgaaaagaactgtattttcctagaattgaaaaaaaatttctttttagatgaatagataagatgttttacatccaaccttgcaaaaaagtcaaatgtttgaaggaggtcttcatttgtattctccacagaaaatttttgattttgccctaactcccccccccagggaaaaacatttttctggggaaaagtatagcaaccataaaggttcccatccccaaaaaacttttgggctcccattattccatttaaaaattcccgggccaccttttggaatgaatg

SEQ ID NO: 44009 - DNA, 796 bp, Homo Sapiens
cgcaaaaatgtgaacaaaccagtcggtggaactaatgtccctgagatgtttatcaaaaaagaagaattacaagaactaaagtgtgcggatgtggaggatgaagactgggacatatcatccctagaggaagagatatctttgggaaaaaaatctgggaaagaacagaaggaacctccacctgcgaaaaatgaaccacattttgctcatgtgctaaatgcctggggcgcatttaatcctaaggggccaaagggagaaggacttcaagaaaatgaatcaagcacattaaaaagcagcttagtaactgtgactgattggagcgacacttcagatgtctaattccacatgtcagaagattattccagaagccagcagtatttcagtatcacagtgtttcagtaatttgcctccatgattctagtgcttctgccttaccgtgtttcccacagcaacacagagactgattcaaagaacaatggtctctttaatggcacccaatacagtattgaaaatcagatcatcaacagtatttcgaagcatgtaaaggtgtttaagacttccgctgctgcttaaaaataacatgtcattgaagtcataaaaagttttttcttcagaaaggtactctagtgttaagtgtatttttttcaactaattttttagtgaatttttttttaaacttacagcatgtttgggtttgaattactaaaactttaaaaaatatttttcttatgtatgctgtcgtatcgtaggcgttttatattataaaaattctgttagtagtcttaaaattgaattggtg

SEQ ID NO: 44010 - DNA, 616 bp, Homo Sapiens
cctagatcccatttgtccgagaggctttggtgcttagttaaggtgcattttcttactctaggtttatagagtgatgtaattcaactgaagaaaacacacacatgcttttggtgcttattcttcagttaaaaggaggtatccattgattcttttatatgaaattaaatcaaactgttatttttatagctcttcacatattaaaaagagctttcatgtacatttacgtgtttaatttacccaacaatcttgtgaagttgatataattaatatctttactgttttaaaggtagagaactgaagttcagatatattgaaactttcttaggacatgtagcaagtaaacagtggagcccaggtcccctgactccatatcttacattcttttactaataacatgtcatgctgagattcagaaggcccatgcttataatttaaaaatgagactatttcagtatttctttgtgtttgttttctactattcctttctgagctatgttttagagaaaacaatttgatatgcttcaattttgtaaaatcaaattacatatatataaaaaaacctatctgtattagacaaaaactgtttttatttatttctgtaagatatccattaaat

SEQ ID NO: 44011 - DNA, 629 bp, Homo Sapiens
  misc_feature (511)..(511): n is a, c, g, or t
cacaccttaaaaaagtaagtttaggattagaatattgctaggtccaatgttaaatacattttcctggagtacatttgtcacattcagctttgagccactgtaagcatgttactattaaatggttggttattttatatagcatattctttatcttggatattttatgaataaagtatagttattttaagtgccaattaatttatcagactaaatagaaaatatttgagccattactgaattcacatatgtatgttactttttactatttaaaatacccaacatgtattatgaaatacctcaaaagtaatttagttacattcttaaacaatgacattgtcgaaagaaagttcttataagctgttttttgcatttttataacttggttatactatattctgtttccaagtaaccttttaactaaaagatttgttgggttttagatctcttttcatttgtcaaccttttcagtaaagccctctgttacatcacaaaaaaaaacataatattaacntgaaaaataaagtaacaaatgtacaggttacaaagttttaataatattttagctggagttaatatcccgcctttatttgggtttggcccaggcacaagaggtagatttgacccctccc

SEQ ID NO: 44012 - DNA, 835 bp, Homo Sapiens
  misc_feature (650)..(650): n is a, c, g, or t
  misc_feature (751)..(751): n is a, c, g, or t
ttggctccgaggtatttttagctacgatccagcccccctccatcaccacaacagtcgagtccaaatcaaacgcgctccaggcaggtggggctggggttctgccagcctcctggccagcaggggtgggtgggcagactggggccagtatcagctgttctgcctggacccaggccgggctgggaaggcacacttgtgcttatttcccgcctccacttctgtgcaagcttgtgctgtcataagcagagatcacagccccatttcttggatggagaaagtggacactgaggtctgaggcttttgaggacagtcaggagccctcctatgggctccagtgatgcactcaccagcttctggtcctcttcttccacctcttagagtgccttggctccctcctgtcgtcctggggaacctcggccccagccctgcctccccagccagtcacagctcctccctggtcaccctgagggagctcagggcccggctggtagctgggttgctctgcttctgtccccgactcctgtggagcctggcaggcaactccatgatctgaccccggttaccttgacagccctgcctggcctcccctctcatggcccagccaccccagaacctgaagaggttttctagctgccgtgcatttgccaggctgngttacccaccctactttccctgcctgccctccagtgctgccaggcctagtgtgccagccagcgctcagccttcagtaaagggttcccctgctttcaacctncattgcactgcttcccctaagactgtgacctcctggaaggctggagcacaactgcctctcaataaacgtgttgcaaaaagggaa

SEQ ID NO: 44013 - DNA, 802 bp, Homo Sapiens
aatagtgtaaatcagatataattgagggctatatggcagtaaaactgctagtgccagttttcttgttgcctgttatacattttgattttgttttgtattctgaacatttgagagatcatatgttgttcaattacatttagagtggttgggaataaatatcttctaaaaagagatttatcttaaaaatggaagtcctaaaaattagtttatccagagtttataaagtcaaatattcagtaggcatagactggaatagataaattcatggaaatcatatcctttcagtacaccgtataacttcagtattacacaagtaacattgaggagaatgccatcagcttgttctcccttaaattcttggttttctttttacatttgggaacaactgcatttaaaatgttattagtcagtatatagtaaggattaggtgtttgctttctgaaggaatggtccagtgaggtgattgggagaggttattttctacctaacttgtatatgccctatacctcttgggcatactttgtctatagaaaaatatttgacctttaggtacatttgggccagtagtcaaataatcctagggccgatataaaaatcttagaataatttaaggttggccttttataccttgttctgaaagcctttacatcttgtcaggtaatttttcccaagccgtggatataatctattcaaacatgtttattgctatccattctgtttttaaatggcaacaaccctgttaacaagtgttcatgaagaaaaagttacagtaaaactatttctaatctttttaaaaaaaaca

SEQ ID NO: 44014 - DNA, 569 bp, Homo Sapiens
attttggtcttgtcttggcctggatcatatccagtcaccactatgcaacaaatgatgtgcactgggcaaggatatgatgggttatgaaagctgtatcttgttgttttttcttttgcagtactccaagtggtctaaacaggaatgtcttgtaaaacctcaagactccctattgattattcccttacatatttatttacaatttatcagggtaattggtggtgccttatgaaaagtataactcgatttcttgatctttgagcatgtttgtgtttcttgtgttttctaaaagaatattagatatggttaattgcattacatctaaaagatttaaaaaattgtgtgtatgctcaggttccccaacccatacccaccctaacccctgtcatttacattggtggcaactttaaatggtaaccaagcaaaagtacattttgataatgagtattgataatcctgaggaaaactagtgagtatatgggagccacctttgacctgtgccaaagcagtttctaaatttcatttgctaactataaaaataaagaactgagcccaaaaaactaaaaaaaaag

SEQ ID NO: 44015 - DNA, 892 bp, Homo Sapiens
  misc_feature (695)..(695): n is a, c, g, or t
gaacaactgtgggagtcttgggtactcgcacctcttggctttgttgatgctccgccaggaaggccacttgtgtgtgcgtgtcagttacttttttagtaacaattcagatccagtgtaaacttccgttcattgctctccagtcacatgcccccacttccccacaggtgaaagtttttctgaaagtgttgggattggttaaggtctttatttgtattacgtatctccccaagtcctctgtggccagctgcatctgtctgaatggtgcgtgaaggctctcagaccttacacaccattttgtaagttatgttttacatgccccgtttttgagactgatctcgatgcaggtggatctccttgagatcctgatagcctgttacaggaatgaagtaaaggtcagttttttttgtattgattttcacagctttgaggaacatgcataagaaatgtagctgaagtagaggggacgtgagagaagggccaggccggcaggccaaccctcctccaatggaaattcccgtgttgcttcaaactgagacagatgggacttaacaggcaatggggtccacttccccctcttcagcatcccccgtaccccactttctgctgaaagaactgccagcaggtaggaccccagaggcccccaaatgaaagcttgaatttcccctactggctctgcgttttgctgagatctgtangaaaggatgcttcacaaactgaggtagataatgctatgctgtcgttggtatacatcatgaattttttatgtaaaattgctctgcaaagcaaattgatatgtttgataaatttattgtttttaggtaaaataaaaactttttaaaaagttaaaaaaaaaaaaaaaaaaaactccaagggcatctatggtcggggtgga

SEQ ID NO: 44016 - DNA, 606 bp, Homo Sapiens
caaattccttttataaatgttatagaagcaggaagaataataaacacatttgtgaattgtggttcagtttatttatctttagggaaggctgatcatttatcttatagcacataaccccagcctcttattcattatggttaacttttataatttatcttattttataatttaagaatatagtacatatcagttgggtttggttttggtcatcgagactaaaagctccatcaaaacagaactttgtgttttctgctaacttatttaatgacacaagttttaagagaaccacaattcattgattcacttattcttttccctaattgtgaattttagtgataaatacacctgtactactgaggaaaatattctgacacttcacgtgtgcaaagtatagaactgacagtgtcagtttcagattttgtatgtacgatttctggcttatatatccaatggtgcagattttgaaatttgtaagaacaaaatttgttaagaaaaacaacttgctctagttttgtgaccttgtgtacttttgaaataaaatcaagaaagcagtaaaaaaaaaaaaaaaaaaaaaaaaaaaaaaaaaaaaaaaaaaaaaaaaaaaag

SEQ ID NO: 44017 - DNA, 467 bp, Homo Sapiens
tttttctcccctttactctttgggtggtgttgcttttcctttccttttccctttgagatttttttgttgttgtttcctttttgtattttactgatatcaccaggatagtttactctccttctagctttctgcttaccgcacactggataacacacacatacacacccacaaaaatgctcatgaacccaatccggagaaggttccagcaggtcccccaccctcccctcctcctcctacttctcctcttgacagcgaggacaggagggggacaaggggacacctgggcagacccgccggctctccccccaccccaccccgcccctcacatcatactccaatcataaccttgtatattacgcagtcattttggttttcgcggacgcgcctacctaagtaccatttacagaaagtgactctggctgtcattattttgtttatttgttccctatgcaaaaaaaaaaaaaaag

SEQ ID NO: 44018 - DNA, 682 bp, Homo Sapiens
ggtcgcgaatctgaatgtgttgtgttgttacatcaactagaggcacttacatagggttaagtgatcgaaccctttgtggttttgaacaccaacatactggcttacactgctgaaatatttggggtttcattattttgcactggatccaccctgtaaatactcttaagtatacatttcaaccactgttttttctactctttttgctgctcattaaaatctttcatgtaggtgccagaaccatatgtaaacagctttttaaaaaattgaagctggtattttgtttaaacaaaaagccatagaacttggtcatgttttccattttaaaatgatttactgaaacaaagtaatactaataaaaacccacaggcaccaaacaggctgcttaaaatggtctgttaaagacatttttgggttatggaatataactaagaaaagttttgcacatctgtaagggggaaaaacagtatatcaccattgggtagagtggacgggactcatgtaaggactcaatttggggaagagcattcagtggcatgctgttagaggactagtgtccgagaatctcctcacagtatcatgttgcaggaattccccatggctctgcaacttccaaaacagtttgagtcatacaaatgttttctaaacttttattgtattactgccataaatcttttaacagtac

SEQ ID NO: 44019 - DNA, 743 bp, Homo Sapiens
tggtgggaccacccagctggctccgtcctgcgtgacctgagggccccactggggttcctggaagaggatagggacattattgctgtactgtgattctgtcgtcagctcacagtggccgtgctctgcagtggggcccctgggagcaggtgccacctccttcctctcccggggcaggcactcgcctgtccacttctgagtccaggtgttgggatcgaggtgttaactgtgattccatccagcgagtgcccacccaatgtcagagcagcccgagggccagcctgagcccctgaccccacttccttctgggccccgggctcctcccacaagccacgttgatcttcacaacgaccctgggccgctggggtcacccaagagaagcagccctgagacccagccaggctgggcctagctccacggcacgggtgtctcccagccactgcccttgctggaggaccgctgtgagtcactggccaggagcccagggtgtcctgagtctcatagccaccctgccagctgcagcaggtcctgggcctgcttccctgcgggttctggccctgggggagggggcgttagtgcggcggagggtcttgccaaaggcttttcatcctaaatagcaacttgagtggaaacctgggcaaggcggccagaggctggccctgcacataaagctttcgtgtgtgtctggccgtctgaatggtgcctctgtgagcggctcgtcccggggcccggaagctggggaggga

SEQ ID NO: 44020 - DNA, 676 bp, Homo Sapiens
  misc_feature (599)..(599): n is a, c, g, or t
  misc_feature (622)..(622): n is a, c, g, or t
  misc_feature (662)..(662): n is a, c, g, or t
attattttatttttgagtgcaaatacaggtactgttggagttgatgggcaccatgctttctcatgaagtagcatttccctaccatcaagccattgttttgtgccattcaggagaggaaaaaaaggaatttatgctgtacatttcagttcagtgtatgaccaaaagcaatatgtttataagaagatgtttgacatactaattattttatatcatttaaaccatactgtagcaacataatatatggagctaatttgtagaattatttttacgatttccaaacaaatgtactgtactgttatataatttattgtgaggaccttctcatggaagccattaggaaaacaaactagaggtaaatatcacattaatctgtattatcaatttctcatagacactgtgctaatgtgaattttaaatgacctgcatcaagtcttctgatctcagataactcagtacagatagcaattagtcagctgatttgattacaatggagtaaccgacaatatatttatttataaagcacatattcataataacgagaagaattcagaaaaccacttaagcaagacccttctgaaataaaaaatgttgctttttanatagtttgtcctaaggtgtttanaacatgtcaaccttatgtaaggaaaaatttcctggtccanataaagttgaagtt

SEQ ID NO: 44021 - DNA, 856 bp, Homo Sapiens
ttctgtgctgcttgcaagtcatagctttccttgtccccccagctgggccaggctgtgctccctgaagtggctttgacgtggggccgtcccagctcccgcagcccctgtccaccattgactctccccggtagtggctgctgtggctgccccatcccagctgttgcaccagccacagctcctagtggctcatgggtgcctcctgccccacactggggcctgccataataactggcccaggtaccaatgcccaggttggaccccctgtctggggtgctgtgcaccccctggagcctgccctcccttgggaccaggggagactcctggcctcagccagtgcctccccggccatctgggtggggtgcccacaaaccctgtgcccccagtttctgctttctggctctgcttccagggatctaacctggggggtctcagcaattctgtggcagcacatagacagcgatgaacctacccgcccacagcccattttgaggaagaggtgatggcggccaggcaatgcaagagctcagtttattaactgtgtgcgagtcggacaaaaaaaaaaaaataaaacaacaaccaacaacggggcgcgcccgccaaatagctccccccacgagggggacccactactagaccgctgccccgattgtctggtgccaccgcggcgccccaagggagcaccacatcaaacggacagccagtggccacctcaccgacccgggcacggagaaaccacccagcccgtcgactctgaagcgaaccaaccacggcgcggcacacagcgagacccccaaacggatgagcctagggcatcacactacggcacggtcacacacatgcgcggcatgcccgtcac

SEQ ID NO: 44022 - DNA, 620 bp, Homo Sapiens
caccagcctaactctgccttacccagaaaccaaccacctaagaggaaaactcagaagatattaatgaaaactaattgaaagtacgcacacttctcatgtaggaacaaaattaaaattttacatttttattttacaaaattaaaaaattacattttgtaggaacaaaatgtaaattttgtaaatacaaaattctttttaaagtcctgtttaaagaacagtagaactaagtgaaaatattcagaacgagctccttagaagaaaggaataagaactttttactggaactattttccatctctagaaaaagtgcttcttcccctccccctccctctccatggtacgtttttgtgaaaatgcttttctgtcaggtttaaacaaacagtttgacatagctcgttgacaagaacatattgtaaaacaaatctaattaaagagtaatatgtggtctatttgtgttcctgttgtaataatttgataagtaaacttctgagggcaaaattactgtttaatattactcttaaaatgttgcatgtttggcgtcattcctaagagccatgtaattttaaacttttaattgcagttagtgaatatgaaaggatttctgaataaaaatctatcca

SEQ ID NO: 44023 - DNA, 622 bp, Homo Sapiens
ccatttcatatagctcaaaatcttaaaatctagggcatggccaactaaattactttgattctgtttaccttctctgatgacaattccatcaagccttaaataggaaaatgtcgaatctagggtaatttatcacttttgtgtgcatcttatctgagtccagccatctggtactgctgtgcattttgaacaccgtgggcataaacaatttgttgaattactaagtgaaaacaataataaagaagaaaatggtcaggagtgtggtttcagcactactaacagatgactgtttctacctcatttgaccataactgtacttgtgagcttctttccttccattcatgactgaagatctgctcaaatgcaccaacactgccaagtgactaaggtagaaaagaaaaatgacaggtatcgtcatctgaaggacagatgaatctttttctgccccttcttcacaatggaatataaggaacaattatgggatgtcatcagaatggatgccataggacctacagctccctttctctttattgtgattatactttaaatatgaacgttgtcttttattgtgtatgttcctatattttcaatgtatctttttccttcagtaaacctgatattcaaa

SEQ ID NO: 44024 - DNA, 714 bp, Homo Sapiens
cgtccggcggccgtgtggcgcggctgctcgccccactaatgtggcgcagggcggtttcctcggtggcggggtccgcggttggagccgagcccgggcttcggctgctggccgtgcagcggcttcccgtaggagcagcgttctgccgggcttgccagaccccaaactttgtccgcggcctgcacagcgagcctgggctggaggagcgggcggaggggacggtcaacgagggacgcccagaatcggacgcggcagatcatactggtcccaagtttgacatcgatatgatggtttcacttctgaggcaagaaaatgcaagagacatttgtgtgatccaggttcctccagaaatgagatatacagattactttgtgattgttagtggaacttctacccgacacttacatgccatggccttctacgttgtgaaaatgtacaaacacctgaaatgtaaacgtgaccctcatgttaagatagaagggaaggacactgatgactggctgtgcgtggattttggcagcatggtgattcatttgatgcttccagaaaccagagaaatctatgaattagagaaattatggaccctacgttcttatgatgaccagttagctcagatagcacctgagacagtacctgaagacttcattcttggaatagaagatgatacttcatctgtgactccagtggagttaaaatgtggaataaaatatttttatg

SEQ ID NO: 44025 - DNA, 855 bp, Homo Sapiens
gggaccctggcagattaaaaccctcagacttgtaggtaaatgggaacttagaaggttaggaaggtaacccctgttttgtttactaagctggctggactcatgatcactgaagcaatacttatttctgctttagcctcctatgtttgcattccatgaagcttaaataagaattgaagcaaatccctaagatttatttttttccaccttatttatcttctaaaacttgaggaatgcatgtgttcttagtgattcacatccacgggacaaaaactcaagaagaaataagagctgacgccacacaagtcttggctgcttttgttactatacattttctctgagactccagcagagttggggctggaacttggcactggggactcatgtttggaatcgtaggggaacatctggctgttaatcacttgcacagttgagaacatttcctatacatcggcttttaattctagctcttatttcattttgtaatcttattttctttcgtctgcatgttcacaataccaagcattaaatgtattttaataactaaacttttctgaaagaaggttagcttaagttaatgaaaactttggtccctttggaaaatcagccatagagacagggtcccgattagggaatctcccattttcttgtccgaaagctgaaattcctccggcagtcagtcacctgggttacagcacttcctgttcccgggggggataaattctggaccctggggacctgggtgcctctcgaaaatccaagcccatgggagaagcgggacttttcctccccagtttcaagggcggcgtcacggggcaattgcggagacggcgcgcaatgtggggcaccaaggcggga

SEQ ID NO: 44026 - DNA, 915 bp, Homo Sapiens
  misc_feature (776)..(776): n is a, c, g, or t
cattaggttatatctattgagcactataatgttccagcccccgactccaatgaccgcattacccctcctacccactcccattcccatccctggatctttggaaaaagcttcataatcatatctggccctcagacacaatgatataaggacaaatttcttggggaccctgcagtgtttggtctttggccagtctgtccctggcacaactacagaaataaatatatatatatatatttattaaacctttgcttgtatctgtacaatattgatctctgctgattgcttaaaatagaacctgattatctctactactacagcatctcctaagccaaacagccccaccacagaggaggcccactttcacagactggctaagaatcctctagagcattttaagtagttgctctgaattttgcacagcagtctaatacctacttttccctagagctattgcccagaggaacaggactgaggcagaaggggcacttggggatgatatggaaggatctataaggcaagtctaaagatttagtggccatgtcagatgtttggggaagggactctattttccagacatttcagatagccatcccgggctcacctgaggagtgctggcaaagacaagagtcccctgaatgcacatatggtctaagcgtaccttgagaagtcgtgaacattctcccagaaaagggaagaccctagagtcccctcttttgcatttgctgtcgccagatggtgtcttcagcagtgaagcggcatttcctttaacaatctgngatttcctaggatgctcagagaagcctggtaattgaagaccaacccacccaagggaaatcttattcaagtctaatggcttagttgagaacccaaaggctttttggaccttaaaactggttcctcctcaacacaagtttt

SEQ ID NO: 44027 - DNA, 587 bp, Homo Sapiens
agccccttgacccccacgtttgcctcttcctgtgtctcctggccccctgctatctacaggggactctgtccgggacaagtgtgtggagatgctgtcagcagccctgaaggcggacgatgattacaaggactatggagtcaactgtgacaagatggcatcagaaatcgaagatcatatctaccaagagctcaagagcacggacatgaagtaccggaaccgcgtgcgcagccgcataagcaacctcaaggaccccaggaaccccggcctgcggcggaacgtgctcagtggggccatctccgcagggcttatagccaagatgacggcagaggaaatggccagtgatgaactgatggagttgaggaatgccatgacccaggaggccatccgtgagcaccagatggccaagactggcggcaccaccactgacctcttccagtgcagcaaatgcaagaagaagaactgcacctataaccaggtgcagacacgcagtgctgatgagcccatgactacctttgtcttatgcaatgaatgtggcaatcgctggaagttctgctgatggaacagccagccatgaacaaggtgaggaa

SEQ ID NO: 44028 - DNA, 690 bp, Homo Sapiens
ggcaacaatcatgctgaattcaattaatatctcaagctaaaaaactatgtaattgaggttgtatctggagaagatgggaaaacattgtataatttaagcccttaattgtctgttgagcttttagggctgagtaattgcctttcatacaaataaaagctttaactcttttctcaagagtgtaccaccgtccttagaatcaggtgttttaaatccagtttcttttaattaaatgggactgtagtgatccctaccctgtagagaaatcaacagaactagagaagctaagggcttgatcaggtttcccctagaacctgtgttgcctgcctgctgtatcttccatgtctttcttattcaacttctagaagtagagaaggttgggacttgagtgtagaagaaacatcagaataatttcaaaaaacaggaagttggaactataatttttaaattattgtattgtttttacggattttacatgtatagttaaatattaaaattcatctcttgcagttcaataaaagctatagtatagattttatttttaagaagtttatataattcttttgtgaaccaatatgtaaaactagaatatttattaaactaataatatgtattagtatcaataaaatatgtatttatttttaaattggtatgaaacaaaataaaaatttgtagacactcttaaaaaaaaaa

SEQ ID NO: 44029 - DNA, 696 bp, Homo Sapiens
atgtgatcctcaaacattgacactggatgggctgcagcagaggcactgggggcagcgggggccagggaagtccccgagtttccccagacaccgccacatggcttcctcctgcgcgcatgtgcgcacacacacacacacacgcacacacacacacacacactcactgcggagaaccttgtgcctggctcagagccagtctttttggtgagggtaaccccaaacctccaaaactcctgcccctgttctcttccactctccttgctacccagaaatccatctaaatacctgccctgacatgcacacctccccctgcccccaccacggccactggccatctccacccccagctgcttgtgtccctcctgggatctgctcgtcatcatttttccttcccttctccatctctctggccctctacccctgatctgacatccccactcacgaatattatgcccagtttctgcctctgagggaaagcccagaaaaggacagaaacgaagtagaaaggggcccagtcctggcctggcttctcctttggaagtgaggcattgcacggggagacgtacgtatcagcggccccttgactctggggactccgggtttgagatggacacactggtgtggattaacctgccagggagacagagctcacaataaaaatggctcagatgccacttcaaaaaaaaaaaaaaaaaa

SEQ ID NO: 44030 - DNA, 536 bp, Homo Sapiens
aagaaatcagcagacacaggtgtagaccagagtgtttcttaaatggtgtaattttgtcctctctgtgtcctggggaatactggccatgcctggagacatatcactcaatttctctgaggacacagataggatggggtgtctgtgttatttgtggggtacagagatgaaagaggggtgggatccacactgagagagtggagagtgacatgtgctggacactgtccatgaagcactgagcagaagctggaggcacaacgcaccagacactcacagcaaggatggagctgaaaacataacccactctgtcctggaggcactgggaagcctagagaaggctgtgagccaaggagggagggtcttcctttggcatgggatggggatgaagtaaggagagggactggaccccctggaagctgattcactatggggggaggtgtattgaagtcctccagacaaccctcagatttgatgatttcctagtagaactcacagaaataaagagctgttatactgtgaaaaaaaaaaaaaaaaaaagg

SEQ ID NO: 44031 - DNA, 713 bp, Homo Sapiens
tagtcttagtttagccatttccatcagttgaaatgtggtgtgatctgtgctgtttcgtgtgtttgttttgtgtagcttgttttttaatattcatttaataagatgatgggcaatagcaaacatttttactcccaggaatataatttatcaaatgaactgttttatttgccaaagaaacttgtttttaatatcacgggtaatgggtaagtgtgaaaactaggcttttttttatgaaacaaaaaaaggtgacgaataatatggctttgtttctgtttctgaagcctgatttcatttatgccaggtttgaaaaacagatctttttcttaagtgaaagcacctttaattgctctaacggtacatcctgtaaagacagaattctgcatagccttttaggtgtttttacagtatgtgaaaaatacaagactcattctagagttaaattaccaatcttggttgatattatctgcttccatttttattaattggaaattaatatgttgctagtaaatatcggtttttacagtacccagtttgaaaatgtaagttatcaaaacttaatgtagtgaatttgtgtaaccatgtgtattgttgagaatgtatttttatttaaattttattttcttatcaagagtattataaaaattaactttgtgtaactgtcgctgtggaaataactcaaataaattacaagaagcctgaaaaaaaaaaaaaag

SEQ ID NO: 44032 - DNA, 530 bp, Homo Sapiens
agaattgtcctgctcaagatgccaggatttcccccagtgagaacatgctctaaggaatgaccacccctttcttttattctcccacagtgctccatgtacagaagtaagcatagcagtcatatgagcaaccacattcctgaacctttcctcatgctggctctacacttaatcctttacttgtatgtttctgtaattcttacataaattctattaagagggtggcatactgtagtggatgaagctgaggcttatagtaggtaaggcacaaagttaaaaagtaacatcactgggtttcaaacctactggtctctgtgactaaagaacactttcagaaccacttcttgattctgccaccacttgatcccataacaggctaccccttggcctcatgctggagttgtgtgtgtctgtcttcatcccaggctgagctccttgaggtgaggatgttgctgctgtttgcctccctcacagtgccttggtcttagtggatgcccagttgtcttgtgaatgacttttaagaagtgtactta

SEQ ID NO: 44033 - DNA, 661 bp, Homo Sapiens
ccaccttgcattttagtctttgcaaaaaggatattgctaggtatattcttatttctgattgagtattgaatttacatttttcagaatttcattctttgtcattataatccaaaaacaatgtccacatcagacttggaacttctcacttcaaaaatgaaatacagatttagcagtgttgtacataatgatgtccaagcatttttccacctgtttactgagttttccaaccatttactatgtgttgagattggtgggttttctggctgtttttctgaggtgaatgacttgttacagagcctcagtaagaaatttcaactaaaatcacaaaaacataaagtccaggaaaccaccagaagatggatttttagtgtttttgaaatcttgtatttccttttgatatcatttactcattttaattttacgactgccaacttgttacggtattaattatatgtatgtgtttatatgtatgcatataatatatgtatatgtatatgaagaataaagttaagatttggtcaaactatattttcccattcaagtacaaaaatgttttcaaggctgcaaaaagtgtacagttgttaaacaagttgtaaataaagacttgtataaaaattcaaaaaaaaaaaaaaaaaaaaatcttgattctgcggccgcaagc

SEQ ID NO: 44034 - DNA, 762 bp, Homo Sapiens
  misc_feature (11)..(11): n is a, c, g, or t
  misc_feature (83)..(84): n is a, c, g, or t
  misc_feature (696)..(696): n is a, c, g, or t
  misc_feature (698)..(702): n is a, c, g, or t
  misc_feature (704)..(736): n is a, c, g, or t
aaatactatgnataaattatttaaggcatactgcatagcagatctcagtaaatataaagaaaataagtttggatttaggtggnncgagtagaaaaagaagtaatttcaggaaaaggtcaatttttctgtggaaataaatattgtgataaaaaagaaggcttaaagagttgggaagttaattttggttatattgagcatggtgagaagagaaatgcacttgttaaattaaggttatgccaagaatgttccattaaattaaatttccatcacaggagaaaagaaatcaagtcaaaaaaaagaaaagataaaaccaaaaaagactgtgaagagtcatcacataaaaaatccagattatcttctgcagaagaggcctccaagaaaaaagataaaggacattcatcttcaaagaaatctgaagattctctacttagaaactctgatgaggaagaaagtgcttcagaatctgaactttggaagggtccactaccagagacagatgaaaaatcacaggaagaagaatttgatgagtattttcaggatttgtttctatgagacgagagagagaagcctccgctccttaatgtgaaacttcatgaagttttaaacttcatgcaatttgaaattccatataagtttttatctgcaagttacagcttgtgtggtttgtctttggaaataaaaatccaggttctctcngnnnnnannnnnnnnnnnnnnnnnnnnnnnnnnnnnnnnnaaggggcggccgctctagatatcctt

SEQ ID NO: 44035 - DNA, 580 bp, Homo Sapiens
gcatggcaagtctcattcacttcagcacaacactctgtacatttcagtctgatattctactttgccatttaaggacaccattaaaatcatagagattttcagtgacattggagtattgtaattattactttcaaaaaattatttttaataggatgattaaaccaatgagaagaaacacacataaatgatattttgcagtttatctgtattatttatatgcttcttgccaatttctagttttagtttttggattgctacataagactttctttccatttactttatgtgtttttaaaagctgcaggtaatttttaaggtttgatggaattataatggaagccttgtataagttaaatgaaattggtaaaggagagcttactttgtctataatgcattcaggattaaaaattagatttcaaaatgaaatgtctgatttgtaaaatatttaatgttatatcagacttacataaaattttctgtgagaactcaaatgcatttgatttttaatgaatgttctgaatgaaatatgaatttttgtctttcagtctctggagtttatctcaatatattaataaaaagg

SEQ ID NO: 44036 - DNA, 665 bp, Homo Sapiens
gcggccgcggctgtaggcttttcctttttagaaatattactaagcactttccgtataaataaatgaaatacaggctaatctttaggtgtcttaggaatttttgctttttgaaaaagaaaagctaatagcctaactgcagaggaactgagtggatggggtagctgctgtatagatttttagatgagatgatacagtgtggattacactgtaccttgggcgggagagtttgttcttgatatggaattcatatgcttttgaattgcactaataactcagcattaacaagtatattactccttaaattatacatgcattttcaatattcctaaccaaatagtttatagcttattgagaagaagtctgttcttggagagatgttgaaattagatgtttattaaactttaaaatataatgccttaagctgtggcactttaaaaacatctttatatataaattgctaaaaggactgttaatgcttttctcagacacattggcattttacaattttgcacatggtttatttgaaatcaaaaaataactatactttgttttataagtctacctaatatctcatttttgattctcatcgttagcacagttttgttgcttttattaaactattttaactgaaaaaaaaaaaaaaaaaaaaaaaaaaacctcgtgcc

SEQ ID NO: 44037 - DNA, 924 bp, Homo Sapiens
  misc_feature (728)..(728): n is a, c, g, or t
  misc_feature (788)..(788): n is a, c, g, or t
  misc_feature (835)..(835): n is a, c, g, or t
aaaataaaaattggaagaagagcttaaaaaagataagattttaaagagtcccaagttatttaagttgagtgtaattgtcatttaaggaaggcaaatgagtttatcatccttcttaaagagcatctcttttaactgttggacaaaaccataactttgtcattttacaaggaagaacctcttaagaagtcctcagaaccagaagcaatgtgaactctcagcgctggtcctggtgggtttgctgaccatgactgggcaagccgttctttttgctgccatcttcctcatcataaagtgtggaacataggcaattgctttgagattcttggatagaagaggacaacattctgcacctgcccccttttttaaatctttggggaaagatgagtaactttccccactactctgccttcctgttcagtaactcttacttttgcctgaagtaacagcatcttctacttctccatctagagatttttgtgtgtgtgccatcaaggttagcaaactttatacgtagcctaacacttaaaaaatgcactcattatcttaaacctaataaattccagagtttattttggttctcctctgttgcccttcctaaaaaatgagctgaagatgacagtatttttctttacatgcttggttatgacttttaaagttttatttaaataaatgttgaagctcaagtttaaagaagcgttgcagaggcccacggtctcctgggtcccggncacctgtccatattccacatttgctgactgtgctccctgcacttcactcaaagtgagagntcaaatagtctttgagggggatcagctttaggatggaaggacccagnagaggccccgagtgggaggggttctgaaatacagactactggcgagtgtccagagctttttgcatgaaacttcctgggactgacttggt

SEQ ID NO: 44038 - DNA, 501 bp, Homo Sapiens
tcaacatcaaaacttaagatgggcctgtatgagacaggaaaaaccaacaggtttatctgaaggaccccaggtaagatgttaatctcccagcccacctcaacccagaggctactcttgacttagacctatactgaaagatctctgtcacatccaactggaaattccaggaaccaaaaagagcatccctatgggcttggaccacttacagtgtgataaggcctactatacattaggaagtggcagttctttactcgtcccctttcatcggtgcctggtactctggcaaatgatgatggggtgggagactttccattaaatcaatcaggaatgagtcaatcagcctttaggtctttagtccgggggacttggggctgagagagtataaataaccctgggctgtccagccttaatagacttctcttacattttcgtcctgtagcacgctgcctgccaaagtagtcctggcagctggaccatctctgtaggatcgtaaaaaaatag

SEQ ID NO: 44039 - DNA, 547 bp, Homo Sapiens
cctgccctcaggatggcagccctgcctcacacccgctgcaccctcccttgtgcatttcaacaggtgccactgtcccctactttgcagagggctccggggggccagtgcccactaccagcaccttgattcttcctccagagtacagttcttggggctacccctatggtgagtcgacagccagggcttggcagggaggggacgccaagagccccacgcagaccctgctttcttcccgcagaggccccaccgtcttatgagcagagctgcggcggcgtggaacccagcctgacccctgagagctgaccccgtgctgccttctccaggcaggcctggcctctgccctgggactggggcgcccagggcctcgtgccttctctcttggcctagcctggcccactcaggacctgcccagcctctgccagctcctctggcatccgccctcttctccctggggctggggtgggggtggcagggagctgggacctggagagacaactcctgtaaataaaacactttatttgtagaaaaaaaaaaaaaaaaaaaaaaa

SEQ ID NO: 44040 - DNA, 1057 bp, Homo Sapiens
taagctgaagtggttcgttgcctcaacagtgctctacaggtcggctgcggggcttttgcatgcctggaaaactccacctgtgacacagatgggatgtatgacatctgtaaatccttcttgtacagcgctgctaaatttgacactcagggaaaagcattcgtcaaagagagcttaaaatgcatcgccaacggggtcacctccaaggtcttcctcgccattcggaggtgctccactttccaaaggatgattgctgaggtgcaggaagagtgctacagcaagctgaatgtgtgcagcatcgccaagcggaaccctgaagccatcactgaggtcgtccagctgcccaatcacttctccaacagatactataacagacttgtccgaagcctgctggaatgtgatgaagacacagtcagcacaatcagagacagcctgatggagaaaattgggcctaacatggccagcctcttccacatcctgcagacagaccactgtgcccaaacacacccacgagctgacttcaacaggagacgcaccaatgagccgcagaagctgaaagtcctcctcaggaacctccgaggtgaggaggactctccctcccacatcaaacgcacatcccatgagagtgcataaccaggggagaggttattcacaacctcaccaaactagtatcatttttagggtgttgacacaccaattttgagtgtactgtgccctggtttgattttttttaaagtagttcctatttttctatccccccttaaagaaaattgcatgaaaactaggctttctggtaatcaatatccccaacattctgcaaatggcagcatttcccaaccaacaaaaatccatgtggaatcattctggccttcttctccagggagaaaagtaccccttctttttaaccaactttcctcctggccatgtcctttttccccctggctcccccgtgaaaccaacccccccaaacccaaaacacattccttggtaactttcttcccagccaattggtaaattttgaaaaaatggggggatccccctttaaaaaacgggttggccc

SEQ ID NO: 44041 - DNA, 949 bp, Homo Sapiens
  misc_feature (888)..(888): n is a, c, g, or t
gccaaatgtgggcatgtttgaccccagcttcagagtccctggcacccaggcagccagcaccagccaccagcctccgacccggattcagggagccccttcaagccactggctccctcagcagccccacttcccactgctgccagccctccccagtctccagcagaacctgcccatgccagctcagagatcttctgcagaaaccaacgagctgagggaagcccttctgaagatcttccctgactcagagcaaagactgaaaatagaccagatcttggtggcccacccatacatgaaagatctaaatgcgctttctgccatggtgttggattgaagattgtgctgagcgctgagcttgcgctcagggctggctgatcaaactcaagctcacacctgtacctgatgggaatgaacataatgtgaagaaacttatttcccagtgtaaacgcagttgtacagaaaaaaaatgttttgggtataaatctgggttttcaaaaccagcttttttctatatataaattatgctgctattacagatttaacattttctgttaaaggaaagtctacattttctgcctgttcagaactgtttaatagcagttactcttgagtgtatttacctttttatggtttttaaactattttccttaaagccgaaaatattgacaaatggatatggttagccctttataaataaataaaaagaaaagtgttggctttcctaagggaaaaaaacacacacaaaacccgagggactcatggcgggggggggtgaaaaagaggcaaggggcacggggaattggaccggaggcggcggcggtgaggcgaggctgcccgtagggcagcgagggagacgagctggcgagaagtggcctagaaacggggaccgcncccgccagttggatgaggagaggccgcgcgggcaccgcgggaggattaatcgcaccgcgcc

SEQ ID NO: 44042 - DNA, 599 bp, Homo Sapiens
tctctggggccagagcagcttccaggaagtgaagagacccctctccccagtgccccacatctttctctgggagacactcgcgccccctatcctggccagtgatggaggggtatctctacaggggtcctcggtctccatctacttccctttcttcatgtgtttccagccccaccctcagccagagccaggcccccaggcaggagcttcccagcgagcggcctcccctcacttcctcctggtggtcccgttgtctctgctgaatcagagctgagaacggtgccaaaatccaacgatgccccccaggccccttcctcccttcccccggccccccgggcctcatgaccctgggggctgcccccctcggtgctcccggagcctccagtagagtagcgtcacaagcaatctccctggcgcttcctgggtggggacccctgctccgtccccgcttcctagctgcccacttttcagtgttacgaagcctggggaccggggcaggcacccacggggctctccacacgccccctacactgcccgccaccattttgcacactgcctgttcacatgtcgcccaggcgggaaaaatggaaaataaagtgtat

SEQ ID NO: 44043 - DNA, 977 bp, Homo Sapiens
  misc_feature (774)..(776): n is a, c, g, or t
  misc_feature (780)..(780): n is a, c, g, or t
  misc_feature (783)..(783): n is a, c, g, or t
  misc_feature (785)..(787): n is a, c, g, or t
  misc_feature (790)..(790): n is a, c, g, or t
  misc_feature (794)..(797): n is a, c, g, or t
  misc_feature (799)..(804): n is a, c, g, or t
  misc_feature (813)..(818): n is a, c, g, or t
  misc_feature (843)..(843): n is a, c, g, or t
tgctagacacttctggtccaagatctgtaaacctgtcctgaaagaaggtcaagtgtgtaccaagcataggagaaaaggctctcatggactagaaatattccagcgttgttactgtggagaaggtctgtcttgccggatacagaaagatcaccatcaagccagtaattcttctaggcttcacacttgtcagagacactaaaccagctatccaaatgcagtgaactccttttatataatagatgctatgaaaaccttttatgaccttcatcaactcaatcctaaggatatacaagttctgtggtttcagttaagcattccaataacaccttccaaaaacctggagtgtaagagctttgtttctttatggaactcccctgtgattgcagtaaattactgtattgtaaattctcagtgtggcacttacctgtaaatgcaatgaaacttttaattatttttctaaaggtgctgcactgcctatttttcctcttgttatgtaaatttttgtacacattgattgttatcttgactgacaaatattctatattgaactgaagtaaatcatttcagcttatagttcttaaaagcataaccctttaccccatttaattctagagtctagaacgcaaggatctcttggaatgacaaatgataggtacctaaaatgtaacatgaaaatactagcttattttctgaaatgtactatcttaatgcttaaattatatttccctttaggctgtgatagtttttgaaataaaattaacattttatatcaannnaaanaanannnaanaaannnnannnnnnaaaaaaaannnnnnccacccaaaaaaaccccccaagggncccaaccaaacccccaccccaccttttcggcacaaaagggcccccataccggggcggcactataaccagggcccgggcgggccgtgtttaaacgacccggggaggggaggactcgacaaaccggcgccccgtgg

SEQ ID NO: 44044 - DNA, 642 bp, Homo Sapiens
aatgcatcaaagctttctcagtgctctagtaaggactctgattcagaggaatctgatgcaatattaagttacttgacagtcaaagtgaccagacctccaagctatgtttatctcatttctcaaaaaaagacacacctctaaggaacaaggttcctgggctatataagtccagttctgcagactctctttctacaaccaagatcaaacctctaggacctgccagagccagtgggctgagcaagaagccggcaagcatccagaagagaaagcatcataatgccgagaacaagccggggttacagatcaaactcaatgagctctggaaaaactttggatttaaaaaagattctgaaaagcttcctccttgtaagaaacccctgtccccagtcagagataacatccaactaactccagaagcggaagaggatatatttaacaaacctgaatgtggccgtgttcaaagagcaatattccagtaaatgcagactgctgcaaagctttgcctgcaagagaatctgatcaatttgaagtccctgttgggaatgaggcacttatcagcatgaagaattttttctcattctgtgccattttaaaaatagaatacatctgtatattgactttaaaaaaaaaaaaaaaaaaaaa

SEQ ID NO: 44045 - DNA, 500 bp, Homo Sapiens
ttggccaggcccatttgagatctttgaagatatcctcaacgtgaggctctgctgccatgaaggtgaagattaagtgctggaacggcgtggccacttggctctgggtggccaacgatgagaactgtggcatctgcaggatggcatttaacggatgctgccctgactgcaaggtgcccggcgacgactgcccgctggtgtggggccagtgctcccactgcttccacatgcattgcatcctcaagtggctgcacgcacagcaggtgcagcagcactgccccatgtgccgccaggaatggaagttcaaggagtgaggcccgacctggctctcgctggaggggcatcctgagactccttcctcatgctggcgccgatggctgctggggacagcgcccctgagctgcaacaaggtggaaacaagggctggagctgcgtttgttttgccatcactatgttgacacttttatccaataagtgaaaactcattaaactactcaaatctt

SEQ ID NO: 44046 - DNA, 863 bp, Homo Sapiens
tagaagatgctctgtatagtgaatatctctatcaggaacagtattttattaaaaaggatagcaaagaagaaatatattgccagttaccaagagatactaaaattgaagactttggtacagtacccagatctcgctatccattggtagcgctattgaccttagctgatgaggatgaccgggaaatttatgatattatttccatggtgtcagtgattcatattcctgataggacttataaactatcctgcagaatattgtatcaatatttactcttggctcaaggtcaatttcatgatcttaagcaacttttcatgtctgcaaataataatttcactccctccaacaattcctcttcagaagaaaaaaacacagacagaagtttgttggaaaaggtgggactctctgaaagtgaagttgagccatcggaagagaacagcaaggactgtgttgtttgccagaatgggactgtgaactgggtactcttaccatgcagacacacatgcctgtgtgatggctgtgtgaagtattttcagcagtgcccaatgtgcaggcagtttgttcaggaatcttttgcactttgcagtcaaaaagagcaagataaagacaaaccgaagactctttgaagacatcgtaacactgaaaagtacactttctactaaagatgcagaaattgatgatcttggaattcatcataacatggaatctacagtactgaccatcaatgaaaattatattttaacttcatatttgtatggtacttggatgataaaaattaattattccctttctggcttagtgaatgaaatactgggaatccatctgtgttgatacattaaaaattcctttccactcttgaaaaaaaa

SEQ ID NO: 44047 - DNA, 746 bp, Homo Sapiens
ttcgctgtgcatgacccatctcagcaggatggccgaggacctcatcctctactgcaccaaggaattcagcttcgtgcagctctcagatgcctacagcacgggaagcagcctgatgccccagaagaaaaaccccgacagtttggagctgatccggagcaaggctgggcgtgtgtttgggcggtgtgccgggctcctgatgaccctcaagggacttcccagcacctacaacaaagacttacaggaggacaaggaagctgtgtttgaagtgtcagacactatgagtgccgtgctccaggtggccactggcgtcatctctacgctgcagattcaccaagagaacatgggacaggctctcagccccgacatgctggccactgaccttgcctattacctggtccgcaaagggatgccattccgccaggcccacgaggcctccgggaaagctgtgttcatggccgagaccaagggggtcgccctcaaccagctgtcactgcaggagctgcagaccatcagccccctgttctcgggcgacgtgatctgcgtgtgggactacgggcacagtgtggagcagtatggtgccctgggcggcactgcgcgctccagcgtcgactggcagatccgccaggtgcgggcgctactgcaggcacagcaggcctaggtcctcccacacctgccccccttaataaaagtgcggccgcgagcagtacacacacatcgacgaaacaacatgacaacacaacaagggc

SEQ ID NO: 44048 - DNA, 566 bp, Homo Sapiens
cacgagggctatccactgaatgaaaataagaagaatccattgtccaaggtcagagcaagaacacaaaggttttagtttacttagttaattccttaggtttggacattacaggagacatgggggtgaccatagcaatttagctgataaatgtatcagaaactctttcatcattttctgtcccctcctatcttaggctgaccggttccctgatgtgttacctgcttctgctactgatccaaactgcagaacttctcattcatccccaaggcctccaggcagtatccaatggggaatcagctctaaaaggaaccagaccaacgttttccagccccttcattctgtagcttccctctgtgtgaggaaaggatagaaatgttcaggacatcatcatacaggctcctcatctacaaagttccagtagcagtgacgcctacacggaagacttggaactgcaaacaggctggggtcacctcagtgacatctgacgctgtccaaccagaagttcgatttttgttctgggggtgaaggaggaaacagactgtactaaaggactaaaataatttgtc

SEQ ID NO: 44049 - DNA, 585 bp, Homo Sapiens
tttttttttttttactggttccttatttattaccactgacaaatgatttcataatactgaccagagggattacacagctcacaaaaactttccatataagaagcacgatgttaaaacacagcagaggccatcaaacacagtattaatgagaattttgttagcttctaatgataatcattattgtatcagaatgcaattcacactaattattagtaaaagtttacaaacattaaaaagtgcataataacatttggatctgagagggctgaaaaaagacatgaaaacacaacaccagggctttacttttgtgattggtgtccacatgattgcaaggagattactttctccacctgattcagcttagtgaagataagttgtcctccaaatttaaatagtatcatacagcattgtgagaaatttgattccatagaacaaaatatttccagtccttagtatgatcttggcttttcttttctacctttccaattgtccaaaattctcataaattaaaatatatatatatatatatattatgtgggagaagttctccacttgagaataaaacaaatttgacagattgaattc

SEQ ID NO: 44050 - DNA, 686 bp, Homo Sapiens
gcgctttgtggtttatgaagaagatatgttcagcgatcccaactttcttgctcatgccacttaccccattaaagcagtcaaatcaggattcaggtccgttcctctgaagaatgggtacagcgaggacatagagctggcttccctcctggttttctgtgagatgcggccagtcctggagagcgaagaggaactttactcctcctgtcgccagctgaggaggcggcaagaagaactgaacaaccagctctttctgtatgacacacaccagaacttgcgcaatgccaaccgggatgccctggttaaagagttcagtgttaatgagaaccagctccagctgtaccaggagaaatgcaacaagaggttaagagagaagagagtcagcaacagcaagttttactcatagaagctggggtatgtgtgtaagggtattgtgtgtgtgcgcatgtgtgtttgcatgtaggagaacgtgccctattcacactctgggaagacgctaatctgtgacatcttttcttcaagcctgccatcaaggacatttcttaagacccaactggcatgagttggggtaatttcctattattttcatcttggacaactttcttaacttatattctttatagaggattccccaaaatgtgctcctcatttttggcctctcatgttccaaacctcattgaataaaagca

SEQ ID NO: 44051 - DNA, 803 bp, Homo Sapiens
  misc_feature (646)..(648): n is a, c, g, or t
  misc_feature (651)..(655): n is a, c, g, or t
  misc_feature (664)..(664): n is a, c, g, or t
tcgtgccgaattcggcacgagaaggatactggcctaaagaagtctgaagtggctgatgtccataacttctgagtctgtttccaaaagaaagactcttgttaatgctgttaccagagagtagagatttgaccagcctctccctaaaatgtaagcttctcaacaacagtacaggaagaagtgcaagagtagactagaacctttaaggaatttggggctggaacggagctatgttgcatctgttgttatacaggtagattataagttctacatgcaccagccaaaacttaggacaggatgtccccaaattaagatactacagattaccaaatcagaaataaccagctggatttaggccagctcacatttatttggaaattaccctccctgattaacaggcttctgagttgtacgtggaggactaatgagacttgtacaagacaccacggggcttggggtccaggtcccagttggatatcggaacagacacagataagtgtgtttcctcattaaggtggtgagagtgtgccttttggcattcagaaaagggtttagccaccctaagagttggaaataaagattcccaactggaaatgttgcagaatccctacaagtgtctcaataaaagccattttaaaagaaaaataannnatnnnnnaaaatatanatttaaaaaaaaaataaaaacttcgagggggggcccggttcccaattcgccctatagggagccgttttacaattaattgcccggcgtttaaaaccgtcgggaatgggaaaaccctggcgttacccaacttaatcgcctt

SEQ ID NO: 44052 - DNA, 554 bp, Homo Sapiens
gcacgaggagtggtaccagcatcagccttctgcctgccctgtccttggctgctccagacccagggcagagaagcagctcccagccctcaccagccatctgctcagcccctgccaccctgacccccaggtccccacacgccagccgtacccccagctccccactccagagctgcactcccagtctctcaccccgtagccatgtccccagtccacaccaggctcttgtgaccaggccccagaaacctagcctggagttcaaggagtttgtagggttgccctgcaagaatcggccgccttttcccaggaccggagctaccaggggagcccaggagccctgctctgtctgggaacccccaaagaggcatcgtgatggttctgccttccagtatgagtatgagccaccctgcacgtccctctgtgctcgggtccaagctgccaggcttcctccccagctcatggcctgggccttgcactttctgatggatgcacagccagggtctgagccaactcctatgtgagacgtcacgcaggacagataccgctccacactctgc

SEQ ID NO: 44053 - DNA, 815 bp, Homo Sapiens
  misc_feature (593)..(597): n is a, c, g, or t
  misc_feature (599)..(601): n is a, c, g, or t
  misc_feature (603)..(605): n is a, c, g, or t
  misc_feature (608)..(608): n is a, c, g, or t
  misc_feature (617)..(617): n is a, c, g, or t
gggcaagataacttgaatttgccaattctgcaaaatctgtgcttttttgaaaatttaagagtggggacgtgaaactgtattctgtgccttccatcatgatttccacatgaaagcactttaaggcactgattttaagataatgtttttggaaaacccaatgcatatgggtttctgaaatattttatggacttatttctccccaggaaatgattcttacggaaaaaaaattgcttttgtatgtagaacaggaactttttgtattacagtgatgcaatagacatgtctaatgtaacttctacttttccttttgaaagctcagtgtctgtgctatgacttgctctcatcacaatattgttgaattccacaatgtatggacattaaacactggcagactgttcactttttctttttttttttggtaaaatattacttcaaacccctttttcttgctttatttttcagtgttttattgctttatgaactgtttaaccctgaaatccctctaggttatctatactgtataaaaaagcaattaccccttaaaactgtactctggcctacttttctattttgcaattaaatatctttttccnnnnncnnnannnacncaaaaaaanaaaacatggcgggcccgcctcgggccttcgagaagcctttctaaaaccattccgttttggcggcgcgggccccccaaggtaaatggaacatgggttcataacctggtttccctaaggagatcccttggcccatggaataaggggctttggatttcccaccccaaaaaaaaaaacgccgcgcgggggggcaacacggat

SEQ ID NO: 44054 - DNA, 715 bp, Homo Sapiens
atgatcatcgttggagccggaggtggcaggagtcgaggcgctgatccctaaaatggcgaacatgtgttttcatcatttcagccaaagtcctaacttcctgtgcctttcctatcacctcgagaagtaattatcagttggtttggatttttggaccaccgttcagtcattttgggttgccgtgctcccaaaacattttaaatgaaagtattggcattcaaaaagacagcagacaaaatgaaagaaaatgagagcagaaagtaagcatttccagcctatctaatttctttagttttctatttgcctccagtgcagtccatttcctaatgtataccagcctactgtactatttaaaatgctcaatttcagcaccgatggccatgtaaataagatgatttaatgttgattttaatcctgtatataaaataaaaagtcacaatgagtttgggcatatttaatgatgattatggagccttagaggtctttaatcattggttcggctgcttttatgtagtttaggctggaaatggtttcacttgctctttgactgtcagcaagactgaagatggcttttcctggacagctagaaaacacaaaatcttgtaggtcattgcacctatctcagccataggtgcagtttgcttctacatgatgctaaaggctgcgaatgggatcctgatggaactaaggactccaatgtcgaactcttctttgctgc

SEQ ID NO: 44055 - DNA, 480 bp, Homo Sapiens
  misc_feature (476)..(476): n is a, c, g, or t
  misc_feature (480)..(480): n is a, c, g, or t
ggataggtgggcacaagtattacacatcagaaaatcctgacaaaagggacacatagtgtttgtaacaccgtccaacattccttgtttgtaagtgttgtatgtaccgttgatgttgataaaaagaaagtttatatcttgattattttgttgtctaaagctaaacaaaacttgcatgcagcagcttttgactgtttccagagtgcttataatatacataactccctggaaataactgagcactttgaattttttttatgtctaaaattgtcagttaatttattattttgtttgagtaagaattttaatattgccatattctgtagtatttttctttgtatatttctagtatggcacatgatatgagtcactgcctttttttctatggtgtatgacagttagagatgctgattttttttctgataaattctttctttgagaaagacaattttaatgtttacaacaataaaccatgtaantgan

SEQ ID NO: 44056 - DNA, 655 bp, Homo Sapiens
cttggctgtcatttagctctctggcccacagaaatactccatccaaggagctggtcctcagtcagcctgatgaggacaggtcagtggccaaccctttgccccagtccttcatctggagacagtcacatagtcacgtcaacagttcacccaaagagaagaggtggggcctggcttctcccacagggcacagcctaactatggagacccagggctccttcctgctgcactaggcctgtgctctccctattgccttcaggtggtgtgatcccggcttcctcacagagcccttttttccttctgcccagctccatcccaccagagtttctacccccgctgaggcatctcctgggcacagaccaccacactctaagccggctggcctgggagttagggtcctgcccacctcacctgggagttggggtcctgcccacctggagtttagcacgctggtcgctcactttgctttggtctgcacacctggtgtgtgcatgtgtatactgcttgtgccatctgtgtacccctctccctggagtacacttgtggtcacactacagtggggacatcaagaatgcaatatttatggattgctgcatgattcttaaaaatgaataaaactgtttacaagggaaaaaaaaaaagcgcaaaaacagaaagg

SEQ ID NO: 44057 - DNA, 685 bp, Homo Sapiens
gggaaaatccgttctaaagtagagctggaagtgcgtgacctccctgaagagttgtctctatccttcaatgccacctgcctcaacaatgaggtcatccctggcctcaagtcttgtatgggactcaagattggagacacggtgagcttcagcattgaggccaaggtgcgaggctgtccccaggagaaggagaagtcctttaccataaagcccgtgggcttcaaggacagcctgatcgtccaggtcacctttgattgtgactgtgcctgccaggcccaagctgaacctaatagccatcgctgcaacaatggcaatgggacctttgagtgtggggtatgccgttgtgggcctggctggctgggatcccagtgtgagtgctcagaggaggactatcgcccttcccagcaggacgaatgcagcccccgggagggtcagcccgtctgcagccagcggggcgagtgcctctgtggtcaatgtgtctgccacagcagtgactttggcaagatcacgggcaagtactgcgagtgtgacgacttctcctgtgtccgctacaagggggagatgtgctcaggccatggccagtgcagctgtggggactgcctgtgtgactccgactggaccggctactactgcaactgtaccacgcgtactgacacctgcatgtccagcaatgggctgctgtgcagcg

SEQ ID NO: 44058 - DNA, 425 bp, Homo Sapiens
  misc_feature (412)..(412): n is a, c, g, or t
gaaatggcttcagaaatggtttgagttggaagacaacattcttcatctctcaggacttctaattccttgatgctaaaagaagaggcatggattctatgagcttccaagtccctttccactttaaccttctacaaatctttcagaggactgcctagtagcaaaggttattcctggacacaggaaagacgggcattacagggaccaaagctctgaaaggtgacttttattaccaacacactggctggaaaagggacaaaccacatcacgggtgagtgatacttctcagtcttctctactcattcaacaaaggaaatgtgggctggggcagaggtcttttttcatttaatactggaaaaatattgaagagcatccatgttcacttatggctggttttgctatagaaattgggaantaaaggccacttt

SEQ ID NO: 44059 - DNA, 767 bp, Homo Sapiens
  misc_feature (727)..(730): n is a, c, g, or t
  misc_feature (733)..(734): n is a, c, g, or t
  misc_feature (739)..(741): n is a, c, g, or t
  misc_feature (744)..(753): n is a, c, g, or t
ggtccggaattcctcgggatccagcaatggctttcatcacctacgttttggtggctggtcttgcgctggggacccaggataggttctccccagacctcctggggctgcaagcgagctcagccctggcctggctgaccctggaggtgctggccatcctgctcagcctctatctggtcactgtcaacaccgacctcaccaccatcgacctggtggccttcttgggctacaaatatgtcgggatgattggcggggtcctcatgggcctgctcttcgggaagattggctactacctggtgctgggctggtgctgcgtggccatctttgtgttcatgatccggacgctgcggctgaagatcttggcagacgcagcagctgagggggtcccggtgcgtggggcccggaaccagctgcgcatgtacctgaccatggcggtggcggcggcgcagcctatgctcatgtactggctcaccttccacctggtgcggtgagcgcgcccgctgaacctcccgctgctgctgctgctgctgggggccactgtggccgccgaactcatctcctgcctgcaggccccaaggtccaccctgtctggccacaggcaccgcctccatcccatgtcccgcccagccccgcccccaacccaaggtgctgagagatctccagctgcacaggccacggcccctaggcgtggccgctgttacagaaacataaaccctgatgggcatggccnnnnaannaaaannnggnnnnnnnnnnaaaaaaaaaaaagg

SEQ ID NO: 44060 - DNA, 545 bp, Homo Sapiens
gtatccatccatggggctgattgtatttaccttctacctcttggctgccttgtgaaggaattattcccatgagttggctgggaataagtgccgggatggaatgatgggtcagttgtatcagcacgtgtggcctgttcttctatgggttggacaacctcattttaactcagtctttaatctgagaggccacagtgcaattttattttatttttctcatgatgaggttttcttaacttaaaagaacatgtatataaacatgcttgcattatatttgtaaatttatgtgatggcaaagaaggagagcataggaaaccacacagacttgggcagggtacagacactcccacttggcatcattcacagcaagtcactggccagtggctggatctgtgaggggctctctcatgatagaaggctatggggatagatgtgtggacacattggacctttcctgaggaagagggactgttcttttgtcccagaaaagcagtggctccattggtgttgacatacatccaacattaaaagccacccccaaatgccca

SEQ ID NO: 44061 - DNA, 766 bp, Homo Sapiens
ggaagaaatagaaaatttgactaagataattgtgtatatgaatcatttttcccccaagttaaaatgtatcataatagagaggctctaatgaatcaatttccaatactcatttctttcttattttgaattcaagttacaatgactttacactgtagattttaatcttgtctgatgtgtgctggtgtgtatgacacaaactcataagtctggatcatgcttgggtacagtcaatgaatcaaccgagtcactttgaggaatttgtttttgtccaatttgctctgtgctcaatcccatgaattattaaatttacaatgtttgtccccaaatgaaaaccaatataaatgaatgatgttttaatctgtactttatgggaagttgcctatttgtcagtagatgtggttaagtgagtcctctggtgcagtgacatccttttaagccatctcatagggatttaaagaaggccaataggaatatagatattggtttttctttctctgacttgaaactaagtaggagaaaccaaaccataaacctattacaaactacccaggcagaggcatttacttaattcatcaactagtgcaattaaaaccctgaaaacacatgatcctttgttgactctgccttgggtgaagcaggaaagaaatggtctttgatgggcagaaagttttaaaattaatggggcagggccttttctggaacctggttttccaaaccccgttagatatttccgtcttggaggggaatgggaattaggctacagtgg

SEQ ID NO: 44062 - DNA, 890 bp, Homo Sapiens
cggtccggaattcccgggatcggaggggacaatggggtagtagaggtctggcaggcctgtaacttcaagcaactgtacatttaccctggatgtgatgctggcattagagcaatggacttgtcccatgaccagaggactctgatcactggcatggcttctggtagcattgtagcttttaatatagattttaatcggtggcattatgagcatcagaacagatactgatgataaaggaagaaccaaaagccaagttaaagctgagagcacaagtgctgcatggaaaggcaatatctctggtggaaaaaactcgtctacatcgacctccgtttgtacattccatcacacccagcaatagctgtacattgtagtcagcaaccattttactttgtgtgttttttcacgactgaacaccagctgctatcaagcaagcttatatcatgtaaattatatgaattaggagatgttttggtaattatttcatatattgttgtttattgagaaaaggttgtaggatgtgtcacaagagacttttgacaattctgaggaaccttgtgtccagttgttacaaagtttaagctttgaacctaacctgcatcccatttccagcctcttttcaagctgaggaaaaaaaaaaaaaaaaacgtttgkwwatttgttmawccgatgcctctttttttaaarggrwamttttgttaaaawaaaamcttgtttaaaaaaamaaaawgttttctttwttttttgtgggrgwtwcmaahtggctrttccctychcccgttgggttgttgggaaggtggctwwccactmtaaaagarawarataygtkcccrgascrcraytgtttgagagggttgattwtggggcccyacgtaatwtttgygcttattccmcaa

SEQ ID NO: 44063 - DNA, 654 bp, Homo Sapiens
ttttggtatgcaagtcagctttgcctcacagttgaaaatgttcggtcatgattgcttttgaaaccaaaggggaaggtaccgatatcattgagctatttaaagttgccagtttgggctccagtaatgctttctggtgggtaaaattccacattcaggccacgagagcatctacagtttgtactctggggctgcaggcatcctgggacgctgtacgcaattcagtggtctagtcctttataccgactcagattccttaagcatgcagagtcactcgaatgaaaaaacatactcgacctctccctaaaaagatgttgcaacccagtttctctgaattccaccacaaaaagagaccctgaataagaagagcagttttcctgtgcatatagagggtgtgtcaaaggtgagctttttggggaccgggaaaaacaaagttgcctgattccgcgcaggtgcacaggccccggatgtacacccggaaaggggagtgtggctgtagaatcatccatccgtctacagctaaaacaatttgccaataaagtacatgtttttcctaagccaaaaataaatacgttaacagaaaaatgatttaggatatagcttgaatgcttaaatatgtgcacctttacaaacctctcagtgtattcttggagttct

SEQ ID NO: 44064 - DNA, 600 bp, Homo Sapiens
  misc_feature (551)..(551): n is a, c, g, or t
  misc_feature (556)..(556): n is a, c, g, or t
atggagcagaccgtgaaggatctgcagctccgtctggatgaggctgagcagctggccctgaagggtgggaagaagcagatccagaaactggaggccagggtacgggagctggaaggagaggttgagagtgagcaaaagcgtaatgctgaggctgtcaaaggtctgcgcaaacatgagaggcgagtgaaggaactcacttaccagacggaagaagatagaaagaatattctcaggcttcaagatttggtagataaacttcaggcaaaagtgaaatcttataagagacaagctgaggaggctgaggaacaatccaacaccaatctagctaaattccgcaagctccagcatgagctggaggaggccgaggaacgggctgacattgctgagtcccaggtgaacaaactgcgggtgaagagccgggaggttcacacaaaagtcataagtgaagagtgatcatgtcctgatgccatggaatgactgaagacaggcacaaaatgtgacatctttggtcatttccctctgtaattattgtgtattctaccctgttgcanagganataaagcataggggtagttgcaaacaaaaaaaaaaaaaaggggc

SEQ ID NO: 44065 - DNA, 638 bp, Homo Sapiens
ctttgtaattgactataaattggttttgaaatgtccaaacatacgttgtgtgtctttatattgtactgtgtgttttaagtaactggcagaaaaagaattggaaatgaaatttccaatcagacaatgtagtattaaagaaaactttgttttaaatatgcggtaccatgtaaaattactcgtgttaggaataaagtccactgttgaagttgaatgtcactaagcttattatgttaaaaggaaccagtgtgattaggaaaacctaccagaagccagatacagtgtggtacgtgcaacatttcatgcacattttgattttgtttgtcattcaaaattgtgcttgtaaaaatgtatacaatttctgagttttataatttctaggtacttgttttttcttgctggtaaatagcttttttttaaaaaaaatctaatataaaagaaaccatgtttttattttgttagtgatcaatgactttgtttatatggaaatttgtatattgttggcacacattttgttgaggtttacgtgcatgaaggcctgcaataattagcacaatgaaaactgctttttcttacatgttcatttttttgaaagattgtggtgcaaaggcttactctaataagtaaccttctggactatg

SEQ ID NO: 44066 - DNA, 657 bp, Homo Sapiens
ccacgcgtcgcctctgcctgcggctgacctgatccccaagggactgtcctttcctctcctaccccaccccactcccagacagagcagaagtatttttataagcagagaattttttatgtcttaccagatagagttgcagggaagggggggcctgctggggagtggggtttggggggccctctcccaggacactgcctcttctgggcagaaggcccctccaggggactgctccaacaggaaagagcccctcccccacttctaagcactgagttaggagtgctaactcctaaactgggaccccctaccctgttctcccctgaggccccgttcctgggaggggcacccctcaactgtcactttatggactgtctgtgcaattacgtccaccaaagacccgtgttgggggtactgaaggagaggccctgggggaccctctgaagcatttctgcctcactttatgtcatctgcttctcccctgttggggctaaggaaggagataggtggctcctaaaagaggaggccatcttctcacccaccccttcctctttggcacagctactcctggctgggggtggggccttgggggtctgggcatccatggtcactgcctcagcccagcaggctgtgcctttgactttaaaataaaagtcacccagt

SEQ ID NO: 44067 - DNA, 814 bp, Homo Sapiens
ggtttcagcctgagtgacaacgacgtggagaaatccgcctcccccaagcgcatcgatttcattcctgtgtcaccagcaccgtcacccactcggggaattgggaagcagtgtttttcgccatccttgcaaagttttgtaagtagcaacggattgcctccaagccctattcccagcccaacgacccgatttaccacccggagaagccagagccccatcaattgcattagaccaagtgttcttggaccattgaaaagaaaatgtgaaatggaaactgaatatcagccaaagagatttttccagggcatcaccaacatgctttcttctgacgttgcacagctgtcagatcctggtgtgtgtgtatcttcggatacccttgatggaaacagcagcagtgccggatcttcttgtaactcaccagcgaaagtcagcactaccaccgactctcctgtgtcacctgcccaagcggcttctccatttattccactagatgaactttcgtctaagtgattcactcatcctgagactttctttttgcagtggagagagagaataatctagttggggcaaacactgaactttgtcaattaatttgaggctatttcctatttgaccccttttcttttttgaaattccctgaaatgatgttattctagagaacttctatgtcaggttcctttggatacccttgaattcagtgtagtaatattttcagacgtttccccaataagtgtgttgaagcatacatcttttacgctgctaatcatgttctaaatacatattgttatccctttgaaaaaacaactctaaaaaagct

SEQ ID NO: 44068 - DNA, 858 bp, Homo Sapiens
  misc_feature (642)..(642): n is a, c, g, or t
cagtaaagaaattggacagaacagaataatatgaagcaggatcacaaaagaaaaaaaactttggctttcgtattctctttgtgaggacaaatctgttgtttgtttgattactgtttactgagccttaatccaccaagtttatatttagaattttattttttaaggtactaattaacttaaacacagagctataaaatgctggattgaaaattttatattgtaatgtagagataaaagcagtaggagaaacaaatgacataatatgtcgtcataattcctgctattgttaataaccttaaggagtagttgataaattataaaattttaaaaagtcaattcagttctagaaatagatttaaagaatatgaagttctatctagtacttgagcagctgtatttcttttctacacattgatggacttttaatattttattctcatttaatataaacctcatctagggtatatacaaattaaaactgagacacattggctttgtaaatcagtatgtttttacataatggttttgttagatttatttttccatcagtgaaaacatttcttaagcacaaatttcatttccatttaagcaatttgtaagcaaagtccaggtccatttagtttttggatatatttaatggtngtctcctgaagtttgtctttatgtactggaagatattagttgctttccatgtttaaatggatgattatatagcacatatttaattagttggttaataagaagtaatacccatctaggaaagaaattttatgaaggtaaatacaagcttgaatagaacattttcacttttggattcgagggactctaaaataaatattgctcccaaaaaaaaaaaaa

SEQ ID NO: 44069 - DNA, 500 bp, Homo Sapiens
taccctaaagcttaaagtttgcaaggctgcccagcctaacccacaacagtttgatgctgccccctagcgtttgattcccttcaccttttgctaaaataaggtaatgtttaaattacaattagatttacttactgctgtaaatctggtctattttagtttcctctgggtagttagtgttgctaataagatggacgtaagtgtttttgaactggtgaattctgattgcttttagcccccagttttccaaataggggtgaattctgggtagagatagaacaatcaccaagttaccttgctccaaaaaagaaatttacgtatgggattgttttcaaagcgggaagttagctgtgtaaataacaacaattttatatatttaatctgggcttctccttatcttgaatgatataaaaatctactttctagattaatttagttccatataactttgtattgctttgactgtactgataataaagtttgaaagtgttaaatttaaaaaa

SEQ ID NO: 44070 - DNA, 582 bp, Homo Sapiens
tttttaatggttattgcagaatattaaggtacatgtctctctgttttaagtaatattgcactttataaaaaagtatgaataaagcaaactattttataaagtgcactgtttaaagcatttgcactgtatttttgccatttattttcattttctactttaaatttgtcctcacattcctcttctactttgtatgcaacaagtagaatggggcatgttgtgtcatgtagtcagccacttatgcaccaatgtgaggaaaacctaaagggaaattaaactaaacactgtgcttcatatttgtacactgtgttgtactacagtgaggaatttcctcctgtagtcatatattatgtacataatattttagaatcatacctatgacttgtttggaaatttttctgttaaattttaaatccagaaagcatattttataaacttatgcagagcacttttattgctcaaaagttctgaattcatacagaaaacaagtactatgtgatgaaaacatttcattaaaagattgctgcatttaaaaatacaattaattcgttccctatgcaaaaaaaaaaaaaaaaaaaaaaggac

SEQ ID NO: 44071 - DNA, 616 bp, Homo Sapiens
gcaggagacaggggtccctatggcactgacatcggcccaggcggaggctatggggcagcagcagaaggcggcatgtatgctggcaatggcggactattgggagctgactttgctggagatctggattacaatgagctggctgtgagggtgtcagagagcatgcagcgtcagggcctactgcaagggatggcctacactgtccagggcccaccaggccagcctgggccacaggggccacccggcatcagcaaggtcttctctgcctacagcaacgtgactgcggacctcatggacttcttccaaacttatggagccattcaaggaccccctgggcaaaaaggagagatgggcactccaggacccaaaggtgacaggggccctgctgggccaccaggtcatcctgggccacctggccctcgaggacacaagggagaaaaaggagacaaaggtgaccaagtctatgctgggcggagaaggagaagaagtattgctgtcaagccgtgagctagccatggcaggacagctcctggaccaggtctcataatgcatgtggcacttaggtccaagctctccagagggtgaaagctggagtctgtcaatgtcctactgagacagc

SEQ ID NO: 44072 - DNA, 645 bp, Homo Sapiens
tggtgcccgcagccctgggcagcctgaccacagcccaaattgcccggagtgtctggaggccttggtgaccaatgccagccagagtcctgcgggggtgggcccggccctccctggatctcctccctcctcccaggggttcagatgtggtggggtagggccctggaagtctcccaggtcttccctccctcctctgatggatggcttgcagggcagcccctggtaaccagcccagtcaggccccagccccgtttcttaagaaacttttagggaccctgcagctctggagtgggtggagggagggagctacgggcaggaggaagaattttgtagagctgccagcgctctcccaggttcacccacccaggcttcaccagccctgtgcgggctctgggggcagaggtggcagaaatggtgctgggcactagtgttccaggcagccctgggctaaacaaaagcttgaacttgccacttcagcggggagatgagaggcaggtgcactgagctgcactgcccagagctgtgatgctctgtacatcttgtttgtagcacacttgagtttgtgtattccattgacatcaaatgtgacaattttactaaataaagaattttggagttagttacccttgaaaaaaaaaaaaaaaaaaa

SEQ ID NO: 44073 - DNA, 648 bp, Homo Sapiens
gggtgggagggaggtgggactaggggcactttgggggtctccttttagtcaaaagcgagaaaatgacaagaaagagattaaaattcaatgtttcctttatagtgttaaacactaaaattttaaaaaagatgaaaaagaaaaaaaaactttgtaaaatgcgagaacagaagcaaaagacactacgctctgtcattttatctttcttttgttgaaagactaaaaaaaaactgaaatgttttttagacaatcaaatgttaggtaagtgcaaaaacttgttttttcttactggtgtagaaattaatgcctttttttatttttcagttattttataataacgaaataaaaagaaccccccagctgccaggcgggttttggtgtttgaaatgcggggcaaagcactacatcactgcaaatagatacagagttagtctgcatgtctgtaggctgtgtgattgcggaaaatataaatgctgctaatatatttcctttttacaaaagcatatctaaatagatgattgttttgatgttaatctttgtaaattatgtattaccaattttaacattggatgtaattgcatacaaagcttgcatctcaatccttgaaagtctagtattaaatggaaaaaacttttcctaaaaaaaaaaaaa

SEQ ID NO: 44074 - DNA, 823 bp, Homo Sapiens
  misc_feature (14)..(14): n is a, c, g, or t
tggcccgctgtctnatttgctgcttctcttgcaggaaagcacctccgttgtggacggtcctcgggcacaggggatgagcgctaccagtttcatttgtaggcagggagttctccgcggatgcatggtggcagtctgctttgatggcagcagtttctgcttaggtgacctagaggtcctcagcagtatcctccacacctatttattgaggtgcacctgctggggattcataatgagaatataacaagaggatctcggtgaaaggccttagtgggtgttttgtgtgaggtggcttgtagctagctacttccttacagatggtagagtattccaatcctctttgtgttagggttcttgcttccagtttgggatgtattaaaaccaccatttcactgcttcccttcctcaatatgctctgcagcttttcttgctgtttaaacctctcgcctcagctttatttatttgtaagctgcattactaactgcccagtgattcggtgaaagctttttactgaaaaagttaacatttctagtcatcccaatcaactggcttttttcaaccaaaattttatatcatttctttgtctatcagatacgagaggaaggaagatattacgaagacatgttgaatagtgtaaaaaaaaagaaccaaaaactgcggcaagccaacgtgatgtatcactcactgtaagatggcaaatggtttcattagttaagatcccgatgtaaactagcgtgcttgaaatgcaatcaccccgcattcaaaccagttattcctttagcctttatttttttatttaaatcctttttgagacattaccctctgt

SEQ ID NO: 44075 - DNA, 604 bp, Homo Sapiens
aaacatgcacttcgagatctgcccctggtccagctacctcactggtgcctggaagccggacacggagcatgcagtcattcggctcaaaaatgaccaggctaactactcgctcaacacagatgacccgctcatcttcaagtccaccctggacactgattaccagatgaccaaacgggacatgggctttactgaagaggagtttaaaaggctgaacatcaatgcggccaaatctagtttcctcccagaagatgaaaagagggagcttctcgacctgctctataaagcctatgggatgccaccttcagcctctgcagggcagaacctctgaagacgccactcctccaagccttcaccctgtggagtcaccccaactctgtggggctgagcaacatttttacatttattccttccaagaagaccatgatctcaatagtcagttactgatgctcctgaaccctatgtgtccatttctgcacacacgtatacctcggcatggccgcgtcacttctctgattatgtgccctggccagggaccagcgcccttgcacatgggcatggttgaatctgaaaccctccttctgtggcaacttgtactgaaaatctg

SEQ ID NO: 44076 - DNA, 735 bp, Homo Sapiens
agcgcttaaaggtcatgtgtgaggatgccctctgcagtaacctgtccgtggagaacgctgcagaaattctcatcctggccgacctccacagtgcagatcagttgaaaactcaggcagtggatttcatcaactatcatgcttcggatgtcttggagacctctgggtggaagtcaatggtggtgtcacatccccacttggtggctgaggcataccgctctctggcttcagcacagtgcccttttctgggacccccacgcaaacgcctgaagcaatcctaagatcctgcttgttgtaagactccgtttaatttccagaagcagcagccactgttgctgccactgaccaccaggtagacagcgcaatctgtggagcttttactctgttgtgaggggaagagactgcattgtggccccagacttttaaaacagcactaaataacttgggggaaacggggggagggaaaatgaaatgaaaaccctgttgctgcgtcactgtgttccctttggcctggctgagtttgatactgtggggattcagtttaggcgctggcccgaggatatcccagcggtggtacttcggagacacctgtctgcatctgactgagcagaacaaatcgtcaggtgcctggagcaaaaaggaaaaaaaaaaaagaaaggacatttgagttttaacagaagggaaaaggaaagaagaaaagatttttgcagaatttctcaaaaatcagtttggggattc

SEQ ID NO: 44077 - DNA, 567 bp, Homo Sapiens
gaatatttccttaagggtccccgagaaatgggagtgaggggaggggacacaatggctttttgagcttacttttaccttctgatactagtcaaggtccagaaccagccaccagccaaatttctatctgggtgcgggccactgaaaatccttgttaaaaaccagatcacaaatctggggctcttggtcccattggagaaggaaggaagagcctcaaaataagtgtgcacccatgcacatattcaggaacagcttgtttagtctttacactttgcctgaaagttgcttctcctcgtccctttgtgtgcctgggtggcctcggccctgtgcgttggcaacgcaggatcaaatgtgctgcagcttttgcagaaaacaactcagaaacacaaaaccccccaacagctcaattattattttttcaatgttttcctacaagagccaagtagcaccatgtacagaagacgcctttttttttggaatattgaaatcgttctgcatgtaaaatatgggataatgacctgtttatattaaaattctgattaaattatctgaaaaaaaaaaaaaaaaagg

SEQ ID NO: 44078 - DNA, 1206 bp, Homo Sapiens
  misc_feature (723)..(725): n is a, c, g, or t
  misc_feature (1206)..(1206): n is a, c, g, or t
caagccctgtcagacattgagaaaaattaccaactgaaaagcagacagatcctgggcatgcgctagccaggtagagagacacagagctgtgtacaggatgtaatattaccaacctttaaagactgatattcaaatgctgtagtgttgaatacttggttccatgagccatgcctttctgtatagtacacatgatatttcggaattggttttactgttcttcagcaactattgtacaaaatgttcacatttaatttttctttcttcttttaagaacatattataaaaagaatactttcttggttgggcttttaatcctgtgtgtgattactagtaggaacatgagatgtgacattctaaatcttgggagaaaaaataatgttaggaaaaaaatatttatgcaggaagagtagcactcactgaatagttttaaatgactgagtggtatgcttacaattgtcatgtctagatttaaattttaagtctgagattttaaatgtttttgagcttagaaaacccagttagatgcaatttggtcattaataccatgacatcttgcttataaatattccattgctctgtagttcaaatctgttagctttgtgaaaattcatcactgtgatgtttgtattcttttttttttctgtttaacagaatatgagctgtctgtcatttacctacttctttcccactaaataaaagaattcttcagtttccctgtaaaannnatggatgatgatataatgattaacatgaagcatgcttactgttagtcaaacaaacttctggggtacccattcagggacctagcactggggacccctcgttcctccccttctaacccctccctggcaattacctccattccggagcctctgcctttattatctcttacacacaacccccctcttccaccgtgccgtcatgaccaatttcaaagttaatgtgccgcgttgcccttaaaaacatcaactagaccttctctcgccatattctcgcctatgtactcctcccatagggacgctttatccattcttacatggtcttcatgcctagctcaacggccttcactctgtccttcttcttataatcccatcccacccaccagattcctcaactcccactactctccaatacctactcccacatcctcgccttgtcctctcgtgtaataccttctctaactcattccacatgcacccacccatn

SEQ ID NO: 44079 - DNA, 696 bp, Homo Sapiens
aaatagtctgcttttaaaggagggcatgttcagttttctgtgaattaaaatatgctcatgtgtgggcacacacgcacaaacacacacacgcacgcacacagtggcagaagggatttatattaatattctttcccctctggccttcttacagtctgttggtccctttgcttctgttgtcagtgtgttgaattgcaaaccgagtactgctgtaaatactatgtttacttcatgctgaatgtttgcaaagacttgatataagtattaatagtaatgaatcaatgaataaataatgagctagggtttgtgaggctttctacaaataggtcagctccacctggagtgcgaattgccagagacaccttggtagtgcccatcggcaaatcgcaatggcagcatgtgagtggaccattcagaaacttctgcttggtggaaagtaaacagagaggatggaggtttggggcgaatgtcctgaggcagagatggtctttattgtgtgtggtggtggttgtggtatttataataatgcaagcataccctcccttgagtctcaattgaagataaaagaatgtactgagcaagcaaagccaatggagagtatttcacaaaaatactttgtaaatgagatgccagtagtgttcaaagttgtatttttaaaagataaatattcctttttatacctcaaaaaaaaaaaaaaaa

SEQ ID NO: 44080 - DNA, 630 bp, Homo Sapiens
  misc_feature (543)..(543): n is a, c, g, or t
tgtgtggtggtggttgtggtatttataataatgcaagcataccctcccttgagtctcaattgaagataaaagaatgtactgagcaagcaaagccaatggagagtatttcacaaaaatactttgtaaatgagatgccagtagtgttcaaagttgtatttttaaaagataaatattcctttttatacctcagttttgtgtcctgtttttaatgacttacgctctaagtaatccattagtagttatctcagttccttcctttgggttactagaatgttggaaaaagatgccaagtctgtcttgacaactggaaacagggttccacagcagcccattcgtgctgaaaactggcttccccctgaagcaccctgctgtggcaccagcaggaagctcaggttaattttacactagcttgctcactgatgcatctctcatcaatgctacggaaggctttgattcatcagtctcgggctcttggaatacctaattttaataatatctatgaaatcaagggaaactttccatttacagttatttcttgtttanataaactaaattaatttttaggggagagcagtaggaaaaagagctaatgcatgcggggtttaatacctaggtgatgggttgaggtgc

SEQ ID NO: 44081 - DNA, 619 bp, Homo Sapiens
gggcagctgcggccaccagatgcccgttccagctcccattctggccgagaggttgtcatgagggtcactacagtctgaactggactccaggagcagggatcttgagtcaatgcatcagtcagagaagaactctcatggctgctggaggtaccagctggacaaggtgtttggggcatgctgcccccgtcaccgaggatctgtgtgggtagcctcaagctggagacattgtctggcctcactgcccactgggtagagacacctggatgacatttcagtacccgctggcagctcctcccactcatccagagacggccggtgggcaggcggggagagcagctttccttccctggagagaaccgtctttacctcagctcctagggcctccagccccccagctccaccacggtgacttggtgaagggggaccaatgccagaagaaaggggctgtagacccctattccccaccccatggccacagggcatctggcaataagactagtatacattgacctcccgttccctgcatgagggcggggagttccccctgctccatcccccattgcatgggggaagggcataaagaatcatttatatgcaaaaaaaaaaaaaaaaaacgcgg

SEQ ID NO: 44082 - DNA, 1198 bp, Homo Sapiens
cctttatttagcaacttacctaatttgccagtagctttataatttttaacagataactgtcattattttgtcaatgttatttgaacttggggtacttaggagcctctttgtagggactgtgcctaggtagcatgtcctaacattgttctggtcttgcataacttcagtaatctttgtcattatatgtaactttgttgctctgtatggcataatattgtatccataaacatggtaattttgatacagttatacttttacagtggtacataatccaaggactagtatagaattaagctgagtgcaagatgagggagggaagggctttcttggtaatttagatgtgaaacctctacagagctatcatgtaaaaactacataaggtggttgtgctactgtataattgggggtgataataccaggaattttaataagattttgtaaagaatatccagaaaagtagtgaacttattttcagtagacatagaaaacaatgtgaatatttaaggtctgtgactatagttaaacttcactaagaatttgcagaattgtttgagatgtgtgaataaaggtaattttattgaatcttcattggtgctaatgatggacagttacaaaagatagctagtgtactatcgtcatgggtcaagtacttattagtaacttccaaaactcgaatttgaaatgctatgtattcacttttcactctgtcacactgtacttctttacaaatgacttacttattaaagggcaggccagtgggtcatttttgacacggactcggtgttgagctatttccaaacttctttcaagcgcctgaaacagggttattaaagctttccgaacaaaatgatgcggactaacatattggaaatctcttaacaggaggagcatacacgttaacacacaacgctaatgtatctcgaacacgagcacagccaatgggctctcaccacgaccacgaacggcgagacacagagtgaaaccacgtcaggacccccacgaggcccgaccaacgagaacaaacacacgagtacagtggaagcgtacaacgagagccatcgtgaaggaggacacaaaaaccacaaagaatcaagcacacgcgagcaaaacacacgcagcggcagagcggctaagtgggcaaccatgagagaaccaacgaagcatggaaacaacacaacggcacgaatagaacaccaga

SEQ ID NO: 44083 - DNA, 621 bp, Homo Sapiens
  misc_feature (46)..(46): n is a, c, g, or t
cgctaattgctcaaacttccaacaaagctgcccagaccagcactgntgttttgattcttcttttttccctggctctcatcatcctgcccagcttcagtccattccagagtcgaccagaagctgggtctgaggattaccagcctcacggagtgacttccagaaatatcctgacccacaaggacgtaacagaaaatctggagacccaagtggtagagtccagactgagggagccacctggagccaaggatgcaaatggctcaacaaggacactgcttgagaagatgggagggaagccaagacccagtgggcgcatccggtccgtgctgcatgcagatgagatgtgagctggaacagaccttcctggcccacttcctgatcacaaggaatcctgggcttccttatggctttgcttcccactgggattcctacttaggtgtctgccctcaggggtccaaatcacttcaggacaccccaagagatgtcctttagtctctgcctgaggcctagtctgcatttgtttgcatatatgagagggtacctcaaatacttctgttatgtatctgtgattttatttcttctttgggtatagggttgaggggaaataagttttgagtgagaaat

SEQ ID NO: 44084 - DNA, 698 bp, Homo Sapiens
aggataagaaagcctaaaattgagtttgtagaactttattaagtaaaatccccttcgctgaaatgcttattttggtgttggatagaggatagggagaatatttactaactaaataccattcactactcatgcgtgagatgggtttacaaactcatcctcttttaatggcatttctctttaaactatgttcctaacaaaatgagatgataggatagatcctggttaccactcttttactgtgcacatacgggctctgactggttttaatagtcaccttcatgattatagcaactaatgtttgaacaaagctcaaagtatgcaatgcttcattattcaagaatgaaaaatataatgttgataatatatattaagtgtgccaaatcagtttgactactctctgttttagtgtttatgtttaaaagaaatatatttttgttattattagataatattttgtatttctctattttcataatcagtaaatagtgtcatataaactcatttatctcctcttcatggcatcttcaatatgaatctataagtagtaaatcagaaagtaacaatctatggcttatttctatgacaaattcaagagctagaaaaataaatgtttcattatgcacttttagaaatgcatattgcacaaaactgtattactgaataatatcaataaatatcgtaaagcattccaaaaaaaa

SEQ ID NO: 44085 - DNA, 344 bp, Homo Sapiens
acgcgtccgcagcgcagctgctggacgtcaggctgtttgagctgagtgagctgcgtgagggcctggcccgcctggctgaggctgcgccctgagccggggctggttttctatgaacgattccggcctgggatgcgggccaggctgcaggcggcatagttgggcccattcgtcctggaaagggactggggggtcccaacttagccctgggtgggccgggccgggctgggctggggtgggccccagtcggctctggttgttggcagctttggggctgtttttgagcttctcattgtgtagaatttctagatcccccgattacatttctaagcgtggcaaaaaaaaaa

SEQ ID NO: 44086 - DNA, 807 bp, Homo Sapiens
aacgcggcgaagtcctcctctttctatctccagagccgcagttccatcctctgggtcagcggcttaccctgactgggctgcggtatctgccttccttcccccaacaaggcgacaggtagtcggggctggggccggaactgactgagtgggccgcaactgactgagtgggccgcggctcccgcctgaggaggctaggaaggactgaacagcagccgacttcccaggctctaaaaatcgtgcctctgagttagagctacctcaaaagcaagaccaagcatgagaaatggagtcttttggccagtattggggtgttcggaattcaagcgtatgagagagtggacggtagcgttgagaattttcatttgaagatctcgtcttaaccaccccaagtgtagtcagaggcggcgttttccctgcgagagtgccctggaacaaagcaaggatagcgtgggttagacatacctgaaatgaaagcgtcttactttatctaggtacatatttgcgtcagtaaggcgcaacgccatttctctcttggaattcagaagtgaaatatggtgactgggacgcctgtacattgctttgacttaaaaattgaagtccattattctgaccgaaagttaatctgatgattaattggttaaacatactatcgttgctaattagcataattattatttacaataaagtgagctaaatagctacaactaaaatatatttaaattactgtgatattgtgatgctaaagatgtgttgaaattaatatcttgaatttttcaaccctgcctaaatgcctctgagagtaattag

SEQ ID NO: 44087 - DNA, 680 bp, Homo Sapiens
tgagagtaattagtataattaaaagtcactagagaaagtgaatgactctaataacaggataacaaattcttttcaagtcagatggtttccagttctttgctttcaacaaaattaatggtggcccatgaattgtcagctgatgaaggaacactatttggtttttggcatgcaactcggaaagaaaccaaacgattgattgacatgcttacaacaaaactactagcattctcacctatttatgtaaaaccatttctcagcacttgtatctgtgaaaacaacagaattgaaaatgaaccctgttaatctaccagtaggaactattcatccagataaatgaattaattggtgggtcagccccatctatctcactaagagatgtgttcccaatagaatttcaccttttataactgtgtgttatcaatatttgcaatcgtgtcattttgatccattatatactaaagatgattgtgatgattactcacttcagaagaattccagcgtagagccataaagttacacgaaattttttaaggtttactacatatgtcatatttttattgcgaagaagtgatcaagaaaaggttgttcaaacatcaaagtactatatttgaataacattttttgttagagtacaatctaaatatgttagagataataaaagaacaatgttgaagagctca

SEQ ID NO: 44088 - DNA, 653 bp, Homo Sapiens
ccggaattcccgggatggaacagcttgaggtacctgagccctgccctccagcagaacccgggccccttcagcccagcacccaggggcagtctggacccccagggccctgccctagggtagagctgggggcatcagagccctgcaccctggaacatagaagtctagagtccagtctaccaccctgctgcagtcagtgggctccagcaaccaccagcctgatcttctcttcccaacacccgctttgtgccagcccccctatctgctcactccagtctttgagacccccagcaggccaggcaggcctcagcaatctggcccctcgaaccctagccctgagggagcgcctcaaatcgtgtttaaccgccatccactgcttccacgaggctcgtctggacgatgagtgtgccttttacaccagccgagcccctccctcaggccccacccgggtctgcaccaaccctgtggctacattactcgaatggcaggatgccctgtgtttcattccagttggttctgctgccccccagggctctccatgatgagacaaccactcctgccctgccgtacttcttccttttagcccttatttattgtcggtctgcccatgggactgggagccgcccacttttgtcctcaataaagtttctaaagta

SEQ ID NO: 44089 - DNA, 511 bp, Homo Sapiens
ctgaagagtactgaaacaaggacttcttgtcagaaacagcttctggaatcttgggttttgtttttgttttttgacaaaatacactattggccatgtccatcacgagagtgtttgtagtaattaattaccttgtacaggacctggcacttagtagcattcttcaaatgttccctcagtgatccttttactctccttgtcacttatttgggagaaataggggcacgtgagataagaagaagaataattttgatgttggtatgcttgccctgttacttatagacagtctttgtcataggcaaacttgaatttgatttaaaatagggctgggaaaaatattcaataactgtaagcccccttttggatgccaaacttagaattttgtacattctctgatgaacaagcatttagatcataacatggtaaagcctattaccagccaatgttgttagcatctttgtatgcacatcactgtttgtgcaatatatgaatattttgttgcattgtattctta

SEQ ID NO: 44090 - DNA, 557 bp, Homo Sapiens
agcggaagggtgctttagggacccactgttttcatttcttcttggagtttaccttgtttcagatgcagccatgggtaggtcagagatggattgttggtgcaataaacccaagaatcaatgtagcctcttaatcccatcaagatgtagtttgtagcagcaaagtgtacagtctgaaaccgtatgttttatccttatattttagagctttcagcagcctttttaagagaggccacttaccaaagttatttctataagctcaagagtgtttcggttggtaagttcttccagctgaagccactttttccttatagttaatacaaatgactatttttactttaaaaggcacagctgtcctggtgggaaatgaaacctgcagcagttcaggatgactaatgaaagcaattagcttgaacatttagaaaaaattcatatatgatctaaatttttatattatcatttctgtgccttctaattcctgcatcctgttcaaaacatctttccagacattaacttacacattgtataaaaccgaccaaaatgatttcctaaagttcatg

SEQ ID NO: 44091 - DNA, 646 bp, Homo Sapiens
ttttttttttttttttttaaaaccagagcaacattttaatagtcatgagatcaaggattcctgggaaggagaggagatgggaggctgaggcccgggagctttcaagacattcatctgcctgtggcaaggtcagcacctgggccagcccgaggagcatctcagctggcagaccacgcagtccctggaccttgcaagcacatctctgacccaccccatgctggagcctctttcctcaggtgagtccagcacggagagttctgtgtggccactgggaggcagctttggtgaagggcatggtcacctccgcctgagtttgtcagtagctcaacgcatgaccctggtatgaacaaaaactgggtgactgtgtctggccacgtaccctaccacccactaaactgggtgaatttttgtttccacagcgcaccttgatttcatacagataattccatgcgggtttcatacatatatatatatatatgtatatatatactttatatatatgtaaatgtgtatgtccatatgtacacatatacatatattcacactcacacatacacacacataagtatacacacacatttccgcagaaagaagtcctgccacaatttggcttttttgggacagtgaaattgacaatgcagtttct

SEQ ID NO: 44092 - DNA, 686 bp, Homo Sapiens
aattgtaaatatggtgagtctgttttaagcctttttttttttatttatctgatcttgtttacctcttgtttagtgggttttgaatcttccctattagttcttcatgtggttcatggtactgatttagaaatccagtgtttgggggatttttttctctgggattcatgaatttagccctgttgtagcatgttaaaggtgacaaacagctggacaaatttttaaaaagtaaaataaaattttatctataattagtattattacatttagcttttcattgaaccgaaagaaaaaaagtgatattggaccctggaaagattttgaaacttgagtggtttgataacccttctatgtattgtagggagaaaaaaaaaagtttattttattccactgtcctcccttaaaagcatcatttgagcaataaatgaatattgtctttaaaccaagggttagggaattttcctctctctctctctctcctctctctttctgttcaaagaacttcaaacatttgggaccacctggtattctgtattttcactggccatattggaagcagttctagttgcattgtattgagttgtgctggcagtagtttccatgcctgtcaatgtatcatagtcctttgttgcccagataaataaatatttgatacgctttaaaaaaaaaaaaaaaaaaaaagtataccg

SEQ ID NO: 44093 - DNA, 764 bp, Homo Sapiens
  misc_feature (752)..(752): n is a, c, g, or t
aacaaatactcagcaaatgtgaaactttatttgctcttacttcaaaattagtccaaaatgttggaaataaaatataagacattgatctagatatgaggtttttctccttcattctcagctgtcgaagaaatcaaagtagcatatgcacaaggttaaaaaccacatatacaaatactatagaacagcttataatgaaaaccttgcctgcctttataaaaaatgtgattatcttcttctgttaatgtcaataaaagatggtttgtcctagaaggtctataaatggtattatgttctggaggaaacctagcaaaaactttgctagtttagtacttgtctctaaattgatgttcacccatttcaatattgcacttattaatggtctttatttttctagcatagataacaattgattctttagattcatatatggaggtaattcttgctttctaaagaaaggaatatggcacattggaaccattttattcaccagtggatttacccttagagtatttttagatctgagctgatgacttgtgagagaaaaagggaacagagtaaagccatggaagccatgaacagtaagagactgccgcctggcatggtttcttcttctgcagaagatgaaactgaggagaaacaagacaacatccttcataccaggaatggtcaagataatgcaagaagaaaaaagctttcaaacaaatcagaaggcagtcaacaaacagaaagggggacattccttccctggcagntactcaaaactg

SEQ ID NO: 44094 - DNA, 309 bp, Homo Sapiens
gtgttgacgattgtgctacttcactccagcctgggtgacaaagtgagactccgtcacaacaacaacaacaaaaagcttccccaactaaagcctagaagagcttctgaggcgctgctttgtcaaaaggaagtctctaggttctgagctctggctttgccttggctttgccagggctctgtgaccaggaaggaagtcagcatgcctctagaggcaaggaggggaggaacactgcactcttaagcttccgccgtctcaacccctcacaggagcttactggcaaacatgaaaaatcggcttaccattaaagtt

SEQ ID NO: 44095 - DNA, 389 bp, Homo Sapiens
  misc_feature (42)..(42): n is a, c, g, or t
  misc_feature (381)..(381): n is a, c, g, or t
aattcgcggccgcgtcgacacggctgcgagaagacgacaganggggggacgccatggcgaccaacatcgagcagatttttaggtctttcgtggtcagtaaattccgggaaattcaacaggagctttccagtggaaggaatgaaggccagctgaatggtgaaacaaatacacccattgaaggaaaccaggcgggtgatgcagctgcctctgccaggagtctaccaaatgaagaaatagtgcagaagatagaggaagtactttctggggtcttagatacagaactacgatataagccagacttgaaagagggctccagaaaaagtagatgcgtatctgtacaaacagatcctactgatgaaattcccactaaaaagtcaaagnagcatagc

SEQ ID NO: 44096 - DNA, 555 bp, Homo Sapiens
catgtctctagaatgctgttgccacttacgggggctggagaaggcctggataaagacagaagggcggcaacacaccaccccagcccccacccccaccctctccttgagtttctgtgaattaaaatatttgcaaatccaaagagatgccttccaggatgaacaaaggcagaccagctccgaggggcggggtagggtggggcgggagctccctggctgacatctctttgttctccagctgtctcaaattcacacctctgtacagggcaaagttttcccacaggagcccccctactgatgctgggagccaaatgctggtgctttgagagtcccggaggccccggggttcccgccccgctggtgtgtatatgtgtgtctgtgtgagtgtgtgtgtgagtacagatgtgagaaggtggtcacacacagatgggtaagcccactgatctacttgtagtcactcagtgtaatcattaggctatcttcaaggaatcattgtgcagtcaaaaagaggattcaattatttatgaatagggtgtgtaaataaaatagtcatttaat

SEQ ID NO: 44097 - DNA, 729 bp, Homo Sapiens
cttccaggtctccttccagcatccacacaagtacctgctccactacctggtttccctccagaactggctgaaccgccacagctggcagcggacccctgttgccgtcaccgcctgggccctgctgcgggacagctaccatggggcgctgtgcctccgcttccaggcccagcacatcgccgtggcggtgctctacctggccctgcaggtctacggagttgaggtgcccgccgaggtcgaggctgagaagccgtggtggcagatttataccatggacacagagatcccctaaggtcctggcccaggcctgcccaaagagaagcccaggatggtcggctgcctggggacattgtcaccacgtcgccatgacggctggtccccacaggaccagctgggaggactggttgtgctgctggagaagggctggagaaggcaatggcatgctgccgctttgccagtccctagaagtcgcggtgcaggtgatggtgggagccgcgcctccagcgggcaggccgggagtgtactgtgtgcagctgacccaaggcagccacatctgcgtttgtcctttgagaggactttgactacaatacaggcatgacatcaatgaaaggaaagtcatgaaatcgatgagactgaatccctacggatttcttaaaagccagatttgtagggagaatgaatgtgcaacgtggctgaaatctattttgtgtaataaaaggtgatacaagtcaa

SEQ ID NO: 44098 - DNA, 857 bp, Homo Sapiens
acagaagctggagaagaagatcatggtcctgccgtagacctggctccaaggacgtggaggaggcaggcagggccaggcacccagagccgtgcccaggtcttccagcaggtggccctgctgcctcttgagtgctggcagcatggctgaccctcggggtggttttatggtgcaggtcacttgggtcttcagggtcccttccgagggcatgtgttcagcactcccgcgttcagcctgaggggtgtacagttaagagaagacagttacagatctcattaatctacatttttcactgtcctctagcattgaaagaaggatgtctacctggtgaaagtatattttaacatgactgatggaatttcactaattgcccactctcttggaacttgaggagaagcggttggccacccatatgtcacctagctctatattctttcaggctgagattcttcttcaggaaaatgaggagcagaactggccacccttggctgctcaagaggcatttcagagtaggagatgcagttggaggtggggaggggaaggaaatagttatcaaataatgcaaaatggaataaagttatcttggatggaaagaacagggctaaatctggtcctctggtgtcgagatggaaaactgtggagttgaagaggctctgatgcccagaaaggacaatcaagctggttgactcttccagagaagaagggtaagccctgtatttatcctcccaggccattcttcttcactcctgctgctgtttgcagagagttgccctgattatcaggagaaaagaaccacgagcatccagagagtttacatcctgccttctgtcctctgctccttcagaaagatgaatgcctag

SEQ ID NO: 44099 - DNA, 517 bp, Homo Sapiens
gcacgagtatagtcgatatagatcacgatcaagatctcgttcctacagcccaagacgctattgataacggaatggttgcaattaaggacattttttttcctctttttttttttttttttttaattctgagatttccccaagctgtggattcttcctactccttaagaaaaaaactttggtttatttagcatctacacttttgtcagttgtgttgctgttttccacccattttattatactcttaaaagatgtaattgttgtcattttgaacagttaaacatcttgagtataaaaagaaccccaatgttatgttatgctttgtaaatttttttttttgcttttacctagataaacttctagctaatcaaataaggaaagaaactgtctttttaaagcttcttttgtgttagatactgtattagagatctgcatttatcatgagttcctttttttttttaactttatttttgggaaagtaacacatgaagtagttcagtcatgtcaggtttgtctgggg

SEQ ID NO: 44100 - DNA, 703 bp, Homo Sapiens
cggggccgcttcccggcgggaacctcttcttcctgccggggggcgcgcgctccgagatgatggacgacctggcgaccgacgcgcggggccggggcgcggggcggagagacgcggccgcctcggcctcgacgccagcccaggcgccgacctccgattctcctgtcgccgaggacgcctcccggaggcggccgtgccgggcctgcgtcgacttcaagacgtggatgcggacgcagcagaagcgggacaccaagtttagggaggactgcccgccggatcgcgaggaactgggccgccacagctgggctgtcctccacaccctggccgcctactaccccgacctgcccaccccagaacagcagcaagacatggcccagttcatacatttattttctaagttttacccctgtgaggagtgtgctgaagacctaagaaaaaggctgtgcaggaaccacccagacacccgcacccgggcatgcttcacacagtggctgtgccacctgcacaatgaagtgaaccgcaagctgggcaagcctgacttcgactgctcaaaagtggatgagcgctggcgcgacggctggaaggatggctcctgtgactagagggtggtcagccagagctcatgggacagctagccaggcatggttggataggggcagggcactcattaaagtgcatcacagccagaaaaaaaaaaaaaaaaaaa

SEQ ID NO: 44101 - DNA, 584 bp, Homo Sapiens
ccggggcagtcaccgagtgaccaccaagaggaagacccaccccacggcggggacagatgcggggtacgttaaagggagagccagagaactcatggggtgaggatggagtccgaggagactgctgggagccgccgtgtgggtcagagatggagaaggctgagtgcagcaaggtggggggtgactgggacccagcctttgggcctccccagccagagcagcccagcaacagtgtgtcctgtggtcataaaactccagggacctctatcctccaggagtctcagcctttccctgggcgcaggcccaccttggcatggccgcctcaggcctccatggagggagctgctatgtccccaccagattggccccgtgcggctgctggcttctgtagaggctgcccagaggggccaggtggcacaaataagagaggggagatggggggcagccaggagaggaggtgtcccttcctcgcccagacacagcgcgcttctctctggcctttcccgaggcctgtgagtgcctcatgaagcagctgggccctctgggaaggctgtgttcagcttaggaacataccgcctgtatctgct

SEQ ID NO: 44102 - DNA, 339 bp, Homo Sapiens
ggtggtggtgagtgtcagcatctacagtacagccaggcaggcaggaccttgaggaatcagactatctgtctgtgtgtcacctctcctccttcagccatgctggccccgagcttagggatgtgcttgcaaacccttctcaagggtctcacaaccccaacatcttcagactggcctgacctgggccttgtcttccagttcctttctcccattcccagcctcatttcttaaatgactaggaattttttaatggaccatcatagggagggggtgctcctcttttcccaccaggttgaggtgggggccttgcatcgggggtccccagggtatggggtaggggtg

SEQ ID NO: 44103 - DNA, 703 bp, Homo Sapiens
  misc_feature (598)..(598): n is a, c, g, or t
  misc_feature (645)..(645): n is a, c, g, or t
cctatatatattcttaatatccttttaagaatatggagatgaagattgttttctccaattttctgtgccattttaaatttaactttgacatccagctatagacagaaataataagccaccctgggtgtaaacttgattttctttattgagatgtatcatgtattgaatgagtgaaccagaaaattagaagatggtcaaaaaaaagtccaagttaccaattttttaaaatttataggcaaagtatcaaattgtcttcttaatatgataaactgtgctttatcattctgaaaactcaggatacagcttattcatagcattgtgggtctctccagtaagaaagatgctaaaagttttgtgcactttttgtgtgtgtaatgcaaattagttaaaacaaatagttttggagaaagttaaaactagctttagagtaaggatgagaaacttgagtgcttttaatttaaagataaaagcctgtgttttacacattcttttttggtgttcatagcttcttctcatacaggtgccagacactgtttgtgcttttgatggatttttatttatatactttttttgcttatttttactttgagtggaatgntcattaatgtaaattgtatttatttttatacttttattttcactagntttgcttctaggcaaaaagcaaaataaacttttcatcttaaagaaaaaaaaaaaaaaa

SEQ ID NO: 44104 - DNA, 579 bp, Homo Sapiens
gcgaattgaagggctaagagtcccagatagctaggccagagctggaagcagacagtaaggggaagagctgctcccacaggagagggagagattccagctcactgcgcagcctgggaggaggcgtggatcctggcacgctgagcctcaggcaccagcctccctgtgctcgacagcaaagtcttgactccttcctgctgagcactgtgctaccttcactgctccaaagccagactaacagctctccaagcccttggggtgactcggcttccaggagctgttggagaaatgaggatgtctgtccctgtctgcctgggcaggccagattcctccccagcagccgggtctctccagaccctgattcggtgcctttctgtttaccagctacttcaatcccaaagtttgaatctgcagataccttactcccagccactttgccttcttactgtgttgtgtgtttttcctggtgcttcaagagcgtgtgcagggcaagtgccgtcactgggaactgcaccagatgctcagacttggttgtcttatgtttaccaataaataaaagtagactttttctatttttaaaaa

SEQ ID NO: 44105 - DNA, 648 bp, Homo Sapiens
tgggtgctggcatcccaagtggcaggatacatgattgttggtctatatatgacacatgacaaatgtccatgtcacaggactcatggctggccagatgacctcaggctggcccaagatctaatttattaatttttaaagcaaatacatatttatagattgtgtgtatggagcagctaagtcaggaaaagtcttccgcccgagctgggaggggagagtgtccatgcactgaccagtccaggggctcaagggccagggctctggaacaagccagggactcagccattaagtcccctcctgcctcaatcctcagcctacccatctataaacttgatgactcctcccttacttacatactagcttccaaggacaggtggaggtagggccagcctggcgggagtggagaagcccagtctgtcctatgtaagggacaaagccaggtctaatggtactgggtagggggcactgccaagacaataagctaggctactgggtccagctactactttggtgggattcaggtgagtctccatgcacttcacatgttacccagtgttcttgttacttccaaggagaaccaagaatggctctgtcacactcgaagccaggtttgatcaataaacacaatggtattccaaaaaaaaaaaaaaa

SEQ ID NO: 44106 - DNA, 741 bp, Homo Sapiens
  misc_feature (717)..(717): n is a, c, g, or t
agaacagctggatcaaaagggcttctttggaattaggttgttttagtaacttctgttccaaagaaacacaggtctgatattgctaagaactgaaatcggaggagccagaggcccttttcagtccaggccaacattgtgcacggccactgtgggactgacaaccgggatagctcaagttcgaaagaccaggtttcaaacattataagttccaggctttgcaagtctttattctctggggtaatatccagtctttctgttattgtctcttaaaattctcttccatggcccacattaagggagtttgcagagagtgagggaggcaaaacttgaaaagggcctgcaacactttaaaccttctcaggttcacccacatgaaacagctgtgctgagtgtgctgccggtgcccggggagcttctctgactgtgacccggcagaggcttctgtggcggtgcatgagcggccctacagtggagggttctctttggaaacaaacagccctgcttggtttcagtttgaggccacttatcttcaatgtgacatttcttgccaagccctgtgacactccccattgatgactcccataggtacagataaagttaagaacaggaaacagaagggtaggatgcatagggagggagagaagccctgaaaactttttttttctttttgaagcatggaaaacaaatcttttatgccactccagccataaataaaantttaacttcaaaaaaaaaaaaaaa

SEQ ID NO: 44107 - DNA, 582 bp, Homo Sapiens
acaggaggaagaagagatgatgaagatgatgatgacaccgatgatttagatgagcttgacactgaccagttgctggaggcggagttggaggaggacgacaataatgagaacgcaggggaagatggggacaatgacttctctccctctgatgaggagctagcaaaccttctagaggagggagaggacggggaggatgaagactctgatgcagatgaggaggtggaactgatcctgggggacactgacagctctgacaactctgatttggaagatgacatcatcttatctctgaatgagtgaggagccatcactgcttggaagagattcttggcaggcgagaaactgagtcaaatgaattcagaacatattcccttctctttctcccagggctgtctgtcttttaaggagctgcatgccctgcattcagaagattatggcttagagagcctcattggcacccgagggtccttccagaatcaataaccaccacaaaaatgacaacagggactaggccctactctgcaccccccacatccaccccccaccatttcctaggatggacatatctttcaaggggaaaaa

SEQ ID NO: 44108 - DNA, 586 bp, Homo Sapiens
catgatacattctcaagagttgcttgaccgaaagttacaaggaccccaacccctttgtcctctctacccacagatggccctgggaatcaattcctcaggaattgccctcaagaactctgcttcttgctttgcagagtgccatggtcatgtcattctgaggtcacataacacataaaattagtttctatgagtgtataccatttaaagaatttttttttcagtaaaagggaatattacaatgttggaggagagataagttatagggagctggatttcaaaacgtggtccaagattcaaaaatcctattgatagtggccattttaatcattgccatcgtgtgcttgtttcatccagtgttatgcactttccacagttggacatggtgttagtatagccagacgggtttcattattatttctctttgctttctcaatgttaatttattgcatggtttattctttttctttacagctgaaattgctttaaatgatggttaaaattacaaattaaattgttaatttttatcaatgtgattgtaattaaaaatattttgatttaaataacaaaaataataccagattttaag

SEQ ID NO: 44109 - DNA, 562 bp, Homo Sapiens
gcaaaccttctagaggagggagaggacggggaggatgaagactctgatgcagatgaggaggtggaactgatcctgggggacactgacagctctgacaactctgatttggaagatgacatcatcttatctctgaatgagtgaggagccatcactgcttggaagagattcttggcaggcgagaaactgagtcaaatgaattcagaacatattcccttctctttctcccagggctgtctgtcttttaaggagctgcatgccctgcattcagaagattatggcttagagagcctcattggcacccgagggtccttccagaatcaataaccaccacaaaaatgacaacagggactaggccctactctgcaccccccacatccaccccccaccatttcctaggatggacatatctttcaaggggaaaaaaaaaccatgtctctggggtatttcacaatatattttctttgtatagtgttctttacttaaagaacaagaaatagttttttataaaactttaaaaaggaaaaaaaaacaggcatttataactgagggtatgaacttatat

SEQ ID NO: 44110 - DNA, 677 bp, Homo Sapiens
aaaggattcaggtgtttagaggagctgcttttcattaggaccttggagagtcccctcagttttgacacccttgtttcaccacaagaaagcacccgacaccctgggttgcatacttactactcaggggctttccccccagctttcagagcactgaattattgtgagctggtgactctgcaggcctgagtggtattagggttgtggaatgttgttgcatacacgtttatgagttaaccactatttaaatgatgctgctttttaaagttttttcaaagtacaatagatttttgaagtttcaggtaactggaaaaatctttaacttttgctttaagtgtttggggcaggataaaacaacatagaaaatataaaacaatttttgctttgaaaaatacagtgcaggtgaccatttactgcttattctgtaatccttactgtctataattaacttcagtaacactgaaacttgatgaaaagttttaaaaaattatttactgtagggacaaagttatatggaatgtttgttattttctatactatctgaatgcactgccagtgaagactgtaaagacagaacacactattttggagggaggatactaattgtttaaaatttttcatcatttgtgagtgataaaaagtttgtatagtttttataataaatccctattttggaaaaa

SEQ ID NO: 44111 - DNA, 459 bp, Homo Sapiens
tttgactggctctttaaatagtctacaagacattcacgtttaacatcacttttagtgaaataaaatgtgccatactagtatgtgcttcaaaagggcaaatgtgctttagtgccctaaggctaaattttggtcatttgacatcagagatgttgtaagtattgcacttaatacgcacctatttctcaatagtgttattttttggctagcattttctttaccactatcttgttgatagctttttgttctctaaggttgaaacatgacagtgcttatctcaaacagattacccatctgcagaactaaggaaagcaatttatgtatgaaagaaattcttgaattcgtcattctcaacctttgaattaaagcttagactaaatagtaatatatcgtgggaaggattttggttttgtgatatttctgtgaattaaggaatagatgttaaccattattttgtagaaa

SEQ ID NO: 44112 - DNA, 591 bp, Homo Sapiens
gcacgaggaagcacgaagccaagccaatcagaaagcccagcaagataaggctacattgaaggaacacattaaaagtttagaagaggaacttgccaaactaaggactagggtgcagaaggaaaattagcaccaataaagaggaaatatgaaaggattcttgaagatttccagttttgcaactgcataatagctatgcccaaggagtcaactattgtatatattgcagatttgcctttttaaaaaaatcactaattctacaatgtgccagatacatgtttcctatgcccaggaagttatgaagacttcaacaattaaactgaaaccaggggaagcttgcttagttttgggtttcattataaactcttagcctcagtccaggttaatctgaagtttgaaagctcagattaagcaagccatgccaagaaactggacgatgtgtaagcctagactctaaaattcaagatgtgtgaaataatataagtcaaaagcaagaaaaacgtaatcccgtctgaactcaagtagtcattcatataaatttgaacacacctgctgtgcctagacaagtgtctttctgtaagagctgtaactctg

SEQ ID NO: 44113 - DNA, 579 bp, Homo Sapiens
  misc_feature (579)..(579): n is a, c, g, or t
ggatcctcacccagagatggcaacatctattaagaccaatgcaataccttttcatcttcagcaaatgttgtttcatctgtttttgatccttggcattgtcaaaaacttaactgcaggtccagtgtatatttttccttatttttcccttttagctatctgctaaagtgagtaaatgccacaactgtacttttccaaagaaaaagaactattgacaacttatagcctgtcatgcaggtcatgtttcaaatcaaggctgaaattttcaacagctgtgggaaaaactaaaacacagaaatactgtacagtattagtgtttttttaaagaaattgttagtgcattattgagtatactaaatatctgtgattaaataaattagttctaacttttgattttgggagcccaaaataaagggagtgttgttttcatggttatgccttgtttgtggagtcaagtgttgatatacttgaggcatgttatgtgtcttctaattaatatttttatcaccttgaatttgtgtctcttccaagcattaaagatactatggatcttaaattccttattaaaaaatgcaagtgtgn

SEQ ID NO: 44114 - DNA, 595 bp, Homo Sapiens
ctcagctctgggagggaacgggagatgttgcaggcgccgagagggcgggccagggccgcactccggagactcgcggttgctacgcgcaccatggctggagcgcccacggtctcgcttcctgaactccgttcactcctagcctccggacgggcccggctcttcgacgtgcgctctcgcgaggaggcggcagctgggaccatcccaggggcgctcaacatcccggtgtccgagttggagagtgctctgcagatggagccagctgccttccaggctttatattctgctgagaagccaaagctggaagatgagcatctcgttttcttctgtcagatgggcaagcggggcctccaggccacgcagctggcccggagtcttggatacactggggctcgcaactacgctggagcctatagagaatggttggagaaagagagttaggcaggaggcagcttactgattgccaccccctggccccttaatggccaccttaactaagggtgtgaacgggctgacttggtgaattgggcaactccttatagtgttgtgcacacaaaagcatcaaataaagaacatttaatcaaaaaaaaaaaaaaag

SEQ ID NO: 44115 - DNA, 567 bp, Homo Sapiens
gatatttttaacaagagtctataggcaaacaatatagggtgtgctgtgcattgtcagccctatactgtggtcttaataatgccagcttaaaaatcactgttgtgctctgcatttcgtgtgttagaagctgattctaggctgaggaaagcaagagttctctacttttgctcaatattgaggcttacccagcttgactctacagccagtgaagtggtttattgcttcaataaaaatatacttgaatgatgaatttatttatgttttgttttgtttttatttagagatggggttttgccatgttggccaggctggtcttgaactcctgacctcaggtgatccacctgcctcagcctcccaacttgctgggattacaggtgtgagccaccatgcccagcctgaatgatgaatttatgtgaacacaaagccctctgaaaaattaatgattttcaatttgttgtcttcttgaaaactgaatttaagtattatttaaacagaaaagtgtcagaaatcaaatgcagtatctccctctcccttttttaaatgttgaattagtagggtttttgtata

SEQ ID NO: 44116 - DNA, 1085 bp, Homo Sapiens
gccaaattaaaaaacgttcagcttctctaaactccaagccatcttctctacgaagagtgactattgcctctttacccagaaatattggaaatgcaggaatggtggctgggatggaaaataatgatcgattcagtagaaggtcaagcagttggcgtattttggggtcaaagcagagtgaacaccgtccctcattacctcgatttattagcacctattcctgggcagatgctgaagaagaaaaatgtgaactaaaaactaaagatgactcagagccatctggagaagaaacagtagaaaggacaaggaagccaagtctttctgaaaagaaaaataatccatcaaagtgggatgtctcttcagtttatgacacaatagcttcctgggcaacaaatctcaagtcctccatcagaaaggctaataaggccctctggctctctattgcattcattgtactgtttgcagctttgatgagcttcctcacaggccaattattccagaagtctgtggatgccgctcccacacagcaagaggactcatggacgtctctagaacatatcttgtggccatttaccagactccgacacaatgggccaccaccagtgtgacagcaggacatcctaatatatggatcttgatttcaagtttcagtatctgaaccttcgtaaattagtaacttttagctgggaaagtatagcatgaaaccagaggttctcagaatgactgtaagaatagttacatttcctcttttggctttattttcccaattaaatcaagggggaagaagtctgctatgatcttgaatgagctttaaggagaactttattttggtgggtaaagttattgaacttacggactcgttaagcttgaagacaaaacaggggggggcgcaaagaacccaggagggccagctacacaacccgttctggtaaaggcgcacaaagggcgaaaaaagaagcgcgggtaacacagcaggaaaagcggtatcctaggacaactggtggatagcacccaaagagagcaacatgtaggaagcctgcgcacaggtagaacagcagcaaaagcagaacatcagcgacatagcagac

SEQ ID NO: 44117 - DNA, 428 bp, Homo Sapiens
  misc_feature (30)..(30): n is a, c, g, or t
ggagcctgcatgttcaggcccctcgggggnattggggggactggggaggcacagcctagacccaattgcttgcccccatgaggctagcactaataggaaacccttttttgttgtcatttaatgtctttattcctgcctttaatatggggaggaaggttccataagctacatgtttcctagttaagctctttcctattgtgtttatacagttttgtttgttatactctttgcaccttaaacccccaccactccccgacactattgccttcccagcatggctggagtgagaagaggcttgggccccgggggaatggttagggggactgaacccctctgaccttatgaggcccatggcactggggcagggagctggggacattttaatcatcaataaacgaagcactttattctgtacagatttgggcagg

SEQ ID NO: 44118 - DNA, 835 bp, Homo Sapiens
ggggtgacatcaccgggcagggaggggtgctggtggtggttcatacggagtaagctgctctgcctgtgtgagtggctcctgggccctaaacaggcacctttaggccatgggtcactcaccgtgagccatcaatgtgctctggtctgacatggtttctctctgtcttctagtctagacctagtttttttgttctgttccccacgtatggatatagtagagattgttgtctgtgaaatttctcttttgtagattttgagttttcccttgtagtgtaaagaatgatcactttctgtaacaataacaagaccactttttaagatttatcctgtttgttctttgttgattgaaacataataattgttaaaattctctacagccttctttttcttccatagctaatcttccttctaatagtttttgctttctgttttgctgttgttgctttgcaaagctttcccctcatagcctgtacctgttatcaatataaaataatcttcctgttgaatgcttcatgacttgaattttactttgataaaaacattgccatactgctttttatcttgatgaattcatctggcattgctttgccttatcatctcatctggagtttttaaatgccatttgtttcagctgtctttacaacctaattaatagactttgccatttaccaggcaactaccgcgaaaacaaaaaaaaacatgttcggccgccttcggtccctcgaaaaccttttttaaacactttcttttggccccgcgggcccccgaaaggtaaggtgaacagtggccccaactgtgtttcctaggaaaaacgcgggtcctgaccaaaagctttg

SEQ ID NO: 44119 - DNA, 766 bp, Homo Sapiens
ctttcagcaaacgccaaacagtagtaattcttgtaactaccttgaaccctttgtggaaagaacctgggtgtgagtgaataaaaagtaaagagcgacgcgctatatcggccattaaatactcggggctgtccgtaacaccctgtgcttcccaattgtagcaccatgttctgtgtgaatatgcataaccagagtgaccccccccagcacccagcatgcccggctgtgcccctctgggtatgctcacatgcacatatatggacatacagtttcgtagcagaacgtggctgcccaggggctgcctatctgggcgagtagaccgcctggctcagcccacaggcctgcagcatcccatagcaccccgcccttgccccatcaccctgtgggctacatgcaggacacggcatgggcctgctccccagaggcacctgtttggggtcttcttgaggcttgtgctttcacagctctctttgaagcagatgtcttggtgaactcggtagactcttttatacctgttgtcacaagaaagctttgtaaaaccagacagtgaagcaaaatgttgccaactgcttaacctaggctatgtgaacccacagtaaacctgaaggtgtttgagggaaaaactgctattttctgaatgaaacgtgacctcctattgatgtattaaaatgtctaacataaaggtcatgtgatttgtaataaatttattgtggtacagtaatatgcataaaataaacccattttaatgtgcaaaaaaaaaaaaaaaaaa

SEQ ID NO: 44120 - DNA, 858 bp, Homo Sapiens
ccacctccacacccaccccctctggagaaggcctggaagagctgagaccttgctttgagactcctcagcacccctccagttttgcctgagaaggggcagatgttcccggagcagaagacgtctccccttctctgcctcacctggtcgccaatccatgctctctttcttttctctgtctactccttatcccttggtttagaggaacccaagatgtggcctttagcaaaactggacaatgtccaaacccactcatgactgcatgacggagccgagccatgtgtctttacacctcgctgttgtcacatctcagggaactgaccctcaggcacaccttgcagaaggcaaggccctgccctgcccaacctctgtggtcacccatgcatcttccactggaacgtttcactgcaaacacaccttggagaagtggcatcagtcaacagagaggggcagggaaggagacaccaagctcacccttcgtcatggaccgaggttcccactctgggcaaagcccctcacactgcaagggattgtagataacactgacttgtttgttttaaccaataactagcttcttataatgatttttttactaatgatacttacaagtttctagctctcacagacatatagaataagggtttttgcataataagcaggttgttatttaggttaacaatattaattcagggttttttagttggaaaaacaattcctgtaaccttctattttctataattgggagaaattgctctacagataatgtctatatattgggccaaactggtgcatgacaagtactgaatttttttataccctaaaaaaaaaaaaaaagggggggccgcctcctagagtatccct

SEQ ID NO: 44121 - DNA, 713 bp, Homo Sapiens
attatggccggggagattagagtgaaaagtctatgaggaagcagccctcaccagacactgaatctgctggtgccttgatcagagacttctcagtcttctaaaactgttatggccacaccgtgcccttgtcagatggaggtaaggccttctgcatcatctactccgtcattggcattcccttcaccctcctgttcctgacggctgtggtccagcgcatcaccgtgcacgtcacccgcaggccggtcctctacttccacatccgccggggcttctccaagcaggtggtggccatcgtccatgccgtgctccttgggtttgtcactgtgtcctgcttcttcttcatcccggccgctgtcttctcagtcctggaggatgactggaacttcctggaatccttttatttttgttttatttccctgagcaccattggcctgggggattatgtgcctggggaaggctacaatcaaaaattcagagagctctataagattgggatcacgtgttacctgctacttggccttattgccatgttggtagttctggaaaccttctgtgaactccatgagctgaaaaaattcagaaaaatgttctatgtgaagaaggacaaggacgaggatcaggtgcacatcatagagcatgaccaactgtccttctcctcgatcacagaccaggcagctggcatgaaagaggaccagaagcaaaatgagcctttt

SEQ ID NO: 44122 - DNA, 805 bp, Homo Sapiens
  misc_feature (1)..(1): n is a, c, g, or t
  misc_feature (760)..(760): n is a, c, g, or t
naaacaggggacggtcggattcccgggatcaaggacgaggatcaggtgcacatcatagagcatgaccaactgtccttctcctcgatcacagaccaggcagctggcatgaaagaggaccagaagcaaaatgagccttttgtggccacccagtcatctgcctgcgtggatggccctgcaaaccattgagcgtaggatttgttgcattatgctagagcaccagggtcagggtgcaaggaagaggcttaagtatgttcatttttatcagaatgcaaaagcgaaaattatgtcactttaagaaatagctactgtttgcaatgtcttattaaaaaacaacaaaaaaagacaaatggaacaaagaagctgtgaccccagcaagatgtctaatatgtgaggaaatgagatgtccacctaaaattcatatgtgacaaaattatctcgaccttacataggaggagaatacttgaagcagtatgctgctgtggttagaagcagattttatacttttaactggaaactttggggtttgcatttagatcatttagctgatggctaaatagcaaaatttatatttagaagcaaaaaaaaaaagcatagagatgtgttttataaataggtttatgtgtactggtttgcatgtacccacccaaaatgattatttttgtagaatctaagttaaacttactatttataatgcataggtaaccattaactatgtacatataaagtataaatatgtttatattctgtacatatggtttangtcaccagatcctagtgtagttctgaaactaagactagatatttt

SEQ ID NO: 44123 - DNA, 864 bp, Homo Sapiens
actgaatggtggctagattagtgggagcagttcacctggatgaagattgagagcatcgtctttgagaagtgaaagactagcaagaataaaataaattaagtccagtgtttgagccaaggttgccacctgtctcttaacatctcactgaacataagtcctgaggtattaggacgaccatactgcctctgagctgaaaacattcaaaagttcacatccctgttgggggataccattcaccgccttcagcccagatgatactttcctttaaatctgtgtctctgtgtgtataacaaagaggaagatggaaacaatgttcatggaaactgctgttgagccccttgtcccaccactcccgccatctgctgcaggcaggaaggcatgtgagtgtacgttttcttccaggagacatcaggtccccctggattcaaattaagtgcaatattttgcaaacagctcttcttagggaaatctcctgaaggaaaaaaatgtgacagaatgttccatagtctgagagaatggaatcgttgaacatttagtacaagtccagtgtgtgtgagcgggacttaggcagctcaagcttgcttttttttttaagcgtacaatgtgagtggtctttagtaaattcacaaactgtgttcaaccatcaccactatctaattccagactcacgcttttttaaagcaattaaatgtccatttccatgaacatcttgggtgaataaaatcactctggattcagaagaagagctcccttaacagtccacacctggatctcatgggtggctctccctttcatgtggtcagaactccccctggtctaccggttgacgggtttcccgagccttcaagttggggcgcacagttc

SEQ ID NO: 44124 - DNA, 651 bp, Homo Sapiens
atgggcagctcccggctgagggtctttgaccctcatttggagaggaaagattccgccgcggcgctctcagaccgagagctgcccttgcctaccttcgatgtgccttatttcaaatacatcgacgaggaggatgaggacgatgaatggagcagccgctcgcagtcttccaccgaggatgactcagtggactctctgctctctgacagatatgtggtggtgtccgggaccccggagaagattttggagcaccttttgaatgacttgcacctggaagaagtccaggacaaagaaacagagaccctcctggatgacttccttctcacgtacactgtcttcatgacaactgatgacttgtgccaggctctgttaaggcactattctgctaagaagtatcaaggcaaagaggaaaactcagatgttccgcgtaggaaacgtaaagtcttgcatcttgtttcccagtggattgctctgtacaaagactggttacctgaagatgaacattcaaaaatgtttttaaagaccatatataggaatgtactggatgatgtttatgaatatccaatacttgaaaaagaattgaaagaatttcaaaagatacttggaatgcaccgtcgtcacactgtagatgaatattcaccacaaaaaagaata

SEQ ID NO: 44125 - DNA, 559 bp, Homo Sapiens
  misc_feature (2)..(2): n is a, c, g, or t
  misc_feature (5)..(5): n is a, c, g, or t
tnacnatgtattactgtataaagcaaagctgtatatactaaacattttttagcagagtaatatttatttgcatagtctatttattgtattcgtatcacactgttattaaatactgggatgaaatcagtgacctgaagcaagaaatcttgccttttaatgtatcattaattagggctgctgtgatattgtcagcttgcattaacaattagaagatagagaacccgccatcagggtgtctacctaacttctcagggactacacttggtagttttccaccatttaaagaactggtaaatatgaaacatttgttgagttaccagaattgccattaacagtgttttctttcccatattccatgctttctgcctctgtgtatatatataatatatatgtatatgactgtgctgtgtatttatcgaagctagtaagcaataatttatatgtaaaaatggccaagcaatataagggttaaaacttatataagtaacccttaccttatcctggtattttccattttttttaaactggcttttccaaatatggggactatgttaaagac

SEQ ID NO: 44126 - DNA, 442 bp, Homo Sapiens
cttcagggacatgatgaaaaatacgtggagttgatgagaaaggggagccaaggctttatacgtctaaagaaaatattcagtagctgaatccgcccagtgatagcctgtgggcaccagcagcaagggctgccatgggatacagcacccatctacaaagacctctattacataaacactgcttcttacaggaaacaaacctcttctgggatctccttttgtgaaaaccagtttgatgtgctaaaagtaaaaagtctattttccagtgtggtcttgttcagaagcagccagatttccaatgttgtttttcccctccactcagaaacccctgccctttcccttcagaaaacgatggcaggcattcctctgagtttacaagcagagactcactccaacccaaactagctgggagttcagaaccatggtggaataaagaaatgtgcat

SEQ ID NO: 44127 - DNA, 574 bp, Homo Sapiens
tttttaaagaacattgttttataaagaacgtgatttccagtgatctctggaagcgctaaagctaaaatttctgttcttgaaacacttcagctttgcaactaaaatattacagattaataataaattaaaccaaccaatgataaacactactcagtccaccaacaacaaacgtgtttgaattcaccttaccaatattaatcccagcgtgtgtaaaacagaacagtaactctatgtgaccccagataacattttgtaacattgtgcttccttgtagtttgtaatgtgagttcaatcagtatttatgttgaaatttctaacattaaatctagtctctatcctgttaatttaatttttaaatgctttatccatttgtgcaaaggtaaacgcagattgtatcttttttaatggtacggcataaaaagtaaccctcaagtgaagtgtctctatactgttttatagagtactttaacatgaatagataccttgtaaacttgtattgtggatgtgtaaataatatgtactttgggtttttaacaccgcatgtaaagtcaaaataaaatatacaaatcattaa

SEQ ID NO: 44128 - DNA, 727 bp, Homo Sapiens
  misc_feature (703)..(703): n is a, c, g, or t
gagaaaaagtttattaccaaacaagagtatttttatgaaagaaaaggacaaacctataaattaactcaacctatatctcccttgaaaatactttcaggctccaccaaaacgtagaactgaaagcatgtattttggaagaaagagatacattttgtatgctttcttttccttttgtagattcccagtttattttctaagactgcaaagatcactttgtcaccagccctgggacctgagaccaagggggtgtcttgtgggcagtgagggggtgaggagaggctggcatgaggttcagtcattccagtgagctccaaagaggggccacctgttctcaaaagcatgttggggaccaggaggtaaaactggccatttatggtgaacctgtgtcttggagctgacttactaagtggaatgagccgaggatttgaatatcagttctaaccttgatagaagaaccttgggttacatgtggttcacattaagaggatagaatcctttggaatcttatggcaaccaaatgtggcttgacgaagtcgtggtttcatctcttaaacacagtgtgtaaatttattcaactaacgatgggaaatgtattacttctgtacacagtggactgaagtgcaatttgttgaaagggaacaagtcattgaagagaaaaaaaaaagcccaatacttagagtcccaattttgtctcatttgccanaaaaaaaaaaaaaaaaaaacgcgg

SEQ ID NO: 44129 - DNA, 501 bp, Homo Sapiens
gcacgaggcaaatgccagcttcaagcagggtgtgaattggccagtgtcagatctcaggagtcctgtgttgagagtgtggctttcagctgcggggagctgcacttggtggggaaagccaggcaggtcaccctcacagccagataatgtggaggtcagaacccaaggaagggagtgagacctccactcccagtgggggacctggccacccatccttggggacctgagaaagcgtacttcaccttggggtgaaggctgggtggggccagagggaccagtgccctcctcagtgcttaggggcagagccacctgcagcaatggtatctgcatattagcccctctccaccttctttctcccgctgaatcatttccctcaaagcccaagagctgtcactgcttctttctccctgggaagaatgcgtggactctgcctggtgatagactgaagccagaacagtgccacaccctcgccttaattccttgctaggtgttctcagatttatg

SEQ ID NO: 44130 - DNA, 549 bp, Homo Sapiens
ttttttttttttttggatgtgggatggaggtatacaatgttctgttgtaaagagtggagcaaatgcttaaaacaaggcttaaaagagtagaatagggtatgatccttgttttaagattgtaattcagaaaacataatataagaatcatagtgccatagatggttctcaattgtatagttatatttgctgatactatctcttgtcatataaacctgatgttgagctgagttccttataagaattaatcttaattttgtattttttcctgtaagacaataggccatgttaattaaactgaagaaggatatatttggctgggtgttttcaaatgtcagcttaaaattggtaattgaatggaagcaaaattataagaagaggaaattaaagtcttccattgcatgtattgtaaacagaaggagatgggtgattccttcaattcaaaagctctctttggaatgaacaatgtgggcgtttgtaaattctggaaatgtctttctattcataataaactagatactgttgaaaaaaaaaaaaaaaaaacctcgtgcc

SEQ ID NO: 44131 - DNA, 608 bp, Homo Sapiens
tgggagagagcagggttttctcagattcctttttaatctctatttatctggttgtttctgacaggatgctgcctgcttggctctacaagctggaaagcagcttcttagctgcctaattaatgaaagatgaaaataggaagtgccctggagggggccagcaggtcacggggcagaatctctcaggttgctgtgggatctcagtgtgcccctacctgttctcccctccaggccacctgtctctgtaaaggatgtctgctctgttcaaaaggcagctgggatcccagcccacaagtgatcagcagagttgcatttccaaagaaaaaggctatgagatgagctgagttatagagagaaagggagaggcatgtacggtgtggggaagtggaagagaagctggcgggggagaaggaggctaacctgcactgagtacttcattaggacaagtgagaatcagctattgataatggccagagatatccacagcttggaggagcccagagaccgtttgctttatacccacacagcaactggtccactgctttactgtctgttggataatggctgtaaaatgtttaaaaacaaaacaaaacaaaaaagaggcactagtc

SEQ ID NO: 44132 - DNA, 605 bp, Homo Sapiens
tttgtagcattgtcatcactcctaagctgccttcacagttttagtacactaagatgaggaaatcgaaaatgggcagagaaagctcatactgtataattgaagacagtgacagagaacgtgtcagttatgccaaaactcttttgatttctgttccaggatttccaacaagaggggaaaggaatgacttgggagggtgggaaagacattaggagttgtttttattttttaccttggaagctttagctaccaatccagtaccctcctaactagaatgtatacacatcagcaggactgactgactacttcattagagatatactgtactcattgggggccttgggggtactgctgttcttatgtgggattttaatgttgtaatgtattgcatcttaatgtattgaattcattttgttgaactatattggttggcattttattaaaataaattgttttgtttcataaaaaaaaaaaaaaaaaaaaactcgagggggggcccgggacccaattcgcccttataggaggcgattacccccgcctcctggcccgtcgtttacaactcgtgactgggaaaaccctggcgtaccccaacttaatgccttggagga

SEQ ID NO: 44133 - DNA, 679 bp, Homo Sapiens
acagtgtttccataacttctgccaataaaacagaatttgagttagaacctatctgctgtccctcaactagtgtctgatagctgagaatgtaattcgtttgtgtgtctattagaaaattaggcaggcaccacagacagtagcaacataaaggaacctgcttagaagaggtttttatggtgtgattgtgttttttttttttaatttttgtttcctgaagtagaatccatagctcaaaacaagttttaagcctgagaaaatataatttgaggtgttttttatgctcctaatgaaaagatgaatgaatgcatcattaaaccttaacagtagagcagaatttcactgttacaaaccacatgggttctcctggttgtgctgctgttctctacctgtgtgtcactgagtttgagcatcattattgtttgaatcagaggacccactggaatcaaggcttcttggaattgcgcaagaatctgagaaaacttcaatctttaccagcatttcttaatgctttccatgacttttgtgcaattatataagttcagtttagacaaaatgctgttactttttaaggcattactaataactgaaaatagttacgtcattgcccctccagggaaaagcacttgtaactggcatttaaaaaaattaaactataaaaccatataaaaaaaaataaaag

SEQ ID NO: 44134 - DNA, 604 bp, Homo Sapiens
gctgggatggcggccaccactacccagagatggatgcgcggcaggagcgggtggaggtgctgccccaagcccgggcctcctgggagagcctggacgaagagtggagggcgccccaggcaggcagcaggaccccagtgcccagcacagtgcaagcaaacacctttgaatttgcggatgctgaggaggatgatgaggtcaaggtgtgaggggctggggcacggtcccagggccccacctaggtgcagagccggcccctcacctaacagctggttcctaccagaccggagaggggagaagtcatgttgcccctaaacccctccccacctctgcaggacagacatgggagggaggacagggaaggccaggcttgctctgggacttttatgctcccagaggccctgccaaactgaccacctcccccgactgccactctggacctaatagctgttccttaggccccactccatgccacccccaccagctggaggacccagcctcacagtgtgtcctttgtgccagaccaagcggcccgtggggggtggggggcagggagtgtaccacacagggccattgtctcacctcccaaaggggaccgactgcacgc

SEQ ID NO: 44135 - DNA, 586 bp, Homo Sapiens
  misc_feature (532)..(532): n is a, c, g, or t
  misc_feature (537)..(537): n is a, c, g, or t
  misc_feature (551)..(568): n is a, c, g, or t
  misc_feature (570)..(580): n is a, c, g, or t
  misc_feature (582)..(583): n is a, c, g, or t
gggggtttatcatgttttaattttagagacagggagtgatgaatcatcaccggttgtccccttatctaactccataaaagtgggaatttcaaaagaacacctcatccaaggagctggggcagacttcattgattctagagagacctgtttcagtgcctactcatccctgccctctggtgccagcctccttaccatcacggcttcactgaggtgtaggtgggtttttcttaaacaggagacagtctctcccctcttacctcaacttcttggggtgggaatcagtgatactggagatggctagttgctgtgttacgggtttgagttacatttggctataaaacaatcttgttgggaaaaatgtgggggagaggacttcttcctacacgcgcattgagacagattccaactggttaatgatattgtttgtaagaaagagattctgttggttgactgcctaaagagaaaggtgggatggccttcagattataccagcttagctagcattactaaccaactgttggaagctctgaanataanagatcttgaacccnnnnnnnnnnnnnnnnnnannnnnnnnnnncnntgt

SEQ ID NO: 44136 - DNA, 671 bp, Homo Sapiens
tcgtgccgaattcggcacgagttgaaggaaatgtttcaccttatttttggtctttgtttattcatttagaccctgcaagttgattctcattaattgtcagattccactaccctttcttcctcatagatagtaattaccaatgtaactaagtatttgtgttctgatatctgaggccagtaactattaatatctagttctcagagcatttggaaaggttatcttaaatggctacctaaattgaaatccttttcagaaaaaatataattgcaagtaggtaggactggcctaaattgtctaatgtaataaagtcagacaaaatgcatactttatagtttcaagattttcagtatataaaatctgtccattcccattaaaaagtggaagattttaaataatttctttacagatgttttatttaagcaggtagctcaatctactaatgttgtttgatctgtgtttgttatactggttgtaattaatttttttaattcatgaactagcagaaaatttattaaattaactattaactacattcaccttgtaaattactgtataaaacttgttgacaatgcactgactttagaaagatgttaatgtacataaatagagtgtaaataaaatagtgttgatgtaccgaaatatgaactgtataaaaagtattggtaattgtt

SEQ ID NO: 44137 - DNA, 690 bp, Homo Sapiens
ctgagctgtatgtcctgaaggggggatacaaggagttctttatgaaatgccagtcttactgtgagccccctagctaccggcccatgcaccacgaggactttaaagaagacctgaagaagttccgcaccaagagccggacctgggcaggggagaagagcaagagggagatgtacagtcgtctgaagaagctctgagggcggcaggaccagccagcagcagcccaagcttccctccatccccctttaccctctttgctgcagagaaacttaagcaaaggggacagctgtgtgacatttggagagggggcctgggacttccatgccttaaacctacctcccacactcccaaggttggagcccagggcatcttgctggctacgcctcttctgtccctgttagacgtcctccgtccatatcagaactgtgccacaatgcagttctgagcaccgtgtcaagctgctctgagccacagtgggatgaaccagccggggccttatcgggctccagccatctcatgaggggagaggagacggaggggagtagagaagttacacagaaatgctgctggccaaatagcaaagacaacctgggaaggaaaggtctttgtgggataatccatatgtttaatttattcaacttcatcaatcactttattttatttttttttctaactcctggagacttattttac

SEQ ID NO: 44138 - DNA, 620 bp, Homo Sapiens
ctccttccgggcccgggcctacggcttcagggccctgggccgcagctgcgaacgaggctggaggccatcctcccgggaggacagccttgaggcgggcctgcccctccaggtccgaggctaccccgaggagaagaaagaggaggagggcagcgcaaaccgcagaccagaggaccaggagctggagagcctgtcggccattgaggcagagctggagaaagtggcccaccagctgcaggcactacggcggggctgagacaccggctggcagggctggccccagggcaccctgtggccctggctctgctgtccccttggcaggtcctggccagatggcccggacgctgcttccggtagggaggcagcctccagcctgcccaagcccaggccaccctatcgccccctacgcgccttgtctcctactcctgactcctacctgccctggaacatcctttgcagggcagccccacaactttaaacattgacgattccttctctgaacacaggcagctttctagaagtttcccttcctccatcctatccactgggcacaactgcaataacttctgaccttttggtgaaagctgagaactcctgactgtaacatattctgtatgaacttt

SEQ ID NO: 44139 - DNA, 668 bp, Homo Sapiens
  misc_feature (631)..(631): n is a, c, g, or t
  misc_feature (637)..(637): n is a, c, g, or t
  misc_feature (647)..(648): n is a, c, g, or t
gaggaccttgacccaatagtgttcccatgctgtttcttgtgaaatgctctcggctatgtagcagcttttgattccctgcataccctaggctgctgcccctatcctgtcccttgtttataacattgagaggttttctagggcacatactgagtgagagcagtgttgagaagtcggggaaaatggtgactacttttagagcaaggctgggcatcagcacctgtccagctctacttgtgtgatgtttcaggaactcagcccctttttctgcctaggataaggagctgaaagattaacttggatcttctaatggtccaaatcttttggtcacaataaagagtctccaaattagagactgcatgttagttctggatggatttggtggcctgacatgataccctgccagctgtgaggggaccccgtttttaagatgcatggccaagctctctgcaaatggaaatgcttacactgggtgttggggatgtttgctacctcctgctatttttgtggttttggttctcccactatggtaggacccctggccagcattgtggcttgtcatgtcagccccattgactaccttctcatgctctgaggtactactgcctctgcagcacaaatttctatttctgtncataanaggagatgannataaaaaaaaaaaaaaaaaa

SEQ ID NO: 44140 - DNA, 632 bp, Homo Sapiens
gtgttttttggatgcttcaagcacacgttaaccaattttttaattccccttttggttcctcccattgttctaaaataggactttcatattattaaaacctcaaaagatgatccacccaggatgaacaaagatcaccaaggggaaagaaaacattttttatctttacagaaaacatgttaagattatatatagatgtattctttacattggatattgtattagagtcctccttacaagaaatgaaatagtttttagcactcttagcattagagttcctagattggtgttgatagctacagttttaaaatgtataacctgaaaatgaaggttaattttgcattgtaagagcacatttgatctatgtaaaaagtgtccatttggtgtatttttttaaaaaagagaaagcactttcatattaagtagcatgtgtatgaatttagattttcatatttgttgtgtctgtattcagtgaagtaaattgagcatttaaatgtttgttgatggcaacattaactattaaattaaagcaccttatactctgctgcttaacttgcttgtaattgcacctttgttacctgcacattttcatatagaatattgttgtaacattgcttcatgtgggtctggatgga

SEQ ID NO: 44141 - DNA, 705 bp, Homo Sapiens
  misc_feature (696)..(697): n is a, c, g, or t
  misc_feature (700)..(700): n is a, c, g, or t
  misc_feature (702)..(703): n is a, c, g, or t
  misc_feature (705)..(705): n is a, c, g, or t
gggatgctatatttttctgttctgttttctgaagattttgccatttaaaatgatccagtgaaaaatatttatccacattgaagaaagtggatttcccatgcaaattgaatcttcattaacacattttaaaaggctttactgtattaggtaacatagatattaaaggatttttctaggcaagaagctcaactttttttttccataaaaataatttttgcttaaatagtaactcatggttttcttttattaaatggggttgttgtcagtatgttaaacattgaagtaggaggaggatgcatattgtactatgcattcaaatttatcactgttttttctgacagactttccctttgtcctttctagttatgacttgggaatggggtaacttctttatgcatattattaagggttatagtatgaagaaatcataaaattgcaagttttggtttgcattactctaatgtgggttcatttaatctgagatcttaaatatcttgcagccttaaatcactacaaacatttgcatttttattatgccagttatttccaaaatgtattgttatacatgtcacttatgttttttagctaatattgactgtaggataatctccttgttccccctcaaaatagtcattgaaagtgtacatggaaaatattttttaaaggaataaaattttcctttaaatttacccaaannaanannan

SEQ ID NO: 44142 - DNA, 878 bp, Homo Sapiens
cgaagttctttaccagatagcaaatatatatgaattaatggaaaatcccagtcaagctattgaatggctaatgcaggtggtcagtgttattccaaccgatcctcaagttttatctaagctaggagaattatatgatcgtgaaggagataaatctcaagcatttcaatattactatgagtcatataggtattttccttgtaatattgaagtcattgagtggcttggagcctattacattgacacccaattttgggaaaaagctattcagtactttgaaagagcttctcttatacagcctacacaagtgaaatggcagctgatggtagctagttgtttcagaagaagtggtaactaccaaaaagcattagatacttacaaagatactcacagaaaatttccagaaaatgtcgaatgtctgcgtttcttagttcgtctctgcacagatcttggattaaaagatgctcaagaatatgccagaaaactgaagaggttggaaaaaatgaaagaaataagggaacagcgcataaagtcaggcagagatggcagtgggggctcccgtggcaaaagagaaggaagtgctagcggtgatagtggccagaactatagtgccagtagtaaaggtgaacgactaagtgccagactcagagctttacctgggacaaatgaaccttatgaaagtagcagtaacaaagaaatagatgcctcctatgtggacccacttggccctcaaatagaacgaccaaaaactgcagccaagaaaaaggatcgatgaagatgattttgctgatgaagaattaggagatgatttgcttccagaataatattcacttttaatatttatttaaggaaaggaattgcctttaatgagatcatccctc

SEQ ID NO: 44143 - DNA, 505 bp, Homo Sapiens
  misc_feature (441)..(441): n is a, c, g, or t
  misc_feature (462)..(462): n is a, c, g, or t
aagaaaccagcttacaaaagattatgatcattaatgaactgcaaacctcatctttcgaaaacaaggttttgtgttttttttttttttgtaaatatttgtgtttataaatgtacagcagagtaagagtgttttttagattatttaattcccatatttctaaactatttactacacagtaatccatgcctgttagtttggaggacttgactgtctcattttttaattcattgtcagtcatgcttggaacagcatttccactagagaatccagcgttctggcagtagcaagagtacacatctggagcatgagggactctagcatgactcgtcagatgcacaccccaagagacaagaatgtgtagtttaatgaccggcgtggaccatacgaaattgagattctaactttcctgcaggagtgctcatgagcccagaatgtgattgngataaggccatttgcccacanatttagctttcatgtaactcctagtgtgttatatcataatgta

SEQ ID NO: 44144 - DNA, 649 bp, Homo Sapiens
gtcctcctggcagcccctcaaacacacaccaccccatgtcacacgggtatccagagcaaggctggatctgggctaggtgacccctggggcctcagacctctgagtgggccccagagcccagctgaggaagccacacagcctccaggacgtggcacggttcccctccacttggctgcaagtcgcctgccatggggcgaggaggcctgcaccccagtataagggcctccccagctgagtaagaagctgcttcccctcctctcataggccaagcctattgtgtgaaaccatctcatggtcttggtgacgtagaccatttttgaaaccgtctcatggtcttggtgacgtagaccgtttgcttctttaactccagccgcggaatgacattagtggaaccgggctagggaactgctggaagttcaggatgccaccaccttgaacacctaggccagggatccccaccatgtcccgggtttctttcttcgagagtatagaaccgttcattcttgctttgtgtcccattccatctcttgaaaaaatgtagtctttgaatgtgtgaaaatctagggacattcaatctagtcttttaaattatttttccatatttatatttttaaataaatgcatatattgagtcttaaaaaaaaaaaaa

SEQ ID NO: 44145 - DNA, 656 bp, Homo Sapiens
  misc_feature (611)..(651): n is a, c, g, or t
acgggcggcgtgggcgtggccgctgccctgtgtctctgtagcctcctgctgtggccgacccgcctgcgacgctgggaccgtgatgcccggccctgactcctgacagcctcctgcacctgtgcaagggaactgtggggacgcacgaggatgccccccagggccttggggaaaagcccccactgcccctcactcttctctggacccccaccctccatcctcacccagctcccgggggtggggtcgggtgagggcagcagggatgcccgccagggacttgcaaggaccccctgggttttgagggtgtcccattctcaactctaatccatcccagccctctggaggatttggggtgcccctctcggcagggaacaggaagtaggaatcccagaagggtctgggggaaccctaaccctgagctcagtccagttcacccctcacctccagcctgggggtctccagacactgccagggccccctcaggacggctggagcctggaggagacagccacggggtggtgggctgggcctggaccccaccgtggtgggcagcagggctgcccggcaggcttggtggactctgctggcagcaaataaagagatgacggcaaaannnnnnnnnnnnnnnnnnnnnnnnnnnnnnnnnnnnnnnnnaaaaa

SEQ ID NO: 44146 - DNA, 685 bp, Homo Sapiens
cttagttattgtcacactaattgatcgtttaaggcataagatggtctagcattaggaacatgtgaagctaatctgctcaaaaagatcaacaaattaatattgttgctgatatttgcataattggctgcaattatttaatgtttaattgggttgatcaaatgagattcagcaattcacaagtgcattaatataaacagaactggtggcacttaaaatgataatgattaacttatattgcatgttctcttcctttcacttttttcagtgtctacatttcagaccgagtttgtcagcttttttgaaaacacatcagtagaaaccaagattttaaaatgaagtgtcaagacgaaggcaaaacctgagcagttcctaaaaagatttgctgttagaaattttctttgtggcagtcatttattaaggattcaactcgtgatacaccaaaagaagagttgacttcagagatgtgttccatgctctctagcacaggaatgaataaatttataacacctgctttagcctttgttttcaaaagcacaaaggaaaagtgaaagggaaagagaaacaagtgactgagaagtcttgttaaggaatcaggttttttctacctggtaaacattctctattcttttctcaaaagattgtcgtaagaacaacaatgtcaagaccaaaaaaaaacaaaaaaagg

SEQ ID NO: 44147 - DNA, 519 bp, Homo Sapiens
ttttttttttttttcttcctttctctggggagacacagaggaaggaagaaacttaagaaccatcatagcctggtcctccaacatcttacagatcatgttttccaagagaaaagcctgtgttttcagaaactctgaattcagaaaaagaaacggaatgtgcgtaagaatcaggccactgcctggaaagactttctctcaattcgtagcctgaggctcagtgaaggaaacatgcagaaagaatgcctgagacgcccccagggaataagggaactctttataacctgtccagtgctgtcatctgggatttttctctgaagtacaagaatttcaggtgatttaagctgcttgatcacacttatttgtgcaaaattgattttcatttaatgttaatgttttcctgcttaattttatataacttcagaatgtaaagagcttcaaggtaaattacaaggtgtttaacctggggagttaaatgtgtacacttgaattaataggagcaccggttgttgctagtcctcg

SEQ ID NO: 44148 - DNA, 731 bp, Homo Sapiens
ggactcagaactgatacatatatacatgtatgtctatcatattcaatgtctattaggtgtaaatcatctcttcatgtaaaagacactactggtttgagggtagactcgtctaggaatattttgtccttctgtgacagcaccactatccatcccaatgtaacatttctacaaagggaagatatcttaaccaggcatacttatatttgctagttggaaaatcattctgaacagttttaattccattctattgaatggattattgtatgagctatttggggatcagatataaatgacaatcacacagaaccacttttattcaacatagataaaatgtgatgagtgttaacattttaaataagcaatctgcttaatggacattggtatgaaggggaagtgtcattctttacctcactcctcaaacacttttctatccaaaggttggtttgagtcagtattggcatcatacaaccacttactgtaaaataagtttattagtggtaacgtgatagaatttattcccgatatctgatgttacaaactttagggtccttgagatatgcaggatccttgtatgtaactggcataaaccctgtaaagagataattaaagttcttgacaaaacataatgagcaaaatttcagctagctcaattcagttgttgaagtattctttcctacccattaattgacctctcttaattgcttttgtggatttctttcggtttccttccc

SEQ ID NO: 44149 - DNA, 571 bp, Homo Sapiens
  misc_feature (411)..(411): n is a, c, g, or t
  misc_feature (524)..(524): n is a, c, g, or t
ttactcttccttttaagttttctaagtacgtctgtagcatgatggtatagattttcttgtttcagtgctttgggacagattttatattatgtcaattgatcaggttaaaattttcagtgtgtagttggcagatattttcaaaattacaatgcatttatggtgtctgggggcaggggaacatcagaaaggttaaattgggcaaaaatgcgtaagtcacaagaatttggatggtgcagttaatgttgaagttacagcatttcagattttattgtcagatatttagatgtttgttacatttttaaaaattgctcttaatttttaaactctcaatacaatatattttgaccttaccattattccagagattcagtattaaaaaaaaaaaaattacactgtggtagtggcatttanacaatataatatattctaaacacaatgaaatagggaatataatgtatgaactttttgcattggcttgaagcaatataatatattgtaaacaaaacacagctcttacctaatanacattttatactgtttgtatgtataaaataaaggtgctgctttagtt

SEQ ID NO: 44150 - DNA, 799 bp, Homo Sapiens
tcttggccctagtaccttgagggtgttgggggtgatggtgtaaccatcttcctcaggaattttcagccccggtgggcagggcagggcgaagtcatcgtgcaggtattttccactcatggcactctctaacagcctgtggagaagaaaagaggtgaggatgccccactgactatggttcctataccatctgccctcacccattttcctgccttacaggtgaagacagggaagccccacagcaaaaaggagaggcccagactgtgagttcccagcccggggctccatctaccagcttgacgctggaactgggaagcacagctggggttcagagggcgatgggctccctaggcagcccttcccctgtgactggccttccctctgacacatgcggctttacccacctttgtctgtccctgatgtctactgcactccacacagagccatatagggtcagctgccattgccggaggatgccgacctggaatgactcatcccctagggcagcaaggggcagctcgtgagccacgcccctctgtcagccatgccagacagcagaggccctgcccgccctgccacccaaaggggctcaggccacatggtctgctccaggagctgcctcactgtgtcccactgaccccaggttctgcagaagggcctcactgggtgcccttagggatggaaagggttgaaaggctgtactccaaagcagagtcttgcttttctctcccgtattttgggggttcagctgggattagaaaaaaatgtctttccaccaaattaaagaaagctttgaaaacca

SEQ ID NO: 44151 - DNA, 918 bp, Homo Sapiens
aaggaagtcataatcacagggatccagacccaaggtgccaaacactacctgaagtcctgctataccacagagttctatgtagcttacagttccaaccagatcaactggcagatcttcaaagggaacagcacaaggaatgtgatgtattttaatggcaattcagatgcctctacaataaaagagaatcagtttgacccacctattgtggctagatatattaggatctctccaactcgagcctataacagacctacccttcgattggaactgcaaggttgtgaggtaaatggatgttccacacccctgggtatggaaaatggaaagatagaaaacaagcaaatcacagcttcttcgtttaagaaatcttggtggggagattactgggaacccttccgtgcccgtctgaatgcccagggacgtgtgaatgcctggcaagccaaggcaaacaacaataagcagtggctagaaattgatctactcaagatcaagaagataacggcaattataacacagggctgcaagtctctgtcctctgaaatgtatgtaaagagctataccatccactacagtgagcagggagtggaatggaaaccatacaggctgaaatcctccatggtggacaagatttttgaaggaaatactaataccaaaggacatgtgaagaactttttcaaccccccaatcatttccaggtttatccgtgtcattcctaaaacatggaatcaaagtattgcacttcgcctggaactctttggctgtgatatttactagaattgaacattcaaaaacccctggaagagactctttaagacctcaaaccatttagaatgggcaatgtattttacgctgtgttaaatgttaacagttttccactatttctctttcttttctattagtgrataaaattttatacaagaa

SEQ ID NO: 44152 - DNA, 731 bp, Homo Sapiens
  misc_feature (24)..(24): n is a, c, g, or t
  misc_feature (37)..(37): n is a, c, g, or t
  misc_feature (104)..(104): n is a, c, g, or t
  misc_feature (646)..(646): n is a, c, g, or t
tggttttggttggggttgctgggnctgtccatcgggnaacacttgtttgggcatttttgaacaaatttttggactcatccgctgcccttttgtggagaatactntggaaaatcaaatttatcaacctgaaaattatgggagagagttcccttgctcctggaacattaccgaaaccatctgttaaatttgaacaaagtgatctagaggccttttataatgtaatcactgtatgtggtaccaatgaagtacgacataatgtaaagcaggcttcggatagtggaactggggaccaagtttgaggtagtggaaatgagacattgctgaacaaaagagaactgggtttacctgaccctctaaagcgctaagtactgtcagcctgaaaaaatcttctatacagaaactcttccaaatactatatcagtaatgtctgaatgatttcagatgtgaaaattgacatattttagttgaaatacctttctggactacagacttacatatcatgtgaatacttacctatttctacccgagttgcagcaagtattctgaaagcttaatgcacataaatcccactttagatcttacagctaactgtgtgccttagaaaccaggaaacatttttcttttacttagtgaataatctgctaanatttgcactttcatgtgtgaaaggatatataagggtccaggctctccctcccttaattttacgtccaatttttggcttaccccgg

SEQ ID NO: 44153 - DNA, 642 bp, Homo Sapiens
  misc_feature (529)..(529): n is a, c, g, or t
  misc_feature (571)..(571): n is a, c, g, or t
  misc_feature (642)..(642): n is a, c, g, or t
tctctttacattgttagttgtcaaccttggctgatggaaatcccgtaaccactatttgttgcactgtgccttgaagggcagcaggcccaagtgctgctctgactgtttactgagttaacaagacgaaatctaaaggatattcacagtgacttcaattcaggaagaatgcttccaaaagagcccagtggggaaatctgacatcacagaagacattaattcagtcactttcaaagagtttgtctacaggcggtttctctgttatcaaaggcatttgaaataggattttacttaaacaataatggaacacaggagtatttaaagtgaagaacactttgcctgaatgtgatcagggcacataagtgacattggcgtgcttcatatggcgtgcttggagccagaaaaacttagcggtttattttgtttatatttaagcacagctttaaaaaattcattatcgtttattcagtgtccgaattgaggccatttgggaagaaaattctagcactggtggagaattatagaataaagnattataatggttggataagacaaatgtaagcttatttcatanacatttaaagctgattcagaacatgttaaaaactgttcccaattccaactatgtaaatagatcctatgttn

SEQ ID NO: 44154 - DNA, 705 bp, Homo Sapiens
caacctagatctcttgcacgtgcggttcacagcaggattcgagctcctttgagaatctaatgccatggctgatctaacaggaaactgagctcaggcagtaatgcttggcaccgccccccaccttctatgcagcccggtcgtggcctggggactggggacccctgctctagtcagtaataaggtacttgtgccagaatataaatcaacacattgcttcctttatcaaagaagtcttgttatttaaaaaaagtcaactgagccagtatgattagtgatgtaattgattttcattctggcacaagcctctttcattctggacagctcacaaatagttaatggaccatgctttgaatagccttcctctaagcaacatttataaatactgatattttagaactgtttacatttcttctgtttatttttgaattttcagtttgatatcttgtccttattcattgttgtataaacaactgtactttaatttcaagtagtattaaaagtatttcacttcagtttggggggattattatcaatttataattttataaaagtattttaaagaataattgtaaattttccataaattacaacttcctgccatcttttattaaataataatcttgcttaaggcatatagacagacattattatgagtattccagtaaaaaaaatctacatcaacttgaccattctggctaaaaataa

SEQ ID NO: 44155 - DNA, 700 bp, Homo Sapiens
  misc_feature (616)..(616): n is a, c, g, or t
ttttttttttttaaagaaagcataacatagtgtgtcttagcaaggacatgattcatatggaagcagaatgtgagaagttgtaaggtccttggtactcactgtaaaatcacagacagagaattggtaggggttgtgaatacactagtaccacttaaagttcagtgatacagttcagaaatagggtccttaagtattttgaaagagtttactcttcagtcagcttagatgagagctctctccctgctcccctctaccctctcaaaagttgagagtaaatagaatttggtttgattccagggaggggaaaataagcagagaataggacttttatactttccaataccaggaataaaatgtttgtgatatatatgggtccagcaaacctatcgagataatgtgaatacgataaacttcctaatggcaggatattcactctcaatcctgaagttaccggttcctgcagaattgagcttcagctgttactgttttgaagccgctgtaaattactgctttccccagttcccccactattttttttaagtgggcgggggcgcctgttaagatctaaaatagatatgttggattgatattctcacgtgttcggtgtggaaaacanaacaagtacatgctttagaagcaacaacaatgaaatccttttgaaatgtgtgttaatatcgtttaatacaataaccctcgtgcc

SEQ ID NO: 44156 - DNA, 640 bp, Homo Sapiens
ggccttactgggacatgagtgagcaggaggtactaaatgcaatagagcaggagttccggctgcccccgcctccaggctgtcctcctggattacatctacttatgttggacacttggcagaaggaccgtgcccggcggcctcattttgaccagctggtggctgcatttgacaagatgatccgcaagccagataccctgcaggctggcggggacccaggggaaaggccttcccaggcccttctgacccctgtggccctggactttccttgtctggactcaccccaggcctggctttcagccattggactggagtgctaccaggacaacttctccaagtttggcctctgtaccttcagtgatgtggctcagctcagcctagaagacctgcctgccctgggcatcaccctggctggccaccagaagaagctgctgcaccacatccagctccttcagcaacacctgaggcagcagggctcagtggaggtctgagaatgacgatacccgtgactcagccctggacactggtccgagaagggacatgtgggacgtgagccgggctccaacagcctctgtgagagatgcccacaccaaacccaaccctcccgatggctgcattccctggtcctccgcctctccaccag

SEQ ID NO: 44157 - DNA, 769 bp, Homo Sapiens
ggagagaaagctcgcctgtgggttttgagttgtggtgtaatggtgaacatgtagccacgtgaaaggccgttggatctttgttctgattcttcagtcgtcttcttgcaaattcagagaaatgtcttttaatcatttcgtttacatatcccagatccttggaaatcatgaaaaataacttgccagagtttgcatcagccctcagtaagtcatgaaccatagagaaggtcatggggccatttattctttggaccactggctacttctgaagttctggcttccttctctctaggaggagtcgtgtattcaagcttttaagttaaatgcataaaaatgagttttacttctcttctgacttgatttttaattttatgaaatgggaaataatgtttttccatttttctgttcattttgaagtgggaatttgaggtgtttgtaatgtcatgttactgttctgaaagattgacagtaaagaagacaagaaatatatgtatgtagtatgcatattagttttgtcccaccaagcctatctttgaatggcaaacattttaaaaacatctgttctagttgcacaactactctagcttctttataaagtaaacaatcttaaagtaagcaatgttggccataatttcaatattctagccttgccgagtgtgaatatattttactcagagactatgtacaaatacactaaagtgggtgatggtgatccatattgttaaagaatttattctgataaatgagaaaactgggatataatgtcaaaaaa

SEQ ID NO: 44158 - DNA, 647 bp, Homo Sapiens
  misc_feature (562)..(562): n is a, c, g, or t
tggacagaggcatttgactaagccaacctcctctcacagcctctgtatctctgcaggccatactggttccattgttctgtataatactgaataaataaatttacttttacatgatcgtataagtttctagataagataaacaaattttgtttaaatttttttaataaaaatcttaaaacactttttttctaacctagactgagaaattcatgtttacttttctaggtgtatgatactttgtaaagttgatactttcctaagaatttaacatgtcatatttttgaaatagatttaagtgtgcttcttattgctaaaaatactaaatgtcatgggtcatagtatctgatatcaatatcgttgataacatatccacaggtaacaccatgatgtaggcataaatggaaaacaaaaaccctactatttcaaatatattgtacttttttatttctgtaagccaactgtgtgccattttcactggacttttaaatctagactttagtgatgtctacattgtaaatgatcttttgtggatatttgtcacttggtttcagaaagttcacanatgtagcaacagctcacatgactgagtaggtagaaaatgtgaaataaatctcatatatatagttttgacaaaaaaaaaaaaaaaa

SEQ ID NO: 44159 - DNA, 627 bp, Homo Sapiens
cgtccgtagaaactagaagtctgggaggtactatatcagctgtagttgggtaattccaagtgctgatagtactattcatcttttttattattgtgtcagatgaaacaaatgccaagttgcaaaatatgcagatttttattatataatggttttaggcataaattattaacaagccatgccttatgtgtttcatcttatatttttctttagaactaaactataacagattttggaaaatgatttgacttgcttgctcacttgattgacttggtcagatatttgaatgatggtattacctagattctaatccttgattctagttatataataaataatatagaatatgaaaatatgtttgggcatttactgtttatattatgtagtagcctccatcatgacacacttactacatttatgaattgagcagttctgtaattgtaattattattgctgttcatgtaacaaaacatgcttatgataatagcaaacaaatagaaatgcccccaaaatgctatttttttaattcagttataactgttactcttgtagttgtgtatgacgcaataaaatttgtaaaaaaatttcagcatgaaaaataaaatttgtatcactcatgtaaaaaaaaaa

SEQ ID NO: 44160 - DNA, 701 bp, Homo Sapiens
  misc_feature (672)..(672): n is a, c, g, or t
  misc_feature (677)..(685): n is a, c, g, or t
tagatcgcgagctgccgccctttttttttttttttttttactgacaatgtgaaactcgaagaaaatgttctctttttaaatatacagtcataaactgttcaaggtaaccataacaaactgggtgttatttattaacgtattataaaataatgtttgatccagtatgtgcttgtcttatttaaaattggaatgtgagacatgttgctgtgacctgtttttctttctcattcacatttgtagatattgtgtgaactacagtatataatgataacaattaaaaggatattctgtggatgtcacgtattttgaaatgatagaactacattagctttgtatcatgtttggataattcatcaatgttcacagtttaaaacatcattaaacattatgtaattacaatgagaaagaatcttacttaaatttggagattttcccccacatctcttttccggatacattataattctggacccctatttatctcaaaactcttaatatatgcagaccaacaggtctttgcattccttttaaataactggttgtgacaaagcttgttgttgatcagattcactgtttcatcatatttattgtaatatattttttgttttgtaaatatgttacaacaaaatgtgattggtctaaaatatttgtaatggatattaaaaggttccnaattnnnnnnnnnaaaaaaaaaaaaaaag

SEQ ID NO: 44161 - DNA, 731 bp, Homo Sapiens
  misc_feature (609)..(609): n is a, c, g, or t
  misc_feature (690)..(690): n is a, c, g, or t
agagtactcaatttaaaatgatcttactttaaaagtggcctagtttgcagtgcccagcaggacactgacagtcacagctgtgtgactttttgtgggttacttaatttttttgagcctccttttctcttctattcaatgaggataatagggcctacctcataggattattatgcattcccctctgttaatgcacgtaaagtttttacttggaaaactaactcaccatttaacaaccattctaagcaccatagaatatattttgtttcacaaatttggtattcattcagaataagtatttgaaaagtgagtaaattctatgcaattatagttattaaatgacttataaactgtgtttctcttccacttcttgctacatttaatcttctaggtgttcagatatctttggagattataggcagcaataaagctaaggcagctaacctttcaacattcttgtgtcaggctaatattttggtgaaaggaattcttgtgtttctcaaagaactagagctgaagcagaaataagttccaatgagcaagtgtccaattggaccattgaatgaaatctagtgttttaaacaattctgatgtttcaatgttttgttctgntttcttttgatcttgtgagcagtaagacatattttatgtgggtggtaaaggaagaaatcaagtaacagaatgaggaattgntcccaggaagagttagagttgggacaaatgggttggtaact

SEQ ID NO: 44162 - DNA, 661 bp, Homo Sapiens
  misc_feature (533)..(533): n is a, c, g, or t
cacgaggagtgattagaatttagtgcgttaagttccctgatgccttcacagccagaagaggctgtgaagggataaacacttctgagagtgggtggtagtagaactgagtattcaagactgaatgttaggcaggtagacagtgactggttaagctgagaaacttacaagtattttcgttgagttctgcttccactattatttactttacaatggatatgaagttcagatttcatcttatttactgaaggtggagaaaggatgtggaagtaggggttatgggctctcaaaagtagatttagagagattttttttatcactgttttatgatatagttcactgagcacttacatagattaacagttacaagtttacataaatcagttagaatatgactagcttcagggaaggaattttcaacaactgcaatctttgattgttttactgtgggaacttgcagtgatataattgacaacattatttaacaataataggtaaagtaggccgggtgtggtggctcacgcctgtaatcctancactttgggaggccgaggtgggtggatcacaaggtcaggagttcgagaccagcctggccaatatggtgaaacccgtctcttctaaaaaaatacaaaaattagccgggtatggtggcgcatgcctgtag

SEQ ID NO: 44163 - DNA, 558 bp, Homo Sapiens
tgagaattgaatgaaatgaaagcccttagtttctgacacatagtaatcttttatataaatgttagttactattctgataatgatgatgctgttggttatttcatcttgctttgtcattaggtttgattctgaatactatacaaactaattttgatttcaagatcttaagtaaaggtttatttatagtacattggaaagcatgtttgtagacatgtattttgtgtttggttcctcaacttgctttgtatatattttataatactaggttgatataaaagtaaatgcagtttcgccatttcagtggcaaaaaccgcgatttcttttgtgccaacctaatgcttaaagatataatctgtgtatattgtatttcagattcatagcaacctaataacaaggatttacaaaagggtttttacttccctacttttttttggctgaaggaaggtttttgtattgacttggtttaacttacaaatcagaactttgaaaccaagaaacattatccttatttctctgctatataatagtaaacctgtttttttccagtgttcttttttt

SEQ ID NO: 44164 - DNA, 500 bp, Homo Sapiens
gtagaactggttgagaacatggtaactgttggaaaaaccattcttgaaagaaataatttcactgacttcacgaatgtgaggatgggttttcatatgccaccattctgttccatttcccacttgcaccttcatgttctggcaccagtggatcagcttggcttcttatccaagttggtttatagagtcaattcctattggtttatcacagctgatcacttgattgaaaaactaagaacatgaaaatgtcaagagtggaagatttttctaatcttggttcagcatgaagtggtatttaggtcccttttaagtctaattgcaattttaagatttgttgggttttatgagaggctgttacttagtggccttaaatcttttctgaatgtctgtttcctaagatctgtgatacagttatgtgaatattttgttactgacttgtttcaatggttacttgtataaggattttatatatatgatactatagataaaatcctatttaagac

SEQ ID NO: 44165 - DNA, 572 bp, Homo Sapiens
atggacaattttcaaggtgctgatgtgatgtcacaacctccgctacatcctgagtaagtcagtgtccccaacagcagatgaggctgggtctttcctcatttctgcttctgggatgacatcagtgggagagttgaagatctgagaattctaaaggaaatgttctctgatgggaggagagagggaacttatttcccttcaaagtagtttgcttcttaagaccactcctccctccagaatgtctttaaccagacatcatttcagaaggtggggcagctgcttccttaggaagagtgggcctgatagctcaaccaactcctttagcatgtaaactcacagaaggcaagaacccctttttttagactttccaaatgcatcctgcaaagagagagatagctgatagggactgacaagcacactgtttagataagaagcaattagccttttatatctgtgctctatacattttctatgtgcagcatctttcctaacttgttgtggttcccgggtggcaggtgcacagctgggagggactgccggctgtttcgtacaacattcttgccaattcccttgag

SEQ ID NO: 44166 - DNA, 1068 bp, Homo Sapiens
  misc_feature (151)..(151): n is a, c, g, or t
gggtgctgccctcagggactgcaccctgacaagtgttaaggcaacattcctttcttgtgccctgggccaaaaccaatgctgatgaccttatcagcttcctgtttcttcccatacttgcatacaccactgcaaaatgtcttaatgcaaattntgtatttcttacaggcctacagaaattgaaaatgaccaaaatcaggaaccacagatttgtgcccattcctaatattttgttctgcaaattaatgtataatttgaggtgaaattcagttataaagtcaaggacgaatttgcacagtgatatatttctatgtgtatgcaagtacaagtatataatatgtcacctggcacattcattttctcagttgaagaagagaaaatttgaaaatgtccttatgcttttagagttgcaacttaagtatatttggtagggtgagtgtctccactcaaaatatgtcaattaaaaaaaaaatagggcctttcataaaaacaaatctagcaagatgaaatgcatggcgaatcctgtcggtctcagtggttatcttgatagtgtcaccatttcaccaagacagtgtggatggggaaaggggctcattggttgctacttcttgggtaaattttccattttattgtgaaaagggggggatctagggaatgagcctggggaaaaagcgggaccggttaaaaaaaaaagaggtggggccgcaaacaagagggggagacgaagaatttgagggcctgtgccagcccactcactcacaccgtcaccccccggtaagcacgacgcaacgagcgacagacacagagccgacagcagacagaaagcgcaaaagagacaagcgaagacggcaaacaacgcggaggagagacggcaccagcccgaaggcgagagcaagcgcaccagcgacagaagaaggaaagcaagaaaccacaaacagacgagccaacaaaacaaaaaagaagagacaacaacagaggaacgacacagacagaaccagcacagaagaaacacaacagagaaacaacgggaccaaaaaacgacaagaagaagcacaaaagaaagacagagca

SEQ ID NO: 44167 - DNA, 717 bp, Homo Sapiens
  misc_feature (635)..(635): n is a, c, g, or t
  misc_feature (641)..(641): n is a, c, g, or t
  misc_feature (695)..(695): n is a, c, g, or t
  misc_feature (703)..(703): n is a, c, g, or t
tatatcagtatttagaaataaattgcaaaggtgggaatatatacttaaataatttgtcttaagtaaattagcatttggtagtctgaaatggtgacagattacttgttaaaattgtgaaaactctgttgtgtcctctcttcctacatttgtccctgagagtactccacgattactaggttcttgattcccttatatggcaatcaggcagaggcgttccttaagcattagagagttctgaagcttaagatttgttttggttggatgaagtccttagtacagttgaaaaacagagcattaaagactaatcaattgttttgcctcaccagtcattttaaatagtagaatacttatttctcagtgcttaaaatttctttttcaactgtgagattgaataaacagtctctatttctgtggaaaaaacaacagaaaagagatattaaataccataaaatgtaactctgccttttaaagttttgctgaagaatgtgtctgtggttaggatagcacaagcattaacttttgttttatagttatgctttttaaaattcattgtttttaaatttagacttcttatttccacactggattatgagatacttaacaatttttccaccttatatttcttttacacattntgctgntctcttttttgttattgttatgccaccataccattttgttcttacatgcctcantacttaanaacgttcatttaaa

SEQ ID NO: 44168 - DNA, 926 bp, Homo Sapiens
aactataaggtacagaaaattaatactttatatagtgttttattaactttctcctacagcatttgtataaaacacaatgagggagtgaaatgttacccaattaggcttgtcaggttagtaataaactgaacagtaataaaactgtggaagtaatggatctgaatttatgaaagacccatttccaggactgaacctaggtcagagctctaaatggtccttctatttttcaacaaatttaaagtaatatttctttctaatataatattgcatccttgtgggaatgactataggtaaaatgtagtaagtaacgcagaaccagggttggctttatttaaaagctagtgacctaaatagaaagcgaacttcaagagaagttgtaagtacagtggcaaatgcttattacttacttcaaactgtttcccaaaataagtgcatttattttgacaataaaacttaaggctgttcatgagaaggccttgaaaagctactctagaggaaaaatgtctaaagaaaaaaaaaattcaaaaagtttacattaattattcagtgttgtgagtaaataaaaatgtgtgctctttactgtttttcattttttaaagaatattattatggaagccgatttatttaataggtaccttgagacttttttttaaggtttggatacattaggatggaggttaatcttaaatctgatttagcttgaatggtggtagcacggaggccggctcacagacgtgaacttgggggccccgcggggggccccctcttcaactcttctggttcaaccacacacagctttgaaccacgctaaaaagcccccctctggcggcgttcacaacgtagtcccccccttaggaaaacggagcagagggcaacaaccgcataactatgtcaccacacgtggctgacctcaacacaaagcctct

SEQ ID NO: 44169 - DNA, 635 bp, Homo Sapiens
caaagatgtactccactttttgaccaagcatcagcacctttggcttaccatccagtccttacttctgtgactgtaagggccccaccagtgtcagcagacttgtttgtgctttgggggaactctcttctcagctccctttgccagtcccaagcctggtggatctgcatctcacgcccactgcacaccgttcctctccatctgcccttccctcccaggcccccggtcgggggagcaggtgtggcaagtgttaggaactcccttctggtgacagctggtcttcctagagtgttgctggtaactatcgcctcttggtcttctgacatcattgccaggaacggggcactttttcgtcttgtagtttggccctcgggtttcctcactaggtattgtgtaactccctcaaaaaaaggtttatgaaatgctgaacctcaggtttcatagacgtctttgtacactaaaaattctgcagcagaatatttttaaacattcgcagttttttgtaagctatatttttgtatatttaattgctattttaaaattttaatgcattttgctaatcactcctcaaaaataaaacatgcatgtaattgactcaaacgtgtaaataaaagcaaattttgaaaaaaaaaaaaaaa

SEQ ID NO: 44170 - DNA, 710 bp, Homo Sapiens
  misc_feature (695)..(695): n is a, c, g, or t
  misc_feature (703)..(705): n is a, c, g, or t
ggacgcgtgggcagacctgagacgcacgatgcaggagctggagatcgagctgcagtcccagctcagcatgaaagctgggctggagaactcactggccgagacagagtgccgctatgccacgcagctgcagcagatccaggggctcattggtggcctggaggcccagctgagtgagctccgatgcgagatggaggctcagaaccaggagtacaagatgctgcttgacataaagacacggctggagcaggagatcgctacttaccgcagcctgctcgagggccaggatgccaagatggctggcattggcatcagggaagcctcttcaggaggtggtggtagcagcagcaatttccacatcaatgtagaagagtcagtggatggacaggtggtttcttcccacaagagagaaatctaagtgtctattgcaggagaaacgtcccttgccactccccactctcatcaggccaagtggaggactggccagagggcctgcacatgcaaactccagtccctgccttcagagagctgaaaagggtccctcggtcttttatttcagggctttgcatgcgctctattccccctctgcctctccccaccttctttggagcaaggagatgcagctgtattgtgtaacaagctcatttgtacagtgtctgttcatgtaataaagaattacttttccttttgcaaataanaaaaaaannnaaaag

SEQ ID NO: 44171 - DNA, 529 bp, Homo Sapiens
aagagggcaaggagaaggaagtaccctggggagggaagggacagaggaagctattcctggcttttccactccaacccaggccaccctttgtctctgccccagagttgagaaaaaaacttcctcccctggttttttagggagatggtatcccctggagtagagggcaagaggagagagcgcctccagtctagaaggcataagccaataggataatatattcagggtgcagggtgggtaggttgctctggggatgggtttatttaagggagattgcaaggaagctatttaacatggtgctgagctagccaggactgatggagcccctgggggtgtgggatggaggagggtctgcagccagttcattcccagggccccatcttgatgggccaagggctaaacatgcatgtgtcagtggctttggagcaggctaggctggggctcatcgagggtctcaggccgaggccactgtagtgccagtgcccccctgaggactagggcaggcagctgggggcacttggttccatggagc

SEQ ID NO: 44172 - DNA, 597 bp, Homo Sapiens
  misc_feature (417)..(417): n is a, c, g, or t
  misc_feature (565)..(586): n is a, c, g, or t
  misc_feature (588)..(590): n is a, c, g, or t
ggggaaactaaggctttactcatcagtcttaagtatggttgttttatgtggcaattgggagatactgatacttgttttcagatccatagcatggaaaataaaatgagctttatagtacatacaaaacaggctggtctcgtggtaaaactgttaatgaagctaaatggacagttaatgcccactgaaagaaattcatgaaagagaagtaactgttactcaagccaccacattttgtaatgcagagttttttctccgtgaaagatttcttaaaatattacttttggccgagcatggtggctcacccctgtaattccagcactttgggaggctggggcaggcggatcacctgaagtcagagttcaagaccagcctggccaacatggtgaaaccctgtctctacaaaaatacaaaaattanctgggtgtggtggcgggcgcctataatcctagctactagggaggccaaggtgggagatcgcttaaacccaggaggtggaggttgtagtgagccaagattgcaccacggcacgctagcctgggtgacacagcaagactccatcttaaannnnnnnnnnnnnnnnnnnnnnannnccctgtt

SEQ ID NO: 44173 - DNA, 832 bp, Homo Sapiens
tctagcgaggtgacagcgtagaaccagtgtgacttcatagtagggccagctcctcctaagttgtccttttgtttttcacataaaatacatctggtactttttacttggaaagttgtactatgtccatgaaaatggttaaatgagaaggccataaagattcatttaatagctgaaaagcaacttttaaaatagaataggacgaatttaacatggaatgatgtgaccttctagggaactttttatagagagcttacatagtgtaattggggagaattttgtcttctatttccattcaacagtagcaaactggtggttttataaaattaacattatagtatgttatataaataaacgttatataaaatgacattaaagtataactgtgaaaaattaaagacttggcgttatccacaacctttatgtgcaataaggaaaactgcagtaggcccccaaagtgccgtctttccctagcattttactcaatgtttgcctttgtgtatgtttagattgctattgtaaagctagccatgtgtgttcctgccctttactgatatttaacacattttctcaaagcttttctttttttaaaaaaacaaaactcaaaataaaacaactaactggctgagctaattttgttttgtattttaaagtaaagtatcatctgttggtagaaggctgtagtgtgatactattcttagtctggtttccctcactgagaaggttcttttctggggtgtaagctaattcctctccagcttttctttaaggcctggggtttgggaaaacctacaacctgggcttcttggaaacaaagtccaaggcccacttgtca

SEQ ID NO: 44174 - DNA, 669 bp, Homo Sapiens
gcagaatggactcacccaccaaggtcttctgtatgaagcagccaaggtgtttggccttcggagcaggaagctaaagctgtttctgaatgagacccaaacgcaggaaattacagaagacatccccgtgaagacttttgaatatgaagactgtgtatgtttctgtgttaccaacaacagcagacttctagcatgtacttatcaatgttgttcggtcagcccttccctaattacacctatcccctacacatacatgcacatagacacacacatgaacacactgaagatatttccttcaggtgtgtgtaaaatatgctgcttggattgaaattcaaatgggattgattagtcaagtaacttgagacctcacagtaatcttcacacttaaccttagacacctatgcagtcatgttgggagcaggttacaatgttacttcagcccacagtttatttctatacttgagttcttaagtacagaagatagaagtgatttaaatggcatagtatatatatcattttctggccttttaaaatttatttgagacctcttgatgaaatggacatattatatatttctgccacctggattttcctggataatttgatggaatattttaagtttcagtaaatcagaacaataaacaaacgtcagatatacacacacaacaaaca

SEQ ID NO: 44175 - DNA, 645 bp, Homo Sapiens
  misc_feature (46)..(46): n is a, c, g, or t
ccaaccacaaaagttagtggttcttattctgtctgcttcgtactangtatatggtaactgagaaagtcacttaacctctctgaaccttaacttcgtcatctataaagtgaatctaacattttccccccggcctacctcacagggttgttgtgaggatcaaatgaaataatgtacatgaaaagacatatataaaatgtataatacagacaaagggtcctgttacacagttggaagtcattccctcagattttgggcctaggaaggtaggtgatttaaactcactgaaagcatgtaccatgtccaggttggatacatggcaacaaggctatgttaaattttttttctctgagttgagtccctaaaatactatcatgggctaattctaagaaggagcacgaatatatattcccctaaaattatagcttagcattgtcaatgctttagagcagttatgggagttatagattataacatattagtgatttgtgaaacttttttactaaaatgtgaccctcatttttctttacatgaaagaacatagaatatttcacaatgcatcccacgtggtaagaataaaaaattgttttagttatatgtacaaatgtgtgtgtgtgaacgtgtgtgtacttggtcattaaataaaat

SEQ ID NO: 44176 - DNA, 582 bp, Homo Sapiens
attaattcataagcagaatggagatctgctgcaagcagccaaatgttatgagaaggaactgggccgcctgctaagggatgccccttcaggcataggcagtattttcctgtcagcatctgagcttgaggatggtagtgaggaaatgggccagggcgcagtcagctccagtcccagagagctcctctctaactcagagcaactgaactgagacagaggaggaaaacagagcatcagaagcctgcagtggtggttgtgacgggtaggaggataggaagacagggggccccaacctgggattgctgagcagggaagctttgcatgttgctctaaggtacatttttaaagagttgttttttggccgggcgcagtggctcatgcctgtaatcccagaactttgggaggccgaggtgggcggatcacgaggtctggagtttgagaccatcctggctaacacagtggaatcccgtctctactaaaaatacaaaaaattagccaggcgtggtggctggcacctgtagtcccagctacttgggaggctgaggcaggagaatggcgtgaacctggaaggaagaggttgcagag

SEQ ID NO: 44177 - DNA, 493 bp, Homo Sapiens
cacgcgtctctctaaatccagtgttcgagtggagacgcccctcctgctaccttgaatgggaagcctcagggatccagcagccaggctgttgccacagtggcatctcgaccacagtgtgaatgacctttgacttgcatgctcaacagggagtggaggagaggagacaaggctctggacagccggtccagccacatccagtgattcagcagggatgggaggaatgttttaaatgaagactttctctttccctgcctgtattacacttcgtatctcttctctctcctctgtcctcatcatgttccagctctctacagggccacatactcttctggcatatctctcctgtctcttccactgctctctatgttttaagcaaagagcatggaattggtagaagtcttgggatcttgccatgggacagagtccccaaggttcctgttgttgcctccttcctaagcctcatatgtatatatcagttcagtatttattgcta

SEQ ID NO: 44178 - DNA, 721 bp, Homo Sapiens
  misc_feature (15)..(15): n is a, c, g, or t
tttaagcctacaatnttgattttttttttgttatgtcacaatcagtatattttctttggggttacctctctgaatattatgtaaacaatccaaagaaatgattgtattaagatttgtgaataaatttttagaaatctgattggcatattgagatatttaaggttgaatgtttgtccttaggataggcctatgtgctagcccacaaagaatattgtctcattagcctgaatgtgccataagactgaccttttaaaatgttttgagggatctgtggatgcttcgttaatttgttcagccacaatttattgagaaaatattctgtgtcaagcactgtgggttttaatatttttaaatcaaacgctgattacagataatagtatttatataaataattgaaaaaaattttcttttgggaagagggagaaaatgaaataaatatcattaaagataactcaggagaatcttctttacaattttacgtttagaatgtttaaggttaagaaagaaatagtcaatatgcttgtataaaacactgttcactgttttttttaaaaaaaaacttgatttgttattaacattgatctgctgacaaaacctgggaatttgggttgtgtatgtgaatgtttcagtgcctcagacaaatgtgtatttaacttatgtaaaagataagtctggaaataaatgtctggttatttttgtactatttaaaaaaaaaaaaaaa

SEQ ID NO: 44179 - DNA, 871 bp, Homo Sapiens
  misc_feature (661)..(661): n is a, c, g, or t
  misc_feature (710)..(710): n is a, c, g, or t
gaatgggaaaagggggagcaggtgttttgtgtagatggaacaaagggcaaaggatagactgtaaggaaggccagataaagcttggagtagcatgagaacttgaggaatagtatgatatgggctgtgcagcaggcagagagaatcaccttagctgaaacatgggtgttaggagcagaccatgaggtggtagaaccatcatctatagtaaatcaggtactacgctataactattgataaggaaacagctgactgccactgaaagaataagcagttttaggggactagctcctatgggagataaaggtcagaaatcgtagtatctgatgaagatattttgatgagcaggtgagaagaaagataaacatggccagatggccaaggactgggataagtagccgtttcacattcaattagaattctgtggctggaataagatcagggagagcagtaggaagatatagtattctataattcatagcttgttgtgttagagattaattaggattctgctgttgaatcttagtacaaaaaaatctaatatttattaggaattaagggaagatggtacttctgttatgttgcctaagcagacaggaagctacaagaaacaccagtctgaagcagtgcctcaggatctcagatgatttaggaagtgtgctgntatgtcaaaaaaaaaaaaaagtattggctttagtatatctatgtatagnctcgtgggaaagcattggttgtggtatcaacagatattctggtccagatgtcttgtaagttaacctgcctcattttcctttctgtaaagcaaaataatgtttacacctaaatctgtctctcagggatacccatattataaaaaatatgtctattaagggcc

SEQ ID NO: 44180 - DNA, 581 bp, Homo Sapiens
  misc_feature (535)..(535): n is a, c, g, or t
  misc_feature (576)..(576): n is a, c, g, or t
tgtacagagaagaagtgcttgggggtttttgaagtctttaatattttaagccctatcactgacacatcagcatgttttctgctttaaattaaaattttatgacagtatcgaggcttgtgatgacgaatcctgctctaaaatacacaaggagctttcttgtttcttattaggcctcagaaagaagtcagttaacgtcacccaaaagcacaaaatggattttagtcaaatatttattggatgatacagtgttttttaggaaaagcatctgccacaaaaatgttcacttcgaaattctgagttcctggaatggcacgttgctgccagtgccccagacagttcttttctaccctgcgggcccgcacgttttatgaggttgatatcggtgctatgtgtttggtttataatttgatagatgtttgactttaaagatgattgttcttttgtttcattaagttgtaaaatgtcaagaaattctgctgttacgacaaagaaacattttatgctagattaaaatatcctttcatcaatgggattntctagtttcctgccttcagagtatctaatcctttaatgatnctggt

SEQ ID NO: 44181 - DNA, 602 bp, Homo Sapiens
  misc_feature (578)..(578): n is a, c, g, or t
tttgccctccctgcccagcagcctgataggactctcctagtccaacttggggtgggcaaggcagtcagcatcaccagcaacaccacaggaccctcaccccagcatagacacacaccccctgacccttaccatctgcttcctgaaagacttcagtgtcagctcccctacacacaccccacaccttcaccccttgcttcaagattcaaacagagactcccagtccccctcagcatcttccctgaatcacagccccagctccttgacccccatctaggtgccaaatgttcatctgcaaccgctatgcagtctggtgagagggagacagccatcacatagaaagtgaccgtacgggtttttaatcactgctgggtggggtgggggtagggggattgtcctggctttgtcgacaaagtcccacttccccgagtattaagggcccttggtatcaagtgaggtaaattcacccatcacagggtctcgccctaccatcctggaattatttcacttttaagataaatgcactatttcactgttcgcctcccattctaaggaggtgaggtggttggaataaaaacagntcctgtctgaaaaaaaaaaaaaaa

SEQ ID NO: 44182 - DNA, 442 bp, Homo Sapiens
  misc_feature (420)..(420): n is a, c, g, or t
tgggtgtgccgggcgctggaggagaggcggagccagcaggggcccccgtgaggctgccgcagggcactgaaagcccaggaccagtaaccaaggagaacaacccacccgtcgcccttctccgtatgctgcctgcgccagaagagctttgctgggccctggcttccctgccctcgccttcacctctgtcagcaggtggccttgcctggggagccccatgtgtggcccaccccaccaggccatccccataccttctggtttgaaggcgctgacactggcagagaggtaaagggtggggcattgagaatggaggctcccagggtccctgcccacttctgttttcctaatgtttttctctataaagggtcaggcccgtcagcatcactgatgggaataaaagtattaatgctttgtgacagccanaaaaaaaaaaaaaaaaacgcgg

SEQ ID NO: 44183 - DNA, 605 bp, Homo Sapiens
gggatctgggatgggagccagccccatgcctgtctgtgaccccacagtgggtgagagcccgtcacagtcctgggtgtggctgctctggaagaattaggaggcagccataataagagtcttcagagagatgatgggaggggccagtgaggacaggaacagagagtagatgtcctataataaaggggcttctgggaggtgcctgggcacagatgtctgttcagcaggtgtgtgggcctagaggagagagcagagcccagaaatgtcttttgcaggcccacgttctgacttgaagctttcgtgggcatgttgccattgggttttgcccttgcaaaggcttcctaggtctccagtggcccctcaggacccagggtcccagctgctgcttggggatgtgcactgctggccgccggccttgcagtctctctaccctggggaggaacagtggcttctcagagcctggggcatacagaagaaggcaggagttgatttttgtgttgggtttggggtttctttgtcctcaaggtactgttctgtttctctttacccctctgctttatttattgtaagcattcccacgttaaataaactttggctgttgtcaaaaa

SEQ ID NO: 44184 - DNA, 516 bp, Homo Sapiens
ttttttttttttttttctatttatatgtgtggcttaggaccctccgtgaacagatgatagagggcatctctcccaggtgacccttcttttctgtcccaggagggtgggtaattccctttgggatggggctcccacacctccctcaggtccccactcagaccagcaccagtgtctgcctctgagaatgttggcagctcacagagagcagggccggcccgggatggggggcaggtactccccaccttcctgcctcccctcctgctcctcatccctccctccccctttattaccgttttttgtacttgatgccttctctgtgagcagtggctctgtgggaaggagggagccgggagcctggtgggaagccttccccagagagatggctttaggggctttatttaaagactgtgatgatggagccacgcaaggctgcacctctgtgtgttgggagacgatgatgatgtccattgctgtgtgatggcttggaatttaatttattaaagtcaacctcgtgcc

SEQ ID NO: 44185 - DNA, 611 bp, Homo Sapiens
tgatgattgattgatgattgatagtaaattatttcaggctttgcaggctataaagtgctgcagctccttagctttgctgttgttatagtgtagctggagccatagacagttagttagttagttatgagtgagcacagctgggtgccagtacaattttaatgatcaagactcgtggcaggcagaacaaaccatcatttgttgatcctctgcttgaaagcacgaataagtgagaacagagcagtcatatggtttcagaaagtgttattctgggatttcaggataaattttgtaaaactactaacaaacaacacacaggaaactaatttggtataagaaacgacatatccctaaatagtgcttatttaacttcattataaatacatctacttaacaaaaaaatatattttgtgatcttgaggtcacttcgtttaggtcattatctcaacccaacctccccaaactctggtttgagccaatatgtgttctattgttctcagagcaccagccgactgtacaacaattgttataaaaatgtttattgtttaccaaaaccagtggacctcttatcaaatgctgcttggtaacaaaatctatcacagttttaataaaaa

SEQ ID NO: 44186 - DNA, 655 bp, Homo Sapiens
  misc_feature (625)..(625): n is a, c, g, or t
aaaacagcctgtaattattgaggttcatattcttctggtatatcattctgagaaattgtggctaatttagaacattgtttagaattgacaaaaggccctggcaattaaattgtcaaggcccaagggctaattttaattttctttttacttggagtcattcattaatttctcacatgggattatggagtatgaagtattatctttgaatgaaattcctgggctgatctgccttacataatcacataaggtcctttgcttttctttgtgttaagagggacttgcctctgtaaatgaaaatgacaatgtgcttttcttgtagttgactttcatgtcactcactataaaataggtctcttaacctggcaccagtataactataaagcactagctgagaaggaactgatacttacatttcatggacagcattaacaagaatgagataaatttgtactttttagatcaaaacaaattacctaattgcaaaagagaaactgaaatggaacatagtctcagattcttctaatgtgtatctcacaatgtcatgtaatgtaaaggaaacccttttggaattagaattcttgttctgatgctgaactatttggtaataaattgcttatttgcagantacagaaaaaaaaaaaaaaaaaaaacgcgg

SEQ ID NO: 44187 - DNA, 657 bp, Homo Sapiens
ttttaaaaaatacagtgtgatttcatgcttttgaacatctttttttttttcattgaaacaaattcaagttcttggcttaaaaaaaaattagtgatgtctttaaaaaatattctgttacactacagataccaaaacactgacaaagatttaggcactccaagagagtatgacttcgtgtttaattggggagcttgttttcaacattgcttatatttgaatagtagaaaacccgacattgatgtttcttcctgttgcaaggtggggctttaaactttcaaggtacaaaagtatgtcttttaaaatggaagtaacgtttgtttagctagtgaatgtgacaatatattttatgtatataatgagtctaatgtaattttgatcaacttggtaatgatgttattaaatagcaaaacaagtgcagtgtattaaagctaaacactacattgaaacgcaaacaaaattctggtgaaataactgggctgttgatgcaggtcaggtggaagctgagaaataaatgtatataaatatgtagctgaggatattaattcccattatataaccataattctgtgacttgtaataaaccaagctgtacaatttagtttataatagcagtatctgagctgctccaaaatatatatatcaacagtggtaaatact

SEQ ID NO: 44188 - DNA, 707 bp, Homo Sapiens
  misc_feature (622)..(622): n is a, c, g, or t
cacttgggctaatgatgtaagccccccttgaggttggggatggtgtggagatagctgcagacacccctgtaacagacatccaggaagaattagggagtgggggtaattatagttcctaggtctaggggtgagaggtgggagtagaaccagaagtgccctggaatccagccgtgtcagccctcaccccagggcccccaggaaagcatggcctgcttgaagccctctgctccctgcagaaactggggcgaggaggagctttttccttcagttagatctttcccttccctgctgcctcgctcccttagctttggagccctaaagttagtggacaagacactgggataaagctctatggctgctggaaggaggtctgagtctgtgtgtgtgcatatgcatgcatgtgtgtgtgtgtgtgtgtcctcatttgcagaagtcttgctaccagttagggtgttaagagcatctccactgggcggagacctggcatttgttttccactgttaagagaatgacacaccccctgtcatgtaagggaggagctattgagttagacattttccctatgggaatcctcggtttggtttgtgggaaaggagggaatggataagtgatttttatctcntatcgtcaacacagctgttcttccactgaatttgtgctattgcatacatgtagccatctttcttttcactgcagcagtgtttatc

SEQ ID NO: 44189 - DNA, 897 bp, Homo Sapiens
gcggcagatgcgatttgaaggaggatttcagggccgctgcaacaagctggtggatggctgctactccttctggcaggcggggctcctgcccctgctccaccgcgcactgcacgcccaaggtgaccctgcccttagcatgagccactggatgttccatcagcaggccctgcaggagtacatcctgatgtgctgccagtgccctgcgggggggcttctggataaacctggcaagtcgcgtgatttctaccacacctgctactgcctgagcggcctgtccatagcccagcacttcggcagcggagccatgttgcatgatgtggtcctgggtgtgcccgaaaacgctctgcagcccactcacccagtgtacaacattggaccagacaaggtgatccaggccactacatactttctacagaagccagtcccaggtttcgaggagcttaaggatgagacatcggcagagcctgcaaccgactagaggacctgggtcccggcagctctttgctcacccatctccccagtcagacaaggtttatacgtttcaatacatactgcattctgtgctacacaagccttagcctcagtggagctgtggttctcttggtactttcttgtcaaacaaaaccaatggctctgggtttggagaacacagtggctggttttaacaaattctttccacacctgtcaaaccaaaaatctatcagcccccgtggtggtgcgttggtgaaacagtggcatgcccaggaggacaggccagtcctccgtcaccaggctctccaggcaggacggatcaaacagagatgaatggcatctgagtataccgggatccaaagcccatggtgactaccacttgaagccaccatcggccccagactgggtgccctcgatggtgcacta

SEQ ID NO: 44190 - DNA, 749 bp, Homo Sapiens
cactggagaaagccgacgtggtgatggtgactcagcagagcagtgacggctggctggagggcgtgaggctctcagacggggagcgaggctggtttcctgtgcagcaggtggagttcatttccaacccagaggtccgtgcacagaacctgaaggaagctcatcgagtcaagactgccaaactacagctggtggaacagcaagcctaagtcttctctgagaggagtttcgtgagctgaagaacaagctgctcatggcaagggctggccccagaaccctgcaagagaggccttctgtggatggagaactaggccttctcaaagctcaaggacaaaatccagctaacccagtccctcggcccaggcctcctttcgtgctttgtgcttggtgggggggatttcgagggactttgcactggactctgggaacctttcatcattaaaaaaagggggaccattggggcctgagccaaggaactttccttctactgccttatagtgcttaaacattctccgcctccagggtgcagattcagagctggccagagtttcagtgatagccgtatgttaaacagaatctcacctcagtctcctggagggagatgtttaagaggggttaacacatcagatgggagggtcagcccggtgacctctaaggtatcttctaacctagaaattcaccataattatggtgcaaggtcagtgtgtctctgagatctatgtctgttggtggcaatgtgagggtgatactct

SEQ ID NO: 44191 - DNA, 785 bp, Homo Sapiens
gcgtccggattttctgaccacggggctgctcttaacactgagaagcgttttccatgtgaattttgtggacgggcgttttcacagggctctgagtgggaaagacatgtgctgagacacggcatggcattgaatgacaccaagcaggtgagcagagaagaaatccacccaaaagagatcatggagaacagtgttaaaatgccctccatagaggaaaaggaagatgacgaggccattgggatagacttttccctaaagaatgaaacagtagccatctgtgtagtaactgccgacaaatctctcctggagaatgcagaggccaaaaaagaatgagcgtttggtgaaattcttaatcaaaccttacttgaacagtgatgaaaaagtgggagggctggcttgggctgagaagggagggacagaaaagagaagacagaacaaagctgctttttaggactgaacaatctattttcaaagcactggtacctgtgtgagtgagtatgtaaattaaagttatttaaatggttggaatatgtggctccttttccatcactacatcttttcttccggatcttcatcatggaagtttcatttgttgcggaatatggaagcacctcccaatggtacggtgcaccctgtggtggtcttggacagtatgtggaaacagaagctccatgacggtagaagacttctcattggggagcaactttttgacgcacaacttttggtgcgtttttctagttttaataccttaagctttttcaagacctaactgcagccgctttgggaaa

SEQ ID NO: 44192 - DNA, 867 bp, Homo Sapiens
tccggaattcccgggatgccggattctgcaggagctgggcctgaaccaggaacagtttgtggatctgtgcatcctgctaggcagtgactactgtgagagtatccggggtattgggcccaagcgggctgtggacctcatccagaagcacaagagcatcgaggagatcgtgcggcgacttgaccccaacaagtaccctgtgccagaaaattggctccacaaggaggctcaccagctcttcttggaacctgaggtgctggacccagagtctgtggagctgaagtggagcgagccaaatgaagaagagctgatcaagttcatgtgtggtgaaaagcagttctctgaggagcgaatccgcagtggggtcaagaggctgagtaagagccgccaaggcagcacccagggccgcctggatgatttcttcaaggtgaccggctcactctcttcagctaagcgcaaggagccagaacccaagggatccactaagaagaaggcaaagactggggcagcagggaagtttaaaaggggaaaataaatgtgtttccccattatacctccttcaccccagaatatttgccgtcttgtacccttaagagctacagctagagaaaccttcacggggtggagagaggattctaaggcttttctagcgtgacccttttcagtagtgctagtcccttttttacttgatcttaatggcaagaaggccacagaggtacttttccttttttagctcaggaaaatatgtcaggctcaaaccacttctcaggcagtttaatggacactaagtccattgttacatgaaagtgatagatagcaacaagttttggagaagagagagggagataaaagggggatacaaaagatgta

SEQ ID NO: 44193 - DNA, 663 bp, Homo Sapiens
  misc_feature (612)..(612): n is a, c, g, or t
ccaagaacaggttttccattgtcataactgtatggaattttcttggaggatgtcattagcttctgtttgcactgacttgtgagctgtgtgtacgctgtggtcagatttctgaatgctgtagagcacttaccagctctgaccgtgtcttgctggggccagcaggctgcgtgtgcagcggggccagctgtctcagggctgatatgtagacgtgtattctgtttacaattagttccccaactctgtggggaagaacttaagcggttttagtgttttataatatggtgaggcaatgagggtcagggcgcgtggtccctgagggagggtcttcagggcaagacccatggccctggcctggaactgtgctccccagggcgtggtgcctccctaaggggatggtcagtgttcctgggactgactgccaggccagcccgtctgcagactcctgtggtgggagttccctgggacaggaagcccctcggccccttccctccaggggcaggaactgagccagcatgggcggggccggccgagcttccaggcgtgttttctctgttaaatgtacctctgtctttaagctgtctcattttctaatcgctggcatgtcttgcctanaaaagcatttggattgcttatgttcaattacagaaataaaatgtcttactt

SEQ ID NO: 44194 - DNA, 632 bp, Homo Sapiens
  misc_feature (590)..(590): n is a, c, g, or t
aattatattgcatcttgggtccataaaccctaatccataatcccatcaagagtcccgttgttatagtcttcactcatagacttaagatgatcccatcaccagagaggtttctctaccattagcttccctcttccggccattcttcacaaagtcatttttctaaattctgtgtcacatacgatgatggcatttctggaaattccttcaggtgctctcaagccctgctgcagagatccttttcagagcacacactgttccagcccatctgtctcaccctctcctgttgtatccagctccacgacaaacttctgccttccccaacacctttgtgcctttgcatatggtgttttcttgcccattttctgctcgactcgcccctgattttcaagttcaagacttaactcagggttcaggtcttccaggaggccttacttatgtcgtcagtctggggaactctccatgtgcttctatcactgtgcggttacctctttcacagcccttttaaagttctatcttccctttcccaccttttttgaccttccactagaccatgagcacctgggcggaaagccatatatcttattaagctntatatctgctacctggccgagggcctaattcatagtggagaa

SEQ ID NO: 44195 - DNA, 606 bp, Homo Sapiens
cgccgtcgaccccgcgtccgcggacgcgtgggtccaataatatttttttctttggtatttctacactttaaggccatttggtgcaatttagaaagtgttggcctcccttccgctagccacattcaaaattaacttccaaaacctcaggaacagtacaaagaattgaaaccctcaatatggcagcacagccggctgtagtgtatatttagggtacaccaaatcaggtattcctggtggtcttgtgcactttaatttctgttacaatgagttaagaggatgaggaagaaatctacttattaacacttactgcagaaatgtctgcattattccgtttgttttcttattattttacctctccaaacatcttcctgtgcagatcactacttcatagttgccaaattttaaaacacttaactgctgaaattcagtgtcagcaaagtgatattacgttgttctgtttctaattaaccttagcaaatgtacataatgtcaaaacccaatagtatttgacagtacttatgtatacaatgtttgataagcatttttaataagatttgtatttttaaatttagtatataataaaaagatgtgtttcagtgtgaaaaa

SEQ ID NO: 44196 - DNA, 867 bp, Homo Sapiens
  misc_feature (323)..(323): n is a, c, g, or t
aaagttgcctatcaattgttcgggaaaaactctacaagggcatatcttgggtagaagtagaagctaaagtgcaaaccagaaattggatgcagtgtaaaagtaagtggacagaaattctaaccaagaggatgactaatggtcgggtatatactatggcatgaatgccctgcgggccaaggtcagcttattgaaaggttgtatgaaataaatgtggaagatactaatgaaatagactggaagatcttgctagtgcataggtgatgttcctccatcttacgttcaaactaaattttctaggctgaaagctgtctatgttccatttntggcagaaaaagacttttccagagatcatcgactacctttatgagacgactctaccttgtgctgaaaggaaaagttagaaaaaatgatggagaaaaaaggcactaaaatccagactcctgcagcacccaagcaagttttcccatttcgagacatcttttatgtgaagacggaaaaggcaatggcgaagatggaacagagaaaggagacgatgaacaagaccgacgaagacagaacagacaccggagactggacagagactggagatggaaacgagcacgggagatcacacccgcggggacggacgtaaagtccagagatgcaacccagcggagaagatggacagacatgacgtggaatgcggcaaagcggaaccagagcgacatctagagcggggaacggaccaaggaatcggggtcccaagacgttgggaaaaaggggcccagttgttaaaggccggtccactggagcggcccgggagaaaaaacatcttccactatacctttcaggttaaaccctgtgccttcaacaccacgggcggcgaat

SEQ ID NO: 44197 - DNA, 634 bp, Homo Sapiens
aagcagcttccgtctttgggttcttgctgcctcggcctctgctctgttcagtttgctgttgtgtttttctcccccatgttggggtggtggggtacagggaaataaaatgctttctcccaggcccctaatccttccccatgcctccatcagcctcaaagctgctgacagtcatgaactgcaccttccagccctgcccataagctactcaaagcaaattcaaattctcttctggccaggaggaagggcagatgctccctccttcctcaagcctccctggctcattgatccattttgagggcatttgggggtcaaagttgagaccagattgcttcagtttgtataaaattagcatttcttatcacaccaaggccacacctgttctctggcctcacaaaccagtaaggatgtaaaggtttgttgaggtggaggaacagaagtgaaatgagcaatctgctccatttagaagtcagtcgcttcggctgttcattccactaatatttatctagtacctattctgtgccaagcattgtctctacctcagtttgccacaaatatgaaaaaaaaaaaaattcttggaactgtgaggcttcaatgtgttgtggaccaatatacaaataaaccaatggaaaagaaa

SEQ ID NO: 44198 - DNA, 833 bp, Homo Sapiens
ggggaactccgagcactgggaccataccaaaggagataccagcatggggccagctacacacgcagccagaggtggagcctcaggtggacagccctgctcctccaaggccctccctccaaccacaccctcggctacttgatcacagggactctgtggagcaggtagctgtgctggcgtctttgggaatcctttctttcctgggactggtggctggggccctggcactggggctctggctgaggctgagacggggtgggaaggatggatccccaaagcctgggttcttggcctcagtgattccagtggacaggcgtccaggagctccaaacctgtagaggacccaggagggcttcggcagattccacctataattctgtcttgctggtgtggatagaaaccaggcaggacagtagatccctatggttggatctcagctggaagttctgtttggagcccatttctgtgagaccctgtatttcaaatttgcagctgaaaggtgcttgtacctctgatttcaccccagagttggagttctgctcaaggaacgtgtgtaatgtgtacatctgtgtccatgtgtgaccatgtgtctgtgaggcagggaacatgtattctctgcatgcatgtatgtaggtgcctggggagtgtgtgtgggtccttggctctgtggctttcccttgcaggggttgtgcaggtgtgaataagagaataaggaagtcttgggacaaaaaaaaaaaaattaaaaaaaaagggggggggggtataaaaaacctggagggggccaagttaaagggtaccaagttttgggaaaagggccccaagggggggataaaagg

SEQ ID NO: 44199 - DNA, 664 bp, Homo Sapiens
ttttttttttttttttttaatctcacctgagttagcctagaatgcgctggttgcaaagtggtgtcagctgtggggatcttgggccctcgttcctcacctgcatcctgccctgcactcaggtgctccccctgaagtcagggtcacatcaggtagacctgttactatatgcacctttggcctggaatgctctgaagttggactggaaatgttactaggttggcctgttacaaaaaggaccccatcctgcttaaacacattgatctcccttgccctgcatttgagtctttctagcccacggtctgaaacttgaggcagctttccagatttggaatgtaaaaggctcagtgggcactctgttcatccctgggtggggagggcccagccaacagaagtgcatgtccactgtgcgggccagtgtgtgtttacacaaatttcatctcagctttgaaaatgctgctattagtttccactgttggtgaactggattttttcctcctattgaaatgatactttcatacttataaagctgtcgtcaatatttatttcaaggtgctagatttaattttgttattaaattgaaatgcttatcttgtgttcaagcacagcactgattttaacaacctgcatttaatgtgaagtaaccgaagtaggatactgtaactgt

SEQ ID NO: 44200 - DNA, 636 bp, Homo Sapiens
attatctaaaatttgacatggtagaccttgcaatttagaatcaagcaggtgagacagggagaagtatgcctgcttaattatttaaactgtgtacttttgttttgacactgaatattttaaaaagcaaataataaaataactaagcatttgaggaaaattttaaggataaattgaggaaactgattaatagagatagcaagggataattaaataaatattccctatgtagcaacagtggttagatgatctttgtctgaatgtaattaaactttgaatagttttagtgtgtccttaaagccaagtatatgctttaacatcaaatggaagtcaaattcctaatgcatagatagagagagctaaactgtgtaatttaatggtatcttctttgctggatgtggcagaatccacaccagcttatcaaccaacacagctaattttagaatagatcctttatctttccatatggcacacgtaagaaagtgtttttctactattaatattaaattaaaacctttacttttgtataataaattaaaactcagaataaacctgtgaccacgtaaaaaaaaaaaaaaaaaactcgagggggggcccggtacccaattcgccctatagtgagtcgtattacaattcact

SEQ ID NO: 44201 - DNA, 741 bp, Homo Sapiens
tgtccctggcagggcccagtgctgggccgggcagctctgaagggggctgctcccgccgcagctcggtgactgttgaggagcgggcccgggagcgcgttccctatggcgtgtcggtggtggagcgcaatgcccgcgtgatcaagtggttgtatgggctaaggcaggctcgggagagcccagcagctgaaggctaggcgccactgggcctggaattcgccacaggacggatcttacagaggcaagtggtccctggacctctcttgcatccattctctagacggccgtgtcagaggctccaccctgttgtgaacttggtatggaggcaaaggcttagaggctggaccagcattcttgggcaaggactgactctccaagggttttgttcttggctttggacacctgagaaccccctcctcccctcccccaatacaaggtttttgacatgagtgtactcctgcttagttcctcttgtggggctgcatttgcggtgctttgccctccccactgtgagtgaggggccaagggatctcctcaatcctgtctccccagcggctctgtttcctccttctttccttggcctctgtcctttgctgacttcctcttccttacccagcagaactcaccctggggtcggggcagtggggaggggcctatccactgctcttcctagtccttggcagctggcctaggtgggcagactataggagggactggttaggagtctgcattgctttgacttcc

SEQ ID NO: 44202 - DNA, 725 bp, Homo Sapiens
  misc_feature (679)..(679): n is a, c, g, or t
aaggcacggctgcttcttacctgccttgctcttaactgacacacatcactcctgctcacgtcctcttggccactggtagtcatgtggccccacctggatgcagaggaggccaggatgtgcagtctccacatagtggcttcccagcaacaacttttgacttagatgggggccatggttgggtgggtgaggccagaagaaactgcctccggcaagaggtagcagccgctcaggtggctctgctggcatcggagcccacagaagtgaggagtggccgatggacctgccctccaaatgtgcctgactctgggtcttgctgtcactggatttcctggcatggcagacagaaagaaagatagtttgaccaagtcgtagaagctgatccagcgggtaaaaagggggcagggaactcgtcccttttattcttgcctcagagctgcctgaagacatgggccaggccggaggctggacaactttggataacgctgacctgtacttccaagtaaatgcctcctgaagagcccgggacccttcctgggagaattctgcagccagaatgaaggtgccatcagcaggaggcactgtgaagcaccatcctgtcgctgtccttgtccattcctagcaagttaatcgtgtcttgttaaccagcagttcctgttcaacgtgtaaagagacctgatgntttccctaataaagctgataacagattttgcaaaaaaaaaaaaaaa

SEQ ID NO: 44203 - DNA, 706 bp, Homo Sapiens
aggcaccttacaacttcagaattcgaggaagatgatgtgaatcttccaattttatctatttgattcaaatggtatgttttttcacatttctcataatttccacgtcaactcccatgatgatcatgcaggaaagcagcatgattgcacttcttgtagtgcataccatcactaaaacatagttactgtctttctgtggtcttaagaaaaattcagaaacagcataccaatgtacatataagataaataagcttatgtggtacagtaagtgttctgttctgagaaataccttgattcgtatcctaatgtctgatgttattggtagttctcaaacttccccaattctgctttcatctaaattcatcttatctatctattgttaaataatctatcagtccatttttatctatcatctatatatctgtctttatcaatcattcgtctgtaatctatctgtgccgtttggcataagagacagaagggcatagcagtggaaactcaaaggagttacctccatgtgaatggacagtggtgatggtgatctgtgaggtggtgatgttatagaaagaaaaactagaagagagcatgccctaactcagggaccttgtccagcaggcactctggcttgttatactgtgctttgaatatgacccaaatttcaatagtgctgacatttttgcctcctgggccgaaaaaccttcctcctttt

SEQ ID NO: 44204 - DNA, 691 bp, Homo Sapiens
  misc_feature (8)..(8): n is a, c, g, or t
  misc_feature (15)..(15): n is a, c, g, or t
  misc_feature (18)..(18): n is a, c, g, or t
aacaaggnactgagnagnagaaagaaggtcagaaaaacacagagatcaaaattcaagtaggttcaaattggagagatcctataacaaagtacacatcagacaaagatgttccttctgaacaaaataactacagtagagttgcgaatgacagagaccaagaaatgcatatagatttggaaaataagcatggtgatcccaaaaagaagagaggagagagaagaaattctttttctgaaaatgagaagcatacacaccgaattaaagacagtgaaaatttcagaagaaaagatagatcaaagtcaaaggaaatgaatagaaagcactcaggctcaagaagtgatgaagatagatatcaaaatggtgccgagagacgatgggaaaaatctagcagatactctgaacaatccagagaatcaaagaaaaatcaggaccggcgaagagaaaagtctccagcaaaacaaaaataattctacaaaatgacataaactggacatgccttatattcagttgaaacaaattattttttactttgacgaactttatagagaattcttatataaagtattggtttgtatttgtaaatttaaaaaatgttttcattttaacatgttttataattgatacatctcaaggccctacccataaaattatttgaaaactttcaccagaaagggatgtaagtctcgcttat

SEQ ID NO: 44205 - DNA, 686 bp, Homo Sapiens
agggccatcttggggaccctgtgtaccatgtactgtatttaaaaaaaaaaaaagttacctattgtcacacttgctgtgttaattaacaaaagatgttgtgtgcggtctcctgtatcggtgtggatccaacagctctccagggagtcacattgcatgggggttgagttgacggttcttgtgatatgtaaacccccgagaccaaacttgagggtttatttagggttttctgtttgtcctttgggtttttgtttcactttgttttggtgccgtttctccatttacagccaaatcagtttcatgatgttcaaaacatttactgatgtcaaatggaggaaaggaacagaaaaaaagatttttacaaagtaataaaatttaaaactgagctgtttaatgttgctgtttttacctgtctgttcttgtccaaaagtggaacattcccagggagaagaggaaggttccactcggttcttaagtcgccaaaagccccagcccgggattcagtacctcccctgccccccgaattcttgcagcactatttcccagttggttgatgccaaggcaaaaagataacttttaacagttagagaggatcagttgcttaaatgatttcatgtcagtgttgtatttatggttttacaataaaacaacctttaagaaaaaaaaaaaaaaaaaaaaaaaaaacgcgg

SEQ ID NO: 44206 - DNA, 518 bp, Homo Sapiens
ggaaggaggggctcctgccataacccaggtgccagccggtctccgcctaggaccttccctcccgcccagccagggtgggcggcatcctacgcggtgaaacgagctcatggactgacccggggctgggcctcgccagccaggagagagcgagggccgcacggcagggctggcccaggcagcttgtccagggccattcagatcccaagcatcaggaaatcattttgtacaaccacccgaagcagagatattttttaagaagcgtaaattattttcagttgttttctgatcctgcctttttcttttccccacaacttcacgccagtgattcgttcacatcaggtaaatcttgagaaagccttggtgccctcctccccaccccccactcagtaaccacgtgcgtgcacccccgcatcctttctcagtagttaagacgttctaggcaataccatagacacatctgactgtgtctctctctttgagtgcaagaaactcaagtcatcttaaaaaaaaaaaaaaag

SEQ ID NO: 44207 - DNA, 783 bp, Homo Sapiens
atgcaaaactacactagtactcttttatgagaaaatagttactattttgataaagggcaaggagtaatcaaatagttcattttcagagaaaaatattttaaattgctaatgtacatgattgttttggttataatttatttatagaatgtatcttttctatattacattcttaatattcgccagatattatattgaccattctctttagcttcttaatgtggcatatttctactctcctttcccacaaacagcttcatctgtctccaaggttaacattctgaagctggagagtccttggagaaactctgctcagcttttttgtgacatttagaaaaatgcatttggtattctccaaaccagaatgatacattgtctcaaaatctgttagacagctgatgggtgtttttgagcaacgtcttaataattcagttgtttctgttttaattataccattaaaaatcagctttagctttttaattctagaatttaagcatcagtctgttcttataaaagttaggtttgaagtttataagaatataaaatcttaactcacatttgtcgtttaatatttctgtcaaggaaaaaagcccccaaaaattgctatcactctataatcctaagtatttttcttttcaattttgtaagtaaaattatatgactatgttcatacttctctaatttttatataatatttgcgttaattttactagtacggtacatgcctttagtcattaaaataaaatgcaatgtgtctattcaaaaccaaaaacaaaaacaaaaagg

SEQ ID NO: 44208 - DNA, 888 bp, Homo Sapiens
  misc_feature (423)..(423): n is a, c, g, or t
ggagctggaagaccctggagaggcccgggcatgctgtgagaaggccctgcagctgcttggggacaagagcctccaccctttgctggcaccctttctggaggcccatgtccggctctcctggcgcctgggcctggacaaacgtcaatcagaggctcggctccaagccctgcaggaggcaggccttacccccacaccaccccccagtctcaaagaattgctcatcaaggaggtgctggactaacccttgcctagatttaaggccactgtgaggagaggggttgccccagaaggcaggggaaggacctgatgagaacagaatagctgggaggctgcagagggtgctgggagcccctagaagttccaaaagagaatgtgaagcagatcaaggaaacttctgttgagctaggctcagggtgagctttnggctggggttgcccttgtgtagtacagggaagtctgacacagcctctccagcctataaacagccggggggctgtggcacaggttggggcaatgttcccttgttggtgggcccccaagctggcaaggcctcttggctgaaggccagggactctgcccctggagtcctggagttaagggatgaaggcaaggctgcaggtctggcccaggggaattaaaagccagccactccagtggtatcagtctctttattggatgtgagggccaaaagggactgtaactcctgtctcaggaatggggataaattgggagggtccttgaaggccccaggcgaaactgggaccctcgggctacaggcttgctctctgaaaacctggggcttccctccggatcacgccccccctggggacaaggtcaaaggttaggaccccgatgcgcggaggccccagtccgggccatgggacccca

SEQ ID NO: 44209 - DNA, 1110 bp, Homo Sapiens
  misc_feature (13)..(13): n is a, c, g, or t
  misc_feature (25)..(25): n is a, c, g, or t
  misc_feature (1090)..(1090): n is a, c, g, or t
tcttcagaaacgncgacccacgcgnccgggtattacaggggtgagccgctgtgcctggctggccctgtgatatttctgtgaaataaattgggccagggtgggagcagggaaagaaaaggaaaatagtagcaagagctgcaaagcaggcaggaagggaggaggagagccaggtgagcagtggagagaaggggggccctgcacaaggaaacagggaagagccatcgaagtttcagtcggtgagccttgggcacctcacccatgtcacatcctgtctcctgcaattggaattccaccttgtccagccctccccagttaaagtggggaagacagactttaggatcacgtgtgtgactaatacagaaaggaaacatggcgtcggggagagggataaaacctgaatgccatattttaagttaaaaaaaaaaaaagcaaacacaaagatgcttcaagatcttcaggagaagtatggtatacaagtttcagggaccctatttgacaattttcagagtgctctctatgctgattccgagtcgagtgtgtcagctgtgattacagtgcctgtggatctaggccgggttgggggggtgtgggcgtgggaagggaaatctggcccggctccattgctcctgccggtaacccctgccctttgcgatgcctaaacaggcgtatcgcttgaggccagtaatttcccacccgcctgggccccatgggaaatctgttccctccataacccccccataaaaacccccctggccgcacttggtcccgccccccgttgtcttttcttacccgcgtgaggttcccctgccccccatttgccccgcatccctttgtatttccccatctccttccccccccccccccttttttgcccccccgtttccccccccccccttccccctcttttcccccccttttcctccccccccccccgtttttttcttcttctttcccttttctttcccccccccccccccccctttttctccttttttcccccccccccccccatatttgcttccccctttttgttggccccccccacccccctcgtcccccccccccccactttttttttcccccccccctntcccccccccctttttattc

SEQ ID NO: 44210 - DNA, 946 bp, Homo Sapiens
cggacgcgtgggctgaaatcaactcatttccaattagagtataggcagaacacctagatatgacttttagttcttgaatatccattacttactttaatgaaaacagaactgccattggtcaataaactgtaaagggaagaggtaaatgtgatagagaattttctatgtcatgggaaattgaaatcacatttattttgattaccagcaatatgatttattaactctgtgccaagttttaagtatattttttcacaaagatagagtgccatagtgaaactaaacactgtgcataaaggtacatgaattattccagttttaaagtattatgcatgtttgtttaataaatgtggcatggttttaatacaaatgctatgttatttaaaagttagaggaacatttctattgacaaaaatatgcttcatttacatataatgttaccatatggtgttaatgattaaattagatctttacatagttcttacaaagcatcagtctaggaaatatgacttattactgatgcaaacgtgaacatttgtagtagtttgtaaaagaacatccttttcaaacatctgtgttaatgtacccttggaaattaaatgcaagcacatagtcagtttgtctaattttgtgtgaaattttgtcgaaaatacctaaacatttcatctatatctgtgcctaccatgttataatgtcctagtacctttcatgtggtctataaaaactgtcttttttactcactgtgaattacaataaaattttgattatttcgatccagaaaaaaaaaaaaaaagaagaaaaaaaaagagaaaaaaaaaagaaaaaaaaagaaaaaaaaataaaaagaggggggtaataaggagaaagagatatgagagaaagaaaagggggaaagagaaaagttagagtgggaacaaaaaatttggtgtgaagaacataggaagagaga

SEQ ID NO: 44211 - DNA, 592 bp, Homo Sapiens
  misc_feature (568)..(568): n is a, c, g, or t
cccgcctgctggacacagttcctctggattatgagtttctggccactgagggcaaaagtgtctgttaaaaatgccccattaggccaggatctgctgacataattgcctagtcagtccttgccttctgcatggccttcttccctgctacctctcttcctggatagcccaaagtgtccgcctaccaacactggagccgctgggagtcactggctttgccctggaatttgccagatgcatctcaagtaagccagctgctggatttggctctgggcccttctagtatctctgccgggggcttctggtactcctctctaaataccagagggaagatgcccatagcactaggacttggtcatcatgcctacagacactattcaactttggcatcttgccaccagaagacccgagggaggctcagctctgccagctcagaggaccagctatatccaggatcatttctctttcttcagggccagacagcttttaattgaaattgttatttcacaggccagggttcagttctgctcctccactataagtctaatgttctgactctctcctggtgctncaataatatctaatcataacagca

SEQ ID NO: 44212 - DNA, 723 bp, Homo Sapiens
tggtaccggtcgggagttgttagggatgggaacagcagtctggaggctgaccacgttattagtgccattccagcttcagtgcctcagtgagctgctccctgctgaggctgcccctctggctcgtgccctgagtgccatcactgcagtgtctgtagctgtggtgaatctgcagtaccaaggagcccatctgcctgtccagggatttggacatttggtgccatcttcagaagatccaggagtcctgggaatcgtgtatgactcagttgctttccctgagcaggacgggagcccccctggcctcagagtgactgtgatgctgggaggttcctggttacagacactggaggctagtggctgtgtcttatctcaggagctgtttcaacagcgggcccaggaagcagctgctacacaattaggactgaaggagatgccgagccactgcttggtccatctacacaagaactgcattccccagtatacactaggtcactggcaaaaactagagtcagctaggcaattcctgactgctcacaggttgcccctgactctggctggagcctcctatgagggagttgctgttaatgactgtatagagagtgggcgccaggcagcagtcagtgtcctgggcacagaacctaacagctgatccccaactctcattcatgaaaataaaaattgctggagcttgaaaacacactacataagacaacaaaaaaaaagggg

SEQ ID NO: 44213 - DNA, 835 bp, Homo Sapiens
ttttttttttttttttttttttaggtcacttattagtgaaacctcattttagatctgacattggtagatagatggatttaggcaaatatgatgcgtttgtggggaatccacgtggttgacgttagaacctcccttctgcagactgttgcctgtcatctaagcgaattggaaatgctgagcttccataagtcagctgagttttaaaggtaaacgttatggctgaagtagtaaagcacctgaccacaaaacctcttgtaaaaacagccctgagtaggtatttccagggctccacaaagttgcttatgggaatcctgagctgcttttcaccatctcaagaagcctaagaagttatatatttaatcaggtagacaaaacagttcaaagcataaggtccatggtggtggaaaatggatgcaagtgattctaagtttgtggatttgtggatagcagagggatcgggacctcttggaggaaccctgggtaccaagctcccaggcccttcctctatcatggatgctgggtgactttgggaagtcaccacctcttcccaagcctgtttcccatatcacagatgtggggccatggcctcgatgatggtctccacaggtctttccacctctgtgagtccaagtcaggtcaatcagcaaggacccatctctgccctgggtcagctcctcagaaccaacccccagcatctctaaagcaaaagcctcacctcaagggctgctcagaagagagcaccttcagcatgagttgttgctggaagatctaataagctgtgtttcctgggaagtggtgctttacttagccctgtggacaacttctctatgcatct

SEQ ID NO: 44214 - DNA, 766 bp, Homo Sapiens
  misc_feature (740)..(746): n is a, c, g, or t
  misc_feature (748)..(753): n is a, c, g, or t
  misc_feature (755)..(757): n is a, c, g, or t
  misc_feature (759)..(759): n is a, c, g, or t
  misc_feature (761)..(762): n is a, c, g, or t
ttctgatcatatggaagtttggaaaagagagcttatcacaggtttgtatgctggtgaatggatagttttaattctcactgtctcaaaagagaatcagctctccagcagttctagaaaagctttgacaatccccaaggggcagtgttaccttactccttcactgcttcttagaaggtagaattaagtttctggaattgcacctacatgttttcttattaacattcagaattgggaatattaatttttccagtgagtagttttctgaaattggtaacttggagagtaaaataacgtattttgcttttcaattttgtgtttgtttacttttatgtaaaaatttgatatgtgaattacacagttctaataaaacctcatgccttttcattacatctaatttgaactctcaacttcatgttacagaatgctttaaagatgctttaatgaaaagtattaagaaaatatatagatttgtatgtcagtttatacttcagaaatccatatatttgtcatatttatttttttagaaacctcctaattggataactagatggtatttaaaatgaatgcccaaaaatatcttgtacctttgtccaaaagtttatctgttggaagccgccagccattcatgtagagagtttataagaaaataatttaaaattgtatgcattttatattactatggtatctgtgtaccatatttctaagtattcattattaaattggtacttcttaaaccctannnnnnnannnnnnannnanannaaag

SEQ ID NO: 44215 - DNA, 403 bp, Homo Sapiens
  misc_feature (171)..(171): n is a, c, g, or t
  misc_feature (181)..(181): n is a, c, g, or t
  misc_feature (213)..(213): n is a, c, g, or t
  misc_feature (314)..(314): n is a, c, g, or t
  misc_feature (352)..(352): n is a, c, g, or t
atgtgtgctgtctaatgatgggatgaccacacttttccatgttctaaaagtgctcctctcctgcagggtcccagggctggtggttgctttgggtctacagctacgtcttacccgcctcctgcctcaacagcctgtgtggtggcaaagccggtgtggggctggggaacgcancgttctccangagggggacctggctctccttctgcaatgcangcgaaggcctagatgccagtgtgacctcccacaaggcgtggcttccagactccccggccggaagtgatgcttttttgccacgggccctgagtttgaagcancctgactttctcttggtaagtggctggtgtcttaacanctgcaatctaaactcagccacctacacaccaccatggccgacactttcatt

SEQ ID NO: 44216 - DNA, 586 bp, Homo Sapiens
ccacaattgagcagtactttgataaagcacaaaatacaaattccctctggcacagtggggatgtgtggaaaaaaaatgaagtcaaagacctcctgcgtcgtctaactggtcaggctgaaggcaagctaatctctgtagaatatggaacagaggaaaaaatataccagtaatatctgtttattcaggtccactcagaagtggtaggaacatagaaagagtgtctttctacctaggattttccattgaaggccctctggcatatgatatagaagtaatttaagacaatacatcacctgtagttcaaatacgtttatttatatctttatgattttattctctctctctattctcatggcactttcataacattatggctaacctctaattacagattttgcttttgcctccctgaatgaattacaagcctttttaagatatgaaatatgcctacccgcagagctcggcacaaagtggagtcaatcttttaatgttctaaatatgcattttcagactcaaataattaagaagtttcattgatatccactgttcacataataactgtctatagggcttgtgacagcgtttt

SEQ ID NO: 44217 - DNA, 696 bp, Homo Sapiens
acaactcagacttggaattttatacgaatttcatttctatatgtgcctggtattgcctctggcataacttagaggaaattgttctacctatatgtcctcagtttcttcatctacaagttgggaaaaacattttcctcttaaaattgtgaagaggatttatatatttatatgatatattgtatatattaatatatttaaattgcttagagtttctagcacatagcaaataataaatattagttattagtataaacataaggcttaaagtcttggatttgatgcatatgacttaatttgtatttgtgctagtagctgtaatgtcagtgacaggataacaagcaaatgattagaaatctaatagtaatgcttgttcctttgctatctatgctaacaagtacatagatagcctaagataaattatacttaggatgaagctaaaatgcataactgagacaccttaaaattgtactaccttgtgctgttcactgccatcagggaggtagcataaaatgaaagataaagtctgaagactggatccaggcaaattcatgttctttctttgtaactcactttcttcgtcaacatttctgtgactcaatggatagcatatttccatcaagtagcacgtataacgtgatgctttcatgtttctgccttaaataaaataaccctcaaaaaaccaaaaaaaaaaaaaaa

SEQ ID NO: 44218 - DNA, 642 bp, Homo Sapiens
  misc_feature (21)..(21): n is a, c, g, or t
cgctatggtctatctatgatnccgtgctttgtgaaactgtgcatccccttgtagcctttctcagtgtccgtggcatttttgtgacttcccagcactagaataagttttcctgccaaaatgagtgaggcgcttggtgccctctggactttcccacttcccaacatgggagaattgtgaactttccatcagactgcctccctggccctccccattcttctcctgttggttattctgagtctgacacagacccatgacatgtcttataaagcctccaatggctttatcctacctagatcccttccagcccattttaattagactatgtcattgtgaggccaccagtccattcatttgaattctgtgaatctccaccttgcctatctttgggtagaagctggacagtactgttgccctcttccaatcctcttcccctacatccctggcactggttgttttctgtgaaaacagcagtgaacaggttcagttttgaactggccctgaggaaatgggtcaggagttgtattggcaagagggaggggtgagagctgttggagaactgagaatgaggttttttttttttttttctttttaactttttttatattagtaataaatgcagtggaaaccaaaaaaaaaaaaaaa

SEQ ID NO: 44219 - DNA, 613 bp, Homo Sapiens
gattgtttctttctcgcctgtcgtttagcctgtgccacacttcgggagcaaagctgtgtaggcttggactgttctgggatttccttgtttaccaaggagtattgtcagtgttttgtgtttgggatataagtaagtgtatttgccaacaacaaaaaaaaaccaacaaaaatgctggatggatgttaaaggataaaaagtgatggggtatggggtaggtatgaaaactagggtaataagatgcttgattgttttcaggtttgccaccagagatgcaatattttaaatactgtcagaaagagtgatttttaaaaatatatatttcagattttcagtgctaacagattgcatatatacagttcatttacttttattaaattggcaatcgatattttattgaatggggaattaagaatataaactgtaaattttgtcttaaattgattttttttcttggcctttatttttattacttaaggtatgagttatattttaggagatactttctagacagtttgaagtttgggtgctatatgaagaaaaacatttaatgatatactcagatataaacaccttgttttcttgaatgtaatttatttattagctaaaaaaaaaa

SEQ ID NO: 44220 - DNA, 552 bp, Homo Sapiens
gcgccgtgtgcctggattcgcagtttttaaccgcaggttctaaagtgtcccgcggagtacagataatattctggaaggtaactgtttactacgacagagacgtggcatttggaaacgaaacttagatgtttcatggagcttattttgagaactttcccatttcaggtttctgcattcaggctttacatggtcagttaactcagagataccccagctgtttatcatcagctcctctgaaatgtgatccctttgtaactgtgctcatcacttcgccagtgcgttcaatgacacgctgatggcaggtggtccctgctgaaacccccacgcctccgcttcagcatctccacgctctgaagctgtctttcaaaatgtgtgcactgacccccttgtttgatcaaatttgtgtaaaatttttttagaagagatggcttattaacagggaagaagcttgttatattccagttgtaagaatagccttagtgtttagatttttttatgatagggaagatgcggccatcactgggatattttcaaatcccaaggacatcagag

SEQ ID NO: 44221 - DNA, 580 bp, Homo Sapiens
gaggccaagaattcggcacgaggagggacagcaaagaagccaacgcacgacggcaagcaggcacccggaggcgagagagccttggcaaaaaggcgaagcgcttcttgggccgcatcgtagctcgtaacagccgcaagatggcctttcgcgccaaatccaagtcctgccacgacctctcggttctctaggtcccacccgctcccactatggtgggagacgaacggaagggttggtgggctggcccagccaactgccccgggtgcctcagagcaggctcagactctgggtccctcggagctgccagccgggcacccccaacctcatggtcatggacagatagacagtgctgccctgcgaagtggctctcaggggccagtgagggctgggcccacagagatgcatgcgcaggctcatatgcgtcccaagcagccgcagcgcagccgccgggcaggcctgcgtgccgggagaggactctgccttttttcacagcccgggtgtgcctgccctggagggaggctcttcagtgcggtagctatttgtttacatgcagatttttgtaataaaggctatttcctgataa

SEQ ID NO: 44222 - DNA, 503 bp, Homo Sapiens
accaggtgcgccctctggggctcagagcaacggatggtcagctgcgaacagtctcgtccgatgttaggaaatggtcctacggccgcgcctttgtgttcctgtcttctctccaccaccaaaagcaaaagatgatttcccattcactgcagtcatctgactcattttaatatctgtgctagtgacaatgaatgtcagaactgccaaaggataccaagtgatcatacgatgatttgcatgatcgggtctatttcacccaatagtcacttgtgtgtcccccgaaattgggatgggtgagcacccttgctgtggtgtaaacttcctgttatttaatctcccccacggtttcatttttctcttctgttaatacttagaactttctaagaaactccatgaaatgaggaaatactgtttctaataatatgaggaaagaagtaaaaatgttcattccaagtggcaagtcttattggacacattttaaataaaatcatgcatacctgaaaaaa

SEQ ID NO: 44223 - DNA, 391 bp, Homo Sapiens
catgcaccacaatgtccaggcgctgtttgaaggtgtcgtgcgccagatacgcctgcgcagggacagcaaagaagccaacgcacgacggcaagcaggcacccggaggcgagagagccttggcaaaaaggcgaagcgcttcttgggccgcatcgtagctcgtaacagccgcaagatggcctttcgcgccaaatccaagtcctgccacgacctctcggttctctaggtcccacccgctcccactatggtgggagacgaacggaagggttggtgggctggcccagccaactgccccgggtgcctcagagcaggctcagactctgggtccctcggagctgccagccgggcacccccaacctcatggtcatggacagatagacagtgctgccctgcg

SEQ ID NO: 44224 - DNA, 827 bp, Homo Sapiens
ggaagttgggattttcctggactatgaggctggcatggtctccttctacaacatcactgaccatggctccctcatctactccttctctgaatgtgcctttacaggacctctgcggcccttcttcagtcctggtttcaatgatggaggaaaaaaacacagcccctctaaccctctgtccactgaatattggatcacaaggatccactgactattgatggctttctctggacactgccactctccccattggcaccgcttctcagccacaaaccctgcctcttttccccatgaactctgaaccacctttgtctctgcagaggcatccggatcccagcaagcgagctttagcagggaagtcacttcaccatcaacattcctgccccagatggctttgtgattccctccagtgaagcagcctccttatatttggcccaaactcatcttgatcaaccaaaaacatgtttctgccttctttatgggacttaagttttttttttctcctctccatctctaagatgtcgtctttggggagatctctattatatcctggatgggttgcaaaagggctttctaaaataaaaaataaaatttaaaaactgtaaaaccgacaaacccccattagtactatacataccccccattttcccacaccccaccttaacagagaccaaaaaatgtcggcccgcccccgcccctcaaaaaactttctaagaactttcgtttggggccccggccccacaagggtaagggaacgggggccaaaggtggttcccccagaaaaacccccggccaagaaaagaggccttgggaattctcccccaaaaaag

SEQ ID NO: 44225 - DNA, 521 bp, Homo Sapiens
gtatttaggaggggaatagggggaaaattgtatttttctgttcaaactctctccttctatttgtgtttccttcacccctctccctccaccacactgtgttggtcaaatgatactattctatgaaaccctgagctatagttgtcaaaagtaactatggattgtgattagtcctctgtgggtgcttccttccctcttttttctccctcactctctttctcagtctccactctggtaaatggaaaaggtgatgtcgaagaattgatgcttgcttggactcatgttgtatctgtgactatgctattagctgtctcctttttccttcctatatgggtagaattcttatgacttatgaagttcccttcttgataagtaggttaaatgcacaatgtggtactgttttatagtttctagatggttgtataaagcaaaaagttaatgtggttatgtgtttttaaagaaaataagtgattggtcactaaactctgtccttttttcattattacaatttctctctgttttcc

SEQ ID NO: 44226 - DNA, 857 bp, Homo Sapiens
  misc_feature (642)..(642): n is a, c, g, or t
ctttatcaagaactggaaggaactccctgctgttttagaaaaagagaaaactataattttacaagaaaaaattgaaagaagaaaaatgttacttcagtggtatcagcacttcaagacagagcttaaaatgaaatttactaatattttagaaagctcatttttaatgaataataaaagttaattatctttttgagctaacatgtgatttttaaaatcattttgactactgggtgtataaatgtgtttgtgtgtgtatgtatttatagatgttctttaaggtacccttgaaaactctacattatgtatgccacataatgacatttcagtcagtggtagactacatatatgatagtggtcccataagattataatggagctgaaaaatttctatcgcctagtgatgtcatagcctagtgatgacatatgtattgcaatacatcactcacgtgtttgtggtgatactggtgtaaacaaatctattgcactgccagtcaagtaaaagtacagcaattatgtcctgtacataatatttaataatgacaataaatgactatgttactggtttatgtatttactatactatactttttacaattgtattagttctgcattgtatgaataaatgccctagaatggaggtantttataacaaagaaaacacaacacagacacaaccaacaaccaacacgacaacgacacacccaagacacaaacacaacacaaaacaaaaaaaaggagggggggggcataaaaacaccagcggggacaccaacagagccatttaaaaaaggcgcccagaggagaaaaaaaaaagccgcggtaaagggcggagaaagcgcgcggactggggaagaccc

SEQ ID NO: 44227 - DNA, 590 bp, Homo Sapiens
ccatttttctatgttttaccacaagttacaatttgaaaagaaaactattttttttaaatattccattgttaactgaatgttactgtttccactccagcaactacatgtcctcccttcaactgcctgccttttggggaaagaccaccttttgtgtgtttgttttttctctctctttctttccctttctctttctatctctctttatttttctttctttttctttgtttttgagttttctataggaaataaatagctttctatatatgagttgctggggaccttcacattctcttttagaaagctgtggcatgcagtctcattgcaggactcctggaatattgtctggttcttggtatttactgtatgtaagcaacaacttgaaaggtggcaatatggtgtcgatttggactatgaatcaaaagacctttttcaggttctttcactattgtctgggggactcagaacaagattgttctctgtatttattgtttgtccatttaggtaacatctgtcttaccttcctcacagactttgtacagaccaaagcaacaaatatttattgccatgtatagcagaaaatgaaacatgca

SEQ ID NO: 44228 - DNA, 513 bp, Homo Sapiens
  misc_feature (490)..(490): n is a, c, g, or t
agggcaaggggatatagtgatggggctcagatggactgggaggagggggagggtgatgcattaattaatggcttcgttaattaatgtcatgttgcttgtcgctttctcagtgtgtgtgtgtggtccatgcccactgctggtgccagggtgggtgtccatgtgcacccggcctggatgccagctgtgtccttcgggggcgtgcgtgtaactgtagtgtagtcaggtgctcaatggagaatataaacatatacagaaaaatatatattttaagtttaaaaaacagaaaaacagacaaaacaatccccatcaggtagctgtctaacccccagctgggtctaatccttctcattacccacccgacctggctgcccctcaccttgggctgggggactggggggccatttccttttctctgccctttttttgttgttctattttgtacagacaagttggaaaaacaacagcgacaaaaaagtcaagaaactttganaaaaaaaaaaaaaaaaaaaaaca

SEQ ID NO: 44229 - DNA, 662 bp, Homo Sapiens
  misc_feature (557)..(557): n is a, c, g, or t
ttttttttttttttttttgagatgaaatttcgctcttgttgcccaggctggagtgcaatggtgcagccttggctcactgcaacctccgcctcccagggtcaagcaattctcctgcctcagcctcctgagtagctgggattacaggcatgcaccaccacacccaggtaattttgtatctttagtagagatggggtttcaccatgttggtcaggctgttctcgaactcctgacctcaggtgatctgcctgccttggcctcccaaagtgctgggattacaggcgtgagccactgcgcctagccgtcacatttctaaacaagcatgaaaggggttcatttttgtcttcttcttgcctgccgtcagcatggtggaaatggctctgcctatgctcatgcttctggtgcccaatgccttgcactgtgccattcaacactatgaagagaaacaagtagccacacctcaaaataatgtggctgtcaacaactggcctaaataaacctacacaaaccagtacttgccttttgctggaaacattgattatgtgctcctcacgtagtanaaagcggtatcctgattagtctaacagttgtgttagactttagggccagtattgtcagcatttatttatttatgtacctttgttatgatgggatatttttcattt

SEQ ID NO: 44230 - DNA, 620 bp, Homo Sapiens
  misc_feature (470)..(470): n is a, c, g, or t
  misc_feature (620)..(620): n is a, c, g, or t
ggggatcggtgggcagatggaaaaggacccctggcagctgcgttctcttccagtgaagtaaaagctttaattcgtgccttgtttcagaacacagaaagaagagcagctgcccttgctaaaattaaatagctccatcttcttaagaaagctatgtcttgaatatgtggattcttccctggcataattactcccttaaagacttctttgaatcgcccatggtttggtgaaccagtacatcttggaagtttgactttacagaagaacgtcttacctcctggcctgtacgaggcttgtttaagaactgtttattaagataaatgtcaagtaaagcacctcaattcattgactttctagccatcttcctttgattagctaacaaactgtcaggcagcattatttcatgctgcttccagagccctctgggagctatatacattgtaaatgcaggccctagcttggaacgaggaatngggagattccaggagtcagggtagagaatttctgagcaaatcggagatattttaggggtgtggaggaggggaagggaggaatgggcaccatatttggcttacaggaattaaggagacttcctgtaatatttctttccaataaatattgtn

SEQ ID NO: 44231 - DNA, 871 bp, Homo Sapiens
tgcaatgcagagggcttggggaggtttgggtactctctgctgccactactgggatgatattcagaagagagaggacctcatactgtgactggacccaggaccctccctggaagagagctcagcccagctgtgtgtgtgtgtgtgtgtgagtgtgtgtgtgtgtgtttgtgtgctgtgctcatgtgcacctgggtgtaaaatgactgttatctggttgtgttactcagggtgggctggggactcaccagaagaatcccccccagcctgcccaagacaggtttttcccttgtaccatcttcagagaggtcaggggaagagggtccaggtgggttaaggggggtcgctatggataaccactaagaccagactgctgccaggaggagtgggggataatgaggtggccccagggtcctggcacctggctttggttttccgtcttctttcctcaggacgcccctgaggcctgggacctgtgcctggcttcgaggagcatctgtggctgggtgatccagctgctggtgtgatcatgggcttccctcctctcagcagggcaggcgctcctgccccagagactgggcaactggctgtttctatgacgtatttatttttacttgtgtttcatgtcactttttttaaaaaaagcaaacagaacaattgtaagtcagtataactgcctatccggtttctttatttctctttttgaaaaatcaaatttaacctcaagaaggaaaaaaaaaaaaaaaaaaggggcggccgctcctaaagaatccctccagggggcccaggctttacccgtaccccagttttcttgtacaaggggggccccctttaggggaggccctaatttataagcttggggccctgggccctc

SEQ ID NO: 44232 - DNA, 599 bp, Homo Sapiens
gaggtgccaagacctgaacaggtgcaggaagccctgacaaagcatgatttgtatatctatgcagggcatggggctggtgcccgcttccttgatgggcaggctgtcctgcggctgagctgtcgggcagtggccctgctgtttggctgtagcagtgcggccctggctgtgcatggaaacctggagggggctggcatcgtgctcaagtacatcatggctggttgccccttgtttctgggtaatctctgggatgtgactgaccgcgacattgaccgctacacggaagctctgctgcaaggctggcttggagcaggcccaggggccccccttctctactatgtaaaccaggcccgccaagctccccgactcaagtatcttattggggctgcacctatagcctatggcttgcctgtctctctgcggtaaccccatggagctgtcttattgatgctagaagcctcataactgttctacctccaaggttagatttaatccttaggataactcttttaaagtgattttccccagtgttttatatgaaacatttccttttgatttaacctcagtataataaagatacatcatttaaaaaaaaaaaaaaa

SEQ ID NO: 44233 - DNA, 595 bp, Homo Sapiens
ggcacgaggatcaatatggtctaaagcttcaataaggattgtgtgtaggtgaataaagacagctaagtgaatgtgtgtaaagtgtagcaaaagcagacagatatttatgtacagtattcatagaatggaaagttaaatatttttgcagtgtgtatttaaaagagaaactcaccataatagtgccgtctaaaaatctttgtaaagttaatttaatgtcctttagaagtgggagtctggtggaactgtgttggatttaagataccttttcactcttccgtatgtcatgagccttgtgcgtcacctcactgtggtgcatgtgcaagggcgtgtgcacgcctgtgctttgccatcccatgttgtaaacagctgttccaaaggcacaaacgagtttagggtagactctgtaaacacctccttactcactatagtcaagaagtccagcggcgtcccaatatagaggtcccagtgcagtctgtccagaatagccagctccatcctcagcagctcattcggggaatagtcagagccatagtgctttgtgaagtcttttacttgtggaataaactgtaaaaagaaaataaagaggccaaagccc

SEQ ID NO: 44234 - DNA, 705 bp, Homo Sapiens
agccagtgcagataaaagatgcttacagcaaggttgcagcaatgctgcaggacagaggactgtgggctgtgatcaacaatgctggggtgcttggctttccaactgatggggagcttcttcttatgactgactacaaacaatgcatggccgtgaacttctttggaactgtggaggtcacaaagacgtttttgcctcttcttagaaaatccaaagggaggctggtgaatgtcagcagcatgggaggaggggccccaatggaaaggctggcatcttatggctcatcaaaggcggctgtgaccatgttctcatcagttatgagactggagctttccaagtggggaattaaagttgcttccatccaacctggaggcttcctaacaaatatcgcaggcaccagtgacaagtgggaaaagctggagaaggacattctggaccacctccccgctgaggtacaggaagactacggccaggactacatcttagcacagcggaatttcctcctattgatcaactcgttagccagcaaggacttctctccggtgctgcgggacatccagcatgctatcttggcgaagagcccttttgcctattacacgccagggaaaggcgcttacttgtggatctgccttgctcactatttgcctattggcatatatgattactttgctaaaagacatttttggccaagacaagcccatgcccaga

SEQ ID NO: 44235 - DNA, 838 bp, Homo Sapiens
agtgttggctttcacttagcatcatgttctcaaggctcatccatgttgtggcatgtatcagtactgcattcctttttatggctaaatgatgtttcatgtatgagtgtgtaccacattttatttatccattcagcaattaatggacaggaacaatggcttttaagtattaaattgtaagttcaacattaaatgtatccacagttattgataatatcaagattatacatggtgtgaacagaatgctgtgtcgaaatggtatgtaaattatttgtcagcatttcatgtaagtgattattttctaaggacccttctagccctggttttaagaaatatgtgaatgtagtattttcatcaataaagtttaatgcattaagcattagcttaaaatttgaatgaaggcagatgtgaagatatttgccacatgttgtaataatcatgttttgaaattatttcaatatgaagtatttgaaaaatgtcaatacataaaggaaaggaaatgagtataattaagtcaatatatttttaaagcaatttttataatttagcagacactgcatcttaatataagttactattaaaattgtgtccttgtgaaaaatgtgatgtcattttccttttttgttgatcatgtaaaataggttacttttcttgtgctacattttctatttaataagctattgcttgccgtgtggaatgttttacttgttgctcccatttttttctccctaccccaagccctctctcccacacgcacacaatgttcaatttttttaaagtcatcatcagtgtgttatctttaatggattctaagaatggacaaaaagaacaccaaatattc

SEQ ID NO: 44236 - DNA, 775 bp, Homo Sapiens
  misc_feature (702)..(702): n is a, c, g, or t
  misc_feature (712)..(712): n is a, c, g, or t
  misc_feature (742)..(742): n is a, c, g, or t
cggggcccacactgtctgaggacagggagatggaggaggcaccggtggctgctttaggagccactgctgaaccccccgaatccccccagacccgagacaagacctagagggtttgggacaaactgggagcccccaccccacactctagttgcccatgtctgattgggggctctagccccttccctcccagctcagtcaatacttgaactcccatcacgggcactttcaatcccgaatgctgggtcttgggttttttaattcatcttttcacaaaacgtgggcttttaaaaaatatattcctacagtgatgtcaatttttattaatccctgtccccagggagggtgggagccgttgccagtcctacctgaattaggtcgtttttctccctcatccctcaataccctaccacagatcctgcctccacccagttccccacaaagcaccagaggtaggagacctggattcaagtgccagctctgccactgaccctggggccccgacccagccctgcctcctcagccagtgtcttcacacgtacaactccacgtggggtggcaactagacctctcctgcctctcccatggcttacagcttctacccggccccaaggctacccagtattttatcgtccagacccatggcagggccagcgggcaggacagggaaacaggggggaggacaatggatactcagttttttgngtttttttgngtggttttttttttttaagaaaaatacagnttatttcaggcttacagtaaaaaaaaaaaaaaa

SEQ ID NO: 44237 - DNA, 681 bp, Homo Sapiens
  misc_feature (607)..(607): n is a, c, g, or t
  misc_feature (613)..(613): n is a, c, g, or t
  misc_feature (620)..(620): n is a, c, g, or t
  misc_feature (622)..(622): n is a, c, g, or t
  misc_feature (624)..(625): n is a, c, g, or t
  misc_feature (635)..(635): n is a, c, g, or t
ggggaccaaggaagagttgctaaatgaattcagtgaaggatttgaacttctcgaagagctaccaacacccaagttcagctttggaggcagatctggaaacagtgtagcagcattggttttccaaaaaatgtgagactttttcttggacgaattcaggtagctacacagaatctacacagcaaagttaacctgacacagaaaatccttgtgcaaataaatgcttagtaagtacacaggatgcacatgttgaatagagtatactggattggtgaaagaaaataataataatgagcatctaagtggttgggttttagagatcaatcaagaataattttaattttcttttgtatttgaaatgtaaatagttttcttttcgattaaaaaaatttcctataactgctaaacagttaaaaactttaaagtagtaaatgagtttatagaaagcatgtattcttgatttttgtgccttggtaaagttgataactatttatgaatatttgaccaaattattccagcatcagaataataagcaaaataactttgttagtgttttgttagactgtttatgaaatataacaagaaatactattttgtgttggatgggcgntatttntaaactnantnnatactgtganaaggcctcttactttatgtatatattaaacaaatcagagaatgttt

SEQ ID NO: 44238 - DNA, 597 bp, Homo Sapiens
caagatgtgttaaagtgttgtttaaaaagggacccaaaacagaggatatccattcctgagctcctggctcatccatatgttcaaattcaaactcatccagttaaccaaatggccaagggaaccactgaagaaatgaaatatgttctgggccaacttgttggtctgaattctcctaactccattttgaaagctgctaaaactttatatgaacactatagtggtggtgaaagtcataattcttcatcctccaagacttttgaaaaaaaaaggggaaaaaaatgatttgcagttattcgtaatgtcagataccacctataaaatatattggactgttatactcttgaatccctgtggaaatctacatttgaagacaacatcactctgaagtgttatcagcaaaaaaaattcagtagattatctttaaaagaaaactgtaaaaatagcaaccacttatggcactgtatatattgtagacttgttttctctgttttatgctcttgtgtaatctacttgacatcattttactcttggaatagtgggtggatagcaagtatattctaaaaaactttgtaaataaagttttgtggctaaaatgaa

SEQ ID NO: 44239 - DNA, 587 bp, Homo Sapiens
agttttcagagtgtcacaaagtcaataggtccttacacggtgctattgccctaagggaaatccgaactgaatttatgcacatagaattgtcaccctgactttgaagcctcaaacatggatcaaatctgttgtgaaacatcaatatatgtagctggatgagtgactagtttcccttgtataatatgtgatctaagaaaattgctaatctttccctgccattttgagaaacacagtccaaacatgagcataaacagaatttcctgcaatacatcccagtaggtccacctagtttacaacttaaactagtttgtgaaacatttgtctgtatacattttatattttgtacattttgatgtaacatatcatgtaaataggcagaaacagtgaaataaatcatctgaaaagttttgtagtctttgtaaagccccaacaataagtacttggtgtcaatggacttaactggatgatgtattttctattggtttattgttcctctagcttgtaaaccagcttgcatatatttttttgcaaatgtgcaccctgtatctgtctaaattattactttgccattaaagtggaattattta

SEQ ID NO: 44240 - DNA, 520 bp, Homo Sapiens
ctgaagtgtcaaacacagtcagattttgggaaagtgacaatgcaatttgaattagaagtgtgccagcttcaaaaacccgatgtggtgggtatcaggaggcagcggcttaagggcgatgcctgggtttacaaaagattagtggaagacatcctatctagctgcaaggtataattgatggattcttccatcctgccggatgagtgtgggtgtgatacagcctacataaagactgttatgatcgctttgattttaaagttcattggaactaccaacttgtttctaaagagctatcttaagaccaatatctctttgtttttaaacaaaagatattattttgtgtatgaatctaaatcaagcccatctgtcattatgttactgtcttttttaatcatgtggttttgtatattaataattgttgactttcttagattcacttccatatgtgaatgtaagctcttaactatgtctctttgtaatgtgtaatttctttctgaaataaaaccatttgtgaataaaaaaa

SEQ ID NO: 44241 - DNA, 1049 bp, Homo Sapiens
aaacaaattaccagtaattcttttatcctcatatacccggtgttcagattttctagataggctcctaatttttttacagattatttgaatctgattcaattcatgtactgtaatgtttgataacttaagtaccctttataggttctcttttacctcttctttattaaattccttgtaatttgttgtactaaatagattgtcttctagaatttcctgtagtctgaattatgtagtattgtttcacatgttccagtgtcctcttatttcctgtgagttggtagttagatctagaagcttgattaaattcagattttctctctttagatcatcaactttagatcatcaacttggatcatttgtttcattttgcttttgatatgttgttttttagaattacctcttaaaattttgatttaattttataatcatgtaaaatgtttataaatttccaaattcagatcagcaaaacacaataaaatctattcagagaaggcaaaaaaaaaaaacaaaacaacaaaaaaacaaaaaaacacacaagaataaaaagaacaaacaaaaacagaaaaaaaaaggagaaacacataaggaatacagaatggcaaaaaaaaacaagatacaagaaatggcacaagcgcccaataagaaaaaacaaacaaaaagaaaatggccatcaaaaaaaacaaaagcaagcgaacatgcaccagaacccaaggaaaacagacaaaaagcgaggtagacctgggacaaacccacaaagaaagaaacaaggacaaccaaccagaaagacagacagtaaacaagagatacataagagataaaaaatgaagcgcaaacaccaaacaacaaggagagaacagaaaaaaacgcagaaaagaagagtcgagacgcgcagagacacacagaaaaacgcgaagcgaaacgcacgaagaagagaagagaagagagcacaaacgagagaaggagccgagacaggaaacgacggagagccgacacagacacacagacaaccagagcgaacgagaaagaacagaaacgaatacaaaaaaagg

SEQ ID NO: 44242 - DNA, 876 bp, Homo Sapiens
  misc_feature (736)..(736): n is a, c, g, or t
taatgtgtcagcacattttgccgcagtggatgtgtactgagggggctggaggcgaagggtgggagcatagcataggaacgctgcatagaccatggaggcctttgcgcagagagcagagaggatgacttgcggccaccaagtttctgtctccgcgggagtcccgtgcaagccatcagaatgttgaaatgagggtgaagagctcagatccctctctttggaaagtttagcctggaagcagttggccacactgtgtggagggcacctctctgtcccttccgtgtctcactgtctctggaagcttcagcccatgtgtgtcctggtgttcccagccccaccagagccccgtgccgggagctgacagctttcacgcttaaggcacgtgtgacctgggtagtcagacaccacttgagcccctgcccacatctgctggtttggggcttcagtggggagctgacagctgtgagcacaccactgtcccctcatccacctcggcctgcatggggcacccacttccttctgggtggggcttccatggtaagggggcctgcgtccctgcacactgcgaggactgccttggccacaggcccactccctacgacacgtgactcgttttagagctctgtcccagaggcgttcgtatgtgacccacagatggcgtcaatgtgaacacctctctttgtgctgaatttctgggccattcttttcctgtcttatttctaaatttccttctttcagnatgaaaacaaaagaaaaactttaaacagaaggtttttaaaaaacaggagatttccaccctttttttagggttcacctgccaaacaaaaattttactccagcccccttatagcccttcctgaccaatttttatgcaaaaag

SEQ ID NO: 44243 - DNA, 623 bp, Homo Sapiens
ccgttttttttttaaagaaaaccttttgcttcatgcccgtaattaacataaagtaagtaaattctttgtctttttatttaggaaaataatcatgctaaaagcaagttgtactttatatagattttcaaacaaaagattgattgtgctttttgaataaaaaagatagggtatcttccaacctcactgacttaaaccttgtggaatacagcacttctaaactaaaaacacacgtcaaaaagaaaaattaaataatcccagtgggatgctcaaaaatcgtctttagaaggttttaggattggctaattctgctattatcttattggctgcggcaaaaaaagaacacagagctgctgtctaaaatttctccaaactcccctccgagttcagcaggcaacactcagatttgaaagaaactctgcagcaacctggacatatggttagctgagtcgacatttgattagcaggcattttaaactgatttcctcttaacatacgcaggagagaaaacattttcttcctgcagggcatgttctactacatcatatttctgaatcccttcttcctattcggtcactctctgaaaaaagctggtttgtttttcccatgtagaatcactctgggta

SEQ ID NO: 44244 - DNA, 603 bp, Homo Sapiens
tccagacttggccctgaactactgacgttcctacctcttatttctcattgagcctcaggctatactccagctggccaaggctggaaacctgtctccctcaggctcaccttcctaaggaaaatgtcatagtaggtgctgctggcccctggtgatccagcttctctgccaatcatgacctgttccttcctgaagtcctgggcatgcatctgggacccccgtggagctgacaagttttccttgctttcctgatactctttggcgctgacttggaattctaagagccttggacccgagtgtgtggctagggttgccctggctggggcccggtgccgagactcccaagcggctctgtgcagaagagctgccaggcagtgtcttagatgtgagacggaggccatggcgagaatccagctttgacctttattcaagagaccagatgggttgccccaggatccggctgccagccctgaggccaagcacggctggagacccacgacctggcctgccgttgccctgagctgcagcctcggccccaggatcctgctcacagtcaccgcaggtgcaggcaggaagcagccctgggggactggacgctgctattga

SEQ ID NO: 44245 - DNA, 619 bp, Homo Sapiens
ctttttgtttttccatctgtgcctgttccttccacagcccaggcacacagaagcccaccttcttccccttaggaggagggatagtcaacacccctgctgtctctctgtcactcacacactgatttatggggtctgagctgggctgttcctgcaggatggacaggacccagcgccctcttctccccacaggctgtaaatagacttccaatcaccaggccagcccccacacaccctcactcattccagggaagcccaggtaggtggtgaacccactgccacgtctatcagtcctcttgttttatgcaaagatttactgtaaagtagatttctttccctccctcccccattcttttattgtaaatattgtctctaaatgtgtaacatattataaagaatttataaggatttttaaagatgttttgctcatttacaaaagtgttgtaacagtgttggacaaagccttccaccccatgtccgcatggctcctttcactgtgtccttgacacacctctctggcaacaactaaaatttcctgcttctgaaaagtcctgtcttaaaagtacagtctatatcttggaaataaatagctttcctcaaaaaaaaaaaaaaaacctcgtgc

SEQ ID NO: 44246 - DNA, 745 bp, Homo Sapiens
  misc_feature (679)..(679): n is a, c, g, or t
  misc_feature (702)..(745): n is a, c, g, or t
tgttatcagagcaatatgataccagtgagttttcatttcaacttttctttgaatgtataaagtgtcttttttcctatttccccttgtacttgcattgaaatgaatatgaaaatgcttaagttttctataggaattgtttgattttgcagtgctaaaatgctttcgtcttacgaaactataaaccataggtcagtattataggggaaaagcattttaagatagtgacaatctgagtgtttgtataaaatgtaattctatgcgtttcttatgtgatctaaaaattcaatgcaaatatcttttatttggtagttttgtctacatattttatgctctagcatgtgcaatatatctttgtaaagcacgatgatacaaatctggtgccagtgttatattttgcataacatatttgtaacagcataaaatattgtttgatgatttcagtgggattttgtctataatgttttcttatgtaaattggagttgaatgactctggtaaatgtcatgactgtaaaaatggggaaaatgacttttagttcagtgaatgactttgaaacaatctgaatcttctcaagcacagtttaatacttttgcaactactgaatgctctaataacgtaatgaagtacttaactgtaatatactatggaaatgcattcagatggttatttttacaaataanaacggtacaaatattgttggaannnnnnnnnnnnnnnnnnnnnnnnnnnnnnnnnnnnnnnnnnnn

SEQ ID NO: 44247 - DNA, 766 bp, Homo Sapiens
  misc_feature (616)..(616): n is a, c, g, or t
  misc_feature (658)..(658): n is a, c, g, or t
actgcttattttatgatagtttgtcctgtgtccttagtgatgtgtgtgtgtctccatgcacatgcacgccgggattcctctgctgccatttgaattagaagaaaataatttatatgcatgcacaggaagatattggtggccggtggttttgtgctttaaaaatgcaatatctgaccaagattcgccaatctcatacaagccatttactttgcaagtgagatagcttccccaccagctttattttttaacatgaaagctgatgccaaggccaaaagaagtttaaagcatctgtaaatttggactgttttccttcaaccaccattttttttgtggttattatttttgtcacggaaagcatcctctccaaagttggagcttctattgccatgaaccatgcttacaaagaaagcacttcttattgaagtgaattcctgcatttgatagcaatgtaagtgcctataaccatgttctatattctttattctcagtaacttttaaaagggaagttatttatattttgtgtataatgtgctttatttgcaaatcacccactcctttacaaccatactttatatatgttacatacattcatactggtagaaaaccagctccatgntgttacctccattatcccatcctttaaagaagaagaaaatgnttattaaagttagaaactaaaattattaaaattttccaagaaaattaaatggcatttccaaaaagttaattattattccaaaattccaagggaactttggtttaactt

SEQ ID NO: 44248 - DNA, 686 bp, Homo Sapiens
agctcccctccccaagctcctgaagacccggtttctgagggagggaaattgctacttggattgagagtagctggaatgtaagtgaccccaggctttgcctcagggcctttagcctatgtcccccccacataaagagagcttctcagagcctgactgaagagctgacgttttgctttttcatatgccaattaaacccggtctaaatccaaatgcttctccagccatccaggagtggctgtccttttcagtcttgtcttttatataggtagctgagggggaagatttagaagccttgcactcactaaatagattaaacagagcaggcttgtttgttgaattgctccaaagtccaacagacacacactgagcaggtgttttacactcacattccctttttgccccttaaatagaaagtgcaggtaaaggtttatacaacaagaaagcacattgaaaataatttgatactctaacaatccattaacatgtgtaggggttacggtgaggatcactgtgttgtattcagaaaaacggggagagggatgcttaattggccctggcgcttgctatttttttctcatttcttcacaataggaccgtctttggcagcagcaaaatgtatttcagtatggcagtctttcctctcttacattattggtaagattatactaacaaaatgtttccccctt

SEQ ID NO: 44249 - DNA, 759 bp, Homo Sapiens
agcgtggggggccgcatcgaccccaggtcaatccgctgaagatgtctccacactccctgacctgcgttacatcttccaactgggaccggccttattccagagaggtggcagcattcccactccccttcgtgaaaccagagaacaaattctggccaacgattgcccggattgatgacatatatggagatcagcacctggtttgtacctgcccacccatggaagtttatgagtctccattttctgaacaaaagagggcgtcttcttagtcctctctccctaagtttaaaggactgatttgatgcctctccccagagcatttgataagcaagaaagatttcatctcccaccccagcctcaagtaggagttttatatactgtgtatatctctgtaatctctgtcaaggtaaatgtaaatacagtagctggagggagtcgaagctgatggttggaagacggatttgctttggtattctgcttccacatgtgccagttgcctggattgggagccatttcgtgttttgcgtagaaagttttaggaactttaacttttaatgtggcaagtttgcagatgtcatagaggctatcctggagacttaatagacatttttttgttccaaaagagtccatgtggactgtgctatctgtgggaaatcccagggcaaatgtttacattttgtataccctgaagaactctttttcctctaatatgcctaatctgtaatcacatttctgagtgttttcctctttttctgtgtgagg

SEQ ID NO: 44250 - DNA, 463 bp, Homo Sapiens
aaaacagattaaacccaacctcactaaacttcgcaaaatggcccaggcctggcgtctctttggaaaagcagagtgtgatacaaggcagagcctgcagcaatccatgcctccctgtgagccaccatgataacagaatcactggtctaaaaggaacaaagggatgttcactgtatgcctctgagcagagagcagcagcagcaggtaccagcacggccctgactgaatcagcccagtgtccctgagcagcttagacagcagggctctctgtatcagtctttcttgagcagatgattcccctagttgagtagccagatgaaattcaagcctaaagacaattcattcatttgcatccatgggcacagaaggttgctatatagtatctaccttttgctacttatttaatgataaaatttaatgacagtttgaaaaaaaaaaaaaaaaaaaaaaaaaaaaaaaaaaaagg

SEQ ID NO: 44251 - DNA, 726 bp, Homo Sapiens
  misc_feature (63)..(63): n is a, c, g, or t
ccatatcccctttgcagggtggtgatgggcatcaaacatgacgtggaacatgtccccttcatnggagggtttccatctaaatgcatctgtgtgccttagggatcagtagttcaggggtggtggacttttttgagtgtctcctaatttctctgaggtgtctttggctctgtgtcaccaaatgtgcctgacctctgcatcccagtggttgctgaaagggaaacagtatattgcgtagtcagatgtcaggagtagagatcttaatgagaaaggccctggcagctggagagatgagaggacctagtggtcagcttatacccagactatctctccactcctccaagagtttgagtcccatagctgatgaaagaatttacatatgggctcccccctgctttcccactgaaaatctattctcatattttgggaaggagcatatgtcctttaactttcaatggtaaacaatctaggatagtgtttaaaggcatggattttggagtcacatatagttggtttgaatttctagcttcactacttaccagctgggtttgaccttggttgatttacttaacctctctgagcctcagtttcctcaactataataacatgggtggagggaggcatgttgaaaatatctacctcagggttgttggaataactgaaacaatgtttgtaaagctttagcacagtgcctggcaagcacttaataaatggctgtggtggtggtgg

SEQ ID NO: 44252 - DNA, 664 bp, Homo Sapiens
cttgtgagcaaaacatactatttataacagtatatgattgatttatgcttatgtggttgttcagtttgttcccatgtaactcgtttgttttaaatattttgccagatttcttgtatttattccacatcattatgcctataatgtgccgctttgtggttgggcatttgcctacttttctttcataattagtgatatatgcgatgtaaaaccactagtaaaggtacattttaatacttgttattttatactgaattagccttggaggttgactgtgcaatgttatttactgttgtaattactgtaataccaacatatgggccccatctgcacactcctgaaaaacagaaagtgtattcaaattttatcagtttaaagaaaataaagctgtgataaatactgtaattccaacctacattagaaggtctaagtgtaggtgatgtgccattccataatggcttccagactagggtgaattttatgttctgtactgtactgtgatgtagctttcttctgtaacagttatgttttaaaattaagtgagtttttttttgccttagcaagggtggtgtttgaaaaaaaaaatgtgtagcccctttttaacctagtgttcattcaaaaaaattgatgcaaatctttattcactttcactggtgcacactgaaat

SEQ ID NO: 44253 - DNA, 857 bp, Homo Sapiens
  misc_feature (24)..(24): n is a, c, g, or t
  misc_feature (773)..(773): n is a, c, g, or t
  misc_feature (834)..(834): n is a, c, g, or t
  misc_feature (852)..(852): n is a, c, g, or t
cagctattacacttcaataacagnaaacctttggccgaattgtcacaatagcagagccattcaacactgaactgcaactgtggcagatggagagcttttttgcaaaatatccacaagctggagcaggagaaaaacctagggaacaagtgctggaaacagtgaaaaacaatatagagtggctaaaacaacatagaaacaccatcagagaatggttttttaatttacttgagagtggttaatgtattcaaatgttagagtttaattttgtgaatctattgtttctcctctgaagcatttggtggcctaatttacaagcacgatggagagagccttataaacagataatgcttttactaagcactgtgtttatatgtcttgcaaagcctttaaattgttcctctttgtttatgaagaaagatactaatagagtacttaatatactcagggattccttctaagtgtacttcataagatattctttacaaactgaagataatgaaatagttattttaatacctttaaatatcattctttgtatcttaaatctgtgaagtagaacaatttggtcttagctttacattttcagtaccaaagaaacaccacttaatcttctctcttgattgatttttaaagtttaaataccagtacttgagggaccaatattaccatcttaatctttattttattattcagaattatacagacctaatatcattttattcacatatgtcttactactttaaatcctaccaaagtaacctgggcttaagttntacttgaggatcatatgaattagccaaaagaatggctgactggtgcctttgctcttataanatcaataagagaactctnctctt

SEQ ID NO: 44254 - DNA, 1048 bp, Homo Sapiens
tctcaaaataaacccagatcatattgggttttatcgtgtaaattatgaagtagcaacttgggactcgatagctacagcgctctccttgaaccacaagacattttcttcagcagatcgtgcaagtcttattgatgatgcttttgccttggcaagagctcaacttctagattataaggtggctttgaacttgaccaagtatctcaaaagggaagagaattttttaccatggcagagagtaatttcagctgtaacctacatcattagcatgtttgaagatgataaagagctatatcctatgattgaggaatacttccaaggtcaagtgaagcctattgcagattctctgggatggaatgatgctggagaccatgtcacaaagttactccgttcctccgtgttagggtttgcgtgcaagatgggagacagagaagccttgaacaatgcttcctcgttatttgagcagtggctaaatgggactgtaagccttcccgtaaatctcaggcttctggtgtatcggtatgggatgcagaactctggcaatgagatttcatggaactacactcttgagcaataccagaaaacttcattagctcaagaaaaagaaaaactgctgtatggattagcatcagtgaagaacgttactcttttgtcaaggtatttggatttgctcaaggacacgaaccttattaaaactcaggatgtgtttacagtcattcgatatatctcatataacagctatgggragaacatggcctggaattggatacaactcaactgggactatctagtcaacagatatacactcaataacagaaaccttggccgaattgtcacaatagcagagccattcaacactgaactgcaactgtggcagatggagagcttttttkcaaawatcmcaagctggrgcaggrgaaaacctaggggacaagtgctggaacagtgraaaacaawatagagtkggtdaamaacatagaaacmcmycagagaatggktttttwtttttttttgggtgkttwtktttttwwtttttaarttaatttttgaa

SEQ ID NO: 44255 - DNA, 806 bp, Homo Sapiens
  misc_feature (716)..(716): n is a, c, g, or t
  misc_feature (780)..(780): n is a, c, g, or t
ctttaaaaacatggccacaaggccctactcaatacatgcccatggggtacaaacagagagttctacagttactccaacattaccaggtgaaactctcacttacgtatggaaaatcccagaaagatctggagctggaacagaggattctgcttgtattccatgggcttattattcaactgtggatcaagttaaggacctctacagtggattaattggccccctgattgtttgtcgaagaccttacttgaaagtattcaatcccagaaggaaactggaatttgcccttctgtttctagtttttgatgagaatgaatcttggtacttagatgacaacatcaaaacatactctgatcaccccgagaaagtaaacaaagatgatgaggaattcatagaaagcaataaaatgcatgctattaatggaagaatgtttggaaacctacaaggcctcacaatgcacgtgggagatgaagtcaactggtatctgatgggaatgggcaatgaaatagacttacacactgtacattttcacggccatagcttccaatacaagcacaggggagtttatagttctgatgtctttgacattttccctggaacataccaaaccctagaaatgtttccaagaacacctggaatttggttactccactgccatgtgaccgaccacattcatgctggaatggaaaccacttacaccgttctacaaaatgaagacnccaaatctggctgaatgaaataaattggtgatagtggaaaaaagagaaaacccatggattcatnacaatgtatgtgaaaagtgtaaaaat

SEQ ID NO: 44256 - DNA, 776 bp, Homo Sapiens
  misc_feature (717)..(717): n is a, c, g, or t
  misc_feature (764)..(764): n is a, c, g, or t
tgcgatctcagctcactgcaacctccacctcccgggtcaagcaattctcctgcctcagcttcccgagtagctggaattacaggtgcccaccaccatgcctggctaatttttgtatttttagtagagacggggtttcaccatgttggccaggctggtcttgaacacctgacctcaaatgatccgcccacctcggcctcccaaagtgttgggattacaggcgtgagccacctcaccaggccccgttgcaatcttactccacttcgttttcacagcagtcccgggacatgcccattattaggcctatttgatagatgatactgaggctgagtcgggggtcacaagccaaagccacaccgctagaagggctcaggacccagcccagctcccgtcctcttggtggcatcaagcttgtgtgatatgaggtcttatgtctgctcatgacagccttaaaagcaataaacagatacaacttccagcaacttcccactcagctgcaaggctgcgggggggtcctgcctcgagccataaggtgagcagctagccagtgccgggccagtgtggagaaggctgaattgcctgtgaagctggggttgcaggcaggaatattcatggagcccctgaccatgtactcacactgctcttcctcagttcagggttcttggatttgctcaagtccacccaaatatccctttacgattctcagggtcccactccttncagatccaatgccctaaactttacataagagttccggcaagggctgngacttcaacttg

SEQ ID NO: 44257 - DNA, 580 bp, Homo Sapiens
aaacacactcgcttctggaacgtctgaggttatcaataagctcctagtccagacgccatgggtcatttcacagaggaggacaaggctactatcacaagcctgtggggcaaggtgaatgtggaagatgctggaggagaaaccctgggaaggctcctggttgtctacccatggacccagaggttctttgacagctttggcaacctgtcctctgcctctgccatcatgggcaaccccaaagtcaaggcacatggcaagaaggtgctgacttccttgggagatgccataaagcacctggatgatctcaagggcacctttgcccagctgagtgaactgcactgtgacaagctgcatgtggatcctgagaacttcaagctcctgggaaatgtgctggtgaccgttttggcaatccatttcggcaaagaattcacccctgaggtgcaggcttcctggcagaagatggtgactgcagtggccagtgccctgtcctccagataccactgagcctcttgcccatgattcagagctttcaaggataggctttattctgcaagcaatacaaataataaatctattctgctga

SEQ ID NO: 44258 - DNA, 581 bp, Homo Sapiens
atagaagataatttgtgggcaggggtggaggatgcatgtatgatactccataaattcaacattctttactataggtaatgaatgattataaacaagatgcatcttagatagtattatatactgagccttggattatatatttaatataggacctatttgaatattcagttaatcatatggttcctagcttacaagggctagatctaagattattcccatgagaaatgttgaatttatgaagaatagattttaaggcttgaacatggttaatttctcaaaaacatcaatgtccaaacatctaccttttttcataggagtagacactagcaagctggacaaactatcacaaaagtattgtcacacataacctgtggtctgtgctgattaatacagtactttttcttgtgtgattcttaacattatagcacaagtattatctcagtggattatccggaataacatctgaaagatgggttcatctatgttgtgttagctcttttaaactattgttcctcctatcccaagtttcgttttgcatctatcagtaacatacacattcttcagctggcttattaaggagg

SEQ ID NO: 44259 - DNA, 581 bp, Homo Sapiens
  misc_feature (337)..(337): n is a, c, g, or t
  misc_feature (340)..(340): n is a, c, g, or t
  misc_feature (347)..(347): n is a, c, g, or t
tactatgcagcggtcctcagttggagaaatgtgcctttcattcattacctctctggagacttcttgctggaatgaacagtgtgctcagggactatttggaactgcatgtttttgaattattttatacttagagatattctgaattttttgagggccttttaacactccccgagctgattgtttgcaagtgtgtttgttccagagtgtggaagtataaagacatgggcatcacgtaaattggttttgtttgctattctgtgtgtcagaaccaacgagtgtaatggagagggcaggtcatctcttattgtttctaaaacaacttaaaaggtgtagattnggnaagaggntgagtgatccagctttctccttttggattgaggctatgtacttggtgggggcaggggagggaatatattataatactattcagttgggataatgggaaaaacagaatatatagggtatctacccagcctagaaagcacaggaacaatacgtcatatatttggaaccgttattgtctgtgccatgaccttcatgataccagtgagaagccaggctagagaacaaaatcctgaatt

SEQ ID NO: 44260 - DNA, 911 bp, Homo Sapiens
gtttccacagtacattgcagcacatttagcttgctagcctaaaaatctgatcatgctgagtttcttttaaagaaagttaattttagaacttcaaactagaaccagtttgaacctcaagttgaccgttgtctgagttttaaaaatctcttcccattttcaaagatttttcaaatggatgtaggagaggaccaaggaggtaggctatagctgtagaacaacacagtcctattttcagaaacgaacagacacacgttttaggtcaggcacagcccatgtatccaggtgcatcaaactggggatgctaagttcaaaagtgcgtctgttttgaagatttcatctgaaaataatgtgtacactttcattactaccagtttgcattcaaaatagtttttgagactctttaaactcttctggatactttaattttccctttggaatagtgtgtaaacacagtccggatgaactttactactgatacctcacttgaggttgacaggagtggccagcagttagtgcctatggtcatgtaatacactaagtcaatacctgtggagtgaaatccggtctctataaaaaatacaaaaaaaatggctggacgcagtggctctcgcctgtaatcccagcactttgggaggctgaggtgggtgggtcatctgaggtcaggagttcaagaccagcctggccaacatggtgaaaaccccgtcctccactaaaaatacaaaaaattacctggggtgtgggtggtgggcccctttggtaataccccgcttactcggggaagggctgaaaccaagggaaaaatcttccttggaaaccctgggggaagggcagcaaggggttggccggggggaaccccccaaaaatcaacgggcccaattgggcacccttccagaggccctagaggcgaaaaa

SEQ ID NO: 44261 - DNA, 899 bp, Homo Sapiens
  misc_feature (44)..(44): n is a, c, g, or t
gattgtgttgtatcgcgagcaggaagtcctggactgtgactgtngacatggcctcggtccaccacctgttgtcccagatccctcaggacttgccctatgagacactgatcagcagagcaggagacctttttgttcagtttcccccatccgaacttgctcgggaggccgctgcccaacagcaagctgagaggacggcagcctctactttcaaagactttgagctggcatcagcccagcagaggcctgatatggtgctgcggcagcggtttcggggacttctgcggcctgaagatcgaacaaaagatgtcctgaccaagccaaggaccaaccgctttgtgaaattggcagtgatggggctgacagtggcacttggagcggctgcactggctgtggtgaaaagtgccctggaatgggcccctaagtttcagctgcagctgtttccctgaaagccagagaagaccttcctcttacatcacattaagggacccactcactaccttggcgtcgttttttgggtctgacttggctcgacaactgctggtcctctccacccggttggaaatgtcgctggaaacttggatagactctccagccttaggcgacaagaggcatcactcattccttttgggccagcttcccttgcttataagcggaagtttctttcttgggccctttcctgcctctttcatttgttaacacccgcctttattcgggctggggctcataataccctccttcacggggggtgtctgcccattccctttaggaggatcgcttcccctgcgcccctcaccttctggtctttcggcctttctgcgtttagaccttatccttttgtcaccttccttcaaacctgttgctcgcttacccttccttcccgtgatctctccttcaggccc

SEQ ID NO: 44262 - DNA, 812 bp, Homo Sapiens
aataattggaggggagatgggcattctttgggactatgtccgcattacattgagttttctccctctaggaagagagagtttgtgttttattttctgtaagtaaaagctacatgtttaggatttttaaaccatattaattgttatattttgtatttcataattatattatgtgttagtgtgtactggaataacatgttttatttggttagttggtgcaaaagttttctaaatctactgctgtattagaaactgaaaagggagggaaattccagatgtttgatgggaacatcactggtgaatatctaggattggtaagtagactcaaggttgaagaagtaaggtgggattaactcttaatattactttttgtatatgctgtttttagcaccgaaatcacgagggtctgtgttgcctcaaccttaacagcagccctctgttctggttactattactgtacttaaaacattattatatattcctgctgtccttgatgttactgctgttctgagacattttggcaataaagacaattatcagtggtgctgatgtataaactggaagaaggaccgtatgttgttcattgattcttctaggagtttcaatgaaaggatttttctgtgttgtattgtgggaagtcttaaaagattttcagtggaatttcccctctcttttcagttaacaaataagaagatcatcatgaaatggagatgtgggaactggccagaagaacactatgccatggttgcactgaattttgtgcctactctagggcaaacagaattacaattgaaggagttcctatctatctgtaa

SEQ ID NO: 44263 - DNA, 840 bp, Homo Sapiens
atttaaaaataatttgtataaactataatgcttagcacagatggcgagttatctgtgctatgtgaaagctgtgaaatagtgctctaagagttgtcaagagctgtggttttacatcttttcctcattgcaaatttagtgactttctacacactatatggaaataaatgactagcaaataaaacagtcataaatacaaagcagaggttgcactcccccaatcccgagttaacccaggtctgcaataacaccatgttaaaggtgcagatagagacttggctcaaaaaggcttggagatgaggaagatcggaatataatgatggtttgtctgttccttaactaaagtgcctctatgtatattcttttctatttgtagcaggataaatttggtctggctcagttttggaactgtattttgaaaatggctttgtcttacagtttaaggaatagacaggtggagggaaagtcaccataaaggagcaagtttgtgtagctgtccctcttgccccttttaatcatcctcctttgatatggcatcctggtgggcctcctttgccatttccatttttggtttctttccctgaaactgtgtgcaggtacttccatgtgccattgttgacaacgacacacaaaaaacaaaataaaaacctacttttacgatgggggccgggtgtaggttagcccttttcccctctggggggggcacttttcaactttgtggtgtttcaaattatggccaaaggaactgcctattggtaacctattattggcttaatctaatagttgtagttggaaccctagttctaggcgacaatcgcgtaaacgctgggaaacaacggtttg

SEQ ID NO: 44264 - DNA, 896 bp, Homo Sapiens
gaccggaccgaagagtagaaaccttccggaggcgggagcgagcgaggaggcccgggagcgccgagcgtcgccgccgccgccgccatgaacaactcgggcgccgacgagatcggggtgactatgaccagagcaggaccaaagtgctgcacatgagcctgaaccccaccagtgtggccaggcagcgcctgcgcgaggaccacagccagctgcaggcggagtgcgagcgactgcgcgggctcctgcgcgccatggagagaggaggcaccgtcccagccgaccttgaggctgccgccgcgagtctgccatcgtccaaggaggtggcagagctgaagaagcaggtggagagtgccgagctgaagaaccagcggctcaaggaggttttccagaccaagatccaggagttccgcaaggcctgctacacgctcaccggctaccagatcgacatcaccacggagaaccagtaccggctgacctcgctgtacgccgagcacccaggcgactgcctcatcttcaaggccaccagcccctcgggttccaagatgcagctactggagacagagttctcacacaccgtgggcgagctcatcgaggtgcacctgcggcgccaggacagcatccctgccttcctcagctcgctcaccctcgagctcttcagccgccagaccgtggcgtagcctgcaggctcgggggcatagccggagccactctgcttggcctgacctgcaggtcccctgccccgccagccacaggctgggtgcacgtcctgcctctccagccccacagggcagcagcatgactgacagacacgctgggacctacagtccgggcttccctgctgggggcgggccaggcaccccttctccaaggtgcagaaaccccatggcggtccccggaaa

SEQ ID NO: 44265 - DNA, 579 bp, Homo Sapiens
gctcatctcatgtaggcagagtataaagtattaccttttggaattaaaagccactgactgttataaagtataacaacacacatcaggttttaaaaagccttgaatggcccttgtcttaaaaagaaattaggagccaggtgcggtggcacgtgcctgtaatcccagctccttgggaggctaagacaggaggattccttgagccctggagtttgagtccagcctgggtgacatagcaagaccctgtcttaaaagaaaaatgggaagaaagacaaggtaacatgaagaaagaagagatacctagtatgatggagctgcaaatttcatggcagttcatgcagtcggtcaagaggaggattttgttttgtagtttgcagatgagcatttctaaagcattttcccttgctgtatttttttgtattataaattacattggacttcatatatataatttttttttacattatatgtctcttgtatgttttgaaactcttgtatttatgatatagcttatatgatttttttgccttggtatacattttaaaatatgaatttaaaaaatttttgtaaaaataaaattca

SEQ ID NO: 44266 - DNA, 717 bp, Homo Sapiens
  misc_feature (542)..(542): n is a, c, g, or t
  misc_feature (661)..(661): n is a, c, g, or t
  misc_feature (685)..(693): n is a, c, g, or t
  misc_feature (696)..(700): n is a, c, g, or t
  misc_feature (702)..(703): n is a, c, g, or t
  misc_feature (705)..(710): n is a, c, g, or t
gggtcgattacttgtatttcatgtaatgttcctccaagttagacatctggtgcaagaccaaccgggagaccatggaattgtcaaaagtacaaactgacagtgtgtatatttaatttaaagacttatttaaaaactcacaagctctcacctagactttggagagcagtctgttttctgtaatgtctgatactagaaactaatttgcttattttagttgtattcaagatttgaagatgtattttatagacaagttctgtttttgaactttgtggaactgttccaatcaatcaatttcccagttatgatgagtatttacattatgaatgtataacccagacatgatttgtaaagccgacagtatgtttctattacacaacactttttgatacagcgtctcttgtcttcactgatactggagtctccgttgtctgcttggtcccttcgagtttctagttacagacacaatcatactgtgattttatttttaatatggatatgctatcaaactgtgatacacttataattcactggtcctgcatcangagatggagtggggaaaactgtatttaatacagtttggatctgaataatctgtatggtttatacagtttgtgttgttcagagatgtttaaagtttgatctttgtttttctaaagattanaaagcacttgcccccactgtagannnnnnnnnccnnnnncnnannnnnnacatggt

SEQ ID NO: 44267 - DNA, 600 bp, Homo Sapiens
ggtactcagaccacaggacccagtggggtaggatgctgtacaccaggccggccgctcctgccgtgcaaatgttcctcagcagcacatagcacctatcgggtccaggagccggctgtgcacatcccaggacaggagcccctgaccgcgtccatgctggctgcggcgcccctgcatgagcaaaagcagatgattggggagcgtctctacccccttatccatgatgtccacacccagctggctggcaagatcacgggcatgctgctggagattgacaactcagagctgttgctcatgctggagtctccagaatccctccatgccaagatagacgaggcagtggccgtgctgcaggcacaccaggctatggagcagccgaaggcgtacatgcactgaaaccagaaaaggaaatcctcgcttccatggctgccaaaaggacagtgtttctggctctcagccctaaggccctgcaaactctaacttatttcccaattagtctgtatctatacttgggctctgtatgtgaatgaaggttggtcacccatccagcctattaccttttgctttgtgtattaaaagtgctgcaaaatctgaaaaaaaaaa

SEQ ID NO: 44268 - DNA, 546 bp, Homo Sapiens
ctgttctcttttgagaacaactgcttatttgttataaaagcatttggttaaaatgatgtcatcataaagaacagtggctttgtttcaatacatatttttgagatgattatctagaagccagattaataaaatcagcttgtgaccttgctaagcatataaactggaaattcagatacattcaaaattatgggttcatttaaaagtgttctaccttttgggtatgagactaatatcactaattcctcaatagttatcatggctctatcttaattaattagaaaatatgtgtgtttaattctttgagaattaaaatagagaatattaacagagggttaaaaactgcttcaactccaataagataaaggaagctcaaaatctatgagctgagtgttcaattagctttgcctactgagttcaattttatgtcaatacaacagtggatcagacagtacgactttgaactggtgaatgtaaacaattgtttttcacctaagctgctttggaagaactgatgcttgctgctaactgaagttttggatgtatcga

SEQ ID NO: 44269 - DNA, 543 bp, Homo Sapiens
gctggacgtggtgcgcacctcgcgggcgctcatcggagccacgaacccggccgacgccccgcccggcaccatccgcggggatttctgcatcgaggttggcagaacctgattcacggcagcgactcggtggagagtgcccgccgcgagatcgctctctggttccgcgcagacgagctcctctgctgggaggacagcgctgggcactggctgtatgagtagcccggcagatgcgcgtcacagaggctctcacactccagcctcctccagggcccaggtgggcgggcttctggccccaccccacagcgcttggagcatccctttggacgggctgctgaacatccacctgtctggacgttgcatggagggtggcgcaggcctctccaatccctggcgtacagggtttcctgcccgaggagctgctccaggagcctgcgcggctcgcctggaaacgtgccaggacactgtcctggtgcccagcccaacgtggtccaacgtttttttataataaagtcctcgttttcgtttcggtttgggcccaggaaa

SEQ ID NO: 44270 - DNA, 530 bp, Homo Sapiens
gtttgctcaaggagaaattgaagccatagtcgtgcctgtttgcttagcattcctattgacaactcttctgggagtgctgttctgctttaataagcgagacctaattaaaaaacacatctggcctaatgttccagatccttcaaagagtcatattgcccagtggtcacctcacactcctccaaggcacaattttaattcaaaagatcaaatgtattcagatggcaatttcactgatgtaagtgttgtggaaatagaagcaaatgacaaaaagccttttccagaagatctgaaatcattggacctgttcaaaaaggaaaaaattaatactgaaggacacagcagtggtattggggggtcttcatgcatgtcatcttctaggccaagcatttctagcagtgatgaaaatgaatcttcacaccaagttccgtcagtccaagtcttctcaagatccgagtctacccagcccttggtagattcagaggagcggccagaagatctacaattagtagatcatgtagatggccgtgatg

SEQ ID NO: 44271 - DNA, 681 bp, Homo Sapiens
  misc_feature (2)..(2): n is a, c, g, or t
anttccaatgacaggcatccagtgcagccagtatacccatacccccaggaccccaaagctggccctgcacccccacagcctggcttcatatacccacctagtggtcctgctccccaatatccactctacccagctgggcccccagtctacaaccctgcagctcctcctccctatatgccaccacagccctcttacccgggagcctgaggaaccagccatgtctctgctgccccttcagtgatgccaaccttgggagatgccctcatcctgtacctgcatctggtcctgggggtggcaggagtcctccagccaccaggccccagaccaagccaagccctgggccctactggggacagagccccagggaagtggaacaggagctgaactagaactatgaggggttggggggagggcttggaattatgggctatttttactgggggcaagggagggagatgacagcctgggtcacagtgcctgttttcaaatagtccctctgctcccaagatcccagccaggaaggctggggccctactgtttgtcccctctgggctggggtggggggagggaggaggttccgtcagcagctggcagtagccctcctctctggctgccccactggccacatctctggcctgctagattaaagctgtaaagacataaaaaacaacaaaaaaaaaa

SEQ ID NO: 44272 - DNA, 913 bp, Homo Sapiens
gccagtcagtcaaggcaggggccctctctccgtcaatatggaaaactcagcagttttcctctcccccagttgtgttcttgtaacgttgttaatgggttcctttgctttttgctttctccttttctgaaaatgtatgtgttttgcctctcttttggctacatcttcaaaatatttcttttgtgcctatgcacatgtgtaaacatgccatagcatgtgtggtaggtgtcctgtattttgtttgggaaaaaaactatcaaaatgaggaagagaatttcccctatttatgcactaggtttctgtgctttttctttgagttctctggagtacatattaatttgataccttcatggcaatgaaattatgatggagctgtgttataaattccttatgtcagaggccagtgcggtagcctttgtcccttcatgcctttcaattctgagtgggaggaaaagcaaacatcaaaacagtgcttcagccaaattccatatgtaatgccattgggagagtattgactaaaatatcattcgtcagggaaatatacttgtaatatttttacaggatattcctaggtaaatgaaggagcccttcagttggaaatttcaattaccccaaaatgtatttgcctacattttgcctgtttgaagtattaccctcttaacccttcctttgtaaatttttttcattcttgtcttatataccgcacgttttccaaaataaacttcggtccttttttaaaagggcaccttttttaccaaaaacttcgtccttacattatgaaaaactgctttcgggcgccgcgggaggacaattctcgtcccccctatttaccgcgcgtttatacccggcccccccgtaatcggttctttcacggggggggccgccccttaaaaaacaatgcccccccgcagggggg

SEQ ID NO: 44273 - DNA, 703 bp, Homo Sapiens
cccacgcgtccggtatcaccaatgcccagaatcagtccctcccagtcggatgagaagaagacctatcaatgcatcaagtgtcagatggttttctacaatgaatgggatattcaggttcatgttgcaaatcacatgattgatgaaggactgaaccatgaatgcaaactctgcagccagacctttgactctcctgccaaactccagtgccacctgatagagcacagcttcgaagggatgggaggcaccttcaagtgtccagtctgctttacagtatttgttcaagcaaacaagttgcagcagcatattttctctgcccatggacaagaagacaagatctatgactgtacacaatgtccacagaagtttttcttccaaacagagctgcagaatcatacaatgacccaacacagcagttagtgcaagtacagtctctcaaggagaattgattttgtggcacaaaaagggaacatgttttactctttgcacgaaactttcattgttaatgtatattattcagaaacattgtattgtaccataaaacttgtattatcaaactgttggatgttcatgtgtttgaacttttgcgcaccggatagaccccttgtatataaagtgttgcacatgtattatgtcgtctgatactaaaatggtcttataaagacaagtggacttgggccctattcaggcaagattaaaaaaaaaa

SEQ ID NO: 44274 - DNA, 515 bp, Homo Sapiens
gcacgagaatggcttaagataaagtatttttaaggaagaaagattaaaaacaactgttatacatgagactatggttggacttccttttctttacacttaagcctagaatttctctttaggtatatcagcgcttaaatccaagactattttttattgctgaagattcttgcaaaccatgaagagatgttctcacagaacagaaccccacagctggataaggcccgtatatatatatttgtaagccttgcaatgtgacaggtagcatcactatatatgcaatagttgttatgtagactgtcaaagaatttttttttccctggatacatttgaagctttgagtgttcaaggttttccttaatgatttcacgcagccaaattcttgaatcagttgaactaacctgtatgttactgttattaatgtttactctgcagtctgaacctggagattactggaattgttttccaagaggaaataaattcagtttaccattaaaaaaaaaaaaaaaaaaaaaaac

SEQ ID NO: 44275 - DNA, 715 bp, Homo Sapiens
  misc_feature (49)..(50): n is a, c, g, or t
  misc_feature (68)..(68): n is a, c, g, or t
cttgtcactgtgattggatgctggatgccgcctgatagacatgctgggnncctggctgagaaaccccntgagcaggtaacccagggaagagaaggaagccaggcctggaggtccacggcagtgggagtggggctcactggcttcctgtgggatgactggaaaatgacctcgctgctgttccctggcatgaccctctttggaagagtggtttggagagagccttctagaatgacagactgtgcgaggaagcaggggcaggggtttccagcccgggctgtgcgaggcatcctggggctggcagcaccttcccggctcaccagtgccacctgcgggggagggacggggcaggcaggagtctgggaggcgggtccgctcctcttgtctgcggcatctgtgctctccgagagaaaaccaaggtgtgtcaaatgacgtcaagtctctatttaaaaataattttgtgttttctaaatggaaaaagtgatagctttggtgattttgtaaaagtcataaatgcttattgtaaaaaatacaggaaaccacccctcaccctgtccacttgggtgatcattccagacccctccccaaacatgcatatgtacctgtccgtcagtgtgtggatgtatgtttacagttctacataaatgggatcattttatacatggtgctctggaacccacatttttcatgcagtcatttgcagtgaattatttattgt

SEQ ID NO: 44276 - DNA, 583 bp, Homo Sapiens
gcacgagccgctacctggagcatgtccaggctgtcatcacggtcaacgcaaccagaagaggagacctgaacatcaacatgacttcccctatgggcaccaagtccattttgctgagccggcgtccaagggatgacgactccaaggtgggctttgacaagtggcctttcatgaccactcacacgtggggggaagacgcccgaggcacctggaccctggagctgggatttgtcggcagcgccccgcagaagggggtgctgaaggagtggaccctgatgctgcatggcactcagagtgccccgtacatcgaccaggtggtgcgggattaccagtccaagttggccatgtccaagaaagaggagctggaggaagagctggacgaagccgtggagagaagcctgaaaagcatccttaacaagaactagcgctgcacatccgcctttcccaccgccctccctccccagctccgcctctgtcctcgctccacgtttcaggcaggcacctagcaattccatcacccgtacaggcaattccgtcttcttaatctgaagcttcactcactgtcaatgattattttcattacaat

SEQ ID NO: 44277 - DNA, 673 bp, Homo Sapiens
  misc_feature (48)..(48): n is a, c, g, or t
tagaaatgagttgtgggaagagtttaacatgcactatttatagtactntgccgttaacaggcaatgttctgaaactaaatttatttttgttcagtgaacataagtttagatttttaaagttggtagataatttatctccactaatatttttttaagaaactgtgaagagattaactgggaataattttatttcagattttactaatgtagtatgtagctacaacttcttgaacttcaagttaaggctagacatttactttgaaaaaattccactgggtgtttccagggctatttcattttagaaataagtgtttgccattcttctgcaaaaactggacaaggggaatactacaaaaaatactcagagataaaatcctcatttcaagttctacaaaatatttatcaaatgaatgttaatttttttttaattccctgctaaagacgttttcattagtcttagagggtatatgctttctagaactgtgtttatagttaacatgtgctttgatgtaaagaacatatttcgtatgcaaaacataacttgcattatggttgtacaatacactatatgtgtttagggattccggaaagcagtttaatgcagaaataactatatctagtatgcagttcatattgtgaatgaaggcttggcttttgtaataaataactaaga

SEQ ID NO: 44278 - DNA, 540 bp, Homo Sapiens
aagaggaggtcagagtgatcctgtataagaaagacaactacttttgaaggaagttaaaaggtggctttgaaggaggaagacaccttgagccaaggaatgaagggggcctgtaaaaaaagattgaaaaggcaaggaaacagattctccattagagtccccagaaaggaatgcagccttgctggcacctttttagcccagtgagatcaatgtcaaacttctgacccacagaaccataagatggtaaatttgtgttgttttaaaccactgagtcagtgataatttgctgaagaagcaaatagattaacatagcaactaagtacatgattagttgcattataggtgaagtcaaaaatacagtcctttagtaaagtctctatttcttccttttataagagtaattatatttaaaaaatctacctacccttctggaattgctaatgttagtgtttataaagtcttaaatgtgtgcataaaaaactaaatgtgaatataaaatctaaataaaggaatatgtttgcctaatataaaaaaaaaaaaaaa

SEQ ID NO: 44279 - DNA, 672 bp, Homo Sapiens
  misc_feature (660)..(660): n is a, c, g, or t
ggggactcccactgctgtgcaagttaagtcttttacaaaacaaggacagcagaggagggtttgcagagacctccctctgaaaaacacaaagaatggactctctcctgggatgaggacttgctttctttacctccggttctttccatgtcttagttggatgtccctgaaatggacacaggctgtgccattgtgccagaaacattgtgttatcttttatgttgttgttgttgctgttaaactataatatgtgacttctttttttattattttttgtttgaatgctttaaaaatcttttaagtctgtggatctgctgatgtacagtgcctttgctgctatggatcaaaatcaaaagaaccgtgtagatatactttattgtataagtagaaaattacttaatttcatactagaaatggatggatgctgcaagttgaaatggactgtccattgacgttcctaatgtggtagcagaaaaaaatggtgtcttaagtgcttagtgtttgatgtcattaacagtttcgtaaaactctacagtgtagaaagattttgatactaaactgtgcgttgtacatagttctaatgcattgtattgacccacagtacttctataatggtagattgtttgtgaattcagacttttaagcattttaacataataactnctagtatgctta

SEQ ID NO: 44280 - DNA, 622 bp, Homo Sapiens
atttaaaaagaccacatgaaatgctgattctaattgtgtgtaggtcttgaggattaagcacacaaatttcacaaacttctgtttgagtaaacaaactcagccttctgtaaatatacatgcaagtttggaaacagtaatactgtacctataaatatatgctgtctgttttgtgtacagtatgtaaaaactccttttctgccacactaaaaatgcaagccatttatgggaatcctaaaactagtattgaactaaaactttgctaatgatctttattagaggatcgtccaacttttcacttaccttgggttttcttttcaattcactcttacactagtctgcttatttccagctgtttattttattgagtcctgaatttaaaaaaaaaatattttgattcattttgtaaatacaagctgtacaaaaaagagagatttaatgttgtcttttaaatactccaattttcattctaatatgaatgttgttatattgtacttagaaactgtacctttaatattacattacctttattaaaagtgcattgaacacatcaattttagatgtgctttatgtactgttatcctataataaaacttcagcttctaatggaaaaaaaaaaaaaaaa

SEQ ID NO: 44281 - DNA, 471 bp, Homo Sapiens
cttttatttgcctctttattttgatggtggttggatttttttttttttaatagtaaaatcactaaacttgtgcaatggtagcatggaaattatctgaggtatattgtatgattgtactttagccagggtggacatagcttaaattataaaaactaaagatgaaagtacaaggaagtataagttatacttatgtaagtataaattcatgctgcctacttctaagagaaatttcattcttcataaccacataacattataatgccactgattcatacgggatttacattaattctatgggggaggacactagaattattagtgttcattttcatctaagatctttattctctaacgttcttggtcctattgaaacattgcagtatgcaaaactactgcaatgttaaacccaagagaaaagccattatcatgtgtatgctggtcatcatgatcagtgtggtacaatttttaaaa

SEQ ID NO: 44282 - DNA, 500 bp, Homo Sapiens
gagtgccatctgctgcatttcaagagattgtaaatgtcatctcagctggctcagttatatctctaatgtcccgggtagcagcacctccctctaaaaatatgtttacttcgctgtttcacttgtattttgtgtatacgaaatggcagcttccgatttctagttggatttgtcttgcattgtttgtataacttgctggtcacccagggctatttgctttttcattgagaaatttggtaggggtgtctagttcagcttttatgttgatccatcctgacttattttagacattgaatttatctcaccacaagtaaaagaacatgtgtattgactgtctttgctaagtttcctaatttttcctaattatggcaattatggatgtgaataagaatactgatgctgtacaaatatttttgtggaaatgtaccttgttaatgtgactatttaaataatatgaaaataagaatactcttgaagaaaaaattaaaatatttactctttgg

SEQ ID NO: 44283 - DNA, 523 bp, Homo Sapiens
cgcgtccgcttccgtgaggcgtataatctctttgcagtgaacggcattctcttcaatcatgagagtcccagaagaggagctaatttcgttactcgaaaaattagccggtcagtagctaagatttaccttggacaactggaatgtttcagtttgggaaatctggatgccaaacgagattggggccatgccaaggactatgtggaggctatgtggttgatgttgcagaatgatgagccggaggacttcgttatagctactggggaggtccatagtgtccgggaatttgtcgagaaatcattcttgcacattggaaaaaccattgtgtgggaaggaaagaatgaaaatgaagtgggcagatgtaaagagaccggcaaagttcacgtgactgtggatctcaagtactaccggccaactgaagtggactttctgcagggcgactgcaccaaagcgaaacagaagctgaactggaagccccgggtcgctttcgatgagctggtgagggagatggtgcacgccgacgtgg

SEQ ID NO: 44284 - DNA, 503 bp, Homo Sapiens
tggaagataatgtagaaaaccactacctattgaaggcctgttttggctaatctgtgcaaactctgatgatacctgcttatgtggattcttttccacactgctttcatttttaagtataaagacttagaaaactagaataatgcttttacaaataattaaaagtatgtgatgttctgggttttttccttctttttagaaccctgtatttaaacaagccttctttttaagtcttgtttgaaatttaagtctcagatcttctggataccaaatcaaaaacccaacgcgtaaaacagggcagtatttgtgttcctaattttaaaaagctttatgtatactctataaatatagatgcataaacaacacttccccttgagtagcacatcaacatacagcattgtacattacaatgaaaatgtgtaacttaagggtattatatatataaatacatatatacctttgtaacctttatactgtaaataaaaaagttgctttagtcaaaaaaa

SEQ ID NO: 44285 - DNA, 530 bp, Homo Sapiens
  misc_feature (154)..(154): n is a, c, g, or t
  misc_feature (444)..(444): n is a, c, g, or t
  misc_feature (470)..(470): n is a, c, g, or t
  misc_feature (522)..(522): n is a, c, g, or t
aggaaccagcgaagaccgctataagtctggcttgacaactctggtggcaacaagtgtcaacagtgtaacaggcattcgcatcgaggatctgccaacttcagaaagcacagtccacgcgcaagaacaaagtccaagcgccacagcctcaaacgtngccaccagtcactccacggagaaagtggatggagacacacagacaacagttgagaaagatggtttgtcaacagtgaccctggttggaatcatagttggggtcttactagccatcggtttcattggtggaatcatcgttgtggttatgcgaaaaatgtcgggaaggtactcgccctaaagagctgaagggttacgccctgcttgccaacgtgctttaaaaaaagaccgtttctgactctgtggccctgtccctgagctcgtggggagaagatgaccctgggaacatttgcngggcccattcagattccacggtgacntttccgtttgccaaattaaccgaggaaagacctttcaccagatttggttctntaaacttt

SEQ ID NO: 44286 - DNA, 650 bp, Homo Sapiens
gtcgcccggccacgcctggcccctccccacccaggagggaggtggcacttcttaacctgtacagttttattgtaccaagagactcgccccgcccctgtatcataagcctttaaatggagtcaactttttaattatatatataaagataaatatatataaatatatatataaactttttaaaactgtgaaaaatagctatgaaattataaaaaaaaaacattctgacgtgcagaatattattttttatttcctgttagattatagtgtctagcaccggcttcaccggcctcccagtccccagcacaccccccgcccaccccgccaagtgtactgtactcaccccccaggatagagaagtgtttgttagggagagaagagggagaggcaggagccggcccaagcccagggtccctgcttgggccccagaaagcacttaaccaggccccaagccttcaagggaaaccaaggcctcaaccagacaatcttgagggaaggaaaagccagactttgggtttgttttttgggggaattattggtttttttttttatgtttcttttggaattttgtttgttggcaaattctgtgtgatcttttttcataaaaaaaaagaaaagatttaattggaaaaaaaaaaaaaaaaaaaggcatt

SEQ ID NO: 44287 - DNA, 563 bp, Homo Sapiens
tttacttggatgacacaatgcagtttacttgcctcttcatacccatgcatgctgctcaccctagacaatgacatataagccgtatatagatcaatgtccacatatatatacacacacacatatatatatataaagtgtaacaaggaacactaaaacagtgttgattcttgtctctgaagacaaataattaaaccttttttttcccaactaaagaatggatttaattaaactatgtattgaaaaaaaagtagcctaagtgttagagatggtgaatatattccattttagttaaagaacaaatttcctgaattttaagcattcagtgagctgccaattttgattttgtgttgctctttacccaaattattttttctttgtttttctttttttgggggaggaggggaaaaaagcagcaatactgtgtttggaaattatactctgtatctggttttcctgtgtatgttaaccacttaaatgttattatcctgctttggttttagagtgattgtgaggcattcaatgcaagtatacagttattttctcattaaaaaaaaaaaaaaaaa

SEQ ID NO: 44288 - DNA, 532 bp, Homo Sapiens
acgaaatgagtcctcaggtggccaccctgatcgaccgctttgtgaagggaaggggccagctagacaaagacaccctagacaccctgaccgccttctaccctgggtacctgtgctccctcagccccgaggagctgagctccgtgccccccagcagcatctgggcggtcaggccccaggacctggacacgtgtgacccaaggcagctggacgtcctctatcccaaggcccgccttgctttccagaacatgaacgggtccgaatacttcgtgaagatccagtccttcctgggtggggcccccacggaggatttgaaggcgctcagtcagcagaatgtgagcatggacttggccacgttcatgaagctgcggacggatgcggtgctgccgttgactgtggctgaggtgcagaaacttctgggaccccacgtggagggcctgaaggcggaggagcggcaccgcccggtgcgggactggatcctacggcagcggcaggacgacctggacacgctggggctggggctacagggcggcat

SEQ ID NO: 44289 - DNA, 672 bp, Homo Sapiens
gtgaaacaaaatcatttgaaattttgattcagacatccatttccagtggcaaacagcaaagcctgaacccataaacccaaatgataggtgaagttgggtggttttatccaatgtctcaagcaagcaatgtctgggaatatcatagagtaacaagtgctggtcagccaaagaaacattcactgctggtgaaccaataccataagcatgtattatctaagcacttgatcaagaaatatacatgttgtacaagctctcaattttgttcatttattatcaaatttttaaaatacaagtttggtatgtgatttggaaaagatgccttctggatcttaagccagttgtcagtggaggtcctcagggctgcaaatgtcaagacataaccctgttcctcaccatcatgataccagatacaggtgaatacataggaactatctgcctgtgtcctcaatctcccttcaaacaagatgctgatttgtagggtacttggcaggttaaattaaaccagaagaggtgacttaataaaaaagggaatgacatttagggtataaagatctcataagaaatgtaatatgtaaattatatcttgctttatgttgtaaaatatacattgtttgcgctagaatagaaatgatttcttttcaataaaaagaaagaaggactctaaaaaaaaaa

SEQ ID NO: 44290 - DNA, 666 bp, Homo Sapiens
cctaggtataggagaaaatgaaaaattaccagactacatcaaacagaaattacagtgtctgtcttccatccttttgatgttttctaatccgactcctaattttcattgattaaaactcctttcagacatataagtttaataaataacttttttgttgactttcaagtaaagtgattttttttaacttaacataaagtcttcagaaagcctttctatgaaagaattttaacctataatgtaaaggatgtattctgagagaacaaagcagaatgaaacttgagtcacttactaaatatagtggatataaaatagaacacctgactttgctcttagaccataacccccgaacttactatgttcatatatttgtattgaacaatcttttaaaagcaaaaatgtaaatgatgtgtagtttatttgtgcttttattgttttccctgcgtctcagacatgttgagaatcatggacaaaacctgctggaattttggaatttttgaagatgtaaataatgtgtatttatgttataagtaacatatgtaaacatgtatatttggtttatatttatttttgtaacaccagtgtctgatgaaacatttttgcaaatgcattttataaaaaataaatatagtgataagttaaaaaaaaaattcggccttcgtggcctca

SEQ ID NO: 44291 - DNA, 740 bp, Homo Sapiens
  misc_feature (610)..(610): n is a, c, g, or t
ggggctatttccgtcattatagaaagctctattggacaacattggtctaggacatatattttgtattttcccctcacccaccatccaataatgagtaatagcacaaagtaaaagtgacttaatttgaaattacttctgtttggctagtttgcttagctgatcaccaccaacatcataggtctataaatcacccaactaagatcaggggtgtttcatgggaaaatctacacaaactattcattaaaaaccatagagccatggactgtcatttctgatttctgtttgattctttgtggtcatcattgaatatacaggggcctctatacactctggggagtatctattctcaggtgagcaaaataccgaatactgaatggaaatcaactgtaagtattaggacttcatatgcaacttgaatttttggtgctgtccggagtctagagccccacaatctgttttggttacagtttatccctgtaggataaatgatccatttaactattcatcagaggtgctgtaattttaaattgtctcttgtctccttcagttaattttcagaaattaaaacataccatgggaaaaaaaaaaaaaaaaaaaaaaaaacatgtcngccgcctcggccctcagagcttctagacattcgtttgcgcgcggccagtagatagtgacatgtcatactgttcctagaaatctgtctgactatgctggatctcacataaaacgcccgcgcacgacgtcta

SEQ ID NO: 44292 - DNA, 817 bp, Homo Sapiens
ggatggaccatgctaatgagggtcatcgtatttgtttagcactggaatccataatttcagaagaggaaaggaaaactaggagtgctccctttttcccaataatcataggaagaaaacctggtagtactagttcacctaaggccttatcacctcctccttctgtggattcaaattacccaacgagagatagagcatctttcaacagaatggtcatgcatagtgctgcttctccaacacaggcaccaatccttaatccctctatggttacaaatgaaggacttggtcttacaactacagcttctggaacagacatctcttctaatagtctaaaagattgtcttcctaaatcagcacaacttttgaaatctgtttttgtgaaaaatgttggttgggctacacagttaactagtggagctgtgtgggttcagtttaatgatgggtcccagttggttgtgcaggcaggagtgtcttctatcagttatacctcaccaaatggtcaaacaactaggtatggagaaaatgaaaaattaccagactacatcaaacagaaattacagtgtctgtcttccatccttttgatgttttctaatccgactcctaattttcattgattaaaactcctttcagacatataaggtttaataaataacttttttttgttgacttttcaagtaaagtgaatttttttttaaatttaaacataaagtcttccagaaaagccttttctaatggaaagaattttttaaccctataattggtaaaagggattgtatttccttggagaagaaaccaaaggcccggaaatggaaaaccttta

SEQ ID NO: 44293 - DNA, 609 bp, Homo Sapiens
  misc_feature (332)..(332): n is a, c, g, or t
gcctctcggggtatgctgtctgccatcaccaatgtggttcaaaacacaggtaaaagtgtcttaactggaggccttgatgcgttggaattcatcggcaagaaaaccatgaatgtccttgcagaaagtgacccgggctttaagcggaccaagacgctcatggagagaactgtttccttgtctcagatgttaagggaagctaaggagaaggagaagcagagactggcacagcagctcacgatggagagaaccgcgcactacgggatgctgtttgatgaatatcaaggcttgtcacacctggaagccctggaaattctgtccaatgaaagcgaaanaaaggttcagtcatttttagcatcacttgatggagagaagctggaactcttaaaaaattgacctaatttccattaaagacatctttgcagccaaagaattagagaatgaagaaaatcaagaagaacaaggcttagaagaaaagggagaagaatttgctcgcatgcttacagagcttctctttgaattacatgtggcggccacacctgacaactcaataaggccatgaagagggctcatgactgggtggaagagatcaacccgtggtgtcagtagatg

SEQ ID NO: 44294 - DNA, 1005 bp, Homo Sapiens
ctcagagggagcaccggtttggagctgggaccccctattttagcttttctgtggctggtgaatggggatcccaggatctcacaatctcaggtacttttggaactttccagggcaaggccccattatatctgatgttgggggagcagatcttgggaggttcccagggagacgctgaagctggtggagcggctgggggctggacagttcggggaggtgtggatggggtactacaacgggcacacgaaggtggcggtgaagagcctgaagcagggcagcatgtccccggacgccttcctggccgaggccaacctcatgaagcagctgcaacaccagcggctggttcggctctacgctgtggtcacccaggagcccatctacatcatcactgaatacatggagaatgggagtctagtggattttctcaagaccccttcaggcatcaagttgaccatcaacaaactcctggacatggcagcccaaattgcagaaggcatggcattcattgaagagcggaattatattcatcgtgaccttcgggctgccaacattctggtgtctgacaccctgagctgcaagattgcagactttggcctagcacgcctcattgaggacaacgagtacacagccagggagggggccaagtttcccattaagtggacagcgccagaagccattaactacgggacattcaccatcaagtcagatgtgtggtcttttgggatcctgctgacggaaattgtcacccacggccgcatcccttacccagggatgaccaacccggaggtgattcagaacctggagcgaggctaccgcatggtgcgccctgacaactgtccagaggagctgtaccaactcatgaggctgtgctggaaggagcgcccagaggaccggcccacctttgactacctgcgcagtgtgctggargactcttcacggcacagagggcagtacagctcagcttgaragcttgagagcctggggtytcccttytytcagctgattggg

SEQ ID NO: 44295 - DNA, 461 bp, Homo Sapiens
cagcctcagccttgagaggccttgagaggccctggggttctccccctttctctccagcctgacttggggagatggagttcttgtgccatagtcacatggcctatgcacatatggactctgcacatgaatcccacccacatgtgacacatatgcaccttgtgtctgtacacgtgtcctgtagttgcgtggactctgcacatgtcttgtacatgtgtagcctgtgcatgtatgtcttggacactgtacaaggtacccctttctggctctcccatttcctgagaccacagagagaggggagaagcctgggattgacagaagcttctgcccacctacttttctttcctcagatcatccagaagttcctcaagggccaggactttatctaatacctctgtgtgctcctccttggtgcctggcctggcacacatcaggagttcaataaatgtctgttgatgactgtg

SEQ ID NO: 44296 - DNA, 707 bp, Homo Sapiens
tcattaattaaaagtggagtcaaaacgctaaatgcaatgttgttgtgtattttcattacacaaacttaatttgtcttgttaaataagtacagtggatcttggagtgggatttcttggtaaattatcttgcacttgaatgtctcatgattacatatgaaatcgctttgacatatctttagacagaaaaaagtagctgagtgagggggaaattatagagctgtgtgactttagggagtaggttgaaccaggtgattacctaaaattccttccagttcaaaggcagataaatctgtaaattattttatcctatctaccatttcttaagaagacattactccaaaataattaaatttaaggctttatcaggtctgcatatagaatcttaaattctaataaagtttcatgttaatgtcataggatttttaaaagagctataggtaatttctgtataatatgtgtatattaaaatgtaattgatttcagttgaaagtattttaaagctgataaatagcattagggttctttgcaatgtggtatctagctgtattatcggttttatttactttaaacatttcgaaaagcttatactggcagcctagaaaaacaaacaattaatgtatctttatgtccctggcacatgaattaactttgtgtggtttactaataatcacagcagagataccagcacgcaaccaaaacacacacgt

SEQ ID NO: 44297 - DNA, 695 bp, Homo Sapiens
  misc_feature (681)..(681): n is a, c, g, or t
  misc_feature (695)..(695): n is a, c, g, or t
aggctcaggtggcgttccaggtgtgtgtgcgccctggctcctacaccccgggacccccttccgctgcccttggagaacctcctgaccctcacttcagtccagccgaacttgagtgggtcactaaggagaagggggccacactcctctgtgccctgctggtacgggtggaatgaggggtgagacaccactactacaagcacagtcgggccgcgggcccatggactctgagtggcgactgcctccacctcattcccgtgactcgtggcatgcgcaggtgctggagcttggcagccgcgcaggagcatgtaggcaggctctcagatgtaggtggcaagtggcacagctccatgtccggaggcccagcactccgtctgatgggaggagccgtgggagcccagctccaggccctggtacccctcttcatgcactgatttggggaacatgactcccttttactcccctaccccacatcacttaatttatttccgtttttgtttctggttactgtgaatcccagaggagtctctccctgtgcccacatgaagctgctttttccggggccaccgggcgggagtggggaagggtgggcgcacggaagatgggggcctctgtacagttgttactgactctgatttctaaggagccaataaacaccgtctcagagcctcaaaaaaaaaaaanaaaaaaaaaaaaan

SEQ ID NO: 44298 - DNA, 984 bp, Homo Sapiens
gagctttgaaagacgattacgtgttagcaaggaaataaggaggaacgggggttacgggcagaggagaaagcacatgccaagtcagcaaagaaaagtagaattcgaaaactttttaaaaatattactaaggattttcacaatgctgcactgggctagaaactgaagctaaaacagatacgtggtccctgctgctatggggcttccgttctagaggcaaggacaggttgtgatgagggttctgaaggatagagaccaagcagggagggtgttgaggaggcttctgcgagacctgaaggatgggaagccaggaagtgggaggggtgggggtccaggctggaggggcccaatgtaggtgtagagggactacagccctgaggggctgctccatgcggcattcttggaggtccaagaggggcagcgccaccttgggccaggctcctctccagcagccttggtatggggtgggggtgggaagacccctgatgcagcctgtcctctgggtgtgggggtggaggagagggctccaggggacccagccagccttgaccctggaggaaagtcaggtgggctcagagagagccctcaaatctgggccctgggtcagggtggggtcaagtccagccttgaagagaatggactctggaatctgacgtctgggtttgaatccagcttcaacactcactggctgtgtgactttgggcaagataacttatcctcttgtccccatgtgtcattggagataaactacccacctaccatattgttgtaccatgctgggcaacccctaactgcttaataaagggagcccactgcctccaaaaaaaaaaaaaatacctcaagggctccttgcccgggggccggacaaacaagtaattgaaaacggaccatggtccctaactggtctccctgaacccagccttttcttgtccacaaaggggggaaacactcccccggcctcccccaaataggggagcccgtgatacc

SEQ ID NO: 44299 - DNA, 410 bp, Homo Sapiens
aaaattttaaaaatctaagcagcttattgtttctctgaaagtgtgtgtagttttactttcctaaggaattaccaagaatatcctttaaaatttaaaaggatggcaagttgcatcagaaagctttattttgagatgtaaaaagattcccaaacgtggttacattagccattcatgtatgtcagaagtgcagaattggggcacttaatggtcaccttgtaacagttttgtgtaactcccagtgatgctgtacacatatttgaagggtctttctcaaagaaatattaagcatgttttgttgctcagtgtttttgtgaattgcttggttgtaattaaattctgagcctgatattgatatggttttaagaagcagttgtaccaagtgaaattattttggagattataataaatat

SEQ ID NO: 44300 - DNA, 620 bp, Homo Sapiens
  misc_feature (594)..(594): n is a, c, g, or t
gtcgccttggccctgggagagctgggctaccgggcagtgaggtgaatgtcattggcattggcaccagtgtggtcacctgcccccaacagccttccctgggtggcgtctataagctggtggccgtggggggccagccacgaatgaagctgaccgaggaccccgagaagcagacgttgcctgggagcaaggctgctttccggctcctgggctctgacgggtctccactcatggacatgctgcagttagcagaagagccagtgccacaggctgggcaggagctgagggtgtggcctccaggggcccaggagccctgcaccgtgaggccagcccaggtggagccactactgcggctctgcctccagcagggacagctgtgtgagccgctcccatccctggcagagtctagagccttggcccagctgtccctgagccgactcagccctgagcacaggcggctgcggagccctgcacagtaccaggtggtgctgtccgagaggctgcaggccctggtgaacagtctgtgtgcggggcagtccccctgagactcggagcggggctgactggaaacaacacgaatcactcacttttccccanaaaaaaaaaaaaaaaaaaaaataggt

SEQ ID NO: 44301 - DNA, 498 bp, Homo Sapiens
gcggccgcatccccgccgcggctcatctcgtcaggcgtgaagccgtgcatgtctccgagctcccgaggccggcgctgacagaaatcccctctctcctggccggtccgcctctctccgctccggcagcggcaattcactctgcacaccaagttagacagcggcacggccaaacaccaactgtcccgggcctgctggtctctgctggcaccgaaacagtggacagtgctgagggccgggacgcagactcgagcgtctcctggagcggggaccccgctcactgtcacatggggacttcagcagttggaccgctacgcctccgcctccctccggccccgggacctgcgcaagcgcgacgcgccccctcccgtcccgcccctttctttctgccgcgcggccccatgggaattgtcgttctctgctgcagagtcaacctgagctccgccctgaccccgcgccatgagggacggaggaactactaatcctagcatgcatagcgcg

SEQ ID NO: 44302 - DNA, 469 bp, Homo Sapiens
gggtccccgctccaggagacgctcgagtctgcgtcccggccctcagcactgtccactgtttcggtgccagcagagaccagcaggcccgggacagttggtgtttggccgtgccgctgtctaacttggtgtgcagagtgaattgccgctgccggagcggagagaggcggagcggccaggagagaggggatttctgtcagcgccggcctcgggagctcggagacatgaacggcttcacgcctgacgagatgagccgcggcggggatgcggccgccgcagtggccgcagtggtcgctgccgcggccgccgccgcctcggcggggaacgggaccggcgcgggcaccggggctgaggtgccgggcgcgggggcggtctcagcggctgggcccccgggggcggccgggccgggccccgggcaactgtgctgcctgcgggaggatggtgagcggtgcggccgggcggcaggcaacgc

SEQ ID NO: 44303 - DNA, 617 bp, Homo Sapiens
agcggctgggcccccgggggcggccgggccgggccccgggcaactgtgctgcctgcgggaggatggtgagcggtgcggccgggcggcaggcaacgccagcttcagcaagaggatccagaatagcatctcccagaagaaggtgaagatcgagctggataagagcgcaaggcatctttacatatgtgattatcataaaaacttaattcagagtgttcgaaacagaagaaagagaaaagggagtgatgatgatggaggtgattcacctgttcaagatattgataccccagaggttgatttataccaattacaagtaaatacacttaggagatacaaaagacacttcaagctaccaaccagaccaggacttaataaagcacaacttgttgagatagttggttgccactttaggtctattccagtgaatgaaaaagacaccttaacatatttcatctactcagtgaagaatgacaagaacaaatcagatctcaaggttgatagtggtgttcactaggagacgtggaattgagactaataacttggatgttaacactgtttactgttttttcacatgtagaaatgttctttgtgtattttttctacagaggattttctctgat

SEQ ID NO: 44304 - DNA, 549 bp, Homo Sapiens
cacgaggggtggcatcacctggtggcatttccagaacctcagccccgattccagcacccaccaccgcctgaccctgtgtaacctgctgtcccgggtcccagagtgcactctgccccgctgctctgctgcctgtcctgggaaagtatctttgccccactaggaaatgtaaacaggagggcttggggagcgtgggcacttttctcatgagcagctactgcggcgttggcaggactcgctgctgctgctgctgcttgtgtaggtcggggagccagagatccccgaggacgcgcgccggacagtcggcactgaccggcccacctggtagcagaggacacccccagccccccaagcattgaagacatagtgtatttcctcgtatcctttctcccttgggtgtagttggggtggggaagcagggaaggctggtgcgatctccattccttgggctccacgtccgagttcatggtgcgccgctgtgctgggagctgcagtggtaatgtgtgggacaccttgaccaaaggggagctttgtctcgtgtgttttgaaaaa

SEQ ID NO: 44305 - DNA, 784 bp, Homo Sapiens
  misc_feature (620)..(620): n is a, c, g, or t
  misc_feature (682)..(682): n is a, c, g, or t
  misc_feature (693)..(693): n is a, c, g, or t
  misc_feature (775)..(775): n is a, c, g, or t
gcacgaggggaatgcagttgcctgtgtgaggacagaaaacaaagaggctgcctcagaccacatgcctatctagagattaagtgaatttgtgagggacattttgtggatgccttaaagatgaccagtggtgggttctgatgggaatatatacactcatctggactaggccaatggaagcagtctctttcagttcacctccgtacagcacaagttgttcctgctcatgacctcattgaggaaaatgagaattgtggtgctggtgactttcatgtgtcttgggaggttgaggtgttcaacatcgttaaggcactcccaaaacgcaaacctccttttttaaatgccaattgtacatctacattaattcatctatgcaaacttgtgttttcatggtttgttttttacactatatttctcattaggttctttaaacatcaggtttaatattgatattatgaataatttttaaaccaaagtattctataagtctgtgtgctttgttttcctggatggtttgaccaaggtaaacatcagtcttgtccttctctcttaataaagtcatccatttgttaagtcagtggtctctgtctcatgtttttgttttgtttctttacagcattcanggacagggaaacttacgagagtcttattataattattattatttacaaaatgaccctaatangtctgtttagntacagtgaaattttttcttactccatttccatacactttctgtaaatatgtataacatgataatgatgcctggtgtattganatcctcata

SEQ ID NO: 44306 - DNA, 495 bp, Homo Sapiens
agaccctcaagctctaacccattttcctccagccctggctacccggatgaagaggttggaggtgggcagccagggtagccagtgaggtcaggaagtctgttgccttaacgtccccttccccacgaacacacacccttctccgctcccaggtctggttggtgagacttgggagtcaggaataagggaaaggggattgtttggtttttgggtttttccctaagcccctcccttttctttcagcctttttccttcccccattatgtcatgacctcacttaagtggaacactatatcataacccagagattcgtcccagccccagagtccgacagactgtctggtccctattcctaatgaggggttgtgttggggcccaggtggagggaggggatttgggggttcagactgcggggaagccagggtctccctcttcaacgccctcctccccctcaacccaccttcccaactgggacattctcaagcttttcacaccgaa

SEQ ID NO: 44307 - DNA, 1039 bp, Homo Sapiens
ccagctcccgtggccacacagctatctggaggctttgcagggagtcgtgggttctcgcacctgctcagccctgtgtcggcttcctgtgtgctcacctaaagctgtggttttgctgtgttcacttcgatttttctggtctgtggagaaactgtgaattggagaaatggagcyctgtggcttcccacccaaaccttctcagtccagctggaggctggagggagacacaggccccacccagcagactgaggggcagaggcacaggtgggagggcagcggagatcagcgtggacaggagcsatgcactttgtagatgctgtggctttgtgttgcgttttgtgtctctgttgcacagatctgttttttcacactgatccgtattcccctgggtgtgcacacagggcgggtgtggggcatttaggccatgctgtgctctacttcattgagtaaaatcgagtgagaggttccgggcagcaggatcgacgcccagtccagccggcagagggaacacacgggtccttcattgtcctgtaaggtgttgaagatgctccctggcggcccccaagcagactagatgggaggaggcgccgctcagcccctcaccctgcatcactgaagagcggcgcctctgcagcaagcagggcttcaggaggtgcccgcyggccacagccagggttttccctaagaagatgttattttgttggggttttgttccccctccatctcgattctcgtacccaactaaaaaaaaaaaaataaagaaaaaatgtgctgcgttctgaaaaataactccttagcttggtctgattgttttcagaccttaaaatataaacttgtttcacaagctttaatccatgtggatttttttttyytagagaacacaaaacataaaaggagcagtyggactgatacctgtttcatagtgccmcagggtattctcacattttcttcatagagatgccttttccaggctagacgacttcaccatgatgatttscttttaggyttattatttmctyytttwgaaactagaagagtgata

SEQ ID NO: 44308 - DNA, 970 bp, Homo Sapiens
gcctacacccctataccccatgatgtgccccatggaacaccccctttctgctgacatcgccatggccacccgtgcagatgaggacggagacacgcctctccatattgctgtggtgcagggtaacctgccagctgtgcaccggctggtcaacctcttccagcaggggggccgggagctcgacatctacaacaacctacggcagacaccgctccacctggctgtgatcaccacattaccgtctgtggtccggctcctggtgacagctggtgccagccccatggcgctggaccgccatggccagacggccgctcacctggcgtgcgagcaccgcagcccgacctgcctgcgagccctgctggacagcgcagctccgggcacgttggacctggaggcccgcaattatgacgggctcaccgccctgcacgtggcagtgaacaccgagtgccaagaaaccgtgcagctcttgctagagcgcggtgccgacatcgacgcagtggacattaagagcggccgctccccgctcatccacgccgtggaaaacaacagccttagcatggtgcagctgctgctgcagcacggcgccaacgtgaacgcggaaatgtactccagcagctcccgcccgaaatcaccggcccggacgcggggatcctctccgctggtgccccacgccgggtccgccgacggtgctagacaacgcgcctcgccgaactagccacacaccaacctgcacgctacagagtggctctgccagaccgcaatggtttatcataccctcaccgcacgggcgaagcgacccctcctgcctgcccgcgccgtcctcacccaccgagaaccaccgagctccagccgcgggagcgagaaaaggcgggggagcgcggcgaaggccgcgagaccgactattagaatctggcagaggtcggtggacgaccataccgcccctacgcatactccgcgcccgctcgctggcgat

SEQ ID NO: 44309 - DNA, 485 bp, Homo Sapiens
tggggtcctccgaggccctggccggccggtgcccccctccccagctccaggaggcagctgaggggaatgggggggcagatcttggactcatgaggaggggcccccctgccctgtggggtcaacccttctggaaactgtgaagatctcactctgccccccccccccatcttcgggaccaggatttgcacagaagcacatgcacctacccatacaccccctcttctgagcacagatgttcccccatctcgctccctcccaggactctgaccccagcattctcaggcaccagtccctgtccggaatgccacccacatcttccatttccatgtcccctcccagagctggtggacccagggaacagccactcccctccactctctaccagataactgaggaggggagaggtgggccgtaacgggcacggatcactgatgtaaattattaagcattttggttggatttcttttgtaataaactatttttgt

SEQ ID NO: 44310 - DNA, 750 bp, Homo Sapiens
  misc_feature (595)..(595): n is a, c, g, or t
  misc_feature (690)..(690): n is a, c, g, or t
cggctgttggatttctatttgtttctctcttcctcttgttttatctgtgtcactcttgtatgtcctcatatctttcatacctcttgtgtagtctctagaagcagaacacctaagtcctgggtctggataatgaaaccctcagtctctggggcctctgaaaataaggaagcattggagctattgccatgttgagtaatgggcttcctagaactattgtcatctatcctgccagtgttttatgttgtagctgtttttctttgacaggtgagttccagctatgttgttagtcatgatcctgccattattttctgtgttctgtaggatgtctccaggctacttaaacatattttatgagtttgcaataaaattgttgaatcttgtatgatcaagtcactcctctgctcagaaatccacagtgacttcttagtaagcccctacattatatgcatacttgtttttttcttaactttactcccacttctacctaacagggacctcaacttaagtctcttcagttcttcaaggcctggccttgttcctgattcctcaaaaaatcttgactctaaggcctattttattgtctgtctctgaatcnctataaagcttcaagtctgtatgacattcttaacgccaaattatatattgtcttgtactgttcctagctggtacatgtatattagtcttgtctcnctcatgagaatgtaagctccttaagggcagggaccatgtcttaatttttgtatcaccaca

SEQ ID NO: 44311 - DNA, 557 bp, Homo Sapiens
gctcaccacgagcgccactgcacacgaaacggtggccacgggagagggcctgcgccaggcgctagtgggccagcctgcctcgctcactgtcactaccaaagacaaggacgggcggttggtgcgcacagcagcgctgagctgcgtgcagagatcaccggcccggacggcacgcgccttccggtgccagtggtggaccacaagaatggcacatatgagctagtgtacacagcgcgcacggaaggcgagctgctcctctcggtgctgctctacggacagccagtgcgcggcagccccttccgcgtgcgtgccctgcgtccgggggacctgccaccttccccggacgatgtgaagcgccgtgtcaagtcccctggcggccccggcagccatgtgcgccagaaggcagtgcgtaggcccagctccatgtacagcacaggcggcaaacgaaaggacaacccaattgaggatgagctcgtcttccgtgttggcagtcgtggaagggagaaaggtgaattcaccaatttacaaggtgtgtccgcagccagcagcggccgcatcgt

SEQ ID NO: 44312 - DNA, 621 bp, Homo Sapiens
gcatcttctcccctgagggcaagttcaagaccaagattggagctggccgcctcatgggccccaagggagtggccgtagaccggaatggacatatcattgtggtcgacaacaagtcttgctgcgtctttaccttccagcccaatggcaaactggttggccgttttgggggccgtggggccactgaccgccactttgcagggccccattttgtggctgtgaacaacaagaatgaaattgtagtaacggacttccataaccattcagtgaaggtcagtgtcttccctccctccgtgaccactgtcccaacatcctttcctcttccacaagactcctctctattttacctcctccttttcccctttgagatcattcactcaaacaatacacatttacacatttatgcatggctgctttgtcccaggcagtatgctagaagctggagatacagtgatgcacaaagcaaatgtattctgtgtcttcttgattatagtctagtagggaagagaaaaaggtaaccaaaaaattacaatatgatgtaatagattctgtgataggaaggggcaggggaactgtgggaagggatacagaagtgtatgattcaggaaagactatatgaggagg

SEQ ID NO: 44313 - DNA, 626 bp, Homo Sapiens
aaagcagaaatggaagtcaagtgtgttataaattgagactgaaaaacatgctttaaaaaatagatttaatttcttacactgtgaatagccattgtattgttttgtttctgataaatcagttgttttgggcccctatttttgaactgttaaaaaattttgatgcttttcgtggataaaagtagtgcctctctttatacaactgatggggttttaaaaagtgtaaattgccttttttgttaaacttattttaaatgctttagtatttaaagggtgtatgttattaattaatctgcatatttgtaacgcaaataactacttcctgatttacatctcaatatattcttctttcatttgcccaatttaaaaaatacgtagtctctattgttgctgtttactaatagttttagatcccaatgtgtattagaattatagctacaaaaagttgcaagtaaaatttagcaatttcctattcaaacaggatctcattagtatgttttttaatgtgtagaattaacactttaaaataaacaggtgtgaaaattataaaggaatatatatgacaattattttctgtacattaatgtctaaacattatacttactttttcataataaaggaaattttgg

SEQ ID NO: 44314 - DNA, 742 bp, Homo Sapiens
  misc_feature (643)..(643): n is a, c, g, or t
  misc_feature (654)..(654): n is a, c, g, or t
  misc_feature (685)..(685): n is a, c, g, or t
  misc_feature (697)..(697): n is a, c, g, or t
  misc_feature (711)..(711): n is a, c, g, or t
acgccagactctaatacgactcactatagggaaagctggtacgcctgcaggtaccggtccggaattcccgggtcgacccacgcgtccgcagaaaagcttgggaaggaagcgctgtctgtgctcacggacagaggcggccggcgccggaggcattccatcctttctgtagggaaaggagcctttatttactattttgtatttatatttgatgaataagtatataaacagagacgtgtacacagatgccaatcacctaccaaaccaaacacgaggaccgccctccctggttctgggggcccctcaaggccaagctcacccctcaagtgctctcacactcgggacctaattcaagtaaaaaccctttctccttcctggggcctcggctcctggagggctggagggtctcgtctgaggacgggaggaggctctcgctggacgtctggcctgtgcgctggtggacggatgcctacgcggttttggaggacccgatgaccaggcgtcctgcgagtccgcccgctggcctgcagcacccacctcggacttggctgtggacggttggtgcaagtgcatcctgcagggctggctgtgcgcagctgtgggctgacctttgcagagttttgtggaatagtttgcaatgtcatanaagtgcaatanaggtacagcagatgtgtgtcggcctcacggngcgggtccctcnaaaaaaaaaaaaanaaaaaaaaaaaaggccggccgtttagaggat

SEQ ID NO: 44315 - DNA, 674 bp, Homo Sapiens
  misc_feature (661)..(661): n is a, c, g, or t
tggcaatctaaatttaaaacctgttagaactcaggacaggcgcttcaatgcgctttttaacaatatttaaggctgttttgatgagtgcgttgtgagaatcatcttaatgaattctttattgagtgtctaaaacatagtataatacacatggtattcttgccactggatagtcttcaataaaagtttaattgatttttttttgttggtctcttaagtaagtcttatttttaactaagcattgacagaatatcttaaaatggtaacctgggggtggcgggtgggtgctgtgtgcacggcagcctagccagtggggatcctgctgtttattataagtagttcacagactctgatggcattttggtaagctttccatctttaagaaattgaaccagcattctcttattaattctttaaactgtggaagtaatttccagttcttacactctgatacgcatcccttttatttaaaaaaaaaaaaaatgctaataaaaggcagtgtacttaaactgtgctttgcaaatattgtgtatgttatgaatgactacagacactgggcaaattatttgtagaatgattatcctttagctagagaaagaaatcattacaactcttttgggcagagatgtttctttttaatgttaatcaaggggaagtgatttanatatgcataaatg

SEQ ID NO: 44316 - DNA, 635 bp, Homo Sapiens
ggggcggtgggcaggcagcgctgggtccagtggtcgggggaaggcgaggattaccctcccggaggcgttgtctgcgactcggcggaggctccaacttccagtggcccggtcgggaaagatctgcctctttctgtaccacccagatcagagcctcctaagaaatatccagaagtcaagccatggatccacctgcacgtaaagaaaaaaccaaagttaaagaatctgtcagcagagttgagaaggccaaacagaaatcagcccagcaggagctgaagcagagacaaagagcagagatctatgccctcaacagagtcatgacagaactggagcagcagcagtttgatgagttctgtaaacagatgcagcctcctggagaatgaggccccaggttcaaaccagatgggatcctgagagctttgagagggtgttgccagttttaagctgagatggcccatttggagccttacagaactagaccagaagacatttgtggataaatctgaactcacttcctgtgtgtaacttctaacttcactggttcctcccatctgaattggccacatgcttgctgaagagacttgttttcttcttctaagacagtggttttgttttttgggtttttttaaaaaaaaaaa

SEQ ID NO: 44317 - DNA, 650 bp, Homo Sapiens
ataaaaccagggtttggatcattttaaaaaaacaaacaaaaataatttattctatcaggtcctccctaatgattccaataaaatgacaagctgaccaaataggccttagaagggagaggtgcctgggcagttacaaggacctaggtagcaggggtgacttggccgcagtcattttctttacttgatttaaggaggttaaattacagtgagagagttgcacttatttagtttgcataccgtactcaactcttagctagcatagggcaggttccttagttgaaaaatttccacaaaacatgatgtaaagtggaaagatcagttcccccaaagaatatcagttaccaaagtaggatgaaaggatgttgggtagatcaaaacaacaaatgtccattacagcaattaacaaaagttagggaatggggaagtctgagtgctaatatggatttcaaaacaactttaaaaatggcttcaaacattttatgctttttgtaatttagtcattttaatattagataaatcttcctgtaactgaaagttcttgagttaaagaaaaatattcggtagttcagctcttccttcaattttattagttgctttttcttttgttcaagtgaaataaacataaaaataattttaaaaaaaaaaaaaaa

SEQ ID NO: 44318 - DNA, 665 bp, Homo Sapiens
cgcgtccgtcacaatccaaaaagtttgatgaaggagaaaattctttgggacagaacagtttttctacaacaaacaatgtttgcaatcagaatcaagaaatagcctcgagacattcatcactaaagcagtgatcgggaaggctctgagggctgttttttttttttgatgttaacagaaaccaatcttagcaccttttcaaggggtttgagtttgttggaaaagcagttaactggggggaaatggacagttatagataaggaatttcctgtacaccagattggaaatggagtgaaacaagccctcccatgccatgtccccgtgggccacgccttatgtaagaatatttccatatttcagtgggcactcccaacctcagcacttgtccgtagggtcacacgcgtgccctgttgctgaatgtatgttgcgtatcccaaggcactgaagaggtggaaaaataatcgtgtcaatctggatgatagagagaaattaacttttccaaatgaatgtcttgccttaaaccctctatttcctaaaatattgttcctaaatggtattttcaagtgtaatattgtgagaacgctactgcagtagttgatgttgtgtgctgtaaaggattttaggaggaatttgaaacaggatatttaagagtgtggatatttttaaaa

SEQ ID NO: 44319 - DNA, 715 bp, Homo Sapiens
ggcactcaaaatgatgcaaccaaaagggaaaaaataaaaatcaaacaaccttcagctttatttttctttaaagccagtcatcatctcttgataaaggagaggttaaagcaaaccagcctcagcggaccactcttctctccaaggaaatccccgggaagagttagcctggatagccttgaaaacaaacaaatcaaacacaacacaagaaaactcaaagaatgtgtatggtatcatgtatctctctgtggtggttcattccacaggacgaatgcatattcaacacactgccttattacataactgatctatttattatcgcatacagatattctaagtcgttgagggaatgacaccatcagacattataagtacttggtcccgtggatgctctttcaatgcagcacccttgccatcccaagcccagtgaccttactcgtataccgtgccactttccaccaactttttccaagtcctttaactcgttgcagtctgtattttccaccttttgtttttccagttccaggacacagattatcaactggggggaccaaatagccaccttgattttcttctttgtggcctttttcctgaaagttgggggcccagtccttggctgtatccatgtaatgatctttggaccatggtagaaaatgcaccaaataagatcatatgaaattgctgtccagccttagtcaataaacttgtaagaactttt

SEQ ID NO: 44320 - DNA, 1099 bp, Homo Sapiens
cggccggcggcgcgtggtgcccgggacctgaacccgcggcgggacatctcctcctggctggcccagtggttccctagaaccccagccaggtccgtggtggccctgaagacccccatcaaggtggagctggtggcagggaaaacctacaggtggtgtgtgtgtggccgcagcaagaagcagcccttctgtgacggctcccacttcttccaacgcactggcctatctccactcaagttcaaggcccaagagacccgcatggtggcactctgtacctgcaaggccactcagaggcccccgtactgcgatggcacccacaggagtgagcgcgtgcagaaggcagaagtgggctccccactctgagggggctgctgctgtccagccacaggtggccttggctccaggcctctgacaggcacccccttctgtgggaaaggaaacaggtgctgagcccaagagactctggtacccactgctggctcatgaaggaagaattattccttataacctaaaagtctccagtctggggcaggcgggagtgggccctggttcaatgtttgctgatggggaagatggcaaaaacaagcctgcccaaccagactggtagtcctgcagtcactgctatgaggcccacgtgctgcctcctgctccagattttaacctctctgtgggctgggggcacctgaccagccacaggagagggcagttcagattcattctgtatggggtcccaagccaggctaaacccagagatgagaggcacccttcccttcttccctccaccccaaagaactacaggctccagaaagtatgcagcatttattacaaagccaagagatacagatgtcccagggcaaaggagggtacagtcacaggacctcagacacaggacaaggtgcaaacacaracaarcccatcagggggctcccaaccccacacacctacgctatgatggaatctcgagtytcgactcccgactcctctyagatytatgcacacttgaaggaawctctggkgggagcgactkccagggtctgtcctwargagkggtcsctgacyctcaagggggggggkggggyraacttmargttttttttttttt

SEQ ID NO: 44321 - DNA, 748 bp, Homo Sapiens
  misc_feature (641)..(641): n is a, c, g, or t
  misc_feature (643)..(643): n is a, c, g, or t
ggtatgtctgaggtgtatggagtttttatttaaaaagtgtgccagtctgaatataagcatttgattttgtaacattggacttttcttaaaagtacagaggttcaaagtataggtatgtccattggcataagaatagagtgggtgagggtctggaccaggttccaggttggtccagtcagatgccagaacaaagaagaacagtcaactaaactggtctacttcaaaaatagtgggcctgtgtgaagagtgagaccacatgtgggtgtgcacacctcttgtccccaggtttccctccctttgagcttttctttccctccctaacttctctggcctattgtcattgttgtttctttaaacttaaggagagaaaaacaaaaatgagattcctacactttgcctaattgagccactaccaggttttctggcagctgtggccacattatttgtgagatgattttttttctttatgttcagagtgacttttgattctgattctttatgttttgtatggagcggcacttttatctgtgttttagcagaactgttcctctgtatcctttacggtttttctttgtttttgtttcctttttaaatatgcatagagtttttttgtgtgtatgaaatttaagcccttattaccntngaaaaaaaaaaaaaaaaaaaaaaaaacatgtcggccgctcggcctcgagagcttctagacattcttggcgcgcgcccatagtagtgactgtctactgtctagaat

SEQ ID NO: 44322 - DNA, 611 bp, Homo Sapiens
attctcacccatttggctaatccaggaatattgttatcccttcccattatattgaagttgagaaatgtgacagaggcatttagagtatggacttttcttttctttttctttttctttttttctttttgagatggagtcacactctccaggctggagtgcagtggcacaatctcggctcactgcaatttccgtctcccaagttcaagcgattctcctgctttagactatggatttctttaaggaatactggtttgcagttttgttttctggactatatcagcagatggtagacagtgtttatgtagatgtgttgttgtttttatcattggattttaacttggcccgagtgaaataatcagatttttgtcattcacactctcccccagttttggaataacttggaagtaaggttcattcccttaagacgatggattctgttgaactatggggtcccacactgcactattaattccacccactgtaagggcaaggacaccattccttctacatataagaaaaaagtctctccccaagggcagcctttgttacttttaaatattttctgttattacaagtgctctaattgtgaacttttaaataaaatactatta

SEQ ID NO: 44323 - DNA, 905 bp, Homo Sapiens
attttatctataaatgcgtatatacatatatatatatatatatacacatacactcacatgcagaatatttacatatatagatattctcttttccttttataaaatcaaagtctaggctcaattggaaaatggaaatattgcaccaaaagaaaaaagtgccattgttgtgatcaatggagtaaagctggggtatagtagaggctggggaagccctgcccatgttctctccaaggccacagcttgcacaccgtgaatggtggccccactggctccatggagtgtgccttcacgcgggggaatgtccttgtccaacacgctgtaatctactccatgggaactgactgtcctgcttttcacaacattgagaaacaggcccagagcctgtctcatgtgccaggtgcagtcacattattgttaaaataaagtggcttctgacaaatcagttcttcaaaatagcatcctatgtacttttcatttcttccaacaaccctcaggcccccttttgccagttttctcccccaggggagattttcaagactactggagaaaaatctgttaataaaacatttgctctgaaaaaaaaaaaaaaaaaaaaaaaaaaaaaaaaacaaattcgatcaaagaaaaacaacaaacgaggagggggcgccgcgcctcaaaagaaaattccccgcgaagggggccaccatcattatcagcgccgccagccgcagatttgtgtgagaaagagggggctcccacctaagggaagggcccggtatcaaacaagagcagccgccgcgggccgtgtctaaaaacgaccagtcagcagggtgcgaaaacagcgtccagtgcgggcgacacccgttgaaaggaaggaacaccccatcctggggggcggagaacaatggggcacaaactgccgg

SEQ ID NO: 44324 - DNA, 599 bp, Homo Sapiens
actagcttgagaggtcttttcatctatttttactccatgggcctctgatatgctgagatgtggcacggttatgattatggtatcaccgttacagaggcaaagggataaaggtctaccagggccaacgtaaccagaatgtgaggagagtgaagagtcggtctccgctttgcacagtaccagaatgtgaggttgccactggagagtggagagtcggtctccactttgcacagttggagctgttctcctctaactcctttgctgggttttctgtttgaaattggcccctactcctctccagccctttactgggttttctgtttgaaattggcccctactcctctccagtgtctgctttttgaatccttctgttcgtgtgtgtgtgtgtgtgtgtgtgtgtgttccctatgatactggcagtggcataattttccacccagagagaagcttgtggtccacaatgctcgaagaatgaatttccaatgtatttgccagtggaaacggagcagaggctatgacaagagtgattagtgttgcactttcagagcattatctactgcagtaataattgaaaatatccaggaagaacaaaaaacaaacaa

SEQ ID NO: 44325 - DNA, 782 bp, Homo Sapiens
ggcactttgctgccaccgctgcattcccagagatcaagcagcccggtgccgtggccagtgaactcagaggtgctggtggacgggctaggactttggggttaggccatggggctctttctctgaaggccactttcctgacgtactctctgtacataactcagcgtccgtgactgcagtaacagccagccctacccagagtatttctgagccatgaggggcccaccagattggttctgaattggattcatgcccagcgcattagcatagtaactcctttcagattttttggagggacgtttggaagtggcttactctcttctgccctctctcctacctccaccttctcagatgagccccatctgagcacatccagctgctccttacccagcatctggagtacaggacatagctctctcctgctaccagtctgtgccttagaggtctgttaggcctgccaaacggcgaccagctcccctggagcgagggcaggccccttccctctctttccccagacacctacttgagactcaccaatttctggcctgttcaggagcctcagataagtatttgtacttgagaccacctcacacaatctgtatgggcccaaccctgatctcaaacctccttccctctgcccaaagctgtccttcctatggcaggaggggtgggggtcccaggacgtgcctcatacatgacttgagcttgtcagtccactgagtttccttctacgagatcaacgcgaggggcctgtatcttgaattaaaacctactcgcttcctttc

SEQ ID NO: 44326 - DNA, 739 bp, Homo Sapiens
atgctagtcgaggcctgggtttaatcggccgagggagagctccgtcgttgcaacctgcagcagttcatccagcagaccggggctgcgctgccaccgcccccacggcctgacaggggccctcctggcactcagggccctctgcctccagccagagaggagtccctcctgggcgctccctctgagtcccatgctggtgcccagcctaggccccgaggtggcccccatgacgcagaactcctggaggtagcagcagctcctgccccagagtggtgtcctctggcagcccagccccaggctctgtgacagcctagtgagggctgcaagaccatcctgcccggaccacagaaggagagttggcggtcacagagggctcctctgccaggcagtgggaagccctgggtttggcctcaggagctgggggtgcagtgggggactgccctagtccttgccaggtcgccagcaccctggagaagcatggggcgtagccagctcggaacttgccaggccccaaaggccacgactgcctgttggggacaggagatgcatggacagtgtgctcaagctgtgggcatgttgcttgcctgcgggagaggtccttcactgtgtgtacacagcaagagcatgtgtgtgccacttcccctaccccaacgtgaaaacctcaataaactgcccgaagcagaaaaaaaaaaaaaaaaaaaaaaaaaaaaaaaaaaaacaccgggggaaaaaaaaagggaga

SEQ ID NO: 44327 - DNA, 596 bp, Homo Sapiens
agaaccacagctcacagtgaggacagggaagctcgggaaggggaagggagactggccctgcccagccggtctctagcccctcagcccccgctgggcactctctgtcccatccctctaggacagggaagctggcctggtccaggcactgatggtgcttggattccagcctaaggaaggctggccgtggtccaggagttaagggcttgggtctggggtttaagtggccacccatccaggccctggccagtgtgggaccgggacgggaaggaagaaggaggctaggagcagggggaaaaggtgcacttggccagtggcgcctgccaggagtgagtccatgcgttgtctgcccacccctaccacagtgtttgtgccttcagctgagggggcagcctctgggccctgaacccctgctggggctccacgaccctgagagaaggggtgagaagaatcatctctgcacctcgggtctctgccagaggaagacttaggcatccctgcgacctcacattctagacagagatgaggtccaggggttggcccctgctgccttctcacaatttgcaatagatgtaaataggacctttccagcacactgg

SEQ ID NO: 44328 - DNA, 875 bp, Homo Sapiens
  misc_feature (790)..(790): n is a, c, g, or t
ccctctctccctttctggtgtcttaaatcaagaactagtttgaagccaaggcaaagcaaggtttgttcatcttcctttcctgtcatttaagggaaaacaggcaatgaactcgctcttcaaataccatagttcaagagtagctgttggccctggttccagattaatatagcagcaggcagattgccccttcttggggccaccaccctccaaagctgtgccaccaatgagagcattgggttcaagtttgcatcaaacatggtattaccaacgctgagcctccagcagagcacttaaaagtcctagtgagagaatagatactatgcaagggaaaaaaaatttaaatgccaacgaatagttttttttttttgaacctgatatactgtttgtttactctcaactctttgtacaaatattattgtcctaagggccttttcccctcctgcctagaaaataggttgtgtattggttttattcaacctgctgtctgctttaggattggagaaggtacctggatccttgtggactgccactgctggctgcctcctctccaactcatcagaagagcattttgacaaagacagaggacttggaccagggcatgccctgttggggatgtttctgtcagcaaggacatggcatggaatcaagtgggctgatgtgttgttatttaaacagtaccaaagtgcattcttcaatgtatggttgcctgcttgaagcaaggcccaagttgagaatacagtaaaggaaaactcctgaaagtggggacccttcccccccgaccccccgcccncttttcaccctccagggatccattgccggggtggcgggaaaaaaagaggaaatggaaatggggcccctggggccctaagccggtc

SEQ ID NO: 44329 - DNA, 502 bp, Homo Sapiens
gctagccctgtttcttgctacggtcctctatattgtgaaaaagcggctctttccatttttgtgagatcccaaaggtgccagttctggccctttcagctcctgtttcaggatctgtcctggttcctgagctctaggctgctaagctgagccacacacccctccgtttgcaccagttgcctgcaggttggatggaacacagtgccccacttttctgcaagtagctggcttgtaaagggtgaacagagccatgggaggaaggtctggcattgggatgccgccctggggacatacgaaccgcctccttccaccattgtgcactatgggaggccgctgctgcgtggagcacttaaagtccagcctccaggaccggatgcccctcctgtctcccgctcccatcgtgcccttaaatgccagatctggtggagggaagagagaagaggtaggaagaaaggtgatgaaaactcctggtcattccttgaataaacttgattttatttaatag

SEQ ID NO: 44330 - DNA, 597 bp, Homo Sapiens
ggaaggggctatttcaagacagaaaacaaaggaaatacctgccttttgaataagatcccgcttttgagtcttacctatgactttaccagggtagattagaaatacacatcctcctgctgaccctctgccttcaatagctatctatcttaaaagctgaagtttgaactgcagcatctgcttgacagatgccaggttccttcggcagggggacgatcactctatatatcttccgttgcctcagattcctgtggcccaaggatcccaccaatcctcgttccccctaaacatgctaacaaaaatcccttatcgtgggtattaaaataataacagttacactgtatgcatatttatgtgctccttttgtctggtttttcttttcatcatgtataagctgaattcagcattagtttctcacatcttcccccaggtatccccaacagaatttttatgtcccagcttgtattaaatagaagtgaaatattaaggaaaataaggaacttgtgcaactttttttatgcattgttctcaaccatttaatttattgaaaggagatgctgcaacagttcttgatttagcaacagttattctcttgtttac

SEQ ID NO: 44331 - DNA, 692 bp, Homo Sapiens
cggacgcgtgggtcgacccacgcgtccgggcgagagtcttggactctgtcttggacttccagcctccagactgtgagaaacaaatttctgtgtttcagcttctcagtctctggtgtttgttattgcagcctgagaacacagctgtacgattatttgtcaaacagaaaacactgatacttaacaatgctaatgcaattatttatttgcttttcagtctctacaaaacgttctaaaacactaatctaaatattaacagtaaaatatttgcataactaatggaaactaagaaatcatatgaccaatatttcacttattggtaatcttactctactgatttccccccagactgtgatttttgaacttccttgcctttctcctgtctttctgtgtttattcatggaattccagttatctgggcttgaaattgcaggctctcctaacttaagcaaaatctgacagatcagcaaaatgagataaatgtttcttttttctttctgactgcattaaatcagatacaactcagcattaaaaagctatctttgtaaatgttgttactaataaattagtcttataagatccctggacttggagtgttgcaatgtctttgagagtaattctttaaaagtctaatttcgactggttgtatctctttatgatttattgccccataacaacatttgaaacatataatt

SEQ ID NO: 44332 - DNA, 486 bp, Homo Sapiens
cacgcgtccgggccttcacccagagctcacaccttattgggcaccagagaacccacaataggacaaagcgaaagaagaaacagcctacctcatagctctcaagccagttgaagaaaccttgccttttcagcttgaccctgcaatataacatgcacaggcctgcttgtgaatcaggactgaatgtgaaagggaagtattgagtgaggacattcccaaaaccaaaggacaactgaggagactgcccagcacataatgaataaataagaaaatgagtgaggagttattaacatcatttggaaaaaagatttcccattcacttgatattgtttgttcactcatttagtcattaaaagtgagattaataaaatctgaaaatgttatataataactttaaaaagccaggtaattaataatctgcactgatattacatccacagtaccacagtatttatgtgtatgaattaaggattaaaagataatgtggat

SEQ ID NO: 44333 - DNA, 595 bp, Homo Sapiens
gtccggaaagattagccaaagagttaattttcattccaaatcacttagctgttagactgatctgtttgtagcagttgtttgtctcatttttgctctgtgcattttttgagacatttgttgagaatattctatttggtgctctactgtatttttctttttaatatctacttgatatcttgttctttaaattttcttcacatatggtttgcctgatacaactgatttttataactgaaatttaaggaatctaacagctaaaactcagtaagtgcatatatttccttataacatagacccgttgctactctcagcaccctctcctcaattttttttcctgtagcatgtgatgcctgattaaactcattttcatttgcttttatttctaatatgggaacaatgagagtgaactctaaatataggttgtagtaataaaacatcattagcctaattattagaaaatgctaattaagtaccagcacatagaaacatgaaattgcttagtcattgtacctttgtcagcaattttgacagtcattaatgtttgtcataattttaaataaagtgtctgggtttcagaataccttcaaaaaagaaa

SEQ ID NO: 44334 - DNA, 791 bp, Homo Sapiens
  misc_feature (692)..(692): n is a, c, g, or t
ggtccctcacatacaagatggtgatgtaccactcccgagaatattcccatctgtattttgtgctgatgttcctgcatccagttgttctcggtcatacttttgaccacttgtgactggagttcagtggccctggcaggcttgtcctgctcttgaccattccactgactaactttggtgttttgtttccaagttaagtgattcctccttttttttgttcaatgttaaatttaaaaataacaatgtgtatgggtcctcccatgtgtaatatggtaacatgtaacttgcagtgtttgccagctttcaaagcaggctttgtgaaaatgtaatacaaacagcagtgaatgggactcaaatgttgtgcttcctataaacagctccgctctttcagggaaggatggtaacaaactagaaggacaaatatgtacgtatttataacgtattaaaactcttttaagtagcttaaggtattgtgcaatggcctagcctagtagaaatgggggaaaagcattgctgtggaccattgttaaagtgacaggagttgtagggttaccccctttgacaaacttccatagtcttcagacacgcacattgatggcatccctacagtcttcttcacttgaactttgtaaaactgcatatggacctggaatccactttttgatatttccttaataaaggcgttggaaaccctncccagccattttccacgccgactcgagtacccttgtccggccccccttcgggtctttcgaaaaaagcttttcctaaacaccattcgctttgggccgccc

SEQ ID NO: 44335 - DNA, 653 bp, Homo Sapiens
ggccttgctgtgagccccaaccctggcgacaagcccatgacccagcgggccctgaccgtgttgatggtggtgagcggcgcggtgctggtgtacttcgtggtcaggacggtcaggatgagaagaagaaaccgaaagactaggagatatggagttttggacactaacatagaaaatatggaattgacacctttagaacaggatgatgaggatgatgacaacacgttgtttgatgccaatcatcctcgaagataagaatgtgccttttgatgaaagaactttatctttctacaatgaagagtggaatttctatgtttaaggaataagaagccactatatcaatgttgggggggtatttaagttacatatattttaacaacctttaatttgctgttgcaataaataccgtatccttttattatatctttatatgtatagaagtactctgttaatgggctcagagatgttggggataaagtatactgtaataatttatctgtttgaaaattactataaaacggtgttttctgatcggtttttgtttcctgcttaccatatgattgtaaattgttttatgtattaatcagttaatgctaattatttttgctgatgtcatatgttaaagagctataaattccaacaaccaactggtgtgt

SEQ ID NO: 44336 - DNA, 878 bp, Homo Sapiens
  misc_feature (761)..(761): n is a, c, g, or t
  misc_feature (796)..(796): n is a, c, g, or t
tctagcgaggtgacagcgtagaaccagatatttattttttgccattttatgtcttaatggtatcctactgagcatttgcacctctgttcatttcacacagtgaaacgcaattttacctagtttgcactatatgatcagtgttactgcctataatcttatacaacagcaaaccctgatgtgacattccatgacgacatacatgctacttttttttagttcaatacagtgaaggtctttgttatgacagtggatattgcttttattattattattgctgaagtggttgcattctactagcaggcaatgctgtacttttcttcagtcctcctctcctttttattttaggcactgttcaatactgtatgccttctgtattttaatggagtggatagcattgttttcttttacagactagcaggctactgggacctaaaaaggtctgttaatgtcatggccttgaaacagttccatttatgctggttaagagatcccttaagaagttagaaggcttaagaactgcttcatgtgaacatcccttattagttacaaagttatattcacagttttttaaaaatgtgtcaaaataaaggataactctgtattacagctttcacagtagctatgtggacaatgtgttatttccattttgactctctaaaatagctacatccctaaatcagggctatcttttacaatagcaagatagcaatattatatacaactcagttatgagaacctttagttattctccattaatgctntcttagttttgtataccataccttcacagttaggntagaagaatgaaaaacttcctggcaggttgggtaaattttgaaaacctaagtcttctaaaaaatttccccaattacctccca

SEQ ID NO: 44337 - DNA, 600 bp, Homo Sapiens
ggacgcgtgggccggcacctcacataactttttgagattcttgatgtcatttttatccttcctgtcaaccagcaatgtatttttatgttactaaaaccagtaacgtcataattgttgagggcaagcttcattgttgatagtgcaaagtgtcgctgttgtgatgtgtgtttattttattcaagtttgaatattgacaagtgtaacttaagctggtgactgacacctattgatctgctgtgtgcaaatgatagtactattttttagaaaactcttaagtaaattttaaaaatatttgaatacaaaatatctgagcaattttgaactcaaaagtttttcattgttttaaggattgccacaggactctttaatgggtttttaatgggacatacatgcctaatatttattggtgtgtttaaaatattttttgatagagtgttatgtcttaagcgcattagaaaacaatgtgttgtaatggaatcaaagtgtttccctggacagtttgatgtgcttatggttgagatttataatctgcttgtacttggctttttaacttattaactgtaaataaacttttagagaataacaaagaacaacgaaaag

SEQ ID NO: 44338 - DNA, 731 bp, Homo Sapiens
cgaggcacagaattcggcacgagcggcacgagcaagaagaacaaaccccgctgcgtctgcgccccggattgttccaacatcacctggaagggtccagtctgcgggctggatgggaaaacctaccgcaatgaatgtgcactcctaaaggcaagatgtaaagagcagccagaactggaagtccagtaccaaggcagatgtaaaaagacttgtcgggatgttttctgtccaggcagctccacatgtgtggtggaccagaccaataatgcctactgtgtgacctgtaatcggatttgcccagagcctgcttcctctgagcaatatctctgtgggaatgatggagtcacctactccagtgcctgccacctgagaaaggctacctgcctgctgggcagatctattggattagcctatgagggaaagtgtatcaaagcaaagtcctgtgaagatatccagtgcactggtgggaaaaaatgtttatgggatttcaaggttgggagaggccggtgttccctctgtgatgagctgtgccctgacagtaagtcggatgagcctgtctgtgccagtgacaatgccacttatgccagcgagtgtgccatgaaggaagctgcctgctcctcaggtgtgctactggaagtaaagcactccggatcttgcaactccatttcggaagacaccgaggaagaggaggaagatgaagaccaggactacagctttcctatatcttctattct

SEQ ID NO: 44339 - DNA, 515 bp, Homo Sapiens
ttttttttttttttttttggtgttaaattactcatgtttatttataacagactttcagccagtacagtacaaaacttacagtagtatatctccgttacacaaatatttacttacaatatattacatatacaaaatgctttgcaataagtctcaaaagctagtttaactccccttgagaaaggagaaaaactctttaaaaaagggggggaggggaatcagaagaagagaggaggaggtgaaggggtaaaggtcaaaagagacaccaaacataggctacaaaggaaaccctaggagagagggagaagagaggtggtattgcacttgcttctgtgtttattttttctttttgttcttcataacttctgattaaaaatatatatatatatgtatatatatatattatgtacacaaggaaagaagctgccagaagtattacaaaatcctatctgcagcttggacactgacacaaaaaaacaaaggtctggaaaagtgtctacttataaatattttgttgg

SEQ ID NO: 44340 - DNA, 578 bp, Homo Sapiens
gtatttttataatgtctcttttaaagtctttgtcagataattccactgtgcatgttattcagtgtttggtgtccactgagttgtcatttgccagacaagtggagatttttgcagctcatccttgtattctcagtagttccgatatgtaccctcgacatgtgaatgttatcttatgagactctgtgttatttgtattcaacagaagatgtttattatttatttggctttctgtgaactgaggtcttaatatcagctcattttaaaagtctttgcagtggtattcggatctatcctgtgtgtgcctatgagattgggtgcagtgtatcctgttagctccattctcagggcgtttgaatgtgaattaggaccagcgcaatgaatgctcaagttggggttgggcgttagaattcatgtctttatatgctcagattctgcagcttcatcctcttcatgattgtgatcgtaaggacagtggaattttgcagttgtctataccttatcttgaagtagaactaaattggtacatttgaagaatgtactctataaattacagatatatagatttatttgaggtgctt

SEQ ID NO: 44341 - DNA, 1053 bp, Homo Sapiens
ggtccggaattcccgggatttttccctgggattctggacttcagagtaggacagcaggctgggaagatgctgagttccatcaagtgcgtgttggtgggcgactctgctgtggggaaaacctctctgttggtgcgcttcacctccgagaccttcccggaggcctacaagcccacagtgtacgagaacacaggggtggacgtcttcatggatggcatccagatcagcctgggcctctgggacacagccggcaatgacgccttcagaagcatccggcccctgtcctaccagcaggcagacgtggtgctgatgtgctactctgtggccaaccataactcattcctgaacttgaagaacaagtggattggtgaaattaggagcaacttgccctgtacccctgtgctggtggtggccacccagactgaccagcgggagatggggccccacagggcctcctgcgtcaatgccatggaagggaagaaactggcccaggatgtcagagccaagggctacctggagtgctcagcccttagcaatcggggagtacagcaggtgtttgagtgcgccgtccgaactgccgtcaaccaggccaggagacgaaacagaaggaggctcttctccatcaatgagtgcaagatcttctaaaccccaagagacttcacacaacacttatgtatgcaccccaaagactaatggggagagggagggccgggaagcctagaaagcttggtggtttctctgggtacccccaagcagcgtctccttttggatacagttattgatgaggcttggccactggatgttttcactaactacactctacaagtgaactccttgcccaggccagttagaaaatcccttgggggaactggtgatgaataattccatctttggattaaaaaagtgaaaatagtctcccataatttttgggaccaatgaagttgagtttttttccaaggaattcccatattttaaaggaccccctttttatttttacctaaataacccaaaaaggaattgtgccttttggggaaaaataattttaaggtttctcct

SEQ ID NO: 44342 - DNA, 730 bp, Homo Sapiens
cacttctcggtcatctggggatacacttcctcgactgaacagagtatggaaacaatttacaatagcatctgaagagagagtacatagattggaaatggctattgcatttcactcaaatgctgaaaagattttgcaggactgtccagaagagcctgaagctattaatgatgaggagcaatttgatgaaattgaagcagttgggaaatcacttttggatagattaactgttccagtagtttatcctgatggaaccgaacaatattttgggagtccaagtgacatggcttctactgcagaaaacatcagagacaggatgaaactagttaatctcaaaaggcagcagctgagacatcctgaaatggtgaccacagagagctaatagctaccagctacctacagatttgcagttcataatcccgcatgttgtcaacatactacagcattagccaccacaccttaagatgcatttcacagccaaaataagtctcatttcttttcatgacacatttctctttacatgttaacaccttgctactaccaaggcataattacttaacatgcttcgaggctgtagattccaagtatcttaaaagaaggaactataaacattgcactgaaaacttgctttaaagctttacctgacctgtcagtttgtagacaaacaactgataataagctttgaatggtgctaataagagtaggaattctctctattaaaaaaaaaaaaaaa

SEQ ID NO: 44343 - DNA, 640 bp, Homo Sapiens
gggtccacaccggggagcggcccttccactgtgaccagtgcagctacagctgcaagcgcaaggacaatctcaacctgcacaagaagctgaagcacgccccacgccagaccttcagctgcgaagagtgcctgttcaagaccacacaccctttcgtcttcagccgccacgtcaagaagcaccagagtggggactgccccgaggaggacaagaagggcctgtgtccagcccccaaggaaccggccggcccgggggccccgctcctggtggtcgggagctcccggaatctcctgtctcccctgtcagttatgtctgcctcccaggctctgcagaccgtggccctgtcggcagcccacggcagcagctcagagcccaacctggcactcaaggctttggccttcaacggctcccctttgcgctttgacaagtaccggaactcagattttgcccatctcattcccttgacaatgttataccccaagaaccacttggatctcacattccaccctccccgacctcagactgcgcctcccagcatcccctcacccaaacactccttcctggcctatctcggactgagagaaagagcagagactgtctgagggcagccatgttctgtaccaaaaacagagagacaaaagac

SEQ ID NO: 44344 - DNA, 686 bp, Homo Sapiens
  misc_feature (550)..(550): n is a, c, g, or t
  misc_feature (620)..(620): n is a, c, g, or t
  misc_feature (647)..(647): n is a, c, g, or t
  misc_feature (662)..(662): n is a, c, g, or t
  misc_feature (685)..(685): n is a, c, g, or t
acaagcacagtgtggccttgatcttcgaccatcaccgtggtggagctggtgggtgtgttcccgactctcattggcaggataggagcaaagattatgcctccagccctagcgctgcagctcaggctgttgctgcgaatcccactctactccttcagtatggtgctagtggataagcatggcatggacaaagagcgctatgtctccctggtgatgcctgtggccctgttcaacctgattgacacttttcccttgagaaaagaagagatggtcctacaagccgaaatgagccagacctgtaacacctgacatgatggttcctctcttggcaattcctcttcattgtctacatagtgacatgcacacgggaaagccttaaaaatatccttgatgtacagattttatttgtaattttaaaagtctattttattatgagctttctttgcacttaaaaattagcatgctgctttttgtacttggaagtgtttcaaaaaattatatgaccatatttactctttctaactttctttactccatcatggctggttgattntgtagagaaattagaacccataaccatacacaggctatcaacatgttattcaatgtgacacctaactctnttctattttgttttttaagtaagactntcattaataaaacanaatgttttggagcaaaaaaaaana

SEQ ID NO: 44345 - DNA, 697 bp, Homo Sapiens
tttttttttttttttttttttttttttttagatttaaaagcatttaatgacatagcatatatttaacagatagggcaaaagttgagaggtacaggtcgtacgactgagcaccaggcctgagcgaccacctccctgttcaggcccagcctctggagttcattcctatcaatgtcattttgattgtgcagtaagatgaaaatttgtcattacaatagttacagtgacagagaaatgcacactatgtatcaaatagcaaggaaatgaagcaaattataacacagtgtggcaacgcacgagcaagtaaccattagagtaacattactttgtccagtaaatgcttcagttccaccacttgtacacttaccaatgatttaaagggtttattatacatctagttttattatactttgtactagaattatctcaaacgtacaatataatgtatttcagcaaaaaaaaaaaaaattgaaattacagattatttaaaacagtatcagttttctattccttcttgtataccgacattcttaaccgtcatagcagttgatgcaaaaaagccgcatgtcgtgtgttagtaagtgatgccagatacaaatggtttggtctgtagagttaatgtggagctgcactgtggctgcagcaagatcataatatgcgatctgtttaataaaggttagccccatctcgggcacttcta

SEQ ID NO: 44346 - DNA, 585 bp, Homo Sapiens
  misc_feature (563)..(563): n is a, c, g, or t
cctgaaaagacaatattctctctaaagcaataaggggtgacgggccggggggagtgtttgctgctgctggcccccagctccccttccctcttgccaggtgtgggggagactcctgttgtgactgaatgtaacccccccacccctgccgcagccaatgcaggggaagggggacactcttcctgtctcttctccccagctaaagagactttggacttagggggcccatgagcctggagaggccttaaccctgtgaggaagtatagggggagccctctcccacccccatccccttctgagagtggtcaatgtttacaagcccctgagcccccctgcccagggactcagaccctgttgctgtccttccccggccccggtcttcctgggccctcgctgctcccctgcccttcctggggttggggtgggtgcaggggtcaccgtgttccctgtctgccttgtacccacagtctccccgccccctctccaccctgtgtgacttccctctcttttacctgctcctgtaaatactcccttctcccaataaaacttggtgtgtgttctcccanaaaaaaaaaaaaaaaaacgcgg

SEQ ID NO: 44347 - DNA, 902 bp, Homo Sapiens
ctgaatgtaaaggagtaatggaaataaaggaagcatcatctgtgtctgactttaatcaaaatttggaggtcccaaacagaattatcgaaatagcaaataaaactcccaagatcagtcaactttacaagcaagcatctggaacaatggtgtatgggttgtttatgttacaaaagaaaagcgtacacaagaagaacacaatttatgaaatacaggataatacaggatccatggatgtagtggggagtggaaaatggcacaatatcaagtgtgagaaaggagataaacttcgactcttctgccttcaactgagaacagttgaccgcaagctgaaactggtgtgtggaagtcacagcttcatcaaggtcatcaaggccaagaaaaacaaggaaggaccaatgaatgttaattgaaatatgaaagctgaaatgcaacaaacaacttccgcttaaaacaattaagttgttaataactgtgattttgtaaatttcagtaattcatttaaatgatgtttcagtagatatattctagcatattaagagcttttataactgagttatagattagtttgctttctggaataaaattttcttcttatactcaaaaaaaaaaaaaaagaaaaaaaaaagaaaaaaaggaaaaaaaaaaaaaaaaaaaaaaaaaaagaaaaaaaagaagggggggggggcataaaagaagaaccacgaaggggagcacaaaaaataggcaagaccaagcagatcagtgaaaaaaaagagggccaaataaaagaggcgcgcaaaaataagaaaaagaagcagaggcagtaaaaacaacgaaggaagagaaaaaaagaagaaagaaggaaaacgtggagagggaaaccacaacacagggaggggaaaaaaaacgggcagacaaaaact

SEQ ID NO: 44348 - DNA, 684 bp, Homo Sapiens
  misc_feature (653)..(653): n is a, c, g, or t
ggaaagaacattttaagcaatgtcatttctagatgggtttctaattctgcagagacacccgtttcagccacatctaaaagagcacagtttatgtggtgcggaattaaacttccccatcctgcagattatgtggaaatacccaaagataatagtgcatagctcctttcagcctctagccttcactcctgggctccaaaagctatcccagttgcctgtttttcaaatgaggttcaaggtgctgctttgcatgcctgccaacccatggaagttgtttcttacttcttttctctcttatttattaaccatggtctgagagttgtttttgttctatgtaacagtattgccacaaaactataggcaaatcgtgtttgcagggagatttctgatgcctctgtgggtgtgtgtaagttaaagtggccacatttaagaaggccaagctttgtagtggttgcacagtcacactgatatgctgatttgctctttctcattgtatgtctatgctttgtcatcagtgctatagtaaattacaaagaaataggtagattgtatgaacatacccacaaatgcctatgatttaggttaccaatgtattctttctcatttggggttttgcttctgtctgtctgtttattggaaacttgtacttcaagtanggggaatcctaattctaatacctccttaggt

SEQ ID NO: 44349 - DNA, 690 bp, Homo Sapiens
tgtagagttgcccacaaacaaagatgtgtgtgatccaggaaacaccaaagtcatggataagtatacatttgaactaagcagaaggactcatcttccggaagtattcctcagtaaggtacttgagccaaccctaaaaagccttggtgaatgctgtgatgttgaagactcaactacctgttttaatgctaagggccctctactaaagaaggaactatcttctttcattgacaagggacaagaactatgtgcagattattcagaaaatacatttactgagtacaagaaaaaactggcagagcgactaaaagcaaaattgcctgatgccacacccaaggaactggcaaagctggttaacaagcgctcagactttgcctccaactgctgttccataaactcacctcctctttactgtgattcagagattgatgctgaattgaagaatatcctgtagtcctgaagcatgtttattaactttgaccagagttggagccacccaggggaatgatctctgatgacctaacctaagcaaaaccactgagcttctgggaagacaactaggatactttctactttttctagctacaatatcttcatacaatgacaagtatgatgattttgctatcaaaatcacattcgacatatcatgcaaaccacaagaaacacacagacagcaacgcaacaaaaacaaca

SEQ ID NO: 44350 - DNA, 917 bp, Homo Sapiens
  misc_feature (728)..(728): n is a, c, g, or t
  misc_feature (762)..(762): n is a, c, g, or t
  misc_feature (845)..(845): n is a, c, g, or t
  misc_feature (859)..(859): n is a, c, g, or t
  misc_feature (865)..(865): n is a, c, g, or t
tttaagtatttagtatgtacaggttctctgtgttaaccagctgagaagtaagcaaccttttctgactgcatatggtgtattcctcttttgagtccccataatattttataaattgtaatgccccatcttgtactacagttgtcttattcgtattgtttataaactttgagggttaggactgggtcttactcatctttatgtgccttccttatgcttcaaagaatttaccatctaatggaagagaacatttgcaagttggctccataccaagctccttccacatactctactcatctgaactttgaatgcagaatctttaaattgcaaccccacatactaaggtcaagaaagaacttaatgggaattaatctccacccattagctttaccctgacatcaggattgccaaatccaatggactcttgtctattcttacgtgacttctgctggaaaatgcgaatgttgaccatcctgccacttggaactctcttcccactcctcacattgcttttgctaccactggaagttccttctgtttcttgtggagtaccttttgctgtctgggacttgtagataatggtgtttcctagggctccctccagggccctctgcctcactaactggatatacttttcctgagcaaatcccaggaaacttgcgtcagaccgtgacttcaaatacaggttgataaatgctaaactgtctccaaccagacttcatcctagcctncacacccagacacccaactgctatggatcaactntttagaatatcctcacttcaaactgaccttacctaaaataatgacttttttcccccattaattgccccctgctatattccttnatttctgaaatggnaccctnctagctttataagataattctgagaagcttaactgaaaatgcctgattctga

SEQ ID NO: 44351 - DNA, 606 bp, Homo Sapiens
tttctctgttccccatgattctcctataaggtaactctttagtcctccatttagcacattttaaatcctccaaagaataagtatcatgtgattattttagctttacaaaaaaaaagttgaatggcgttttattttcatggcctataagcaggtaccttagtagggcagatataggaaaaacaaattagagcaaaacaaatcctctacaaatccaaggcaggaaaagtggtggcagagtgactcattctcctgtccctcccatcaggtcaaatcaggaggctgcagtgaatgcctgttctttgaatgtgtagcagttgttcctgtaactctttaaaacttggctataggctgtttagcacagtacagattaaagatacagttacgtaaacagcaaagtaattttatagtgcttcatccatttatcatgctttggtttgctaattttttcacatacctttttctatcacagtctgttgcttttgtacacatttctcatattggggttcgacaggtaaacacaaactgctatttcagtagaaaaagttattgttatgaatattaaacccaataaattgtataaaggtaaatatcaaaaaaaaaaaaaaa

SEQ ID NO: 44352 - DNA, 1058 bp, Homo Sapiens
  misc_feature (667)..(667): n is a, c, g, or t
  misc_feature (955)..(955): n is a, c, g, or t
  misc_feature (966)..(966): n is a, c, g, or t
  misc_feature (993)..(993): n is a, c, g, or t
ctactgagtggcaacacaaagcttttgcagcccaggaagacttggaaaagaccaaagaagagttaaaaactgtgatgtctgccccccctccacctccaccaccaccagtcattcctccaacagaaaacgaacatgatgaacacgatgagaataatgctgaagctagtgctgaattatcaaatgaaggggtaatgaaccatagaagcgaggaagaacgtgtaaccgaaacacagaaaaatgagcgtgttaagaagcaacttcaggcattaagttcagaattagcccaagccagagatgaaaccaagaaaacacaaaatgatgttcttcatgctgagaatgttaaagcaggccgtgataagtacaagactctgcgacagattcgacaaggcaatacaaagcagcgtatcgatgagtttgaagcaatgtgagagctgctattttgcatatatgttcttcataagctgaaccaccaacagagaaaagcaggcctttgcagatatgatgcaatgcatcccaccttgccaaagcacttacaccagtttgactgtgctagctaaaagacaaatttaaggggagctcttcaacattaaggcagcatgatatcatgcttggcctttcttttttcttttgccccacccaatggagaatggcgctccattgcctcttntcacattttttttctttttcttttttttttctgccgcagattaaccctacttatcccccctgacaaatgcccatgcgaggacaccacacctgcgcaccttctaccagataatgccgcaaccttctaaggcccctcccctggccctttcactatttacccctatttcccaatcatctcctcgatccaattttaagcaaaagaagacttcatcttatctgccctgccccctaccccctacattccgcgcggcgtaccggatccggccaccgcctcacaatggatgggaanccacccccggnggcacgggacctctgaattcttatgancacaaaatgcgcccatgcccaccccccccacccaccattcccaccctcccacacacagccctgcc

SEQ ID NO: 44353 - DNA, 689 bp, Homo Sapiens
ataaattataacattgaatgggcaacggagctctaatattgatgttctcactttctgatttaatttttataaatgtttttgtaagtaactaattgtagtattgcttttaaatagttttaaaatctatctcaaataagttctgcccagacctatttccttaggacagtattctaaagggggggggtccagtgtgagcttgaaatactcctagatcccgtcagtgatttttatatataccaatacacaagcaaattattaatataccaaaaacctaatttctgcattgcattaataaaatacttgttattttgcctttatccaattcagttgattaggtgaaatagaaaattaatcttttcaaatgtgcatatgatcataatttttcaaaatgttactgtggtcatttttggtgcatgatgccaagtttatctttagttagccattgccacctgatatgtaatgacaaatgttttactatctgatcattgggttgtagattaaactattttttttctctgtagattctcactacattttcaaatatgtacttggaaaaagctgcaaagtgctacctataagcaaattagtaactttggccttatctatgcatagcgttcgctcagtttggttttgataaattgattgacttgcagttcctttgtagtattttaacttattgtgatgtaatg

SEQ ID NO: 44354 - DNA, 500 bp, Homo Sapiens
gaggccaaggtgggcagatcacaaggtaaggagttcgagaccagcctgaccaacttagtgaaaaccgtctctactaaaaataccaaaaaaaaacacacttttcgaggacttctgcgggagttgcgctacctgagcgcggccaccggccgaccctatcgcgacaccgcggcctatcggtaccttgtgaaggctttccgtgcacatcgggtcaccagtgaaaagttgtgcagagcccaacatgagcttcatttccaagctgccacctatctctgcctcctgcgtagcatccggaaacatgtggccctacatcaggaatttcatggcaagggtgagcgctcggtggaggagtctgctggcttggtgggtctcaagttgccccatcagcctggagggaagggctgggagccatgaacatggagaatatccttggatgctgcattcataggagaattgaataatttctatcaatatgtatttatcattaaattttttttaagttt

SEQ ID NO: 44355 - DNA, 506 bp, Homo Sapiens
gttcggccattatggccgggggccggaggaggggttttcagggtcgtaggacgccgttgggcaccacgctcggagaaggacaggacaatggcggccttagggtccccgtcgcacacttttcgaggacttctgcgggagttgcgctacctgagcgcggccaccggccgaccctatcgcgacaccgcggcctatcggtaccttgtgaaggctttccgtgcacatcgggtcaccagtgaaaagttgtgcagagcccaacatgagcttcatttccaagctgccacctatctctgcctcctgcgtagcatccggaaacatgtggccctacatcaggaatttcatggcaagggtgagcgctcggtggaggagtctgctggcttggtgggtctcaagttgccccatcagcctggagggaagggctgggagccatgaacatggagaatatccttggatgctgcattcataggagaatgggataatttctatcaatatgtatttatcattaaatt

SEQ ID NO: 44356 - DNA, 1051 bp, Homo Sapiens
ttcccgggatcttttaagcaatgattgtaactattaggagacattgctctcccacgtatgtttttctttttagacaatgcagacaccaggaagttgtggagctaggatccatcctattgtcaatgagatgttctcatccagaagccatagaatcctgaataataattctaaaagaaacttctggagatcatctggcaatcgcttttaaagactcggctcaccgtgagamagagtcactcacatccattcttcccttgatggtccctattcctccttcccttgcttcttggacttcttgaaatcaatcaagactgcaaaccctttcataaagtcttgccttgctgaactccctctctgcaggcagcctgcctttaaaaatagttgctgtcatccactttatgtgcatcttatttctgtcaacttgtattttttttcttgtatttttccaattagctcctcctttttccttccagtctaaaaaaggaatcctctgtgtcttcaaagcaaagctctttactttccccttggttctcataactctgtgatattgctctcggtgcttccaactcatccacgtcctgtctgtttcctctgtatacaaaaccctttctgcccctgctgacacagacatcctctatgccagcagccagccaaccctttcattagaacttcaagctctccaaaggctcagattataactgttgtcatatttatatgaggctgttgtcttttccttctgagcctgcctttctccccccacccaggagtatcctcttgccaaatcaaaagactttttccttgggctttagccttaaagatacttgaaggtctaggtgctttaacctcacataccctcacttaaacttttatcactgttgcatataccagttgtgatamaaataaagaatgtatctggattttgtgcyagttcctarcacamagcttcaaaaatctagagtgtcctgrwagggtgtcttttgwatcataaaagccctttcmccayccygggktwtgcyaacarggtmccatggggggcctagtttaaggaggg

SEQ ID NO: 44357 - DNA, 712 bp, Homo Sapiens
  misc_feature (579)..(579): n is a, c, g, or t
  misc_feature (700)..(700): n is a, c, g, or t
ttttttttttttttgtttgtctttctgacacagaaagactgatgatggtgtccactatgtattcttcaaaacatttggcacatgctgcactaacctagtctatcttttctatcttggaatttgctcatacaaaccctatagcctagactagatcccttaccctctctccagttcctatcattcacccatttcactgtgcaagacacctcactagtcaccagtgatacagaaatgacttttaagcagtttctgctcttaagggcttaccgttttgtctataagatacacaagtataaatgacaagtacaaataacaatgaatgtttaatgctttacgtttagtgtttaagcttgttgttggaagagcagcattttgacccttggagaagaaaaactagctgtggcattccaggtggagaacctgacagaggactaagaagttatctaatgtaaaagacctcaggcaccaccttcgcataaactttttccagacaaggctaaatgtgcatgcttcataaccataattcttatttttctttaataaatatttttctacttgtaacactgtgcattatttcanactgtttacctgtttgtaaagcttgtctcttaatcaaatttgtcttgaccaaataagtttcctgagggctggaattatgccttaactatatctatagtatttaacagtgaatcctttgtantatgaaagcatc

SEQ ID NO: 44358 - DNA, 503 bp, Homo Sapiens
gaccgggcagtattcctagcactcaatgtaatcaccctatttgtgacatataaagggaaaaaaatataataagatcatctacctataatttgaatagttttgagctatcaaaatgtctttgtaattttcacaaccgctgtccattgtttgaggatgttacctactaaactgaaaacattcattccatatctacttacacatacaccagcaacagtataaatgtaagcctaactttgcaaaattcgtaataatttagtgatggaattttttaataacatgcagtatataaatgtgcagattttatgcgtgttgacaaaatcatttttcagcttgcaaaatgggactgcaatattacatttttcacttaagcagttttttacatctacgttgttgctttctaaaatgaatgtgaatgccatcttttatgactgcaacttgccttttccattacagaaatttttgtttgatgtaatcaataaactttggtatgatatgattgataa

SEQ ID NO: 44359 - DNA, 605 bp, Homo Sapiens
cttcattttatggttatgtgtgtgtgtctgtgtgtctttggaaaaatatatataattttttcaataggaagccaacatatcaagtgatgaattaaagtatgctgcagaatatatattctaaaactacaaaaaagtcactgaatatcaaaatgatacagcttatacatatagttactgtgacaagtgacagactgctagttcagaattcaaaaatcctttcctagtttgtgagataatgggctaaattccttctgcctgccactggggcaaagcaaattgctttagtttttgatgagagttcttagaagtttgttggtattccttcatccacagcatccattgttgaaataaccattttcagttgtgatgccttaactaagaagccaattgttagcctgaaatgcaatcttggtagccagtttcaatgaagctagagattagtcagaaaaagttagctgttgggctttagaaagggattttgagtcctgtcatttctacttgggagcattttggagcagattagtctttcagtataaaaacaagtggctacctgatggaaacttttcttacccttatagggaaactgagcacaagctgaatgatat

SEQ ID NO: 44360 - DNA, 512 bp, Homo Sapiens
gaagtggaagacgtgggaccaacaagtcataacagaaagaaggccaggtgggacactttagagcctttggataccggcctgtctttagcagaggatgaagagctggtgttacatctgctaagaagtcaaagctaaatacttcctgcgcctgccttctccttgaaaccttggttatgactgcgtaggcaagaagttgaaaaacagttgatttgggggcacttaggtaccatatgccccattcccaaagggcacatttctggatagaagcgatcgtatctccaagtccctctcacaggacatgctttgtgccatcactgagcatactcagatcgagggtggatgataccatttcctgaccccgttttccagcatgtgttctgttagatttttatccatgggttcctacgccttgtcattggaaacactgcctttgtcttactggcaagttctggagctcttgtgtcattgttagaaatccctgtcttgcttactgtacagaagtttctgttgct

SEQ ID NO: 44361 - DNA, 684 bp, Homo Sapiens
  misc_feature (12)..(12): n is a, c, g, or t
  misc_feature (662)..(663): n is a, c, g, or t
cctactgtgggnaaagtttcattcaggggacaaactttaatagacatcagagggttcacactggagagaaaccttataaatgttccgcactcgtgggcaaaagtttcagctggagctcgagccttgacaaacatcaaagatcccacttaggaaagaagccctttcaatagccagtaaccaaactctctttccccatttctatctcccagcccagtcacaaaaatactcagctccatcaagaggaattgtgtctaagaggatacccctgttaatctccttttttcttggattggagaggagagaatctggacatggctttggacttggaggatatcttggattggattgcacaatggcttaaattcttgattctgcctcaggagaaagaatagtcttcatgtttccactcatccttcctttggacccatcggggaaaaagtctaaattggagatccagttttagaagtgctttctgggaagcatttaatgggattagctgtagtcactgcttatgggaagaacctcagatcagccccttaaaatgagttctagagcaggtcttctgttccagaaggggagaagcatagagggcctgtgagctcacgtgtgttctttgtcataggggtgaaaaactaacttcaagtgtcccttgtttgaaatannactagcagagtcacttgtcta

SEQ ID NO: 44362 - DNA, 905 bp, Homo Sapiens
  misc_feature (6)..(6): n is a, c, g, or t
  misc_feature (617)..(617): n is a, c, g, or t
agtggngactaaagcccgcttggcgccgcaggatcccgcgctcctccgggacgccttcttccctcagcaccgacactccgctcaccgggaccccctgcacccctacgccgtcccctggcagtcctccatgccccagtcccgacaacggctcgggctcggctctcgcgcccgcagagggcctgcccctctagtcctgggtcgcggccctgcccatgttttctcaggccaggtctctgctggcagaggcggtagtaaagtccctgtaccccgtctcccagggcacaagctccctagcctctttggatccattgcccctgagctcccagagtcacccctccacctccgcagccagtgaagtgtgttgtgcctgctgaagtgatcaccccccgcccccagccctgcatcaggccacaggtcttggctttctccttatcaccatttgctgttatcacggcacacagcagggaatcccaggcccccccgccaagtggttacccaagtcaccactcctgacccaaaaatcaggcatggcattaaaacgttgcaaattcctttactgttatcccccccaccaccaggaccatgtagggtgcagtctttactccctaacccgtggnccgaaaaaggtgctacctgctttgcagacagatgagagagggcaggacttcaggctggatccaccactgggctctgcctccccagcctggagcacgggaggggaggtgacggctggtgactgatggatgggtagtgggctgagaagaggggacttagtaagggcttatacaggcttacacctgctactgtaatttgaccttgaggttggtaaaacaggctgacagaccaggtgagggttgttccagttggtcacggactgctggtggggtcaatgacaccgggccgcc

SEQ ID NO: 44363 - DNA, 646 bp, Homo Sapiens
gctgggtggcgaatttcccacgagggtggggaatttggtcatattttcaatctctgtcaaagagtagacagctgaactcacaccacacccagcttatagaatgtccatggaagatgaaggcgcaccagaagggaaggaccctgcgcagaatggacgtggtgaatggtgtttaaaatgccagatgccaaagagtaacacgattccctgctgaccccttaactctaatccatccagcaccatggagcagcctgcatgtgaggaatggaaggagcattcagggcctccaagtgacagtctctaaaatggggtggtgccaggcagattagcatgttcaaagctgacaccactgaggtcgtgttttttgggtgacaaagccaaaggagagaaaggccaaatattccagccctggccgaaagatgatcactcaccagacggaagcaagcgtgctgcgtggagcatccatgcgaagatgtcaattccatagatcaataggtttccagttttcttcgtgatatgttaatatagcaaacttaccatgatccggttttctcttttttctttttttttttacaaagtgctgaattgtttggaatatcaagagtattatgtaataaaaacttgttgatcataaaaaaaaaaaaaaaaa

SEQ ID NO: 44364 - DNA, 496 bp, Homo Sapiens
ttgctgttatcacggcacacagcagggaatcccaggcccccccgccaagtggttacccaagtcaccactcctgacccaaaaatcaggcatggcattaaaacgttgcaaattcctttactgttatcccccccaccaccaggaccatgtagggtgcagtctttactccctaacccgtttcccgaaaaaggtgctacctcctttccagacagatgagagagggcaggacttcaggctggatccaccactgggctctccctcccccagcctggagcacgggaggggaggtgacggctggtgactgatggatgggtagtgggctgagaagaggggactaggaagggctattccaggctcagccctgctcctgcagctttgccgctgagtgtaggaaaaacaggcatgacagaccagggtgagggttgtgcccagctgggccacggccatgcgtggggtggcccaataaacaccgtggactcccaaaaaaaaaaaaaaaaaa

SEQ ID NO: 44365 - DNA, 842 bp, Homo Sapiens
aggatgactgttggaatgggaaaggcaaaagcaggtacctgtttgcagtgacaggaaatggattagccaaccagggcaacaacccagaggtccaggttgacaccagcaaaccagacatactgatccttcgtcaaatcatggctcttcgagtgatgaccagcaagatgaagaatgcatacaatgggaacgacgtggacttctttgatatcagtgatgaaagtagtggagaaggaagtggaagtggctgtgagtatcagcagtgcccttcagagtttgactacaatgccactgaccatgctgggaagagtgccaatgagaaagccgacagtgctggtgtccgtcctggggcacaggcctacctcctcactgtcttctgcatcttgttcctggttatgcagagagagtggagataattctcaaactctgagaaaaagtgttcatcaaaaagttaaaaggcaccagttatcacttttctaccatcctagtgactttgctttttaaatgaatggacaacaatgtacagtttttactatgtggccactggtttaagaagtgctgactttgttttctcattcagttttgggaggaaaagggactgtgcattgagttggttcctgctcccccaaaccatgttaaacgtggctaacagtgtaggtacagaactatagttagttgtgcatttgtgattttatcactctattatttgtttgtatgtttttttctcatttcgtttgtgggtttttttttccaactgtgatctcgccttgtttcttacaagcaaaccagggtcccttcttggcacgtaacatgtacgtatttctgaaatattaaatagctgtaca

SEQ ID NO: 44366 - DNA, 909 bp, Homo Sapiens
  misc_feature (639)..(639): n is a, c, g, or t
  misc_feature (898)..(898): n is a, c, g, or t
agggtttgtgccgttttatctgccatcagtgtttgacctgtttagggcagaggcaataagtcagaagtcttgaagttgaaatagttatatgtgtgtcattggactggattataaacagctgtcttggactttccctctcttaacactgactggtcatcagtatcattagtgaaaaagaaacaaattgtttgttatcatctctttagacagataagctgaatggtgggctttaaataataaaaacatacacatagttgacttgtgtatgagctactcttggattcttgttattatagacttgtatttagttcatattttgtcaaaagcaaaacaagaagatacatcacttttcattgaaaagaaaagtgtagagcatgactgaattgctcatcattctgggagtttccatgtagtggctatgcagtgtggaaagtgagaaaaacctccattgtggtgaggagaatacttcaatgtcccttgtccttgttctcattaattcagctaaaggtggatttgaccaaaataatgctggttaaatttgtagaaatgttgaaattggctgtgttttaaattttgcttgaatttttataaaatgtttaaccaaatgtacctttgcattctttaattaaaattgcttanaaaaaaactttcattatttcagtaaaatgctcagctcccttttcaaaatgccctttatttgctaactgttccaatacactcaggtgatgagccaatttaatgttagtgcacatgctatcgcatggaaaattacagcatctgttgtcaataattatataagagtttagtctgatgacctacaaaatattttgtggtagaaatatactataaatctgtacatatccctttcagggttttaaaaaaccaaaaagaaagaaanatatgtacacg

SEQ ID NO: 44367 - DNA, 462 bp, Homo Sapiens
  misc_feature (12)..(12): n is a, c, g, or t
  misc_feature (16)..(16): n is a, c, g, or t
  misc_feature (24)..(24): n is a, c, g, or t
tttttggccctncgangccccagnaattcggcacgatgactccagcccttccagcccaaatctagtagcattgagcactttatctcccacgactcagtgaagtttctccagtccctagtcctctcttttcacccaccttcctcagtttgctcacttaccccaggcccagcccttcggacctctagacaggcagcctcctcagctgtggagtccagcagtcactctgtgttctcctggcgctcctcccctaagttattgctgttcgcccgctgtgtgtgctcatcctcaccctcattgactcaggcctggggccaggggtggtggagggtgggaagagtcatgttttttttctcctctttgattttgtttttctgtctcccttccaacctgtccccttccccccaccaaaaaaagaaaaagacaaacacaaataaaatatctgagcggaaaaaaaaaaaaaaa

SEQ ID NO: 44368 - DNA, 560 bp, Homo Sapiens
ggatctgagggctttgctagaccatggttcaaggagtcagaatcttggctaccctacatgctccctctggcaccatttcaggggattactccagagagctgcagccagaactgtttatctcctgagatatggactttctctaagtcaggaaaagcacaaacctcataacttaggtgttttctggttggttgctcccttttctgatcctactactggcctctccctttccagagccaggagacacatctgggaccagaggaaacaaaagcaccaagaggttgactagagctgaccagtgatttacaaatatttcatattccaatgcttcgtctgctcaattattcaaaaggccatccctgtaaaggcagaaaagcttcctcttagatctggccactcagcaaataagtgggtatttggttttatgaagaataatgctgaggactagagatatagtatatcagagataatatatagtatacaggttgatctaaatattctggtttggattaggcaattaaaatttttttggcaacaggaaaaaaaaaaaaaaaaaaaaacgc

SEQ ID NO: 44369 - DNA, 562 bp, Homo Sapiens
gacagaggcatgtccatttgtcattgatatctatgcagaaaaatgcaagccaaaaattaaagctgtccatatggaggcatgtagtggacaacttgagaaggccatttgtaaatctgttcttagcaacggtgatgccaaagtaatggatggctatgaaaatataatcgtgcatacttacagttgtgacacctggataacgtcagttattgaaaacaagtcagatgagaaagtgattattcacatcagcaatgagctaagtaaaaactgcataaacaacagaggactcaacatatttgcagtagaagtgggacccaaatctacaatggtttgtcaacatgtaatgcctttgaatgaatgacaagaatggatatattattgtatatattctcttatttcttaaataattatacttagaacttaccaaactaagaattatttcagatttagtctgttatttattaaacaactaaatgctacttaactgatgtacctaaataataatctattcaatttatatgcattttcattttatgtccatggtatgtactttattattaaaata

SEQ ID NO: 44370 - DNA, 662 bp, Homo Sapiens
cttgagcagagacaaacctttattcatagtgtctacaggacatatgaagagtgcaatggcaaaacaagagcaaaaagcacttcctcccatgaccttacagtaaccatactgattgaatccccagggacattccatcattgcaatagctcagatttttcttcctttttctttgcacaccagctctactctttagtaaaattgtaaaaggctgccattatggacattaggtatcccaacataaccatctggagtgtgtccagtttgttcttcataggaccaatttttatttgcagcttgagtttttatatgaagttgcattattgtggacttggctgtcttgtgatgaatttttttcatatgtattctgtgccatactattgttaaaatgaactgttgctattgtgagatggattttaactgacctattaagggtttctttcgaatggcactactttagggacattctagtatttgcttctattgtttgggccttgtggataatgtacagatttaaaaacaaatcttgttgctgatttgtccatttctttccctgcactttgttacatctgggatacagtctaactcatctgatttaatatgcatttaaaaaaaatgccataactattaaacaccttgtttacagacagatgaaataaatttat

SEQ ID NO: 44371 - DNA, 552 bp, Homo Sapiens
gcgcagtgtggctggattccccggctcgagccggtccctcagcatcagagcatgcatcaggggtccacacaggctcagctctctccaccacccagctcttccctgaccttcacgaagggatggctctccagtccttgggtcccgtagcacacagttacagtgtcctaagatactgctatcattcttcgctaatttgtatttgtattcccttccccctacaagattatgagaccccagagggggaaggtctgggtcaaattcttcttttgtatgtccagtctcctgcacagcacctgcagcattgtaactgcttaataaatgacatctcactgaacgaatgagtgctgtgtaagtgatggagatacctgaggctattgctcaagcccagtccttggacatttagtgactgttagccggtccctttcagatccagtggccatgccccctgcttcccatggttcactgtcattgtgtttcccagcctctccactcccccgccagaaaggagcctgagtgattctcttttcttcttgtttccctgattatgatgag

SEQ ID NO: 44372 - DNA, 605 bp, Homo Sapiens
cgacactcccatgatgaaatctccatcctctcgcctctctcccagtgctgcatgataaaaaagaaaacacttttgcacctgcagctgctggcccaagctgactacagactcagcgatgtgatgcgagaatcactgctggaagaccagctcagccctgtcctcactgaaccccacctccttgccctggatcgaaggctccaaaccatcctaaggacagtggaggggtgcatagtggcccatggacagcagagtgtcatagtcgacggcccagtggaacagtcggccccagactctggccaggctaacttgacaagctaagggctggcagagtccagtttcagaaaatacgcctggagccagagcagtcgactcgagtgccgaccctgcgtcctcactcccacctgttactgctgggagtcaagtcagctaggaaggaagcaggacattttctcaaacagcaagtggggcccatggaactgaatctttactccttggtgcaccgcttctgtcgtgcgttgccttgctccgtttttcccaaaaagcactggcttcatcaaggccaccgacgatctcctgagtgcactgggaaatctgggtataggtca

SEQ ID NO: 44373 - DNA, 564 bp, Homo Sapiens
  misc_feature (564)..(564): n is a, c, g, or t
ggaccaaaagacagtacaaaaaacactggcacttgaatgttgaatgtcaccgtatgtgaaataatatattttggggtagtgtgagcttttaatgttaagtctgttaaacttgagtcaaattaagcagacccggcattggcaatgtagctgtaattttctgacaaaatttaagacaaaattgtcaacttgaaactaaaacatgccaaggttttgatatacttgtcttaagatattaatgaaacacttctgaacactgataggaagtgtccacatccacaaagtttctcttgagttttgttatgtgttttgttgtgtttgattttcagtgattgtctggtatatttacagtcctcaaacatggttatttctgtcagtgacttaacattcggttttatcagccagcagtattcttcagtaaataaagaatggaattgctgaatgtaatcattgaacctcgagtcactgtaaaagttcagtaattgcttattgtattagttttagatgctggcactgcatgtgctctgtttattctgattttactaaaataaaaagttcaaaagtccn

SEQ ID NO: 44374 - DNA, 785 bp, Homo Sapiens
tttttttgaacactttaggccttgccacctcattctttaatgaaaaaaatatgaatattacaaaggatttgttggatcttcttgtagaagctaaacaagaagtgccttcttggttggaaaatatggcttatgaacaccactacaagggtggcagtcgtggacgatctaaaagtaatagattcagtggaggatttggtgccagagactatcgacaaagtagtggttccagcagttctggctttggtgctagtcgcggaagcagcagccgcagtggtggaggtggttacggcaacagcagaggatttggtggaggtggctatggaggcttctacaatagtgatggatatggaggaaattataactcccagggggttgactggtggggcaactgaatctgctttgcagcaaagtcacccttacaaagaagctaatatggaaaccacatgtaacttagccagactatattgtgtagcttcaagaacttgcagtacattaccagctgtgattctcctgataattcaagggagctcaaagtcacaagaagaaaaatgaaaggaaaaaacagcagccctattcagaaattggtttgaagatgtaattgctctagtttggattaaactcttcccctcctgctttagtgccaccccaaactgcatttataattttgtgactgaggatcgtttgtttgtaacgtactgtgactttactttagacaactactacttgatgtcctgttgctcagaatgctcagataccattgttttgacaataattactaacttggc

SEQ ID NO: 44375 - DNA, 566 bp, Homo Sapiens
tttggcaataaatgtgctgtacacgtaatgtccttaccactaatgatgtaaaactttcttaaagtaattttagtgttcatttatttataacttctaccatgtgatttccagactattggaagtgatttactgtatcttgtgatatatgggttttaacaaattctagtcttcacgctgagagagcactacttgagagagcagttgaaagtttcaaaaactttggttcaatctgaagaaaggaagcttgaactgtttgttcttggtgccttgcagagagactcacagcaactctccattatagctttcacacggtttggatgtgcagcacatccaaggcaaccacagctgtggtagagcttggtaaaagactgaagatacattggtgctttgatgaaaaggtcagttggctggtccctctctcaaaaagcttattaagcctgaaaagccaactttgtaacatatttaaaactgctattttcgcttatttctggaatgtaaaaaaaaaaaatgtataaaaagaattagtgtatgcttcctgaataaaaaggagccaaagttgatcagaa

SEQ ID NO: 44376 - DNA, 822 bp, Homo Sapiens
ctagaactctgacatcatcatttgttaatatttaatgatttctggaactgccattccaaagaagaataaaagcacaactcaagtgaaattgaagtagtcgataatcagaaaagatgacaaaagtccacatgtgacatttgtacgtttctagctagaatgttaaacttcatcctttttttactgttgacctatttgtgggagggatgaaaggctacaaagagcacattcttgtaattttcaaattttgcctgtctcttgaagaggtattttttcacccttagaaaagggactgtttttctatggactaagtagaagttacagagtcatgtaagaaaatcttgctatgtgtggagagaaattgctgcatttctgtttcttaagtgatggtacatttgtccatgtaacagaacaaaagatccatttggaaattttttttactggtatcaccttacatggtatcactgggaacatttatggaatcaacacttctgtagctcagtgacaggtggtggttgtttaagtgcagagcaatattaaaatgtactggtgactagtacatgtatctctccataagcagagttgccgaatcaataaacatgcaagtttgtacttttgatctttaccaggtcagtggattgcttcaaaagcagagtttgtgcaagcactcactgtgctctctgaaagagctgaggcgggcgtggtggtcacgcctgttatccagcaactttgggaggccagtggggagatcatgacgtccggagatcgggaccattctggcaatggtgaacccatttttatggaatcaaaataccgggtgggggg

SEQ ID NO: 44377 - DNA, 451 bp, Homo Sapiens
  misc_feature (18)..(18): n is a, c, g, or t
caggagaatcgcttgagncctgggaggtgaggttgcagtgagccgagatcgagccactgcactccagcctgggtgacagagcgtgagactccgtctcaaaaaaaaaaaaaaaagaaagagcctgtacccgcgactaactagacttttctgctgttgtgcaaagttcagtttcttctcagcaacatcaaggatatatgaagaaaaggaaataaaaaactgtaaagtcaaaagagatgcctggtggaacttattcgtgctatcagggcattgatagtttgaatgtttttattacttatgcaaaattgcacatactcctctatactgattttatcatgaaaactgtcatgtgtcatgctaatggaaaatgtcttatttgtaaataagtattcataattttgttactgatggtgtttttaatctagaatttgaaaaacttaaaaaaaaaaaaaaa

SEQ ID NO: 44378 - DNA, 366 bp, Homo Sapiens
ggtacctataaagaacactgaaaggtgatgtgtgtggatgagctaggaagacctgaaataggctctctctaaattaatcaaattaatcctgaagccattctgcaatactgtctttaatgtatactcacttgttatagaagccagggttttttcccctaatttgtatcattgctatatgtgttattgtaccaaactacactgttttaattgctgtaaattttaatatgtcttagtatctgggtgtgggaatcttgaaagcatggagtttgtgttattcaccactgtattctcaaatatcagaagagtatctggcctactaagtgcacaataaacatagttaaaaaaaaaaaaaaaaaaaaaacatgt

SEQ ID NO: 44379 - DNA, 648 bp, Homo Sapiens
cttaaccaggaagggggcctgtgaaggttaggacccttcccacagccccgctgtggtccagccccgggacccatggcctctctccaggccctccgcaccccgccccatgccccagtcctttcctactccagaaatgctccccacccccccaagagggaaaagcagataacccaacaggaggtggtggggtctgacgtgtccaagtgctggcagacaccctggtcacccaggacagagcggaaaaaaaaaaaagaggtcagggttttaacgagctatgcaatctttttccaaaacccaaggttgggctgcttcccacccctgcctgttccccttctcccggcctccttcacaatgtgaagctgtgggtgcagtgggcccaagggctcttgctcctgtctctgcctctgggtcatgagtaccaccctgcctgcctccccaacaccgtggaatcctcactggtgtgctgtccacagatttgtgaactcctggtagtaaaacacttttgcatccctttgctctccatgtatgctaatgttaggaaatgtttgagggtacctttgcttctgatccttgaaatcccaccattggtgtctcacctctcggcattaggcagtgcctcctgctttaggcactaactttgatttcagt

SEQ ID NO: 44380 - DNA, 617 bp, Homo Sapiens
  misc_feature (601)..(601): n is a, c, g, or t
  misc_feature (610)..(610): n is a, c, g, or t
  misc_feature (612)..(612): n is a, c, g, or t
  misc_feature (617)..(617): n is a, c, g, or t
ggtattacttactctgtagaatcaaaacagagtagttaacaccaattatgcaaactacttttttttccagcagaaagggagctgacatgatcaaatccatgttttcaaatgaactgaaaaaggcatccagcaccacttataacacatttatttcagttccaggctgacagccctggggcatctagcaggatgcataattgtcatctggtgagagttgggactttgctcaattttaataccaatctctcctgattgtaattacctccactactttcatgatccccctacaatatttttttaaatgatatatttattcactgaatcaaatgtcattaatgagttatcttctgtggaggatgactgttctctttgttaatgttcacaatcaagatcttgggctgagaagaggcccttcacccaaggagtttgaagtatcacagcgtgtgggaaggtgggaaccaggatacccattcatttccaaccgagacacagagaagtgagtcacagaatttgagcccgctctcttgactgcccagccagagacactgatttctgtaacctcttcacttgatcctgcctcttaagcattaaaacattctcncttaaaaananaaaan

SEQ ID NO: 44381 - DNA, 914 bp, Homo Sapiens
ctgcccacccatctcagtgctgagatcgttaaggaaatgaccgaggtctttgacatcgaggatactgagcaggccaatgaagacaccatggaatgcttggccaccggagaatctgatgagctgttgggtgacacggacccacttgaaatggagatcaagttgctccattctccgatgacgaaaatagcagatgccattgaaaataaaaccaccgtgtataagattggagatctcactgggtattgcaccaatccgaaccgtcatcagatggggtgggctaaacgcaatgtggaccaccgccctaagagcaacagtatggtggatgtctgctcagtggaccgccgctcagtgctgcagaggatcatggagacggaccccctgcaacagggccaggctctggcatctgccctgaaaaataagaagaagatgcagaaacgtgcagataaaatcgccagcaagctgtctgattccatgatgtctgctctcgacctctctggcaatgctgatgatggtgttggtgactaatcgactgatctcacttcccttccgctccaagcaccagttccggtggtacgggggaataccagtgaaatagtttggttctccctgaagcatctgcatattgaaagaacgctttccccactgtgtgtcttctccccctcctccagtaaaaacagtcccggctaggtgctgtggctcccgcctgtagtcccaccactttgggaggcccaagtgggcacatcacctgaggccgggaggttcaagaccagcctggcccacctggtgaaaaccccgtctctactaaaaatacaaaaaaaattttacccgggccttaaaggggacccaataatccccaacctaacttgggaagggctgtaaggcaaggaaaaattccccctggaaccctggggaac

SEQ ID NO: 44382 - DNA, 524 bp, Homo Sapiens
ggcgcagtgtgcctggattcttttttacactttttaagccttaactcgccattgatttaccagtttaacgtttcctggggtttctttgcccatggggttctctgcccccacccccggccctttgtttgacttgcgtcgtctgatactcattattgtagctttttgtccgcatgttactccctgtaaatacgctgttatacatactgttaacacccctttgctttttctatgggacctccaggccaccatatttagaactagttaccttattaaaaaagaaaaaacagtctgttggcttctcagtctgcatcttggaggcagggaggtgagggcaggtgcccctcagacacttcaggaaggtagtttgcattctatttaaaaaagggagtggggagcaaatgaaaatcaaatgtggggggaaaacactaaagggggcaagaaacaaaggaattacaaaccctctgctctttgtatttctctgttgtgaagaataaactgtacctgcacccgaaaacccggctcga

SEQ ID NO: 44383 - DNA, 573 bp, Homo Sapiens
gcacgagaaaatgatttaagttgaagcctaacagaagtacttgttcattcctcagttacctgcaaataatggaaataatggtgcagtcagttttatttgattgtgtaatgctttatactaggggtctcaaacccctgggtggcattagattcttacaggagcgtgaaccctattgtgaactgcacatgcaagagatctaggttgtgcgctcattatgagaatctaatacccgatgatctgaggtggaacagtctcatcctgaaaccatctaccccaacacctgtgtctgtggaaattgtctccacgaaaccggtccctgttgaaaaaaggttaggggaccactgctttatacagtgtttgaagtaggcacacttacagttactatttctggttctttatgactgttgaggggggcagaattctatgtttgattcacagtaaaacttttcatgaatcattgagggttaactgttatcacttgccaatggaaactggatattgaaacatttttttaagaaatgcacttttacctgaaataaaactataaaaactaaaaaaaaaaaaaaaaaactc

SEQ ID NO: 44384 - DNA, 642 bp, Homo Sapiens
caggacacatttgttacttcgtgagcaagcccggaggctcggagccccctgccgtgttcacaggtgacaccttgtttgtggctggctgcgggaagttctatgaagggactgcggatgagatgtgtaaagctctgctggaggtcttgggccggctccccccggacacaagagtctactgtggccacgagtacaccatcaacaacctcaagtttgcacgccacgtggagcccggcaatgccgccatccgggagaagctggcctgggccaaggagaagtacagcatcggggagcccacagtgccatccaccctggcagaggagtttacctacaaccccttcatgagagtgagggagaagacggtgcagcagcacgcaggtgagacggacccggtgaccaccatgcgggccgtgcgcagggagaaggaccagttcaagatgccccgggactgaggccgccctgcaccttcagcggatttggggattaggctcttttaggtaactggctttcctgctggtccgtgcgggaaattcagtcttgatttaaccttaattttacagcccttggcttgtgttatcggacattctaatgcatatttataagagaagtttaacaagtatttattcccataaaaaaaaaaaaaaa

SEQ ID NO: 44385 - DNA, 579 bp, Homo Sapiens
taaatttaaacgtcaagtttaaagggatcataattctgcaggtatctttctctgagtgactgaatgtgactattgcattagggtaaatgaattaagacgtgcaagtgggatttactgtatgttagaaaggagttttgcagccaagactgccttgaataaaatgtgtttgcactgaaaaaaaaattttaaattacttggtctctggttgctgtaaaggtcatccaagatggatgttctgtttatattgtatagtatttcatatgaaataattacagttcatgaaatgtcttccctaatgttactgatttataacagcacatttgtaacatggtttttatcgtgtcagtgtaccatactgtaaatgatgattacttgtcatgcttagtataataacttaaaagaaaaaaaaggacagggatttttgtaagtctatatttgaaagtccctccctatggtgatactgtgttcatgttgtttatgtagtgttgtgtgaaatatccattttggattgtgttactttttaagatattaaataacatttggttataaaaaaaaaaaaaaaaaaaaaaaaaaaaaagg

SEQ ID NO: 44386 - DNA, 646 bp, Homo Sapiens
gcacgagggttatcttcaagccaggttttcgagggcacatgggtcaccagttgctttttcagtcaatttggccgggatggactaatgaggctctaacactgctcaggagacccctgccctctagttggttctgggctttgatctcttccaacctgcccagtcacagaaggaggaatgactcaaatgcccaaaaccaagaacacattgcagaagtaagacaaacatgtatatttttaaatgttctaacataagacctgttctctctagccattgatttaccaggctttctgaaagatctagtggttcacacagagagagagagagtactgaaaaagcaactcctcttcttagtcttaataatttactaaaatggtcaacttttcattatctttattataataaacctgatgcttttttttagaactccttactctgatgtctgtatatgttgcactgaaaaggttaatatttaatgttttaatttattttgtgtggtaagttaattttgatttctgtaatgtgttaatgtgattagcagttattttccttaatatctgaattatacttaaagagtagtgagcaatataagacgcaattgtgtttttcagtaatgtgcattgttattgagttgtactgtaccttattt

SEQ ID NO: 44387 - DNA, 1393 bp, Homo Sapiens
agaaatagaaacttacttgatgcagaatggatatttatatttctgcttgcaccatttccatagcagctgacaaaggcaaaatcatgaaatagaatcatttctataaatggcttctttaaggttttctctaaattttgcctctaggaaaaaattaaaactattcaaatgacagctagctgtcactggtgctaccccaaagctttccaatcttttatgtattttttgtgaatgaaactgttgctgtaggaaagtcaaggttcatgtaagagtatcgtggtgtaaatataatggtttcacagctgtttgaatttttttcctgtgccagatatagaatgcagtcaaccctttttcagtaacttatgttcaccagtctgtgcttttcttctcccagaaggcttttcttagtggttgtaaatgcaagaatcctgagccctgtgttgcaaaggtgggtggtctgtcagcactttctggcaaattgagttgatggatttaagataagcctttggggttcctgtcagttttctgggccctgaggaagggttgggcctcctttactctcagtattttgagtgtttttcaaatgtttgtacgttatcttgcactgctctaataaaaatgaaagctctctgacaagaaatagttctggatggtttgaagatctgcggggaaaaataagtgtgcacctgagaccttcagttagtcttttatttatttagaataaaaaatagtttgataacctaccagagttagtgcttctttaaaaacactccttggaaagatggggactgtcccttaggaaagccataaaagtgattcccaatactttgcaattgcttttgatttttagtcctttggaacaaatgtgtgatgttatgtctgatgttgtgtttttagagctgtgaaaagtctgaaaaatttcaaggggtattatttaaatgatgattatctggctgaattatgtgtgagctagaatctaggtagctgtccacttctttttctgttgtcctgacagtaaagcaaatagtaagccatgtcttgaaagtgatttgcttgtttcatactgacatctaaagacatcagccttctctttggcaaccctggggatactcctctgcaccataacttattaatgtttttttagacaaggctaaacctgaatgactctacgtatctatagtttcactgctcatataccagctgctacaagaaaaaccatgacttgtaagtttgtctttactcctaattgctaaattaactgaaacccttcctgtctagggagaattgctgctagtaaggtcagtttgcaatgttcagctttagatatgtgtcgtaatgggagtctgaaaactgtaataaactgtattcatatcctgaaaaaaaaaaaaaaaaaaaa

SEQ ID NO: 44388 - DNA, 619 bp, Homo Sapiens
agggccgttgttcgagagagaactgcaagtatcttcaccctccgacacacttaaaaactcaactagaaattaatggaaggaacaatttgattcagcaaaaaactgcagcagcaatgcttgcccagcagatgcaatttatgtttccaggaacaccacttcatccagtgcccactttccctgtaggtcccgcgatagggacaaatacggctattagctttgctccttacctagcacctgtaacccctggagttgggttggtcccaacggaaattctgcccaccacgcctgttattgttcccggaagtccaccggtcactgtcccgggctcaactgcaactcagaaacttctcaggactgacaaactggaggtatgcagggagttccagcgaggaaactgtgcccggggagagaccgactgccgctttgcacaccccgcagacagcaccatgatcgacacaagtgacaacaccgtaaccgtttgtatggattacataaaggggcgttgcatgagggagaaatgcaaatattttcaccctcctgcacacttgcaggccaaaatcaaagctgcgcagcaccaagccaaccaagctgcggtggccgcccaggcagccgcggccgc

SEQ ID NO: 44389 - DNA, 712 bp, Homo Sapiens
agcgggaatggaatgccaagaatctgcattgagaataactaaacattgttactgtacatactatcctgtttcctcctcaatagaattgccacaaactgcatgctaaataaagatgtagttcttctggacagaccacaactctaagaagctagtgctgctatctcatatatgagtattaaatatggtatgcttagtatattccaacctaagatagttaactacctgagaccagctgtgatgtttaaagacataaaggataaagtttacttttaaagggtttctaaacatagtttctgtcctaggaatattgtcttatctccataactatagctgatgcagaaagtccagccagtttactcatttcgattcagaatatttcaaatttagcaataaacaattagcattagttaaaaaagaaacatattccaagggcaggttcgattctagctctaattactgtcatgtcatttacccactggatcaaagggtatgtttcacttcttgacaatataaatgctgcagcaaagatgagaggtgacagtaaaaccgatacctgtcctgcaggtctaaaatttgaatggaaattcaagcacaagtactggggacacatcaaagtgtggagtaaggtttgcctggagatgccacgttgaatcatgtgattctagcattaacatcacatacgattgacccacgacaacttgcaccggtatga

SEQ ID NO: 44390 - DNA, 577 bp, Homo Sapiens
gcacatttggtccacccatgtggccgggcagtaccttcttcaagagaaatggagcccttctccaagatcctgacattgatgctgccagtgccatgatgcttttgaatactccccctgagatacaagcaggttttcctccaggagtgatccaaaatggagcgcgggtcctgagccgagggctgtttcctggcgtgcggccgctgccaatcactcccattggggtgacagcggccatgaggaatggcatcaccagctgccggatgcggactgagagtgagccatcttgtggctccccagtggtcagcggagaccccaaggaggatcacaactacagcagtgccaagtcctccaacgcccggagcacctcgcccaccagcgactccatctcctcctcctcctcctcagccgacgaccactatgagtttgccaccaaggggagccaggagggcagcgagggcagcgaggggagctttcggagccacgagagccccagcgacacggaagaggacgacaggaagcacaggcagaaggagcccaaggatttctcttgggggacagcggggtacggcatttccag

SEQ ID NO: 44391 - DNA, 1032 bp, Homo Sapiens
  misc_feature (830)..(830): n is a, c, g, or t
  misc_feature (934)..(956): n is a, c, g, or t
  misc_feature (958)..(1027): n is a, c, g, or t
ccacgcgtccgctgaaagcaattaaaaactggtaaatattaatttactatgtaaagtgaacttacgaattaacttactaaatacatatatgtagaccttcccgaaatgccattctcaattttattttatgggctccaaaaaaaaattatctgggttaataaggttatctattaaagcccccagaatctcagcactagatgtcataaatatgaaatagtaaaaacaaggtcacttgaaaatgggtatttaataccttagctggtgttttcagaagcatacagaactggaaaggtaagaacttgcttactattgcagatatacctgaccactcacaactgtctttttagcagcagctttgttaaaactgcacaaagcattcactttattgattaagtacaaatgctttagtgtttctacctaagtattagtacatctgttcaggaaatggaaaaaaaaaatgctgcttaaatttgttttatcagctgaggttgtggaggatttttgtccactgatcttttgcaacagaaaagcatactttgtcagcttctaataagatagccaggtttgaattatttgcaaaatttatataagcaaataagatctcttggtaacaattgacattgcactagaatttgaatgatactgttgttggcatttctgtttctctttcaagtagttgtaaataatctctttttctcatataaacggaatgcataatgtcttactcttgagtcatttagtatcattgatatggtaccaagttgtatagcagagtaacaaaatcatgatttgacaatgaaatttacatattgcctcacctaaagatgttntgtctgtatgacttttttttttttttaagtttggcttactggtactttaaatgtttttggggtaaattgtgtaatatgaaaaagttcaataatgtccgaatttnnnnnnnnnnnnnnnnnnnnnnnannnnnnnnnnnnnnnnnnnnnnnnnnnnnnnnnnnnnnnnnnnnnnnnnnnnnnnnnnnnnnnnnnnnnnccccc

SEQ ID NO: 44392 - DNA, 437 bp, Homo Sapiens
ctaggagcagacccaagcttgtggcaccaggcatctgatggtgccaggaaagccactggaattgtcacacggcgagcacagagggccggccaccagtcctcgatgcttctgaaccctgaagcccgatgacatcttacgaggtggacgttggactgttcatgcgcatcgggtgtcagtgactcatggagaagaaatggggtaaatttttagtgatgttgctaatcattgaattctgttctctattaaattaagaaaatgttccaaaagccataagcctgaagattggccctgtgcacgcacgcacacacacacacacacacacacacacacacacacacacgaaggagagagagagaaaactgatggggaaaacaagctgtgtcttcttaactgcccaagtgaaaagcaaccaagtccaggaaattacaatagctgtt

SEQ ID NO: 44393 - DNA, 812 bp, Homo Sapiens
  misc_feature (615)..(669): n is a, c, g, or t
  misc_feature (674)..(681): n is a, c, g, or t
  misc_feature (683)..(683): n is a, c, g, or t
  misc_feature (691)..(692): n is a, c, g, or t
  misc_feature (694)..(697): n is a, c, g, or t
  misc_feature (699)..(700): n is a, c, g, or t
ggctctggaacctatcttcttttctccaagttaccatcacctcttgtctaaactgctacggaaacttcctaacctgttctcccatttccacttctgacttccatgctgcaatgagagtcagctatgaaaaacaaacctaaacatcgaactttccttagcttcttcagtggcttccaactgcttttggaataaagtcctaaattcaaagatcttgtataaatcaggctcatctcgcaacacccctctttgttctctatggcctagacacactggctttcagttcattacatgtcttgcctcagaccctcacacactgtcctctctgcctgcaacactcttcctttcactttccacctagctgatcctaaatgttccttcctcagggaggtcttttctgatttcttggtgggtcaagactttctgataaatcagttagcaccatgcattttccagagtttttattacaattgtaaaattatggctgtaataggctggctgcgctgctagattgtaagctcacgagggcagagatcttgttcacatcttgctcactgctatattctcattgctgagcacacagttgcagctcaataatttttgaatgaactccaaaannnnnnnnnnnnnnnnnnnnnnnnnnnnnnnnnnnnnnnnnnnnnnnnnnnnnnngaaannnnnnnnanaaaaaaannannnnannccctgtggggccgccctctgcccctcaaaaatcttttcaaaaaccatttctttttggggccgcgggcccccattagggtaaatggaaaatggggctaaagctggtttcccaa

SEQ ID NO: 44394 - DNA, 812 bp, Homo Sapiens
cacagaccaccagacccagctcctttatcaagcatcagccatgatggtagaatctaggtatgcactgcttattgtagacagtgccaccgccctttacagaacagactactcgggtcgaggtgagctttcagccaggcagatgcacttggccaggtttctgcggatgcttctgcgactcgctgatgagtttggtgtagcagtggtaatcactaatcaggtggtagctcaagtggatggagcagcgatgtttgctgctgatcccaaaaaacctattggaggaaatatcatcgcccatgcatcaacaaccagattgtatctgaggaaaggaagaggggaaaccagaatctgcaaaatctacgactctccctgtcttcctgaagctgaagctatgttcgccattaatgcagatggagtgggagatgccaaagactgaatcattgggtttttcctctgttaaaaaccttaagtgctgcagcctaatgagagtgcactgctccctggggttctctacaggcctcttcctgttgtgactgccaggataaagcttccgggaaaacagctattatatcagcttttctgatggtataaacaggagacaggtcagtagtcacaaactgatctaaaatgtttattccttctgtagtgtattaatctctgtgtgttttctttggttttggaggaggggtatgaagtatctttgacatggtgcctttaggaatgacttggggtttaacaagctgtctactggacaatcttatgtttccaagagaactaaagctggagagacctgacccttctctcacttctaaatt

SEQ ID NO: 44395 - DNA, 673 bp, Homo Sapiens
cacacacacgggtgagaagcccttccagtgccacctctgtggcaagaccttccgaacccaagccagcctggacaagcacaaccgcacccacaccggggaaaggcccttcagttgcgagttctgtgaacagcgcttcactgagaaggggcccctcctgaggcacgtggccagccgccatcaggagggccggccccacttctgccagatatgcggcaagaccttcaaagccgtggagcaactgcgtgtgcacgtcagacggcacaagggggtgaggaagtttgagtgcaccgagtgtggctacaagtttacccgacaggcccacctgcggaggcacatggagatccacgaccgggtagagaactacaacccgcggcagcgcaagctccgcaacctgatcatcgaggacgagaagatggtggtggtggcgctgcagccgcctgcagagctggaggtgggctcggcggaggtcattgtggagtccctggcccagggcggcctggcctcccagctccccggccagagactgtgtgcagaggagagcttcaccggcccaggtgtcctggagccctccctcatcatcacagctgctgtccccgaggactgtgacacatagcccattctggccaccagagcccacttggccccacccctcaataaaccgtgtggctttgga

SEQ ID NO: 44396 - DNA, 745 bp, Homo Sapiens
ggtatggaatattcattttactcagaatagctgttttgtgtatattggtgtatattatataactctttgagcctttattggtaaattctggtatacattgaattcattataatttgggtgactagaacaacttgaagattgtagcaataagctggactagtgtcctaaaaatggctaactgatgaattagaagccatctgacagcaggccactagtgacagtttcttttgtgttcctatggaaacattttatactgtacatgctatgctgaagacattcaaaacgtgatgttttgaatgtggataaaactgtgtaaaccacataatttttgtacatcccaaaggatgagaatgtgacctttaagaaaaatgaaaacttttgtaaattattgatgattttgtaattcttatgactaaattttcttttaagcatttgtatattaaaatagcatactgtgtatgttttatatcaaatgccttcatgaatctttcatacatatatatatttgtaacattgtaaagtatgtgagtagtcttatgtaaagtatgtttttactttatgcaaataaaacccaatacttttgtccaatgtggttggtcaaatcaacctgaataaattcagtatttttgccttagttgtttggtgaagccctgtgaattcctcagcctggggacctggagggatggggccttataagggaaattcgaagattaataagaatttcgggaaagggaaaaatggtggt

SEQ ID NO: 44397 - DNA, 779 bp, Homo Sapiens
ggcattatatttatatgacagcttgaactgacaacattgtgtatatagatcatcttgaagtattatttcacattgaaaagaagaaaatatattgataactatagatgttatgaagaagagggtatttctagttttgtactaaaaatcaattggatgaactaaatccaaaacatgacactgtaggcagcagttttaagtcttatttttactgtttatatatttgaatgctgctacaacagatgatcttcatccctgaagttttcagctaaacttggtttcctagaatagactgttaactttcaaaatttttattggtgaaatggaaatactgtttttccttgtgaatgaattttcatatttgtaagtgctaagtttataattcaggtttgatcaaggtgtgaataactgaagaaaataacttgctggctatataggaaaatgctgtggaaatgaactgtgtatatacttctgggaggaacaaatttaatcatttcttctgttaagcactaatcagtatagtgcaactcctggttctgtactgtattttatatgcaacatatatgctttaatattttaatgtttgtgcattaatattttcaatttgtttaaccactttgctgctaagattttgccgtcccattcccattttttcctttacaattttaaacaagtttcttcattaaaaactatggtgatgaaatgggttttattttaccttgggatctttatagttaacatacccagtttcttaatcagtctacaagactaactgatgatat

SEQ ID NO: 44398 - DNA, 812 bp, Homo Sapiens
gactccacttttttctgtaaaatggtgctgatgaccacctgttctgtgtgagaggcttagagggacctgcagcttccccaggttgcccacatcggtggagtgtgagctgggtctggaaggggtgggggcctgcgggtgggaaaccagaaatcaccagtttcccttgactgcccacgctcacactttccccataccagctgctgaagtggaccggctgaaggtgacgtttgaggatgccactgacttttttggccgtgtggtcatctaccacctgcgggtgcttggggagaaggtgtgagacctctaggggctgtctcctccaggaagccctccgggaagcacagcaaagtccctcattctgcacagaaggtttattggttcctcttgggaagggtcccctcccaccacctgtccagaagctgcctttgaagtcagttctgggtttccccagctctggctgaccattttgttccctgagtgtctgagtccccggcaggcggccttcactcagggtcagcgggcaccaggtttgctctggaagagcttgaggatgtggttctcgatcacctgttgcactgagatggggcaagggaaaaggtgggctgtgagcttgaatcgggagtggggtggaggcacaaggccaacctgcgctctcccccttagggccaaacagggacccttgcagagacctgcattacagagcaaagctgggagaaccgggactacctcaggaaccttactttccctaagtttgttaaaagcacttttgtggcttttcaaaataaaattaaaatttttcttcccggccaaat

SEQ ID NO: 44399 - DNA, 496 bp, Homo Sapiens
gaattgtttccaggtaacctaccatgtgcacttctcagctgctctgctcacctttgcccaccttcccgtgaccctgagagtacagatccgaataatgtggcctgtgcagagctcagagaactgtgaggactacccatgcctgtcagactctgctcagggacagagatggatgggtaaatggtgctgttggagacatttttatcttcataccaggctctgtttcatccctgcaccccgcacccccactcactcccctgagggggtaaaatgcagaggtggttgacctgaagggtctgattccctccttcccaagccttagggcctaccctggagtgctgcagtgtgtgagagctgctgcttgcttgtttctccactaggcctgctccaaatgcttagccaatctctggagccgacacagttgcctacggggtgacttagcaccaggttccattagctctccaagtgactgtttccacccagtacttttggcgcttga

SEQ ID NO: 44400 - DNA, 556 bp, Homo Sapiens
tcttcatcaggtccagtgtcgtcctcttctgccacacagtccagctctagtgatgtagattccgatgcaacaccatgcaaaaccccgaaacagctgctttgccgtccgtccactgggaaccgagtagggtcgcaagatgtatccttggagtcctctcaggcagttgggaaaatgcaaagcacccaaaccactaacacatccaacagcaccaacaaatctcagcatggatcagcaaggctctttcgttcttccagcaaaggcttccaaggtacaactcaaacaagccatggttccttgatgacaaacaaacaacatcaaggcaaatccaataatcagtattaccatggcaaaaagaggaaacacaagagggacgcgcccctctcagacctctgtagatagtcagcgctgcgcggtggactgtcttctctgtgcaatgatctcatgctcaggacagttgcgcagggactcctgggagatattcaggagcctcacactgttcagacgttgacttagcaactgcgttttttcccagctcgccacagaatggatcatgaag

SEQ ID NO: 44401 - DNA, 577 bp, Homo Sapiens
  misc_feature (395)..(395): n is a, c, g, or t
tttatttattggattctctgctgcctgatctgtacatacatgatccctcgggttttgtttacaaggaaccttgactgaccaaaaggcattataactctgactcaaatacaaggtacagaagataagcatctttgaggaaactcctacttcagttcttttgttatgatgaagacatttgtgagagaggagatgattagaattctagtaatgtacttttaagatgttacagatacaaagaaatgatgtgggtgtcaggagactaaaggatgttgaaggctacacattcaaccttttgttaggtgtttcctttaagctactcagctgtaccttttaaattagttctttttcaaccagtatatcactaaaagttatatcaaagctttatcagttcaagnttcttgcttttcataatacttttttctgatgcaattttatattttcaaacatggcaagttaaaatataaattcatttaaatatatagttttgtacttttctaccatgtaaatgtgcaatgtatataaaagttataatgtgtatttgtaaataaatgatgagtgaaaaaataaaaaaatttta

SEQ ID NO: 44402 - DNA, 817 bp, Homo Sapiens
taacaggttggcctgtttgattacagctagtaatcgctgtgtcttgttccgacccctccctgacaccccagcttcccaggatgtggaaagcctggatctcagctccttgccccatatcccttctgtaatttgtacctaaagagtgtgattatcctaattcaagagtcactaaaatctcatcacattatcattgcatatcagcaaagggtaaagtcctagcagcaattgcttcacataccagcatgttccattgtccaatttagaattagccacataataaaatcttagaatcttccttgagcaaagagctgcctgagatgtagtatggttatatggttccccaccgaccattgtatgtcgcttttattcttgtatcggtctcgttttagactgcactgtgagttttgtagtgtcctcttcttgccaaaacaaacgcgagatgaactggacttatgtagacaaatcgtgatgccagtgtattccttcctttcttcagttccagcaataatgacatggtcaacttttttaaaatcttagatctctctcattcatttcaatgtatttgtactttaacgatgaaccaaaattattagacttatttccgatgtccaggcatcagacatcaagaagccccatatgctttcggcgcgatggcactcactgtgaacatgtgtaaccacatattactatgcaccattgtttccaatacttctaataacagttttgatactgtgtggtggcgtcgtcacgtcgaatctgtgatccaagaacgttaagctcagcccccctctggcaatactgcccgactgaatggaaa

SEQ ID NO: 44403 - DNA, 468 bp, Homo Sapiens
ttacatttgaactatatccttcctagtgggttagtgtgaaaaagagtttggctgattcctaaaactctgccagccctgcagtaatctccagggcctggttattgttcagacattccatggtgattcctgggaaggaagcttggctgctcagtttctgagtctggggtgagataatgttctgggaagggacatctgttctttggtgtaatctctcatggtgaaatctgctctgtacatcagacaattgcattgctaccaagtttcataccaaatatttgaaaggatggtattgaatctaaaaccaaatattagtttttattaaactcatgggaaggctaatatattccaacgtaaattattacatatggttaagtaattgcatgttaatttattttaatgtaaatatttttgttactgttctgagccaaattctaaagaaaaaataaatacatttccttgttgaaaaaa

SEQ ID NO: 44404 - DNA, 815 bp, Homo Sapiens
tttacatgatgaatagtttatttgagaacttttatactcagtggtgttttatatattaagataaaaatatgtacacacatgcatgtcacatctctctactgtggagttaatgtgaatttttaaaaaatggaattgcaaccacaatcatatctaagagaacattcactcctagtgagggtttacaaaagctactaagagaataaggtagatgataatgcaaagggtcatgatttggggttatttttgttttattttaaaatttatactgctacttttgaaagaattgtttttatgactatgctctttttgtgattgaaaagtcatctaatagaagctgtatagaagctactttttaattgctggcaaacagctttaagtgcactttctttgattacacttccattttttgttaaacttgaattttctgaagccttttatgtaccactaagcaaataactttaacctttaaataaagcaaatttacatctttattgtatttctacttgttacaaaacatacttgctaaagtaacttcagtcctcaaatatagctgggaaacaattatgagatagactcagtctccccctcccaccccttttcccctgccatatctaattaagcactaactgattttattactttattgcctttacactgcttattctttttgactgaattctgtccctgattcactgttttggttgaaatttaaagttattttcttactggatttatcatacctgttttaatctgttttctttaaatgcaataaatcccaaatggatttgcatattctttataaaaaaaaaaaaaaa

SEQ ID NO: 44405 - DNA, 719 bp, Homo Sapiens
ttgctgctactctaacactgagcaacactctcccagtggcagatcccctgtatcattccaagaggagcattcatccctttgctctaatgatcaggaatgatgcttattagaaaacaaactgcttgacccaggaacaagtggcttagcttaagtaaacttggctttgctcagatccctgatccttccagctggtctgctctgagtggcttatcccgcatgagcaggagcgtgctggccctgagtactgaactttctgagtaacaatgagacacgttacagaacctatgttcaggttgcgggtgagctgccctctccaaatccagccagagatgcacattcctcggccagtctcagccaacagtaccaaaagtgatttttgagtgtgccagggtaaaggcttccagttcagcctcagttattttagacaatctcgccatctttaatttcttagcttcctgttctaataaatgcacggctttacctttcctgtcagaaataaaccaaggctctaaaagatgatttcccttctgtaactccctagagccacaggttctcattccttttcccattatacttctcacaattcagtttctatgagtttgatcacctgatttttttaacaaaatatttctaacgggaatgggtgggagtgctggtgaaaagaggtgaaatgtggttgtatgagccaatcatatttgtgattttttaaaaaaagttta

SEQ ID NO: 44406 - DNA, 664 bp, Homo Sapiens
gtctttagtattcagcacactgggtaaagttcagtttagacacaatcaaattggcatcttttaaacataagtgaaatatagagagcttgaacttgagttacttaaagaagatacagtataattaattatacagaacaaaacaaagatgtgtttagagtgactctggcctgactcttgtccatcagcccctagtagcctatcttcagcctttgggaagtcttaacttcccaggttaaactagaatattctggaactgagctgtccaaatttcatcttaaagtggatcatttgactctgaaacacgattctcatggcagaaaaagccctggtgtttccttggagctggggataaaggccagtgagccagcctgtgatgagagctgcccctggcactatctgagtggaaagctcattgggacagccatgcagctatcagagccgactgaagccctgtcccttacccctcaggcacctgatgcttaacttgcctcctgggaaataatgatctagcatttacttggaacaatgattaatcatgttctttaataattgctgacatttgtattttaagctgtataccaatgttcgtatttgacattgattttctaaccattagagatatttaattaaaacttggaaatgaaagaaaaaaaaaaaaaaaaaa

SEQ ID NO: 44407 - DNA, 590 bp, Homo Sapiens
ggcacgaggaaatttctaagttaaagcagcaaaatgaacagctaataaaacaaaagaatgaattgttaagcaataatcagcatctttccaatgaggtcaaaacttggaaggaaagaacccttaaaagagaggctcacaaacaagtaacttgtgagaattctccaaagtctcctaaagtgactggaacagcttctaaaaagaaacaaattacaccctctcaatgcaaggaacggaatttacaagatcctgtgccaaaggaatcaccaaaatcttgtttttttgatagccgatcaaagtctttaccatcacctcatccagttcgctattttgataactcaagtttaggcctttgtccagaggtgcaaaatgcaggagcagagagtgtggattctcagccaggtccttggcacgcctcctcaggcaaggatgtgcctgagtgcaaaactcagtagactcctctttgtcacttctctggagatccagcattccttatttggaaatgactttgtttatgtgtctatccctggtaatgatgttgtagtgcagcttaatttcaattcagtctttactttgccactagagttgaaaga

SEQ ID NO: 44408 - DNA, 721 bp, Homo Sapiens
tctgctttcatcagggctgcagcccccaggcagcagtactgggagcccctctcatctccgagaataaactctgaagccagcgaccctgcggacctgaatcatcagggagcctgtcagaggaggggcagtgactctgcgggacaagcaagcaggctatataagtttcagaaggctgggctccactcagatcttttccagcagctgctgcctgccagagaggcgccttcagagacccagcgcttacacaatacccaccatgtcccaggctggtgctcaggaagcccctatcaagaagaagcgcccccctgtgaaggaggaggacctgaagggggcccgaggaaacctgaccaagaaccaggaaatcaagtccaagacctaccaggtcatgcgagagtgtgagcaagctggctcggccgccccgtcggtgttcagccgcacccgcacaggtaccgagactgtctttgagaagcccaaagccggacccaccaagagtgtcttcggctgagaagtgtgcgccactccccttgctgcccgaatgctcggaaacaggagccttacccaggaactcttttttatgccagaacgcttcctctcccctgctgtctctggggctgccaccctcccccacagtccaggcccttcagccaagggctctgcaccagcaccttggaagcaccaataaagaggatgcccacgtggccccagcaaaaaaaaaaaaaaa

SEQ ID NO: 44409 - DNA, 681 bp, Homo Sapiens
gattggagtgagctgagatcatgccactgccctccagtggccaccacatccggcaaggcagatgggaccatttccttcatccagaacgttctgtggacatcactgctctaggttcctcccttatggagtctcacaagactgtctagccagcaagatctcttttccaaccaggccaggagcacctctccacccactgctgctggtctgaccgccttcctggaagtccctcttgaggcaggccctggagttagaagctgggcagaggcacccacagccttatcctttgccaatctctgactcaatgccacggccactgtagtgagctgaaccacctccagcagtcccctggcagaagcacctggaaaacatgcaatgggaaccttcaccctgaggccaggcccttcccatgctacccaacagtagacaggacaccctgtgttgttggctgcaccggggtgctgggatctgtggatccctggggcctggaagccactctcagcacatacagccactgtgttccgaggtccagtcagctggccgggaaggaattcaacacagccaaggacagaggtccatatgatgacgggtggatgctcgtgtgacttttgctgaccttttattgttttctatgggcaataaaggcaagagagctcaaaaaaaaaaaaaaaaaaaacaaacaaa

SEQ ID NO: 44410 - DNA, 583 bp, Homo Sapiens
  misc_feature (2)..(2): n is a, c, g, or t
tncaggaaacgatggcagaacgagaagctcgggttggatgccggggatgaatatgaagatgaaaacctttatgaaggcctgaacctggacgactgctccatgtatgaggacatctcccggggcctccagggcacctaccaggatgtgggcagcctcaacataggagatgtccagctggagaagccgtgacacccctactcctgccaggctgcccccgcctgctgtgcacccagctccagtgtctcagctcacttccctgggacattctcctttcagcccttctgggggcttccttagtcatattcccccagtggggggtggggagggtaacctcactcttctccaggccaggcctccttggactcccctgggggtgtcccactcttcttccctctaaactgccccacctcctaacctaatccccccgccccgctgcctttcccaggctcccctcaccccagcgggtaatgagcccttaatcgctgcctctcaggggagctgattgtagcagcctcgttagtgtcaccccctcctccctgatctgtcagggccacttagtgataataaattcttcccaactgca

SEQ ID NO: 44411 - DNA, 556 bp, Homo Sapiens
ctgacttgccaatgttgtatctatgttaaatagtaagctgatgtgtatgggagcctaaacaagtgtagtatcctgaacttctcccattaattgctattcacaattgggaaaagtgtggagattggttcctagtgagttttgtggcctactccacatttgctcttccttcctcagggttagtgatgaaaaaaagtaaatatccttttcatatgtccattagaatgtatgaaaaaaatcattttaactaaaagcaaaagaattttatcttatatctaaaaaatatataacttactatatgtttcagttgctctctgaacaaaaattatcttcaatgtaatatgtggaatgtgttttgtagctttctttgaattatgtatggcaacctggtttagcactggcatcctgaacagttaagagtcactgggaaattattgtatttctttataaatttactgtcatatcaattgctggaaaatgctatgatttttctattattaccttctaagttgtattctctcttacactgtagcctcaactaaggcaattttgctatgtt

SEQ ID NO: 44412 - DNA, 968 bp, Homo Sapiens
aaaaaaagataaaggataattaagggcgaagtggatggaggacacagaatagtaggaaatggtttgtaatgctccatgcgcacatagcaaacctcattcaacatacagacctgctcccttttccctaggtccaaagaccttaaaaaacctggagctagaaagcagtagactggaggcttctacagactgtaggattcaaggtgatatttgcagactggctttatgagagacaacactgatctactaggggctggaccctagatggttgccagggcttgtgtgtgaatcaaccctaggaggaaaaacctactaccaaaccagaagagcaggcctaagagtactttgagcttctagaagaagtaagcgggaaaggaagagaaagagtagaaagttggtgcatcttctcctccccaagagcctgagtataagaagttggattttaagggtgggggagctgggttggagaaaggtaatataattaaagccaccacaaaacaacctaaacaagccatgttcatgagtaattgtaagtggcttctggatgagacctggcagtgtctctacatacttcctcagggagatagcaattgaaaatgtaattgaataaatacggaaaggaactgctatttggtgtgttcctctgtggacccagtttatttaatccttaaaatatatttcgggaagacatgatttcgtccatttatgtggatgggaaactgagactcattaatgtgtccatgtcgaacagtgggtagtagagctagatcaaaccagcttaaagcctgttctatcataaagtacgatccgttggctaagggttcgggactgaaacgagtaatataaaaaaaccatcggcacaggaggagcgcgcacaaagggccgtacacgtcacaaggtgtgccgggtggtcacagatcgggtgtggaccccaaacgcacacgcgtcgctgcgtggacacgctatctcct

SEQ ID NO: 44413 - DNA, 711 bp, Homo Sapiens
cttaatatggaaatataccagtgtagcttggtactgtatttttttatattgatctgctgataccagtgataggcttaaagattgtattttcacagagtggaaaccaatttttttagttattgttcaaggagggtgcaatattaagtgttttggaatttgaagctaatttttaaaaggcctgaactatactttgaagaaacccctatagaaaaggaaagctccagctaaataggaagaattagaatattgagcttttttttcctgatttttctctttcctatctttgatggaaggaggaagtagaaagtggtaaagaattgaggctttccttcttggagagctgtaaatgacaagcattaggaaaggtaccctcctagattcattattctttcattctggtttcacttttaaaataaatggcaacttggcacacctaggctgttaacaaatctcaaagaggtttataaaaacgtatagaatacttggaagcaaagtatggatgactcggtatctgctttgttattcctcagaaatactgcactgagtatatgccctcattactggacttcattttgatacttgtctatccttcatagtgccctctacttttaaagggtttatatgttgaaaaactgctgtggccttttatgacctgtatataatgtagaataaaaataataaaatacttgatagctttttctaagtgaccaa

SEQ ID NO: 44414 - DNA, 640 bp, Homo Sapiens
gaaaaacagccattttcaacctttttataaaacctcttcagggaatattggaatattattttgtcaggcaaaaataatccaggcttgagcattgctgtagaatatgttatctgttcaaaacttagcagagcacgcatgcatcacatgctttgtcatcagtatttgagagctgaaccaatggtttttgatggttgccgtaacagaagatctgtgaagaggatggtggtttgcacctgttcctgaagtcaaactggaaaaggttgcaggtatttcaattttctcaatcattttgcataaatgtattaatattttgagtagtaatagttctaaacctgcaggaaggcatcattgtatactgtggtatgtagagaatactacttttacactgctctttatcttaaaatgttttggtatactgtgaatattttcctctaagtatttggtgtattttgacagttattaaaggagaatataaattaaagattctggtctaaactaagaataatggaaagttgcttcgtcctgccttagaggagttttcagttcatcctcttcttgagaaactatgtgtgctgttactaaataaacatttactcaataaacgttttagtttccttgaaaaaaaaaaaaaaaaaaaaaa

SEQ ID NO: 44415 - DNA, 552 bp, Homo Sapiens
ctgcgccccgcgctgcggctgccgtcgcttttgctggtgcacgtgtgtgcgcgccccgagaagccgcccgggcaggtcacgcggctccgcgccctgcccctgacccaagggcagctggttctggtctggtcggatgaacacgtgggctccaagtgcctgtggacatacgagatccagttctctcaggacggtaaggcgtacaccccggtcagcaggaagccatcgaccttcaacctctttgtgttcagcccagacacaggtgctgtctctggctcctaccgagttcgagccctggactactgggcccgaccaggccccttctcggaccctgtgccgtacctggaggtccctgtgccaagagggcccccatccccgggcaatccatgagcctgtgctgagccccagtgggttgcacctccaccggcagtcagcgagctggggctgcactgtgcccatgctgccctcccatcaccccctttgcaatatatttttatattttattattttcttttaaaaaaaaaaaaaaaaaaaaaagggcgccgctcgcgacta

SEQ ID NO: 44416 - DNA, 412 bp, Homo Sapiens
ctcgcacagggcggctcctcagggccaaacgccccagctctgaggactttgtgtttttataaagggaggggatgaggggaaagatacaacactatttatttttttatttatgtcatgtcgggtgtgggatcttgagctctggcagtgatgatggtacttcctgttgtcagcccctcaagcccagctgcaaccagtctggggccattcagccagggacagagcccacagagcccatacacctgtctcccaccagcggggccctcctggcagggtagggaaggaggaccccgggcacccccctcagggcctgactcacgtactgtagtttgcactggacgcccgggccctccctgtcccaaagcccccttgggggaactgtggctgctgggggccaataaagctgtgtaattga

SEQ ID NO: 44417 - DNA, 923 bp, Homo Sapiens
  misc_feature (19)..(19): n is a, c, g, or t
  misc_feature (37)..(37): n is a, c, g, or t
  misc_feature (740)..(740): n is a, c, g, or t
  misc_feature (794)..(794): n is a, c, g, or t
  misc_feature (809)..(809): n is a, c, g, or t
  misc_feature (814)..(814): n is a, c, g, or t
  misc_feature (828)..(828): n is a, c, g, or t
  misc_feature (838)..(838): n is a, c, g, or t
  misc_feature (845)..(845): n is a, c, g, or t
  misc_feature (863)..(864): n is a, c, g, or t
  misc_feature (889)..(889): n is a, c, g, or t
  misc_feature (897)..(897): n is a, c, g, or t
tttcaaaatacaaaaccgnagttttatcagcagcagnagggtgtgggactctgtccaagttcaccgtcaccatcaagccactggctgtggaaggagtttgtccaacagggtcagtgtcacagccacaacttcagaaagcagccatcccgcgtgtcgtccaaacagcagtgcctgcgtcccgctccacggagtcttccagaacacctccctctgaactaatcccggagcaccccacccccagcgagtcccacctggacctcttcaaagtcaaaactcttctctcgggacaaacaaatattcgggactttcgaagccctgaacttgagacaccaagtttgtctccatggaaacacgtagccgctgcagttggacagctgcgtgctggagttctgtccccaaaccaactgcagagaagaaagacgagcctcggcccaggacgcgatttctaacgaaatgcaatagttttctctttttggaaaaatgtttataccaatagttttgtgcgctaattgttattagaacgtttcttatgaatgtgtacattgcagtatattcagtcccaaatgttttgttctcattcacacagaaggtactaatgtcagctcacgtggcctttaaaaacctacttccccgcccgcaggagctcagagcatcgctgggcctgcgccagagtgaggggtgcaggaagacaaagacgcgtgctcactttagaaacgaaaagctgggaataatcacactgnttgtctggtcgtatagcccaaaccttagtttgaatcagacagaaagaatgtctntaaaatatacatctnctctncttggagacactgnagctcacagntaacggnattgtaatgccccggctnnttctcacttcctggtacccatacanagctggtnctgcctttagctctggcctgtctttc

SEQ ID NO: 44418 - DNA, 647 bp, Homo Sapiens
cgggatgagaaaattatcttgaaatatagcaaggaagagaaacaagtttcctttctccactttattgttggactaattgggtcaatttgctgtgacatatcaaagatctctttgtgccaggccaagactggctactgagttctcaattcgttttaatatatagattacgtatgagtgcctattttttcctcctcctttcattttttatcttaatacccattttacttctgaaataattcatctgttttgctttatgaccagctttaatttcaattgaggaataataacaaccctagagattcataggaaagagcattgaaatacattttttgcataaagatacctaaaaccatctacccagcttagggttgaactgaatttctgtgaaataaatttgttttaaatactaattattttaaaactacttaattcttaaaaacaatgtcatcagtttcaaaagtttcactttgggaggatattccttaaagggcatacatagatggtaaagtataaaatatttctgacagaattattcagtattattcaacatttactttcatgtttgttattgtaccacaaagatagtgtcattgttgggttaaaatgttggctgtttttgttaatatacttaaaactgtaaccagtga

SEQ ID NO: 44419 - DNA, 654 bp, Homo Sapiens
  misc_feature (612)..(612): n is a, c, g, or t
  misc_feature (628)..(629): n is a, c, g, or t
  misc_feature (631)..(638): n is a, c, g, or t
  misc_feature (640)..(647): n is a, c, g, or t
gggaccagttctaagggaccatacagagtattcctctcttcacaccaggaccagccactgttgcagcatgagttcccagcagcagaagcagccctgcatcccaccccctcagcttcagcagcagcaggtgaaacagccttgccagcctccacctcaggaaccatgcatccccaaaaccaaggagccctgccaccccaaggtgcctgagccctgccaccccaaagtgcctgagccctgccagcccaaggttccagagccatgccaccccaaggtgcctgagccctgcccttcaatagtcactccagcaccagcccagcagaagaccaagcagaagtaatgtggtccacagccatgcccttgaggagccggccaccagatgctgaatcccctatcccattctgtgtatgagtcccatttgccttgcaattagcattctgtctcccccaaaaaagaatgtgctatgaagctttctttcctacacactctgagtctctgaatgaagctgaaggtcttagtaccagagctagttttcagctgctcagaattcatctgaagagagacttaagatggaagcaaatgattcagctcccttatacccccattaaattcacntttcattccaaaaaannannnnnnnnannnnnnnnaacatgt

SEQ ID NO: 44420 - DNA, 939 bp, Homo Sapiens
tcaagcccatcacgaactaattaaactattgttggtaaaaacagagattgaaattactgtttttatcatatttaaatccctctggtgtatttattgaaatttaattaaaaatatttctacatattgatttgaagccaggatattgatggacctacagatttaacagctcttcaaagttttaactagcattataaaatggcctattcattatatgtatatttttttataaatatttatcaagaacatgaaaatattttattttgtatttgcagtgcagtttggcacctctcttccaggccttcctaagtttttgttagttgtgtcttcgaatttattgtagttcaccgctggtcagtaatctggttcataaggaagctggggcagtgaaaaacacttcgttgatccatccagccctaaagttcattgactaatagctcatgcatcttattaaatgggattctggacttctacaatagtgtggaaagccacatcacaaaaaaagccacatcacaaaaaaaagccagtgcctgttgagtatatcaaaccaaaaaagaaaaaaaaaagttttaagaggggtcaggctggcagataaaagtctcttatgaagcagatataaatccagtaagctatttttttctacctatgggcaagttcataagtcattgctggatcctgaaccaggtgttcttttgtgtaagtaccaaccatattttcagtcagtcccagaagccagtttaacccctgttagcaacttaacttagaactgggtgaccacctgggctgggatggtgggaaaaataaagtggtcaaaaacccctgggcctttcaatgggcctaattctccttaaatgcccctaaaatgggagagtttcctttaaatattttaacccggggggttttttggtttttaaacgcccttatggggggggtaaaccctaa

SEQ ID NO: 44421 - DNA, 862 bp, Homo Sapiens
  misc_feature (704)..(704): n is a, c, g, or t
  misc_feature (753)..(753): n is a, c, g, or t
  misc_feature (773)..(773): n is a, c, g, or t
  misc_feature (814)..(814): n is a, c, g, or t
aaaaaaactattggtaataaaccttgatggcattgggcaaacagtagacttatagtagggttggggtagcccatgttatgtgactatctttatgagaattttaaagtggttctggatatcttttaacttggagtttcatttcttttcattgtaatcaaaaaaaaaattaacagaagccaaaatacttctgagaccttgtttcaatctttgctgtatatcccctcaaaatccaagttattaatcttatgtgttttctttttaattttttgattggatttctttagatttaatggttcaaatgagttcaactttgagggacgatctttgaatatacttacctattataaaatcttactttgtatttgtatttaaaaaagaaaaatattcctatcctgctcactggtaattaacataggtttaaaatggcttcaaatgtggccctatagacggttaaaattgtaccttatcttggcaaaacttcagagcaccagtcagtgcatgcaaggtgccattttttattgagatgcttagaatgtttctttctgtgcacaagacttaccctaccagcagcagagccattctctgttgagtggttcattttgaagttccacagattgaagagaacatgccaccaatcacctcacatcttcttggtggacatgataaatgacacaatgaacttgatttctttactaccttgctgnagctttttatccctacctgtgaaccttcaaagactgcattaacttttangctacataggtccaattgangtataatatcagtacaccaaagattttaatatggccctcgngtgaccattcttcaacggcctaagggccactgcaaagaccttttggaa

SEQ ID NO: 44422 - DNA, 593 bp, Homo Sapiens
tttgcagcattgcacttgaactaaatgagcggctaattaaagaagatcaagttgagtaccatgaagggctaaagtcaaatttcagagacatggtaaaagaattatctgacattatccatgagcagatattacaagaagacacaatgcattctccctggatgagcaacacattacatgtattttgtgcaattagtggtacatcaagtgaccgaggttatggttccccaagatacgctgaagtgtgaggaaatgcagatgtacgtgacaatgagactgacctttctcaggaatatttggagctgtgcaaatgttaaaatttaaagatttgatatacatggagtgtttcttctcgacaccaaaattttcatgtgttccaacagggtgcttacatatttgtaaataagcaacttgaaagtgcctggaaaattgcaccactgtgcttggtttgtacttttttaggtaaatctatatgctgaaaagtagagctcaaaaacagtagttcaatttgcttaattattgcttaaaataatggtactatgtaaaattgtataatggaatacaataaaaggtaaaacttaaaaaaaaaaaaaaaa

SEQ ID NO: 44423 - DNA, 695 bp, Homo Sapiens
  misc_feature (508)..(508): n is a, c, g, or t
ttttttataccccaaacaccatgaatctttttgagagaaccttatattttatatagtcctctagctaccctattgcattgttcagaaactgccgaccagagttagaacggagccctcggtgatgcggacatctcagggaaacttgcgtactcagcacagcagtggagagtgttcctgttgaatcttgcacatatttgaatgtgtaagcattgtatacattgatcaagttcgggggaataaagacagaccacacctaaaactgcctttctgcttctcttaaaggagaagtagctgtgaacattgtctggataccagatatttgaatctttcttactattggtaataaaccttgatggcattgggcaaacagtagacttatagtagggttggggtagcccatgttatgtgactatctttatgagaattttaaagtggttctggatatcttttaacttggagtttcatttcttttcattgtaatcacaaaaaaaattaacagaagccaaantacttctgagaccttgtttcaatctttgctgtatatcccctcaaaatccaagttattaatcttatgtgttttctttttaattttttgattggatttctttagatttaatggttcaaatgagttcaactttgagggacgatctttgaatatacttaccctattataaaatcttaaaaaaaaaaaaaaa

SEQ ID NO: 44424 - DNA, 919 bp, Homo Sapiens
  misc_feature (652)..(652): n is a, c, g, or t
  misc_feature (667)..(667): n is a, c, g, or t
gacacattttttttctcccctttttggacactttttttgaatggttttctaacaacttgaagcacaggatcaaggaattagggtggtctacttgaggcagatgggatagtagctgggaactgttccctttctgattaatttcagcagcatcggaatatatttggagcacaccctagtaacctcttgagattaaattacatagtcttaatatttctgttcctccatgcaactgatgtttgttttttaaagggtaagatgctgcctcccaatgggtgatgccatctgactggtttccccatgtcctcccattcacccatctctgctcccacccttgcctgcctctaacccaccactggccagcccccttgccctactctgggctgctgaacactggtgctgtggtggttttcaaggttaattcctaggctaaccgtatggcctatagtttaaaagcacatctatgttcactgccactctgaaaaagggaattatttctcagtctttcaaggcttgagactaatataggccattgtgattcaggaagaaacccaaggttggaggggtgggatgagtaccctctgaaaaagggaatttgctggtgaaaagaggctggatctttgtggaagactgtctggggaatggggaagtactnacctggagatttcanattcacttggcctgcaaacaacagaagtatccgtatcttccacatgtgaatgtcatttgcaagggtgactctagacaaactacaaaccgatggaccgtcaagctccccagaaaccccttgggatggcagcgttggcttcaaagtgtttcctggtttctgggattcccttgggtagggaaccttttaagaaaaaaaggaaaactttgaaatgggggttgaaattaccggatcccttttaaccttttttttttt

SEQ ID NO: 44425 - DNA, 722 bp, Homo Sapiens
ggtatggggactcaatgggcttcttaagagagaataagttgaaatcaatgaccagaagaccctgatggaagtggaggagaatcatctcaggcaaactttttgtgtgccagtaacagaaaccctctttgtgtgatcacatgcaaagtataggatatttgcaatatagccatggggaggagtgcagggcccaagggtagattttagccaggcctcccaggaacagaactcggatccgaaaagcccagagaagctagagctgcccctccaacactctcggatccacatggtctgtgttctctagacccccctgcatgttagcggtgttctctctctgtggactgactgtccttctcagtgaacatgtccacccgacagctcctgagtttatatcatctcaaccctcacaacccacagaggctgtgtctcctagtcacagctttaaattactggaaaaataaatgactggccaaacttggagcaggtgtccatcccagccctgtgtagttagagcaggaatcaagatctcaacacaaatgtggctgccaagcactcagccccggggcgaggggtcaagttcttctcagagaaagaggaataagttggttctcagaagacatcacaagatacgtgtgtacccaacaatctctgatctctgctgatcttttgcttagacgttaacttgatgcatcattggaaaggtgtttctctcatctctgtcctag

SEQ ID NO: 44426 - DNA, 611 bp, Homo Sapiens
  misc_feature (549)..(549): n is a, c, g, or t
gagtaggaaggaacttgaagactaaagattttactctctcccctatccatgccccctacctctgactctctctgtgtgaacaggaaactttagggtagatgaggagaatgaattggttatcagagtggaagaccatggcccaggatccctgagctttcccagtagcctccagtttcctttgtaagacccagggatcacttagccatagcctgaatcttttaggggtattaaggtcagcctctcactcttccttcaggttactaacaaaatttcgtagctaaagaatgccatggccgggtgcagtggctcacgcctataatcccggcactttgggaggccgaggcgggcggatcacgaggtcaggagattgagaccatcctggctacgacggtgaaaccccgtctctgctgaaaatgcgaaaaattggccgggtgtggtggcgggcgcctgtagtcccagctactctggaggctgaggcaggagaatggcatgaacccgggaggcagagattgcagtgagccaggatcgcgcccctgcactccagcctgngtgacagagccagactcccgtctcaaggaaaaaaaaaaaaaaaaaagaatgccatgccagga

SEQ ID NO: 44427 - DNA, 626 bp, Homo Sapiens
cacgagggctcccctcaaaaagaagacactgtctcatgggcctgtgctgtcacgagaggaacagctgcccctcctgggccgcttggtgagaggtttggtttgatacctctgcctccctcctgccagcatggattctgggtggacacagccttgtggaaggtccagtaccaccaagagctgcccatccactcccaccccacactgtatcaaatgtatcacattttctcatgttgaacactttagccttaattgaaaatgagcaacaaagctggacaattgctagttgtatataaaatttaatctcaccgaatgtacagttttcaaatttcacgtgtatattaaggaactgatgcatctgagcattctgaaagaaagaaaaagaagctactttagctgccaccccattctagaaaagtctcttattttcaagctgttctaaatagcttcgtctcagtttccccaaaaggggtacccaggcccctcctctgtgtgccccagctgcatcagccagcttctaggtggctccattgttttctgccacctgacaacatttttcctcaattactgtacaactactgtataaaataaaacaactactgtataaaataaactctctcttttccctg

SEQ ID NO: 44428 - DNA, 691 bp, Homo Sapiens
cacatgtgtatggcggtgaggcgggcgggtacatggcgggctctgtgggactggcgttgtgcgggcagacgttggtggtgcggggcggcagccgattcctggccacctccatagcaagcagtgatgatgacagcctcttcatctatgactgcagtgctgcagaaaagaagtcacaagaaaataaaggggaggacgcgcccttggaccaggggagcggtgcgattctggcgtccaccttctccaactctggcagctattttgctttaaccgatgacagtaagcgtctgattcttttccgtacaaaaccatggcaatgtctgagtgtcaggaccgtggcaaggaggtgtacagccctgactttcatagcctcggaggagaaggtcttggtggccgacaagtctggagacgtctactccttttcggtgctggagccacacgggtgtggccgtctagagctggggcacctgtctatgctgttagatgtggctgtgagtcctgatgaccgcttcatcctcactgccgaccgggacgagaagatccgagtcagctgggccgcggcgccccatagcatcgagtccttctgcttggggcacacagagtttgtgagccgtatctccgtggtgccaactcagcccgggctgcttctgtcctcctctggggacggcacccctgaggctctgggaagtacagg

SEQ ID NO: 44429 - DNA, 843 bp, Homo Sapiens
gacttcagaggttatgagtcagacatgaactgggagaaaggcgaaggccagcccttcgaatattttgtttatggagctgcctgttccgaggttgaaatagactgcctgacgggggatcataagaacatcagaacagacattgtcatggatgttggctgcagtataaatccagccattgacataggccagattgaaggtgcatttattcaaggcatgggactttatacaatagaggaactgaattattctccccagggcattctgcacactcgtggtccagaccaatataaaatccctgccatctgtgacatgcccacggagttgcacattgctttgttgcctccttctcaaaactcaaatactctttattcatctaagggtctgggagagtcgggggtgttcctggggtgttccgtgtttttcgctatccatgacgcagtgagtgcagcacgacaggagagaggcctgcatggacccttgacccttaatagtccactgaccccggagaagattaggatggcctgtgaagacaagttcacaaaaatgattccgagagatgaacctggatcctacgttccttggaatgtacccatctgaatcaaattgcaaacttctggagaaaacagagtgcctcttccccagatggcaatctgtcctatctctgtgctggaagatgctagatctgaaagacagagtttccacagttcagaaaatcatcccacaaggtgttgcttttctaatggagcttgaatttaaagtattcccatttagatttggataagatatgcttaaggcatctataagtcatttcatgtttaaaccataattggttcctctaaggta

SEQ ID NO: 44430 - DNA, 585 bp, Homo Sapiens
  misc_feature (556)..(556): n is a, c, g, or t
gaaacagtgaaatgagaaattctgcagtggccacccggaatatcagtctgtagctcttgggcctggatttctactatgttagtgagtgtaggaatatactgtgtctttaatggatgaaaattcaatgtatgctgtgaatttgttggtttgaaccattgaaatttttcattagacaatgtttacatacctcacctgaagaacctttgagagtgtatatataaaattttaaaatatattaagttgctttaaaacaatatgtatagctataaaagttggagttattttaactttgaatatgtaccaagtctcttaaatattgaaatcttgtagacttcttgtgcttctgtgttttgctttcctatcaggccatgtaggaaactgtgttcttgttattggtagaggggccctcactgaaatccaagcttggaaggatgtcctgtgttgtttcagattctcttgtttggttttgaaggatgcggtgtggagccagaggatgtgtgggaggggtttctctaacactgacttctattccatgagctttttcaaggcgcttatnttatggcagcgtatttaacttctttgata

SEQ ID NO: 44431 - DNA, 664 bp, Homo Sapiens
  misc_feature (583)..(583): n is a, c, g, or t
atctctgtgctggaagatgctagatctgaaagacagagtttccacagttcagaaatcatcccacagtgttgcttttctatggagctgatttaaagtattccatttagatttgatagatatgcttaagcaatctataaatcattttcaatgttataaacactaattggtttcctctagggtgatattcgtcattactctgtctcttcaatccatccagctaaatggaataggtgatgacttgcatgtgactcctacttggcttctatccaccaacagaaattataccatatagtgaaaggcaattttctaaataatttcattactaatatgaactgtgaagttgtcattttttcatttgtccttttctgctatcaccttcctcttgtcagaatgaatatagacactgtatctaagtgggaccaaagaaaaaaatagcgaactttcaccaaagttttcatgaaaacccaaaagctttaaaagttactatcaagaaattgaaaggaaacccacagaataggataaaatatttgtaaatcatatttgataaaagtcttgtaaccagatacataaagagctcttacanatcaataaaaggcaagtaatttaaaaataggcaaaagaattgctggatggtatggtagttctatttttagtttttacccta

SEQ ID NO: 44432 - DNA, 707 bp, Homo Sapiens
gattaggccaattgtcaatcagtattcagaaactagaaaggaacaatgagatacttgtttatggttctttagggcatatgtttgaaaaccctctcatctcagatctgtatagctggtgtgtgtttgtgtccataaatacacgtgcattgctgtcgtgcccattaagaaagggggagtaagtaaaagaggaatcgctcagatctttccttggatgaacagcagtggcgtggttggtgtgttgactgtgaacaggctgacttagctgttgatgtatactcagaacctccatctcctcccagaccctgcacttttccttctctgcagtctgattctctaatgactgtcactggacaaaccccagttttatgctcgcttagtaaaaataagtttaaacatttcatggtggttgacagaactttgtccccaaacatgcggattcaattccttaaaactcgttgaacgtttataccaaaggtcccgccccgcaggtgtgtatgtggtgcacagagggtgaggtttggagcatcgggcactgtgtgcattgctaaggggacatagtgagacaatgtgggatttaactaaaaacacatcaattgtgtgtcacattaccagtgttgtcaggtatttgttcttaatggttatcgtaatatattttcagttgtttttctaatttaattctctccgtctgtggtctgactgtgaacttg

SEQ ID NO: 44433 - DNA, 783 bp, Homo Sapiens
agcggaaaggagcattcagccgggaggctttctttggcggcaatggaaagattaaccttactgtgttcaaacttctccaggagcatcttggggaatttatattcctttgtgagaaatgttttgatcataagcctagaatgataagtaaaagaaataaagataattctactgcttgttctcacccggttacaaagcatgagtttgaagacaataagtgccttgtccacattttgcgagagacaacagtaaaatactccaaaatacgttcttttcatggtcagtgtcagcttgatttatgtcgacatgaagttcggtatggctgtttaagggaagatgagtgcttttatgcccatagtcttgtggaactgaaagtctggataatgcaaaatgaaacaggtatctcacatgatgctattgctcaagagtctaaacgatattggcagaatttggaagcaaatgtacctggagcgcaggtacttggtaatcaaataatgcctggatttcttaatatgaagataaagtttgtgtgcgcccagtgtctgagaaacggtcaagtcattgaaccagacaaaaacagaaaatattgtagtgcaaaagcaaggcattcgtggaccaaagaccggcgtgcgatgagagtgatgtctattgaacgtaagaagtggatgaacatccgtcctctccccacaaagaaacaaatgcctttacagtttgatctgtgcaaccatattgcttctgggaaaaaatgtcaatatgttggaaactgttcctttgctcatagtcctg

SEQ ID NO: 44434 - DNA, 806 bp, Homo Sapiens
acaatgttacaaatatgcagaccgtgttgtttgctccagtgataccttgttaagctaggtggctgagtcgcttatggttttaatgcaatgagcaatgtggatatgaccaagagttgttgtgcaagttgacaaatgccaaatagaaaaccacttggccatttatttctatgttcactaaaaatcctattgccttgtgtgattcttaatctcttttgcgaacctttcagtctccgctagctctttcctaatgagctttacagcagaagctgttttatcgttaagtgccccacagagacactttaccaggaggctgggagagttctccagatttgggagaggcgcagagacagtgtgtgagccgagccctgtctcagcaatccacctggaggagctagagtatcctcctccctttaccattcagaccgagagaaaaagcccagcttgtgtgcaccctcgtggggttaaggcgagctgttcctggtttaaagcctttcagtatttgttttgatgtaaggctctgtggtttgggggggaacatctgtaaacattattagttgatttggggtttgtctttgatggtttctatctgcaattatcgtcatgtatatttaagtgtctgttatagaaaacccaaaccactggtcctgttaaacttttctcagtgtccagactttctgtaatcacattttaattgccacctcgttattacctctactttgaaatcctgggtcctgttcaagccagggtgttttccttcgttctgtaataacaagccgggagaaaaaacaaaacaacaacaacaccaa

SEQ ID NO: 44435 - DNA, 557 bp, Homo Sapiens
cataaaggagagaagccctacgaatgcctccaatgcggaaaagccttcagtatgagcacacagcttacaatacatcaaagggttcacactggagagaggccctataaatgtaatgaatgtgggaaagccttcagtcaaaactcaacccttttccaacaccagataattcatgcaggggtgaagccctatgagtgcagtgagtgtggaaaagccttcagccggagctcatatcttattgaacaccagagaatacacactagggcccagtggttttacgaatatgggaatgccctggaagggtccacctttgtgagccgtaaaaaggttaatactataaagaaactgcatcagtgtgaagactgtgagaagatatttaggtggcgttcacacctaattatacaccagagaattcacaccggggagaagccttataaatgcaatgactgtggcaaagcttttaatcgtagctcaaggcttacccagcatcaaaaaattcacatgggatagaccacttacatataaatgtgtatatatgtgaataaacctacagccttaac

SEQ ID NO: 44436 - DNA, 763 bp, Homo Sapiens
  misc_feature (739)..(739): n is a, c, g, or t
tgctcctgtccagagcagagaggaaccggcgcctgcatggggactatgcataccacccgctgcaggagatgaatggggagcctctggccgcagagaaggagcagccagggggcgcccacaaccccttcaaggactgaagcctcaagctgcccggggtggcacgtcgcgaaagcttgtttccccacggtctggcttctgcaggggaaatttcaaggccactggcgtggaccatctgggtgtcctcagcccctgtggggcagccaagttcctgatagcacttgtgcctcagcccctcacctggccacctgccagggcacctgcaaccctagcaataccatgctcgctggagaggctcagctgcctgcttttcgcctgcctgtgtctgctgctgagaagcccgtgcccccgggagggctgccgcactgccaaagagtctccctcctcctggggaaggggctgccaacgaaccagactcagtgaccacgtcatgacagaacagcacatcctggccagcacccctggctggagtgggttaaagggacgagtctgccttcctggctgtgacacgggaccccttttctacagacctcatcactggatttgccaactagaattcgatttcctgtcataggaagctccttggaagaagggatggggggatgaaatcatgtttacagacctgttttgtcatcctgctgccaagaagttttttaatcacttgaataaattgatataatanaagggagaaaaaaaaaaaaaaaaa

SEQ ID NO: 44437 - DNA, 703 bp, Homo Sapiens
ctctttcagggctgaatcgtctcaaacttgtcattctgaacaaggtgataaaaagatggaggaaaaaaattcaggcaacttccagaagaaggctgcaaacatgcttcagcaatctggttctaagaatacaggagctaagaaaagaaaaatcgatgatgcctgatatgaatgttactaaattttctaattaaagatggtttatgcatgtatatgccattatttttgtagttagacaatagtttttaaaagaatttcatagatattttatatgtatggatctatattttcagagcttatctctgaagatctaaacttttgagaatgtttgaaaattagagatcatgaattatataattttccagtgtaaaacaagggaaaaatttttatgtaaaaccctttaaatgtaaaatatttgagaataagttcatacaatcgtcttaagttttttatgcctttatatacttagctatattttttcttttgacataactatctttttgaaagcaatattatactgacagaggctcactgagtgatactttaaattaaatatgtagatcaaggatgtccaatcttttggcttccctgagccacattggaagaagaattgtcttgggccgcacataaaatatgctaacactgatgatagctgatgagcttaaaaaaaaaattgcaagaaaaatctcatgttttaagaaagttt

SEQ ID NO: 44438 - DNA, 842 bp, Homo Sapiens
  misc_feature (808)..(808): n is a, c, g, or t
  misc_feature (810)..(810): n is a, c, g, or t
  misc_feature (824)..(824): n is a, c, g, or t
  misc_feature (839)..(839): n is a, c, g, or t
aaggtgccaattcatacccatgcatttgaaacaccatcctggcatttctggaccgcaagagacttggacgtcggcaacaagacatgaaaggtctaccttcatgtaatgggtcctccttcagaagagagccctcagctactctgtgaatgacttgcatagctgcaactgtaatctcgaaggtgtcactttgttatttacaagatgcttcttaaatgggctgctcctgagctcagtgtcaaggtgattcaactgtagtgccagacaatgatttacacagctcagataattgacctgtccagttaacagatcattgcttcataagtttttaaattattttaatttaatattctttagtagaaatagtccacaaaaacattttcttgaatttaaatatacaacttttatatcatgtatcaaaccagattttatattcaaacgatcacattttaaattctgtacataacagtaagcgcactagtcaaaagacatttatgtttgaaatgtcatttagatcaaacacaagggtcaaagcccaggacaagtattaaagttttatacttaaagagtactaaagggccagtgtgcagatgggtggattaaaaaaataaataaaataaaaaatagtactaaagggcttacttcaggcaaaagtgttcctgacgtaccaaaaagtaagatatagtttattttcatgcctccctgctcctagtaatgtatgttttgtgctgaactggcagctatcccaatgtgaaatgtattttggatgtatctggtgtcatttttctattaagaccaagtataaatgttngnttgtaaaggcatanatcttgactttgaantca

SEQ ID NO: 44439 - DNA, 560 bp, Homo Sapiens
ccccgggctgcaggaattcggcacgagctgcaaagtatctaaatagacagaaacaacacaaatatttttgctggagtcaggagcactgtgaggcacagaacatctcccagaaagcagattttttttttctgccgaaaaaccaatatatatatgtatgatcccaattaaaagacaaaagcaaatgagccccaaactgcctgtcttcagctttgcctgggagctgctacctttgctcttctagcatcttctaggtaccaaggatattagccacttgagggtgttgggcatatttgtttcattgtaggcaaaatcctcttgtggtttcccctccccaggtattgttgagtctgttcaaagctgggtgtgttgaaacactgcacaaatcctgccactcttgatgtgccgcttgtctcagccttggcagaggctgagtctgttcctgtgcccacctgtccagcaggttttgatgttggctcctgaaagagtttgtatttattttattttgcactagtcacagttgttgttaaactgtatcaaatgttttgggagattatttgcct

SEQ ID NO: 44440 - DNA, 881 bp, Homo Sapiens
  misc_feature (528)..(528): n is a, c, g, or t
gggtttcccccggtggagccttaggttagtgcccagtgcagtgccagactgtctcctctgctcctcccacctcatccctaggaggacccaccagtggagcacatgcagcctcagtggagatgcttggtgtggggatctgggtgaagggggttgagtagcgactgcctgggagatggctgttagtaggtctgcgcctggtgtctgcctcgccatcctggggtaaggggcagagagaaggacttgtcttatgtagggtgtggtcagccttggggccttacctacccagttccatgatatttcttgccctgttccccctggaatgtgcagtgggccagctgagagtacgccttgaggaggggggatgaggccttaatctgggaggcctatccccctatcccaggcatcccagacgaggactggctgaggctaggcgctctcatgatccacctgccccgggagggcagcggggaagacagagaaaagcaaacacattcctcctcagctccacccacctggagacgaatgtanccagagaggaggaaggatggaaactgaaaacaccggggcccctcggccttctctctgctagagttgcccctcagagggttcagccctgactttccagcggtcctcaggaacacctactaattccctctccacttccttcctggggtgggaacagtttactggtcccctacgccacgcaaaagatgacaattttactccacacataattttatcccaggccccttttttatgtccccacggcactgggtggagcggggcctaaaggaaaatttcctcttggtttcttggagcggacttaccaccctcgtggtaggatatccccccgcaaccctctacctttctaactcaagggt

SEQ ID NO: 44441 - DNA, 785 bp, Homo Sapiens
gggggcaggggatatgagggccagtgtagagattaaacagaataatgagtacacaagtttttgcctatccctttccttaaaatataagaaataaaggagctcttacgaaaaacccaggttagaccgcataaaaaataaagtgaacagtgaggtggtagcaagacttctttttagaaaagaaagcatttacctgcctgtctgtaaggtggaaatttcatcagtttgcaaacgataagaaatgcagacttgctcttgatagaaatgcttagaaacactctgggggggaaaaaagctccttccatatactgtgagacatttgttaagtgacatctattgtttatcagcttttaaggataaaaaaggtattttaaaagttggatatttaggatatttgaggatattcctttatgagctctccatatccttcttgagaaactggttaaaaaaggaataggggttgagtgttacagagagtagtctgaagattcctgtgtaaaagcaaagctaacaagcaatgaagacatgaagcaaaatactaatctaattgtgtaaagaaaggatattttaataagttctttctgcttgctgctaagagtttgctaaagtgtcatgaattattctgggtattactaaagtttctatgaaaacacttaagtagatttttaggaataaatggtttctgggaaaagaactatgttatgatttttggagaaaatggtaaaggattacttgaagggggtttaaaattaaatttttcatttcgaacggaaaaaaaaaaaaaaaaa

SEQ ID NO: 44442 - DNA, 717 bp, Homo Sapiens
  misc_feature (595)..(595): n is a, c, g, or t
  misc_feature (664)..(664): n is a, c, g, or t
  misc_feature (673)..(673): n is a, c, g, or t
  misc_feature (703)..(703): n is a, c, g, or t
ggtgctttggaccatggtgatccacatcggcctgagcgtgaagagcttggcgggaggtttggtgctgttcttcttcttcactgcctttgccaccctgaccgtggccatcctcctgatcatggagggcctctcggcctttctccacgcactgcgcttacactgggttgagttccagaataaattctacagcgggaccggtttcaagttcttacccttctccttcgagcatattcgggaagggaagtttgaagagtgagtccctgtgagggccgtgtgccccatgctaccctccccgcctccctccacagtgatcagctgtgcctctctgcctgttggttgtgatctgtgggcaccagctcattcgtgtcaccctgtctgtgagtcatttagatagaatagtcctccttgggtctcccaccacccctagctttgtgtgtagtgtagtgattttctggctgtcactcatactcactgggcaccagccttgccctcttagcctccatccatccagacagcccttcccacctcctggtggtgagccagtctgcattcccacgccatcccaaagccctttcatcttccccgtgcattgtanatggaaggagcacccatgccattcacatctagactttgagttccctgcatctgccaacgtagtttctancaagagtantggggggagtaatacagattcttccctaanaaggggacactggg

SEQ ID NO: 44443 - DNA, 499 bp, Homo Sapiens
ttcactagggagccagtcgtagttctttgtaatcctctttcttccaaacctgctttgctgaaagttgcagaaaaggaagtgtgtggagagaaacagaacccttcagggtgggtcagaggacgccatccacagtggattcgtgttcgtttgcaggtggaagcagtgatttttaggacccactgattaaaaacaaacattcccaagtgtctctgagagatgctgtttatttgttaattaaaaagcttttttctctgtcttttaaattatggctttcatgtaataaggatatttttagtgaaaaattgttttcctttcaaattacagaccttttaaaaaaacttaatttgagcgagtaccttttcatttgacacttttcctgtttctaaccttaggaaaccagaatagcgtttggcagacacgacgttttcagtttacctttgacacctgccccactccattttgctttgtgatgtcttcatttaacaataaattatctgaa

SEQ ID NO: 44444 - DNA, 680 bp, Homo Sapiens
  misc_feature (538)..(538): n is a, c, g, or t
  misc_feature (617)..(617): n is a, c, g, or t
  misc_feature (658)..(658): n is a, c, g, or t
gccattcctgtccttaaggcacagtctcatcagaagtctaatacctgggcaggtttataacatcctgagagccagcctgacattagacagaataccctttgtaatacattggaaatttttactcatgcctttttgtttaggataaataggtaagcacaaagagctcttcaaaatcagaaaaaacaataggagtccttccttgtcttttctgtgatctctgtccttgtttctgagactttctctaccattaagctctattttagctttcagttattctagtttgtttcccatggaatctgtcctaaactggtgtttttgtcagtgacagtcttgccagtcagcaatttctaacagcattttaaatgagtttgatgtacagtaaatattgatgacaatgacagcttttaactcttcaagtcacctaaagctattatgcaggaggatttagaagtcacattcataaaacccaagtgctatgggtgtattattcatgatagctggcccacaggtcatgaattgaggaggaatttgctttcanaaagcaagaatgtccaacactgaaagtttatagttttatatttggaccttgaaaggtaagaaaaaaccaggttctccanagttaggaatagggaactaatttatgaaacagccatcttanaaaaaaaaaaaaaaaaggacgc

SEQ ID NO: 44445 - DNA, 623 bp, Homo Sapiens
gctttccaccgagtatgtgtttattctctctccaggaaagcaggtcaaaagaaagttagcaggatcgagtgtcttcttccttagaaataggttctggtagcttctgtgcctgggtagcatcagaccagtgggagtaaaccgagtgttaagtgtcaaggtgagaaagcctcacattctctcaagacagttgctctaggagctgagttgctggttggaagtgtggagattgcatttctggcttctctcaatggcttgtgttgaggactctgggtgctcctggccctaattgtgcaccctgatccccgtgcttggagctaggcctggtggcgtgctctagccctctcagttaccagctctttggagaaggatcaaaattcagatggaatgtgggatgggtaataggtgagagtagaaacccttccctccaggagggccccgctgcctcccacagaaacccacctaccataagatgtcttcaggtggccttgtccaaggatgggggtcaggcattttatatcaaggttgctctgaacatattttattttttaaaaaaactatgtttgtgaattttgcgtatactggcaagcttttgaaaatgtatttaattctgtattgtttaccaa

SEQ ID NO: 44446 - DNA, 628 bp, Homo Sapiens
  misc_feature (533)..(533): n is a, c, g, or t
  misc_feature (540)..(540): n is a, c, g, or t
  misc_feature (542)..(542): n is a, c, g, or t
  misc_feature (552)..(554): n is a, c, g, or t
  misc_feature (556)..(556): n is a, c, g, or t
  misc_feature (564)..(564): n is a, c, g, or t
  misc_feature (628)..(628): n is a, c, g, or t
ttttgttaatactgccaataaaatcattttcaacttattttttaaagtaggttttcttactttggtggaccagaagtgagagattgttatatttaggatataggcaaatacagtaaaagttaaaaaaaaaaacctgacccaaaatatactctgatagactatattatattcaattttgtatccccagtcgagaacatcttgtaagccttcattaagggccacctgctgtctgttgaactagactgaacaaaatatattttctcacaagctccatccctttttctttaggacatgttatatataatccatctcagaagttgaagatgtgatgttgctcggcctttggaataatttttaaatctgtaaatgtctatatgagcagaaacaaaacattgtgtaacatgttttaagcattattgtaattcctgtgttaacagtttgtgtgtctgctgctctggttttgaaacatgtttgtatatagatacaggagttggcataaattttgttaaataaagcaacaaaaattttaaaanaaaaaananaataaaatannnanaaataaanaaatttaatattataaattaaattttaaaaaatttataattaaaaatcgggggggggccgggcn

SEQ ID NO: 44447 - DNA, 790 bp, Homo Sapiens
gaccggaccgaaggagtagaaacttgactgcttccacgtgccttctacccaagtgcttttgcttacagcagatactgtttctctgtgtcctgaagtcgccagaggagaagggaatcattgtttacacatggggatcagagcagacttctccactactgtgcaatagagatacagctctcttcagagtaactgtgaaccttttataaccaacactagagttagttttaaaagacaagatatttataatgacgactgtatagcttttaagttatttttctagtatgtggctttctgtagccgtggtaacggccaaactgttcatcctagctacccatgctctgtgtccaggcttgctcctggcaggtggcattcatctcagatgtgagcacaaggcattggccctctggactcctttctccttttctttcctctctaggctgctcctgaatcctgttctctgacatccgtggagcccctcctgcatccacctatgcctcctataagtccagttgaaatctcagcctccttcaacattttcttctcgtgtgtggcccacatccctccacttctccaacttctgtttaatctgatcacggctctttttaagccctggcagcattttggtccctgctccttgcccatagtaaaacagcttgaaatatcccatgcaagagagtagtttcaagtgggcaactctgctctctatttaaaagcgtgcacaatcaaaagtactatgcaattttaggacaataaagaacatacagttttaaaaaaaaaaaaaaaaaaaccc

SEQ ID NO: 44448 - DNA, 582 bp, Homo Sapiens
tattgaagctttttggattatgagtatgctgacttttcacgattggctggtgcatgtttagacttaaatgtcatatccttcatgtctcaaagccaaaatagtaacatctcatctcagaacagagctgtgaccacatgccaatatatgtgtcacaaagtctacatatgttacattccttggaagtctccttaaatgtttcacaaaatgtcaacaagcttgttttgttattgatatttccgagattgggcacatttaagacagtaaacgggaaaggtggtgaagatgctataagaagatgctgtatcttgagaattgaaaaatgagaatctgacatggtttgaaaaatcatgaagggtatatataaaggatgcatgtgtaggagccattaaaattcataacagtatgtgccccttcagcgttttaatcttatgaagtggttaagagataagtcttcggagttggacaaaaggatttgaatttaggttctgtggattattatgggtccttgataaattctcaaagcctttttttttgttcatctctaaaataggaatataggattacctaccacattgactcgta

SEQ ID NO: 44449 - DNA, 541 bp, Homo Sapiens
tcgacgccttgtccaagggacagagccttctattctgagaatcccaggggccctcagaccctgcctgatgctatatgcagaggcccagggaccaggtgtgtttcctctcaccaagaagaaagtacacactgatgagaaactgagaaccaagacaggcatccctgggtggcctttcctgctgacactccgtgagctgacccagcagaattctctgtaggaagcatcggactttgtccattgaatatgtagcggctgccagagatcacacatcaatgcaaattccagagcctgtctgctatagctcagtgactgtgttgtgattcatagtacattaaaaagagagagagagagaaagaatcccacagggcactattaaaatacttctctccttccctgactcatgacactcttcctgacagcagaatgactgtgtgaccttgaacttcacatttcccacattggcccttggattgttcggattaaccccttccactcctcactggctggttcactgtgttctgactagtccataaaaataaag

SEQ ID NO: 44450 - DNA, 1108 bp, Homo Sapiens
  misc_feature (789)..(789): n is a, c, g, or t
  misc_feature (791)..(791): n is a, c, g, or t
aactcactactgagtacgattcagtatgttcctgtggatgtctgctgtgactaatataaatttcttgcagaatcagctacacttaattatgttgctgatagacaagcatccacgcttcagctggcactaagtgttttcattgtaggatcagcagcaggttaaagactgaacggttagtgaagacaaatgtcttaagaggctgcgatgtctaggttgggcttgtgacttcttagtggcctagccttcttgatggcaccttgaaagtgaacttctagaaatctacatttaaaaggcaaagctttaaaagcagagctagtctattctagttactgatgcaactaaaattctgtatttcttaagatggagccactgacgagatgtcacagtatagagcctgcagtctcaactcattgtgatcctaatggtctgggtgattggatggtttgagttgttagggattttgagtttttcattttattgcatatctgggttggatgttagactaaaggaaacccaggaatatttacctggtgttacatttaatatttaatgtaactggtctagcaacattaagggggatttctgaagccaactccggaggctgtgggctgcacattttgcactgtttttatatacttgtattcatatcctcttatcacctcagactcagacacaaggccttttacatggaaattttacaaattacttccatttatgtaaaaataccgtccctgtgaccaagttgttttaaatggaaaaataaagtgcttttctttaaggaaaaaaaananaaaaaaaaactccaaggcatctatggtcgggttgcggagaaaagaggtaaatggaaatgggcaaccggggccataagctggttctcttggacccagctttttctttgtaaccagggggggaaaaacccgcccgggcctcccctctaatagggggctcgcaaatttaatttcccaaaaacgccccgggttaacccctggcacttatataggaactcgggctgggagagcaaaccccggggaaaatttttcacccccgccctcaacctaaaacgcggcgcctttttttttttttgtggcgcatgtacacagcggcacct

SEQ ID NO: 44451 - DNA, 761 bp, Homo Sapiens
ccacgcgtcggtccctgggaggactgggcccctcatgcctcgagcttggcaaccgaaaacccgagggaggagaagggacctgccttgtgacatctctgatcaggttggggtgccccagcacccagtaccagttggggttgggaagcaggactccgtccctgtccccgactgtgccacgtggtaggacacataggacacaggaattcctgggtccttgcccatgactgtgccatgtggtaggacacaggacacaggaattcctggaaagtggtggcttcagaagtgatcttggctcgcaggcaccagtgccacctaccaagctgtgaaactaaaccttctccactaaacgtcgttagggcctcagttctagacgagtcatacctgattcacctgcactgcttcccccgtgtgctgagcatagagcatacaatagcgcctacttcacggaaacttgtgcctttaaactttgtaaacttaaacacagccgagaagttgcttctttgtactttttctacttttcctacttttttgtagaaacaaaaagataatgcctctgcttctatttctctgggggtgggggtgggggccgggagccgtcgcagacccgtttcatgcagcgtctccctcggcacgcgtcggaggacgcaccctcactcccctgctgccttcactcctttctgaccaagcaacgctaacttttgtacagatcgatttgataaaattaaccaaagtgctttttatggcaaaaaaaaaaaccaaaa

SEQ ID NO: 44452 - DNA, 633 bp, Homo Sapiens
tttattttcaaggtggaggggaaaatcgtctgtttcctaaatcctgtttaggatctgatagtctatgcctttatctccgagtactgcagaactgacattttgacggtctaccagcgtggcggctggtgttggtcagatgcacctgtgtgcactgggggagggatggtttgggcaggtgcagatccaagggctgtggtaaacgggagagcttgtgtttttgaagtggaaaaaaacccaagagtttgtacagacatcctgtcttcccagagaaggtggacactcttgggctcattgtaaagtgcctgctgcatcaataaagctcttggcttattagtctatacattgcggtgtgtttcgtgtatgtaaaaaaaaatggtaatgaatgggatggtaatgaatgagagttcagttgttgttccggaaacccgatgtggaaggagtagacctgtgtccctgttgagccacccctgggagcgagcatggcaatccacaggccctctgccacaggacgccagcctcggcctcagagctgccggctgctgcagagaggtgtttgctgaataaactatttattgtttcttattcctttgatttgtatgtaattaattttggagcttatttaattaatttaat

SEQ ID NO: 44453 - DNA, 583 bp, Homo Sapiens
  misc_feature (64)..(64): n is a, c, g, or t
cgtggccttgagcaaggtatccaggataacaagattacagctaatctatttcgaatactactangaaaaaagaagtgctgttaatacggaagaagaaaagaagtcggtcagttatccttctctccttagccacataacttcttctctcatgaatcatccagtcattccaatggcaaataagttctcacctacccttgagctgcaaggtgaattctctccattacagtcatctttgccttgtgacattcatctggttaatttgagaacaatacagtcaaaggtgggcaatgggcactccaatgaggcagccttgatcctccacagaaaagggtttgattgtcggttctctagcaaaggcacagggctgttttgttctactactcagggaaagatattggtacagaaacttttaaacaagtttattgtcgaaagtctcacaccttcatcactatccttgatgcattcacctcccggcactcagaatataagtgagatcaacttgagtccaatggaaatcagcacattccgaatccagttgaggtgaacctgactttcacatttggattgagaatcattggctttt

SEQ ID NO: 44454 - DNA, 513 bp, Homo Sapiens
cttgagaagaattctggatgcccaggctggtgaagaagggattgacaatggaccatcttcctaggaactcccaagtaaactatttcaggacatgtatctgctgaaatgtattttattttcaaggtggaggggattatcgtctgtttcctaaatcctgtttaggatctgatagtctatgcctttgtctccgagtactgcagaactgacattttgacggtctaccagcgtggcggctggtgttggtcagatgcacctgtgtgcactgggggagggatggtttgggcaggtgcagatccaagggctgtggtaaacgggagagcttgtgtttttgaagtggaaaaaaacccaagagtttgtacagacatcctgtcttcccagagaaggtggacactcttgggctcattgtaaagtgcctgctgcatcaataaagctcttggcttattagtctatacattgcggtgtgtttcgtgtatgtaaaaaaaaatggtaatgaatgggatggtaatgaatgag

SEQ ID NO: 44455 - DNA, 466 bp, Homo Sapiens
gcgaaactctgtctcaaaataaataaaaaataaaagacagaaagcaaggggtgcctaaatctagacttggggtccacaccgggcagcggggttgcaacccagcacctggtaggctccatttcttcccaagcccgagcagagggtcatgcgggccccacaggagaagcggccagggcccgcggggggcaccacctgtggacagccctcctgtccccaagctttcaggcaggcactgaaacgcaccgaacttccacgctctgctggtcagtggcggctgtcccctccccagcccagccgcccagccacatgtgtctgcctgacccgtacacaccaggggttccggggttgggagctgaaccatccccacctcagggttatatttccctctccccttccctccccgccaagagctctgccaggggcgggcaaaaaaaaaagtaaaaagaaaagaaaaaaaaaaaaaaag

SEQ ID NO: 44456 - DNA, 586 bp, Homo Sapiens
ttgctattactgctgcttctgattcttcgtcttctgcgaattctgtgagccaagcagaccttccctctcatcccaaggagccagagtcctcccaagatcccctggaggaggagggatccctgctgcctgcactgggggtgccaattcagaccgacaagatggagcattgatgggggagatcagagggtctgaggtgactcttgcaggagcctgtcccctcatcacaggctaaagaagagcagtagacagccctggacactctgaagcagaggcaagacaaacacaggcgctttgcaggctgctctgagggtctcagcccatcccccaggaggactgggatttggtatgatcaaatcctcaagccagctgggggcccaggctgaagacctggggacaggtcgattgctggaccagggcaaagaagaagccctgccatctgtgccctgtgggccttttccctggggcagcaccttgccctccccaggggatcactcacttgtcttctatgaagacggactcttcatgaggttgaatttcatgccagtttgtatttttataagtatctagaccaaaccttcaataaacc

SEQ ID NO: 44457 - DNA, 601 bp, Homo Sapiens
cttaagaactgtaggacgtgaaggaagaatagactcttggtccagctgcctttgtctttagtatataacagtgaagattctgcagaatatcagttcactgggacttattctacaaggctagatgaacagtgtagtgctattcccacccgtaccatgcatttcgagaagcactggagattactggaaagtatgaaagcacagtatgttgctgggaatggttttcgaaaagtgtcctgtgtgttaagctcaaatcttcgtcatgtgagagtatttgaaatggacatagatgatgaatgggagctcgatgagtcttcagatgaagaggaggaggccagtaataagcctgtaaaaataaaggaagaagtgttgtcggagtcagaggcagagaaccaacaagctggtgctgccgctttagctccagagatagtcattaaagtggaaaaacttgaccctgagctagactcctaatctagcttgccattattgtgtgtgtaattatggccaaaaggacataggagatggactaagatgtcttggaccacctttgtgtaacacagaaataaacagtaaattttacaaaaaaaaaaaaaaaaaaacgcgg

SEQ ID NO: 44458 - DNA, 428 bp, Homo Sapiens
gcacgaggaagacggtgcagtcggctgcatactcccagtcgggagtgtggtcagtctgcctgctgctgtgcggtagctccagaaccacctcgttcctggttttgtttggattttggcatcttgtttttctaacaacaaacaatggagaaaaagaattgattcttagtgacacagaagattgccttacgctcgtgagcgtgagaagccataagagagagaccgaattctgtggctcagcacacaggactgacccacagcccaggcagcgggtgtgtggagatggcgccctgtcctgccaaggggcgccaggagcagagccagggcctggcgagctggcgtggagcccacaggattcagcagcatggacagtcactcttgcactattccttctccaagccagaaaccacatttaatttcataaataaatt

SEQ ID NO: 44459 - DNA, 957 bp, Homo Sapiens
cgttaagtgaaagaagccggtcacaaaagatcacatgatgattccattcatacgaaatgtccagaataggcagaaagattagtggttgcctaggctggctgtagatggaatggagtaactgctaatgggtgtagggttccttttcagggtgatgaaaatatcctacagttagcttgtggtgtaggctgcacaactcttgaatatattcaaatccactgaactgtacattttaaatgtaaggtatgaatgtatctcaataaagctgttattaaaaaactcttgaggtgtaggactgaaagtatactgacaccaggagataccctggaactttctcgaaaaatcctgcattatccctgagggttgttcaggtacgttcttcagatgtgtcatagtttgatagagaactcatcaaaaagatcaccactgcgaatctagatctttgttgaaaagggaagagaaagagaagcttaatgagcacattgaagcacttaccagaaagaagagggaagacttctggatgaaacctctgtgagtaccttaacattcacatggaagtagtaaaaataagattctgggtgcagttctccagtgacaggaaaaaaaacaaagagaatttgaagaatacgtcagagacaaatacattacaacaaaattgattcaaggcacttttgaaggagatcaaattataacaaatattagtgaagtgaagctgtggagatgtcggatctcctctgaaatgagtctctgttatcacagaaagtaagagtaatctaagatgacggctcgaaaagtgaccacctcgcgagctaccggtcccccggggctcggaggcacgctggggtctgcccgcgggcccctacccaggactacaaaaagagaggcgggggcacaacaccgggcccgtacaatagaccaaccgcaaccattgggccctaaccaggaacaacgaagctagaa

SEQ ID NO: 44460 - DNA, 898 bp, Homo Sapiens
ttgttttcttggcttgatgttttctatctacgcttgattcacatgtactcttttctttggcatagtgcaactttatgatttctgaaattcaatggttctattgactttttgcgtcacttaatccaaatcaaccaaattcagggttgaatctgaattggcttctcaggctcaaggtaacagtgttcttgtggtttgaccaattgtttttctttctttttttttttttttagatttgtggtattctggtcaagttattgtgctgtactttgtgcgtagaaattgagttgtattgtcaaccccagtcagtaaagagaacttcaaaaaattatcctcaagtgtagatttctcttaattccatttgtgtatcatgttaaactattgttgtggcttcttgtgtaaagacaggaactgtggaactgtgatgttgtcttttgtgttgttaaaataagaaatgtcttatctgtatatgtatgagtcttcctgtcattgtatttggcacatgaatattgtgtacaaggaattgttaagactggttttccctcaacaacatatattatacttgctactggaaaagtgtttaagacttagctaggtttccatttagatcttcatatctgttgcatggaagaaagttgggttcttggcatagagttgcatgatatgtaagattttgtgcattcataattgttaaaaatctgtgttcccaaaagtgaacatagccatgtaacaggccagtttttcctggccctgtggcaccaaaaaagttttaaaaacaaggttggtttaaaaaattttggttgggttgggaaaacccccaaaataaccgccccccgaaaataaaacctctcttttataaattccaatttcccgggacaagaaaccaaaaaaaaaaaaacta

SEQ ID NO: 44461 - DNA, 961 bp, Homo Sapiens
tgagggatacatgggcaggattgtgttaaaaacccagcaggaaaacctagaagagaaaaacatgttcaagatgacaaagaggtgatcttgagctcagaggaggagagtttctttgtccaagtgcatgatgtttctccagagcaacctcgaacagtcatcaaagcaccccgcgtcagcactgcacaggatgtcattcagcagaccttatgcaaagccaaatattcctacagcatcctgagcaaccccaatccaagcgactatgtgcttttggaagaggtggtgaaagacactaccaacaagaagactaccacaccaaagtcctctcagcgggtccttctggatcaggagtgtgtgtttcaagcccaaagcaagtggaaaggtgcaggaaaattcatccttaagctaaaggagcaggtgcaggcatctcgagaagataaaacagaaaggcatttctttcgcaagtgaactcaagaagctcaccaagtcaactaaacagccccgaggacttacatcaccttctcagctcttgacctcagaaagtatccaaaccaaggaggagaaacctgtgggtggcttgtcctccagtgacacaatggattaccgacagtgactaagggcagcatgtttaacccaggtgaagatctttaagcaagaagttaaagagtgaacatggtggaaaacacatatacattattttcatcagacttaaactggaaattgatgatttctgaactgaagccttcacacatgttgagatccatgctgaggagaagcacaatggcacagggcttagtttgccaccaaatcaatttactgcttgaatgaagcccaggggactgccattttataaatggccagcagttggacaaatcgtcacgaattggacttaagcaagggtcagcacgctgtcggaaagggccaaacgtaatattataggtggggcctaaatagtggaaacacc

SEQ ID NO: 44462 - DNA, 532 bp, Homo Sapiens
agcaagttgtggaggaagtatttcatcccgagaggccagattccgttgatattgaacacatgtcttcaggcctcactgatctccttaaaactggatttagcatgttcatgaaggtgagccggcctcatcctagtgactaccccctcctgatcctctttgtggtaggtggggtcacagtctctgaagtgaaaatggtcaaagatcttgtggcatcgttgaagccaggaacccaggtaatcgtgctgtccacacgactcctgaagccacttaacattcctgagctgttatttgcaactgaccgactgcatccagaccttggcttctgagcatccgctaagaagataagacctactcaagctggaaatgccgatgcaattttctgccaccactccaaatactcctccacaaccagcgtccctgtcactaattgcgagaatgatggaattctgcctgaagggtcttgatacctactcagtgaggtactttgcttggattgctgtgattcttaaaaaaaaaaaaaaaaaggccacat

SEQ ID NO: 44463 - DNA, 653 bp, Homo Sapiens
  misc_feature (550)..(550): n is a, c, g, or t
cttttaaaactttactatttctgaataaaatttacatgcatttctcagaaaaaaaaatatttggaattgaggtatctaatagagaactgagttaaattattgccacttaaaaacacaaagtgatatagccactttgtgaattaatcagtcagcagtggctaggttatgcttagtggtttataaccaaatcttagtttataacaacaaatgtgtattgttaattcccactacaagtttataacgacattgctggatgctacactccatgtctctttgtgggacccaggctcatgggacttctgttatctgcattagagagagagaagacaacaaaatatgcactggttcttgaagctttggcccagaagtaaaatatgtcttttacctgttcacattgcattgggccagggcaattatcatggctgcaagtaacttcaaaaggatgggggaagtgcgatcttggcatgtgtcagaagaaatgaaaacatttggtgaagagcattaatgactgtctttacaggaaaaaagcaatcaaatagacatgatttcntggtttcagtttcatcatttcctactgtgttacctaaactttctgagccccagtttcttattactaaaataaaataatgataaagatgaaaaaaaaaaaaaaa

SEQ ID NO: 44464 - DNA, 571 bp, Homo Sapiens
cgcagtaatgcatgaagagtgccgggcatggtgctgagccctgttcctgctctccctccagggctgctgagctagaattcccacctatgtctttccaagggactgttcacggcttgggacttggtctctgtcctgccccatcctcgtcacttgggaccacgagccctggttcagtcacccagggaagcctcccagcggctcatgaagcatcgagctccaagcccagatgccaagctccctggctgagctgaatgatgtcactcatggtggacgcgttctgctcacgggcccagagccctgtgaaatgcatcaaggtcctctccgctggccagcagcatccccaggcttctctcaggcgcccgtgttcacattttctccagcctgagacgcagcctcccacctggaagggcctgtgccatcaccaggcagagggcaagacggagagggcagagcaagaactgcactgcatctcactgcagtctgaatctagacatcgccattccccgaggtgcgacctcagactaatgacatcctggctgagcctctgttttttctctctaggaaatggggg

SEQ ID NO: 44465 - DNA, 710 bp, Homo Sapiens
  misc_feature (555)..(555): n is a, c, g, or t
tttgctgacccctcatctaaaaaataggctatactacaattgcacttccagcactttgagaacgagttgaataccaagaattattcaatggttcctccagtaacttctgctagaaacacagaatttggtctgtatctgacactagaacaaaacttgagggtaaataaacattgaattagaatgaatcatagaaaactgattagaagaatacttgatgtttatgatgattgtggtacaagatagttttaagtatgttctaaatatttgtctgctgtagtctatttgctgtatatgctgaaatttttgtatgccatttagtatttttatagtttaggaaaatattttctaagaccagttttagatgactcttattcctgtagtaatattcaatttgctgtacctgcttggtggttagaaggaggctagaagatgaattcaggcactttcttccaataaaactaattatggctcattccctttgacaagctgtagaactggattcatttttaaaccattttcatcagtttcaaatggtaaattctgattgatttttanatgcgtttttggaagaactttgctattagatagtttacagatctttataaggtgttttatatattagaagcaattataattacatctgtgatttctgaactaatggtgctaattcagagaaatggaaagtgaaagtgagattctctgttgtcatc

SEQ ID NO: 44466 - DNA, 622 bp, Homo Sapiens
  misc_feature (560)..(560): n is a, c, g, or t
ggcaaggtaaacttagcattttcaactttagaaccgggtcagcttcagggggactgctttcaaatcagccaaagagcctgtcagatcttcttagaaggaagaggttggtagttccctgctctgttttgaacatgctctagtttattaacctggggacattcccattgctgtcttaagtaagtctcatagccagctcctgtcacgtgactctcatatggattcattttcgggccagctctgaacaaagcatcatgaacatatgtgcttttggtcgtttgcaatgtgatggtggtggaggtaggtattggtttccttggaaggcatgataagaaagattcacaatggccaacagtgtgtatgaacaaaaaactgattggagcatcagctagtactgaaggtccttgctttgtgtcagaggcaaaggaacccaaggcgccaagtcctcagccttgagtgtactgctgacaactaaactcacaggctgcaaagcagacctctgatgaagatgcctgttatttcacatcactgtctttttgtgtatcatagtctgcaccttacanatattaataaatgttccaataataggtgaaaaaaaaaaacaaaaaaaaaaaaaaaaaatggc

SEQ ID NO: 44467 - DNA, 752 bp, Homo Sapiens
  misc_feature (596)..(596): n is a, c, g, or t
gggactgaaagaaagaaaacacaaacctcaagtttctcaacaggaggaacttaaataactatgccaagaattctgtgaataatataagtcttaaatatgtatttcttaatttattgcatcaaactacttgtccttaagcacttagtctaatgctaactgcaagaggaggtgctcagtggatgtttagccgatacgttgaaatttaattacggtttgattgatatttcttgaaaactgccaaagcacatatcatcaaaccatttcatgaatatggtttggaagatgtttagtcttgaatataacgcgaaatagaatatttgtaagtctactatatgggttgtctttatttcatataaattaagaaattatttaaaactatgaactagtttcattaattgaatttgctaagtggagttatttctcattgctaaactgttttttttcaaattctagatctctgataactttagtaaattaacactaaagtggtgagctttgataatgcattttgtggatgcaaaatcatcgcctcatcactttctagaatgaaaggctgggggcattgctcaccttttgcgtgaagaaaagacctgtcncttagagccagtttttgcttaaggggaggacagaccgtcgtcacccagtggaccacgtgaatgaatggatgcagtgcatgctttagaagcaccgcatacctccttttacaggtacagagtaagtggtctggctactgagggaaagagtcatgattt

SEQ ID NO: 44468 - DNA, 632 bp, Homo Sapiens
cacgcgtccgcgctgctctagctggcaggacacatcccggcctcttcttccacccattcccccatgtggctgaagacattccaacaatggggtgggcccataatagttagccctcagtcagttcccggagcacagccctgggagggggctatttctctccccactgaaaacatttcaaagctgagttacttgtctgaggcctcatccctcggaagccgtctgactccagagtctgagcccccggctagtaccctatagagagggggctctccaaaggggctgctggggcatgtgtgcctgtggcagaaaagaggagaccctggaattcagcaccctgggtgccattcccagcgtttagtttctagaggcctcagtttctccatcagcttatgggatccttgtctttactgacaagaatggaatagaaatgtaaaagtactctgaaaagcaattgccctgtaacttatctagaaagaaaagaccctgagactccagaatctgctgttgccatagccccatatgtgtgaattctgcaactagccaaggctagttcctttcaattccatttaaaaaacaaaaaccagcaggtgtggtggctcatggcgtaatgggcctgcccaatgctttgggag

SEQ ID NO: 44469 - DNA, 694 bp, Homo Sapiens
ttttttttttttttttttacaaaaaaatatttaattaaaaatatcttataattacagtatctattaaagcatatactttctcacacttatagaacatctctatatatacatggtatgaaatgtcactcatttatctatacaatatgtaacattcttgcagagaaaagaaagttctctgccccgttataatcatctattttaaacaatagatgtaaaaaaaaaatatctacaatgctctggtagattagtaaagcttcaaaacaaaaattgagctccttggtcacaaagtaggcttctaaagtcggatctactcttgatcttctatttatcagtcctgtcacacttaagcttaaaagtttaactgcacctccaaaaaacacagaaatgtacaattcacagcagttataaatgaagagacaaaagagaatacgtatgtagaatgtttatgaacgtgcaaagaaagaatgaaagttgtatttttctttcctctctctctcttggaatgacgaatgaaaacgtttctaggttggccgatgttttttcctttcctccggtggctttttttctctaacttctgctcttccccctccctctctagtgctcctggctcgggctcaggcggccgcacacctggacagcgcggctcagcggcacagaatgctgtcgccctgcttgttcaccgcgccggccgggt

SEQ ID NO: 44470 - DNA, 734 bp, Homo Sapiens
gcgagaccccaacggcacctttaacccccgcgccctggctcaggggccctggtgggcacggaagcggctcaacatcagggtcatttcggggcagcagctgccaaaagtcaacaagaataagaattcaattgtggaccccaaagtgacagtggagatccatggcgtgagccgggacgtggccagccgccagactgctgtcatcaccaacaatggtttcaacccatggtgggacacggagtttgcgtttgaggtagttgtgcctgaccttgccctcatccgcttcttggtggaagattatgatgcctcctccaagaatgacttcattggccagagtaccatccccttgaacagcctcaagcaaggataccgccatgtccacctcatgtctaagaacggggaccagcatccatcagccaccctctttgtgaagatctccctccaggactaggctggaggaagccagtggggtcccccctgagtgggctgggccctctgtccacatgtggggacagggctggtgtggctgctcccagcctcttgctcagagctaggcccccaaattgccttcagccctaacatagtgtctgctgctgcctccctggggaccaggagctagcccagtccctggagctgtccttcattccgttaggaataacactgcagccctctccaccctccggccagcgagtggtcaaggattttttataaaaatcacgataagattaaaaaaaaaa

SEQ ID NO: 44471 - DNA, 753 bp, Homo Sapiens
  misc_feature (567)..(567): n is a, c, g, or t
  misc_feature (570)..(593): n is a, c, g, or t
  misc_feature (595)..(602): n is a, c, g, or t
  misc_feature (606)..(637): n is a, c, g, or t
gggattggattgatgaacaatgaagcagctcaggaaagcacaaggagaagacagaaatatcaagagtctcaagaacctttgaatgaagtaaacagtttcccacaaaaaatcagctatacacaattcccaaactcattttatgagcctcatcaagattttaccagtccagatatattcaagaagtcaagatctccatcttggtataaatacacttccacagtcagcacggggatcacagacttagaaagttcaactggactttggcctacaatttcccagtttactcttagtgaagagacaaacgcagatgtttattattatcgcatcatcatacctgtccttttgatgttagtatttcttgctttattttttctctgaagatgataccaaaattccttttgataattttttaagtttccagctcttcaccgaaatgttgtattcttatttcagtgtttccttccagacatttttaaggtaattggctttaaaaagagaacatattttaacaaagtttgtggacactctaaaaaataaaattgctttgtattagaaatagtgtcatangannnnnnnnnnnnnnnnnnnnnnnngnnnnnnnnggcnnnnnnnnnnnnnnnnnnnnnnnnnnnnnnnncccttggtcgggcccgcccttcggccccttccgaagaaagctttttctaagaaccatttttccttttttggggcgccggcgggggcccccccagtaaggggtaaagagtggaaacc

SEQ ID NO: 44472 - DNA, 531 bp, Homo Sapiens
gattcgaacgttcggactgaggtttttctgcctgaagaagcgtcatacggaccggattgttttcgctggcccagtgtccccggagcttgtgtgcgatacagagagcacctcggaagctgaggcagctggtacttgacagagaggatggcgctgtcgaccatagtctcccagaggaagcagataaagcggaaggctccccgtggctttctaaagcgagtcttcaagcgaaagaagcctcaacttcgtctggagaaaagtggtgacttattggtccatctgaactgtttactgtttgttcatcgattagcagaagagtccaggacaaacgcttgtgcgagtaaatgtagagtcattaacaaggagcatgtactggccgcagcaaaggtaattctaaagaagagcagaggttagaagtcaaagaacatattcttgaaagttatgatgcattcttttgggtggtaacagatcataaagacattttttacacatcagttaatatgggattattaaatattggctataaaaaaaaaa

SEQ ID NO: 44473 - DNA, 483 bp, Homo Sapiens
cgaaaagcttcttcctccaagagcccattgaagaagcccagtgatgagacggtgagatggtttgagtcctcggtgcctgggtagcaggaagaaagacctgcatcctgcatctgtacttggggaagccagcggagaggacggggaggttacttctctaagtttctgcagaaatattgaaggctggagtttggaatccttaaacttggccttctcaaactcagcagcagatctccgggattctgctgttattatccaaaggcgttggaaggaaagatggatcttcttacatgctagaagttttaaacggtccttaacatgcctttgttcaagcaccttccagaatgtaaggttcagcagctctggtttctattacggtgacttgaatgtcagattcaagggcccggcgtcaaaggaaattggttttgactttttgtaatctaggagcgacagttcgtgagatgtttattcagtgttaaagagcct

SEQ ID NO: 44474 - DNA, 598 bp, Homo Sapiens
gagacccttgaagtgcatccctgcgagcaagaagacagatccgcagaaggaccttaagcctgccccgcagcagtgtcgcctgcccaccatagtgcggaaaggcggaagataactgagcagcaccgtcgtctcgacttcggaggcaacaccaagcccgaccgggccaggcctgggtgatctgctgctgagacgccacggagggctggggatgcgcctgcgtccgtttcgcgctggccggggctctgggtgctgccctgcgccctgccgcacccgcggcccgcgcagctgcctaggatgttctgggctaatatacttgtaaaaccaccgcattctagggttttctttcattttcgttaagaatttggggcaggaaatactttgtaactttgtatatgaatcaaaacaaacgagcaggcatttctgtgatgtgttgggcgtggttggaaggtgggttctgcgtgtcccttcccagcgctgctggtcagtcgtggagcgccatcatgtcttaccagtgacgctgctgacacccctgacttttattaaagaataagctgtcgttacagtattgcattttaaaaaaaaaaaaaaaaaaaaggac

SEQ ID NO: 44475 - DNA, 603 bp, Homo Sapiens
cgtccgggcgggagcctggcgcagccggcagaccgccagcagatggaggcgctcactcggtacctgcgcgcggcgctcgctccctacaactggcccgtgtggctgggcgtgcacgatcggcgcgccgagggcctctacctcttcgaaaacggccagcgcgtgtccttcttcgcctggcatcgctcaccccgccccgagctcggcgcccagcccagcgcctcgccgcatccgctcagcccggaccagcccaacggtggcacgctcgagaactgcgtggcgcaggcctctgacgacggctcctggtgggaccacgactgccagcggcgtctctactacgtctgcgagttccccttctagcggggccggtaccccgcctccttgcccatcccaccacccggcctttccctgcgccgtgcccaccctcctccggaatcgcccttcccttcctggccacgaatggcagcgtcctccccgacccccagtctgggcgcttctgggagggctcttgcggtgccggcactcctccttgttagtgtctttccttgaaggggcgggcaccaggctaggtccggtgccaataaatccttgtggaatctgacttga

SEQ ID NO: 44476 - DNA, 503 bp, Homo Sapiens
aggaggcttggcatatcccctttatgttaatcccagctagagattagtaggttgactttcacagcaattgtatattgatccattttaactcatccttgccataatttccaggccagtcaccaggacagaggagatgatggggaaacagagctttagatgaaaactactatgcactactagccttagaggcactggtttcctgttaccactttggcaagtatggatggtctaagtccagtagggcttcatccatggagccattagaactgaggggggagtgttagagatgccatttcaccaggatctttttgctcaggttgtacccatgccaattgaagaacgtgttaaagatgaggaggagagatgtaccattctctcccttaataatgatgttggtttgcaaaacctaaagaaataataacaacagactatttcatactttcaagcaagtctttatactacctgttatttctctaaaattcaaataaagaatttttaaactt

SEQ ID NO: 44477 - DNA, 549 bp, Homo Sapiens
gctccgtgtgctggattaactgcctgatggccaagtcatcactattggcaatgagcgcttccgctgtcctgagacactcttccagccctccttcattggtatggaatctgctggcatccatgaaacaacttacaatagcatcatgaagtgtgacattgatatccgcaaggacctgtatgccaacaatgtcttatctggaggcaccactatgtaccctggtattgctgatcgtatgcagaaggaaatcactgctctggctcctagcaccatgaagattaagattattgctccccctgagcgtaaatactctgtctggattgggggctccatcctggcctctctgtccaccttccagcaaatgtggattagcaagcaagagtacgatgaggcaggcccatccattgtccaccgcaaatgcttctaagatgccttctctctccatctaccttccagtcaggatgacggtattatgcttcttggagtcttccaaaccaccttccctcatctttcatcaatcattgtacagtttgtttacacacgtgcaatttg

SEQ ID NO: 44478 - DNA, 841 bp, Homo Sapiens
cgccagtggtatggctgagccgactagtgatttcgagactcctatcgggtggcatgcgtctcccgagctgactcccacgttagggcccctgagcgacactgccccgccgcgggacaggtggatgttctgggcaatgctgccgccaccgccaccaccacttacgtcctcgcttcccgcagccgggtcaaagccttcctctgagtcgcagccccccatggaggcccagtctctccccggggctccgccccccttcgacgcccagattcttcccggggcgcaaccccccttcgacgcccagtctccccttgattctcagcctcaacccagcggccagccttggaatttccatgcttccacatcgtggtattggagacagtcttctgataggtttcctcggcatcagaagtccttcaaccctgcagttaaaaattcttattatccacgaaagtatgatgcaaaattcacagacttcagcttacctcccagtagaaaacagaaaaaaaagaaaagaaaggaaccagtttttcactttttttgtgatacctgtgatcgtggttttaaaaatcaagaaaagtatgacaaacacatgtctgaacatacaaaatgccctgaattagattgctcttttactgcacacgagaagattgtccagttccattggagaaatatgcatgctcctggcatgaagaagatcaagttagacactccagaggaaattgcacggtggagggaagaaagaaggaaaaactatccaactctggccaatattgaaaggaagaagaagttaaaacttgaaaaggagaagagaggagcagtattgacaacaaacacatatggcaag

SEQ ID NO: 44479 - DNA, 791 bp, Homo Sapiens
agcggggggtcagagagtgagccagaagaaactcccatcaagactgaagcagacgtttggcagaaaaccaggttcttgatagcagtgctcctaagagtccaagtcaagatgttaaagcaactgttagaaatttttcagaagccaagagtgagaaccgaaagaaaagctttgaaaaaacaaaccctaagaggaaaaaagattatcacaactatcaaacgttattcgaaccaagaacacaccatccatatctctggaaatgcttctagctccggacattcgacatgaaagaaatgtgattttgcagtgtgttcggtacatcatcaaaaaagacttttttggactggatactaattctgcgaaaagtaaagatgtataggcatctggtgtttcagcatacataactgaagcatgtgaaacagtatcatcctcgttagtagaggaaaaccaaaacccttttttccgtcaaaattggatttgtaattaaattgtaagcctcgtaggatgtatgttggaattttaagtctttcctttggttctatgcaaataaaaaaataactgatttttttaagactgtgtctgtatggttgggattgaatctagtatttgctggggagaattttttctttgtatttattttaactgtattgtgctcatgtaagaatgactgatgttgtgttaggttaagaattgacgataggtttagcagttaagaagaaagcttttaaaaggattgattcagttaagcaaagttgggcagagaaaatcaggcatttgtatttaatgcagaaaag

SEQ ID NO: 44480 - DNA, 632 bp, Homo Sapiens
cctcattctgcctggagtgccccgtgtttgacttggcagcgggtgtggagccatccccgcgtcctcctggcgcattgccactgtggctgtccaggaacaggatgtggctgccttggccgaatgttgtcctactctccccaaccccggcgcctcagctcctcagctcctcgggcccctgcgtctggctggtgtttgcagggctttcgctctgctctggtattgctctgcctttatagaaagtcttattgaagaagtgtaagaaagacctaaggtggggaagactcctacacacaccattagtatcagtgacaccagcaatgtaggttcccagccccttcccagtggcagcttgtgtgtccaggagataggacatcatttaacgcatcagcaaagtagcagcagatgccacatacagagtagagcgaaggcatttggtggatcggtcactagagatctatcttgcagaaagtatgtttttcctcataaaagtgcctcttaattggccattgtaccagccacttgtcctagccaaatgtccaaaacacgcccttgggccccgccacgttacaatccacagattgtctgtctgagtcgtttaaggcatttcctggtgcttgtgttccatgaataaa

SEQ ID NO: 44481 - DNA, 766 bp, Homo Sapiens
ggactactttcattgatgaccatatctccaggatgttgttgatccccacactgccttaaggtatattatagaaacagttttattttccatttttcttgtttcctgataataaatgtatttaggactgaaaatactcctgagtactcccttggctgtatgtctgacagtctttagctatggtgactattgtttatttttaatgggtatttcagattccaagtgtatttaaaatttctaaggagatataatatagcctgtatggtttctactttatggaattatatggtcaatatttgtaaatattctatgagttttgggtgggtagaggggtgctttgcctgttttgggtacaggtttttttggatttagcttgttaattgttcaaactttctgccttctacattcctatcttattgttcgtttaatcagtttctgaaatgtaagcattacatgactattggtgagttgtgccttttataactgaaatactttactttttctcatatcctctataattgacttctattttccttaatcaaaccagctctgggaacactttaatacatttatcttaacttgagcattattaaaacatttggactattaagaaacaccccgaaagaacaaaaaaacttgtgtggcacgcttgggcctctaaaaactttttctaaaccattctgtgtgggcgcggggccccatagtgcttagtgcaacaggggcaaacggtgtccccagaaaaccggggcaaaaaaagggcgggatttcc

SEQ ID NO: 44482 - DNA, 796 bp, Homo Sapiens
gggggctcaatttgtgtactggaacaggatcaaaggcctggtcattcaatattaacagggttgcaactcaggctgtagaagatgttttaaatattgcaaaacgacaaggaaatttgagtcttccattgaacagagaattggtagagaaagtaacaaatgaatataatgaatcactgctctacagtccggaagaaccaaaaatacttttcagtattcgagaaccaatagcaaatagagttttctcaagcagtcgtcagcgttgtttctcctcaaaggtttgtgttcgttctcgttgttgggatgcctgtatggttgtggatggaggaacttcttttgagtttaatgatggtgcaattgcttcgatgatgatcaataaagaagatgagcttcgaactgtgcttcttgaacagtgaaggatttcctcatgacaaattttgattactggcgagaatatttttacttcagaaacagactaccagtcgtaaagtgacattttttggttattgttgagactgcttgcccgtgggctcagaagtgagatttgcattattcttctgttggattctgatagaaaaaaagacattcactgtataagaaaatggatggactgaaccaattagaattgataccagtgaaatttttatattgcttacaattgggtacccaagagtgctgatacctttttaaaattttgaggggcaggccttaaataaaggacctaaatatttagggatttgaaaacttaaactgtaataagtggtggttttccttttccctttctctccctaaatgttga

SEQ ID NO: 44483 - DNA, 666 bp, Homo Sapiens
tcacttgagtccactagtagtaatcccgtgtctttgtatctgacaagtcaaacagagcaaggaagtactactagtggactcaagtgatataaaaaaataaaaaataaaatacttccatatacagggactggactcttaatacaatggaaaaaatactttggtgaaacactgacatttagtgagcccctatcgtgagcctttggggttggaaaggggagacggggagtgagtggaaagataactaaaactcaggcctcattacagagtcattcacaatccatgttcccacgtagaaggcacacctttgtgtagctgtgcacagttaataataggggcaagatgtgttatagcagaattaccaaatgctataaaagtggcatgaaacaaagaagttacttctaattggggtaacgggagtcaaacttacagaatttgggagagagcagtaacatttagcttgaatattttaatttaaacacatttaaagcttttagactcacaggtccaatttatattataaagaagatgtagttttatatcagttataaattaaccaaaggagctcaaatattactgggccagccaggaggccaaagagctcccaaggctccagggggtttcttagctcatttccatgcaggtgtcaaggccttcttccaggtaaat

SEQ ID NO: 44484 - DNA, 598 bp, Homo Sapiens
cacgcgtccggtggcaagcagaggcgacttccggaagagacaggcaggcaccgtgaggaaggtggctgtgctctcccaggtgtctcagagacagatgccttatttaaaatcagcacgacatgtgtgagatcttctgtttcctaccccaaatcctgaaaccctgcagacactggctgactgggagaggtggggtctgtaagttgtcccctagtttgctaagaaaatctaaaataatatttattatatgagttaggagagagagaatgggtccgcgtggcctcctctgcagatgtactggtctgaaatgaggttctgagtcactggccaggccagatgtgctcatgtcggtgtctggtgtctgttttgtggagaaaacagtatggtgtgttttaagctatttgtgttctgttgtaatatacttttagaaggttaattggtaaggttaaggtagcattaaccacaaagatgtttggtatttaaaaaatattctctagcaaatattggaatttccaaaatatatcatttgtacagggttaattttgaaataatacttgaaaatttcattataaatatatcctactttttatcttaagttgaa

SEQ ID NO: 44485 - DNA, 1125 bp, Homo Sapiens
  misc_feature (728)..(728): n is a, c, g, or t
  misc_feature (932)..(932): n is a, c, g, or t
  misc_feature (957)..(957): n is a, c, g, or t
ggtccggaattttcgggattctctcctcaactgtaattctatttttaataataaaaatggcatactgtagggtcttcagagtagtgtaggaatactgtagaaatactttttcagaaacgaatccatagctgacaaattcactcagtgcccaatatattgtgattattttcgttgataaagaactagatacaaagacctctgaaattgatgataaaatttgtatctcattaattttatcaaaatgaaactaaaagtacatatgtattatacacttgaacatgtgtttgtatatctttaaaattttcctttatgttccattccataggaaaacacacatatgcacacaaaactcagttatctgtggggaaagtggtagtaataattgagattcatcaataatcatataatttcactatagacattacttgcattatctcctatcagtccttctaacaaaacttaaattaccagatgaactgactttagttttcatcttattttttgtccacatgctggtgatgctgagaaacaataattggcccaaatgcagacatcaagaagcaggcaggaaaatggaaaaactgagataatacacaggtgataaacagtttcaagaaaataaaaattggctagaatctcaagttatgtgtttctatattggtataagcatataagtgaaaagtcttataagtgtaatagagaaaagatttgtcagtgtgtttttttanatgaaataactagtctgtgctactttatgtcaatataaaaattggtaaacaagaagtaacttgtccacaaccctcagttatgatacttatgtgcgtgtttttttttcaaagtttttccccaggagaagatacaaatatatggtagctattgttttaaaatgattgatttacttgcagatttttcagaagatgttatgtctttgncattcattaatgttcaaaatgtagnttttacaaatctgaagtgccatcagttataagaatccccattattttatgttccattagaaaaaacccataaacctgacactgctttttttgttacttgaaaatttcctatttattggagagttccttttagaagtttttaaataccgatttttatttaaccctctgc

SEQ ID NO: 44486 - DNA, 712 bp, Homo Sapiens
  misc_feature (661)..(661): n is a, c, g, or t
  misc_feature (664)..(664): n is a, c, g, or t
  misc_feature (669)..(669): n is a, c, g, or t
gagtccccatgattccctcctcgtcagtctctcaaagaccccatggtccatcccctgagggtggtcagccaaggctcccgttccgtgggatgccataaaagccgcccagtgggacccacagtcacacagagcgcctcacctgcatcctctcccccacaagagccccaaagatcccacgggagaggggagagggacgcacagcactgcctgccaagcgagaatgcaggccccgccccctcggcccctcaccacctctttctacagcctaatttattggattccctattcgtagccatctccgtggccaatgtgactaccgtgccagcagcgggggcggcccagcctctgagtcccgtggggccccggctcccaccggtgccaaacccagcccctgcggccgtcaccccgccagcctacactgccagccgccaccggggcacacgggcctctgcttgccagccaggagtgcggacaccatgttcccagctcagtgccaaagaggggtcaccagggggagctgtctgcggagccagcgcctgcccgagagagaccccaccgccaccgtgtgcctttcccgggccctcagccctcgggccgggcaccacccccagtccccccagtaaaagcctcccactggcaaatgcagtccttcaaaaaaaanaanaatanacgccaacttccaccgctttttacactacccctaaaggggggg

SEQ ID NO: 44487 - DNA, 457 bp, Homo Sapiens
agccggagtctgaactgtcctgggggaccaagcaggagcttaagatgggcaagacctggggccctgggcagacgcatcaaagcaggcagaagcaggcatggccagcaggaagaccaagaagaaggaagggggtgccctccgggcccagagagcctcatccaatgtcttctccaactttgagcagactcagatccaggagttcaaggaggcattcacactcatggatcagaaccgagatggcttcattgacaaggaggacctgaaggacacctatgcctccctgggcaagaccaacgtcaaggacgacgagctggacgccatgctcaaagaggcctcggggcccatcaacttcaccatgtttctgaacctgtttggggagaagctgagcggtaccgacgccgaggagaccattcttaacgccttcaagatgctggacccggacgggaaagggccacat

SEQ ID NO: 44488 - DNA, 628 bp, Homo Sapiens
  misc_feature (572)..(572): n is a, c, g, or t
agagctgacccctctaagcctctgacacttaaacacgagtcctgctgtccccagcacacaactgcactgaagccttgttcctctcggctggtgtagagctcatctgcatgttgtgtgcagataccagtagcctccctgcttgaacaggcctctcctaggctaggcaggtgttcagaggcatgaaggtctgggcaggggaagggcgtcttctgaaatgggagttaccaggtttttaaatgctgctattgttttatttaccatttaaggtcttttctattatatctgagtaactagtcagtttttcttacagtgctcatagcagttgtatttgaattgtattttcagtgaaatttgttttacattgccatttaaaattggcctttaacagcttcccaactggcttataagatatttttttttaatgaaaacataacccatgaggctcagatgctgttgaagaaataaatggtatgttgctgctgacagtagtgcttgcctattgtaacagcattggttctgctgtagcctcggtgaccatttaagttgaataaatctgtcattttcacccacanacagttgttgagcccctggatttgggttgtcactgtggttctccctgcagtgctat

SEQ ID NO: 44489 - DNA, 663 bp, Homo Sapiens
ggaaaaaactaacgagcggctcctagaccggcaggcggcggccttcaccgcttcagtgcaacacgtggaggcggagctgtcagctcagatccgctacctcacccaggtggccacagggcagccccatgagggctccagctactcttcgaggaaggactgtcagatggctctgaagcgagtggactatgcccgcctcaagctcagtgatgtggctcgaacctgtgagcagatgctggagaactaggccagggagatggacccagagctgagagggagaccatcacctgtgccatgggacagaacctgggaacatgtagggtggggagtatgagcaccaacataccctgctggtcaaagtaccctaggacaaaggggcaaatggtgggcatggaaaaactgaagcccgagcctgcccacagctatgccttggcctctccagcagggtgctcctgctctgcactccagaaacaccctgacaggctcagagaggagatggaaactgacatacccaacccacttcctcaaacacttcatgctgctgccccagccttcccgcagacttggcctaatgaaaatacatacttcttcattcggagagacaaaacaagaactagagttttaatgataataaaagcaataataataaaagcaataacaataaaa

SEQ ID NO: 44490 - DNA, 912 bp, Homo Sapiens
aacagtacaagagcgcttgctgacttcgaggataactaagattacatactttctcaggagaaggctgcatgcaagacttctctgtcagggttgctcctgtggcttttttaattttatttttttaaacctatatatggaaaaggaaatttcaatgccagatttgataaaagaatgtgatgtatatgtagctgatgacccactggggaacaccagtgttccagttcacttaccacatctgtgacagtgtgtttagattggaataaatgtgatgcattacttcttatgtttttatcagtgacatggttgactgtgccctaattctcttgagttgcagttaagcaatgaaggttatttcctaatagggaagcaaaaggtgattgtcaattgatagtttaatgtttgaccacattagtgtctttatatgaaatagtagaggggaagaaattatagaaaacaaatgtgaaaaaaatacaccagtgggtatctgttctactaaaaccagaagattgttatgagtacttaaacctcactgtgaaataatgatatattttgcaattaatccctccccaactgagtgtcttactgtgttattaaatcttatcttttagttaatagttgcagtatttcttttaaatgtttttgtttttaacttaaggggtagatcctttatttgcttccttgttttccactatttgggattacttcctttccctgctatttatgaaatacctgtttatcactaagtgtaatgggtttggctttcattaataaatttactggggggccccaaaatgccaccccctaaaaaaatggaccctggggggttatggccccaaggggctattggcattttactggcagggcgaggcacccttggcagctccccacacactgtggcctcccgcctgcccc

SEQ ID NO: 44491 - DNA, 619 bp, Homo Sapiens
tttttaccaaaagagaagcagtctgggccagatgccctgccaggaaagggacatggacccacgtgcttgaggcctggcagctgggccaagacagatggggctttgtggccctgggggtgcttctacagcctcgaaaaagttgcccttacctcctagggtcacctctgctgccattctgaggaacatctccaaggaacaggagggactttggctagagcctcctgcctccccatcttctctctgcccagaggctcctgggcctggcttggctgtcccctacctgtgtccccgggctgcaccccttcctcttctctttctctgtacagtctcagttgcttgctcttgtgcctcctgggcaagggctgaaggaggccactccatctcacctcggggggctgccctcaatgtgggagtgaccccagccagatctgaaggacatttgggagagggatgcccaggaacgcctcatctcagcagcctgggctcggcattccgaagctgactttctataggcaattttgtacctttgtggagaaatgtgtcacctcccccaacccgattcactcttttctcctgttttgtaaaaaataaaaataaataataacaataatacggggga

SEQ ID NO: 44492 - DNA, 523 bp, Homo Sapiens
tgggcttgagcctcacttacttctccttgatacatagttcctggtctaccttctgaccctttttctaaaatagccagtgtctatttcactaggccatttacttacaagttcccagcttttagggaaaaaagagggaggggggagcatctagttttgaattagatatacatcttagaagtaatgagctattggcagctgttaaatcagattcagccacaaaccagaattctttcttgttgaacaagaccaatgagttagatgactttaataattccacttttctctccctctcttctcctcttcctgaaatcagagagatgagaaactactctttgaaatacctccagaggcgttttattgtgttcctttcccctccaagcagctccctttatacaattttgctcaggcaaccaaggacagagtatcggcagaaacatggagtgcttttgtataggccacctgtacataaaagtgtaattatttatttaattttcccatttgtatcatattaaagctttgtaca

SEQ ID NO: 44493 - DNA, 588 bp, Homo Sapiens
ttatttaggtataaatggtcatcttattatttttcaaaaaggtatattttaataattgtacaatttatatacagtttgtgaccagaatttgtaagttgttggtgtcatatcaaggatcttttaaattatgccactacaggatgtatcatttcaagtctattttgcacagctaaacagtagcaaaagatgccaattagcatgataatggtgtcttcatttttactgtatttaactgaaacctaacacatgttgaaaaccatatcatacctagtttatctcttaatttcaaactatgtacttgtaaaaatgatgtaaatttgcactgggaacctgggaaagagtgactgataatttttggtgcgtgatttttagatttgtctttttttttttaagaagaatttgttactatgtaaaccctgacattaaatgttttatctctaccagcatcaggaggaatcactgctttaagggtattatgtaatgcctagtgccttctatttacagtgaaaaagaggttttgcgaaggcatttatggtcattaccaaaaactaaattaaaggccttggattttaaaaaaaaaaaaaaaag

SEQ ID NO: 44494 - DNA, 597 bp, Homo Sapiens
ggggattggcgactcctgaagttggggcagtgggatgctgacaggcagaagctgaggtcctcagtcagtggcctttcctccttctgggtgcccagccccctttcctcacctgatacccaagcccaccacttttattttctggtgaggtgggtttgggaggaaagagaggcctagaggaggagttgaaagctctgctgttgtctcaccctatcttaatgagagacaagtgaggtggagggcctgccccccctccctccaccagacactccttccaggcctgagccccaacccctcttcaggccttccttccctagctgtgtcttggtcttcaatcccagaacaggacctgtgagcagctgcattggcctggagctggagagtaaggctgtaggatctttggaatctcttggttcctaagagtttcctcagagatcatacctccccagagggaagccagaatgatgccaaaaagtgtgcattggatatgggaacagcaagcagggctctgggtgacgcatgcctctgggctaattaactgggtttcaaccctcaaaaaaaaaaattttctacacaataatacttattattaatataacc

SEQ ID NO: 44495 - DNA, 618 bp, Homo Sapiens
  misc_feature (575)..(575): n is a, c, g, or t
  misc_feature (579)..(579): n is a, c, g, or t
  misc_feature (583)..(597): n is a, c, g, or t
  misc_feature (599)..(605): n is a, c, g, or t
ggcaagaaggagaagacaggctgggacacgtcagaaagtgagctgagtgagggtgagctggagaggcggcggcggacactcctacagcagctggatgatcaccagtgacccaatgagctgttctctgcctcgggtctgtgtgaggccatggctcctgggccaccctcaccgtctgcctcagacttcttccttagtctggtctgtgtccactttttctaaagtaaccccacccccagcacaccattgttggcacctctcaaggttgctcttggtgttcaagggtcccctactccctggactagtgcagtccttgccctcagccccagaccagagatgggtggtatatgccatgtggggtgggtgatgccagtagataaaagtgtgagagaaggggtctccagggaagagtcacaggctgttggacgcagcctgggtggcagagggcagggtcatcaccctctagcatcagtgcctgctcctgcctgccctggccctgaggctccaccacttcttcctccacccaggacctaatgtacgtgtgttttgttttttgttttttaaataacaatatttantacncgannnnnnnnnnnnnnnannnnnnnaaaaaacatgtcg

SEQ ID NO: 44496 - DNA, 573 bp, Homo Sapiens
tgaggatttaaatgaagtaacccctaaactcagccagtcccatgtttttttaacacttggaatatctaattccatttacactgcattcttcaaatgtaattttcaaagatgccttttgcctcatcccttgcttttaagtattattatagacttttggagactcacgaaacaagcaatccctaaattctcgcccaggaaagtatcttggattaaatggtttttgagaaccttgagagtgtatattctatgaaatggaagaaacaagaactagacagagtcacaaatgctgttgatcacagacaatctctgccatccataaggtaaatgtaatacatctggcgacctgctgagtgtgaacttgcagcaggtgaggaaggaactctgaactctcacaatcttgtttcttcatttcccagagagaaactcggcaaagagaaaaaggacatttccctccaggttatctgaaagaatttcaatgcttacctttaatcatgtgacattgtttatcttggattaaaagaaaagaaaatgtatttattttgtgcatattttcaataaaatatataaaatcga

SEQ ID NO: 44497 - DNA, 640 bp, Homo Sapiens
tagattgttttatttaaatccttctaacaatttaggcaattctacattaattttcatcaaaatttatccagtcaaaaaaatttcatgaatactccagatgtaagagagtcacaattttctacgataaatcagacatcttatttctagggtgattgagggaggtggaaagcgcaggaggaagccagtgaagaggacaatggaatgctgagtcaatgacattgacttgtgttcctatctgccatcttgggtgtgggtctttatatgtggttacagatcctttagtttgagggaggtgaggtagagaaataggatgccagcaggtaggaggccgatgtcagtcctcccagcaaagctgtgtcatttatctgaatggaaatgagaaaataaatatgtactcaataagtcacatttcccagaaatgtgattgagattctcaaaaaatagactcagattcttggctgtctgtttaaccaatcacgatatgggatttgagaaataaaatttagggaattttaagagacatgaaagctactaggtcagggaaaataaaaagcttaaataactatttttattgtccagatcctctactgtaatagattaactatgttcaataaatttctagacaaaaaaaaaaaaaaag

SEQ ID NO: 44498 - DNA, 715 bp, Homo Sapiens
ttttttttttttttttgtgtgtcagagttcagagctcaggagccaaaatatttttatacatatatagataaatctaccaggctatggatatatatgcaatgcactgcatccatgcattctgatagcatttcattaattttgatttcaaatggaagataaataatatcccaaatgaattatctgtaacagaaaagccaagactttaactttcattacatatctaatagttgatatcaccagttaccattttgaattttgtatagtactaggttagaacattgcttaatccttttaaaaaaaatgcatttacgtaaacacgaatactgaaattgttggattttttaactatatctgacataattttattcatcaattacattacacattcatttagcccagatttcaaatagtgggggaagaaagaaactgtatttcagagtaaaatctcctaaaggaaataaaaacacagagttgtaaatacacatgcttgcaaaaacattagtcgtgaaatccctagcaacaagtcactggatttttctctgtcagcacgcgtgtcagctgccaaagaatagacttaatgaagaagtgcccacatgctggcaggggccggcccactctggccagccagatactgctagattgtaatatttaaggtcgaatttcgacctgtggtacacagctgtgctgtggctcagtcagcaacctcagaactctg

SEQ ID NO: 44499 - DNA, 483 bp, Homo Sapiens
tggtccggcatcttggacttctcattgcaaccacttggaagtctgccctgagcctgcttcttcacatgggagctagtattctcagcccatggggagaaacggaggcctgaatacaggcggtcacctaaggtggtgcgtacagtgttgggccacatgtctagtggtgccaggactgagagatcacttacctccaccggttacccaggaggtaacagagactgatccacaatgttcctgaggtgtcttgggcacccataggcaggtgacttctggcttagggcagggttcaggaggctgggcactcacagtttctctttggtccccacagaacatgtttgggctgtggaagcctatggtattcttggctattgcagctgtggctctgtatgtgttacccaacatgcgacagcaggagtcagagttctgcctcatggagtgatggcagaccttggccagcgcgagggcagatccccagtggccacc

SEQ ID NO: 44500 - DNA, 902 bp, Homo Sapiens
  misc_feature (527)..(532): n is a, c, g, or t
  misc_feature (534)..(576): n is a, c, g, or t
agatgccccaccacctcctggcgagtccttcctgttcagctccctgtgcgaccctccagggatgcaggggatccaggattctctgccctgtcacacggcgagtcagacgggaggggcctttccctcggacccatggccccaggcagagttttgcaccagcaggacccctttgagggccttcaaggctctcccaggagtccccctctgccggccccccaatgccccagctccctcttgggtcctgtgccaagtccgccccagggcctggggctgttgggagccaagggccccctggtactcagttccctcacgattcccgatcacgggcacacctgccccctggttatttgtaaatatttctattggacccaattctcctcggaattggctggcacctctggctgccgcagctcagtgatgacgtgggggaggtgggagaggccgagggctttgcctaggggtgggttgccctgtatacatgatccagtctgtgactaccagccaacctgaataaaggggtttaaaannnnnnannnnnnnnnnnnnnnnnnnnnnnnnnnnnnnnnnnnnnnnnnnaaaatccagggcatcatttccgggggcggaaaaaagggatggaaatggcaacgggccaaatcgggttccggacccccccttctttgaaaaagggggaaaatttggcgggcctccccataagggggggggcgatatatatttccaaaaaacccccgggtaacccccgggctttaaggaaaaacggggggggcggaacaccccccggggaaaaatataccccccccccacataaagaggaggggggggggttttttttttttttgtttggaacccccaaaaagaagaagctttctttttttgagaggaacccacctcttttttttttt

SEQ ID NO: 44501 - DNA, 614 bp, Homo Sapiens
  misc_feature (580)..(580): n is a, c, g, or t
tttttttttttttactactctgtatgtaatatatatacatatatacgtacatatgctgtccaaatatatttgtatatatttgtatagcatttttacacctttattgagtaatctggtttcgaaaggaggtgagagtttagtcccttctgcagttttctccaagctgtgtcctgtgaatttcaacccttggagcctaagaaaaccctaggaagatgatgttaatttgctgtcatttcctaattcaggatctatcatcaaatgaaacatgaaaaaaacagtgacttttaaggtgaaaagagtttcaagcattccaaataaattatcaatgtttcataactttttattataaacccacctcctaataggaagccaagtactatttgatacagtggtaaaaaccaaactaccttgaatttttttaaggcaacttatgaataatgctcattttcacagtcagaatagctttaaaatatggttgaatttgatacacacaggaagttttcttgaagaacaatcctttcgcttttcttttttcttgagagatctaaagagaaactgtagattgttttcctgacagcanaagactaatgtgacaaaatgaagtcattgtaaag

SEQ ID NO: 44502 - DNA, 602 bp, Homo Sapiens
agtttgtaaaatttttatagtgaaacattttaatgacaatttaaaaatttatcttctctaaagaatggtcaaaacaatatcctttcagaaatagaattgttctttaatatctttccaaaatgactttggttaaatggaccagatgtatattagttaaaatttaggactaagttgttgatattctttgagtttacaagttaatccttattggagatgtgccaatatacagttagaatatcattaatttgcactgtttggggaccccatttaagaatgctgaattttgccaactaagaagtaagcaaatgcaatttaaaaagtaaatttgagcattctgtattaaatatgtgcagttattatcacatgaagaaacgcagtgtgtcgggctgtaatattaccatatttgctgtcatgttctcccatctcagtgctgggaaatcaccatgtggaaaccaagcaaacgtgttgtgcatcagccggcttgagtttgttcaatatcaaagctgaaaactagcgaggtctgctgtactgcttattgaagtattgtgattattttaggcattgattcttacaaaatatatactgtaacagtatactttgta

SEQ ID NO: 44503 - DNA, 559 bp, Homo Sapiens
gaactacacaatcaagatagctgactttggaatgagcaggaacctgtacagtggtgactattaccggatccagggccgggcagtgctccctatccgctggatgtcttgggagagtatcttgctgggcaagttcactacagcaagtgatgtgtgggcctttggggttactttgtgggagactttcaccttttgtcaagaacagccctattcccagctgtcagatgaacaggttattgagaatactggagagttcttccgagaccaagggaggcagacttacctccctcaaccagccatttgtcctgactctgtgtataagctgatgctcagctgctggagaagagatacgaagaaccgtccctcattccaagaaatccaccttctgctccttcaacaaggcgacgagtgatgctgtcagtgcctggccatgttcctacggctcaggtcctccctacaagacctaccactcacccatgcctatgccactccatctggacatttaatgaaactgagagacagaggcttgtttgctttgccctcttttcctggtcacccccac

SEQ ID NO: 44504 - DNA, 806 bp, Homo Sapiens
cttagactccgtattagaggccaccgatttcatacaacagtgtttcgctaaagacccttcactattcttgtttagtaaatagctgtctgctcttcagggaactgttacctatgggttattaccaaagaacgctggcaattggaaatgtcctgatggaaattctttgcacgtgccggttctctggcatcctccaggtggcccaacccaaagcagaaagcagaaaccacagaccccgtgagtctccccataccttgtttccaataacttggcaaaacttcttggtgcatattggttacaccctctgggattcataatgccattaggctaaaaccctaagagagagggttgacagaaacacacgcgagaatgaggcagatcccagagcaaggactgggcccagactctccacatgtgctctactagtgagtgccttatactctcagtattttggggcttacagcttcttatttgtgctaaaaaggtgcagttccaaagtaggaactgccacacaggccccagcatcctctctccaacttcatacctctctcctggtggggggagcgggcatccaggacctccggaatcaaggatgtgcagagaagagcaaaagtaatttttctagtcacatgaactgattggttccaggcaattagaaaatggctataaaataaccttattttttaaaaaaaatcttgggtcttcgttttcctattaggagactgaactgaccacatgtattgatttatatcctgaatatatgggaacttctgtgttgggatgtcctactggtagactgatgaatgttc

SEQ ID NO: 44505 - DNA, 583 bp, Homo Sapiens
ccttgttcttaggatcacagaatactaaagcacctcaaaaaaacaggtatcatgtgaaacagtggttgccaaaagtggagcgaggatgatttcactaggcatttggcaattcttagagacatttccggttgtcacaattggagggatactagtagcatgaattgggtagaggccagggatgttgctaaatagattataatacacaaggaaagcagcctcaaagaattacccctcccaaaatgtcagaagcgctgaggctgagaaaccctgatgtaaagatcagtcccagttataaactgaaaacagctatttacaaagcagtaaatgcaagaaagaaaaggaagtcgcaaagagaaggtgatgtaatgcaaattgaggattttacaagatcagatactgctgctttaagtcaagggtgaataatctcaacaaacagcaaatagcaatcactttaccagctgcatattgcacccacataggcaactcttcattttaggaacaaactgaatttgaacactgagccttttgaactcagccatctctatatattctttccttaaaattcatgattttgggcaaaaaa

SEQ ID NO: 44506 - DNA, 695 bp, Homo Sapiens
gcagacatggtgtcacctggatttttttctgcccatgaatgttgccagtcagtacctgtcctccttgtttctctatttttggttatgaatgttggggttaccacctgcatttaggggaaaattgtgttctgtgctttcctggtatcttgttccgaggtactctagttctgtctttcaaccaagaaaatagaattgtggtgtttcttttattgaacttttaacagtctctttagtaaatacaggtagttgaataattgtttcaagagctcaacagatgacaagcttcttttctagaaataagacattttttgacaactttatcatgtataacagatctgttttttttccttgtgttcttccaagcttctggttagagaaaaagagaaaaaaaaaaaaggaaaatgtgtctaaagtccatcagtgttaactccctgtgacagggatgaaggaaaatactttaatagttcaaaaaataataatgctgaaagctctctacgaaagactgaatgtaaaagtaaaaagtgtacatagttgtaaaaaaaaggagtttttaaacatgtttattttctatgcacttttttttatttaagtgatagtttaattaattaacatgtcaagtttaaaaaaaaaaaaataaaaaccaaagcggccgcaagcttatcccctttagtgaaggttaatttttaccttggccc

SEQ ID NO: 44507 - DNA, 560 bp, Homo Sapiens
gtggtccatcaattcagacactctgcttggatgccttacccttttcattagtgcattctttgcttctgaaacttggcagaaactcgttagccagtccactgcctttctgacaatgtgtggagtcacgtatgcttggtatatgcctttactacttttaaagttctacagtttattacttgcccaagtgttactaaatccttttcttatgtgtactggatggagaaaaaattatagccagcactttgagaggaaagttttcagaaacaatattaactggcactactaactgaaggccacaggagatgctatcaatgttatttgtaatctgaagattgaacaaggctgtgaggctcatttcaaactattttgaggtgttaaaatatatatatgctgtttctcagctgttccactcaaaccgtgttaggactctcaaaggtaaaatgtcacaggggcttttcagttgttacagagctcagcagctgtggttgcccctgttctacaccaatttcagttcaataaaaatgttaactttgcaaaaaaaaaaaaaaaaaaaaaatggc

SEQ ID NO: 44508 - DNA, 988 bp, Homo Sapiens
gcgttccctgcagaccacgggaagccctgtgcttgcctgggtcagggctaagctgtgcgccctagaggagggaggaggactgcagattcttggtcgagaagaatgaagaggatttctgtgtttgctgagcagccattgtggagggttacccgcctccactttcccgttgcccatttcactgccaccagctcctcttcctctgctcgaacctatgagtcccagcctcactggcggcctcagacatgctcaggagtgacggggacagagggaggccgctgagttgcccgttagaactcttactgctgcgccagtgacccaggtggagagggaccctgaaccaaacagaacgtgtgctaattttccgaactccaaactgtatactcatattcatttttaaattgtatttttccaaacttcaaaaaggatgatgagcgtgggggataggaaacaaaacctgtaaacgttgtgaatgggctcagtggactctgggaccaaaccttctgtaatctctaaaacaatgggaccaagagctggatggaacctggagtcaaaaagaactgcttcagtccccgcttgtaccgcttgctagctgtgggagcaggcagggcgcctgggagccttgcgttttctgggaccgttccattgggactcatccctactcacagggctgtgtgaggtgttgtgtggactgggtgtcctgcgaacgcccagtcggtggccagcaggggggggaccaataaaggttaacattagaaaaaagaaaagagagaaacaacaacaagacgactacaacagacacacagacacagaaagaacataataagagacaagaaacaagagggggcggtgatatttagcgggggaaagtaaagtaagattaaaagcagcatgagaagataaagagagaggacacaatggagagacgttgtgggacctgtgggagaccacagaggcattgtatcgtgggtgtgatacatgtacaaatttg

SEQ ID NO: 44509 - DNA, 936 bp, Homo Sapiens
  misc_feature (644)..(644): n is a, c, g, or t
  misc_feature (648)..(726): n is a, c, g, or t
gggtgagtgaaaaggtggaaatccctggtaccttgcctggtggttacacagtttaaccataggccaattttaggggcctctgaagtatctttctacaaacgcagacaagctccactacccctaacctgccaggatgctcaagtccactgtcacaatccctttcagaaaacattagtggccgctgccccagctacagagacggccgaaatgctttcactccttagctttgccaactccatcctccaaaacttcccagaatacctccctttccagttctaccaaatctgtacttgggagcagcctgctggatccagaacatgacaacagagagctgcgtccacagggaacaaagccctgacctctctctccacattacccttacaaaaacaggccctccccatgagagagctacacggcaggggcagacactgtgagtataagctactttcctccctggagtgctctatgtgggcagaacatgctctccttgcctctcctggaaggtgtcttctctatggcctggctagagctgcaaaaaagggacacaccccacttcggtaaaagaaaatagggaaaggccataaacaaagacagacttgtagtttattttgtatttttttttaaataaatacactttacattanagannnnnnnnnnnnnnnnnnnnnnnnnnnnnnnnnnnnnnnnnnnnnnnnnnnnnnnnnnnnnnnnnnnnnnnnnnnnnnnaaaaggggggggccctccaaaaaatcccccgggggggccccaaggtttacccgttaccccattttttttggaaaaaaggggccccctaaagggaacgcgttattaaaaaactagggccctggcccccccttttttaacaacccccgggaatggggaaaaacgggccacccttggggaatctttgtgggaagggaaccttatcttcggggg

SEQ ID NO: 44510 - DNA, 880 bp, Homo Sapiens
  misc_feature (790)..(790): n is a, c, g, or t
  misc_feature (811)..(811): n is a, c, g, or t
  misc_feature (827)..(827): n is a, c, g, or t
cgagcccctggatgaaggtggcgagggcggacggcacgccgtgtaccaggctgagcacctgctgcagacggccgggacctgcggggtcagcgacgacagcctgggcagcctcctgggaccccggacggcagccgtcttcaggcctcggcccggggactctctgccatcccgagagacccgctacgtggagctgtatgtggtcgtggacaatgcagagttccagatgctggggagcgaagcagccgtgcgtcatcgggtgctggaggtggtgaatcacgtggacaagctatatcagaaactcaacttccgtgtggtcctggtgggcctggagatttggaatagtcaggacaggttccacgtcagccccgaccccagtgtcacactggagaacctcctgacctggcaggcacggcaacggacacggcggcacctgcatgacaacgtacagctcatcacgggtgtcgacttcaccgggactactgtggggtttgccagggtgtccgccatgtgctcccacagctcaggggctgtgaaccaggaccacagcaagaaccccgtgggcgtggcctgcaccatggcccatgagatgggccacaacctgggcatggaccatgatgagaacgtccagggctgccgctgccaggaacgcttcgaggccggccgctgcatcatggcaggcagcattggctccagtttccccaggatgttcagtgactgcagccaggcctacctggagagttttttggagcggcccgcagtcggtgtgcctcgccaacgcccctgacctcgnccacctggtgggcggcccccntgggtggggaacctgntttggtggacctgtgggggaacaatggcgaactggcggccccccccgaaggaa

SEQ ID NO: 44511 - DNA, 652 bp, Homo Sapiens
  misc_feature (573)..(573): n is a, c, g, or t
  misc_feature (584)..(584): n is a, c, g, or t
aataaatatacctttgctcttttcagggaaaatacaaccacccttactgatagttgggaaaagaagattgggttattttgccatatcatttagctggaagtgacatttaaaagcaccctgcatcactagtaatagtgtattttgctattctgcccttgtaatcggtgtccctgtaaaacaatccccacagattactttcagaaatagatgtatttctctacgtaagggccaggtttattttctccttttttgagatttctagaaaaaatgctgcttgcacatgttggttcttgaaaccttagctagaagaatttcaggtcataccaacatgtggataggctatagctgttcagaggtctcctgggggagcttaaaacgggggaaacactggttttcacagacgctccacatggctgtctttaaaagactcaaaacttttttttgtcctctttgttatgcttggaagctccccccccccccaacagtgtgtcgagtctttgcaaagaaacctttagatgtggttcatagatatatgaatacgtatctgtgtaaaacagtgagtgtgcagtgtgntaatactttanattattatgctagaaaaataaagttacataccttgctgtggaaaaaaaaaaaaaaaaaaaaaaatggc

SEQ ID NO: 44512 - DNA, 558 bp, Homo Sapiens
gtttgactgttctatgtatgttttttcaaagaatgttcctttttttgaactataatttttctttttttggttattttaccatcacagtttaaatgtatatcttttatgtctctactcagaccatatttttaaaggggtgcctcattatggggcagagaacttttcaataagtctcattaagatctgaatcttggttctaagcattctgtataatatgtgattgcttgtcctagctgcagaaggcctttgtttggtcaaatgcatattttagcagagtttcaaggaaatgattgtcacacatgtcactgtagcctcttggtgtagcaagctcacatacaaaatacttttgtatatgcataatataaatcatctcatgtggatatgaaacttcttttttaaaacttaaaaaggtagaatgttattgattaccttgattagggcagttttatttccagatcctaataattcctaaaaaatatggaaaagttttttttcaatcattgtaccttgatattaaaacaaatatcctttaagtatttctaaaaaaaaaaaaaaaaa

SEQ ID NO: 44513 - DNA, 673 bp, Homo Sapiens
  misc_feature (658)..(658): n is a, c, g, or t
tttttacacataggttgattttttttttcttaagagaaatgatgtattcttgaaacatttgttactcattccaggaaacaaaaacccatataataaaacccccactcagagcctgttagtcacctctctagaagatggcatctcaggagaaggaatggctttgtggaagaaggaatcacctttttcttgctcaagaattatgctgacttcagccctgagcctggatctggtcactgagaatcatcaagtgtctagatcctccccccaaaataactaatttagtaggtgattttgattttaaaaaattgacaccaaaaccctgcctgcattgtaatggaattcgaaaagaattcatgttcacagaactcaacgttcaggctaatatttacagaagggaccaaatctaaatcctggtaggtaactcctgtatgctttatccaaaggacacccacagttttccagcatagatataaccaaggatgaattgattccttcaaagaactgggaggcacggatattgcattttttgtttacatccagtagccaagacgcctcagtgagccagtcttgggcagaggctgtcacatttaggcagattggaagttggtatgttctaattctcactctggactacagtgaggctgaatttatcatgtcnaaaaaaaaaaaaaag

SEQ ID NO: 44514 - DNA, 484 bp, Homo Sapiens
  misc_feature (468)..(468): n is a, c, g, or t
  misc_feature (480)..(480): n is a, c, g, or t
gagccctgtgagatggctctgtggctggtatcccgacttggaagatgaggaaactgaggcacacggcctggcctggcttcacacacatagccgactcaggagagggatgcccatgggggaacatgtgactctcagcattggaaggacagagctaggatgatggctttccggtggcactcgttcaggtttttgcccaagtctcagcttggccaaggcctgtcactgactggtttaccaaagtcgatgtgaggaggaggctttatacctgaggggatgatgttaacttcagacaagatggagctgctcacttttgccgggtttggtggccacttcacccccaaccctgtctcacccccattatccctcctcaattggaggctggacagagctgaataggaaagacttgctattgcctaaaggctaatgtgtgacacctcctgaggacctccccaccccagtgtaatgggnccttcatggcanggac

SEQ ID NO: 44515 - DNA, 729 bp, Homo Sapiens
gaacaatgaactcatctgccctagagagaatgacccagtgcacggtgctgatggaaagttctatacaaacaagtgctacatgtgcagagctgtctttctaacagaagctttggaaagggcaaagcttcaagaagagccatcccatgttagagcttctcaagaggaagacagcccagactctttcagttctctggattctgagatgtgcaaagactaccgagtattgcccaggataggctatctttgtccaaaggatttaaagcctgtctgtggtgacgatggccaaacctacaacaatccttgcatgctctgtcatgaaaacctgatacgccaaacaaatacacacatccgcagtacagggaagtgtgaggagagcagcaccccaggaaccaccgcagccagcatgcccccgtctgacgaatgacaggaagattgttgaaagccatgagggaaaaaataaaccccagttctgaatcacctaccttcaccatctgtatatacaaagaattcttcggagcttgtcttatttgctatagaaaacaatacagagcttttgggaatggactcactgattttcagtcttttccatctctttcctcctagactctgtgatctgagggtataaagacatctccaccaagtctgagccctcaaaatgtcctgattacaatgctgtctgtccaactgcctgttcaataaaagtaaactcagcagaaaaaaaaaaaaaaa

SEQ ID NO: 44516 - DNA, 784 bp, Homo Sapiens
agcgtgactgacatgaaatgctaccatcatcgtaaataaaattcccgtaaatacttgctgtctctgctgtctcagtcctgactcacgggctgagttctctttctgcacagtagcactggcattaactgtgacagctttacagcaggctccctccccgaggccgttcagaagcattactcagcgggtcctacacgtttcctctcccatgtcaagtttagaagcagtgtcaagacccacagcagtcctgcgggagttttaagggatgcacggagtttatggggacagtttggaaaattgacattcatgtgacttagagtcctactacttgaaaatggattccagctctcaacgaatttagagctttggcaaaatttttaagatttctttgatgtccgatgtgctcatctcttggtttgttcttgagtattttgtggatttttatgaaatccacaaagtttttgttataatgaatgggacactttcccataaaatgttgtaattctgtattgctgttttagtaaacactgttgattgatgtatattgatgttacacttggtcacttgtaatagtttgtcagttcattattttgaactttttaggtaaacagtcatataattatgcaaataattatagttgtgtctctgcctttctaatatttatactttgtgtatattatcatgttggccaggactcaagcgtctttctcttgtttctgactaatgcgaatgattctaatgcaggggtttccaaactggtggccggggggccaaatccagccaatgg

SEQ ID NO: 44517 - DNA, 735 bp, Homo Sapiens
attcaagggaaataccagcgtgcacttgagtcactttgaaatagttaattcaacagcaccatgttagaaatatattggcagccaagactctgaactctgcagaaacatttgtttcacccagacttcaaactctagccctgactatgatgcccctgtgtgcatttacaataaagactccaacggagggagcctgttggtgttaaattgtttacatttctttatacaaataatgtgctttcagtgccttagttacagctccctttctgtttcttgttccaaggattctgtagtatgtagtgtgtttcttaggtaaagtctctttttgctactgaaagggaaatggtctctaaacactggtcactgtagcaggtaaacactactctaacgtggagaaatgagcttcatgctgaggtagtggttgccttagagctgttatttatgctgtagaaaacgaaaatggttttgctacctgataagcttcagattagatatagccctaaagttatcctgtacctgcattaaattttcattttagaagagaatcttggttttggtaattcatttttttttaagatcattatgtgcaaaacaccaagttttaaaataactcacagaatggccttagttttcaatgtctgatggaatatttgtgagttgtgttatctgtatatacatcccagaattaaggagtgaattaaatagttaaaaaaaaaaaagaaagttggggtaaaaaaa

SEQ ID NO: 44518 - DNA, 763 bp, Homo Sapiens
  misc_feature (5)..(5): n is a, c, g, or t
  misc_feature (63)..(63): n is a, c, g, or t
  misc_feature (66)..(66): n is a, c, g, or t
  misc_feature (77)..(77): n is a, c, g, or t
  misc_feature (90)..(90): n is a, c, g, or t
  misc_feature (105)..(105): n is a, c, g, or t
  misc_feature (112)..(112): n is a, c, g, or t
  misc_feature (151)..(151): n is a, c, g, or t
  misc_feature (154)..(154): n is a, c, g, or t
  misc_feature (187)..(187): n is a, c, g, or t
  misc_feature (197)..(197): n is a, c, g, or t
  misc_feature (254)..(254): n is a, c, g, or t
  misc_feature (325)..(325): n is a, c, g, or t
  misc_feature (331)..(331): n is a, c, g, or t
  misc_feature (336)..(336): n is a, c, g, or t
  misc_feature (339)..(339): n is a, c, g, or t
  misc_feature (386)..(386): n is a, c, g, or t
  misc_feature (654)..(654): n is a, c, g, or t
cagancaactattccaggagacttaataggtgatgtactttcttcaatcatggaaatcgtttnagngcctcctttgnaggaatgctttgntttgtgatgggtttncttaaanaagagcacacctccgtccaatctcctgagacagccacgnctncgctgacatcccactgtgatgctttcagatagncagtgaatgnttctgataaccttcatccagtatctgaaacacaatgtgagagattatattgttttanataataacatcccatttagttgactaaaatcttccaaactctgaaagctgcacactgctactccagagagngcaggncttanctnttctcctttctgacttcaagatgaatctttgggacgatgtttctggngcttggtccacagtgattcacttttgaaggagaggccacatgacatgaactgcctggtgttacaacctagctaacatatttgatgctactcctgttgtctgtactgcttattcaagtagtattctaagttatgttactaaaaaacatggtgggtaaagcacaatcctacccatcattgtcctccaaaataattgtatgacatacacggcccagcccattgccctccctgcatctctgtgctgctttgccatttccccttctacccagnctcctcaaggggtaccttggtggatatttcagtacttaaaaccagactgtaatcataacctccctctgtgtggcatcaataaatagccaaactcaaaaaaaaaaaaaaa

SEQ ID NO: 44519 - DNA, 661 bp, Homo Sapiens
  misc_feature (640)..(640): n is a, c, g, or t
  misc_feature (650)..(650): n is a, c, g, or t
  misc_feature (653)..(653): n is a, c, g, or t
atatgtgaaaattaagtttggagaatgaatcttataaggggagtgtgcctgttactctttttttaactttttctgcctatagtaaagcaatggttcttaaaccctaatatgtatcatatcacttggagagcctaataaaacacagattcgtaggttccttccttccctgaaagagttgatttggtaggtctgatgtggggacctagggaaactgtttataccagttttccttttaatgaggggatttccaggatgctggacatttagtgctgaaatggggaatgtgtctggtaagccaagacaggtcggtcacccttgttggcacctgaaaatttgcgagattaatgaggtttcaggtaatgatgaggcatcttatccagagaccacagcttgaaaactcctggaataaacacttacagatacattttctaactcttaaaattaacctaaagtaaatgttaaaataaaagttaaaaaaaaaaagtcaaactgtcattaaaaataattctggctgagcacggtggctcacccctgtaatctcagcaatttgggaagtggaggtgggcggatcacaaggtccagagatcaagaccatcctggccaacatggtgaaaccgactctctactaaaatacaaaatnagctgggggnggnggcgccta

SEQ ID NO: 44520 - DNA, 479 bp, Homo Sapiens
agactgtctcaaaaacaaacaaacaaacaaacaaacaaaaacaagtggccagtctgtgagctatagttcccaacacctggtctagactcttctgcccttgctctgcagcttctttcctgttgattgggcattcagggaaggagtttaaaaagtgacactcatggctcatgacaaatgagatactttgggagtgtggaaacatggcttgatatttgccttcagatatttttgcttatataagttctaaatggaagtgataagttcattcttagggtccaagttgaaaggcagtggttcttttgtgaacaccactaactacattcgaaaagcctctccaattccacattccaagtctataacagctttggaaatgagtaacaatgacctctcatgtagtagattaaagcagaggcctttgccatatgattgttttttggcttaaatgtttgcttgccctgtaactgtaatactttggttac

SEQ ID NO: 44521 - DNA, 702 bp, Homo Sapiens
cgctccggcgccccagccccactatcagtgtccagcgtgctggttccccagagcacagctcagcatcacactgacactcaccctgccctgcccctggccagagggtactgccgacggcactttgcactctgatgacctcaaagcactttcatggctgccctctggcagggcagggtagggcagtgacactgtaggagcatagcaagccaggagatggggtgaagggacacagtcttgagctgtccacatgcatgtgactcctcaaacctcttccagatttctctaagaatagcacccccttccccattgccccagcttagcctcttctcccagggagctactcaggactcacgtagcattaaatcagctgtgaatcgtcagggggtgtctgctagcctcaacctcctggggcaggggacgccgagactccgtgggagaagctcattcccacatcttgccaagacagcctttgtccagctgtccacattgagtcagactgctcccggggagagagccccggcccccagcacataaagaactgcagccttggtactgcagagtctgggttgtagagaactctttgtaagcaataaagtttggggtgatgacaaatgttaaaacaaaaaaaaacataaccacacactcaccacacacaaacaaacacacaaaacaccagcggggggcccccacaaaaatatcccg

SEQ ID NO: 44522 - DNA, 561 bp, Homo Sapiens
ctggagaccagaatggaaaggggcttcctgagctgctagggggtgaaggacccccgaacccgcatttcttgagtgagagcaaacactcgaggcaggagccagcacccctcccactgcatgcccggcccccagcccaccttgccccctgacccaccttcacccgtgccccttctttctgcccttcctcaccgaagaagggctaggaacaccctggagaggctgcaggtccggccacggacgctcagctgagccccggtctgctccttcagcctccttgctcttgttggagcacaggccccaggcttcctgccagggccccgattcttcttatgtcctccagccccgccctggcgtggacatccactcactccttccagcaataagaaccgtccttggtcgtggagagtactgtgaaacaaaccaatgcacttaccaggaggcacaagactcttgaagaagatgtaaaatgaaccttttttttttttacaaaaaacaaaaagcaaatattcataaagagaaataaaatgtaattttaaagtaaaaaaaaaaaaaaaaaaggac

SEQ ID NO: 44523 - DNA, 927 bp, Homo Sapiens
cccacgcgtccgcggacgcgtgggtcgactgtggggtgggggctgacccctgcctttgattgtcattctcctgggaagcccagtctcagtccctcccccaacactgtccacactgcccctccccactgtttatttattgcacggatctaagttattctccccagccagagcccgagctcctgctccctgggaaaagtggcgtatggccctgagctgggctttatattttatatctgcaaataaatcacattttatcttatatttagggaaagccggagagcaacaacaaaaaatgtttaagccgggcgcggtggctcacatctgtaatcccagcactttgggagtccaaggagggggatcgcttgagtccaggagtttgagaccagcctggacaacatggtgaaaccccatctctacaaaaaatacaaaaattagccatgcatggtggctcatgcctgtagtcccagctacttgggaggctgaggcaggaggatcacttaagcccagaaggcagaggttgtagtgagctgagatcgcaccactgcactccagcctgggcaacatagcaaaatcctgtctcaaaaaaaaagttaaaaaatattgcccggctcctagaatttatttatttcctgacttacagcaagcgagttatcgccttctgcattttgtacactttcttaataaagccacattctttctttttcccaccgaaaccacctcccccccccttcttttccccaagggcgggcccctctaaaaaaatccctccagggggccccagtcttacggcgaaccccaattttcccgtaacaaagggggccccaataagggaagacgcaaataataagccttatggccttgcgcccggctgctttttatacaaccctcacgcccgctgggaaaaaacttgttttaaccatttccgaa

SEQ ID NO: 44524 - DNA, 1105 bp, Homo Sapiens
gaaaaggaaaagtgattaaacttttaaaggaaaaatttcattttaagaaaataatcatgattggagatggtgccacagatatggaagcctgtcctcctgctgatgctttcattggatttggaggaaatgtgatcaggcaacaagtcaaggataacgccaaatggtatatcactgattttgtagagctgctgggagaactggaagaataacatccattgtcgtacagctccaaacaacttcagatgaatttttacaagttatacagattgatactgtttgcttacagttgcctattacaacttgctatagaaagttggtacaaatgatctgtactttaaactacagttaggaatcctagaagattgctttttttttttttttaactgtagttccagtattatatgatgactattgatttcctggagaggttttttttttttttgagacagaatcttgctctgttgcccaggctggagtgcagtggcgcggtctcggctcactgcaagctctgcctcccaggttcacgccattctcctgcctcagcctcccgagtagctgggactacaggcacccgccaccacatccggctaattttttgtatttttagtagagacggggtttgaccgtgttagccaggatggtcttgatctcctgaccttgtgatccgcctgcctcagcctcccaaagtgctgggattacaggcttgggccaccgcgcccagccaatgtcctagagagttttgtgatctgaattctttatggatatttggaactatatttcatacaaagtgctttaagtgtggagaggccatttaaacccctttactcttaaaataccgattccggagccttcaatgaatattggtttctctttggtatggcaataaaagtttatccgtatgtcaaaaaaaaaaaaaaaggggcggccgctccaaaatatcccctccagggccccagcttacgctaccccgcttttcttggacaagggccccctaaagggagccgaatataaaacaggggcctggccgtcctttttacaacccccggaatgggaaaaagtctacacttggggaactcttgggaaagaaccctacttcctgtggggg

SEQ ID NO: 44525 - DNA, 889 bp, Homo Sapiens
gcttgcagacaacctgttttctctagagacacacaatgattctggccctcagtctgtttccctccccttgtttactctttggtcaccgatcgagtcaggctagaggggtaatacggtgattaaaagaagtaaattctcactgtaaacttggattgattaacagaaacaattaaaccaaacaaaatcattgccccaaatttctatctccaagaattgctttgtgccattttgaattcaggtagttattctgtatatacttagctaactattcagagcttcttcaatctctagtaagcttgaaggtggtgtctgggaagacacagggcagggtgacatttagactctgttcattcttaaaaatagggataagccagaatgatgtgacatctagtatgtggtagatgaagaatcagtggaaattcttaattgcacagactttataatccattatataaagtgtaattccatactttttactgtggcaagggtgtgatgtgattgttaatctttttaatttttgaatccaaactgaatttaaagtgttgaatacttaaatcctcacaagtgaattatgaaccatttgtaaagtgtttctataactctttgtatcatgtgttggtacatcttatcaagttttttctggcatgtaattccattctaaacttatgtaaaatttctattgttgctgtaaatattacacaaatatctattccgtgataaccttcattatcagcatgaaatggttaatttttactgagcacaatgtatttttgaatggatcttccccaatgtctttaataaaatgcagattttgcactgactgatgtgactgccaggccgtcccaatcttgagcactgtggtcccttcgtggtttgaactgccaaccgc

SEQ ID NO: 44526 - DNA, 635 bp, Homo Sapiens
  misc_feature (625)..(625): n is a, c, g, or t
  misc_feature (632)..(632): n is a, c, g, or t
  misc_feature (635)..(635): n is a, c, g, or t
ggatcttttctgtatacagcttaaaatcaaaaatgtatgttaagagaattttttctattacttatggatcatgctttaaaatgatttttcttgatatttattttactccattttgtttttttctctgggtgaggcatctggttactggttattttaaaaagaataaagacattcctggaatcactccttttgggtttttgtttgttttgtttcttttctacatttttaagtattattttacaaaatagaaaaaatatagattcatgccaaattattacctatttttacaccaactttctgcagtccctccatctggtatgagtaaccagatagagcacaaagcatgagttcttgttcttcagttaaaagagcttctttcacagtgttgataacaaatgccttttgtagccaaaaccaggcgtctcaaccttacgtttttagttaaagaaatgtttagctaaacgttgttgaacattgattgtttggtaccgaaaacagcagtggacgatgttgtgcaatatccatctactgtagttaagatattcagtagtttgtttttcataagcatgtaattgatcatatttctgccaaggatgtgccttcaactttataattatagtgttgntaaaganaan

SEQ ID NO: 44527 - DNA, 627 bp, Homo Sapiens
  misc_feature (583)..(583): n is a, c, g, or t
  misc_feature (586)..(587): n is a, c, g, or t
caggactggacatatctgcactcctgccctctgacttcagccgctacttccatatgaggggtctctgactacaccgccctgtgcccagggtgtcatctggactgtgtttaaccagacagtgatgctgagtgctaagcagctccacaccctctctgacaccctgtggggacctggtgactctcggctacagctgaacttccgagcgacgcagcctttgaatgggcgagtgattgaggcctccttccctgctggagtggacagcagtcctcgggctgctgagccagtccagctgaattcctgcctggctgctggtgacatcctagccctggtttttggcctcctttttgctgtcaccagcgtcgcgttccttgtgcagatgagaaggcagcacagaaggggaaccaaagggggtgtgagctaccgcccagcagaggtagccgagactggagcctagaggctggatcttggagaatgtgagaagccagccagaggcatctgagggggagccggtaactgtcctgtcctgctcattatgccacttccttttaactgccaagaaattttttaaaataaatatttatantannaaaaaaaaaaaaaaaaaaaaaaaaaaaaaaaaaaaaaaaa

SEQ ID NO: 44528 - DNA, 724 bp, Homo Sapiens
gtggaaaacctgggttccttctgccctcatcttattagtagctgtgatgggcacacactcagccaagcactgagatgttgtgaacacaaagatgtttgaggagctcaagagccgtctggacaccctggcccaggaggtggccctgctgaaggagcagcaggccctgcagacggtctgcctgaaggggaccaaggtgcacatgaaatgctttctggccttcacccagacgaagaccttccacgaggccagcgaggactgcatctcgcgcgggggcaccctgagcacccctcagactggctcggagaacgacgccctgtatgagtacctgcgccagagcgtgggcaacgaggccgagatctggctgggcctcaacgacatggcggccgagggcacctgggtggacatgaccggcgcccgcatcgcctacaagaactgggagactgagatcaccgcgcaacccgatggcggcaagaccgagaactgcgcggtcctgtcaggcgcggccaacggcaagtggttcgacaagcgctgccgcgatcagctgccctacatctgccagttcgggatcgtgtagccggcggggcgggggccgtggggggcctggaggagggcaggagccgcgggaggccgggaggagggtggggaccttgcagcccccatcctctccgtgcgcttggagcctctttttgcaaataaagttggtgcagcttcgcggaaaaaaaaa

SEQ ID NO: 44529 - DNA, 686 bp, Homo Sapiens
cttcgtactctggcctctggcgtctcggctcgtcggttgggtacccgaacccagctactgctgcttgaagagaagatggatggggactcctcgccgtcgctgcgccgccggccttccctgggcggacgtacacctttgcgaagcgtcagtgaggacccagggcccctccttggaatagctcttatttctcaagcgctgcagcgtgaagctcgctctgcgggtccgagaggcctgcgatctgaagactgaaaactgggaagagacgctctaccctgtgctcctcgccggcttcgataggagccgcaggtgcctgggattttctcaaactttgtcccaaacttcagctgtgggagtggaggaacaaacaggcctctcccagaattgtgaaagagatcgccctggtggatgaaacaaaaacaaatgcacttgacttccaccgcctgcctggcgtgtcacgcgggtttaatgtatgtgtcacatttaaattcaaagtattttcttctaagggcctggacacatttcttttctccctgtatcgtgaattggaaaataccttaggatattaaaagttatctaagataaccccctttcttctgtaagttaaatactaaacggcttaagacgaaattttggaatatagagatgatgatgcagactgcagtgaattatcaaatatgcatctcact

SEQ ID NO: 44530 - DNA, 513 bp, Homo Sapiens
  misc_feature (480)..(484): n is a, c, g, or t
  misc_feature (486)..(495): n is a, c, g, or t
  misc_feature (497)..(499): n is a, c, g, or t
  misc_feature (503)..(503): n is a, c, g, or t
gggaagctgtttccttgaagacattgctttcagtcaccatacatgtctaaataatttagcttatcattcattctatgtaggaatgagataagaaaggatatgatggcaggaaaagaaatgctattcattttttatactttagttttattttcttaggatctatatcctatatatatatattttttaaagcactaatttattgcagtctttattttagaaaaatgtgaagcatttttttctcccctaaaatgaatatatttagatgacaagtctttagtgctggtagaggaactaattgattttgtactatagtaggaaagtgtttatatgtttcaccagaaataaaatatgtagggtttgtatgtaatcttctgtgtttatcctatgttgatttaccttaaatttgcaacatacatatccacataaatattcatgactttcttatatttcattaaaatgttttatggcttcttaaaatcnnnnnannnnnnnnnnannnaaanaaaaacatgt

SEQ ID NO: 44531 - DNA, 580 bp, Homo Sapiens
tgacaaattcttcaaggaggtgtgggtttcaacagcagctcgaaatgctacaatttatgacaaggttttccggtgccttcccaatgatgaagtacacaatttaattcagctgagagactttataaacaagcccgtattagctaaggaagatcccattcgagctgaggaggaactgaagaagatccgtggatttttggtgcaattccccttttatttcttgtctgaagaaagcctactgccttctgttgggaccaaagaggccatagtgcccatggaggtttggacttaagagatattcattggcagctcaaagacttccaccctggagaccacactgcacacagtgacttccttgggatgtcatagccaaagccaggcctgacgcattctcgtatccaacccaaggaccttttggaatgactggggagggctgcagtcacattgatgtaaggactgtaaacatcagcaagactttataattccttctgcctaacttgtaaaaagggggctgcattcttgttggtagcatgtactctgttgagtaaaacacatattcaaattccgtataccaaaatccatt

SEQ ID NO: 44532 - DNA, 500 bp, Homo Sapiens
tgtatacacacacacacacacacagagataaacacaatattccttatttcaaattagtatgattcctatttaaagtgatttatatttgagtaaaaagttcaattcttttttgctttttaaaaaatctgatgcttcataattttcattatattattccacatatttttccttgaagttcttagcataatgtatccattacttagtatatatctaggcaacaacacttagaagtttatcagtgtttaaactaaaaaaataaagattcctgtgtactggtttacatttgtgtgagtggcatactcaagtctgctgtgcctgtcgtcgtgactgtcagtattctcgctattttatagtcgtgccatgttgttactcacagcgctctgacatactttcatgtggtaggttctttctcaggaactcagtttaactattatttattgatatatcattacctttgaaaagcttctactggcacaatttattattaaaattttgaatcc

SEQ ID NO: 44533 - DNA, 970 bp, Homo Sapiens
gcagaggatggcccacgggtggttttcatggtggatttgtggcatccaaacgtcgcagcggccgaacggcaggctcttgatttcatctttgctccgggacgatgagagtatttcccatgctggagtcggcgagaagggccgaggcggggcctgggcagactgtggtccggtccagtccctaccggtgttgtttccatgctcagaaacctgcctcagcggaaagctcttatttgggattttatatcatgtcgggtccctctttcccttggttattgtaaatggaaacttttcggcttgtatttccttagatttttttttttttccttccaatcattggcttcagagactcctttctgggcctaacagcgcattcctttgatgggtccttgagtgaccagagacttagtgcccttgtaagtctgtcttcggtggctactggttttttccagggctctgaaatagagtacctaaagggttattggtctgaatttcataatgtacaaaaaaaaaaaaaaaaaaaaaacaaaaaaaaaaaaacaaaaaaaaaagggggggggcggccattaagatattcacccccggaaggggcccccagtttatagcggcataacacagattttttgttaacaaggggggcgcccaataaggggacggcctatatataacacaggggacacggggcggggttaaaaagaaggagacggggggaaacaagtgcttacggggagaacttttggagagaagaacacccatatagcggggggggggggggacaccaagtggggggcggagacagacctacctacggagatttttagagacggcgcagaggagggagaataataagacaagtttagagggggttatatagtgaggtttggtcaacaagggggaatattggatctgcgggtgttggaaaaattcttggcatcacggagggaatgattcttggagaaagatattttagcgc

SEQ ID NO: 44534 - DNA, 669 bp, Homo Sapiens
  misc_feature (650)..(650): n is a, c, g, or t
gctagtgaggagacagagaagacctacatgcccagaggacccgtggccgttgtgctggttttctggtctcctgtgaagaacatgtggatctcttcccgaaggaaaaggtcccaggagaccagtttgaggcactcactctagaaatagcctgtgttagctgatgtgtgaaagcgtagccggccagccacactagagatgccttttctgaataatgtattatgagcagtgtcagatttataaagccgaggagtggtttggaatatacagctggtcgcaggtgcaggtccagtgtttagatccaaatggaaaacagcagcttctaagaggtacaactgttggaagaaaacacagttgaaatgcaccaggcaggtactagcaagtgtgcaaagagcacgtctacatttgagtaaaatgtctacacagatatttgtcagtgatgagaatgcaggaaaaggcagacatttcaaacatacctgaagtctttttactcattatcttgttaaagaatcactgaggtgcatgatttctacacatcgtgactgctctgctctgcgtttacaaaaccaacagcccgcgcaggtacctagctacctgcattcatgtgacatgtctggggaacagaagataataaaggatcttgctgaaaacanaaaaaaaaaaaaaaaggac

SEQ ID NO: 44535 - DNA, 625 bp, Homo Sapiens
ccgcctcgcgtcacacagcatgctgccctcagacgtgtccatcctgtaccacatgaaaacgctgctgctcctgcaagatactgagagattgaagcatgctctggaaatgttcccagaacattgcacgatgcctcctgaccatgccagagtaatctcagctttctttagttactggatcacacatatccttcctgagaagagcagtgactaaaatggaatatctctttaagaacagctcctctttaacaaaaaaacttaaaagacaaatgtgagatgggcttagagttagttctctgggaacttgaaagacatttatgccatattatttattcacgtgtttgttcctggtgggcaagatgccatctgaggcttcagatgagaaattggggtaaaatggaaatttttcacttatttgcaattatatatatcttgaattactacataaaacttgattctgtttctctacttattgtaaaaattgaaaatggacattctgttaagttaaatgtatagtttgaagctcatatatttttatgaagttttgaatcaccttgtatctgaaagtctctgctttaagaatgctttctgggtattaaaatgttctagtttaaaaaaaaaaaaaaaa

SEQ ID NO: 44536 - DNA, 592 bp, Homo Sapiens
gcaggtccctcggccgggttcttctttgagccactgttttacagacgtggaagaccacatgttcatagccaaggaggagtccttcgggcctgtcatgatcatctctcggtttgctgatggggacttggatgccgtgctgtctcgggccaatgccacggaatttggcctggcttctggtgtcttcaccagggacatcaacaaggccctgtatgtcagtgacaagctccaggcaggcactgtgtttgtcaacacgtacaacaagaccgacgtggccgctcccttcggaggattcaaacagtctggatttggcaaagatctaggagaggcggctctgaacgagtacctgcgggtcaagacagtgaccttcgaatactgaagaaaggtctttgtgagaagaaagtccctgcccctccctcgtggctggggccccctccctcttgagcctgggtgcacagcacctcccacctggggggctagtggaagccctcctgcctgcacaccatgtctgcatcttggacgccctctgtccagtcagaagcagcccttggctgggtgaagtgtgcccctcccagggagaataaagcttctgaag

SEQ ID NO: 44537 - DNA, 676 bp, Homo Sapiens
  misc_feature (566)..(567): n is a, c, g, or t
aatgatcatgaacttttcttggtttagcactaggatttagctatgaagagagctcataggctttcaggtgctaattgagatctgccctgttagagtcttggggtgctagattggtcacattgacaccagtggcagggaaggcatctatgagtttgatgctttttatcacacacttcagtgtttagaaagttattaccaatacttttaaacaacactccaagaaaatttgctatatttctttctcatcactacagagagagtagatttccccatagagagcacagcctccattagtaaggttggtgactattggtaagaggtggacttcattgacaccaagtgggaggtagggaaagcccagaaatggcaggatgatatggtggttctgtcgttgggaaaggtattgggttttgctgtttgtatttatactgtataatagataccacgctttttcttattatctgtatatgtattgcttttcatgtttgatattttcccatgccaagatttgtttatatatattttcaatgttaaattaaattgatttgcgtaactttcttccgcannatctcgagcaagcttatgcatgcggcccgaattcgagctcacttggccaattcgccctatagtgagtcggatacaattctgcccgtcgttttacaccgtcgtgactggg

SEQ ID NO: 44538 - DNA, 822 bp, Homo Sapiens
gaggaagggccgaggaatgtgaagccagatctcgggactcagattggaatgttacatctgtctttcatctcccagatcctggaaacagcagtgtatatttttggtggtggtgggtttggggtggggaagggaagggcgggcaaggagtggggagggagtctggggtgggagggaggcatctgcatgggtcttcttttactggactgtctgatcagggtggagggaaggtgagaggtttgcatccacttcaggagccctactgaagggaacagcctgagccgaacatgttatttaacctgagtatagtatttaacgaagcctagaagcacggctgtgggtggtgatttggtcagcatatcttaggtatataataactttgaagccataacttttaactggagtggtttgatttctttttttaattttattgggagggtttggattttaactttttttaatgttgttaaatattaagtttttgtaaaaggaaaaccatctctgtgattacctctcaatctatttgtttttaaagaaatccctaaaaaaaaaaaattatccaattgaacgcacatagctcaatcacactggaaatgtttgcccttgcacctgagcctgttcccactcagcagtgagagttcctctttgcctgaggcccagtctcctctattttgtcccacccccaatccttgagggttttgtctagggcctttctgcacgtcacctgggttccccccagctttatccaaaagtggtaaagtccgctgtccaggctgaaactcgtgcaacacgtgttcctccggcagaaactaacctaaatccgtg

SEQ ID NO: 44539 - DNA, 659 bp, Homo Sapiens
taggggctgcccaaagcccagcaggaacagctactactcatcctgcagaggccttggcccagaccagctttccatccaaagcctcacctggtttccatgtccatctcaacagtctggccttcctgtgactgtagcctggcagccacaccctcagtaatcccgcacagtgagtccagcttctctgggagcttggccttcagttagcccagtccatgagagggcagggtaatgaggaggagtaaaggacctatcttctctgtccacataaggaagttgggaccacaaggtcttttatctccttgttactccccaaccccaccataacctcctactcagcacacagctttatcctggtagattataaggtgagcttccagaacctggcaggaggctggtgtatccccctgcacagacggaagtgtatctgaatgttgtgtatgtggctgatatggaagacatacatgtatgcaatccatcagcgtttaaagaagaagatcggctccagttctgaggaggaggaggaagattacagatctattctgagtattttttagagagttaatatttatatttttagtaattttctggtagaaggaaatggcacaataaaatgattggtttggaaaaaaaaaaaaaaaagggggggcgcctaaagtttc

SEQ ID NO: 44540 - DNA, 603 bp, Homo Sapiens
tatgactccagtggcatatatttcattttttaatgacaagacactccaaacctttcagataacaaactatcattgcagaccttcacttttggaatgcaatctttatattttctgtgcatcacacacatgcttttctgcacgtggttgccttagtcatcttcctacagcaccatctagacatcaaaaattgtgctatatatcattggtaaaggaaatttgaagagatgacagtgcctaaaagtacagtttacatccttttggaaagtatgtgtaagtgcatgttttttgtgcaccttcttctatagcacttttttacaaatatcttatttttatttaacgacttgggttcatgtccctaatataagtatcttgacaattatgagctttatacctagcaagccacttcaggaaattcttttggagaatattttctgattattgttaaacttaatatacaattagctttattccttataaaatgtctaaaagaataatacgaagtatatataaaaggaattactgtaaactacattgccatagcaatttacataaaagtatattgttttttatctttaactcaaataaagcgtgtaataaataagt

SEQ ID NO: 44541 - DNA, 603 bp, Homo Sapiens
ctaagaaagttctagtcttgtttctccttctccccgcttccctggggtttttccttaccataagtattctggtccgagggttcagttcctttagtcaagatgtcacaagtttaaaaacaaaacttgagaaactaccaaaggctcaggagttgtccactttgttgaaatccattaaattagagaagtctcactaacagatgtatttaaatataggtacaacaaataatttctttttctccccttccccaaattacagtcagcatttaaagctgtttatggcttgccatcagcattattctggtaggcttgttagtgttaaaatctatttgattttttttttttttttggcctcttaaagtctaatttaggatggatgaattcagatgtttaccagagtgtgttttttacataatgttcttgattaaaaagactgtgttggtaaattatccgtggttttggcatatgcccagttgatgtgataaaattttcatggtctgtgccatataaagcctgggttatcaccaggtggaatgtagatcttgtaaagcttttcgtgaattaaaagtgcaaataaagcaaaaaaaaaaaaaaaaaaaaaaaggg

SEQ ID NO: 44542 - DNA, 923 bp, Homo Sapiens
gctgaggttggaggattgcttacgtccaggagttcaagaccagcctgggtaacatggggtggacaggcctgtggtcccagatactcaggaggctgaggtgaaaggattgcttgagccagggaggtcaaggctgcagtgagccgtgaaaggccactgcactccagcctgggtgacagaatgagaccttgtctcaaaaaaaaaaaaaaagtttcttggaacctatacggtttttttttgtttttttttttgaaaagccagaccttgtgcccttgttttgaacaccgactgggaagatggggcttaggtaacagccaaacctggctgtcagctgtgtgggagccaccaccctctctgggaagagttcctgcttctgtatggcaagcataaatcaagctcagtctgggttatggagaagttgaaaattgttttgttcctcattagtttataattgtatgaaatacgattttaatgaaaacttttcagaattcacgtttgtgtagatatttcagagaaccatttttactttacatcctaaaactgccttttcctatggttttgtcaataaaacactatgatgttggtctgtttaaaaaatccattcccaaaagaaacaaataactagctaacactgaaaaacaaggaggaaaacaaaagtcagacgagcgataaactaagagatttgctcccagactgatcttgggggggggggcccccccaaaaaatctaccctcggaggggccccaaatgtattcactgctccccctgttttttttgtgtaaaaagaggggggtctcccctctagggggcgcggctcgctttttctataattactgatggacacccggtcgccgccctctttctttttatttaacacccctctctcacgtagcgatggtggtgaaaaaaaaatactctcgttttcc

SEQ ID NO: 44543 - DNA, 546 bp, Homo Sapiens
tgtcattgaaagtattattgaaaaggatcatagtcacattgaatttgtgaaggccaaagaaattgaagggagtgatattttcattttatgatattcacatatttagtaaattttgtgtacaagaataccaggcagagtgttttacccatggaaacaggtttcagattactttatttttactgttagagtctcaagtttagaaatgctaacacttaaatcagtttttttctcactatacttgaagattgttaatattttgatatcttcctagcttgatgaatttaaacatatcttcagatctgtgacagtgacagccaataggactgataatattagcttcaaaccaataatatccagggttaaaataaaaatcatagtgaaagtacgattgtaaaattatgctatattaacttttaagtctgtaataacttgacatcaaaatgttatgtaattaccataaataatggctagcgagaacatctttggaaattctcaaattacctttcttactacactgtttgcagaatgaatgtagaaatgatcctg

SEQ ID NO: 44544 - DNA, 627 bp, Homo Sapiens
tttaaatatatcacttagatgggcatttcctataattaggatattccaaatagttgctgaaatcaattgtgccattgaccaatggatgcacttggttagccttaattttttttaaaaaaaaaaaaacaaaaactttcttgaatatttcagtttgttcattttaagtttgtgctgctggtatttgggaagaaaaatcaatcagttaagtgctaccagaaagtgtaccaatttttataaaaattaagaatgatataaatttcacaatctaaaattttaattttgtgcaatattttcatttaatgcatgtgtatttgagtttgtaagataaatgaatttttaattttttgagatgtagcttaaactgtcttcttaatccaacaacttacattccgttgttgctgcatccttttatttaaggacttgttttaaaagtctttttgtcactccttggaaaattcttttattagtagtaaattttgcttttaggagcatggctcctgtattacaagggaaaaaatatgaagagcacattttaggattataattgttaaaagataatgtgtgcatatcattgtacagtaagtgtcaactgtgtgcctaactgttctatcaatactttctttcttt

SEQ ID NO: 44545 - DNA, 583 bp, Homo Sapiens
aaagaaataaagggccaggcacagtggctcacacctgtaatcccagcactttgggaggctgaggcaggaggattgtttgaggccagaaatttgagaccagcctgggcaacatagcaaaaccctgtctctacaaaaaatactttccgtacattagtggttgcctaaggctagaattgggggtgatgaatggggagtacaggattcatctaatgggtacaggatttctttatggttcatgaaaatggtctaaacttattgtggtaatggtcacataacaatatattaaaaaccattgagttgtatattttaagtgggtgaattatatggtatgtgaattatatctcaataaagttgttagtaaataaatggggctgaagatgttatccttcattgtggtgtaaatgaactttcacaatattttcacctgtgaacccaaataaaatgattaaagttctgatggaaaaatcttgaatggagtataagttttccgttgttaaaaagcaaacaaaaaaccaacaaaaaatccaagtgtgccttgaattgtacagagcacaattattatgtttgaaatgtgtactactta

SEQ ID NO: 44546 - DNA, 946 bp, Homo Sapiens
  misc_feature (813)..(813): n is a, c, g, or t
  misc_feature (818)..(870): n is a, c, g, or t
cgttacaggaacagtgtttctgcagctgccctactccaagcgcaagttctcagggcagcagcggcggcggcggaactccaccagctccaccaaccagaacatgttctgcgaggagcgggtcggctacaactgggcctacaacaccatgctcaccaaaacatggcgctccagcgccacaggggatgaaaagtttgctgatcggctgctgaaggacttcacggacttctgcatcaaccgtgacaaccggctggtcacgttctggacaagttgcctggagaagatgcatgccagtgccccgtgaggccaggctgcacctgtgctgggggaaggtgggtgagccactgccctcaaacccggggcggaggattccaggcaggctctaggagtcaggtgtccgtttgctgctatcagtgagtgggggccattgttttttgtttgtttgtttgtttgtttgtttgtttttggcccccacgacaagtcttctactctagaagaaagactttggaagcagctgctgctgctgccaccactcctgtcagcaagtgctcagagcaggtgggaggcacagattgtccgtgggagggctccagtgtctgggaagagggcaggcggcccccatgaatgtcctcggaagggggtggctcctggtagcatccttttccttcaccatctatgggatattagggggcagaatctgccacttcttgcccaggagtgtgcacagatgtaagataattttgtgaaataatgtaccatagactctcaccaacggtatatacctgtacatatcagaagcaaataaagagctccacngtgcnnnnnnnnnnnnnnnnnnnnnnnnnnnnnnnnnnnnnnnnnnnnnnnnnnnnnaaactccgaggattctatgtccgggtggcgaaaaaagaaggtatggaatgggcacttgggccaataactggttccc

SEQ ID NO: 44547 - DNA, 647 bp, Homo Sapiens
ggctgtccatgccctaaggatgggttcctgtttatccttgccacgcagctgagcttactgcatgtttatatctcccaaggactgttctctgctcagaaatgccctgtcaagggtgtggcatcacgcagtttcatccaagttgtttcaggaattgctgacactgctgggtgcagttctatcccctaaagcctagggtgtggccctttaacttccccttcagtagaactgggaaaggcagtaccattcctagttatgagtgaagcatccactttcttttgtaacaatgaggaacagaaaggataagactgaagagtgatcttttgtccaactaaaccatttatctcctttgtaggtaacattcaaatcctgcccagttatagttttcacgtcactggagaattccaggtaggagccctactttaggtgatcctaggaactcctatgttcagaacaagaattttcttcctactatataattacagtatttagctgtcaattttaagatgaatttggtagagccttatagtaaagtatgtatcttggtcacacacaaagcttggaaaaagtaaaagatgtctaaaccataatcttgtaactcataacatctgggctggggccccggggatctaattgtttagagagcccca

SEQ ID NO: 44548 - DNA, 754 bp, Homo Sapiens
ctaattgcacaaaatctataattgccaggctttagagattgagtcaatatgtcatttaccatggttttcccactgaaggctttaacttttctgataaaataatattttaaattttcaaaaacccattcctgaggagaactacttctagcattccttttcatgatgtgctttgtgcagtaagtagcattttcggctacttaactttacattcctcttatttttcagtttccagtcaagattataaaaagcaaatgattgatataatttgatattcatagagttgtgcctacctttaatggaaaaatacatgtcagatacttagatgtttattgatatgagactatgtggttaaaaaacccaagtatgtccatgtgtttcttataaggtacacttgaaactagtgagtgtttgtcacatttcactttcatggtatataaaatgcagtttgcatatataacttgaatatctggtactagttttttcacgcctgcaatcttggagtctaggttgccttgtctctcctatttttaaataagtgaaacttcgggaggattgtacaaatctgtaaaagttgtttcgtgaacactcaaaatgttcacagtaggaaaacaccaacagcaaaaaagaaaccaaaccaaagggggaggcggacagaaatcaccaccgggggccacattaacggatcacacatttctgtataagggggccaaagacacgaaaaataacacacacggccccatcaaccgcgcgggga

SEQ ID NO: 44549 - DNA, 739 bp, Homo Sapiens
  misc_feature (705)..(705): n is a, c, g, or t
tgaaaacttactctcaactggagcaaatgaactttggtcccaaatatccatcttttcagtagcgttaatctatgctctgtttccaactgcatttcctttccaattgaattaaagtgtggcctcgcttttagtcatttaaaattgttttctaagtaattgctgcctctattatggcacttcaattttgcactgtcttttgagattcaagaaaaatttctattcttttttttgcatccaattgtgcctgaacttttaaaatatgtaaatgctgccatgttccaaacccatcgtcagtgtgtgtgtttagagctgtgcaccctagaaacaacatattgtcccatgagcaggtgcctgagacacagacccctttgcattcacagagaggtcattggttatagagacttgaattaataagtgacattatgccagtttctgttctctcacaggtgataaacaatgctttttgtgcactacatactcttcagtgtagagctcttgctttatgggaaaaggctcaaatgccaaattgtgtttgatggattaatatgcccttttgccgatgcatactattactgatgtgactcggttttgtcgcagctttgctttgtttaatgaaacacacttgtaaacctcttttgcactttgaaaaagaatccagcgggatgctcgagcacctgtaaacaattttctcaacctatttgatgntcaaataaagaattaaactaaaaaaaaaaaaaaa

SEQ ID NO: 44550 - DNA, 598 bp, Homo Sapiens
atgggaccggaggagaggagagcggggaagaggagagcagcttcaggccgtggtgtctcccacgtctgtgttcttatttgcagctcagggtttgcattcccaggtagaacaggtgtcgtacactgtgaaatgttccaggttatttgtttataatgtgtgtgtcatatacagatagctccaatgacatctgaagttgtgacttcatcatcttgtcatatttctgtatgatgagccccagggcccatcctgaggtctgctagccatgtgcttagtctcacctccccagcccacgctggcattaccacccagagacccttcagtgctgtgtgtttttcctttttagggttacttttgactcacagtgttaggcaagccagcttggaagttaacttttaaaaaaattcaattgaagctgtaaagtataatatatagattggaagtcaccagaaattgttttagtttgtgaattcccccagtgtatgttctgaaaagaaaatgggagagcttgtaaagcatctcctaaatgcgaagccgcgtgaccctggacttctggcacatctgaataaacatgttcttattctggaaaaaaaaaaaaaaa

SEQ ID NO: 44551 - DNA, 930 bp, Homo Sapiens
  misc_feature (19)..(19): n is a, c, g, or t
  misc_feature (32)..(32): n is a, c, g, or t
  misc_feature (45)..(45): n is a, c, g, or t
  misc_feature (821)..(821): n is a, c, g, or t
  misc_feature (893)..(893): n is a, c, g, or t
  misc_feature (896)..(897): n is a, c, g, or t
  misc_feature (912)..(912): n is a, c, g, or t
  misc_feature (922)..(922): n is a, c, g, or t
atggcccttggtcctgagnaccccaccacatnctcttcagaaggngttttaccccagccccctataacatcacccccaacaggatgcttgctcagtctgcactctccccatacctttcctctcctgtgtcttcgtatcagagagtgactcagacatctcctctacaagtacctaacccatcctggatgcaccaccattcatacctcatgcagccttcaggttcagttctgacaccagggatggaccatcccatttctctccagcctgcctccatgatgggaccccttacccagcaactgggccatctctccctcagcagcacaggcacgtatatgccgacggctgcagctatgcaaggagcttacatctcccagtacacccctgtgccttcttccagtgtttcagtcgaggagagcagcggccaacagaaccaagtggcagtggacgcaccctcagagcatggggtctattctttccagttcaacaagtaacagtgggattcccctccccatctttactgaatagaaatgaattcttggagatactcatgctcccagattccagagggttaaccaggaatggagaccatccgtcggccctgctaaggactaacacttagccatcgtttttcacaggcctgggcctggaaaaagaaatctctacgttcctgccctttactattgctgatggagcctgggggaaccatcactttttttgtgtgctacattcaaggagatcaaaaaaacttttcttcttttgcaaagaagctttttgtttttaaactgcacgtacttttcccctaccttgaagagacatggtgntcgcagcttctcatctatatgaaaaagttttcgatgtattggaattatttggggatgctttttaaaccattngtnnattatttctttacanaccaaaacgnaaaaaaaa

SEQ ID NO: 44552 - DNA, 619 bp, Homo Sapiens
gccatttccttcactgttagaaatgtgtttggccctataagggagagccccaacaagaacttcctagtaattgtcacagatgggcagtcctatgatgatgtccaaggccctgcagctgctgcacatgatgcaggaatcactatcttctctgttggtgtggcttgggcacctctggatgacctgaaagatatggcttctaaaccgaaggagtctcatgctttcttcacaagagagttcacaggattagaaccaattgtttctgatgtcatcagaggcatttgtagagatttcttagaatcccagcaataatggtaacattttgacaactgaaagaaaaagtacaaggggatccagtgtgtaaattgtattctcataatactgaaatgctttagcatactagaatcagatacaaaactattaagtatgtcaacagccatttaggcaaataagcactcctttaaagccgctgccttctggttacaatttacagtgtactttgttaaaaacactgctgaggcttcataatcatggctcttagaaactcaggaaagaggagataatgtggattaaaaccttaagagttctaaccatgcctactaaatgtacagatatgcaaatt

SEQ ID NO: 44553 - DNA, 628 bp, Homo Sapiens
gaagaaacagcactggttgtttatgttactaactttcaccacccgttttcagtaggtaaagtaagactgatcattgaacagaaaaggttatttctgtgatgaggttgagggggtagtggaaagcatgtattgctagtaagccccaggtacagctatgtgagagagagtcacctggacagggaagtcccccaaatggtggccagaagagcagaaaacggggtgggaaaaattctacctcacagttttgcataggggatagctatgcttttacgggacattttagcgtttaaaaatattttcaatattgtctctttattcaataccacccagctgtagttttttcacactctgatgactctcttatccactcttttacctctcccagctgttctattacatacagcattcacctgtattagtctatagaattataatcatctgtgtgtttctaatgctcattttcaaaaatatgtatggtttattcgatttttcctattaaaattttaagggctgggaaatttggcttctactgtaaatccttataatgttccacacattgtaaatatgcaataacaaatgttaacaactataatggcaaacacaaacaagaaccaacacaaacaaaggg

SEQ ID NO: 44554 - DNA, 712 bp, Homo Sapiens
gggttggccttcctgcagaagcacctcgacctgaaagaagactataatcaatggaacaaccttattgaaggcattggaccgtcgctcaccccaggggccccccaccatctgtccagcctgtaggcacaactggccatttgtaaagtcacttcagccaagttttcatttgggagctacccaagggcacccatgagctcctatcaagaagtgatcaacgtgaccccttttcacagattgaaaggtgtaatcacactgctgcttggataactgggtactttgatcttagatttgatcttaaaatcactttgggactgggatcccttgctgattgacaaacagactttctgggaccttgatggagtggggaacaagcagtagagtgggactgggggagacccaggccccgggctgagcactgtgaggcctggatgtgaagactcagcccagcgaagctcattcccttacccccggccagtgctgctgcttcagtggaagagatgaagccaaaggacagaatgaaaatccctaccttcagagactctagcccagcccaacaccatctcttcctacctctcagccttctccctccccagggccacttgttgaagtctgagcactttatgtaaatttctaggtgtgagcccgtgatcacattttctatttatttccaagtcttctcattgtatggaacatagtactacttatacttaca

SEQ ID NO: 44555 - DNA, 686 bp, Homo Sapiens
ttcccgggattgagcacctgcggccggcacatgtccgctcaccgcgtgtccggggccctggcgcgggtcctggaaggtaccctagcgggccacaccctgacagccgagctgatggcgcaccccggctaccccagtgtgcctcccaccggcggctgcggtgaaggccccgacgctttctcttgctcttgggagcggctgcatgagctgcgcgtcctcaccgcgcccacgctgcgggcccagcttgcccaggatggcgtgcagctttgcgccctcgacgacctggactccaagaggccaggggaggaggtcccctgtgagcccactctggaacccttcctggaaccctccctactctgaccccctacagacaaccaagcactaatccccttagtaccaagaaaggggagccaggatttagtcctggcccagcccagagctgggacctggagcacgatctgttgacttccctgggtaggacactgccacctctgggctcaggtcctcatgcctccaaatggcatctagagtttgagcagccttcttggctgcaggcaggcctagcctgtggcagcgggctagggcccgcagagcatttggtgcccctccatgttgcaatgcaaacaccttcaccactggggcagtggggagagatggctatattaataaaataacgtgtgtytttcaaa

SEQ ID NO: 44556 - DNA, 704 bp, Homo Sapiens
  misc_feature (682)..(704): n is a, c, g, or t
tagggaagcgaagtgtaatttctaggtgtgagccgtgatccattttctatttatttccaagtcttctcattgtatggaacatagtactacttatacttacagtagtaagttatacttgtgagcccacagagtggcagacagcatggctctcacagcacagggagaaaaactgaggtacacagaggtacctcagaagctctggatgtctttgggggttttgctaagtgtatcttgataggaaacaacaaaagcaggttgagatggggaagatgacagaacaacagtgttaaatggccatttgcacaggcctttgccacaacagagaagtagtttggtcagctaaaactcagctgcagcctggacagtagagcgagaccccatcttaaaaataaagaaggctgggcgtggtggctcatgcctgtaatcccagcactttgggaggccaaggcaggcagatcacttaaggccaggagttcaagaccacctggccaacatggtgaaaccccgtctctactaaaaatacaaaaaattagcctggcgtaatggcaggcgcctataatcccagctactcaggaggctgaagcagaagaatcacttgaacctaggaggcggaggttgcagtgagtcaagatcgcgccactgcactccagcctgggtgacagagcaagactctgtcttaaannnnnnnnnnnnnnnnnnnnnnn

SEQ ID NO: 44557 - DNA, 704 bp, Homo Sapiens
  misc_feature (675)..(681): n is a, c, g, or t
  misc_feature (683)..(688): n is a, c, g, or t
  misc_feature (690)..(690): n is a, c, g, or t
  misc_feature (692)..(692): n is a, c, g, or t
  misc_feature (696)..(696): n is a, c, g, or t
ttttgcaatgatgtgccttagcataaatattctttgctatcacctactcagttaaaaaaaaaaaagaaaaaaaagtgtttcgccatgttggccaggatggtctccatctcctgacctcgtgatccgcccgccttgtcctccaaagtgctgggattacaggcatgagccactgggcgcggccagataagtttttaaggttccttcttgctttagcattctgagaaatgtctaattggtagtaagacaagagtaatagcaacctgtattgttagtatttaaccaaataggctaaaattttaatcaggtaccttatgtattaaatagaaatcggaatgtaccataataaatccaaactctcaattacgccatggtaattcagtcactaaaatatgtaaagatagaaaattttttaatttaaagaagtgtgaaacatagccattgattgatcagaattctggaatctgaatattaaaaccttacttagtgactggaatggtatatgctccctccaaaagtttatctttgtttattgattaaaggtaatccttactttctttgtattacttaggttcttaattaaaggtaatccttactttctttgtattacttaggttcttaaatttctatgataaacatgtattgctaaataataaaaagtatataaaaattgctttnnnnnnnannnnnnananaaanaaaaaaag

SEQ ID NO: 44558 - DNA, 634 bp, Homo Sapiens
ggctcaggatgggaaaggaagaaggggataggaaaagaagaggtaattttacatttcccctttaaagtaaattttagccaactcatcattctgaaatgtccctataaagaatgagtcgaactagaccagaagccagcctactccttcttacatagcttctccaacaggggtagcaatgacctgtccacttcaaacacagataaggcctgccatcctcattggttaaaggcacacgtgagactttcagtgggctctgctgagaaggaaggcagcccaggagtcaggtatgcaggcattgcattgtcagtgtctgctctcagagtttacacattcaattgcttccaagggtgaatctcctgctctgtgaatgctatcagaccccaaaggccaaccttgggctgggtctatgtacgttcttccgaagcactgatgatcaaaattgaagacacattcagaggtttgattgggttgagattaactggtgtggtggttggtgtatgtatgttttatttttatgtcttagtatgtagttctacataatgcaaatggtgctttctgatggacaagacctcataactgtgattaatatcaatacaaaggggatgtcgtggaaaaaacacacaaacaacaaaac

SEQ ID NO: 44559 - DNA, 897 bp, Homo Sapiens
  misc_feature (831)..(831): n is a, c, g, or t
cgtggcgtgatctcggctcactgcaacctccgcctcccgggttcaagtgattctcgtgcctcagcttccccagtagctaggattaaaggtgcgtgccaccatgcccggctaatttttgtatttttggtagagacagggtttcaccatgttggccaggctggtctcaaactcctgacctcaagtgatccacccgcctcggcctctcaaagtgctgggattataggcgtgagccaccacaccccgccgcggctgacttaaccttagatttcagattccctttcaatcatgcccgtttgcttgggtttgaccactccccactcctggatctggactgtttcttcctgttgctgtcagccttggttctagtttatagtcttgtctcctccgtttctgcttatggtgtggacaaatgaccttttttaagcagctggtaataattttacattgactggagcctgtgcatttgctcagagatgctacaatttttagatatttctaagacttctggattcttgaggtagttaaggattaaaaccagaaacagtcgaggttttttaaaagcagggtaagccatgaagtgaatacagggtgactgagtgatcatcagatgagattaattcttttgggttttcttggttttaaggcatctcgaatgccccttgaaaatgtagttttccctggtggtgggcacctgtgggtccacctgctcgggaggctgaagcaggataattgcttgggccctgggaagtggggggttgcggggaagccgagaatgtggccatggggctcccaccttgggtggacaaattgaaagcaccatctccaaaatanccaacacaggaaatgggggttatcccccagggacccatagcccccaattaacttcccccccggggg

SEQ ID NO: 44560 - DNA, 884 bp, Homo Sapiens
cttattaaaatgaaaatcctgcattatgtacttgaggaacattccagctaatgaggatgtaatgtcctcagtacaacgcagaccttctttttgtgttcaccaccacaagatgctggaagcttgacaaatgatatcatttaagacacatgcctgccttagggacctggtttttggcttcctgtttctggcttttatttgggtaacgtttataatggccacccgacttgtacctgggtaatgttttaaccccttccccagagttctcaattagcatgaatttactacagtcagagtttcctttaaattggggtgggggtgctaagcactgaaaatatctttcttgattactttaccatgtggacatatgggataaatactgtatttcagatttacataaaagtagattagtaatgcacagctttcagaataaaaacaatgataaaaaagaccaagcactatcaactttggacagtaatttcctaggtgttaaacaagttttctgaatgcaatctggatgcaaaacggcctgatttgatgaattcataattttcttctgtatactttcattttattacatattttattacttggttaacacaagaattatctatgtaaacttcatggcgcttttctcgttgacagttagatgttcagtaactaatttcccagttatggcccagaatttaacatttatgatccatatttccagaaagtcaacaaataccaaaactgcgattatcaaaaccggttggtgtgggtccactttaaacttggactatcaagtatggttgcccgtggtcactttaagcttggatatcagtaccggtgggtggcacttggtttcatcatcaataacagtgggtgtgcccttaacctggttacca

SEQ ID NO: 44561 - DNA, 697 bp, Homo Sapiens
agattttttttttttttttctcattgtagatgtcatctctcacatttatatcagtgaggtttgaaattctgtgtagcagttactcagcacatatgagagggcagcgaatgaatgagatttgtcatgtgctaataaaagctgaatttttgtaatctaaaatgatgtattttctactattgctgttaatttgcattgttaaaaattcttaaagtttaatatgttatgttcagtcattgaaagcgaccactcatttttttcttaaagttgatgccttttctgctgtgctagagtcagtattttgcttctggcaggagagctgcaaactgtgtatcctcaaacagatgcaaaaagtagtgctttgcaaaacgtttgttttctgtttatctcagattaacatcctttaatacaagtttcttaagtgtaacttgtatttctgaaaatgcttaaaattattttatatttccctttgggaatttttctctatttccagcacgctgatttgatttaaaaatgtaataagaccaagagttggagtaaagggatattcattccatgttaaaagtggcttcatagctactgacaaatgtctgaactattgtcgtgcccttcacaactggagttttctaaaataatcttacttttatacctgtatgttccagcaatttacgatatatacattgaaagggaaataaacatt

SEQ ID NO: 44562 - DNA, 589 bp, Homo Sapiens
  misc_feature (455)..(455): n is a, c, g, or t
  misc_feature (500)..(500): n is a, c, g, or t
  misc_feature (573)..(573): n is a, c, g, or t
agctgatggggcaaactcaagcttcttcactcacagcaccctatatacacttggagtttgcattcttattcatcagggaggaaagtttctttgaaaatagttattcagttataagtaatacaggattattttgattatatacttgttgtttaatgtttaaaatttcttagaaaacaatggaatgagaatttaagcctcaaatttgaacatgtggcttgaattaagaagaaaattatggcatatattaaaagcaggcttctatgaaagactcaaaaagctgcctgggaggcagactggaacttgagcctgtcaagaggcaaaggaatccatgtagtagatatcctctgcttaaaaactcactacggaggagaattaagtcctacttttaaagaatttctttataaaatttactgtcctaagattaatagcattcgaagatccccagacttcatagnatactcagggaaagcatttaaaggggtgatgtacacatgtatccnttcacacatttgccttgacaaacttcctttcactcacatcctttttcactggactttttttgtgggggggccnggcccgggggggactc

SEQ ID NO: 44563 - DNA, 735 bp, Homo Sapiens
tccggaattcccgggatagcaaaagcaacaaattgagccaggcgaggatgataaatataacattggaataatagaagagaattggcaactgagccagttttggtatagtcaggaaactgctctgcagctggcacaggaggcaattgcagctgtaggagaaggtggcagaatcgcatgtgtgagtgcccctagtgtttaccagaaactcagagagctgtgcagagaaaacttttcgatatacatctttgaatatgacaaaagatttgccatgtatggagaggagtttattttctatgattacaataatccattggacttacccgaaagaattgctgcacatagttttgacatcgtaatagcagatcctccctatctttcggaggaatgtctcagaaaaacatcggaaaccgtcaagtacctgacgcggggcaagattctgctgtgcacaggtgccatcatggaagaacaggcagcagaactccttggagtgaagatgtgcacgtttgttccaagacacacccggaacttggcaaatgagtttcgctgttatgtgaattatgattctgggctggactgtgggatctgattacagacggtgacataacacaggaaggaaccctgtcacattcctctttttgtattttcgtagtagatttaaaagttataatctcttcccctccccccaaactggagctgtccctggcctggttttcaaaataaagtgtgcgatcttca

SEQ ID NO: 44564 - DNA, 717 bp, Homo Sapiens
  misc_feature (25)..(25): n is a, c, g, or t
  misc_feature (27)..(27): n is a, c, g, or t
tggggatggctgctgcctcaccagnanagacctggaaggatcttgagaacgcccagttctccgaaatccaaatggaacgacagccccctcccttgaagtggctacctgttgggccccacatcatgggaaaggctgtcaaataatctttcccaagctccaaggcactcatttgctctttccccagcctccaattagaacaagccacccaccagcctatctatcttccactgagagggacctagcagaatgagagaagacattcatgtaccacctcctagtccctctctccccaacctctgccagggcaatctctaacttcaatcccgccttcgacagtgaaaaagctctacttctacgctgacccagggaggaaacactaggaccctgttgtatcctcaactgcaagtttctggactagtctcccaacgtttgcctcccaatgttgtccctttccttcgttcccatggtaaagctcctctcgctttcctcctgaggctacacccatgcgtctctaggaactggtcacaaaagtcatggtgcctgcatccctgccaagcccccctgaccctctctccccactaccaccttcttcctgagctgggggcaccagggagaatcagagatgctggggatgccagagcaagactcaaagaggcagaggttttgttctcaaatattttttaataaatagacgaaaccacgaaaaaaaaaaaaaaa

SEQ ID NO: 44565 - DNA, 598 bp, Homo Sapiens
aacagacagcatcaactgggcaagtggtgaggatgaccatgtagttgccagagcagaatatgattttgctgccgtatctgaagaagaaatttctttccgggctggtgatatgctgaacttagctctcaaagaacaacaacccaaagtgcgtggttggcttctggctagccttgatggccaaacaacaggacttatacctgcgaattatgtcaaaattcttggcaaaagaaaaggtaggaaaacggtggaatcaagtaaagtttccaagcagcaacaatcttttaccaacccaacactaactaaaggagccacggttgctgattctttggatgaacaggaagctgcctttgaatctgtttttgttgaaactaataaggttccagttgcacctgattccattgggaaagatggagaaaagcaagatctttgatatctttcatgtttgcctgcagttgaacaatactttagagtactttttaaaattatttctcacaaagaaatgaatgtacaatccaatgaaaacatttgttattggctatttcaggtgttttgctgctagaaattattaaagctacacactagtaaaaaaaaaaaaaaa

SEQ ID NO: 44566 - DNA, 584 bp, Homo Sapiens
gttgttcaacatttaccagcacactactgggcctggtcacttcttgattcaaacctgtttcctcgtctttaaaatcagaataataatgcttgccttacctgtccagtacttcacagggtggttgtgaggatcaaaatctaactgagataactaacaggtgtgacagtgctgtgaaacctgtacacatgaaaaacacatcattacaagtgatggtaacccagggaaattagaagacgcatcaagtggagacagtaaacagggaacactgctcagtttggggtgggtggggatgtctggttgtctgtgaactggggtcattggcattcagacaattcagatgtgttccatgaagcattagttctctgggatgcttgtaagtcataagaggaaaaaaatggttagatgggtttgggaaatactgagttaaacagttaatataggaagtctcaaagctttatgtcactgtagatcactgaaaaggccatctgtaatttgctgtattcctcaagtgtatttgaccagtatatcttttgagttgcatcttgaaggaccaggagtcttggattaaatcaagcaatatatgc

SEQ ID NO: 44567 - DNA, 870 bp, Homo Sapiens
tcagtcatttacacagtcttgaagaagatctaaaagatgaagatgagtcattgagaagcaccaacaaagtaaacagaacgaaagtttcagtcccggatgcaaatggaccctcagtgggggagataccccagagtgaactcatcttgtatttatcagcttgcaaattcttggacacagcgctttcttttccacctgacaagatgccattatttcaaatttataggtgggcatttattccagaagtggacacagagggccctgccttcctgtcggatgtagaggagaatcaccaagaatgcaaaccccacactgtcaggattctagaacttctaaaattaaagtttggggaaatcagtagctctgatgagatcaccatgaagagtgaattcccgcttctgcgccaacattctgtttccagcatcaggcagttgatgccattcttcatgactctaaatggtgcatttaagacccagagacagctgcctgctgatagcccaggaactccattcttggactttcctgtcacagatagcccaaggatcttaaaacaactggaagaatgcatcgaatatgattttctggaacatccagaatgttaaccatgtgagagagaatatgtttaatccatgtattggtactttactgaaaaccaggttatattctaaagaagaaagaaggcaggatagtgcttttgaacaagcctatttccattttgaaagtagatttcaggctaggtgcggtggctcacacctgtaatctcagcactttgggaggccaaggcaggcagatcactttgagtcaggagttcgagaccagcctgaccaacatggtgagaccctgtctctactaaaaaacaaaattagctgggtg

SEQ ID NO: 44568 - DNA, 648 bp, Homo Sapiens
acatttccatttacttactaacgaacagacctgatttttatttaaaaacacaatttagctttgccaacagaagagtaaaggaaaccataacttataaatttgtaatgtgttcctccttgttggagacattagccagtgtttagttttagaccaacttatacaaacagagtattgatttgtacacattctggagacttgctatatcatggtttgctatggcacagactcagcttagcatggggacattttgaacttcattcaaagttgagtagttactggaacctttgacattgccttgtaatgaggtacttccaaaaaaagacccctaacaatggcataatagtgaggtctctctgtgcatatacataatatatatgcaggataaatgtgtgcaccactcaaatctaaaattttatgtgactgtcaaatgaatattatttgggttaagatttttcatttctgatttggatagaaaattgctattaatcttgtattaaaatagtttttaaaaatctaaaaaaaaaaaaaaaaaaaaaaaaaaaaaaaaaaaattaaaaaaaaaaaaaaaaaaaaaactcgagggggggcccggacccaattgggcctatagtgagtcgttttaaaaattattgggccgtggttttaaaa

SEQ ID NO: 44569 - DNA, 688 bp, Homo Sapiens
  misc_feature (676)..(676): n is a, c, g, or t
ccaagctctaatacgactcactatagggaaagctggtacgcctgcaggtaccggtccggaattcccgggtcgacccacgcgtccggctgcctatgcctatgataaggtagcagtctgcattcttatggccattagatgttacaaactccttgcctctaaagtcagatcatgaagggataggtgttcatctaaggttacagttatgttaccgaaacacaaaactgccaaaatcttactctgctgttatgaatgtttaccatcagcattattttatcatttaatatgtgctcactgattgttaactgtagcttcagcgcgtgccaagcagttgacttaataggatcatcttgtgaatttgtttacgtgatgccaagcatcaagtcatgttttctttagtgtgtgtgcttacacaggtgttaaacagtttttctctattttaaactgagccttctttttaatatattcccgaagagatatgtaaataagctctcagagtttctgtgatgatttgttgagccttgctggacaagtggtttgtttgtgtgcaaaccaaactttctttacccagtgcaatagatttgtttgactgcttgtgtctttttatgacctgtttgccttttagaaaattggtaaataaagcaagtatatttttataaaaaaaaaaaaaaagggcggncgctctaaagga

SEQ ID NO: 44570 - DNA, 480 bp, Homo Sapiens
ggtggaattccttcttttaaaaggaaagtccctgagagccagtattggttgaggctcttcagtatgcccaggttggcagcactgagaaccgcaggaacggcctgttgttacaaaaaggagattgactcagctgcccttggtgcatctgactgactatgactgctgagagattccaaggacccttaatgccagggctaacctctccatgtgcagtgagacctctggaggaagtgtcatcctctggctttgtgtggtactcattatggtgcagtgcgggcatgaaatgaagacacccaaataggcttacagatacgatatgttttaaatgttcgtatttaacaaaaacatactgacactgtttggaaatggcaacaggaagatagcaaaatgaatactaacattacgaaaagatgaacaggtacatgttccaaggcaggtggctgtgaacttcctctgagtgaaggcatcccctccagcacc

SEQ ID NO: 44571 - DNA, 562 bp, Homo Sapiens
cccaactcggctggtggatacccttcgccatgttatcagccagacaggaggatacagtgatggactcgcagccagtcagatgtacagtccgcagggcatcagtgctaatggaggttggcaggatgctactaccccttcatcagtgacctcccctacagaaggccctggcagtgttcactctgatacctccaactgatctcccagcaatcgcatcccggctgaccctgtgccccagttggggcaggggcaggagggagggtttctctcccaacgctgaagcggtcagactggaggtcgaagcaatcagcaaacacaataagagtctccttctcttctcttctttgggatgctatttcagccaatctggacacttctttatactctcttcccttttttttctgggtagaagccacccttccctgcctccagctgtcagcctggttttcgtcatcttccctgcccctgtgcctctgtcctagactcccggggtccccgccctctctcatatcactgaaggatattttcaacaattagaggaatttaaagaggaaaaaaattacca

SEQ ID NO: 44572 - DNA, 637 bp, Homo Sapiens
  misc_feature (561)..(561): n is a, c, g, or t
  misc_feature (580)..(580): n is a, c, g, or t
tttttttttttacttctaaaaaagttacagtttactaataaagttaagtctggttctgtcctagaggaaataaattcactattaattcatgtcttaagttacttgggttaaaacactttcagccacccagattaattaaagtggagcagtggagcccctggctgggagatggcctccagaggagcagctgcagggcacgttctgggcttagcgacagaggcaagcaagggactggtgtctctggtgagaggtgggtttgatgtatctctgtcctatgctggtctctcttctcctttataaaatcctctgtggtcaactgactactgcgtatcgcagtggaataagactgcacagttgctggtaggtgagtttaaagtcttaatctatgcattcagagaaatatttttatatgctttgtgtaatttataacaaggattttttttttagctttgttaactgtgaattcacccctcctcctccactgcatatttaaagcatgtgttcacactgtgtgtaaacattcactgaagattttttctttgtgcattgctgactgttcanacataacaagtattattanaattaaatattaactgaccgaaaaaaaaaaacaaaaaaaaacctcgtgccgaattct

SEQ ID NO: 44573 - DNA, 639 bp, Homo Sapiens
tgagtacctgtttgtctccggccaaacctttgggcttaaatatctttttcctagacaggtttttgctagtgttgaattttcttcttcctctggcctccttctgtgcccctttccccaagcccaagactgcttaacttccaaagcaaattctagatagacactgtatttattggtatgggagtgggctctatggggtggtctgcacccatctgggactcttttccctaaatcctgcaccaaatgagtcaggaggcagggtgcacagcattagtttcaatgtggttatgcatcataagcttaacatcagaatgaaaatgaaactcgattttgatgtttctttaaaacccttcccctgtccaatccactcgccgcccccaccttgaatagctaaagtctcttatgaaacagagaagagttgttgacgtctaactccttccattaaattaataagtactgacctcctaatatttaagtgtttactatctattgctgtaaagttttgtatattttgtaaacttttttccccaaatagtagatgtctaaaatcattgtacatctgattcttttatattccattgttcagcacaaagtgtggtttttatttagaataaaaaaagaaatttgaaaaaaaaaaaaaaa

SEQ ID NO: 44574 - DNA, 679 bp, Homo Sapiens
gtacatacggggaaactgaagccaggagaagaagagggagaaactgtccagggcctcacagggaggcattcatggagctggagaaaccagggatcctgaccgcagggcccatcaattgctacatagagatacacatggaaagagggtttaacagaccctctctaggacacaactgtttctgctttgagcaataatttctaacctgaggccaacatgtcccactgccccttgggttggctggggttgtttcctgagccaagcatccaatatcatgccccactcaatggcctagaagctgcctgtactttggggaaacagatggagctcttgggcccagccagctgggcctgggacttctgcctctgccgcctccagagtggcctggcagctttgccagaggctgtggagcgagggtagtaggagcttttcccagagtgctgtgacttgcatgatggattctaggctgtggcaagggctgatttctgggatagggggagggttggaaaatttatttttatgaaacagagggaagactttattgttgttatttttggtaaaataaaaggcaaactaaagcaaaaaaaaaagaaaaaaaaaaatggccttatcgcggccgctcgctaccttaggaccgttatagttaggtccctttagtgagggttatttatattgaaaaagg

SEQ ID NO: 44575 - DNA, 618 bp, Homo Sapiens
caacacatctatatatatatggacacacagtcacgcaagctagttcccatgactcctggatctatgtgtatgcagaaggctacatatacatagttgcttctttcctttccattgtagctctttgcctctcaattgtcattgatacatgcattgctcttattctgtctggcattacaattgcagttttgcctaatggcaaaaccagccatcccattgccaaaagagtcaacagtatctgtgtttgtactgtgcagttttcaggatgagatgacagatagcacgactacactgaggcaccctcagagaaggcagggcctgatttatctagctgtccagccgctgtggctggaggtaggctagttgggatgggcagctaagcagtcttctcttctgcctttatgagattgggtagaaagatggggcatattcatctacccccaaaagaacactataaaaacagctcctctatatttccacctctttctatttatgcaactcatcttcacagattgttctaaagtaaaatagatggtgtatgctgtatccacaaatcatctgtaacaattatgttttcagtgctgtgtcattccaaataaacctttggtaatcttcaacgat

SEQ ID NO: 44576 - DNA, 789 bp, Homo Sapiens
gtcatccttgccagttgtataactgaaaaaggacttttctaccaggtatgaccttttaagtgaaaatctgaatgttctaaatggaaagaaaaaaagttgcaatctgtgcccttcattggggacattcctctaggactggttggggacgggtgggaatgacccctaggcaaggggatgagaccgcaggaggaaatggcggggaggaggcattcttgaactgctgaggatggggggtgtcccctcagcggaggccaagggaggggagcagcctagttggtcttggagagatggggaaggctttcagctgatttgcagaagttgcccatgtgggccccagccatcagggctggccgtggacgtggcccctgcccactcacctgcccgcctgcccgcccgcccgcatagcacttgcagacctgcctgaacgcacatgacatagcacttgccgatctgcgtgtgtccagaagtggcccttggccgagcgccgaactcgctcgccctctagatgtccaagtgccacgtgaactatgcaatttaaagggttgacccacactagacgaaactggactcgtacgactctttttatattttttatacttgaaatgaaatcctttgcttcttttttaagcgaatgattgttttaatgtttgcactgatttagttgcatgattagtcagaaacgtgcatttgaaaaaagttatttttatagcagcaaaaaaaaaaaaaaagggggggcggttaagatttcctagagggcaggttaaggttcccaggtttttgtaaagggcc

SEQ ID NO: 44577 - DNA, 893 bp, Homo Sapiens
  misc_feature (688)..(688): n is a, c, g, or t
aaacaataaaagtgtccattgaaaccgtgatttttttttttttcctgtcatactttgttaggaagggtgagaatagaatcttgaggaacggatcagatgtctatattgctgaatgcaagaagtggggcagcagcagtggagagatgggacaattagataaatgtccattctttatcaagggcctactttatggcagacattgtgctagtgcttttattctaacttttatttttatcagttacacatgatcataatttaaaaagtcaaggcttataacaaaaaagccccagcccattcctcccattcaagattcccactccccagaggtgaccactttcaactcttgagtttttcaggtatatacctccatgtttctaagtaatatgcttatattgttcacttcttttttttttattttttaaagaaatctatttcataccatggaggaaggctctgttccacatatatttccacttcttcattctctcggtatagttttgtcacaattatagattagatcaaaagtctacataactaatactcacagctgagctatgtagtatgctatgattaaatttacttatgtaacttttattgtctttggcattaacagtgtttcaaaaaattttctgtgtatacccatcagtgattcattcccaaatctctctagaagatttgggaatgaatnaatgatggagtccttagtgctcctttatccaatttgtacttgatgccctctaggcagggtgtacagctagctgttgctctggtatttcctataaccttcttggggatttcttttacctcctgtgttagactcctgttttctggattccccttttcctctttcttggtctactttttgtagaacacaagactctactagcttcctg

SEQ ID NO: 44578 - DNA, 511 bp, Homo Sapiens
  misc_feature (343)..(343): n is a, c, g, or t
cgggggccccagagcttccccaagaaggcccacacgacgcctctccctaccgggccagctgggggcctcacctcccagcccctgcacagacacggctcggacccgggcagttagtggggctgcccagtgtggacacgtggctcacccagtgatcaatgcgctgctgggccgctccccttggaggccctgctcaggaggccctgaccgtggaaggggagaggaactcgaaagcacagctcctcccccagcccttgggaccatcttctcctgcagtcccctgggccccagtgagaggggcaggggcagggccggcagtaggtggggcctgtggtccccccactgncctgagggcattagctggtctaactgcccggaggcacccggccctgggccttaggcacctcaaggacttttctgctatttactgctcttattgttaaggataataattaaggatcatatgaataattaatgaagatgctgatgactatgaataataaataattatcct

SEQ ID NO: 44579 - DNA, 680 bp, Homo Sapiens
ttttttttttttttcataatgtttgcttcagtcctgcaaataaacccaagatcctggctaatgaaaaagtcattactgtgcttgctgcctgtctggaaagtgagaatcaaaatgctcagaggattggagcagctgccctttgggctctgatttacaattatcagaaggcaaaaacagctttgaaaagcccatcagtaaaaagaagagtggatgaagcatactccttagcaaagaaaactttcccaaactcagaagcaaaccctctaaatgcctattatttgaaatgtcttgaaaacctcgtgcagctccttaattcttcctgagtgccatgggatgctacaccttgaagctgacagtcatcaacaggggagctaaagttgaagccagctgtgtgtagcagctgttacctgaagacgtgctacctctctacaaagtgttgatccccttctttcccatgagagagagaactggtgatactccaacaccgtccagttgtggcagctctccagaagtaatagcagctgacaactttctgtgccttttcctttctgttgaaaaggcatagaaagttctgggaacataaacatttttacccttttctatgccatttattttgtaaaaatcctatttaacagttatttaataaaacaatatttttagaaactcctcgtgccgaattc

SEQ ID NO: 44580 - DNA, 853 bp, Homo Sapiens
  misc_feature (825)..(825): n is a, c, g, or t
ggggattacagacacgagccacctcacctagcctgatgagatttttaaaaaatattttctctgtacttttcattctcttttaatgaggaccaatgtacagttgaaataactggaacaaattatttttggtgtgtgtgacaattctgtttttaatgctatttgaacaagtgggccattagccagatttgtctttttgttgtaaaacaaaatttgactaattttacatgtttataaatcttatgctctcactgtttgtttttatttaaattacaattttatctgtttcctgacattgtctcctatatatttctattattaattgcaaaaacatagaaatggaaattttgctatcaacaataaaatttttttaatgtctcccatttcccgttcctattcaccttacctccagccttcctccctcccgtttacaatttccccccatacctcaccccccgaatgcttatagaccccacgcccttcgtttatttcgccctcccttgcctccgtccccatatttcataacccatcctccttttttttcccgtcctttctctcccccctctttccccacgttttacatcctttccatcatctttttcttcggggccccggtctgttcccgctttatttggcgaccttcgaccgtggcctcccctgtgtttttttcccaagaaaattatccagccctaccctaccattgcgtgttgttgtttccccccccccccctaaaaaaataccccctcccttgcgtacccatacagccgtgtttctccccacatcacactgttgcgctgcctgttttcccaggtaattttttccgtccgnttgtccctcccataccgtgctgtgtgcc

SEQ ID NO: 44581 - DNA, 911 bp, Homo Sapiens
  misc_feature (778)..(778): n is a, c, g, or t
  misc_feature (804)..(804): n is a, c, g, or t
  misc_feature (818)..(818): n is a, c, g, or t
ggtaacaccaagctcagtggtcaaatatcacagcattcttggtaagcccaatgttttttctgttttgctattttggtggagagaaaggaacacataaaggaataacatgagagaaggctatttggggaagtgtagtagttaaggttctggctcaaacaacaactgcagctcataaagttgactttagtggaaggatactggggtatctcatggaatcttgggaactgttgaataaccagggaaactctgggaaactcactggtaggaatccataaactgtcctcctggtgggctgtaaacaactcaccctctatgcatctcacatcaaaattccagtttcttgggaaaacaagtctgtttgcccaatttgggtcatatttccacctccatgttactcaggcatgattcatctgcaagttatgtgtatagatattttgctactgttccacccttacgctgtgctggggagggaggtgtcactgtgagctgtgtcggtgccttaagagatatctgttgtgtcttattacttggttgcttttccccacatgtacaatgacaaaaatgccttcaacctatttgatccagccgttccagtacaactcctatacttgccatctttccaagcccaaaggtacatccagctgatggaaggagcatcttggtgttaatattcttttagtcatggtctctgaaagtaaaatgtctattcttctaattctggcacaatcttatctagctatagttcctcatggtcctgcacttcatggactaaattgtnagtatattactaccaatgtactctantaataacttttggngcccaggtgcaatagttgctagagaaaaaaaaaaaaaaaaggagggaggagaaacagggattagttttattttaaaggaaaaaagaggcagag

SEQ ID NO: 44582 - DNA, 454 bp, Homo Sapiens
tcgagcggccgccctttttttttttttagtagagatgggggtttcaccatattggtcaggctggtctcgaactcctgacctcaggtgatcaacccaccttggcctccctaaatgccgggattacaggcatgagccaccgctcccagcctttgattttttaaggtggattttggttgttataaatggagaaaggtaagagttcaagttcaacccgtgtgtgaaagcaaaacaatggaaaacaggattggcttcttcaaaggctcctcttgtagaactgcctctttgaaatttcgaggtaatctactttggagactctgcctggagagggtcagttcctaagttaaaagcatcgcttaaccttggctcctgtggcattttacaaaggtttaaaggaattgattcctctgaaagggcctgaaaataaaaagtctttaacataaaaaaaaaaaaaaag

SEQ ID NO: 44583 - DNA, 781 bp, Homo Sapiens
gagctgggattacaggtgcatgccaccatgcccggctaatttttgtatttttagtagagacggggtttcaccatgttggccaggctggtctcgaactcctgaccttgtgatccgcccgcctcagcctctcagagtgctgggattacaggcgtgagccaccgcacccagccttttaccatgtgggtttctttagtgtcttaaaagcgtccataagccaccattctgtggaaccaaggccccctccacgcaaacaccctccctcctggggacctctggagcctcagccagaagtaccattaggtttaattttaatttgttttgctggagaaacatcaggtttgtaggagactgagttgttagcaggtgtgcttagctcttgatagtgaacgtgtaccttgggaactggctcacccacctgctaatagcaccatcgtcactattaagcagacatttcagttggtagaatccatgtagaagtcatggacttttctgggaaatgacttttctgggaaatgacagtttctttgacatattttctttgcccactttaaataaaaactctggagaaaaaaaaaaaaaaaaaaaaaaaaaaaaaaaacccggggggctcattagggcggggggggaacaacgcgcggcaccaacaggggcccgtgggcacaaacggtgatcccgagacccaaggttccggggcaccaacgggggcacaactcggggggtcccccataatggggaccccgataaaccccagaaacccgggtacccggctagaactcgcaaa

SEQ ID NO: 44584 - DNA, 525 bp, Homo Sapiens
gcacgagggagtcccccactcctgcttggtgctctctttctctctccttctctacatagagaagtgccagagcatccgtcagtagaagttacttaaggttggctgtgtcttccacatcttttgtttacccatgaagaactgtgaccatcttgttctgtgtcttgtcataaagatgggacgtgacttctttctgctcttgcttccatctggtgctgttttctgcacagcctccttgagaccttccagaaccttcttttttcctactcgtatcacttaaccagtagctatctgggatggttccagaggctgaagtttgcagttgaataacattttaaatagtgttaagcgacttgggatctctggccctttgcgtttcagtatttgtcctttttatgcctgatgtttaacctgccacatgtttgtactgcaacatgaatcttgggaattttaatgttatgcatttcaaatgtttttggttatctgtaaactaaatgtgcccttattggctcacttgtcaataaagat

SEQ ID NO: 44585 - DNA, 500 bp, Homo Sapiens
acaagggttttatcctttcctttaaaaacagtgtttgaaatgaagactgtcaactatcccataatttatttattcttcttcaatgtttgtaaagtgcatgagtcatgttcacacttgaagtctagtagtgcactgtaataattcattttttaaaagattatttaatgcccatttcaaaatacagtagtttacacagctacagaaacaatttggggcaagttttaaaacactgaaacagtaatagttattggtgtcacataaaactgatttgttttttacagccaaacctctgtcagtcagaggcattcattagttttatacatgtaatttgaaaatcactaaacctcgttttctcagcagcaataatttaagaggcttcaaaaatataatttcactcttatttaggtattttttcctgggggcatttttacggtaatttttttatgaaaagacaaatgcatgttgagataacttctgggattaaaatagtcttttgtttt

SEQ ID NO: 44586 - DNA, 679 bp, Homo Sapiens
atggccgggggagaagggggggtcctgtccagatgcagaaggggagcttgcctgctgctctcacacaatggagcccttgtttctcttccttgaaccagtatttcccaagattgagtgacagcccaggagaggatgtgggtctcatgcagagagctgggatcttcttggccattaaagtatattgttcacccccaccccgcgagaaccaagctcaggagttgcctgcctctgcacacatgctgagtgtgctgtttgtgtatatggcaggaccgtccctatggggcatgtgtgagctccgcagctgggtcaggctcctcggtccaggtttacttcatcccgcctggacgtgatttggctttgactgtctctcctgcagcccaaagcacttcctccccgtggttgctgtagctgtctcattggagcagtgcctctccaagtttgaggatttgaacaaagaactgggactggtgacttgttaatgaacagttcagagggcagagggccatcatctcagcttgtggagacctttctttccctggatgctgcttctcagctaactccctctctcttcgtgtgtgtactcggccttcagggtttccaccgatttttacaccttcttcccaccacgatagcttggctttaatgtggaattaaattatatatttttaaaaaaaaaaaa

SEQ ID NO: 44587 - DNA, 583 bp, Homo Sapiens
  misc_feature (25)..(25): n is a, c, g, or t
aacctcggcccccatcccccgcggnaggaagagaattcattaaatgaagagtggtacgtttcttatattacccgaccagaggcagaagctgctcttagaaagataaaccaggatggcacatttctggtcagagacagctctaaaaaaaacaacaaccaatccatatgtcctcatggtgttgtacaaagataaagtttacaacatccagatccgttatcagaaggaaagtcaagtttacttgttgggaactggactccgagggaaagaggactttctgtctgtgtcagatattattgactacttcaggaaaatgccacttctgctcattgatgggaaaaaccgaggttccagataccagtgcacattaacgcatgctgcagggtacccatagcaagttatagccgagcaaatgaaccgtcctcctgcctctgttgccaacacgagatcaatcagccttggtcaatggacaaacacttaggactgaactgaacccctccccatgaacacaagggttttatcctttcctttaaaaacagtgtttgaaatgaagactgtcaactatcccataatttatttattcttc

SEQ ID NO: 44588 - DNA, 789 bp, Homo Sapiens
  misc_feature (3)..(3): n is a, c, g, or t
  misc_feature (712)..(712): n is a, c, g, or t
  misc_feature (759)..(759): n is a, c, g, or t
tcncgcgtccgaacaatccaactaccaacacccgactctattggtgcatttaaaatgtgattccattttttcttacaattcttcagggaacttacctgcattaagtgaggttaaatgcattcaggaggttgtttgtttcttctatctagttttagaataatatttcttcggcaaaccctgctaactgcggttcacccttgaaaacgttaatctgaggactttttccaccaactcattaatgatggtggaagcaagtgtattatttgtttcctggagaatttgatgaagagcagtcttcctctgctgccctttactaagcaaaacctggagcaatttaaataggctaaatggttttgattaaatcttgagctccgagttggaaggagaaaatgagaagttaaccccttgagccatgtggtctctttacaatcaagagactgtacatatgtgaaaaaatacaaattaaggacctgtgttcatagacaatctaaactgtgtttctgaagtttgtgcacatttttcttcactgtaatgttattttacagctgtttgttaaaatagtgaataatttaatgatcctaaaagtaacaggtttcgtgtgagtgtgcttgtatacgtgagatttgccttattttcaggttgttttatttaacgatggttccttggacagcattctggtgttcagcaaccaatatggaatatttgtcattanatccatatcagtcttttaccatgtcattcttctttgccacacattanatgtcactcagctctaaaaaaaaaaaaaag

SEQ ID NO: 44589 - DNA, 544 bp, Homo Sapiens
ctgctgccagtcaaggcctgcatatgcagaatgacgatgcctgccttggtgctgcttccccgagtgctgcctcctggtcaaggagaagtgcagagagtaaggtgtccttatgttggaaactcaagtggaaggaagatttggtttggttttattctcagagccattaaacactagttcagtatgtgagatatagattctaaaaacctcaggtggctctgccttatgtctgttcctccttcatttctctcaagggaaatggctaaggtggcattgtctcatggctctcgtttttggggtcatggggagggtagcaccaggcatagccacttttgccctgagggactcctgtgtgcttcacatcactgagcactcatttagaagtgagggagacagaagtctaggcccagggatgggttcaattggggatccaacaggaaaccctctgcacttgaggctggtttaccaacatttactcccttaggatgagcctggagcaaaaacccactggtgtattttaaggaatccagcctttcttggaattaaa

SEQ ID NO: 44590 - DNA, 613 bp, Homo Sapiens
ccgggaagcactgtcatttccccagaaaagctgtgttccctatgctgaacacaccatacacattctcatctggaatctaaggagcagcttttaccctgatccagtatcctgaggaattttaagcctccactcaaatgacctgcctgtgttgtcatttccatgggaaagaactctttccacgagatctgctagttccaggcctctaagacaggaacgtatgtgccataagtgggtctacttcacagactcaatgaggcagaaattattgtagttttctcctatttcttctgcacccaactttctccttgtatttcaaaggccaggccatgtacactaacgtccttgaaatttgcagttctgtatgcttctattccaaatcattcattaccaataaaaacgaaataccaccctttccattttatagacctcatcccctatttctgtcagacagttatatgacagggtgactgtggaacctcttagttcatccaaagtctacctgaagtgctagactttcagactcttatcactgaaatccttaaggttgaggaggctttatttccctagcactggtgaagggcttcaactgtcaaacctcagaacaaatgcatta

SEQ ID NO: 44591 - DNA, 601 bp, Homo Sapiens
tgtcgactgggctaagtctggaaaattcacacagcaagacatcgacgaagccaaactttctgtcttctcaaccgtagatgctcctgtcgctccttcagacaaaggaatggaccacttcttgtacggcctctcggatgagatgaagcaggcccacagagagcagctctttgctgtcagccacgacaagctcctggccgtgagcgatagatacctcggcactgggaagtgcacacacggcctggccatcctcggacccgagaacccgaaaattgccaaggacccatcctggatcatccgatgagcagccgtggcgctcgactgcacaggagcccgagacaatacacctccgagctgaatatgaaaagtcagaaatgctactgctttttccaagaatattatgtcattgagtgtcgccaaagcccttgactggcgagtcaaaaactcagatctatcttaagagtgaccaggaagaggttcattgaaataatcatgcatgaagcgccaaagatgcaccatgtagaattttcactttgtactggcaggctcgttttacctcattctagaatatttaagaatctaaaaataaagggcaactctgact

SEQ ID NO: 44592 - DNA, 797 bp, Homo Sapiens
aactcctggctcaagccatcctcccaccttggcctcccaaagtgctgggattataggcataagccaccatgccctgccctaagtaactgttacttgagttaatgtactagttaattgacccttagaaaattatatttttctgcttgcaagtcttcattaaagaaggaaattttaaaatattttatagtataatgctatccaaactcatttttaaaaacattttattatggaaattttcacaaatgcacaaaaagaatagcagaatgaagctctgtgtacccatcctccaacagctgtcctgtggtcagtcttgtttacctgcatccccacctatcccctgccccaacccacagggatcagtttgagtcccattaacaggcatagtattttcatgtttgtgtgatcagagacattcaaatataactccaaagatagggtacttttttgaacataaccacaataccattgtgtaagactgctaaaacattttttgatgccaagtaccagtcaatattcaaacttcctgattgtctcgtaagttttttttaacagttggtttattcgagtcaagatccaggcaagatctagatcttgcattttgttaatataatctatagatttaactttcctgtttttaatttttgaagaaactaagttgtttgtcctatagaattgtccttcagtggattttactgaatgtatcctaatgggatcatgtacaccttttctgtcccctatatgttctataaactgacagatctagaaaaaaaaaaaaaaggggggccgctaaagaaatc

SEQ ID NO: 44593 - DNA, 566 bp, Homo Sapiens
gtccggagaagggtctcatgcggaccctcacatgggcagaaaaatggtggtcattggccgacatcacagttttcctgtttcccacccagctaaaaaccgttgtttgctttaaattttcataaactggaatcctttcacccgctcctacagctaaccctcacaagcatgaagtgctgtggctgttccttatcctaatgatgcgcttttgtcccgtaaatgttaacactcatgaagcataccccggcctctcagttcttgagggcctccccaccgcagcagcaaggaaagctcacgaaccccaaacctggcaagtcacctgcagcccatggtgagctctgggaagtgtggttgaggccttggggtcactccttttttgcatgtgcaaatgtgctggtcacccttcaacgctcccagacggtcaggaaaactgttccaatcatgaaaaggggggatgattttgtaaaagtggcatttcctggtcagtggtggtcttcaagacgacagctctgtatctgccatgtgaagagaattaacaataaaagtgtgaagagcgattgtgaggaaaa

SEQ ID NO: 44594 - DNA, 700 bp, Homo Sapiens
ggcaaatgctatagaaaaggttcaggtttcagtattctctctgaaggcatcattcctgggcttccggcagcatcacacgcttccagtgcctgcagggtgagggtgtgtggcacagaggcaagcagctcctctcttctgtaggagctttgggttttcagaggtgcagggaaggcagttttacaggttaccgtaaaacagaggttccgtccagtgttccttatgatgcctccccatttaaaaagaaaagagatctatggaaaactgggaatgtaatgtggattctgtcagagctcctacagagcacagttgcctttagtttcctttaaagatgtaaaaatattgtataatacagttttgtccctacacaattgtatttgccaagcttagtgcattatgatacctttatttatttgttttgggcagtattactatatatatataaacatacagttactgttttatatattcttaggtcattcaaagccatgtatgctgtaaatgtgctagtctttagaatgacacataataaataactgacaagatattaaatgtggtcttgcctgattcatcctattaggaggactagttctatgtgaccagcctgtgactggaccattgttcttgggcattgcattgagtgctcgggtgctgaatacatgtttgtaaacatgggaccatgggagacttccattttataagc

SEQ ID NO: 44595 - DNA, 705 bp, Homo Sapiens
  misc_feature (641)..(641): n is a, c, g, or t
  misc_feature (652)..(652): n is a, c, g, or t
  misc_feature (654)..(654): n is a, c, g, or t
  misc_feature (661)..(661): n is a, c, g, or t
  misc_feature (664)..(664): n is a, c, g, or t
  misc_feature (666)..(666): n is a, c, g, or t
  misc_feature (669)..(669): n is a, c, g, or t
  misc_feature (675)..(675): n is a, c, g, or t
  misc_feature (683)..(684): n is a, c, g, or t
  misc_feature (686)..(686): n is a, c, g, or t
  misc_feature (703)..(703): n is a, c, g, or t
  misc_feature (705)..(705): n is a, c, g, or t
gggttttgtattcttgtatatagtttattttttccatgtgctagccaggtaaagattacacagttcttctggactgttaaattgtgcatggttttggaccccttctgctctactacagagagtgaagaagaaagtattaaagctcactttaccattccatatacttactaaaagcctgtgtaaacatgtcttaatgaatgttgttgaaagcaatgtaaatagttgaaaatataaatttatattacagtttaagaaaaccttatgaggcatcactagccactgttaatatctatttgtattcttataccttttcaatatatttgaacaaatatagtttctggcactatttttatactaggaaaaggagttactatgtatattatgcttagcttttaaggcattttaaataaccatgaatgttgatttcattactttcctttcctccatcacgagagtcatttcagatgactctttcatgacaaaatcactttaaaggaacacttacctccgattcctgtataaagtcatgagatggtcaaggtggttttccattgtgcaaattcttcacctgtcagtggtttcctcattttgccatgctttgtaaaaataaaaagaatgatcaagtaggaaaaaaaaaaaanaaaaaaaaaananaaaaaanaananaanaaaaantttttaannanaaaaaatttatttaaanan

SEQ ID NO: 44596 - DNA, 645 bp, Homo Sapiens
cacgcgtccggcttttacatgatgggggtctacgccccaaccctgctcattgttgttctctcctggctttccttctggatcaacccggacgcgagtgctgccagagtgcccctgggtatcttctcagtcctcagcttggcctctgagtgcacaacccttgccgctgagcttcccaaagtttcctatgtgaaggctcttgatgtttggcttattgcttgccttctctttgggtttgcttccctggtggagtatgcagttgtccaggtgatgctgaacaaccccaaaagggttgaagctgaaaaagccagaattgctaaggctgagcaagcagatggaaaaggtggaaatgtggctaaaaagaatactgtgaatggaacagggactcctgttcatattagcactttgcaggttggtgagaccagatgcaaaaaagtttgtacttctaagtctgatctgagatctaatgacttcagcattgttggaagcttaccaagagattttgaactatccaattatgactgctatggaaaacccattgaagttaacaacggacttgggaaatctcaggctaagaacaacaagaagcctccccctgcgaaacctgttattccaacagcagcaaagcgaattgatctttatgcaaga

SEQ ID NO: 44597 - DNA, 503 bp, Homo Sapiens
gaaaaatggactgatctttaaactattcagtcttactgggatttttatgcatagaaactcacatataaacatgaaataaacagtgccagtattcataggaaagtgagaaactgtaatatttggccattattctattcaacaggttttagaggcatgccaccattttttccttatatttttgcttaatttttttaaattgtcatttaattcttaaactgtcatttatttgagatggaaataagatctaaagttagttgcctttgcctgtaaaacatgtgatttgcaaattattatttttcttttttttaacaaatggaagtaaatttgtttcacgtaaatcttaattttcaacctttctggataccttaattgtaactgtcagtttgcactggtcggtatatggaaacacattgctctaccctgctacttagttgattttaaagtgaatttacagtgatgagaaatttgtgaaaaatatattgtatttcttttgatgtttcaaa

SEQ ID NO: 44598 - DNA, 556 bp, Homo Sapiens
agaatggttgaaagtccttcgagatgaagaaatgcacgccttggccatcgctgaaaagtctcaggagttcttggaagcagataatcgccagctgcccaatggtgtttacacaactgcagagcagcgtccgaatgcctacatcccagaagcagatgccactcttcctttgccaaaaccttatggtgctttggctccttttaaacccagtgaacctggagccaatatgaggcacataaggaaacctgttataaagccagttgaaatctgaatatgtgaacaaatccaggcctctcaaggaaaagacttcaaccaggcttccttgtacccacaggtgaaaaatgtgagcataatacttctaatattattgataagtaaggtaaccacaattagtcagcaacagagtacaacagggtttctatttacccaccaactactatacctttcatgacgttgaatgggacatagaactgtcctacatttatgtcaaagtatatatttgaatcgcttatattttctttttcactctttatattgagtacattccagaaatttgtag

SEQ ID NO: 44599 - DNA, 493 bp, Homo Sapiens
aaaaaaaggaaagaaagaaatctctgcttccgtactatcaaaacttctaccctagaataccccctggcaccttctaacccaacctaatacagagattttgtagggacccattaacaagctcctatataattataagcagctctcacagtagggttgaaagagaatataaggaaaattagaagtactgtatttttgctattggaaatgaaatattgtttcatgcacctttgaaaaaaataacaggattttacagccttctgatgattcattcaaagcatggggaatagttcatatgtttgttaaatgaaaatcttatgtagctatttgtgtgtccctcccacttcataactacaaaaacatatatatgaatttctaaacaaagtgatattttaaagatgaattgattcaatgtgtacttaccagtttactgtgtggttttatcttcaggtacagatagtttgtggtactacttgaaaatacctttaatattatt

SEQ ID NO: 44600 - DNA, 724 bp, Homo Sapiens
gggaaaagcctgacaaggaacccaagcccccgtttctaaagcccactggagcaggccaaagattcggaacaccagccagcttgaccaccagagaccccgaggcgaaagtgggatttctgaaacctgtaggccccaagcccatcaacttgcccaaagaagattccaaacctacatttccctggcctcctggaaacaagccatctcttcacagtgtaaaccaagaccatgacttaaagccactaggcccgaaatctgggcctactcctccaacctcagaaaatgaacagaagcaagcgtttcccaaattgactggggttaaagggaaatttatgtcagcatcacaagatcttgaacccaagcccctcttccccaaacccgcctttggccagaagccgcccctaagtaccgagaactcccatgaagacgaaagccccatgaagaatgtgtcttcatcaaaagggtccccagctcccctgggagtcaggtccaaaagcggccctttaaaaccagcaagggaagactcagaaacataaagaccatgcaggggagatttcaagtttgccctttcctggagtggttttgaaacctgctgcgagcaggggaggcccaggtctctccaaaaatggtgaagaaaaaaaggaagataggaagatagatgctgctaagaacaccttccagagcaaacatacatcaggaacgagtcggcctcagggcactcctcctg

SEQ ID NO: 44601 - DNA, 489 bp, Homo Sapiens
ccagccaaaatgtgcctttgcaaagtttgcgaaatcagattttgtatcccaatagaaccaaaatatttatgaggatgctagcattttccaatcatagtaattagttcacaactgagaaatattatgtctgtagtagataaatattagttgtgcattttaatttaattctcctttttccattttgtctcatgaagtaccttattgcaaaaatcccactgagtaatagctcataaattataatctttcaaatagccatgctaccagcgtacaacagtgatacatgtaaccccaaatgtgatgtgagaggacgattactttgtaaataaaacttgttattgacattttaaaaaaaaaaaaaaaaaaaaaaaaaaaaaaaaaaaaaaaaaaaaaaaaaaaaaaaaaaaaaaaaaaaaaaaaaaaacaaaaataaaacaaaacccacatttcttgaaaaaaagaggacccaaaaagagagcgcaaataataaat

SEQ ID NO: 44602 - DNA, 824 bp, Homo Sapiens
  misc_feature (809)..(809): n is a, c, g, or t
aggaaggggatgcggaaacccctggctcggtggagcggagaggcaggcggggagccgaggacggcatgtcccaggccccgggagcacagccgagcccacccaccgtgtaccacgaacggcagcgcctggagctgtgtgctgtccacgccctcaacaacgttctgcagcagcagctctttagccaggaggctgccgatgagatctgcaagaggttggccccagactcccggctgaaccctcatcgcagcctcctgggcaccggcaactatgatgtcaatgtgatcatggccgctctgcaggggctgggcctggccgccgtgtggtgggacaggaggaggcccctgtcccagctggccctgccccaggtactggggctgatcctgaacctgccctcgcccgtgtcgctggggctgctgtcactgccgctgcgccggcggcactgggtggccctgcgccaggtggacggtgtctactacaacctggactccaagctgcgggcgcccgaggccctgggggatgaggacggagtcagggccttcctggcggctgcgctggcccagggcctgtgcgaggtgctgctggtagtgaccaaggaggtggaggagaagggcagctggctgcggacagactgaccatggctgaccatcggcgcccacagcgcagtccctgcgcatccccctccggctgcgcacactgcatgcctggggaaagccagcacttctggaaccctgggggaggcccgcccccctcccaaacccctgctccccactgccgctgctgcctccaaaaatctgctgaattgccaaacnaaccgataaaattcc

SEQ ID NO: 44603 - DNA, 823 bp, Homo Sapiens
acagattgggttgaatcttccggccgggaggcggaaagccgctcatgtgactctcctgacatccttagtagaaggtgaagctgttcatttggctagggactttgcctatgtctgtgaagccgaatttcctagtaaaccagtggcagaatatttaaccagacctcatcttggaggacgaaatgagatggcagctaggaagaacatgctattggcggcccagcaactgtgtaaagaattcacagaacttctcagccaagaccggacaccccatgggaccagcaggctcgccccagtcttggagacgaacatacagaactgcttgtctcatttcagcctgattacccacgggtttggcagccaggccatctgtgccgcggtgtctgccctgcagaactacatcaaagaagccctgattgtcatagacaaatcctacatgaaccctggagaccagagtccagctgattctaacaaaaccctggagaaaatggagaaacacaggaaataaaattggaacgaagaaaggttaggagagtagggaaggaacaggactgcaaaaatccttctccaccgcacagactgggaacccctcctggcctgggggaagagtttgttacctaccttactatttaaagagccttcactggttctgcatcacccgcccctggacttcttagttgtttctctagcgctgagctatctcctaactttggacctattatcagaaggtgacaagtactggctctttattcattaagctttttttttttgaaccccattctttccttctctgaaagtggtgctataagttttagaatcttttaaa

SEQ ID NO: 44604 - DNA, 587 bp, Homo Sapiens
ggggacagcctggcgtgggaggcggctgcgggccccacctggcgcagcctccgctgaccacgcgggggaacccggactcgggcccgacgcgctcccaaagagtccccgccggcgctgacgcggaagcgccacagctcaccacgtccctccgcgggccgagacgactgcggcggcggctcacggcgtcctccgcgctgtgtggctaggcgggaggcgcgcgggcggaggcagttgacaggaggaaccgcccggcagcagctgccgccgccaccaccgaaggagccggaaccggagcgggcaggacctgaggcttccctcgccggggcaacggctgccgccgcaacccgggtcccaccagcgccgctccacctgcaacggtccctcaggctttaggagaggggcggaggaaaatgggggtctccccccaccttgggccttttcggtggtagttgttgtttcaggaaactttattaagtcagcctctctttttctctgtcgccccctcctccggagagcccgagctaccgccgcggagcgcgtaggaagggggaagcagagactctccggcagcgacagggcctcgtgcc

SEQ ID NO: 44605 - DNA, 635 bp, Homo Sapiens
  misc_feature (611)..(612): n is a, c, g, or t
ttttttttttttttttgtagagatgagattttgctatgtcgcccagactggtctcgaactcctggcctcaagcaatcctcacgcctcagcctcccaaagtgttgatgagccactgtaccccgataccactgtataaaaaatttaaaaaaaattgtgagtgctattgtacatggcaaagtttcaaagagctcttggccatccctcaccaaactttggcaaaagatggtgttagtccccttctccagggcacatgagaaaaacaggcctaacatcaggtctcagcggttcctctcacaggccttggcttggaaggctggagcttcggaccaaggcccagccctgtcacctcctcttcatgtgatgtggacccctgggagcatcagtgtcctcatctgtccaatgacagcccttttctcacagagttattgtgaagattcaacaatttcttggcatagtgcctggcacatggtgtgtgcttagcgcaaatggcagctctcatcatgaatgatagactctttcaccctgctggtcccaggtcggcacacacatcctcataatggcatttctcctttctgtgcacagcactttattgttacaaagtactcttccannaaagttacctgtgcctcgtgccg

SEQ ID NO: 44606 - DNA, 903 bp, Homo Sapiens
  misc_feature (19)..(19): n is a, c, g, or t
  misc_feature (765)..(765): n is a, c, g, or t
  misc_feature (893)..(893): n is a, c, g, or t
  misc_feature (897)..(897): n is a, c, g, or t
  misc_feature (901)..(901): n is a, c, g, or t
gccgggctccccgccccanaccccggttggggggggcagccagccgagccacactgtgcgcagcttccaccatgaagaatctttggaagaactaccagaaacgagtgggaaaacaacccggagattcttctttaatttaagttctatccccacggaggagtttatcacctcagcagagcttcaggttttccgagaacagatgcaagatgctttaggaaacaatagcagtttccatcaccgaattaatatttatgaaatcataaaacctgcaacagccaactcgaaattccccgtgaccagtcttttggacaccaggttggtgaatcagaatgcaagcaggtgggaaagttttgatgtcacccccgctgtgatgcggtggactgcacagggacacgccaaccatggattcgtggtggaagtggcccacttggaggagaaacaaggtgtctccaagagacatgttaggataagcaggtctttgcaccaagatgaacacagctggtcacagataaggccattgctagtaacttttggccatgatggaaaagggcatcctctccacaaaagagaaaaacgtcaagccaaacacaaacagcggaaacgccttaagtccagctgtaagagacaccctttgtacgtggacttcagtgacgtggggtggaatgactggattgtggctcccccggggtatcacgccttttactgccacggagaatgcccttttcctctggctgatcatctgaactccactaatcatgccattgntcagacgttggtcaactctgttaactctaagattcctaaggcatgctgtgtcccgacagaactcagtgctatctcgatgctgtacctttgacgagatgaaaggttgtattaaagaacttcagacatgntggnaagntt

SEQ ID NO: 44607 - DNA, 750 bp, Homo Sapiens
  misc_feature (26)..(26): n is a, c, g, or t
  misc_feature (716)..(716): n is a, c, g, or t
ggcacctgacccacgcccccacaggnctctgaccgcagcctatgagggggtttggcaccaagctctgtccaatcaggtaggctgggcctgaactagccaatcagatcaactctgtcttgggcgtttgaactcagggagggaggcccttgggagcaggtgcttgtggacaaggctccacaagcgttgagccttggaaaggtagacaagcgttgagccactaagcagaggaccttgggttcccaatacaaaaatacctactgctgagagggctgctgaccatttggtcaggattcctgttgcctttatatccaaaataaactcccctttcttgaggttgtctgagtcttgggtctatgccttgaaaaaagctgaattattggacagtctcacctcctgccatagggtcctgaatgtttcagaccacaaggggctccacacctttgctgtgtgttctggggcaacctactaatcctctctgcaagtcggtctccttatccccccaaatggaaattgtatttgccttctccactttgggaggctcccacttcttgggagggttacattttttaagtcttaatcatttgtgacatatgtatctatacatccgtatcttttaatgatccgtgtgtaccatctttgtgattatttccttaatattttttctttaagtcagttcattttcgttgaaatacatttatttaaagaaaaatctttgntactctgtaaatgaaaaaacccattttcgctata

SEQ ID NO: 44608 - DNA, 652 bp, Homo Sapiens
tatttgagcgattctgtcgtggactaaaagaagtagaacggttaatccaagaacgaggctgggagttcatgtggaatgagcgcctaggatacattttgacctgtccttcgaaccttggaacaggactacgagctggtgtccacgttaggatcccaaagctcagcaaggacccacgcttttctaagatcctggaaaacctaagactccagaagcgtggcacaggtggtgtggacactgccgcggtcgcagatgtgtacgacatttccaacatagatagaattggtcgatcagaggttgagcttgttcagatagtcatcgatggagtcaattacctggtggattgtgaaaagaagttggagagaggccaagatattaaggtgccaccccctctgcctcagtttggcaaaaagtaaactttccctttcccaatttataaataatctgtctgctggtacaacagacataaatctctactctgagagtttttatacacttggaaaatattaaaattgtagatcctgcctatctttacaataaaactctccttaatgtaaaaaaaataattaatctaaaaaaaactcaaggggggcccctgtcccaaattcccctatggaactctttacaattaaatggccgagttttaacacttcag

SEQ ID NO: 44609 - DNA, 568 bp, Homo Sapiens
aaattatttttatcatgatgtatattatgtacataaataaaaggccatgattattgatttatataatagaattgtatagattatttttgcacagtttgtcataaattagggtggtaatgaactggattgaactactatatgtgcattatattgaattctgcttgtcattaagataaggtgaataagtgtcttaaacgtcctgtaaaaccggactcccctttgttacatgcacattttccattgttacctcgatgcaaaagaattcatttagtaggtacatctattgtagctgtgattattccagtttctgtgtgatgcaatcaaatgtcctattaattaattattatttcatgtcatttgtagctactgatacagcagaaatgaagggaactgtaattacttgtatttttgtaagccatacgttaaatgtttgttacatcatctttctgcttctatttttatgccaatgaaggcatttgtcttgttactaattacatgatgtaactacttcttgatataaataaatttttattttaattactaaaatctttttaaaaaaaaaaaaaaa

SEQ ID NO: 44610 - DNA, 526 bp, Homo Sapiens
gtaggatcagggagcttccaaggcatttgatacctttttgatgggaagaagggctctgaggagctccaagataccccaacctccaggcccttcattagggggtagttgggtttctgtttggcctttccccctgggccccataggcttaaactacccccacccccacctccgcctcctacctcagctgggagcactgtcttccatggggcttccacttctctcctcaacctggggaagaccacagggcagtgcctgcctcaggacctgccttccccaaaagctggcttcttgctccaaggagagagcattgacccacctgccagagtcttgccttttgcccaaaggagcctggtcttcagggctgcataggatgcaagtgccttctctgcttctcaccgtgggtggcactaatttcctccttaaccagaactttgttccagccactgacccattctaactcttccccctctgactctcctgcgcagggtctgttcctggtttcccagatgcataaaggaagacatat

SEQ ID NO: 44611 - DNA, 730 bp, Homo Sapiens
tgagagaagctgttgggcagcgaacctactgtttaaaatcaggataaccacattaagcccaatatgccagttggcaccagatgctgtggacttggaatgaggccaacagggttcaccaggatgagagaggagagaggaatccacaggaccaccagaagggagagggaaccagatatgcagatcagagatagaggaagtggaaccagagagctgggagggaccaaggttgtaaggatggctaagtcccaccataagagctaaagggtcctgggagatgatggctcatttccacccaaccccaggatttccacagcacacacccacaggcctggacctgggatgaagatgaatgaagaacatggactcatgtggatgtggtttggctcagatgtccctgcaataaacaaggggtcagtacttagtccctgagtgtggttgaggtttgaggtcctggtcgagcagggcagtactggaccaggtctacgtcagcattcaggttcaatggggacaccagtggcttcaaacttcctgatctaattatgtttttagacacttagaagttattgaggactttaaagagcttttgtttatttgggttaatatttatgacatttgacattgaaacaaaaatttaaaatgttatcttttaatttatgttaaaatagcattaataaatcagttataggttaatgtagataggatgttttgtgaaaaagcaatctattgtgtc

SEQ ID NO: 44612 - DNA, 808 bp, Homo Sapiens
ggttcccactgtgtctgcacagtgcttgacttctcggcccggaagagaacctgctttctctggtttccttcctgagtctggcacagacggggctattgtagttcttgatcaagtcctggagtcagccttgcctggctctccttgtagcagattcagtccacagacctcttgctgcccctcagtgacaagtatgctgtgaattcaacctttggacttgctgcccaagcctttggttgctgccctgactattgtaagaggtaaacttacctggtttgtttgagaatgaccattttcctaatgtgaaaaccatctctctcaccacttttattagtagggctaacatttttttccgttataaatggttgagcaatttgaatgacttaacacagtgtcattatcttgcaatataaactggtaacctcacaactccacacttcatcaccatatgaagtaaatgaagctagctaagcggatgctgtatcaactagtaacttgccattaaggattattttatagcatgaatttaagactatttattcaaatgatattttactcttgtattcactttgttttagatttgtgacatgaatatttcagtgctgcttaattttgttctgaattcttgtttcttgcttgtaaatggcttttttatggtataaataaacgtcatggacattgctgtttgtaaataaaaatgctgctagaacccaaaaaaaacattcaacacttgtccaactccttttgcgcgctgtcacctgcccacccgctcccacccacagcccacatcacaacgggggggcgccattcc

SEQ ID NO: 44613 - DNA, 967 bp, Homo Sapiens
agataaccgaggaggagctcctggataatttccatctgatggccccttctgaagaggatcattccatcctttgggacgccatcagtacctatgatggctcgaaggctctccatgtcaccaacatcaaaaaatggaaggagccctgccgaatagaactctacagagtcgtagagagtttagccaaggcacaggagacatcaggagaagaaatttccaaattttacctgccaaactgcaacaagaatggattttatcacagcagacagtgtgagacatccatggatggagaggcgggactctgctggtgcgtctacccttggaatgggaagaggatccctgggtctccagagatcaggggagaccccaactgccagatgtattttaatgtacaaaactgaaaccagatgaaataatgttctgtcacgtgaaatatttaagtatatagtatatttatactctagaacatgcacatttatatatatatgtatatgtatatatatatagtaactactttttatactccatacataacttgatatagaaagctgtttatttattcactgtaagtttattttttctacacagtaaaaacttgtactatgttaataacttgtcctatgtcaatttgtatatcatgaaacacttctcatcatattgtatgtaagtaattgcatttctgctcttccaaagctcctgcgtctgtttttaaagagcatggaaaaatactgcctagaaaatgcaaaatgaaataagagagagtagtttttcagctagtttgaaggaggacggttaacttgtatattccaccattcacatttgatgtacatgtgtagggaaagttaaaagtgttgattacataatcaaagctacctgtggtgatgttgccacctgttaaaatgtacactggatatgttgttaaacacgtgtctataatggaaacatttacaataaatattctgcatggaaa

SEQ ID NO: 44614 - DNA, 579 bp, Homo Sapiens
ctgatgccaagacaaatattgggagcgagccttcctcactagccatgtccaaataatgagcgtattttcatgtggtcttcactgcatttggttttgtttctgatttcatgttcctttgaggtacagtcagatgaaaatgctgagttctgagagagttccaatgaggagctgcctttcagctttggagaatatgcatctaaaacaaaaccaaacattattgtaatctgacacaggcaaaattatggttcccacaccccaaccccaaatgaaacctgggattttgaatgtggctctaagagttaacattgctgtctgtatgtcgtgtatgctaggtgatatcctcagtagggattgactactagactgtgtgttttatcaaagtgtgtaagaataaaaactcacttgcacgaattgaaacgtaaagaaatgacacttgtgaacgtgtgaacgttaacactgtagttgatagatcttaagctgctaattgttgagagagatttaaatttatgttctgtctggtcgctgcagattctcagcagcacttttactgtatatagaaattgaaataaagacctcagc

SEQ ID NO: 44615 - DNA, 468 bp, Homo Sapiens
gtatgctcgtttctctcaatttgaaacacaagaattacactaatagtaacaggccttgagcacaaaatttggtcaagaaatgagtctgtttgaaatgcttagttggtgaaaccagatcgctgtgttactaatgatcactctggaaatgcaaatagaatatgaggggaaaaaacaaaatcatgttaatgcgttttgtacatcagccttctcctgtctccatgataactgcatttggtaggaagcctgaggcaaaaactgcttaagtggatctgtttgtaagtggattcagttcattcgctttgtctgtcggtgactcctgaaggtttcctggtccatctcattgcggcctgttgggcagagctggacaaggtgtctttgaaggaaagctaagtcttgtctcatttaggactgggtccccacagtgacagtcacttccttcagcatctcacttcttcttctagaatccca

SEQ ID NO: 44616 - DNA, 584 bp, Homo Sapiens
  misc_feature (538)..(538): n is a, c, g, or t
ccaggatccaagatgcagggctggtgttggcagacacgctccggaaattcttattcgatctggatgttgatgatggcctagcagctgttggttactccaaagctgatatccccgcactagtgaaaggaacgctgccccaggaaagggtcaccaagcttgcaccccgtccccagtcagaagaggatctggctgctctgtttgaagcttcaatgaaactgtattaattgtcattttaactgaaagaattaccgctggccattgtagtgctgagagcaagagctgatctagctagggctttgtcttttcatctttgtgcataacttacctgttaccagtataggtgggatatacatttatcttgcaggaaattccccaaagctcagagtccagttccttccataaaacaggctggacaaatgaccactatgttagacccccaggctcgacttcaggggtcagtgttcctgtcccaaaccccacacagaatactctgcctctgcttcatgtagcaaatgagcaaaaactcagtatctatcanaagtgtaaattatatttcctatgcctagtaattcacttcatgtcta

SEQ ID NO: 44617 - DNA, 741 bp, Homo Sapiens
caagtttcatatcctggaaggtcttcacatgctccagcccctgtaagctatgtctaatgtgccagaaactcgtccagcccagtgagctgcatccaatggcgtgtacccatgtattgcacaaggagtgtatcaaattctgggcccagaccaacacaaatgacacttgtcccttttgtccaactcttaaatgacggacctgactggggaggaagaagaagagaaactgatgtgaacaggaagcgcgggttcaagatttctaaaactctatatttatacagtgacatatactcatgccatgtacatttttattatataggtaatgtgtgtatagaaagtctgtattccaatgttcgtaaatgaaactatgtatattatgcagaaacagtctgttccccctcatcttgcaattcctttgggggatgcagattgtagggaagatgatgtttagtttggccttgaaattatgatatccctgcccagggctgttttcaaatacaatataaaaaccacctaggaacctgctgttgctctaaggccattctgctttggtttggctcagcctctagtccatttccttaaggctcatgtatgcagatttaaagcctggtgctcacccactgtccaaccagatgccttgcttaccgaaagcctccagaagcctcagtattgttttagccactctactccaaatggataaaatgagactctgattgaggaaaaaaaagtaaaaaaaaaaaaaaa

SEQ ID NO: 44618 - DNA, 909 bp, Homo Sapiens
tgccggggggcggggacgcgggcggctccgggcgggcgtggtccctcttgcgggcgcctgggctggtcgggcggatcccggtkagggggagccgcggggacgcagcgacagactcggggtgctggcagcggcagcccacgcctcccagggattgcaggcctgggcgccggggttggaccagtctcccgggcatggcacgccctggttattctgtacccgtgatttgtggcggggcaagacgttaagttgggtgacaccgaggtgagccacggtcctcggcaccagatgaggaaccactgtctcaataagtgacaccagtgatgctgttaaacaaggacaatccggttcatggattgtgacaacgcacgctgacatcaagcagaccctgccgtcaggtacagagggcaccacagtgaccaggaactgctgtcctttcataccaggttttaggaggctttaccagaaggaatggaaaatgctggtgggcagtaagattgaaacagcatctgaggactggttctgcacaaaaccttaaattcttcaaggactttgacatttgtttattcttgtaacaaattaawacctatcctgtgtgttggttagagatcttcaaactgtaaataccttgaggcaggagtgaggtttttatcttttaaaggacaggcccctactctcctacgtaatgagtttctaaaaatggatgtgagcaccaatcaatatttctctggttgttaaagtcaagaataaaatggtattttkaagctcgcaactgtgtaggatgaattctgtacacttttatttccctctgttctcctttcctatttgaaagtttattagtttgtggacttgggatcggattattcatgcattattttttgatgttgtatgtctcttggttcttgggtattt

SEQ ID NO: 44619 - DNA, 868 bp, Homo Sapiens
  misc_feature (1)..(1): n is a, c, g, or t
  misc_feature (5)..(5): n is a, c, g, or t
nctcngagctactgaagactgcttgttatttgatgagacaatggataaattcagtaacgaccttagtttgtgtcttcctgtgttctcaagattgagaatcccagatgatcacgcgatttcagacctacccatgtacaattacatagagatgcgagcacatgtcaactcaagctggttcatttttcagaagaacatggagagatttcttcatgcgattatgccatcgacctttatttctctctatacaatggtcactttttccagaataagataccatgaggctgtgcagcgttggcattggcaaaaaaaggtgataaacaaaggactctttttcttgggatcactgatagccatcagcagtacctacctacttatacactacatgtcaccacgatctttcctccgcttgagaagaccatggaactggatagctcacttccggaatacaacatgtttccccgcaaaggccgtggactccctagaacaaatttccgatctcattagcaggtgatagaaaggttttggtggtagcaaatgcatgatttctctgtgaccaaaattaagcatgagaaaaatggttccattgccatatttgattcactagtggaagatagtgttctacttatattaactgactgagagaaaaaaataaaaatggcctcgttggctcagcggtggagcttgcgggccgttcctttaggagggtaattatgatcctcgtactgactgctggctcggcgttcggtgcgcgagcgaatagtcactcaaggcgaatcggtatcccacgacaggggtaaggaggaaaacttggacaaaggccgaaaggccgaccgaaaaggccgtgctgcgtttcctgggcccccctaca

SEQ ID NO: 44620 - DNA, 641 bp, Homo Sapiens
tatttactttgcttttgttctaagaaaaagccaaggactaaatcaacttgtttttgtgtttcagtaatcagtttaaaatctaagatttttttttaaattagactatttaatgaagtgccatgtaattgtagcttgctagtgtttaatgtttaatagactggttctgtaggtgttttaaccatttaacactctctgccatccctggagaaagtggttctactcttactgaacacattctctctgacaaaatcaccagctgctttatttttctatttattacagttaaacagttgatgaggtctgaatcttgaccaaaactgctcagctgagatgtttttcacaatagacactgtacaaagtgtgcgtgcaaaaggacacggttggtagtattttttcattaatgtgaacattgactaaaaaaaagcagtcctgccttttaaatcttgtggcagctcagaagggaggtgcttaagaaccttaactactatgtcagataacaaaatatttttttccattttggagattggttactgctcacacatgatgtatagggctaaatatatgcttgtttccttgcacctgtgtacttcccctctctccctccctttccttcccctgtaggcaataaatggccattttgc

SEQ ID NO: 44621 - DNA, 637 bp, Homo Sapiens
atttcccaagaagccgcatcgcccaaggttggcacctctcctaacctgccacacgacagctctcacctctctaggaattgggggctgtcaggtcacaggtgggatctggcatttttttatgacagtccatttctagatggtttgcctattaaagaagtgggggggaaatactgttttctccttaacctcaagctaccagtctctcctcttccgcgtagaggaagaggggagcagaaaaaaaaaagctgaagtataaaaaccctcctcctcccgttattatttaagctactgccatcaaccccacccccataaagctgtgaagccctttgcctcgcttttgacagcgtgggggggccccgtgggcagggacttcggatttgcatttctgggttgtttttccttccactctggggtctcgttcaggcattggggtctcctcaccccagccacatgtttctttaagaatcctttggtcaaccaggaccttgatttttcaggcattttggtctggggtatttttgtttgttctctctgttttttgttttcttttttttctttccatcgtggttctggaagcttctagcgtgtggcatctgaccaattttgaattggtcctttctataaaatcaatatttat

SEQ ID NO: 44622 - DNA, 1001 bp, Homo Sapiens
  misc_feature (758)..(759): n is a, c, g, or t
ccagttaaacggatgaccaaagacctttcttatgccggaagcaaaaaccaaaactttttgttggctttttcctttgtcgcctccccagcacctgccctcccagtctcccaccccggccccaggctggaagccctccctccacttaagttattgttttaaaccaaagtttacagtgtctgttggtggccaagaccttctctctccacccctcctccatccaccctgaggaccctggggctcagtggaggcagggccctgcccccctcccttccgctcctgcccagcctgggggaaggagaaaggaggggagaaagcgggctctcaccccctcaggagtgggcacgggagcccttctccctgaccctgggctgcttcctgggggctctccagacccctctctaggaccaagtcacccgtcgtgctgggagtgtggattctagcaaaagagctggaaaaaagtcagactctccacagaccccctatgggggacccccaactcaaggccaaggactgggcgtatcggatgctcataacacccctggcctggcccctttactgagaagactccttggatatttcccaagaaccccccacatacacccctcacaagccacccctcctgagaggcagggggccctccgccccctccccatgtattccccacctgtgttccgtttgaccagcacagaaatattaaacgtcctctattcacaaaaggagaagaagggcggggacgaacgggccggaaggggagcaanncaaaaactcgaggcatttatgttcgggggcggaaaaaaaaggaatgaaatgggccctgggcatagggtgttcccggaccccacttttcttgggaaaagggggaaaatctggcggggccccccaaagagggagaccggaattaattttcagaaaagccccgggttaaacctgggattaatggaaatcgcggtgggacagaacccgcgggaaattttacacccgcgccctaaattgaggggcgc

SEQ ID NO: 44623 - DNA, 1739 bp, Homo Sapiens
ggagagagagaggacagagagcaagtcactcccggctgcctttttcacctctgacagagcccagacaccatgaacgcaagtgaattccgaaggagagggaaggagatggtggattacgtggccaactacatggaaggcattgagggacgccaggtctaccctgacgtggagcccgggtacctgcggccgctgatccctgccgctgcccctcaggagccagacacgtttgaggacatcatcaacgacgttgagaagataatcatgcctggggcggcaagcccagcatgcacagagctggagactgtgatgatggactggctcgggaagatgctggaactaccaaaggcatttttgaatgagaaagctggagaagggggaggagtgatccagggaagtgccagtgaagccaccctggtggccctgctggccgctcggaccaaagtgatccatcggctgcaggcagcgtccccagagctcacacaggccgctatcatggagaagctggtggcttactcatccgatcaggcacactcctcagtggaaagagctgggttaattggtggagtgaaattaaaagccatcccctcagatggcaacttcgccatgcgtgcgtctgccctgcaggaagccctggagagagacaaagcggctggcctgattcctttctttatggttgccaccctggggaccacaacatgctgctcctttgacaatctcttagaagtcggtcctatcttttgcagattcattcaactttaatccccacaaatggctattggtgaattttgactgttctgccatgtgggtgaaaaagagaacagacttaacgggagcctttagactggaccccacttacctgaagcacagccatcaggattcagggcttatcactgactaccggcattggcagataccactgggcagaagatttcgctctttgaaaatgtggtttgtatttaggatgtatggagtcaaaggactgcaggcttatatccgcaagcatgtccagctgtcccatgagtttgagtcactggtgcgccaggatccccgctttgaaatctgtgtggaagtcattctggggcttgtctgctttcggctaaagggttccaacaaagtgaatgaagctcttctgcaaagaataaacagtgccaaaaaaatccacttggttccatgtcacctcagggacaagtttgtcctgcgctttgccatctgttctcgcacggtggaatctgcccatgtgcagcgggcctgggaacacatcaaagagctggcggccgacgtgctgcgagcagagagggagtaggagtgaagccagctgcaggaatcaaaaattgaagagagatatatctgaaaactggaataagaagcaaataaatatcatcctgccttcatggaactcagctgtctgtggcttcccatgtctttctccaaagttatccagagggttgtgattttgtctgcttagtatctcatcaacaaagaaatattatttgctaattaaaaagttaatcttcatggccatagcttttattcattagctgtgatttttgttgattaaaacattatagattttcatgttcttgcagtcatcagaagtggtaggaaagcctcactgatatattttccagggcaatcaatgttcacgcaacttgaaattatatctgtggtcttcaaattgtcttttgtcatgtggctaaatgcctaataaacaattcaagtgaaataaaaaaaaaaaaaaa

SEQ ID NO: 44624 - DNA, 557 bp, Homo Sapiens
tatcgaattcgtatcggccattatggccggggtatatgcttatatatatatatatgtatatgcttgagaaagtggtttttcaagatgtatgtgtacagtacacacatggacacgcttcagtcctctgacttcccatgtgctacctcatgtgtttctcttctcatgaggatttgcaatggatagttgtacaacctggggactgtcagtgactcattggtatcagcatatgctaaagaagctcttgaatccaatcttgaaacctgatctcccttcgtcaacattccccaataccaaactggcccgtttacccatacaaatgcacagtaaagggaagaacagcggtatttttcctagccaactgactctatcatttgtttaatgtttgctggtttttttctggttttgttttgttttagagcaggggtgggagtggctgtaacttcacaatcctaatacagtaaatgttttgcatcttccatgttttatgcaaaaacagacatttaaatcaataaataattgtgccctagactgaaggctaatgtttaggagaggaaaaa

SEQ ID NO: 44625 - DNA, 587 bp, Homo Sapiens
gtaggacatgtgctattgaactgagccaaacacactgtaaatatccacagactccctcccctgcccccatcccaaatgatcttgagatttcttttaaagaagtaaatttgtccaatggctgtaaactataaactactgtaattaagtgcaatttcccctctgtgtcctctcctctctgccctgtatataatactaaagtgtctattagttttctttgtaaaggtcagagtcaaaatttcaaaagtgatctgtcccctctcccctcatggagaaacatcctaagtgggaagtgaagccccttgtcctctcccgcgggcctggacacttatggggacagcataccttggactgactaccagctaactccagtctcctgacattaagacacacctctggatccctggaggggctgaatgtagtgtgtcagagtaacatgccagcttcctgtgggccaggagctcagccgtgcactccctaagaaaccccaggtcagggaaactggctgtttgatagcagaagaaaaagttgcagtctcagaaagccttccattaaaacaatttattttatcactaaaaaaaaaaaaaaag

SEQ ID NO: 44626 - DNA, 570 bp, Homo Sapiens
ctagatggtggaagacagcaatggagacctgtcctcatggctgtgactgagaaggatttgctgctctatgactgtatgccgtggacaagagatgcctgggcgtcaccatgccacagctacccacttgttgccaccaggttggttcattctggctccggatgtcgatccccctcccttggatctgaccttacatttgctaccaggacaggctctcgacagggcattgagatgcatctcttcagggtggagacacatcgggatctgtcatcctggaccaggatacttgttcagggttgccatgctgctgctgagctgatcaaggaagtctctctaggctgcatgttaaatggccaagaggtgaggcttactattcactatgaaaatgggttcaccatctcaagggaaaatggaggctccagcagcatattgtaccgctacccctttgaaaggctgaagatgtctgctgatgatggcatccgaaatctatacttggattttggtggtcccgagggagaactgaccatggacctgcactcttgtccgaagccgattgtatttgtgttgcacacg

SEQ ID NO: 44627 - DNA, 671 bp, Homo Sapiens
gggagaggttctagaatgtcatgtagcaaccagtttaaggactgggactcagggatccaactcccacagtttccctgtgtgaccctaggcatttgacttagcctttctgagcctcaggttttttgtttctgaagtaaaaggattggactaggtaatctccaagatcctaggaacccaggagaaagatgagaaaatgtacaagaatgaacactcaggtggaaatgctgcaatcctgagaagctcccaggatgaatgaaaggcacaggacctcttacccctcacccctgcccccctcaagagctggtttctcaaacctttctcttaggccccttcaaagggggaaaactaaaaattatacaagttatagttcaaggactttaaatagattatttatatgattgctcataaggatgaggctgtgaggagggaacaccttatttaatctaatgaaattccataggaaagaggcctttgtatattgaatcaatttatctgccttctcagtgcatctgtcatattctgaaagattctgggttgatcttttgcgataacctctatggctgtgagtgtgtgtgtgtgtagtgtattttttaacattttgtataatgatcggaggttggtaaaaagtaacacaacagtacttttttaatacaaaaaaaaaaaaacaacag

SEQ ID NO: 44628 - DNA, 632 bp, Homo Sapiens
  misc_feature (4)..(4): n is a, c, g, or t
  misc_feature (16)..(16): n is a, c, g, or t
  misc_feature (21)..(21): n is a, c, g, or t
  misc_feature (40)..(40): n is a, c, g, or t
attnggccctcgaggnccagnaattcggaacgaggggtcntgaaaaaaaattgagaaacattacctcatacacaatgaatgaatcagaggacagacacgggaatggcacgactgtgcagtgtgttactaggaaaaaagttcagaatcactgttctagagagcttcatttccattggttttaaaacattattctcatgtagaacagtgttgggtctcatactgttaatgttaatacgtaacaatgttcatgttaacaggcacctgttaatattaacagataatgttactgttaacaggtaagagaaattgctctaagtgcccaaactttatatacttcagttttaatgacaagcatttcagaaatataagagcggcagccagaccaaccagtttttccagatatcttgatgtgaacctgaccctactcctttagaagacagcctgttcatttttaaatagctttaacccaaactgttctatgaccattgtttcaagagacattaacacagttctgtaaatagaagtgtctatggacaaataagtttgggaaatgtggcatactgtatccttttcttaacatttgcatattaaagactctgagatatcctgcagtaaagaaaaaaaaaaaaaaa

SEQ ID NO: 44629 - DNA, 910 bp, Homo Sapiens
tatttgcaaagggaagcattttctacagaggataattaatttcaagaaaaatatcttgagttttaagaaataaacatctccagaaaaggagaaagtcgattttataaaatgtcgcaactctccaacatttggggtagtgactccttttttgttaggacatttgaaactagcaagcagccattgtttctaaagaattctggcttcacattgactcatgtttctttcactccattttgaaatagctaaaaatcattaaaactgtaaatattttgttgcttgggtaagcatcttctgggaactttgtatctatggtatataatcatagaattttatattttcatataaagctaatttttttctagtttcaactccgtcatagttttttttcctttttgtggtggatatgtgaattcaactttctgtgtattgaagtagcaaaaaccatctctacattccaaaagaatccaacatgtgttatttctttgaggcagtgattgtgaaagttgggttttctttttaattccattgaccatttgtgcaataggaattagacataattagtcactgaaaacattcgtcacattgacccatttggaacacagtgtgcttttatttatcctaaacattctgtcccgggggaggggtttctgtaccctgaaattttcctcttttctctctgtttaaacctatttcaaatcattccataaacaggggtccatcactcgtgtcacctgggctggcgcatccctttaaactacagcctacgggttttggggtgctcccacaacatatcacacacacaacaacaaaactctttcggcgcacccagcgctctgaaaatctttctacacccctctctggagcccccgccccacgtaaacactacagtgtccaaacaggtccccgaaga

SEQ ID NO: 44630 - DNA, 732 bp, Homo Sapiens
ctgcagtccagcctagtcatgggagaacagaacttacaatggatattaaatggtgccaccagttctccacaaaaccaagaacaaattcagcaagcatctaaagttgagaaggtgttttttaccactgcagtaccagtagccagtagcccagggagctctgtccagcagattggcctcagtgttcctgtgatcatcatcaaacaagaagaggcatgtcagtgtcagtgtgcatgccgggactctgcaaaggagcgggcatccagcaggagaaagggctgctcctccccaccccctccagagccgagcccccaggctcctgatgggcccagcctgcagctcccagcgcagactttctcttcagcccctgttcccgggtcatcatcctctaccttgccctcctcctgtgagcaaagccgacaagcagagactccttcagaccctcagacagaaacattaagtgccatggatgtgtcagagtttctatccctccagagcctggacaccccgtccaatctgattcccattgaagcactactgcagggggaggaggagatgggcctcaccagcagcttctccaagtgaagggcccatgtgtgctcacctctgggaaaagcgggtgagcaggaggcatgaggtacaatgcctgccatcatgggtcagaaatttgaaggatgaagaaatctactgttttgaaatcctcactttcagacgtattttctttattcaattccg

SEQ ID NO: 44631 - DNA, 459 bp, Homo Sapiens
gcacgaggaagacaccatatttaacactatatctcagtgatagggaaatagctgcattgatcttacatgagcataatcatccttatacttcatgaggggattattagtacaatccccattttactgtgtttgagttaaaaaccaaacatccctgtaatttaatttgaagattctttaacagattgcagcaaagttcattataaaactgttatggtgtcttcaaagacttgataaaataacactgagagagaattggtccatttgtatgctgtatttctattacttgccaaaaggaatggggttaagattaaacttgtttccattctcttcacatggatatacatccccatgtttaactgacacactgggggctcagttgtgtgctgtaatgtcttattaaagaagatattaaagaaaactaaaaaaaaaaaaaaaaaactcgagggggggcccggtacc

SEQ ID NO: 44632 - DNA, 874 bp, Homo Sapiens
aaaaaagctaagttataagtgaactgtttggctgcactgtatgtcacttttgcttgttgtcatgtgaacttggaaactaaggttactcgtgtgcataaaaattctaaatgaaagggtgtggtttccatcaatctgatgctgcccatcgcttgcactggggtctttgtggatcgggcaggagttttcagtgtgttgggtgttgctccttcctatgtgtcttttgaatctgaggctgacatttgcttggaaggccagacccttgctccatcagagagggcagtggcaaaggccagtgaggcagctgtgagttggacagggttcaggtgagatggtgttgtcatttgtgcttagtgttggtggtgctcagggtggataacacgggtcgttctgcagcccgcttcagcacaaataggcagcttaaggcctggctcacaggctgtggggttgatctggctctgcagaggccctaggcagcttgttgactgctgtctgttgatgacgtgtgtgcaaagcaggctctagcaacatgatcactgtccttgccttcctggttctttctctcggttggttgccagggcttgcagatcgcagtgaattttccttggggaacatcgctgttttgtcctagagtgaacttgtggcttatggccagtgctgtttggtggtctgccttcttttttatggtattttcttcctcagagcaaaagggctgcattttgcttatcagaagaaggtgcagatttaagggaattcatatgaggtggcattgtaattggcaggcccaggtggtcctgggttccagggttccaagcccaggccttttggggttggccccccttccattctcttgccccccccctcctgggaatttttc

SEQ ID NO: 44633 - DNA, 500 bp, Homo Sapiens
gagcggggagctgcacttctgggtgaaggaggctcgggacctcctgccgctgcgggcaggatccctggacacttacgtacaatgcttcgtgctgcctgatgacagccaggccagccgccagcgtacaagggttgttcgacgcagcctcagccctgtgttcaatcacaccatggtgtacgatggctttgggcctgctgacctgcgccaggcttgtgccgagctctccctctgggaccatggggccctggccaaccgccagctggggggcacacgcctcagcctgggcaccggcagcagctatgggctgcaggtgccctggatggattccacacctgaggagaagcagctgtggcaagccctcctggagcagccgtgcgaatgggtggatggccttctacccctcagaaccaacctggcccccaggacgtagccccaccaagcctctctctctggacccccatctcagggcctgcccttggctaaagtcaataaagtctatt

SEQ ID NO: 44634 - DNA, 582 bp, Homo Sapiens
  misc_feature (556)..(556): n is a, c, g, or t
ccgcccgcgtttttttgcctcattcctactgtcacacaggtcacgagggtggactccctacaatcaacaaagcaaacagagagcctgtgggaggggctgacagcagcagccggctgtttgggggatgatggaggtgacatcaggcagaggagagtgcagcctcacagtgactttctcagaggtgacagagatgatggatgagcagctggattttcgtgatgaaggacggaagcagcagcgggccggcaaggccatacctcggtgagggacaggtggacaacggtcacctatctgtagccaggggcagttgtgtggccagctgtctctctgggatgagtcaggaggcctggaggcttggggagaggtgtggagaaggagagaacatggcccaggccctttccttccccctgtgctgacagcattgctgtgggggtggcccactgccctcccctggccctcatgtccccccggggctggggtccgcctgcctgtgctgtgcttgcgacgtgcatcaataaaccaccatggcctgagggccctgctcgtctcagtccanaaaaaaaaaaaaaaaaaaaaacgcgg

SEQ ID NO: 44635 - DNA, 810 bp, Homo Sapiens
gatttatactacggtaatgagcgccggtagcccagacaagtacatgactaggatcagaaacccgagtagaaagtaagtcagcagaagagcgagttcgcccgtgctgtgaaagatgattttttaaaaaatgaaattcttgaagagctgcaccttaaaaaataagacaaagtgaaagtattgtattatgttacaaacaatgcaggctccttcctcatttaactttacaaccttgcgaagtgggtccaggagatttggagtttgtggtaaagccagtaatgggcattgtcctgcattcccttcccttcatggtttgcctcgatcctctctaagcttctatcctggcctgaataactcaaagataattggtctcagagatcaagccatatcctcaggccttatttccatcttctcatgattctgccatcatacctttgcttctccgctaatgaaatgagctggcaagacctctgttcattgtgaagtgcttctgaacagagcctaagaaaaaaggctcatctgaaagaacatggagaactctatttcgaaccaagcctgtttgaatgtgtgttagtctgatctttgatcatgtgtttccatgtaatgggagtctcgtttctataatgttcctaacgtttattgaaaaacctatggacctccttctttctcaatagctactttcttactgctttttgacacacataatatgcaacccaaattattctcttaatgtcacataattcaagtataaacatgtcgacagacactgtgggccaggagattacgaaaatttccaagaaaaacacacacaaa

SEQ ID NO: 44636 - DNA, 533 bp, Homo Sapiens
  misc_feature (393)..(393): n is a, c, g, or t
ctgctgcatcctgtgctccgcaggctgggccggagcctctgcccgcaggtttctatgctgtttcttagcacagaatccagcctagccttagccgcagtctaggccctgcttggactaggactccttgcttgaccccatctctggttcctgccctggctcctgcaccagccccagctcctgcctacatccaggcagaaagataggcaggggctcttggaagacgttccgtgctgtgacctccgagccctcctggtgggaagacagctggaaaggctgggaggagaagggaggggctgggggttcccaggagccatgcgtggcctgcagagtccattccatcatgatgctgtgcccgctatgggctgtgtccatgaccagaggctggagtggggngtgtgttagagcccctcaccgggacttgctgtgcggatggggcctgggcctccttcctacaggggctcctctgtgggtgaggggccctctggaatggcatcccatgagcttgtggcctctatctgctaccatctgtgttt

SEQ ID NO: 44637 - DNA, 549 bp, Homo Sapiens
ggaaccttaagtaagcctcagccaaaggttttatgcattggacttcctgtgcctgcccccaggggcaagactgatccccatgcctgtgcccatgacatctccctgaaagaggacaccatgacagcccggctttgccttgactgacccactgctaccccagaaataagaatcaagagcagctattgttatccttagagtgttttccgtctaggcccggctcgtgaacagccacatatccttgcacctgacactgtccccacacaaatagctggctttcgttgcttgttgaatgaatgagtgagttggctctatatccccttggagctggccggtaagatattagtgcctcattttacaagaagagaataggaaggaattaagcaatttggccaacagatacaagatagattccagagttttatctcccactttagggtggcagccagtaggccaaactccaaagaccgttgctgatgtctttttctgcctcccctctttgggttagtgtggtatgtacaagctcactcttgttgaaaattagaaaatagt

SEQ ID NO: 44638 - DNA, 619 bp, Homo Sapiens
gcagtgataatatgtttgagagcctcatcattttacttttgaaacaggaatgatttctccttaattgcttaaggccggggagcaaagtgtcttaacttctgtctttgactttcccagcgttgagtcatcaacactttgccaattagctcatggtcctggcaacctcagaaacccctgaagttttaaaaactttctcgctccccacgaccccagaatgaaacagctttaaaaatagccttaagcaaaaggatgttatttcattaaatttggtttaatggaaagaataaaagtaaatgaaaaacacaccctacacactagactccgaacactggtaatcagtactgcatagcaaactctttgggaaagaagacgaaaatgttattgcacatgtaaaatatgaaaacttaactctgctgtgtgttaggcaatcctgtaatcttttttgactcttaagagaaattcatttctgaaatgcttggttggaagactgtgacaatagctcatgaaattgagtgttatttttttctttcttttttagaaaaatatgtaaagtgcagtcttctgtattcctgcatattgtatatacctgtatatgttttcctgagcagttaaataacac

SEQ ID NO: 44639 - DNA, 656 bp, Homo Sapiens
  misc_feature (656)..(656): n is a, c, g, or t
ggcatcttcaagagcagaagcaaaccacatgtctcagctatattattatttattttttatgcataaagtgaatcatttcttctgtattaatttccaaagggttttaccctctatttaaatgctttgaaaaacagtgcattgacaatgggttgatatttttctttaaaagaaaaatataattatgaaagccaagataatctgaagcctgttttattttaaaactttttatgttctgtggttgatgttgtttgtttgtttgtttctattttgttggttttttactttgttttttgttttgttttgttttgttttgcatactacatgcagttctttaaccaatgtctgtttggctaatgtaattaaagttgttaatttatatgagtgcatttcaactatgtcaatggtttcttaatatttattgtgtagaagtactggtaatttttttatttacaatatgtttaaagagataacagtttgatatgttttcatgtgtttatagcagaagttatttatttctatggcattccagcggatattttggtgtttgcgaggcatgcagtcaatattttgtacagttagtggacagtattcagcaacgcctgatagcttctttggccttatgttaaataaaaaagacctgttttgggatgggcaan

SEQ ID NO: 44640 - DNA, 947 bp, Homo Sapiens
  misc_feature (627)..(627): n is a, c, g, or t
  misc_feature (691)..(692): n is a, c, g, or t
  misc_feature (706)..(706): n is a, c, g, or t
tgtgcttcagcgaccaggatggccaggccagagctgcagctgggggctcttttcctggtcattgggtggggctgagtgccacatgttcccacattaaaaaggggggtccagggctgtgtgagtgtgtctttctgggtctagggctcggggtagtttgggtcaaggactgtccctccagcagtcgcctcctcccaccctgagccccacagtcatctggccctttccctgctcaaccctccatcctaggctctgagcctcagaggacccagcccatgagagaacggggatctggggggcctctcacctgctcctatgaccttgctcccttttaggtcaccccattgccaccgtgcccctgggctggactcccgtgctcctcagggcccacccctgctctgtctggtacaggcccctgctgagtgggcccctctcctctgcccctggggtccatcccctcttgcccagggtccccatcctgtaccaagcagactgggccctaagacccctggcagaacccagcctctgctcacacccgccccagcttctgccacggcttcagtcagggccaggaggaacacgtgaaggagaaagagaaatgcaggagccgcggggctcccggttccttgngaagagggtgcccattgggacctttggcactggatgagccaataaacaaactctggcacctccnnaaacaaccaccaancccctccctcacagcaacaccgcataaactctacaacaacaaaaaaggggggcgccttctaaagtatccccccaagggcccaaagtttaccggtaccccagctttctttgtaaaaagggggccccctaaagggagccgcattttaaaaacttaggccttggccccgtccttttaacacatgtctagagacgggaaaaatagtcctccttggggaattttttcgaaaggaacctctcattcg

SEQ ID NO: 44641 - DNA, 443 bp, Homo Sapiens
cggaggtctgagcagagggaggcccccaagagtgccattgaccaagagacagcagacagcctgcctcctggggcgtgccggcacctgcttcagctactgcctcctgtatgcatgagccggatgctgggcaggatccctgcctacgcccgggcccgatttgcgctttgccggactggatggagtggaggaggcccaggccacagtaccaccccacctgcccaggcagcccctcgtcacctactccccgaagttaccagctcagctcgagtcttcagggctgggctcctaggctgcccatcctacttctaccctcactggcctccagtgggattcactcctgccctgcccccaccttcccagtcccacaggccacccctggcttgggctgggttctgtgaagttacgtatttattgagcttttggttcttttataaagacttgtc

SEQ ID NO: 44642 - DNA, 687 bp, Homo Sapiens
tttttttttttttttttcactggctggcttgatcctcagtggcaaaaggacccctgagccccttctccgagccctggagcactcctcgggacaccgagtggcctcagggctgggttcagagctcctcccgcagggggagcctcagaagtggaggcagctgctgatgggtgagtttacaacttcttatcctgcctaaggcgagtaggcatttttattccgtttccagtccttgagctcagcagatcaaaataacagtgaccctgcaaccccacagagcccgcgacacgctcgctttcttccccgccctgcccctttagtccccgctctggaaggccaggcagtttaggtgtaaataggtatcttttatggtttccaaatgaattatttgtgtgagagtaattaaatctgtaagaaaacctgttgagattcttcactatgaattatgacttctacaacatgtattttagcaaaaacacgatgctggcctccactggatagctcagtatgctgattgccagtgatagttctgtacgcgttaccaacagcgtctttattaaccctcttccacatccagtggaaatcattgctaggcggtatttgttggttggctgttagctttgctttatgatttcatgtttctttttaaggttgttttgcatgttgaatattaaatttttttttctgtgt

SEQ ID NO: 44643 - DNA, 568 bp, Homo Sapiens
attttttaaaccccatcaaaatagatttcaattgactgtttcccctacatcttttgagccacagtcgcccatcgaataagcaaatttgtttttgagaataaactggtaaccagtttgtgatgactctcagaagccttttggctgggttacagaagagtttctaagttcctagagagccatttaataattagttggtgagccagaggcttgacagagctgttacttatgtgtgagggctttattctcaggcagtagtttattcatcatttggtaagcccctccccacactcctctaatttaaacaagtagtgaaggcttatcttaaactgtgtagtaccttagacttggcatttatttttgatagagcagagataaaatattttgatggaaggaaatcaattttctgtaactgatgatgtgaaaattttattttctgggaaattatatagccattcaaaaattcaaagtatgttattatgattggttacaagagaataatgttacatgtttaattgtaatatttgtctcctatcattttcttccctttcagtcataataaatgatttac

SEQ ID NO: 44644 - DNA, 789 bp, Homo Sapiens
  misc_feature (668)..(668): n is a, c, g, or t
  misc_feature (771)..(771): n is a, c, g, or t
ctcctaaaaacccagaacagaagatcattaagagagtgattgctcttgaaggagatattgtcagaaccataggacacaaaaaccggtatgtcaaagtcccccgtggtcacatctgggttgaaggtgatcatcatggacacagttttgacagtaattcttttgggccggtttccctaggacttctgcatgcccatgccacacatatcctgtggcccccagagcgctggcagaaattggaatctgttcttcctccagagcgcttaccagtacagagagaagaggaatgactgcatgaatctacctgagttgctggcattgggaggccagttactggaaaggaatggaaaaaagaagcctccaaaagggaaaaacttctgacaatatgatgctgtgcgagaaatatttacagcacattaaaacgatctgtattattaaataaataattttcaaatgttaaacagtattaaatggcacctgattttgtgttaaattttagttccctgttgtttaatgcccccaaaatatgcagacctttgggaatataaaaatattgcacccacatgtcttaatggggctgaatttcagattatttgttacatatacttattatattgattgttgggttttgattttggtgcttgctgctgaaataaattgaaattaatatnaataaaatgatgtatttgtcacttgctgttaagtagaacaagaaggaacacttttatacacatatgatgggaattacattggatttgactatctacaaggagnactgccagttagaagaaa

SEQ ID NO: 44645 - DNA, 549 bp, Homo Sapiens
cttgaagtgtatgcttgggattctcaatggatgctggattctaaaatttgaatgggtaaaagcatgtctacgaagaaaagtatgtgaacaggaagaaaagtatgaaattcctgaaggtccacgcagaagcaggctcaacagagaacagctgttgccaaagctgtttgatggatgctacttctatttgtggggaaccttcaaacaccatccaaaggacaaccctattaagctcgtcactgcaggtgggggccagatcctcagtagaaagcccaagccagacagtgacgtgactcagaccatcaatacagtcgcataccatgcgagacccgattctgatcagcgcttctgcacacagtatatcatctatgaagatttgtgtaattatcacccagagagggttcggcagggcaaagtctggaaagctccttcgagctggtttatagactgtgtgatgtcctttgagttgcttcctcttgacagctgaatattataccagatgaacatttcaaattgaatttgcacggtttgtgagagcccagtcatcgtact

SEQ ID NO: 44646 - DNA, 781 bp, Homo Sapiens
  misc_feature (14)..(14): n is a, c, g, or t
  misc_feature (19)..(19): n is a, c, g, or t
  misc_feature (679)..(679): n is a, c, g, or t
tgtcttatggagcnctccncttgaaccctttgaaagttgcacgccctcttgagttggcacccgggaattcggccattatggccgggggagtaataatataatgattctggttgatctgaaaaatgaagtttggtatcaaaaatgtcatgaccctgtatgtaaagcagaaaacttcaaatctgactgtttcccattacctgctgaagtatgtctcctgtttcttttcaaagaggaagaagagtttacaacagatgaagcagatgaaactaggagcaatgaaacccagaatcctcataaaccatcacctagcaggctgtcaacaggtgcatctgctaatgctgtctgggataatggcattgatgatgcttattttttagaagctactgaagatgctgaattagctgaagctgcagagaacagtcttctcagttataacagtgaagtggatgaaattcttgatgaactaattatagaagtattacaagagtaactaattcactatgaacacttttgtcaccaggctataatttgcctgatgtctgtgagatttgataaatatatcattcaacctgtttatataaactaaagtttattactttgcttttcaatttttggttttttactttttgtgaaccaaatttcattaaaaattagcctttggtgtaaaaaaaaataaatntattaaaataaaccattgttgggccgctttggcccacaatgactttataacttgacccttttgccattcggccccaatttaagcctaacttgggccttcccc

SEQ ID NO: 44647 - DNA, 638 bp, Homo Sapiens
ctttgctccaagtattctaaatgtgtcccatcatgctttccactgacccaaaattcaccacagcatttctatctttatatttctgtctcaaaaatgaagagaagggggttatgggttaagttgctgccttttaactactttgtagctgtatttaatagctggaaacctctggttaaatttgtgcttacatgcactcctggcatagtcctattaaatccatatgaagccagatatgattgggtgcagatgtggtgttcctcatattatggtacagggccaaagacttgagacgtggtgttttacatggtgactcacattatgaatggatttactagaagaacattgctgctccttatttattgtagtgtgctgcatggaacgtatttatttgaaagcattaaaataaatgatcctagagcatgtgcataatgagaggactgtattctctctgctgctgttgaggttatattaagttccacatagcaattacagtatgccagttccactgaagacatgaaatctttagaggtttcttgcagtgaacgaaatgaattttaatgcctattatttctgggtactttaacaatatttcaaatatcattgaccactaatacttctcactgaagctaacacagtct

SEQ ID NO: 44648 - DNA, 713 bp, Homo Sapiens
  misc_feature (666)..(666): n is a, c, g, or t
  misc_feature (689)..(713): n is a, c, g, or t
gaggtgggagtggctgcagggacccctagtgtccctggtctatctctccagcctcggcccacacgcaagggagtcgggggacggacggcccgctgctggccgctctcttctctgcctctcaccaggacagccgccccccagggtactcctgcccttgcttgactcagtttccctcctttgaaagggaaggagcaaaacggccatttgggatgccagggtggatgaaaaggtgaagaaatcaggggattgaggacttgggtgggtgggcatctctcaggagccccatctccgggcgtgtcacctcctgggcagggttctgggaccctctgtgggtgacgcacaccctgggatggggctagtagagccttcaggcgccttcgggcgtggactctggcgcactctagtggacaggagaaggaacgccttccaggaacctgtggactaggggtgcagggacttccctttgcaaggggtaacagaccgctggaaaacactgtcactttcagagctcggtggctcacagcgtgtcctgccccggtttgcggacgagagaaatcgcggcccacaagcatccccccatcccttgcaggctgggggctgggcatgctgcatcttaaccttttgtatttattccctcaccttctgcagggctccgtgcgggctganattaaagatttcttagaggctgnnnnnnnnnnnnnnnnnnnnnnnnn

SEQ ID NO: 44649 - DNA, 535 bp, Homo Sapiens
cctgccccaccgcccagctccccccagaggccacctcgcccctccctctgggacctctccggatggggagtccttggccagggtctctgactctgtgtcacctgacatttgcccatgagagccgctgggccttagagaggccttggcccagctgaccggttctgaagtatgggcctccggggttagcagatgccagcagtgcctgcccgtgtccccatgtcccggcatgaaggacactgctagagagttaccatgcacaccgatggtttcctgtatcacagcccaaagaggttctctggtggccacagctgtgtgctcagtcagtgcactgggcaagctagaagtgttggggggttaatgtccccaggagcagcaaccctgagtcaataaggagcaggacctcagcttcattgtccttgagcaggacaattctgaagtgtattctacataaactctcagaggatgcccagcaggatggagtcccagttgcccgcagcagtaacccactcattcatgtacttcctgcgggggctct

SEQ ID NO: 44650 - DNA, 614 bp, Homo Sapiens
  misc_feature (21)..(21): n is a, c, g, or t
  misc_feature (579)..(579): n is a, c, g, or t
  misc_feature (581)..(581): n is a, c, g, or t
  misc_feature (590)..(591): n is a, c, g, or t
aacagggcctctacccccagnagctgcagcctctgttggaaggggaagtaaaagggggccctgagccaacacctctggttcagacctttcttagacgccaacaaaggctccaggagattgaacgccggcgaaatactcctttccatgagcgattcttccgcttcttgttgcgaaagctctatgtctttcgccgcagcttcctgatgacttgtatctcacttcgaaatctgatattaggccgtccttccctggagcagctggcccaggaggtgacttatgcaaacttgagaccctttgaggcagttggagaactgaatccctcaaacacggattcttcacattctaatcctcctgagtcaaatcctgatcctgtccactcagagttctgaagggggccagatgttgggtgcagatgtagaagcagccagtcacagacccattctatgcaatggacatttatttgaaaaaaattctcaaaagtttttttttttttttgggggggcgggggttctaaagctgtttttaactccgagattacaacttagaggaaccaaggaaataaagcaaataagatttaananaaaaaaaannaaaaaaaaaaaattcctgcggcc

SEQ ID NO: 44651 - DNA, 884 bp, Homo Sapiens
tagttctcaccttttgaaaatgcaaaccactgaagtgatttacagtctcctccattttggctggagaggtgttctgtttctgtgagacatttttctaattttgtggaacttcactttcctccttcttgcttatacgtgttgttagattatatgcaaagaagtcaagttactgatatccagtattttacagaggaagatgactttcaaaactagtcatatttctgtagaggaggaagatttttaaaacctttatcattcagcattgtattttatggatccccaggagaactaaaaaggagatgactctctaccatagttggtttaaaaaaaaattactctgtcagttatttatttattatttaatactaaactccaaactgaagtggctctgaggtaaatcagatatgatttaatttaagtttctttattagcagatctataattggaaggtgaccaatgtcactgttctaaaatactgtcctaaacaaccagaagatttatttcagctcatgaatagctgtctaaatctgtgtatgtagacatactatgaaactacctcttcacttattatgggggaagttcccttaataaaagtgtgacgattaagctctggtgttatgggtattttctcactctccctccttctattctttttaatggttaccttgcatacgcaggctcttatgtatagcttaaaatcattttagcttgtgggttgctcggaaaatcgacttatccaacgtcgtccagtcttatttcccgagaccggttgggcacagcaaggctaaaaggtacagggcgcgccggcccgtaccccatgggcgggggcaacggggccacgcagcacgtaaaaaaagggggcacccggaggagcgcacctgcga

SEQ ID NO: 44652 - DNA, 674 bp, Homo Sapiens
ctgaatggtactatacaaagcacccttttggccacattcctgtcctggagaccagccaatgtcaactgatctatgaatctgttattgcttgtgagtacctggatgatgcttatccaggaaggaagctgtttccatatgacccttatgaacgagctcgccaaaagatgttattggagctattttgtaaggtcccacatttgaccaaggagtgcctggtagcgttgagatgtgggagagaatgcactaatctgaaggcagccctgcgtcaggaattcagcaacctggaagagattcttgagtatcagaacaccaccttctttggtggaacctgtatatccatgattgattacctcctctggccctggtttgagcggctggatgtgtatgggatactggactgtgtgagccacacgccagccctgcggctctggatatcagccatgaagtgggaccccacagtctgtgctcttctcatggataagagcattttccagggcttcttgaatctctattttcagaacaaccctaatgcctttgactttgggctgtgctgagtctcactgtccaccccttcgctgtccagaattccccagcttgttgggagtctacgtcacggcttgtcttgggaaccaatccgtctctctttcttttctttgaagttcccaataaaatga

SEQ ID NO: 44653 - DNA, 657 bp, Homo Sapiens
cgtccggttttgtagttaagatgaccagacagctaaaagctgtgatgggaagtatggactgctcctatttatagtctcagaaaatggacctttaggtctctatccgtattggcaattattagaagaaagttacacccttttgaaagtacaaaagctgtcttggaatttccccctcttctccctatttatgtccccttagaatattttagggagcctataattattttctaaccaaggaaaaacttaagtctctttaagaagcaattacttttcataacatcagattgaataacccaccttgctgttcagcccacatcctactggaaacaaaaggtaagaaacccattttctggttcttgattgtttgggtctgaattttgtttttaaaactaagctaagtttaatgttttttaaaatgctgtttggaatatgaatagattccccataaaatgatttttcctaagttttatgctttagtaaatattcagtgctcacgtctgtgcatcatagtgcttgcgtttaatatgatttattgtagaatctcaacttttcttggtgtttgttgtctttgaaacattgtcttggtcattagggctggtgttttcacatttctgtggtcaaggtggatttcttatgtgtgcctttttgcttactttg

SEQ ID NO: 44654 - DNA, 411 bp, Homo Sapiens
  misc_feature (73)..(73): n is a, c, g, or t
  misc_feature (282)..(282): n is a, c, g, or t
tcagacattgaagaaaatattattttaacaatgtaaagcaatatgatttgttactataattaacctgtataanagatacattttatggtggtttcagtaggtcattttaaaaaccaatgtgcattagttttcaagtataaggtttaagtaatttggtttaataatcagaaaatattcaatacagtgttggatattctgtcatgcactatttttcagttgacaatttctgtattttaattgaatactgtttcttcagtcatggttattgcactttatcctgantaataattcagaaattgggttttggttcagtgattctcaagaaaaagatctcttgcccattaagaagtgtatcaaaatctcataaggaatgcgggagagaagggggctgtagagtttgaaaaagcataa

SEQ ID NO: 44655 - DNA, 866 bp, Homo Sapiens
aaaatttgatgtttctattgatatgccagacctacttgatatcaaccatctccgagccagggggttacagccaggagaggaagaacttccagacatcagcccccccatagtcattcctgatgactcaaaagatcgcctgatgaaccaattgatagacccatcagacatcgatgagtcatcagtgatgcagctggccgagatgggtttcccgctggaagcatgtcgcaaggctgtgtacttcactggaaatatgggcgccgaggtggccttcaactggatcattgttcacatggaagagccagattttgctgagccgctgaccatgcctggttatggaggggcagcttctgctggagcctctgtttttggtgcttctggactggataaccaacctccagaggaaatcgtagctatcatcacctccatgggatttcagcgaaatcaggctattcaggcactacgagcaacgaataataacctggaaagagcactggattggatctttagccaccctgagtttgaagaagacagtgattttgtgattgagatggagaataatgccaatgcaaacattatttctgaggccaagcccgaaggacctagagtcaaggatggatctggaacatatgagctatttgcattcatcagtcacatgggaacatccacaatgagtggtcattacatttgccatatcaaaaaggaaggaagatgggtgatttacaatggacacaaagtttgtgcctcagaaaggccccctaaagacctgggctacatgtacttttaccgcaggataccaagctaaacctcaaatataaaaatgggcgaaaagaaagcatacggcctttttaatttggccaaaaaaaaaa

SEQ ID NO: 44656 - DNA, 741 bp, Homo Sapiens
ccccgcgtccgggtgactttcactgcccctcgagccgaccttataattattacagggattttgaagctgacatcactccagaagagctgttcaacgtcttctttggaggacattttcctacaggaaatattcatatgttttcaaatgtgacagatgacacttactattaccgtcgacggcaccgacatgagaggacacagactcagaaggaggaggaagaagagaaacctcagactacatattctgcatttattcagctacttccagttcttgtgattgtgattatatctgtcattactcagctgctggctactaatcccccatatagtctgttctataaatcgaccttgggctacaccatttctagagaaactcagaacctgcaggtgccttactttgtggataaaaactttgacaaggcctacagaggagcttctctgcatgacttggagaaaacaatagagaaggattacattgattatatccagactagttgttggaaggagaaacaacaaaagtcagagctgacaaatttggcaggattatacagagatgaacgattgaaacagaaagcagagtcgctgaaacttgaaaactgtgagaaactttccaaactcattggcctacgcagaggtggctgagaggataatggtcctacgcagggctggggttttgctacttgttcctatttatgttcctgattccattttataatacaaaactaggtaatgatgaaaaaaa

SEQ ID NO: 44657 - DNA, 675 bp, Homo Sapiens
cagatgacggctgctcgaagaacaatgtcagaaactcgatgaatgtgttgatttgagaaattttactgacagaaatgcaatctccctagcctgcttttgtcctgttattttttatttccacataaaggtatttagaatatattaaatcgttagaggagcaacaggagatgagagttccagattgttctgtccagtttccaaagggcagtaaagttttcgtgccggttttcagctattagcaactgtgctacacttgcacctggtactgcacattttgtacaaagatatgctaagcagtagtcgtcaagttgcagatctttttgtgaaattcaacctgtgtcttataggtttacactgccaaaacaatgcccgtaagatggcttatttgtataatggtgttactaaagtcacatataaaagttaaactacttgtaaaggtgctgcactggtcccaagtagtagtgtcttcctagtatattagtttgatttaatatctgagaagtgtatatagtttgtggtaaaaagattatatatcataaagtatgccttcctgtttaaaaaaagtatatattctacacatatatatatatgtatatctatatctctaaactgctgttaattgattaaaatctggcaaagttatatttactttaaaataaaataattttattgcaa

SEQ ID NO: 44658 - DNA, 947 bp, Homo Sapiens
tagttctagatcgcgagcggccgcccttttttttttttttttttttacttgaagtagattgtctgaataggcatcctcatctatatttacccaaaacctcgcttactgtcatgtgcactacaaattgcaatttggaaacctactgtattgaaattctgtcagtttatggttcttgaagactgatgtcctttcccaaacactggttactgcagcagcatttttaatgtgtaagtgaagaaaaaaggccactaaggccaaagattttttaagaatcattgtacaaatcattatgttaaactatctaagctttgctgtaatactgttttctcttcaatatgtgatggtacaggaaggatgttaaatgaaggggtggtattgcaggagagcattttaaatggcagaagtaaaaagttataatatttataattttgatgggtttaagtttatttttgtagggaagatttttctcccctaaaatagtttctagaatgggaaaattgtttccattattaaaaattgaagttaaaaaaaaaaaaaaagggcggcccgctcaagagaatcccctctaggggccccacgcttacgcgtaaccacccttatcttgggcaaaagggccccactatagtgacttgaaaatcataccccaagagaccccgcctagcctatctagaaaaccccccagcacgggggaacaaatcggtaaccctcaggtaaacactttccctaagggaacccctatcactgcctattagtggcccccccaccatcgagaggacaaaccccaccgccaaaaaaaatattttaacaggcccctgaggggcgccagatggctcccaacactgcacaagtgaggaactaacgagcgcccaataacccctcgatcgtggcactcctcactattgccgctcggcccttctgagcaccaaggtgatgccccttccgccgca

SEQ ID NO: 44659 - DNA, 625 bp, Homo Sapiens
ctgagccgtggctcagtgacaaaccaggcacccaactatgcaaggcccctgcctggtgggcatcctaccctctggactgggcccatggaagccactgggcgggcagctggggtgtagttcatgtgaagccccattcccctcacgcttttggggccactgtgaatggggccaggaaacggatttttggtgcagctgcattccctaatagacctagttccctccacgttagtgtagacatggccttgggggctgagcgcagcagccaggctgccagggctgggggcgggtaggaggcacggtagttggtgggtgggaagagggcctgggtggtggcggtcagttagcctggctgggtgaggttggtgaggttgcggggcggggtggtgaggagagcaggggtcccagggaggcattggggtgctgggtaatgacctcggccctgggtttctcctctccctgcgggacaggagcctcagaaagggccaagggcaaggtgggcttggggggctctgggaatctcagctctagccctgtatggccaggatctgctgtctccgtcccctcctgggccccagcagctgtcctgcagctgtcagcaggagggcctggctttaataaagagtgg

SEQ ID NO: 44660 - DNA, 476 bp, Homo Sapiens
  misc_feature (9)..(9): n is a, c, g, or t
cacctttgngttcagtgaagtggttgcactatttaacaaagtttctctgtcactcagttccacaggtcgagacatgtcagtcaagatttcaatgcccttttccagggccttctggaatgactcagaaatgatggttggatgaatccctttctgaagaagcttggtacaagaatctaagagggagccagcaatgatgactactgatgtggtgccatctcctgcttctatatcttgagccttagacagctccaccagcattctggctgctggatgtaatacttgcatttgtttcagaatggtagcaccatcatttgtaatggttacatcaccttttccatcttgaatcattttatccattccttttggtccaaggcttgttctaatagcatcagcaaccgctttggcggcggaaatgttgctgaagcggatctgggctggcttgtcgcggtcctgataggcgcctttcccgcggccgc

SEQ ID NO: 44661 - DNA, 697 bp, Homo Sapiens
taaatattttctgatgttactagctatgggaaattagaactggcacaaccctgacattactaagtggaaatgttaggatttttcggcatcgcatgttagaatctctaaaatttaaacattcctgttaaatgactaaggtttgcttttatcaatatgaattctgaaggccaatatcataccattaactatgaaagcttttaattcctaaaaatagttttagagatattcaagcaatgctctcctaatatccatacgcaagtgtgtttatgacacaaattcactagtctgtttaaaaatgaattctttatattgactggtgttccacatatttcagtaatttctgttatgagaggacttgaaatagcaaattgccacacagttaactggatagaccacgtacgtggtgatcataaccacttggtactacacccagaaactcaaaattgtctttctcctgatgagatatgggtgtccttttgtacgtctaggcctaggtaaccagtggagtgattatattagcaaatgtgtttgtatccagagtcttcctgtcattgtaataaaaaatttatttaaaaaaaaaaataaaaaaaaacgaaggcggccgcaagcttattccctttagtgagggttaattttaccttggcactggccgtcgtttttaaaacgtcgtgactgggaaaaccctggcgttacccaa

SEQ ID NO: 44662 - DNA, 902 bp, Homo Sapiens
caggataggcttacctttcccacctgtgtggctagcacttcacagtttacaaattcctcccacctccactcagtgacacatgctgttctaacacaggtcaggcaggcattacagtccccatgttcagaatcaaagacctagcctcagagaagtgaagaaacatcatgccaaggtcattgactgccaagcggtagaggtggggttgcatccagagagcttcccggtatgcctctgcacaatgccattccttggccagctccctccaccccaagggacccagactgcacacttaacaaacaggacacaggtgtctttgaacaaacttttttgtattattatttttacatctagaataaattatttaaattatttcacagcaagggagagggataggtaatttttatcagatatttttttaaaccatctgttttttaattacatttttgtttatgttcttgagctgatgtagtggaacttgcctagcacattcaggtcccagccagttggcagagcatgctctcatctccttattccataccctgggcgtcccctttctgttgactcaggaactttctgagaatgaggacagcactaggagatgagctttggcaggtatccaccttaacgctacaataattgtgcttcctgaaacaaaacttgagattgtatcatagaaggaaacaggaagtccgaaatcaaatctatgctttttaattgaaaccgtgcctgaaacagctttgactgattgttcactgttgtttcctgaaaattcctttgtacctttggtgaacaacatactgattatcacttcaacgtgacaactaactagatgtggaactatgccacggcacattattgtaccaaattattaaactccgggcatttactacaacaacaaaaaa

SEQ ID NO: 44663 - DNA, 572 bp, Homo Sapiens
ttgcttttctaaagcaacaaataattctccaaagaaggggatgaaaatgctagttcctttaagcacttactgactgtaaagttggtccctgcttaaattcatacccatagttttgagtcggtatgacaccactgcagtgtgagcaaggtgaatccgtgtgccatgcatggaccaccttgggataccgcagcaccatcaacatccgccttgctgatggaagccacacacgctgcccagcccacagcagtcgcacgcagccgatgggctcggactcttagctggcaggctaggacacacagtgaacattaatgtactgtgaatcgttcctgataagtgaataaaacattgtgaccaaacaatcagcttattcacttatcaggaatcgactgttctgctaatttgctgttgttgtttttcatctctgttgtagttcactatttttgctgtgttctgttttctcctctcatgcttgggcaaatcactgggaatattatcttcatgtgaccatgaaacgtttctattgagtgaaaatgatatcttaacaaaatctatgcacttgctttcaggaacct

SEQ ID NO: 44664 - DNA, 568 bp, Homo Sapiens
tcaaaaacaaaaaaacaaaattcatgttactaaaagacaggtagccatatacagacagtatatgccctattttttttaactgactcttaatgaaactttaattttacttaattaagaaatggaatttatatacaaaaatattttccatttccgttattatgctaattgttgtatgaaataagtgcaattatacttctcttttgagatatccaagagtatattcttgctctgtatagagaatatcatctgatagtgtcttatttatattaattaatgtctttgaaaagggaaaagtataaactggccttaaaattgtccaattatagttttataaccagtctattaaaggtgtttgtttaaaatggatatagttttagatttgtggtaatgctttggtattttcttggggaagaccttcacctttgcaaacttccctcatgtaaggaaggtactttaaatgtagcagccactgacatttctttttttaaaaaaaatttgagaagtctacttccttttaacttttttgggcttcagctaaaaaataggataagaaattaaggtctattcc

SEQ ID NO: 44665 - DNA, 1106 bp, Homo Sapiens
  misc_feature (490)..(593): n is a, c, g, or t
ggaccggtccggaattccttgcatgaaaggagctctaggaaagaaatacatggagaagcacacatggctcccctgtttgaaaaagggcctgaataatactctgcttctgcctcatgacatcagatgctactgttttggtttttttctttgagccccaattcaccatttcaggatgtggatgggggcggggttgggggtaaaaacagctataaaaagcaactgcagatgctgactgactgcagtgggcagggtatgtagctgctccaagatgacttgcatcataccccaattactgctggcatcttagttgagagtataatctgcttggttgcctttttatgggaataaagagaataaaaggtattttaatagaataaagaaaaatttgaaaatataatggaaggtatttaaagagccacccacatagcttcaccaacccttctcacacatcaactcataaatcatcttaaataaaagtcattggtatgannnnnnnnnnnnnnnnnnnnnnnnnnnnnnnnnnnnnnnnnnnnnnnnnnnnnnnnnnnnnnnnnnnnnnnnnnnnnnnnnnnnnnnnnnnnnnnnnnnnnnnngggggggggcccccctaaaaaacccccccggggggggcccaatttttcccccccccccttttttttttaaaaaaaggggccccctaaagggggggggccttatttaaaaaagggggcgccgggggccccctttttttaaaccccccgcgggggggggggaaaaaacccgccactcgtggggaaattttttggggaggaaaaaccccttctctttcggggggggggggggacaaatatttggggaaaaacctccctccccaaagaaatttttcccgcccccccggggggaaaaaaaaaaaaattttttttaaagggggaaaaaaggggggcaaaaaaaaaaaccgcaaaattagtctcccgccccgttaaaaaaaaattttctctctttttccggggaaaaagtttttttttttaaaaatattttttcccccccccgcggacgcgtgggggggcccttccttgggggggggggggggttttttttaaaaaacaaccgaaacgccctccgagggg

SEQ ID NO: 44666 - DNA, 597 bp, Homo Sapiens
atgtagaaatggtagtaagtgccaaggccccagaaccctcatgtttgggtccgactcccacattgccagagactaggcagctcacacaggtgtcccaagctgtctttctcacaggccgcattgaaggcatttatgaaatgagaccccctcttcctcatccgtagtgacagggctggcctgaccgtggagaaatcagatttgatcatgatagcttccactccgtgactggtcacgatctgccaggcgctgtgctaaacactttcataggccttgtccccctccatcctgataacaccccagtgaagcaggccctgctcttcactccactccacaaagccaaggctgagagaggttaacagacttacctaaggtcacacagctaagaagtcgtgaagctgggatcgaatcaagtctgtgtttatgggtttaactatcatgttgtggccccaaccccatttgacctagcctggctggtgggccttcttgcagtagcttcccctggagaagaggaaaagcaaaccttcattgagacccaagcggtctctcctgtgctctgtgacaataataaagttccagcccttgaaaaaaaaaaaaaaa

SEQ ID NO: 44667 - DNA, 708 bp, Homo Sapiens
ctcaagcgctgcagaagcatgaggtgagggcctgcagcgctctgtaccgtttagggtgttggaccagccgggagcctggcaggcctggcccagcggccagggtgagtgttctcagaccccgggcagctggtggttctccagggccaggtaccccttttgtgtgtgcgacctctgactaggtccctgtgggaatggggcagatggcggccatcaccactgggtcccagggcagaagcttagataccggccttgagcagcccgaccttccaccgctgcctggatcccaagcctcagccgacccaggggaccttggtggcaacggtgtgactgacagcaccacccctagcctttgcatgcccaggggtcgagagccagtatccggcccagacaatgccacccgccatggaagaaaagctgaccctgcccacctgctgcagacccgggccccgggccgaggttgctttctgtgacgaccgcctggtgacgctggacaccaggagggttatggcactgccctcccctcctggagcccctggcactgaccacctggacttgacctgactcctggtcactggccaaacacccatcctcaccccagccaccccgggccctggctggtgccgtgtgacacctgtagcccacctgtgtgtctttgctccgcccacccctgcgtggcgccggtcaggcgcaaacctggcgccagtgtct

SEQ ID NO: 44668 - DNA, 904 bp, Homo Sapiens
  misc_feature (599)..(599): n is a, c, g, or t
  misc_feature (756)..(757): n is a, c, g, or t
gcagctgcaggcggagggcctgagcccgcgcttccaccaactggacatcgacgacttgcagagcatccgcgccctgcgcgacttcctgcgcaaggagtacggggggctcaatgtactggtcaacaacgcggccgtcgccttcaagagtgatgatccaatgccctttgacattaaagctgagatgacactgaagacaaatttttttgccactagaaacatgtgcaacgagttactgccgataatgaaacctcatgggagagtggtgaatatcagtagtttgcagtgtttaagggcttttgaaaactgcagtgaagatctgcaggaaaggttccacagtgagacactcacagaaggagacctggtggatctcatgaaaaagtttgtggaggacacaaaaaatgaggtgcatgagagggaaggctggcccaactcaccttatggggtgtccaagttgggggtcacggtcttatcgaggatcctggccaggcgtctggatgagaagaggaaagctgacaggattctggtgaatgcgtgctgcccaggaccagtgaagacagacatggatgggaaagacagcatcaggactatggagggagggnggctgagacccctgtctacttggccctcttgcctccagatgccactgagccacaaggccagttggtccatgacaaagttgtgcaaaactggtaaacgtctgcttcggagcttgctgcttaataaatggtggtggaaatgaatggaaaaaaaaaaaannttaaaaaaaaactccaggcatctatggtccggggcgggaaaaaaaaggtaatggaatgggcacatggggccataactggtttcccgaaccccacttttcttgggaacaaaggggaaaaaattggcccggctcccccccaaagaggga

SEQ ID NO: 44669 - DNA, 482 bp, Homo Sapiens
ccagatggccccaggttttcctttaggtctgacatcctgagggtcattcatcccatgcccagttccccccatcctactcctaacagatgtgaccctacttgaggccgccttggcttttgggtcaccctgtctcatcccatcaccccaaacataccctagtccttcagcctggggctctggcatctgagcccgagctcctgcccctgctgtgggaaaggtggggaagaaggggatctccctcccgggcccacccagctgcccagcctttgcccactcggggagcagatcatgcatgccaatccctgttgccgcatggagctcctcagcccactgacctctccgtgcctggtgcaggccaggcccccgtcttccgcctgcctctgcttccccgtcatgcatggtggtggtgtttctacggtgtctggttctgtgcccgtctctgagacagtctctgtgtggaatttgccttaaactgaagtaaa

SEQ ID NO: 44670 - DNA, 994 bp, Homo Sapiens
  misc_feature (572)..(572): n is a, c, g, or t
  misc_feature (576)..(576): n is a, c, g, or t
  misc_feature (580)..(580): n is a, c, g, or t
  misc_feature (583)..(583): n is a, c, g, or t
  misc_feature (586)..(586): n is a, c, g, or t
  misc_feature (593)..(593): n is a, c, g, or t
  misc_feature (599)..(599): n is a, c, g, or t
  misc_feature (601)..(602): n is a, c, g, or t
  misc_feature (629)..(630): n is a, c, g, or t
ttaaagcaccactacaatgtccattttaatggcctggaatgcaaaacgcctgaagaatacaaaggatggtctgtgggaaaatatattagaagttactatgaagaatgccccaaagacaagttaccagcatatcctgagtcatttgaccaagacacagaagatgatgaatgggaaaaaaaacatagagatcacaccgcaaagaagcaaagcgtaataattactatagtaggataaggtagaaattgttctgattgtaattagttttgtattttctatactggtgttagaaaacatatgtttacatttgattaactgtgttgcctatttatgcagggtaatccagctaaaggaagctttctttaattataagtattattgtgactattatagtaatcaagagaatgctatcatcctgcttgcctgtccatttgtggaacagcatctggtgatatgcaattccacactggtaacctgcagcagttgggtcctaatgatggcattagactttcataatgtcctgtataaatgtttttactgcttttagaaaataaagaaaaaaaaacttggaaaanaaanaaanaanaanaaaaaanaaaaanannaaaaaaaaaaaaaaaaaaaaaaaaaannaaaaaacaacaaaaaaaaccaacaaaaaaaccccaaaaaccaaaaacaaccccccccaccaaaaaaacaaaagggggggggcgggcgccccttaaaaataacccccgggggggggcccccattttacccccccccccgttttttttgttagaaaaggggcccccctaagagggggcggcataataaaaaaaaaggccggggggggcctttttattaaaccgcggggggggggggaaaaaacccgttcctgggggacttctctgggagaacaaccctctctcttgggggggggggcatatagggggagaaatccctcctccaagaattattaagcccttcgggggaaacataaaaatttttttag

SEQ ID NO: 44671 - DNA, 711 bp, Homo Sapiens
gccaatcaggtatattattgtgatgtccgtgggagcatgcaaattagaagacagtgtgtgggagttcctcagtattgaattacatgtgtgcactcaggcctgccagtcactgaattctgacttgtaaagggtttaacctgctgttccaatcattgaggaccaatttgcttttggataagattggaaaacatttatggagactttcccagttaaatctatgacagtgtccacttaaatagtgcaatttagtatattctcagataactgcaacacaaaattgaaatgtgccagtatgtcatctttctacctggaagatactgtatattggaaagtttatgcttctctcaataaatacatgttattaaataagccatatcacagtttaagaaatgtatatactttatcatatgccctttcagaaaccaggtattttgcatatgattgattttagaaagatttgaagctggggtttgtccatgttaattaagatcacagtatatatatatatatatatatgtgctgtattggcaactttcacatgtaatttcctatacacttattaaagtatgtttgccatgtggttttattacataaaaatgtccgtctcttaaaaaacaacaataaacatacacagaaacaaaacaaagaacaatcagcacaaagacaaacaacaaggacacaaaacaaaaacacgaggcgggagacaaagaa

SEQ ID NO: 44672 - DNA, 938 bp, Homo Sapiens
tgacactgggccgggatgaaaagccacaggggggatggggagggccaagggccagggccgccaccaagtcgttcacagcagctgcttggtgtcctctctgcaggcctgctcaaggtggtgttcgtggtcttcgcctccttgtgtgcctggtattcggggtacctgctcgcagastcattccagatgcacccctgtccagtgctgcctatagcatccgcagcatcggggagaggcctgtcctcaaagctccagtccccaaaaggcaaaaatgtgaccactggactccctgcccatctgacacctatgcctacaggttactcagcggaggtggcagaagcaagtacgccaaaatctgctttgaggataacctacttatgggagaacagctgggaaatgttgccagaggaataaacattgccattgtcaactatgtaactgggaatgtgacagcaacacgatgttttgatatgtatgaaggcgataactctggaccgatgacaaagtttattcagagtgctgctccaaaatccctgctcttcatggtgacctatgacgacggaagcacaagactgaataacgatgccaagaatgccatagaagcacttggaagtaaagaaatcaggaacatgaaattcaggtctagctgggtatttattgcagcaaaaggcttggaactcccttccgaaattcagagagaaaagatcaaccactctgatgctaagaacaacagatattctggctggcctgcagagatccagatagaaggctgcatacccaaagaacgaagctgacactgcagggtcctgagtaaatgtgttctgtataaacaaatgcagctggaatcgctcaagaatcttatttttctaaatccaacagcccatatttgatgagtattttggggttgttgtaamcaatgaacatttgctagttgtatcaaa

SEQ ID NO: 44673 - DNA, 566 bp, Homo Sapiens
agggcggccgggagggcgagcgagggagaggagggagagggggaggggaggagtccagggagaggcgggatcacggcccaggctgctgacacccgcgcgtggggaggactcgggccacgaaaggaaagaaatgtataccgtatctatctacccgacagcagcgaccgagacccggtgggacactccccttctccccactttcacctccccacccaaactttataaaagttgaaaaaatatcatttgactttttatagaaaaaaaaaggaaaaaataattgagaaagtgttcatctgaggactgcatcagtggacactggtatttatttatgttagctccaagcggaccggtggttcaaaagtgcattatttagtttgagctctgtacgtaaaaaggaggtgggaaaaattttaaaacttgagggtaaaaatgtggaaaacaaaccctcccatcccttgtagattataaataaaagcaaaaccgccacagaactagaggtcttctctttaatgttactttaaaattgctatgattgtattggacgttatttaatgtctgattgaaac

SEQ ID NO: 44674 - DNA, 669 bp, Homo Sapiens
cacaagttcaactgaccatatccttccatgacctgaatagatgctatcctttatcacgatgttcaattgcctttgaaagagagtagtccaggtatattcctgatcaaaatttggcatttttgatgatactactctacacagatcagactcatgtgcagaatcgtgcctggagagagaggtttggttaagacagagatttctggaaacattcaaattgcaaatggaaacttgaaacccacaatctaatgaggaatgtactggaaaaataatctgaagagttgacaaattgtgtactagattgaacacatggaatgcaatgcaatgagactttctgcactaaaacttatcctcatatgtacaacaatgatgtgtgtattatataacagtgatgtgtacatttctgacaccccatacataatatacacagtttgtataaatgcatacatttaaaaatatatatgtacaatacagctaacataaaactgtagtacgcctgaaggatattactagtgcctaatattgagtatgagtcactgcgtgttcgcatcaacttggaagtgcagtaattgttataaaattaatcagtgcagccaacattatttatgaatcacatctttgaaactgtgcagtagcatatacatatatatttttaaataacatttttcacag

SEQ ID NO: 44675 - DNA, 699 bp, Homo Sapiens
ggtaaccaaaatgacagccaagaaactttcagaagcattaaaaaaatagttgaagtatatcacttctcaccaagtgggtagagtcagttggctgtttgtcccttgttttttatttattccataattatgtttgtgctttttgttttgtaaacagtaatggaacgtacatttttattttgtttagaagacaactttgattcaatctttcaagaactgttccattcttggtttcttcttagggggataaaagttaccagttaatttgttttgagatatttaagcattctttgagttatagaattgtgatgcagggatttgtgaatgagacatttacatgtgaaaggtgacttcactagttacctgcttgagcagagtaaagtgtgtatatgtacataaaatgtaagtaatcttaactccattgtgcagtgccttttagatgttccgctttctataaagtcttcaaatttttgcatatatattatatatatatgatgtaatgttatagaaatatatgtataatatacatattttttccaggggtatctgatagctctgtattttgttatggaagtttgaagaaaaagtattttactcagaaattaataaaaaatacttttaataaaaaaaaaaaaaaaaaaaaaaaaacatgtcgcgctcggctcgagacttctaacatcgttgccgcgccatagtatgacg

SEQ ID NO: 44676 - DNA, 848 bp, Homo Sapiens
  misc_feature (707)..(707): n is a, c, g, or t
  misc_feature (737)..(737): n is a, c, g, or t
  misc_feature (741)..(741): n is a, c, g, or t
  misc_feature (837)..(837): n is a, c, g, or t
cagagtctcccagtggattttctaagcacattcaatccaatttggacttctctccagtaaacagtgcttctagtgaagaaaatgtgaagtactccagttctcagccagaaccccgcacaggtctttccttatgggataccagcccctcatacattgataaattggtacaagggatcagcttttcccagcccacatgtcctgatcatatgcttttgaatagtcagttacttggcaccccaggatcctcacagaacccctggcagcggttggtcaaaagaatgacacgattctttaccaaattggatgcagacaaatcttatcaatgcctgaaagagacttgtgagaagttgggctatcaatggaagaaaagttgtatgaatcaggttactatatcaacaactgataggagaaacaataaactcattttcaaagtgaatttgttagaaatggatgataaaatattggttgacttccggctttctaagggtgatggattggagttcaagagacacttcctgaagattaaagggaagctgattgatattgtgagcagccagaaggtttggcttcctgccacatgatcggaccatcggctctggggaatcctggtgaatatagtgctgctatgttgacattattcttcctagagaagattatcctgtcctgcaaactgcaaatagtagttcctgaagtggtcacttccctgnttatccaaacatcttccaatttatttttgnttgntcggcatacaaataatacctatatcttaattgtaagcaaaactttggggaaaggatgaatagaattcatttgattatttcttcatggggggttagnatctgaatttg

SEQ ID NO: 44677 - DNA, 945 bp, Homo Sapiens
  misc_feature (639)..(639): n is a, c, g, or t
  misc_feature (809)..(809): n is a, c, g, or t
  misc_feature (844)..(844): n is a, c, g, or t
  misc_feature (847)..(847): n is a, c, g, or t
ataaactcattttcaaagtgaatttgttagaaatggatgataaaatattggttgacttccggctttctaagggtgatggattggagttcaagagacacttcctgaagattaaagggaagctgattgatattgtgagcagccagaaggtttggcttcctgccacatgatcggaccatcggctctggggaatcctggtgaatatagtgctgctatgttgacattattcttcctagagaagattatcctgtcctgcaaactgcaaatagtagttcctgaagtgttcacttccctgtttatccaaacatcttccaatttattttgtttgttcggcatacaaataatacctatatcttaattgtaagcaaaactttggggaaaggatgaatagaattcatttgattatttcttcatgtgtgtttagtatctgaatttgaaactcatctggtggaaaccaagtttcaggggacatgagttttccagcttttatacacacgtatctcatttttatcaaaacattttgtttaattcaaaaagtacatattccatgttgatttaattctaagatgaaccaataaagacataattcttgtgacttttggacagtagatttatcagtctgtgaagcgaagccagcttcanaacatatccccaagatttgtacttatattttcaaaagggcctggccagttatataaacctgtttttgaattataatgattaattaaaattgcaagtaggtgtttttttcagtgtagttagtaaaatacttgtattttacagtggtgcataaactctagtgcttaactaancttactctaaaaattactggttgacatcctaaaanatntttctatattttctactttcatagcccatattttaaccctttttcacttactggtgacccaagcttttaggtgataaagaataaaagaggggaaggat

SEQ ID NO: 44678 - DNA, 1019 bp, Homo Sapiens
gcagtttccgagggcctgcatgatccacctgctgcacgatcctatgagggcttcctgtggcacacagccctctgggtgcttgggaactagcttcaggcacagcctgattctggtgatccagtgatctatggaagtcgtgtcttactccaggtgaagggggaaaaaaaaagcctatactttggcaggttatgaactttgaatgtgatgaaatgacacgtttggctgcatttggatggtgtcttagaaccctcattgctcagacctgaaggctacttctaggagcatgaagtttgagttttgtgtttttccaaaggatacttccttggccctttttctttattgactagaccaccagaggaggatgtgtgggattgtaggcaaacccacctgtggcatcactgaaaataaatttgatcatacctaagaggttaggaaatggtgccattcccaccttagagtgctacataggtgctttgggcgtatgtaacattagtgtccttccttgaagccacaagctagttttcttagttttaaaatcctgttgtatgaatggcatttgtatattaaaacacttttttaaaggacagttgaaaagggcaagaggaaaccagggcagttctagaggagtgctggtgactggaatagcagttttaaggtgggcgttcaccctagtcaaccacgaacccgcgtgtggttccccctggccctgggcctcccccgccatgaacatcctttcacccttggcaaccttgggggcttaaaaattaacccaaaggggccagcttaagcaccttggggacccccaaaaaccccttggcctttaaagacaccctttcccagggggagccccacctttttttattttcccccttttttccttttttttcccccccttccccccaaaattgggggttttttttttcccccaattttttttggaaaacccttttaaaaagagggtgttttcccccgggacaaaattagcgtttgggggggggggaattttttccccccccccc

SEQ ID NO: 44679 - DNA, 778 bp, Homo Sapiens
tcaattcggagcgcttctgcctaggrctgctctccaatgtcaacaggaatgcagcagtggagctgacacggagacacatcggaagaggcgtgcggctctactacatcggaggggaggtcttcgcagagtgcctcagtgacagcgctattttggtccagtctcccaactgtaaccagcgctatggctggcacccggccaccgtctgcaagatcccaccaggatgcaacctgaagatcttcaacaaccaggagttcgctgccctcctggcccagtcggtcaaccagggctttgaggctgtctaccagttgacccgaatgtgcaccatccgcatgagcttcgtcaaaggctggggagcggagtacaggagacagactgtgaccagtaccccctgctggattgagctgcacctgaatgggcctttgcagtggcttgacaaggtcctcaccmagatgggctccccaagcatccgctgttccagtgtgtcttagagacatcaagtatggtaggggagggcaggcttggggaaaatggccatacaggaggtggagaaaattggaactctactcaacccattgttgtcaaggaagaagaaatctttctccctcaactgaaggggtgcacccacctgttttctgaaacacacgagcaaacccagaggtggatgttatgaacagctgtgtctgccaaacacatttaccctttggccccactttgaagggcaagaaatggcgtctgctctggtggcttaagtgagcagaacaggtagtattacaccaca

SEQ ID NO: 44680 - DNA, 665 bp, Homo Sapiens
  misc_feature (631)..(651): n is a, c, g, or t
  misc_feature (653)..(656): n is a, c, g, or t
  misc_feature (658)..(661): n is a, c, g, or t
catcggccccggcaccctgctccatcggcactggcgccctgctccatcggcactaatgctccactcggcgccccactccatcggccccgctccatcggcactaatgccccactcggcgccccactccatcagcactaatgctccactccattggcactaacgccccaactccagcggcactaatgacccgctcctttgacattggtgccccactccatcagcactaacgccctgctccatcggcactggtgtcccactccattgtcactaacgtccggctccatcggcactaccaccccgctccatcatcactatgtccagctccgtcggcactaccaccctgctccatcatcactacgtccagctccaacggcactggtgccccattccatcggcactaacgccccgctccaccggcaccagtgcctcgctccattggcaccaacgcccagctccaccggtactggctccctgctccatcggcactaacgccctgcttcattggcactttgctgctgcctcctgagcactgccttccatgaacagggacagaccagaggccctgcaaggactccccctcagacctccaaagggcaacagaagagtattaataaacgtgaaaacttaaaannnnnnnnnnnnnnnnnnnnnannnnannnnaaaa

SEQ ID NO: 44681 - DNA, 538 bp, Homo Sapiens
tttttttttttttttttaatcatgcctagactttaactagcactttttttcccatttccaactacaggatataccaggagttggtaacatccactcaggtgccacacctccctggatgatccaagatgaagaatacattgctgggaaccaagaaataggaccatcctatgaagaatttcttaaagaaaaggaaaaacagaagttgaaaaaactccccccagaccgagttggggccaactttgatcacagctccaggaccagtgcaggctggctgccctcttttggccgcgtctggaataatggacgccgctggcagtccagacatcaattcaaaactgaagctgcagcaatgaagaagcagtcacatacagaaaaaagctaatcatgctctctaccaactaccatgaggctaaaagcaaagtcaacaaacccctattataccttccaccaaattctttatcattgtctttcttaggaaacagacatactcattcatttgatttaataaagttttatttttccaaaaaacctcgtgccg

SEQ ID NO: 44682 - DNA, 747 bp, Homo Sapiens
  misc_feature (585)..(585): n is a, c, g, or t
ccacgcgtccggaaaaagctaccgtattccattttgtaaaaataacaataataataataataataataattagttttaagctcatttcccacttcaatgcaatactgaaaactggctaaaaataccaaatcaatatactgctaatggtactttgaagagtatgcaaaactggaaggccaggaggaggcaaataatatgtctttccgatggtgtctcccaagtgttggtgctttgggtttttataagttgtgaaaaggaagatgcacatttcttcattctccatggtgtgcatggaaatgtgtttgagtgtggatgtaaaagaaatcgagtaataaagaattagctggcttgtgaaatagtgcagtgttggatgcttcaagaggtataatcctattttattagcacaaacttgctagctaattagagtttatctttttagaaaggacaccgtataggttcgtaaaaaatatttacaggaagcaaaatagatctattactactttaccgactttaccccctttctttaatttgtataatttttgtactatatatcgatgtgtaaatgtttagagtcttcattatganaatatcaataaatatttcattagtttacatttaactctggtataaaatgaaacttttaaaaataagtgaaatggatgatttcccagtggaagtatgtcaacagtcttaagatcattgccagatttcataaaatatttaagtatttgaaaaaaaaaaaaaaag

SEQ ID NO: 44683 - DNA, 676 bp, Homo Sapiens
tcggccttatggccgggagaaaagactttgcttttataaagcatttagaaaaatgcatacttttaaaacagtgcttgagttgtcacttaaaaattatagcatattgctataataaaaccttatttatgtcttatttgaagatgaatagtcttaaaagataaagacataaatgggacaattgttattgagcaaaaaaccaaattatcccaccctcatggagcttatattctagcaaggggagatggatatgatagattacacagtttattggaggacaataagagttatggcaaaaagcaaaaggaacacagggtaaaggggataggtgccatttggtggtgagaatgctgactgaaaaatagaatgatcaatttaatctgaaacaaatggttatttcttttataatccatataataaatttaaaatctaaaatgtaaaattttgaacccaacactggaaagggtatccacagcaggaagtccccagttcacctccatgactacagggcagctttgcacagccctctgggcgcactgtgtgcctctgcccagaagggggcctcgccgttccaccagaagctcagctccaggccctggaggggctgctgctcctcagttgcatttcttcagtagattcatttccttgatgcaaagcatctgtatttgttggttctgtc

SEQ ID NO: 44684 - DNA, 572 bp, Homo Sapiens
catgaaggcagtttctggggatagtccatatgcaagcagctccaaaggaggaatgtgccctggagatcatcaaagggggagctctgcgccaagaagaagtgtattatgacagctcactctggaccactcttctgatcagaaatccatgcaggaagatcctggaatttctctactcaacgagctataatatggacagattcataaacaagtaggaactccctgagggctgggcatgctgagggattttgggactgttctgtctcatgtttatctgagctcttatctatgaagacatcttcccagagtgtccccagagacatgcaagtcatgggtcacacctgacaaatggaaggagttcctctaacatttgcaaaatggaaatgtaataataatgaatgtcatgcaccgctgcagccagcagttgtaaaattgttagtaaacataggtataattaccagatagttatattaaatttatatcttatatataataatatgtgatgattaatacaatattaattataataaaggtcacataaactttataaattcacaaaaaaaaaaaaaaaatgg

SEQ ID NO: 44685 - DNA, 902 bp, Homo Sapiens
tgccgcctcagcttcagcctcgttactcctgcggttctgtggctgtgctgctggcgttaacggcgcgaggtgaagggaggtgacggagtgtgcccgcgcgcgcgggggtcccctcagtcccagcagttcccttcgtgcgcggggggcggcgagggtcttcagcagtcgggagaggcccttgacggcgccatgtcggcgggcggtccatgcccagcagcagccggagggggcccagggggcgcctcctgctccgtgggggcccctggcggggtatccatgttccggtggctggaggtgctggagaaggagttcgacaaagcttttgtggatgtggatctgctcctgggagagatcgatccagaccaagcggacatcacttatgaggggcgacagaagatgaccagcctgagctcctgctttgcacagctttgccacaaagcccagtctgtgtctcaaatcaaccacaagctggaggcacagttggtggatctgaaatctgaactgacagaaacccaagcagagaaagttgttttggagaaagaagtacatgatcagcttttacagctgcactctattcagctgcagcttcatgctaaaactggtcaaagtgctgactctggtaccattaaggcaaaattgtctggcccctctgtggaggagctggaaagagagcttgaggcaaacaaaaaagaaaaaatgaaagaagcacaactkgaagctgaagtgaaatkgtkgagaaaagagaatgaagccctkcgtagacatatagctgtkctccaggctgaagtatatggggcgagactagctgccaagtactkggataaggaactggcaggaagggtccaacagatacaattgctgaggacgagatatgaagggactgctcatgataagctttggaa

SEQ ID NO: 44686 - DNA, 1051 bp, Homo Sapiens
ggcagttcttaccaagaagatgtcgattccattctccaacacccactaccgaattccacaaggatttgggaatcttcttgaagggctgacacgcgagattctgagagagcaaccggacaatataccagcttttgcagcagcctattttgagagccttctagagaaaagagagaaaaccaactttgatccagcagaatgggggagtaaggtagaagaccgcttctataacaatcatgcattcgaggagcaagaaccacctgagaaaagtgatcctaaacaagaagagtctcagatatctgggaaggaggaagagacatcagtcaccatcttagactcttctgaggaagataaggaaaaagaagaggttgctgctgtcaaaatccaagctgccttccggggacacatagccagagaggaggcaaagaaaatgaaaacaaatagtcttcaaaatgaggaaaaagaggaaaacaagtgaggacactggttttacctccaggaaacatgaaaaataatccaaatccatcaaccttcttattaatgtcatttcttcctgaggaaggaagatttgatgttgtgaaataacattcgttactgttgtgaaaatctgtcatgagcatttgtttaataagcataccattgaaacatgccacttgaagatttctctgagatcatgagtttgtttacacttgtctcaagcctatctatagagacccttggatttagaattatagaactaaagtatctgagattacagagatctcagaggttatgtgttctaactattatcaaatgaataaatcctctctatcacatcccccaaaaatgttctttagctcctgtttcactcctagtggtaaagaatttcactgctttttaaggatagtctatttaattttggaattttagaaagataagctgggacaaaatctgcctccttcagcctggccaacatggtgaamcccatgtctactaaagtacaaaattggcmagsgtgkgsgccmctgtwatccmgctmycgggrgstgagsagggatysctkahctgggagtgg

SEQ ID NO: 44687 - DNA, 826 bp, Homo Sapiens
gtaaattatcaggcaaatttgcattaaattacagaaatttaattcagaaccccaactactgtgttatgcaaaagcaagctgattaaatgacactcatataattatatgttgtaagcaacaggctcactggtcacggatttgtgtctgtgacttttgtgaaagggagaagtgacattgcatcaaagcatcttgcattatgcaatttttatattaaccagatatatattcatcggtattcatccaagttaaatgtagagtttttaaacatcaatctttaaaccaattgctgctacttatataattgccaaaaagtgaaataatgtgtagttcatgtaaataatacattatatttctattttattatgaagaaggtgaatagccatatttgtaaaatgacaatcatgtgtgttaacccagtgctttccattcgtgaaaacacatttgctttttgtgatatgcacaatgtagataagtgttctgtctgactttcttttttgatatagaagtataaagaattgtggtttatatatttaaaagtgtcaagctgagtattaaaatgtatgcatgttgtctaagaaattgaatactttgaatgtgtttcacagtttgaaataagctatttgatgtaatacttcttgtgtgtatgcacatgaacttagattttacatgaagtattttttcagtattatatgtaccctctgaaatacatagggatatgcgtattataccaaaatgttgctgaaaaatgggcacttaaagctttcagaatatgtcagtgctgatgtagcatgcttgttgcaattgccttttttctgtataaatgtct

SEQ ID NO: 44688 - DNA, 1074 bp, Homo Sapiens
tgcattgmyaatctttctttactgttttaagttgcagagcatgtggatgggttasraatctgaagctgaagttcaatctttggttttctgttgtaaatgccttttacaaacattgaattagctaccttaagtattgaagagcttccattgctaggtgagccctgctttgtcctcagtagagtgccggttccctgggctcatccaggggctgagagacggcgggacgctggggcagggcacactggcggastgcttgctcagtagggaatgtcagttgttgcgctgggccatgagaaatccgccagaaaacgttaggtgagcagacatgccccccatgccagtgggctgctgtgagtgaggataaggtgtgtgttgggcatagaaaccctggctgcccgcccaccctgtggagacaagtgcagctcctccagctggagaggctgccctctctcctgcccacttccctcccttctccatgatttccatggagacctgtggctctgctcacccctggcatgcagaccgctctcccgtccagccctaagcctgctctgcggagggcggggtcattcttctcctggagatttcagtgggactcgtccccagtgggcacaacacagcccttggtgggaggggaaggccccagcctcctccacctcccactggaaagcagactgcttgggactgcccagctgtgaattgtatagtttctgtacttattagaactgggtaaattattttggttcaaatctattattccatcaattcagttagaattgaattttctaggtgattatgcagaatcttctgccagggcacgatgctgtcgtaararatttctgttctctgtactgggccccttgccctgttccttgagtgaagtgggggvtgscctcamctgtcccccttgmctgtraatccttccttgtacatggtggtmagtggvaggratccccaatarattgtatatmtgaaggrgaaaaawaaaamttttgtygaaaaagkgkgaaaaaaahcttttyytamcccytycctwtaaaaccwagsamcagcyycttgggggcaggggtkggg

SEQ ID NO: 44689 - DNA, 716 bp, Homo Sapiens
  misc_feature (535)..(535): n is a, c, g, or t
  misc_feature (622)..(622): n is a, c, g, or t
agttgttaaatttgaaatattagaaaatgtatattatagaacatgatatatatttacattcatctctgtattctctcagctgttgttagaaggacagaatgttaaactttatcttaattagtatactagaaagggcagtataatactgtttaaagtgaaggcatgactgaaactaaaatatttcataaggcttagctagaggcagagtaacgtgtttttgttcattgggcttccttgtacttagttttttcatttaataattcaaaccaacacttttaaaaaaataattcagatgagactgagccatatctgcagtaagagaaatatttcttaatgttttggttacttatgatagagtacttttcttgatactgttaactttgtgctttttaaaaaaagtgattctctaacagacctcttaaattgtgacatgaaggtatgtaattagatttcagaaattggtttattagtgaggaatttttatcaataaatgttatggggcgtgttcttcagaatatatagttattttcaacanatgccaggctagattcctcacatgtggctatttcttatgtaagaagcttttaactgaagttggcatgtttcgtaaaacttgcgtgtncttttaaaataataaaaggaagatgagtatttatgaagaatatgtgctgacaacagggcttatgaggtctatgtaccttaatctcgtttctcct

SEQ ID NO: 44690 - DNA, 642 bp, Homo Sapiens
  misc_feature (522)..(522): n is a, c, g, or t
  misc_feature (628)..(628): n is a, c, g, or t
cttgaggctccttacaagaaggtgagaaaaaacatgtcggtgaggtttatatatttcttaatttagcattattcacgaaactactgctgaaatgtaaactaacctccccggagccctcttgatttatcttatcagagatgcattacgtgtaacttacaaaagtaaatatatgctattgatgtaataatattgtgcagtagtttcacttcagcgtgatgaataaatgcccatctatctctctttgtagacttgcctaacgatatctcacctctactcccatgaattcacctttgattccagtgtgaactgtcaatcataaggtagtaattgagtgacttatcgctgtaccgtggtcccctaggtaaaatgactcaactaagaattaccacctccagtttggtatagcaaaaaggtgaatgtagtggtttgggaaaaagcaggggtccaagaataacaaagcatgaccagtctgtggcaagttaaatcttctaatagtcttataagaagaaatgggtgagattntaaaatttatgtatctatgtaagactggtgatagtaaatcttaaaacagttcagtggcaatctgctgctcagttaataattactaaaattcctggatccctgaatngaaattaaaaaaaa

SEQ ID NO: 44691 - DNA, 536 bp, Homo Sapiens
ggggccctcaaagagcagcctgttgatcttttggccaaatgacttgagcataagtcttttatttctttttaaggttaaatcgtaaactgtatacctttactactgaaaacaaaactatagggcatcatactaattgaaaatcaatagtaatgggttccatccattggctttttaaatgaatagatctggtattgatttccttcctgtttttttgaggcacattcctttacaaccagtgtttaaaccaccacgtaatcatcttctgcaaacaaggggtgccagtgttgcctaacagaagataatctttaataaagcaaatcctctgcttcaaaggtttttgaaataattggatccctttttgaaaaggaagatgagtttaactgtgtccaggtggagtaatagtactgctgttgcatgaatagatgatacaaagcaagtgatgaggttggtatgacttctttagtgaccttttagggtttgcttttattttcctctcctttttgtattatttctttcaaacatagtaaatatatgat

SEQ ID NO: 44692 - DNA, 639 bp, Homo Sapiens
  misc_feature (632)..(632): n is a, c, g, or t
ttttttttttttttttgtggcggttttgcttttatttataatctacaagggatgggagggtttgttttccacatttttaccctcaagttttaaaatttttcccacctcctttttacctacagagctcaaactaaataatgcacttttgaaccaccggtccgcttggagctaacataaataaataccagtgtccaccgatgcagtcctcagatgaacactttctcaattattttttcctttttttttctataaaaagtcaaatgatattttttcaacttttataaagtttgggtggggaggtgaaagtggggagaaggggagtgtcccaccgggtctcggtcgctgctgtcgggtagatagatacggtatacatttctttcctttcgtggcccgagtcctccccacgcgcgggtgtcagcagcctgggccgtgatcccgcctctccctggactcctcccctccccctctccctcctctccctcgctcgccctcccggccgccctcactgataccccagcgccgaggcggtggtcagtctctgtccgtagagggcgtagggggagtagtacggtccggtggcggcgggcaccggcacgggggcgccaggcgtgggaagcgggctcttggagtangggtggt

SEQ ID NO: 44693 - DNA, 848 bp, Homo Sapiens
tgacttttcttgatgtctgaagcgttattttgggtactttttagggaggaatgcctttcgcaataatgtatccattccctgattgagggtgggtgggtggacccaggctccctttgcacacagagcagctacttctaagccatatcgactgttttgcagaggatttgtgtgtgctgcctcaggaggggagggctggtaggagggggggagaggtctctgtcctactgctctccagagggcatttccccttgcgccttctcccacagggcccagcccctctcccctgccccagtccccagggggtactctggagtgagcagtgcccctgtgggggagcctgtaaatgcgggctcagtggaccactggtgactgggctcatgcctccaagtcagagtttccctggtgccccagagacaggagcacaagtgggatctgacctggtgagattatttctgatgacctcatcaaaaaataaacaattcccaatgttccaggtgagggctttgaaaggccttccaaacagctccgtcgcccctagcaactccaccattgggcactgccatgcagagacgtggctggcccagaatggcctgttgccatagcaactggaggcgatggggcagtgaacagaataacaacagcaacaatgcctttgcaggcagcctgctcccctgagcgctgggctggtgatggccgttggactctgtgagatggagagccaatctcacattcaagtgttcaccaaccactgatgtgtttttatttccttctatatgattttaagatgtgttttctgcattctgtaaagaaacatatcaaactaaataaaagcagtgtctttattacaa

SEQ ID NO: 44694 - DNA, 679 bp, Homo Sapiens
ggacttaaaaatgtggccaacaatttttgtaaaagatggctactctgtagtgctttaactggacctatttagacaatgccttacacactggaggacgatactgtgtaaatctaataagtctacaagacaatacttctgtcttttggctctctccttcctctccagggtgatgacaaatccgtgagggtggagattatacctctctcatcatttcagcaccaaggaaataaattagtggcagagtaagggtgacttgatgagtacatccaattgttgacatagttttgggtggagaaattttgctattatatcgacttcttaaaatagtctagtgggattaacttggtttcaattcacagagatctggaagcgaggatcttttaaaaatcccgaaatatacactgcaataaaagaacaaagcatacacctcagccttaaatgactgaagaagtatgtcaagtagcagcaggtgggaaagtggctttggttttcagtttgtgagctctgaatccacacagaaacaggactgcattctgacaacctgaattaattattgtccttaccacaatgaggcagaaaagtataatcaaaatcattagtatttcagtcacaattaatgccaagatgagtttgtcagtatagccatatcctggaacttattttgtgagctaaaaaaaac

SEQ ID NO: 44695 - DNA, 760 bp, Homo Sapiens
ggacgcgtgggtttggaaatctgcctggaaacctgatttcctcatccccaccttgtttcccaacataaccactgctctgtgcccctgccctctctgccaggctttctccccgatgccgtccagctctgatcctgagtgtcatttcttcatcggcttccaggctgtccttgctagctggtttgactctcacgcatcaagcgtctcaaatttgagaatgcggaggagaaaagaagtgttgcgagaaggaggtgcggccttcagttgaggtctattaggaaaagattccaaataagacaagggcggggggcggcagtcgggagagcccccaggaagccctgtagatgcccccaccccagcccatggagttgctatggttaagcagcctgagccgtacagttgaaaaggggcggtggggcccatctccaaatagcacagccagttcagccgtctgtcctcaacccaggagagctgggaaagccagtggactcctgcacctggttcttgtcactcctggcgtttgtgtacagatcaccacttctctttttggttcattgttgaggagtcgttttccggacggctccatcacagcattgagctatcaagctgctgttttccacagttggtggtcacagcccaggaagttgctgtcttgatttgttacattgtcagtaatccccaaggaacaatggatgtcagtaggagtttctgttaaatgtctccttgatggggactcagtactgtgaaaaaaaaaaaaaaaaag

SEQ ID NO: 44696 - DNA, 835 bp, Homo Sapiens
ggagggatatttttcttatatttgtgagttcagttccgatggtgcccgtggtcaaaagcgaaaaacatggacaattcctattcattcttagcactttgacatgtcttggggaaaagcttacattttaatttaaaagaaagatcaattatatccatgcttaacaggatcagcaggagctttataagtgactttacagagactaataagggatttgatctttcttttttttgttatcgaggcttttgaaatgtggaacttgtgtgttctgctttatatgttatattcaatatcttttcagatgcagtctatattttatgctgagttttaaaaatgaaatactttatgcaaacaggcaaaattggtaccaaagggaaacattaacccatgaggaagagcatttttctaaggaaaacaggtgaccatatacacatgtgcgcctaatcgtaaaatggagccatctagtctttaaaacaccttcgaattgaatacgaataatctatttggtcgatgaaaataaacaccactccttttaaggatttgagactacattccacccccttttaatttcccagttcacttgccagtttttgcctttttcttctgcaattttcccccgcctggtaaaaatgaacttggttgccattcgttgaaactttacaatttttgcaggtgggaataatatttatggtttcgggataacgaatccaaaaattttttaaaactcgccttaaaatctttgattcggttccacggttctgttcccttacccatacgattttctctggtttaataccgcgacttacgcgccctctctccactaaacgccttttcatat

SEQ ID NO: 44697 - DNA, 686 bp, Homo Sapiens
  misc_feature (669)..(669): n is a, c, g, or t
gagagggccagggcctggcgaggtggagcagtcggcccaggtgtcccagcaattgttgctggaacagggtctggaacccacaggagaggcctgaaggacccagggccctctggctggatgcgtttgcctatcaggacccagaattacttacagacctgtttagggctaggcttggcctctttcttgagctcatctggaggggtgtggcaacactcattcttcatccttattctccctggctgtgggcaacactggtcctcagtgtcaccagatggtcctcctctgtgcccatgacccctcagcagccaaggctggccctgccagataaatgtgtgtgcccatgatcacacccaggggcacaggccacatacgtttccctgaaaccttgggctccagcctccatcccgtccatgtgggagggaacttgggtcccagcagtgtgtctttcagcaccaagtcatgtttaaaagaccagagagacaagcattttgccaagatcttccagggaagatgcatgtgtgacacattaacattcaaatcaggccagcgcggtgctcatgcctgtcatcccagcactttgggaggccgaggcgggaggatcacttgagcccaggacttggagaccagtctgggcaacacagtgagaccccatctctacaaaaagttaanaaaaaaaaaaaaaaagg

SEQ ID NO: 44698 - DNA, 518 bp, Homo Sapiens
ggttccccttggtaccaggagagctgctcacttagggcctggggctcaaggagctgtaggtgccggcagaggggcagagctaggctgggaggagcccagggcctgcaccacccacttgcaaccaccaggctggtgccctgcagctgtgccagttgggccacagcctcccgagtgctgacccacatggtcaagaccaggcagaagctcccagagcccctgtctcgggctccccaccgactggcagctgcactatccccaactccccacttctgccccaagggtggtcactgcctgtgatacattcctcagtgtcgcctctgagcccaggcctcctgccacaaagactgggccgagagatggggctgggtaagcgggtgcgcctcctgtttgggtttcttcggggtttctctgtagtgtctgctgccctcctcctggcctcccaggtttcagttgtgtctgacagagcattaggttttcctgttactgctgtgtaataataaagaaagattcggcttttg

SEQ ID NO: 44699 - DNA, 1114 bp, Homo Sapiens
gggtattttacaaaaattacttcatgaaatatagtttgtaccccagtagttgagaaatgtgaccttttaggcaaagaacaggcagtccatctctcttagctttagtttatctctctgcctgaagacaggaaacaggcccaagtgcatactcgggttctttccaactcagaatcatctctgattccacaaaagtgagtttagtttcctatctgaattaacaactttaaaggagactataatagttaaaagtggaagaatagaaataaataaatttaaaatgaaattaattaaagtagaagagaagggttctgttccatgtacgattaatgtgccccttttggagataagctttccaaaatatgcgtatgagtaaaattagagaattccaccactaagcaacagtagattttatatgtgtgtgtggatatatatacacacacacacagaaagatgaatatatatatatatatatatctgtataaatagaccacacatataatatatatagatatataatccctatatatcttgaatctacaaatatctttatatgtatataatttgaatatatacctgtcatgtatataccgatgtgtgtgtatatatatatatacatacacatatacataaattttcagctatttctgttaccctgaactaatttgcaaattagaccaaaatgcttttaaatggtctcatggcaagacactggattaagattctccatgttgaatatttaagtgattcctattaagtttctaatatactgaaattgcttcttcgaattatcttaaagtcctattaaatcctactaaaaacttcaaacaattatctaaatctgaaacaaccatcaaataatgtgattaacaaaaaccaaatgtaacccttcataaatggaaacggagtgagttaaaagaaacctaagaactacaggttaacggccacgccgcattctaaaaaagtgttaagaccccgtagttcaaaaaccgagatcagacccgtataaagaggagatagagtggcgagaatacttccatatgaaataaaaataatatattgacaagaaagggtgataggaagtgagaagaaaagacgagagtgcaacaaggtggaa

SEQ ID NO: 44700 - DNA, 718 bp, Homo Sapiens
  misc_feature (17)..(17): n is a, c, g, or t
aaaagacatagactatnacccctccaaaaatgtgcatatggccccatacaagacacatgtactgccagagcttggggaactccctagaatctactcctagaccaccctagtgaagtaccatagaccatattgtctagatgggacaaaataataaattttgactaagaacttactgtttagagagaaaaaatagtaaataatgttcaaaatgagaagacaataactgacaagtctgtgatttttgggttagatgagaccacttttgatttttgaggaataaaaggagttagttttttggtcctgatgtgtaaaatgattcatggggtttcacatacagacaagtagttttcttttcagcaaatatttaacatatctctcaatatatttttcaccagtttttggtaaatatgcattgctataggtataccaagttttttttgttatgtttagtaactaatttcattttttctgtatatgtaaatatagctattggaccctgcattgaaaaccttcttagtactaacaacactccttttattattaccttcatagttactttaaatgacatatttatttcgagttttacttctggctgagttgcaaagtctatgagaatgttacctcctgtctcagaagcttgttagttattgtgccacctaaatattgtaataaaagtgtttaaataaaaatcttcttaaaatttaaaaaaaaaaaaaaa

SEQ ID NO: 44701 - DNA, 674 bp, Homo Sapiens
aaactaaatatagcatggaaaatccaatttgaataagtcatgctttcctagaatttaaaaataaaaaagtcttcctctggaaagagaagtcacacagacaatcatgtgccctataaaagtgagtgtttataggactaaaaaacttttaacaactttttaaggaaatatttttgttcttatacaaaaacatgtaaatattgctttattactttcattttctgaccctgctgtaaactactgcaaccctcacatcctcaaagggacttttatgtcaaactcttctgtttctccaaatataaggaaaaaagactaaagcaagagatctggcagttgaaaattgtgggaaagagaatttgtatgggcactgtatctatgaaatacctcataacttacgtttacatgttttcctaacttttgtatttttcttgtatagccacctagagaattcttcatagattaagaactacagttttcaccacttaacataagtaaaacaaagtccttcataatttaaccattagcatctttggccaaaccaaaataaagaaaagcatcttctcctagttgtgtgtgggcaacagaaacaagttaagggaaacaaaaatacttatatatacacagaacaaaaataatgttcttttatgcaaatcccctgtgaaaataaaattttcatg

SEQ ID NO: 44702 - DNA, 596 bp, Homo Sapiens
attcatactggagagaaaccctatgaatgtaatacatgtgggaaacttttcaaccataggtcatcccttactaatcattataaaattcatatcgaagaggacccctagaaagtagatttgtatgtgtgaaagccttaaaccaaagctcatcgaagaatacatccttgagagagatgtaataaatgtaatggatgtgaaaaaaactgtaataatttagccctcattaggtatttaattccatggataaacctcagctatataatagatatgaggaaagtgtttgtgcctgtcagacacttaaaaaaataacctgagatgaagaatttacaattgaagacattgactttagccatttgtgaaatgggttgctttttcccttttcctacagacgtatatgctagatgtcacgtgatcatcagaaacagatatccgagtgggtggggaggtgtgctttagatttctcattagaagaccaccaaactggtaatatttttatagcattttaatagcttgatcaaattgtacctttttagagaaaaggagcaacaataaaagaagacatgacaattattgaacacacacaacgaatcaagcaa

SEQ ID NO: 44703 - DNA, 721 bp, Homo Sapiens
gaaaaagatggccaggcatataagtttgtgtcacgatctgagatggaagcagatattaaagctggaaagtatttggaacatggggaatatgaaggaaatctctatggaaccaaaattgattctattcttgaggttgtccaaactggacggacttgcattctggatgtcaacccacaagcactgaaagtattgaggacatcagagtttatgccctatgtggtatttattgcggctccggagctagagacgttacgtgccatgcacaaggctgtggtggatgcaggaatcactaccaagcttctgaccgactctgacttgaagaaaacagtggatgaaagtgcacggattcagagagcatacaaccactattttgatttgatcatcataaatgataatctagacaaagcctttgaaaaactgcaaactgccatagagaaactgagaatggaaccacagtgggtcccaatcagctgggtttactgatgattcagtaaggttaacaatgaaaattaaactcttaaaaagtgactgcaacaaataaaccttctactgagaaaatacatcacagatagaagattatctgctaagtccaggcatttttatggtgtagattgaaataatagtacacttctgaatttttatataaaatgtggttgggaaggtgtactaatatataatttatcttaatttttctaactttgtatggataatctttctattc

SEQ ID NO: 44704 - DNA, 625 bp, Homo Sapiens
  misc_feature (594)..(597): n is a, c, g, or t
  misc_feature (599)..(599): n is a, c, g, or t
  misc_feature (601)..(601): n is a, c, g, or t
  misc_feature (606)..(606): n is a, c, g, or t
  misc_feature (610)..(610): n is a, c, g, or t
  misc_feature (615)..(615): n is a, c, g, or t
  misc_feature (617)..(617): n is a, c, g, or t
gggaaaaattaaaactctctagtcctttaatgagcatgaatttatacttctacatttgttgcttagtaaaattatcctcagtactttgagttattcagatttatgtttaatattgttaaattcttcatcagagagcataaatatattgtcttctatactttgtaacttgtgcatatctaaagaaactaacaacgaacattttgggagatgtttttgtgtttttttatagtagagttttagagtacatttgtcttaataggaagtttttaccataaacccaagattttatttcacgtattgttgctttctcttatatggaacttattgtgtacctcttacctttatttctaatcatttagtgatactaatcttttcatagtaaatatatttgtttctaattgtattcctagagtttacattcctaaagaataaacgacgactttggctatttttgtgtgttccctaccttcttaaggctatggaaataaactggagtttagttttttgaatttttgtatatttgtgtaaatgttctccatatgtagtactttatacaacaagtgttgcctcttgttttattgaaataaaaacttnnnncnanaccanaaanaacanancccatgtt

SEQ ID NO: 44705 - DNA, 557 bp, Homo Sapiens
aaaacaaccattcatggtggccttcttcaaggcgagtgaggtacttcttcgatccgtgagagcagccaacaaacgaaaaaatcaaaaccgcaataaatccagctctcatcaggactcctccagaatgtccagtgttggagattataacacaagtgagcaaaaacaagcctgtaagaagcacgaactctatgtgagcttccgggatctgggatggcaggactggattatagcaccagaaggatacgctgcattttattgtgatggagaatgttcttttccacttaacgcccatatgaatgccaccaaccacgctatagttcagactctggttcatctgatgtttcctgaccacgtaccaaagccttgttgtgctccaaccaaattaaatgccatctctgttctgtactttgatgacagctccaatgtcattttgaaaaaatatagaaatatggtagtacgctcatgtggctgccactaatattaaataatattgataataacaaaaagatctgtattaaggtttatggctgcaataaaaagcatactttcagacaaac

SEQ ID NO: 44706 - DNA, 2527 bp, Homo Sapiens
agtaacagttgattgttacattcagtaacactgaatgtcagtgcagtccaatttacaggctggagcagcagctgcatcctgcatttccccgaagtattacatgattttcactccttgcaaactttaccatctttgttgcagagaatcggaaatcaatatgcatagcaaagtcacaatcatatgcatcagatttctcttttggtttcttttgctctgcatgcttattgggaagtcacatactgaagatgacatcataattgcaacaaagaatggaaaagtcagagggatgaacttgacagtttttggtggcacggtaacagcctttcttggaattccctatgcacagccacctcttggtagacttcgattcaaaaagccacagtctctgaccaagtggtctgatatttggaatgccacaaaatatgcaaattcttgctgtcagaacatagatcaaagttttccaggcttccatggatcagagatgtggaacccaaacactgacctcagtgaagactgtttatatctaaatgtatggattccagcacctaaaccaaaaaatgccactgtattgatatggatttatggtggtggttttcaaactggaacatcatctttacatgtttatgatggcaagtttctggctcgggttgaaagagttattgtagtgtcaatgaactatagggtgggtgccctaggattcttagctttgccaggaaatcctgaggctccagggaacatgggtttatttgatcaacagttggctcttcagtgggttcaaaaaaatatagcagcctttggtggaaatcctaaaagtgtaactctctttggagaaagtgcaggagcagcttcagttagcctgcatttgctttctcctggaagccattcattgttcaccagagccattctgcaaagtggatcctttaatgctccttgggcggtaacatctctttatgaagctaggaacagaacgttgaacttagctaaattgactggttgctctagagagaatgagactgaaataatcaagtgtcttagaaataaagatccccaagaaattcttctgaatgaagcatttgttgtcccctatgggactcctttgtcagtaaactttggtccgaccgtggatggtgattttctcactgacatgccagacatattacttgaacttggacaatttaaaaaaacccagattttggtgggtgttaataaagatgaagggacagcttttttagtctatggtgctcctggcttcagcaaagataacaatagtatcataactagaaaagaatttcaggaaggtttaaaaatattttttccaggagtgagtgagtttggaaaggaatccatcctttttcattacacagactgggtagatgatcagagacctgaaaactaccgtgaggccttgggtgatgttgttggggattataatttcatatgccctgccttggagttcaccaagaagttctcagaatggggaaataatgcctttttctactattttgaacaccgatcctccaaacttccgtggccagaatggatgggagtgatgcatggctatgaaattgaatttgtctttggtttacctctggaaagaagagataattacacaaaagccgaggaaattttgagtagatccatagtgaaacggtgggcaaattttgcaaaatatggctgttcttcctcaaccatactaaactacgttcttgaaacagaacctgtggttttgatttgatattcattgaagtactatatgggaatccaaatgagactcagaacaatagcacaagctggcctgtcttcaaaagcactgaacaaaaatatctaaccttgaatacagagtcaacaagaataatgacgaaactacgtgctcaacaatgtcgattctggacatcattttttccaaaagtcttggaaatgacaggaaatattgatgaagcagaatgggagtggaaagcaggattccatcgctggaacaattacatgatggactggaaaaatcaatttaacgattacactagcaagaaagaaagttgtgtgggtctctaattaatagatttaccctttatagaacatattttcctttagatcaaggcaaaaatatcaggagcttttttacacacctactaaaaaagttattatgtagctgaaacaaaaatgccagaaggataatattgattcctcacatctttaacttagtattttacctagcatttcaaaacccaaatggctagaacatgtttaattaaatttcacaatataaagttctacagttaattatgtgcatattaaaacaatggcctggttcaatttctttctttccttaataaatttaagttttttccccccaaaattatcagtgctctgcttttagtcacgtgtattttcattaccactcgtaaaaaggtatcttttttaaatgaattaaatattgaaacactgtacaccatagtttacaatattatgtttcctaattaaaataagaattgaatgtcaatatgagatattaaaataagcacagaaaatc

SEQ ID NO: 44707 - DNA, 535 bp, Homo Sapiens
ctttctcctttgcactaagtgctttgcagacacggcacagcaaacattttgcaaactgcagcagaaatcgaatttaaaacaaaaaggagggactttaaaataccttcttgacaaaaatcaacaatgcacaacttacaaagtgttcattctagggacaaaattaaataaacagaatgtccccaggagtcagcaggtcacagtctggctttgtgatggttgacaaggtctagctacatgggaaagcctgagaagtcactttggaactaaattgcctccattttattttgtacgagtaagggtttgatctacaaaagagctcacatggacgcactgagaacgcctgccagcttccccatgccctcacttggtttgtgttttaggttaagtagtcaatgcccacatcacttcactgtctcaagactgagcacttcactaaatggtagattttactgttaaagaccctacaataagattgttttatctgtacattttttcagatatttaactgtataaaaatgttcattttacacaatat

SEQ ID NO: 44708 - DNA, 594 bp, Homo Sapiens
acaacagagacttaaatgtttttttcagctgggatccaaaagacagggacgtttctgaagaacataagaaactttccttagaggaggagaccttgtggttaagaatccgatccttaacattgaggctgataagtggacttccaagtctcaaccaccctgtggagccaaagaactcggagaagactgccgagaatggggtatcctcccggattgatattcttcgtttgctccttcaacagctggaggcaaccctggagacaggaaagcgatttattgagaaggatattcagtatcctttccttggtcctgtacctaccagaatgggtggattctttaattctggctgttctcagtgccagataagctctttttatcttgtcaatgatatttatgagctggataccagtggtttagaggatacaatggagattcaggaacgaatagaaaatagttttaagtctttactagaccagttaaaagatgtcttcagtaaatgtaaaggtgacctcttagaagttaaagatggtaacttgaaaacacatcctactcttttagaaatctagttttctttgttgagactatttctgttatcct

SEQ ID NO: 44709 - DNA, 534 bp, Homo Sapiens
caagtacctgatttggaagccccaacatctaaggatatacggtgggcggattccccttaagttccaggtatgtgttacactttctaacatgccatttagaaagtgttagactttctcacctgccatttatggctcttgccatttatgtcactgacagtttctgaggcagaagccgtatcatgtctaccacctgtgaggtccacacagtgtgtatcatttacctcctgaacctgctcaaggaagcagacctctgcttctccccatttgctagaagaaatcatgaatagtctgagtcttcctctctgacaagttagggcatggacttgacccagctttgtgccagagaacccaatatgagtgttgttggcagcttgccaagaaggactgtctttttcaagacatactggtttcatgtgacacctccatggatttttttccagcctctaagtcaccaacttgggaactgcttgtctcacattgctttgttttttacaataataaaagcattattatttaagcaaaaaaaaaaaaaaa

SEQ ID NO: 44710 - DNA, 505 bp, Homo Sapiens
ggcacgaggagaccagatgccaaaggctaaaatgtacatagatttccttggattaatttttaagtcactgtttaattccatgcctagtattcttatgaatgtttgtggtttcatagatttatgcactttgaatatctgtcacgtgcagtgttaatgttacctgttcttgtctctcagcattttgaatgagcatcataatcagagtagaaggcaagttaaactataaaagtgtcaagtggcttgttaacttcttaatttaatggacctttacttagaatataatatgttggagcctcttgggaccaaccgatgagcgacagtttcatgtttagatttgtattgtttctctgtccaagtccttattctctatcttgtggggaggggtgacaggggagggttttactttttttgcaaaaatgtttgaaaatatctgtcagattttatattcgttagttataataaacttatttttaaagtattaaaaaaaaaaaaaaaaaaaacactt

SEQ ID NO: 44711 - DNA, 556 bp, Homo Sapiens
tgctgcaaatagctaaattatatttatttgaattgatggtcaagagattttccattttttttacagactgttcagtgtttgtcaagctttctggcataaatatgtactcaaaaggcatttccgcttacaatttgtagaaacacaaaatgcgttttccatacagcagtgcctatatagtgactgatttttaactttcaatgtccatctttcaaaggaagtaacaccaaggtacaatgttaaaggaatattcactttacctagcagggaaaagtacacaaaaactgcagatacttcatatagcccattttaacttgtataaactgtgtgacttgtggcgtcttataaataatgcactgtaaagattactgaatagttgtgtcatgttaatgtgcctaatttcatgtatcttgtaatcatgattgagcctcagaatcatttggagaaactatattttaaagaacaagacatacttcaatgtattatacagataaagtattacatgtgtttgattttaaaagggcggacattttattaaaatcaatattgtttttgcttt

SEQ ID NO: 44712 - DNA, 650 bp, Homo Sapiens
  misc_feature (557)..(558): n is a, c, g, or t
  misc_feature (562)..(562): n is a, c, g, or t
  misc_feature (646)..(646): n is a, c, g, or t
tgttaaaagccttaatctcatttgggtactcaaaagagaaatcagagtttattctggttaacttgagaagccaagaaagatcatttttagcaagtatgccttccatccttggcagaggcttcccagcatcctaggctcagcttaccgggtgataggccccataagacacacacatgagcagggtgagaaatgcttgctttatagctgctccaccctcatctccagagattttgtgtctatggttgtgggtctggaaacctggcaggaaccacttctagagtacctttgcctaaactcttttagaattgaggccccaactttgatggcacatttaatacccaatttcttccataacagatatttttaatagcaggacagatggcactgattagatcaagaactatttggaagtgcctcttatgttttttcctgcattctgtacataaagttttaagtggcaggtccagatatgtaaaatcatttctctctattttccagctggttttgttaatgattctctaggacagcaggtaaatgaggttagttgtttgcttggnngcangtgaagtttgtgactatgcttgatttaataagctgagagtctcttgttgtcttgcaagtgccttcctctgctgaagccttactncttt

SEQ ID NO: 44713 - DNA, 575 bp, Homo Sapiens
ggcacgaggagattcttcatcacctgaagtgaacccacacaacagggctgggccatgggcatcataaaccccattttgcaagctcaggaggagctttagggaaatcagaagactggcccagtctctaccaagtggtggatttagagccggcatggcttcgttccaaatctcacccttgtcccaccattccatgggacctcccattcctgagggagcctggatacgggcaagtgcacaacccgggaggttgaggttacagtgagccatgatcgcaccactgcagtccagcccgagcaatagggtgagaccctccctctgaaaaaaataaaaatactcattttggaaggaagtcattctaaaatgttacacttgtcttcagcatatctgcaatataataattttctgcataactgaggatcattcacagaaaccaatggcttttctccagcagtgtcttctgaagttgtaacagtaggggcacggggagctatttgcttttatgctaaatgaccttagaccacttataaaatgcatatgagtgctttaaatgttaaaaaaaaaaaaaaaaaacactt

SEQ ID NO: 44714 - DNA, 825 bp, Homo Sapiens
  misc_feature (616)..(616): n is a, c, g, or t
  misc_feature (639)..(639): n is a, c, g, or t
  misc_feature (757)..(757): n is a, c, g, or t
  misc_feature (804)..(804): n is a, c, g, or t
  misc_feature (822)..(822): n is a, c, g, or t
gtatgaggtgatcaggaagtttcttctggaattttatcaagtccttgtattctaaaatagccaagcaaaatgatagtaaattctttgtctttgttctttcagtcagaggtatttattaagtacctactgtgtgctcagcactaaaggtttgttgataaaatgacaattaaaaaatggcatttagccaaaggccttttcagccaggagtaagaaaagatggttagtgatatttggaaatacctggatatttgctagaggaaaaatgaaagcaaaacttcgtacacagtgccttgcccataataggtactcaataagcaattgttcctcatagagtcttttgccatgatttatggtgttttttgaaatttgtcttaattgaaaaaagaccaaatatttcaaatgagcttataggcagctgtggccagtgaaaatatggggttgtacagttagttcctagaatgttattttgcactagttgtcacttagaaagatggggttcctgtagattttttggtgctaagggatactttgtcattatgatgaagtaagtgttaagtgtcagataaatagcacacagaatagttctttctgctggtctgttttttctcttcgttgntggtgtttttaattgtaaattgntatcaatcaaactattgtagcagctacaaagtaattcaccagcatgacaaaatggtcaaaaaaataagtcatcagcacttaagaaatgaaagcaacttttgaaattttctggtaaaantgtcaaatatattttatgaagaatttataaaaggggaaaatgattgnaatttattggtcatgacnttt

SEQ ID NO: 44715 - DNA, 631 bp, Homo Sapiens
gaaatttcctaggtgctattataaacggtgtggtgtcataccaaatgcaaaagcagttacagtatttccgaagttggagttctctttgtaggcctttcaaatacgtgtttgcattccatagaggtctgctcaccaactgtgcctctcaccactggttaaaattgaatttaagcctcattgacataagtcgtttcttgattgaactcttcagtttttacactggaatttctgtagttgtcttgaaagctgcatgtcacatcactgtacacaaagtgctttggtattactcatgcaccgtggatagtgatttctgtgtcgttttcattttcagttgtacagtaatatggaaggcaggatgtctttcctagaggctggaagaaaagtgtatcgtacattttaaatttattttagaacaagtgcatgagatgtgtcactgatttctgttatttatttgtatgttttattattcaaagtgtatgcacttttaagaagcagaatttatatttttacgtttgaaacgttttatttctgaaacagcgttgattatatagtatacagttggaattaagagaaaagtggaaaatgtaacaaaatacaataaatttattacaagatgtaaaaaaaaaaaaaa

SEQ ID NO: 44716 - DNA, 858 bp, Homo Sapiens
gaagccgggctgggtcccagcacttgaccccagctgcactgctgtacagggctgccgtcacccgaagtcagaaacgtggcatctcatcggaagaggaggaaggagaggtagacagtgaagtagagctgacatcaagccagaggtggcctcagagcctgaacatgcgccagtcactatctaccttcagctcagagaatccatcagatggggaggaaggcacagctagtgaaccttcccccagtggcacacctgaagttggcagcaccaacactgatgagcggccagatgagcggtctgatgacatgtgctcccagggctcagaaatcccactggacccacctccttcagaggtcatccctggccctgaacccagctccctgcccattccacaccaggaacttctcagagagcggggccctcccaattctgaggactcagactgtgacagcactgaattggacaactccaacagcgttgatgccttgcggcccccagcttccctccctccatgaaagccactcgtattccttgtacatagagaaatatttatataaattatatatatatacatatatatatatatatgcgccacataatcaacagaaagatggggctgtcccagccgtaagtcaggctcgagggagactgatcccctgaccaattcacctgataaactctagggacactggcagctgtggaaatgaatgaggcacagccgtagagctgtggctaagggcaagccccttcctgccccaccccattccttatattcagcaagcaacaaggcaatagaaaagccagggttgtcttatatcttacccaaaaaaaaaagggggggggggggaaaaaaagggccca

SEQ ID NO: 44717 - DNA, 645 bp, Homo Sapiens
  misc_feature (324)..(324): n is a, c, g, or t
ttttttttttttttttttacatagagaaatatttatataaattatatatatatacatatatatatatatatgcgccacataatcaacagaaagatggggctgtcccagccgtaagtcaggctcgagggagactgatcccctgaccaattcacctgataaactctagggacactggcagctgtggaaatgaatgaggcacagccgtagagctgtggctaagggcaagccccttcctgccccaccccattccttatattcagcaagcaacaaggcaatagaaaagccagggttgtctttatattctttatccccaaataatagggnggtggggggaggggcggtgggaggggcaggagagaaaaccacttagactgcacttttctgttccgtttactctgtttacacattttgcacttgggaggagggaggctaaggctgggtcctcccctctgaggtttctcaggtggcaatgtaactcattttttttgtcccaccatttatcttctctgcccaagccctgtcttaaggcccagggggaggttaggagactgatatcatgtgatggctcaggctgaataaccggggtgctgtttatgtccctgcttttatcctgatgcctgattggcgtggggactgtcctactgt

SEQ ID NO: 44718 - DNA, 1138 bp, Homo Sapiens
  misc_feature (585)..(585): n is a, c, g, or t
  misc_feature (597)..(597): n is a, c, g, or t
  misc_feature (1138)..(1138): n is a, c, g, or t
ggaccggtccggaatttccgggatgtagatgctgccttccgagagggcaatgctgcccgcctgttccgtctgctccagaccctgccctacctgccaagttgcgctgtgcagtgccatgtgggccatgcccgccgggaagccctggcccgcttcgctcgtgcctttagcacccccaagggccagaccttgcctctgggcttcatggtcaacctcttggccctggatggactcagggaagcacgggacctgtgccaggcccacgggctgcccttggacggagaggagagagttgtgttcctgaggggtcgctacgtggaggaagggctaccgcctgccagtacgtgcaaggtgttagtggagagcaaacttcgaggacgtaccctggaggaggtggtcatggcagaggaggaagatgagggcacggacagacctgggtccccagcctgaggagggagcgtgagcctcccagagccccaggactgggccagagcacttaggtttctttttccatggtttccaggtaataaaaggaacttgttttgttggtaaaaaaaaaaaaaaaaaaaaaaaaaaaacaaaaaaaanaaccccaacccnacgccccccccaaaaacacccaaggttacccccccccctccggtcccccgcggcggggctccttaataaggggtgcgccagtatccgggacgcacaatcacgcgcttaatgtttgacccccgggtaatgtacgacaccttgggggacttggaacttaatcgcgcccgtggccccgcggttacctgcgcacggcttggcccccaggacacacgccaagctccgcccggcccaccggggaaaaaaaccacatgactgcggagacggaacacggcatcaacgcaccccaccccgccagagtcaagaaacgcacgagcgggagacgtgggggtcaatcttgaacgagcgtgtatacggggcgctcaaccaacacgacacggtcagggggaaatccacagctgtataccggccactctcaccaaggcgcgacacaacacgcgcggaacgacccggcgggcaggattggatacttcagccgggcatattggcatggaacacaaaaggggccgccagaccccgatattcgggtgtcggtgcactatan

SEQ ID NO: 44719 - DNA, 598 bp, Homo Sapiens
  misc_feature (417)..(417): n is a, c, g, or t
  misc_feature (466)..(466): n is a, c, g, or t
  misc_feature (577)..(577): n is a, c, g, or t
gtttccctaacaaaaaagctaacccaggtcccctcattccttcaacttgtgcctgggagtgtgtggtgttagggtgcagccacactcttctatgacccagcatgggttagtgctatggtgggagagtacattgaaggcctggaattagcttggggccagggaagggactgggaggggagagaagagaaggagggaaggatttaggatggtaaagttaggtacagagacctccctgttcaaggcccctgacagctgtccctgcccttcttccccttccctgactgcaggggttatgtggaagtgtgtgtggcagcaggcagcggggaggggaggaacagggaagggggagctggggagcttggctgagggtctgggaaatgagcagggatggggggggatgtggatcaggtttactancacctgccagggaggccatctggggctccttctccaccccagcccccanagcagcccttcccccagtgccctttgcatcgtcccctcccccacccctgctgtgggttcccatcatttcctgtgtcagcgcctggcctacccagattgtatcatgtgctanattggagtggggaagtgtgtc

SEQ ID NO: 44720 - DNA, 624 bp, Homo Sapiens
agcaaattgaatagatgggctgcatctgatttgctttatggatgtaattttacaaaacactcttgggtctctgaccccagggagttaagagtgcccagaggaggtcctacacattaaaggataaagccccccagtgatgctggcaagcaaatgtgttgagttcttaaatcttcatttggttttctgttcaggattttaattgcaaatgaatttatttctccagtttatctaaagacctaatttcccaatagtttcctctgcatttatatactctgtagtgtttaggcaaccctgttataagtttattaatattatgtaagtgttgttcttgtatttatgtatagtgtatgtattgtaaatatactcagagcttttttccttttactgtaaaatggtgatttttttgccctatgataatgtaaagggagaccctcctaatgagattctctcagaggatgattattccagtctattctcagagatttaaatgaacaagtgttattgtttttaatggtgtctcagacatattctgttggtgcattgcttttctgtattcaactttcctatgaattgagctgtgaactgaaatagagtttaaacctttaactgtatgcatttgtataa

SEQ ID NO: 44721 - DNA, 768 bp, Homo Sapiens
gttatactgctgctgctgcataggtacatggtataagaatcatgttttttttatctttgagaaaatgagttaaaggcttgcttcttcacttaactgcaacacagtttacagattcagatttcacattttgctaagtataaatgacatatcttaagactaatgaaaactttcatgttttacttgtatttattatggtaacttttcttttcatagccatgttcactgcccacttcccatgagatttctccagtgcccgccagacctgactggaaaaagtcattatcttgatgaagcagatgtattttacctaaatcccttaaactggttacatagagagtttcatgatgatgcatcattgcctactcacttgatcaccttcagcattttggaagaggaaataagcgctttcctaatttcaagcaattataaaagaactgctgttttcttccacactcacttgccagagggtcgaattggaagtcacatatatgtctatgaacggaagttaaaagggaaattcaacatgaagatgaaattctgaactttcctagataaattaacattgctgggtggaaatattcagatgctgcttaaatacttcggtaaacactgggtaagattcatggaacttagaaaaaagctgtatgaactgctttaccaaatatcactactgaggaaatgtataaaataccacatagtataaaattacatgttaatacaatgccagattttaaataaagacctttagttttcaaaaaaaaaaaaaaa

SEQ ID NO: 44722 - DNA, 594 bp, Homo Sapiens
cggacccccggcctttagccgttcgcttagagggcgcaggcgcgtcgagtcccggctgcgcgctgcgcggggccggcgggctggagcccgggccattgccagaagacgtcttctcggggcgccaggattcacctttccttcccgacctcaacttcttcgcggccgactcctgtctccagctatccggaggcctctcccctagcctacagggttctctcgacagcccggtccctttttccgaggaagagctggattttttcaccagtacgctctgtgccatcgacctgcagtttccctaacctgtttcctcctcccggtcctttcgacccccgcgctccttggccgtctactggaaaaatcgagcctctcccaccctcagtcgcatagacttatgtgttttgctaaaattcaggtattactgaattagcgtttaatccactccctttcttcttcttctaaaatattgggcactcggttatcttttaaaattcacacagaaaaattccgtttggtagactccttccaatgaaatctcaggaataattaaactctagggggactttcttaaaataactagagggacctattttcctc

SEQ ID NO: 44723 - DNA, 646 bp, Homo Sapiens
aactattgccatggaatttgtaagcagttatcctaatccatctggactctgaaaatgcatcctttatgagagggagtgaatgcaaagataagggtggggaaacactaatcatgaaaagaatgaaaatcagtgttcagttttaagagcaggttgtattgaaggaagggattaaaggaattatccagatttgaggtggcacatcttccaccactccctgcaccatcagcatgcacggagcgcataaaacaagccctgctcctaatggcagtgaaacctcggatggcctccatcaggtcaatacaactgaattgctgggctgacttaagattgaaggactccattttagtaagtagagaagtgtgacctttctcaacccaggttgtgaatgtggattcacacttatctcaaaaaggcacctggagttttaactttatgtcatgtctcagtactggttgcaaggtatgaccaaaagtgttccttgaatggcacctttttgaatattaatttagaagaaaacatgccagactgacatacttaccccctccgcactgttactacttccttaccagccctatgtactgcatcaatgtctacaagaaagcactcttcattaaaatgaaatatatatattaaaaaaaaaaaaaaa

SEQ ID NO: 44724 - DNA, 563 bp, Homo Sapiens
  misc_feature (563)..(563): n is a, c, g, or t
ggagattacatctgctagaaccttttgccttaactattcaccaatatatgctaatattcataaatatggattgactgtttacaaacattagaatcttgtcttggttccattttgatggctaatatttgttatcttaattaagactatttctgaggtcatgattacttgaaaatattgactaaaactgggtccttagaaattccaggtggagctgatttacctatgactgaggggaaaaaaaaatcaaattttactgataatagtaatgctccaaatgaattaatgacacatctgttcaataaataaagagcttaaatatacaaaacataagaaatctgggcaacaaaacttgtggtctttacttttgaatagctacccaagaaaaggttttaaaggtaaaagttatgagtaatgtcatcacaataagctcttgtttaaaattcttttcttttatgtataattaggtttatgtttcatgtctttttaaaaccttataaaagatttaattatcacatctattcttcaatgtggaaatattaaatattgttggttgtaaaaaaaan

SEQ ID NO: 44725 - DNA, 787 bp, Homo Sapiens
gccaaggccaagcctgtgacacgaggagcgggtgctggcggcaggcaaaggggacaaaacaaggagaggccaccacctgttcccaacccagactatgagcccatccggaaaggccagcgggacctgtattctggcctgaatcagagacgcatctgaccctctggagaacactgcctcccgctggcccaggtctcctctccagtccccctgcgactccctgtttcctgggctagtcttggaccccacgagagagaatcgttcctcagcctcatggtgaactcgcgccctccagcctgatcccccgctccctcctccctgccttctctgctggtacccagtcctaaaatattgctgcttcctcttcctttgaagcatcatcagtagtcacaccctcacagctggcctgccctcttgccaggatatttatttgtgctattcactcccttccctttggatgtaacttctccgttcagttccctccttttcttgcatgtaagttgtcccccatcccaaagtattccatctacttttctatcgccgtccccttttgcagccctctctggggatggactgggtaaatgttgacagaggccctgccccgttcacagatcctggccctgagccagccctgtgctcctccctcccccaacactccctaccaaccccctaatcccctactccctccaccccccctccactgtaggccactggatggtcatttgcatctccgtaaatgtgctctgctcctcagctgagagagaaaaaaataaactgtatttggctgcaa

SEQ ID NO: 44726 - DNA, 787 bp, Homo Sapiens
  misc_feature (784)..(784): n is a, c, g, or t
agaagcttttgtctattttttaaactcattgattaaataatgattaatgcattctccacattttaatattgcaaaggcccattggagtttctgaagtggctccacagaattgaaataatttcaaataactgtaaaggaactgaaaatcttcacagagatgaagtggggtttccattaggtgctttgaaatttgataacaaatcatcaacttccactggtcaatatatagattttgggtgtctgaggccccaagattagatgccactaatctccaaagattccctccaattatgaaatattttaatgtctacttttagagagcactagccagtatatgaccatgtgattaatttcttttcacactagataaaattacctggttcaaaagtggtttttgtttattaaatttggtaataaatatatataatacacagacaggatagtttttatgctgaagtttttggccagctttagtttgaggactccttgataagcttgctaaactttcagagtgccctgagacacttccagccatccctcctcctgccttcattggggcagacttgcattgcagtctgacagtaattttttttctgattgagaattatgtaaattcaatacaatgtcagtttttaaaagtcaaagttagatcaagagaatatttcagagttttggtttacacatcaagaaacagacacacatacctaggaaagatttacacaatagataatcatccttaatgggaaagatatttgaagtattaattttaatatattaaatatgnatt

SEQ ID NO: 44727 - DNA, 742 bp, Homo Sapiens
aacgtatccaggcatttcgagaagacattatgttatggcaagtaagacttaaaagtaatcgtcctagctattacataatccaagattttagcagcatattgaagagaatattattaatgaaaacattttgaaagaaataaaattagagatatgtggcatctcacttctcttgtctcaaactttgaaccatttctttccagaagaaaaatttgaaacattaagggaaaacagttgggtaaaagatccatttgcttttcgaaaccctgaatcaataattgagctaaacttggtgcctgaagaagagaatgaattattgcagcttagttcttcatatacattgaagaatgattatgaagaccttaagtttatcagcattttggatgaaggtaaaggaagactttccattgttaagtagcaaagagtgtcctgctattgctaccattcacaacaactagttgtgtgaactagggttttccatcttaacgcagttaagaacaaaggaaagaaatgggctgaattgtgcagcagttatgcgggtagcattatcttcctgtgttccagactggaatgaacttatgaagcaggcaaagcacacccatcatagtaaattaaaatcttaccatagcttttggctttgtatgccttaattggagtaaacccctatgctcataattcccacgggacctataaaaaccggggaaaacttttctgggcccgcttcacaatctcggcacatcttcaa

SEQ ID NO: 44728 - DNA, 958 bp, Homo Sapiens
  misc_feature (491)..(491): n is a, c, g, or t
  misc_feature (697)..(697): n is a, c, g, or t
  misc_feature (835)..(835): n is a, c, g, or t
tcgcggggcaagctggagcagaagctcaaggtgggccttcagcatgtacgacctggacggcaacggctacatcagccgcagcgagatgctggagatcgtgcaggccatctacaagatggtgtcgtctgtgatgaagatgccggaggatgagtccaccccggagaagcgcacagacaagatcttcaggcagatggacaccaacaatgacggcaaactgtccttggaagaattcatcagaggtgccaagagcgacccctccatcgtccgcctgctgcagtgcgaccccagcagtgccagtcagttctgagcgagcggcccctggacagttgcagagaaacacaggcttgtcgtgccgtttaagctttgcttgcaagagtggatgccccgcaatcgttcctgctctcccgggccccgggcctggggcatgcgttgcacctgcccggcccggtggctgcgcctccctcctccacctgaccaacgcgacattcctnccctcacgcctggcccggtcccttccagggcaactcccaaggatgtggtgacatgcagggttcaagtgttcttggttccaggcacctcccggctcacggggagctcagaggtccatgccgaggagaccaggcaggacctcccgaggctgcgccccggccggcccatgcgttttgtgatcccaagtgactctgtgggaagggtgggngacgaaggcgtctgggagggtttacagggaaggcccttcccgtgcatgcttgcccccccgttcatttttttcaccaaagccgtttgcacggatagatacttgtgggtccctttcttttaatatataaatatgttgggngaagaggaggtgttttgggttgagttcccgttctaaagccccttgtctggctttgtagcgcaactcctatgttgttccgaaacctcttggcccgtgcgtgtaggggtgctattagtcctcact

SEQ ID NO: 44729 - DNA, 623 bp, Homo Sapiens
atctcttctccaaccaacagaaaagactgctcttcaaaggtggagggtcttcttgaaacacagctgccaggagcccaggcacagggctgggggcctggaaaaaggagggcacacaggaggagggaggagctggtagggagatgctggctttacctaaggtctcgaaacaaggagggcagaataggcagaggcctctccgtcccaggcccatttttgacagatggcgggacggaaatgcaatagaccagcctgcaagaaagacatgtgttttgatgacaggcagtgtggccgggtggaacaagcacaggccttggaatccaatggactgaatcagaaccctaggcctgccatctgtcagccgggtgacctgggtcaattttagcctctaaaagcctcagtctccttatctgcaaaatgaggcttgtgatacctgttttgaagggttgctgagaaaattaaagataagggtatccaaaatagtctacggccataccaccctgaacgcgcctaatctcgtaagctaagcagggtcaggcctggttagtacctggatggggagagtatggaaaacatacctgcccgcagttggagttggactctgtcttaacagtagcgtggcacac

SEQ ID NO: 44730 - DNA, 719 bp, Homo Sapiens
ctttcataaacatacttcatagatgttgttttgaaatgtttctaaatatctaaaatcatttcaacagcagaaatgatttttattttaacaaaagattatgatagcccttgtagtgtttaaaagtggtcatatttattactgactttgagtcaggtgttaaaatagcagtgccacagctcgtctcttgccttagtgtgctgctgtgagagtcacagtggaaactgcagggaggaggtgtgttcctaagaaccaaaatccagcacagcatcctgtgaagccacgtgtaatgatggtcccataaggaaagtatgtgaatatggctcttgtaaaggattaactattgtaattttagcttatgctctgtattctgttttctatggaattatttaagcccttttagtgacctttgtcctggcccatttaaaaactaaaatgtagtatatattgtataaaatggaaatatcattattgcttcattaggggaaactgtacataggcattgaaagaagggtaaaagcaagcagttttatcaggcaattgtaaaacaccaaaaatatagattcgtctttgacgtgtaacacactaaatgtattttgtacagcatctggtttaaaaggtgccttaagagtttaccattacttgctttgttctatatacagattatgtccaatgtatcattttgaagtaaataaccttattttagtaaaaaaaaaaaaaaa

SEQ ID NO: 44731 - DNA, 499 bp, Homo Sapiens
tttttgatttgtttaaattgctcgttacagttctcttgtggggagggactttgtcagtcattttgcatcttaagctagactaaactttttgttgttgttttcctaaaaccataggtgcaagctttgccgctgggaagtcatattgaattaagcacttttgaaaatgtcactgtttgtgacacacaatgttctctacagaaaacttcttctatcttatgtcattttagcagtagatgtagctgcctgccaccaggtgcaatatgtcatttgcatcagccttttcagttaaggaaattaaaacttggcatgcattagttcatatgtatgaggttggctgtgtccccaaacagcaattgcttgtacaagatagaagtttgcttctcagctgggcatggtggctcatgcctgtaatccaagctctttgggaggccaacgcgggaggattgtttgagcccaggagtttgaaaccatcctgagcaatagagagacccccatctcg

SEQ ID NO: 44732 - DNA, 661 bp, Homo Sapiens
atgaaccagtccatcccagtggctcccaccccaccccgccgcgtgcggctgaagccctggctggtggcccaggtgaacagctgccagtacccagggcttcaatgggtcaacggggaaaagaaattattctgcatcccctggaggcatgccacaaggcatggtcccagccaggacggagataacaccatcttcaaggcctgggccaaggagacagggaaatacaccgaaggcgtggatgaagccgatccggccaagtggaaggccaacctgcgctgtgcccttaacaagagccgggacttccgcctcatctacgacgggccccgggacatgccacctcagccctacaagatctacgaggtctgctccaatggccctgctcccacagactcccagccccctgaggattactcttttggtgcaggagaggaggaggaagaagaggaagagctgcagaggatgttgccaagcctgagcctcacagaggatgtcaagtggccgcccactctgcagccgcccactctgcggccgcctactctgcagccgcccactctgcagccgcccgtggtgctgggtccccctgctccagaccccagccccctggctcctcccctggcaccctgctggctcagggagctctctctaaagtctgggagctggccct

SEQ ID NO: 44733 - DNA, 584 bp, Homo Sapiens
  misc_feature (419)..(419): n is a, c, g, or t
gggctgtggcccaggcccctcctggagcaggccttggtgttggccagggccctggcctatgcacccagctggcatgcaataacaaggctgcagacggtgactggccctggcttcctgggtggcggtgcggactgatgtggagatgtgacagccccgatgagcacctggctggctgcagggtcctacctctgggtttcctggaagtggatctgggccaagaaggagagggagaaaggcccgagcccctgccttcccgggcctttctctcctgggctgtctctggtctggtcagcctggctctcgggaaattcagccatgagcagggaaagaactctcccaaccctggggcctagctgtataggaggaattgcctaagggtggcccactcttgtgattgccccatttcctctggcaacaanaagcccaaagagtgtttgtggggcccaagtccccccacagggcctctgcagggcatggccctgatttccctggtttgagactcacttcctcatctccctgtcctctgagataatatgagtgagcacttaggtatcatatcagatgctcaaggctggcagtacccc

SEQ ID NO: 44734 - DNA, 948 bp, Homo Sapiens
tggaccggtccggattctccggaatcgtcgaccacgcgtccgataatccatgttatagaaaagaactttgcagtcagacattcgtcatgggaaagttcagaaaaaaataaagtccttttaagggaacttcctgaattttgtgtattaatgttctttaaaagtttaagtattctacaaaaaaaaaagttttctccattgattttcacctgtggttcataccagagacctgagaatgtttgtaaatgtacaagtatcaaagttcttacagttaattactgcaacttgctgctggacaattgtatacagagttaaaggcaggtctgaataagacctagctttgtttttttctaatggaatgaaccattttcctcttctgaaaattctgtatctgagcacatcaagagactcttgtagcagtggttacccagacttacagaattatgtcctccagaaaccagcaagaacacttggaatgaacgaatgaacttgtagggggcatagaggattcttgaaaaaaaaaatgcaagagtgattttctgttacattcaatttcaaactctctaattgtgggttttctcctgaagaattttttttcacatactttccaaaagaccaacaaatggatgttgacaacaacccaatgaaataacattttgcatatctgaaaagaagcattgaatataagccaaaagctttcactgaaagttttttttttcttaaaaataaaaaaaatatataagtgtaacatgtttttcattccaaaactggtagtgggtatataggaattaaagaataataatggttgctttcttattcaaactgttgggtcatatgtaccggtatattaactttaaaaccccccaggaaaggtattatggtatggcagtagttatacttaaagttttaggaaaaatgaaaaatttttacaaaaatatggttttggtaccc

SEQ ID NO: 44735 - DNA, 668 bp, Homo Sapiens
  misc_feature (14)..(15): n is a, c, g, or t
  misc_feature (637)..(637): n is a, c, g, or t
cacgaggggctctnntggtaaagaataacccacaaacacctgatcttgattggaaagcattgtaggtcattagggaaaactgatgatgctgactgttgctccagctgtgttggcaattcaagatgaccttgttactaactgaaagttgctgtcaaccttagcaaacaaaccagctaacaccattacagcactggttaagtagatttttactggcactggctggcgttcagctgaggaaggctaggatacagactttaatgaccaagagccagactagctcgagctagaaatcagcaacaaatacctccttgtgctatttgaatgctaaggtattagttgcaataggcttacgccttcgctcctctagtgaggggaatgagcctgatgacactattactgtttacctgtcaaaccagggtggaaatttagagggatgcaagtacagtatgtctcattaagcagtctctgttgctgattatatgaagataaaattgttgtatatgctgatctgtatgttatgtacattttcacagtgattgaatcattgtaaaaagaaaaaagacaaaaaagaatcaccactgtctattttatgaagatgataaagcagctttattaaattattacagttatgtttcanatggtgttatctgccacattgtttcctttta

SEQ ID NO: 44736 - DNA, 595 bp, Homo Sapiens
ttgttctttcattgcaatttgatacagtataggctacagtatttttacagggtaaaactagttatggcagtagtatgcacagcagtgttagccatttcatatgtatgtaatatgcacgtgtgtatccaatctgcctgtgacatgcattttactctttgcagagaatgagctgcagtccagtttaatgtcagtttaataagtggtctctttttagcagagcaaaaaaatatagcgtaaatacttattttttttaaaaacttacttaaatttgtgtgtaaaatatttatttgaaggactttaatatgtaaaaataattgtcttctatgccaccctacagattttattttaatgtgaattatttttttcatttcatttttaccagtatagtaaaaaagtagaaaagcaagtatgatatttttgtaagataatttatttggggattcatgttccctgttagacaatcatgaccttttctacttgtctttttatatataagtagtagatttccacttgtttagggattaagaagatgttctagaatgtagataccttgtccagccataggaatcaaaataaaaaactaaaaaagttcaaa

SEQ ID NO: 44737 - DNA, 549 bp, Homo Sapiens
gaaagaatcagtaagatgacagggctgacttcattagatgaggagcgtttctatccagtttcctggaggaataaggacactgccttttcagattaaagattgtctgatttagagaccatggaggtggacagagaataacaaaaccgtgatggcagtcatcatgcttattgcagttagcacacacttttcctgacaggcacagtgctgctgtgctctacaaatgaccatgaaatagagcacgccatgactttaggacacagggatttttatgggaagagagttcatcagggactgattacgtaggagagacgatgcaggggaaatggtggccaccgtctccattgaatagcaatagctgctgtttagcaaagactgattaaaaagtactctgatttttcaaatggaagagagaacagttaaatcagagtagagagtttaatcaaaactaccagtggaacatgttcttgagtaggattcacatttaactgctggcataatttgcaactgttggattttctcatgtttggaacaataaagttgaaattttcc

SEQ ID NO: 44738 - DNA, 809 bp, Homo Sapiens
gtgttgtctctgttatatgatgttatttttgccaggagactacaggttgatttagcttgatagctgaaatttgatggaaaactgatttccatttagtcttaccaagtgttgcttctctcttactagacagatatccacttagtaaaatctaaagcagtatgtaaatgaaaccagcaaagagagtagggtttattttataaacattcttaatgctaagtaaccagttgttcaatttattatatgtgtctgaggacattaaaacaccataagattgtaataattggttgtgccaatgtgtgagggatttacctttaggctctctgtcaccagtgatttactagtgttagctgtttaacacattatctgtatttagtagtgattatttatttacaagttggtggtaattcagcagtcaggactctaagcttttatagttgaattgaggaaatctcgcttttattcatttagctggcaactgcctttattgcagacctctggtgcttggctttcaaggaagcctatgagatgccaaaatcacacctttagagagcaccttgctctaataggtgatgcatgagcaaacagtgagatttgaaggggttttaacataatttagaatgtgaaaaaaatatcaattcatatctttcaagtactaacccctcaaaaaagcccacacatacaaaatatgtgatgtgataccactttgtcttttaggtctttaagtaactgaagttaagcacagaaaaaaaaaatcacttcatggaaattcagtaagaaacccaacttctaaaaatgcttgcagatgagct

SEQ ID NO: 44739 - DNA, 833 bp, Homo Sapiens
ccacgcgtccgaagctataaaactaagtcttcatcttgtatttggaaaattggttcaagctgggtatgagacataagtgtagtcagctctgggagaaggttgctcttaaggagaagcacggacctgtggtttagcagcaggaagtgcaaatgggactggcttgtgctctacctggcagacctggattggcttcaggcagccagtgcctggaaaagcctggagaattgggccgtacttgaccctgattctcatcaggcacagatgaatcacaggcacctaagaatcggcacagaacttccatgaggcctcagtcagcattttttcacaaaatgagctgaggccattcaaggaggctagaaagagggaactgaatccagagaggaagagtctatagtcatcaagttgtatccatgccagcctccctccacagaggtggcagcagcgtggctcaatctgatccacctccatggcacccactgggtaggtgcttcataaagctttaccgagttaaatgtgaacaaggcctaccactttgccttgggcagctgcaccaaattagaatttccagatgtgactcatctcatattccaacagctggagtgggtcatcctttacccctgtggctccttcctacagctctcctgatctcagcacaagcaggggagcagctgggggaacacagctttatgtaattacctctgttcaatatttagcaagttgcattgtaacattgtaactgtttgtttctccttggatgatgagctaccccccagaaggggtcatatcagattgggtctcattaaaatgtctgatgaatgaaaaaaaaaaaaaag

SEQ ID NO: 44740 - DNA, 643 bp, Homo Sapiens
  misc_feature (556)..(556): n is a, c, g, or t
aggtgcatgcagttatgtctgggttacgtgtgaaacgtacatctggtgaactgtatacttggctcaaacctctcaaaatttagaggtgctggaaaggattgtcagttggagcctttagtagacaaaaggcagaaagtgagcatcatttcagaaatgctttagtatgcacacttttagctgatattttgatatatagaataataatatacacagtggagaatattcaaagagtggctgaagggagaatacagagccagtagggccaaaatgaaacttctaggatgtcttctgaattttcagcacatggggggaataagtgaacaaatttcccaacatcgtgcaatgctttatagcacaatgatctagatttcagactgtgttaaggttttttctttgttgatgttgttgttttaattctaatgtgcacggtgtgactggcagagtgagtttgctttacgagtgattaattgcttggcaggcacccacgctatctgcatttccagaactttactgatgcatccatgtacatttccactgaggaattttggtgggtggngggaggttgtgctgcctcacaatgtcacgtgtattaaagtctgcagtcacttctgattcacttgcactgtttgggtgtcaggtttac

SEQ ID NO: 44741 - DNA, 619 bp, Homo Sapiens
agtcacctggcacagagcccattttgtttggtgaatgggtgaagccaggggctcacatcaatgctgttggagccagcagacctgactggagagaactggatgatgagctcatgaaagaagctgtgctgtacgtggattcccaggaggctgccctgaaggagtctggagatgtcctgctgtcaggggccgagatctttgctgagctgggagaagtgattaagggagtgaaaccagcccactgtgagaagaccaccgtgttcaagtctttgggaatggcagtggaagacacagttgcagccaaactcatctatgattcctggtcatctggtaaataaaacaaaggaacttgatgttgagatggatgcttgaggaatattgctgctggttctcataatttctagagtaaatgagggagtccagtccccagtgaactctccttttgtgcttatcatgttttaccttaaatgctgagatcctcatttatgtttgtagttggaaagcaaagctaggtagccatttcttctgttctaccaagttataatagcattcatttccctttatatttccctgaaataaagcacattccaattgaaaaaaaaaaaaaaaaaaatgcggcatt

SEQ ID NO: 44742 - DNA, 724 bp, Homo Sapiens
atggaaaatatgaagaaaatccaatggtgtggctgtgtgaagatcccaattcaacttatccagaataattctctccattctcaaaatttcagatgaggaacatccacagaaactgtctcttgccaatacctttagtactggaattctctcatcttcctcaacagtcttggcagctaggaaaaaacagctgattgcaatacaactcaagtattttggatgagcctttacggtagctaaaaacctatccaaaagactgctagccagagcaaatgtttctgggtaaaggttgaattggtacttgagtttggccagccattgaattacttcatctctctgggatggagaaacattctgatttgaaggcattttccgcacattcactttccacatctgtgcttccctagtgattgccttttccaacaggaaagacaatctctggttttccaaaggccctggaaacttcatgatatcctttggatctgcctgctacccagcttgctgtagctaccttctcctcctcttcctcctcctcctcctccccggcagagctgtaggcctcacagtggtgacgcggggtcatccgggggcccgttaccacctcattctcataggcgcgcggaggcggtgcgcgcgggacgactcggccaactgaggagggagcaaaggggaagcggatcggggggcgcgggcgcgggcgctgggcgctcgagcgggacgcacggct

SEQ ID NO: 44743 - DNA, 552 bp, Homo Sapiens
ttttttttttagggtaaatttctgagtaaatttattgatcagttggacttttcacgcttttgaaatagctttgctaaaatgctccccctacaaagttgtaggaaatgggaagaggagtaaactagaggcaagggagttgagagagctggaaggcatggtggctaagggctacggttatcaggtgaaatttgagatttgtaggctgactatattttcaagcttctgaacttttgcttatgcaaaatattcatcccaaagcctctagcgtcatagtttcctcacccaaattactatgtttccacaagatttatatagttggtctatctctgcggtccttgaaagtgaagttggtgttactaggctgtgggttttgggggctcaacagtgacctggagtgtgcaaataaatgttaagttgaaacctcctttgtggtcttgcaatggtttgacacacagaagcaatcttaaagggaatgaaagctgtccaaaggttcaaaaagtattgaaggggcctctagggaccctcaacctgcttttccttacttccctgggc

SEQ ID NO: 44744 - DNA, 1237 bp, Homo Sapiens
cttggcacgaggtgaagaccaagagtcctgacagccagtggcctccccgcgctgcaactgaacagggaaggctttctcgctgagtccagcccccagactcagagggccccctactcaggaccccaggaccttgccgcactgctggagcagatcgggtgtctgaagtacctgcaggtgtttgaggagcaggacgtggacctccgcatctttctgaccctcactgagagcgacctgaaggaaattggcatcacgctgtttgggcccaagaggaagatgacgtccgccattgcccgctggcacagcagtgcccgcccacccggggatgccctggagctggcctacgccgaccggctggaggctgagatgcaggagctcgccatccagctgcacaagcgctgcgaggaggtagaggccacgcggggccaggtgtgtcaggagcaggagctgcgcgccgtggtggagagctgcctgctggagcaggaccgcgcccgcgaggacctccaggcccggctgcgggagacgtgggccctggcccgggatgctgccctcgtcctggaccagctgcgagcctgtcaagctgagctgtcatctcgagtgaggcaggaccagccccctggtgcagccactctgggcctagccgtccccccagctgactccaagggctggcaagcgtccctgcaggccatgagcctccccgagctctcgggagccctggaggaccgtgtccgtgagatggggcaagcactgtgcttagtgacccagagcctggagaagctgcaggtgctgaacgggaagaagtggcgggagacctagcctgcgggccgaatctgacgttgggtgattggtccaccctgaagctgtgtgccagggagtgaggaggacagtgagcaggtagctgccatgtgcagcccaggcccagtgggggccagaggatcaggccccgggagcagccggcagacagaggcaagacgggggctgcggccctggctcggcagctcgggccagcactgaggcgggacgagggcctcacccagaacctcgtggtgaggcccagagttcatgggctgccctggcccataccaggcagggccctggggggaaagtgtatccatatacacgcacaggtgccaactgaggtgggaccttaggaatgaggactggggcacctggaaaatgccattttttggaaaataaaatttaagaacagctaaaaaaaaaaaaaaaaaaattctgcggc

SEQ ID NO: 44745 - DNA, 499 bp, Homo Sapiens
tttcaccccgaaatacaacagcccataacagagacttcctcggaccccactaacagggcaaggaacaagaagactacaccgctcatcacaaaccctgcctgtatcgaaagccactttcctgctctgaagctactgcctcttagagaaagggaatagctctttatgggctgggggtgagggcccctccccagggtccctgttaatttctggccttggtgctcaggcctgtccacagcctcccttgtctatgtctctatccatgcttaaggggcccggacaggatttcccaaaccagccgaggccccagcacccgccgtctccccagaagccccctcctccttcccccatggtcatatgttgaaagtctattttaaaaactatgttccttgccgtagattgcagagctaatttatcacgtttctctcctgtgagacccccccttttatatgatatatccagaggaagttttgtaatataaaacaggacgcccacactgatg

SEQ ID NO: 44746 - DNA, 705 bp, Homo Sapiens
gatcaattctatgagaaacagcgactcctcatcatctcagctcctgatccttccaaccgatattataaaatgcagatctctatgctacagcaatccacctgtggactggatttgcggcatgtgaccatcattgaactggtgggacagccacctcaggaggtggggcgcatccgggagcaacagctgtcagccaacatcatcgaggagctcaggcaatttcagcgcctcactcgctcctacttcaacatggtgttgattgacaagcagggtattgaccgagaccgctacatggaacctgtcacccccgaggaaatcttcacattcattgatgactacctactgagcaatcaggagttgacccagcgtcgggagcaaagggacatatgcgagtgaacttgagccagggcatggttaaagtcaagggaaaagctcctctagttagctgaaactgggacctaataaaaggaggaaatgttttcccacagttctagggacaggactctgaggtgggtgagtatgacaaatcctgcagtgtttccaggcatccttttaggactgtgtaatagtttccctagaagctaggtagggactgaggacaggccttgggcagtgggttgggggtagaagttcttcctttcctaacccgggcccctgcccagctctccaaagtctttcagaaaagtaaatcctaaattcagtgatgaa

SEQ ID NO: 44747 - DNA, 666 bp, Homo Sapiens
  misc_feature (459)..(459): n is a, c, g, or t
  misc_feature (474)..(474): n is a, c, g, or t
  misc_feature (544)..(544): n is a, c, g, or t
gccaacgaggaggagaagaaggccgcagcaaccactgcacaggaatacctcaagacccatcccagcgggcgtgaccctgagacccccatcattgtggtgaagcagggacacgagccccccaccttcacaggctggttcctggcttgggatcccttcaagtggagtaacaccaaatcctatgaggacctgaaggcggagcttggcaactctagggactggagccagatcactgctgaggtcacaagccccaaagtggacgtgttcaatgctaacagcaacctcagttctgggcctctgcccatcttccccctggagcagctagtgaacaagcctgtagaggagctccccgagggtgtggaccccagcaggaaggaggaacacctgtccattgaagatttcactcaggcctttgggatgactccagctgccttctctgctctgcctcgatggaagcaacanaacctcaagaaaganaaaggactattttgagaagagtagctgtggttgtaaagcagtaccctaccctgattgtagggtctcattntctcaccgatattagtcctacaccaattgaagtgaaattttgcagatgtgcctatgagcacaaacttttgtggcaaatgccaagtttgtttaattggacctattccttcaggatgatacccc

SEQ ID NO: 44748 - DNA, 672 bp, Homo Sapiens
aggcaccgctgcccccagcgtgggggtggccactcctgggccccagaaagcctcagagtcctgccgacggagccactggggtgggagggggcaggggcttggctcgcacccccactttcgcctcctccagctcctgccccgccggccgcgcaccgccatgcatgatgggtaaagcaatactgccgctgcccccaccctgcttctgctgcctgtttggggaggggggcggtgaggtgggggcagcggccccgcacccctcctccttgctgatttgcacacattggccgcttcagacacgcacttctggggccagcccctccccgcctcctccctgcctggcggcaggggtcgcgatgatgggctggagcagtttggggcagggggttctgggacccactccgactccccctccccggcatcatttcccctccccgcttcctccggctggacctggggtcccccctccctgtaatgcactcctgccccggcccaacctcgccctctctcaccagccttgaactgtggacacctagaaaggggcccattcagcctcgtctctttacagaagtagtatagttcatgaaataaagactcttggacttgagaaagaaaaaaaaaaaaaacaaaaaaaaaaaaaaaaaaaaaaaaaaagaaaaaaaaaacaaaacaaaa

SEQ ID NO: 44749 - DNA, 543 bp, Homo Sapiens
ctcaaaaaaaaaaaaaagaaaagaaaaaaaagaaaagaaattgtcctttggttgccttagttaccagagttgaatgaatgtacacatttcggtagtgggggggcagagcggataaccccttccttgtctgtttcctttgagaaaggacactccaccttttcaaaggtacttaaagccatctttacagattgcttgtaatgtaaggaaagagtcatgtcctttggattgattgaggttaaatcatcaaccactagccccctttcaaaatcagcgagatatttgatgattaagtgattcattgggtatgttctggctactgatgttactgaaatctgcaatcgtgtatgttttttaatttgttgcttttgtatttgtaattttatgacatttcgaagtttctgtgtcttaactctttttaattaattttctgcacgttgcttttttctctttgtttttaattccatacagagtattcaattcttgaaacacattaaaataatttgcttgctagggaaaaaaaaaaaaaccaaaaaaaaaaaaaaa

SEQ ID NO: 44750 - DNA, 745 bp, Homo Sapiens
acccatccacgcaccacctccaggacgagaacccttgatgtcaaaaccaagtgcccagtggaggcggtgaagctctcggaaatgctgccacctgtgtgaggccgggtctgaactcgagggagtcggagctcagctgtcggtttaaagagacactgaggggaccgggctgccgccctcagcctgcattcctgtgcgcaatcgattccgcaatgacagcaccttactccttcctgcggcaggctcacccctgcctgtgggatgttgtgagaggaacatgagccagacaaagacttggctcagggctccgtggaacaagccaggatgcacggggagctgggggagcccccagcctggggcagcccagcaggccgctgaacaaacaccccagaagccagcactgtggcaggtgctggggagatgcccctctgagccttcctcccccctcagacctgaatgcactccacagttgggggctgcccctgccactcccctggtaatgcataaaaggggaggggaaggttccctggggcttgagctccctctgtggaggtgaggaggggagattccgttcacatccaggaggggcaacaatgactgaatgtactctttatgtattctacacacgagacgtgcatttttcttctcccagagatgcttgtctggttaaccaaaggaataaccttaacgaaaatctggcttgattcatctttataaactggtgcaagacccaaaaaaaaacacaaag

SEQ ID NO: 44751 - DNA, 792 bp, Homo Sapiens
cagtggcaagttacttatcaagctgaaagacggcaggaaggtagaaactgaccacatagtggcagctgtgggcctggagcccaatgttgagttggccaagactggtggcctggaaatagactcagattttggtggcttccgggtaaatgcagagctacaagcacgctctaacatctgggtggcaggagatgctgcatgcttctacgatataaagttgggaaggaggcgggtagagcaccatgatcacgctgttgtgagtggaagattggctggagaaaatatgactggagctgctaagccgtactggcatcagtcaatgttctggagtgatttgggccccgatgttggctatgaagctattggtcttgtggacagtagtttgcccacagttggtgtttttgcaaaagcaactgcacaagacaaccccaaatctgccacagagcagtcaggaactggtatccgatcagagagtgagacagagtccgaggcctcagaaattactattcctcccagcaccccggcagttccacaggctcccgtccagggggaggactacggcaaaggtgtcatcttctacctcagggacaaagtggtcgtggggattgtgctatggaacatctttaaccgaatgccaatagcaaggaagatcattaaggacggtgagcagcatgaagatctcaatgaagtagccaaactattcaacattcatgaagactgaagccccacagtggaattggcaaacccactgcagcccctgagaggaggtcgaatgggtaaaggagcattttttta

SEQ ID NO: 44752 - DNA, 634 bp, Homo Sapiens
gcttttgagaaatttgtgaacattttcagaggcctcagtgtagtggaagtgataatccttaaatgaacattttctaccctaatttcactggagtgacttattctaagcctcatctatcccctacctatttctcaaaatcattctatgctgattttacaaaagatcatttttacatttgaactgagaaccccttttaattgaatcagtggtgtctgaaatcatattaaatacccacatttgacataaatgcggtaccctttactacactcatgagtggcatatttatgcttaggtcttttcaaaagacttgacaagaaatcttcatattctctgtagcctttgtcaagtgaggaaatcagtggttaaagaattccactataaacttttaggcctgaataggagtagtaaagcctcaaggacatctgcctgtcacaatatattctcaaagtgatctgatatttggaaacaagtatccttgttgagtaccaagtgctacagaaaccataagataaaaatactttctacctacagcgtataaactagcaaaatttgaaaggatttctggcaactaaatgccagctggacatacaacctattttatccaacacattaacatatctactatatttgcttt

SEQ ID NO: 44753 - DNA, 751 bp, Homo Sapiens
  misc_feature (718)..(718): n is a, c, g, or t
  misc_feature (744)..(744): n is a, c, g, or t
acaggcgtgagccaccatgcccagctgggagcgttctttcagcaaaaagtctaattcagagactcaccttccatcctggcactaaacaatagtactagaggtaagatctgccaagaatttctctcacttaagcaggatacttactttaaatataattaggcaagacttatttgagtacttgactaattgtatttaattagaactatgctggatgctgtagacagaagaaataaaatactcaacttggtccctatcttccagcaggttagaggcctttagggaagaaaagcctgtgtgcagggaaagagaacctcaccagaaagtattcaataaaatgccaaagtgatcttacagaacagtgcctgtgacaccggaggggattgttctgtctttgtgagtgaacatacaatgatggggataactggtcctcataccatgcaggtcccatttctgatcaccccactggcaggacaattcacagttcttgagcaaactgagttagggagggtatgctaacgacagaacctatgcaagttcttagaaatattttttgtttgctgaaataaagctcaatcaacacactaccttaaaaaaaagtgggagcagtggcatttccatgcctcatgctcaccatcatgaggttaacttcccgccgtcgcctcttgcctgccaggggtttttcgggagcccctctctgttccactctgattccttttgnttctttgctgaccattcactctctgngtctggt

SEQ ID NO: 44754 - DNA, 590 bp, Homo Sapiens
gagtgaatatttcatcagcagaaattgaggtggggggattgatagcgctggcgagggaagcagctggaaagagacagatggcaccctgagacagcccagaggtgaataggacccccaggctgcagggataaagctcagtggtggtgttacctcaccggggaccagtgtcacacagcaaagctggaacaacagaggcgtgttgtgggggagcctcagaggggacaaaacctctgcctgagatcccaccccaggtgggcatgggggccactgaggttggggatgaaaatgccggtaccgtcagtgcacagccctgttccagacagtgctgcctggaagatttctgggctctcctgaggcgccaccccgcacctgagccacctccttggactcctgtcctctaccccttgaggacctccctcccttctaccctagctgtcttcttgaacttgggactctcctttcccaagacttccatcactagctcctggagggactggactttgcatcttcccttcgcgtggagcctcagtgtgagaggccctagccaatgcgtgcatgtcagaggtggtggggaccacatcagaagaaga

SEQ ID NO: 44755 - DNA, 636 bp, Homo Sapiens
ctggaagtcattcctgatgtgctgtgagcagaatgggcctgcgattttgcaagaatgcaaaaccacatgaaaatttcaagaattcactgatctgatgcaaaataaaaatttatcattacatcttgaacccaggaagcttacagcaaagagactatgctttatgacgtcagcaatagataattccacgttgcctttgtgatttgtatatatagcttacatttgtggatcactacatagccagattcaaaaatattttacttgttccatccacagttctctacagaaagaaccaatgaacccaataggaacaaattctctgtggaaaacaaagcatagctgtagtagatacgaatccaatcacagaggaaacaggaagagaaaaacatccaagactacagtgaaaactggaaatggtctgttttcgtgatattcgtatgattaagatgcaaattttttcttaggaaaatgtgattgttaactagcattctgttttacatgttgacatttctaacacacacaccactgatttgaacttcaaaatttattttctgattatatatgctaggtctgattctgaagatacaagaattcaatggtggaatttgtctcctgaaatttctagattcataattagaa

SEQ ID NO: 44756 - DNA, 573 bp, Homo Sapiens
  misc_feature (565)..(565): n is a, c, g, or t
ataccccagggaagccactgactcacaccgctgcagaggctcctgggcccaatgcccgacccctgctggccagcatggggcctagcactggaagatgcctcaggtgtgtttggagtgggggaaacggaagtagggcacgctctcagagaccaggatagagagtcagggaacctgggaaagagtagtgccagttccgggtaggctgctgcaccaggccctaccagctcaggctataaacagtctgctttgccccaagtcttttccgtccacccccaacagccttgtcatcacttagctactgatcacgcccatggcttgacattggagggttacattagtggagtccgccacagcttcgaaccctctccccagatgccctttgcctctgctgtggccctggggttttatcaactgtccccttcctatcctcctctccaccctgttttttgttttttttttttttaaataatattttgctatgggggaggggaatatcaaatggacaagatcacttttaaatggtagtttttataagatgttataaacttgtatctttttaccattnaaaaaaaa

SEQ ID NO: 44757 - DNA, 714 bp, Homo Sapiens
gtgatcgcctccttcgaccagctgtacgacgcctggcggggcgggctggactggtgcaatgccggctggctcagtgatggctctgtgcaatatcccatcacaaagcccagagagccctgtgggggccagaacacagtgcccggagtcaggaactacggattttgggataaagataaaagcagatatgatgttttctgttttacatccaatttcaatggccgtttttactatctgatccaccccaccaaactgacctatgatgaagcggtgcaagcttgtctcaatgatggtgctcagattgcaaaagtgggccagatatttgctgcctggaaaattctcggatatgaccgctgtgatgcgggctggttggcggatggcagcgtccgctaccccatctctaggccaagaaggcgctgcagtcctactgaggctgcagtgcgcttcgtgggtttcccagataaaaagcataagctgtatggtgtctactgcttcagagcatacaactgaatgtgcccttagagcgcatcagttttaaagtcattaagaacatgtgaaaggtgttttttttttccaatatgaactcatgcaagttaccaaaactgtgataacccttttttacttactgtaaagagtcattttcataaagatcaattcattgatttgttttttggaaagctatcattccatatatattataaattaatataaatttaa

SEQ ID NO: 44758 - DNA, 745 bp, Homo Sapiens
  misc_feature (17)..(17): n is a, c, g, or t
  misc_feature (729)..(729): n is a, c, g, or t
ttagccgccgccccggnggccggtgtgggcgtgacctgcaggcgtccaccctgcggctacgggagaagtcttagtagcttgtatctggagtcttgagaaacacaaaccttacaaatgcatctttcttttgtcataaaattggaattacaattttcaactgggaaacagaaacacatttcttagcgtgctcagattttatatatcaccttatcaattttttccaaaacatgatttaaagcaacatctgtcctagtataattgttgcattttaaataacaatttattgaaaaatgttaagttttaccagcctaaaaaaagtaacaaaccaattaagtgtactttgggggcagggaggagtccttgatttgaataatcaggagttttgttggtccagtttcgccttctgagcagttcttctgtatcccgggaaaagtacgctcggccccaaactggtatttgtcagacgatacatgtaaaagtttgtccttgaacgtggaacaagacttgtgtaaagtctgagacgggaactagtgatcactagctcaagaactgcaaatgagacaggaagctgttcactgtgaaacagtctcttgcttgtcgtgtatttttcgagtacttctgaagtgtgaagtaaaaaaatctggctaatttatttgtacaaatacactttgataattttttatattttcataaacttttacagatgtaaaattaaagaacttcacttgntaaaaaaaaaaaaaaa

SEQ ID NO: 44759 - DNA, 894 bp, Homo Sapiens
cgcacatatatacacacacacacacacacacacacacacagaagtaagagactcagcctggagattaattagcattctggcagtttagacatcagacagctgccctaaataacccttcaacgtttcttcacttgtgcaaggttccacagagtaagacattgggtctattccagctcattcattttatattgaaaaaaagtaattttaaaaatggtggctatcagctccagccccgtttccaaaatttttcaaccccaccctgtgtggatttttaattaaaactagtagttctcttggtgttaaaacacttctgtcctgtgaggtttcccaagtggtgtttctcttgtaaagtgtgttggacaaatgtgaagatgcattgtagtttaaccatatgcccacatttagtctctttattcctagttggtgagaaacctgtatctttctatgctgcttttatatctgtatgtattagtgatatctctctagtagttaaaaaaaaaaaaaggaaaaaaagactctatggggctagtcctcaagaaaaagaaaagaaagaaaagctatcttccggcacctgcatatgacactcgtcttataggcatcaaccagaacacccgtgaaaaaaccagaatgcatacagcgcaaatgcctaacaactaatcagagggaaaagacgaccacacagggactgaccaataccgtgatatagccgcacagggcccaccacaaaagaacacccccataagggccaagtgactaaaccagaacgaacaagaccacacaagaggcacggacaacacacccccgcaacaaacacacgagcagcaaaaagagccacgaaaaagacacacaaggaactcacacccacggcaacgaacaaacacgaaaaaacaacag

SEQ ID NO: 44760 - DNA, 676 bp, Homo Sapiens
acggctgccccctctgtgaacgcatcgatgacgggcagggccaggtgtctgccatcctgggacacagcctgcctcgcacctccttggtgcaggcctggcctggctacacactggagactgccaacactcaatgccatgagaagatgccagtgaaggacatctatttccagtcctgtgtcttcgacctgctcaccactggtgatgccaactttactgccgcagcccacagtgccttggaggatgtggaggccctgcacccaaggaaggaacgctggcacattttccccagcagtggcaatgggactccccgtggaggcagtgatttgtctgtcagtctaggactcacctgcttgatccttatcgtgtttttgtaggggttgtcttttgttttggttttttattttttgtctataacaaaattttaaaatatatattgtcataatatattgagtaaaagagtatatatgtatataccatgtatatgacaggatgtttgtcctgggacacccaccagattgtacatactgtgtttggctgttttcacatatgttggatgtagtgttctttgattgtatcaattttgttttgcagttctgtgaaatgttttataatgtccctgcccagggacctgttagaaagcactttattttttatatattaaatatttatgtgggtg

SEQ ID NO: 44761 - DNA, 939 bp, Homo Sapiens
ctggaccggtccggattcctgcgaatcgtcgaccacgcgtccggctagatgtaaatctttagttccaagaagtgatagagtttctgctttaataatttgttgataagtttacataaacagaaataaaagatactatctttaccgtagtagttcaggccaagattatgcttagttttagttctccaggtagttacttttgccatgtcctattgatcagtgacactgccagaggcccataccggcaagaggaagaggacgtcattttgtaaagtttaacttcttagcgaactgatgtgccacccagtcacagagtggagttgtgaattcatgtagaggtggcaaacctctaccttgtgttgatgagagaataatcttgggcagtctgggaaaataaggaaggcatctccttcttactcatggagattcaactatagagagttgaaacctaaacccgccttccttttatagaagctggactagagacggactgaccatcagctctgaactgtggctttttttgttcacctatgatgccatgtaccaaattcagaagctatcgttaataatttgttttataattgagtagtacaagcgaggaaaaaatacggaggataaccactatttttgtgcaaatagtatgaaagtgaagtaaaagcaatagaagaaatttctataggatctgggtttagagtgtgtatcattaataaatatacctttgctcttttcagggaaaataacaaccacccttactgatagttggggaaaagaagattggggttattttgccatatcattttagctggaagtggcattttaaaagcaccctgcatcactagtaaatagtgtatttttgctattctgccctttgtaatcggtgtcccctgtaaaaacaatcccccacagattactttcagaaaaaagaaggaatttcctctacgc

SEQ ID NO: 44762 - DNA, 641 bp, Homo Sapiens
caacattcccctggatgatgctgtgcagttcaaccatctggaggtggtcaaactgcttcaagattaccaggactcctacacactctctgaaactcaggctgaggcagcagctgaggccctgtccaaagagaacttagaaagcatggtatgagcacaggtcatggacagcccctgctcaagaaaaagcatgagctggccacacatgtaatccataaccaccaaaaatactatggagagctacactgcttcagtggggaccaagcagtcatttggtgacttaggctagtgctttctatgggagtcaaaataccccattccctcagcagacagagtacagagaagggcctcagaggacacctgcagtacagctatccagagagactgggcttcaaggtacagcctaatggcttgccccactcaaaaccatcccagctcttcacccaggtctcctcttcctctccctgaagaaaccatcatgagagagatactctggtggagggactctagctaccatgcacatgtacatatccacagaatatgggaagtgggaatggctatatacatggctttagtagtctggagaaatctactccccttggccaggacatgctgctgctactgctaacagccaattttataga

SEQ ID NO: 44763 - DNA, 876 bp, Homo Sapiens
gttttgtacacattttgaaatgcttcttctgtagtgatagaacaaataaatgcaacgaatactctgtctgccctatcccgtgaagtccacactggcgtaagagaaggcccagcagagcaggaatctgcctagactttctcccaatgagatcccaatatgagagggagaagagatgggcctcaggacagctgcaataccacttgggaacacatgtggtgtcttgatgtggccagcgcagcagttcagtacaacgtacctcccatctacaacagtgctggacgtgggaattctaagtcccagtcttgagggtgggtggagatggagggcaacaagagatacatttccagttctccactgcagcatgcttcagtcattctgtgagtggccgggcccagggccctcacaatttcactaccttgtcttttacatagtcataagaattatcctcaacatagccttttgacgctgtaaatcttgagtattcatttacccttttctgatctcactggaaacagctgcctgcctgcattgcacttctcttcccgaggagtggggtaaatttaaaagtcaagttatagtttggatgttagtatagaattctcgaaacttgggaattcacaaatcaggactggggactgcgagaccacaaatttctgatcgcatttctgatggatgtgtcacaccttttctgtcaaaactaacatgtcttggaggttaatcgacgtcccttgggtggacacacacacacacccccacaccacccacacacaccaccacccggacgccccatattctccactcccccccacaacaccgtcacaccacacggcgcacgtggccaccaacccgtttcctacgcccccacccttctgccgc

SEQ ID NO: 44764 - DNA, 655 bp, Homo Sapiens
aagctatgaaattagcaaacagagactcagtattgtcattggcgtggttgctggcattatgacggtgattctaatcatcttaattgtagtgatggcaaggtactgcaggtccaaaaataaaaatggctatgaagccggcaaaaaagatcacgaagacttttttacaccccaacagcatgacaaatctaaaaaacctaaaaaggacaagaaaaacaaaaaatctaagcagcctctctacagcagcattgtcactgtggaggcttctaagccaaatggacagaggtatgatagtgtcaatgagaagctgtcagacagcccaagcatggggcgatacaggtccgttaatggtgggcccggcagtcctgacctggcaaggcattacaaatctagttccccattgcctactgttcagcttcatccccagtcaccaactgcaggaaaaaaacaccaggccgtacaagatctaccaccagccaacacatttgtgggagcaggagacaacatttcaattggatcagatcactgctctgagtacagctgtcaaaccaataacaagtacagcaaacagccatttcgtagaagtgacgttttctgttgtgagtcagcctcaggacccacatcaggggtcactgcagagttgctatgacagcgggct

SEQ ID NO: 44765 - DNA, 673 bp, Homo Sapiens
  misc_feature (632)..(632): n is a, c, g, or t
aaaatggctgacacatttgtccttgtgtcacgttccattattttatttaaaaacctcagtaatcgttttagcttctttccagcaaactcttctccacagtagcccagtcgtggtaggataaattacggatatagtcattctaggggtttcagtcttttccatctcaaggcattgtgtgttttgttccgggactggtttggctgggacaaagttagaactgcctgaagttcgcacattcagattgttgtgtccatggagttttaggaggggatggcctttccggtcttcgcacttccatcctctcccacttccatctggcgtcccacaccttgtcccctgcacttctggatgacacagggtgctgctgcctcctagtctttgcctttgctgggccttctgtgcaggagacttggtctcaaagctcagatagagccagtccggtcccagctcctttgtcccttcctcagaggccttccttgaagatgcatctagactaccagccttatcagtgtttaagcttattcctttaacataagcttcctgacaacatgaaattgttggggttttttggcgttggttgatttgtttaggttttgctttatacccgggccaaatagcacataacacctggntatatatgaaatactcatatgtttatgaccaaaataaatat

SEQ ID NO: 44766 - DNA, 650 bp, Homo Sapiens
  misc_feature (398)..(398): n is a, c, g, or t
  misc_feature (574)..(574): n is a, c, g, or t
atttggccctcgaggccaagaattcggcacgaggggcagggaagaaaacagggatttcccctctctagatccctgccaggtccctctccaggaggcccctctgctctcctgaagggtggtccctgagggtctgcccagccttggcacgagaggttggttccagtccctggcagggcttccttccaagggcccctgcagcctacaaactgggcctcgggcgactcaaaataagtgctcttgggggtggctctaccccattacctcccccagccacaactcctggccttcgacttctggctgggttagccagaccctggtttctctaccctgatgttgcatgagacctggtaacagtgtctccctcccagctccttgccaaagcctctgttgagacctgngcttcttgtagccccttctccctctggccagctgcacagcctgtgggaggtgcccggccccagctgggtgtgggggaagctggtccctgctgtgggtggcgctggggacctaggggcttccttctgaggttggcctttggggccctgggctgtatgccttcttgggggtaaggaanaagccgggaggaatcattgggtatggtgaccccacctaagcattttaccacttttttttggacctgggaaaaaacc

SEQ ID NO: 44767 - DNA, 828 bp, Homo Sapiens
gggttggaactggagatcaaaaacttgcggatgggctcagagcagctctgagcagagacctctgccctcctcaccctcagggacaccactcggctccatggggaggtttagaaccaaaccacaagtcccctcaaggacaaccactatttctatattttttaccagaaaacaaaactctccatcgctgaaagagattccagtgggacatggtgccgtttttctgtttgccttcttgcaacaacagtttctgaattgactttgttttcagatgatgccttctgttgaattctgttattaagggcccatgatgagctgtaacttctcaagaggaaagaacacagtagaaaactagagctggaaggatctaggttgacctgtctgtgattttcaaactgtggtccagagaataggggaagactgggccagacgcagtggctcatgcctgtaatcccagcactcctgggagggtgaggtgggcggattgcttgaggtcgggagtttgaaaccagtctcaccaggcgcagtggcttccgcctgtaaattccagcatgttgggaggccgaggctgggtggatcacgaaggcagcaggttcaagaccaagccctggaccaacatgggggaaaacccattctcttcctaaacaaacatggcccgggtaaatcctgtcatccttggtcgggccgcccttcgggcccttcgaaaaagacttttttagaaccctttcgcttttgggcgcccgcgggtcccccgtaagggtaaggtggaactgggtcactaaccggtgtttccctaaggaagaaccttgggcccaggcaataaggggctgg

SEQ ID NO: 44768 - DNA, 544 bp, Homo Sapiens
  misc_feature (1)..(1): n is a, c, g, or t
  misc_feature (372)..(372): n is a, c, g, or t
  misc_feature (434)..(434): n is a, c, g, or t
  misc_feature (443)..(443): n is a, c, g, or t
  misc_feature (450)..(450): n is a, c, g, or t
natttggagtgcaggaaaaacatatgaacaattaaaagaagagctgggagatgctgctgctatcatgcgaatcactgctgacatgaagaatgcaaccctctccctgaattctaatgacagtgagccaaaatattaccctatagcagttctgttgaaaaaccagaatcaggagctgcctgaggatgtaaaccctgccaaaaaggagaattacctctctgaacaggactttgtgtctgtgtttggcatcacaagagggcaatttgcagctctgcctggctggaaacagctccaaatgaagaaagaaaaaggggcttttctaaagcaagaaaggcctatacctatttgcaaggccacagaaaagagcagatagtnccaatatcaggaaataatttatccaccaatttctggctgacattcagctactttaatttagntataatagngtctgcnaatcacggcatgttctccattttttctcatccttgcattccttgcttggttatatacctaaaatgttaaccatataggtttttggggttttgtg

SEQ ID NO: 44769 - DNA, 694 bp, Homo Sapiens
ccccgcgtccgcccacgcgtccggaaagttatcctctttttgcccaagtcacacttgtgtcatttcttatactgtaaacatgtggttccaattctgaggtattttcccggcttgtaggacccaaaaagaagttaggcttgagaaattttaagtgaagagaacaattctagttcagagtgattggctcttcctaaaagctgacatttgactgaaaattttgaggggagggaaagaaacaataccttttacggcatgtaataggaagaagacctggattttagttgctgctctgatgtcccaacttgggtaaggcaacataacataaatgtcagtttcttcagatttgtgatgaagctgataatccatgctcagcttcctttatgggtctcttgcctatcaaataaggtacagtatgtgaagatacattgcagattatcttatgcattgcttcaggggatgattaaaccatcctttattatagccagagtctagtctaagggaagaaggtcattctctataccagtgaaggctccatccaaaccagtgtttgggggcatagtcataattgaaaaatgattgttttccttatctgtaaaacaggtaaatggtattaatcctcaggtggttgtgaggattaagtgatacatgtaaaaaaaagaaagctttggatagtacctattataagaaactcagt

SEQ ID NO: 44770 - DNA, 512 bp, Homo Sapiens
  misc_feature (498)..(498): n is a, c, g, or t
ttttttttttttttttttcaaatggagtattttattcacatgttagttatcattttaacacacacacaaacactgacacactctggtttgcgtggaacaagggtggtctaaatatcctaaaagaaaatgaaaaattaaagtacattaatttttcattactgtaggcaattacgtccacatcacttacaaagctattactgatattgtccaaggaagcagagtggtacagaggaaggaaacttgagggtaaattcatcagtgacataacagatctcaacatgagaaagctgacaaaacatgaatttttgctgtgaaatttctctttgcaaaatatgaagaaaagtcaatcaatgggcagtaaataagagtaggtggtgaacttttgctgtcaattctcctcacagtatcttgcagaggcatcaagaaaattgcttagtccttctctgggaccaatttcaaaacttttccaattgcaatggtcttaccctcatctcttanagtaaaacgaccca

SEQ ID NO: 44771 - DNA, 782 bp, Homo Sapiens
ggcaatttattaaaagtaaacatttcagtatgattctttccaaaggtaatccatgttctatgttgttaatgtgtgtatgtaatttttctgactcttccacctcttataaacctattttctgtttcatttgttttgtttttgaaggatggctcttttttctttttaatgttctagatgaccaaaacactattggtttttacccttttgcctaaagctttgatatccccacttgatgttctgtgaattcactgtttaatctattaagtgaaataataaatagtcctggtgacaaacaatctgttgatttagaggaaaggccctgaaaaatacagtattggaaactaactttgcatatgctgttagctattattttgcatcatgggcttcatgggaagaacatgttgcatttattttgtctttattaaaagactactagccacaagttactctgattatagtaactgttttatcaacccacttcatctttaaaaaattaaatttacattcacaattcaaaacagtaagctgtctttcagaaaatttttgaaggataaaaacatgaaggaaaaaagtggcccgtgtaggtaggattccctacacaggacttttagttgtatcacctcaagagattttgaagtttgtgatcaaggtctgtatattatcccaaactttattaagaattgttttctaattggttataacatttttcaattaatagtttcaaaacaaattgttaatacaactgtataaaatgaacataattttcctcaactttgtaattt

SEQ ID NO: 44772 - DNA, 723 bp, Homo Sapiens
cctggaactgcatatttctgtatccccatcatttacaagcccaaaccaaaagcagaagttcctgaagacaaaccaaaagctaatagtgaacccaatggcccaatggatggacagagtggaactgaaactaaatcagattcaacaaaagacagctcacagcatactaaatcctctggagagatggtagtggactaagtcttaattttaccttcacattaattcaaaccgtgcaagtaaccacggggtccatcttttacatctggtacacacaacagacgctcagttgttcttaaccacttttgtcatttgttttttggagtagttttgaaaagtgttttatattgagtgcacttctgttcatttccattgctgcttatatgcagtgttagccgaattagatttacaagacaatctaagctttccggataattttatatatcaaacatacaggatggatacataatcggcaacagtctaccttatttaaagcttctactgagataaacctcaattcctttattcaggaaaggatactttattgcattatttgtgcagaagcatagatttaattgcatttttatttttgaaaaacaaatgaaaattgatggggtttaaagctacagagggacctgactcttttctagttattggattggtacaatttaaattttaaaacaaattagagctttttcaaaaaaaaaaaatccggccccttggcctcac

SEQ ID NO: 44773 - DNA, 582 bp, Homo Sapiens
  misc_feature (559)..(559): n is a, c, g, or t
  misc_feature (565)..(565): n is a, c, g, or t
tgcgtcagatgtctggtccttcggggtgaccctgtatgagctgctgacgcactgtgactccagccagagcccccccacgaaattccttgagctcataggcattgctcagggttagatgacagttctgagactcactgagttgctggaacgaggggagaggctgccacggcccgacaaatgtccctgtgaggtctatcatctcatgaagaactgctgggagacagaggcgtcctttcgcccaaccttcgagaacctcatacccattctgaagacagtccatgagaagtaccaaggccaggccccttcagtgttcagcgtgtgctgaggcacaatggcagccctgcctgggaggactggaccaggcagtggctgcagagggagcctcctgctccctgctccaggatgaaaccaagagggggatgtcagcctcacccacaccgtgtgccttactcctgtctagagaccccacctctgtgaacttatttttctttcttggccgtgagcctaaccatgatcttgagggacccaacatttgtaggggcactaatccagcccttanatcccncagcttccaaacttgag

SEQ ID NO: 44774 - DNA, 809 bp, Homo Sapiens
  misc_feature (666)..(666): n is a, c, g, or t
  misc_feature (687)..(687): n is a, c, g, or t
gataggaatgtgaaatggatcaactactttggaagacaattgggcagtttctttcaaagtaaatgtgaagatgccatacgattcatccattccatttctaattattcaagagaaatgaaactgtatatccacaaaaaagacttgtacacaaacattcacagcagctattatttattggtaatagctaaaaactgtaaacagctcccatatccatcaagtgtatggataaacaaatttggtgtatttatacaatggaatactactcggcaataaaaagaacagttgatactctcaacaacctagatggacctcaaaataattcggtttaatgaatgaagccaaacttaagaagagtacattgtatgtacttggagaactaacttcttgcaatagatttttaagcactattaggagcatatgacttaaacagtttttaaaagtcagggagtaagtatgcttaaataaaatacaatctgtgaaacaaatctctgaattattatcacttcactggacactctaacttgaccatatttctgactttaatgtaactcactcttattccgtagtcacatgtttgcttgctcattggttcacattacatttattcagcatctgcttgagccacaggcactgtaactacatgtttttttttagtctacctacttnttgtaaggtccctggtttctntgggctacatctgattacagtaaacataggaaagttttataaaaccattttcattgaccgaaaaaaaaaacaaataaaaaaacaactttttcgggcgctgggcctgaagaagtttttaaacc

SEQ ID NO: 44775 - DNA, 775 bp, Homo Sapiens
aattttatatagtcttttaagaggtaattgtaatgtatttctgacagtataaacaaaaagaatataaggcatagaagaattgtcctctaaaaatatcaatgatgtatcctggaatgtgaagatgtccctttatagttaaaaattgaattattttaatattgtaccattgttagaccttgaatgagtccatgttaccgtgtgtgtctgtatatctatctgtagagaaagaaaaatgacaactgaaatgttacttttaaaaatcagaataaattgggcactgtctgtgttgcaccactactgtatcttttcgaaagaattaacagtatttgcctattgtaaaggttaattctgatgacgttttcacattcaccagactttttttcctgtattatttgcatccccaaatatttaatacaagtagattctgcatggcttgggcattcagagattaatagaatgatgactcaattttaattctaaagccatgaaaagttactttgagactgaacaattctgaattatttatgatacccaatgtccatgtttctttccctactgtaaaagaattgatcagtttcttcattaaagcagcaaaaacttattaaatcttgtaaataccatgtctcttttagatttctgtgtatgctgtgaatgaaatcattttgagatgaaattgtacaaaggcattttaaaaggctctgcatgcatcgtacctccaaacagtacatattcggaaagtcaaagattcccgccaaataaatgaactaaaagmcaa

SEQ ID NO: 44776 - DNA, 612 bp, Homo Sapiens
  misc_feature (1)..(1): n is a, c, g, or t
nctagttgacctgcctctgtttttctctcgagaccagccaactctcacatttcagtccgtttatcactttaccaacagtggacagctttactcccaggcccaaaaaaattatccgtacagccccagatgggatggaaatgaaatggccaaaagagcaaaggcttatttcaaaacctttgtccctcagttccaggaggcagcatttgccaatggaaagctctaggaaacaccagtcttgagaggtggccagccagactgcctgtccacatgcgtgtcagcacatacagccgcttcctggaagccgcctggaatgtcttcacggcagcgttttgctcacacagcagcttttgcacgccccaggcagccccgactgctgaaatccaacttgagctggctggtggtccctggatcctagagcccttcacttcgggttactccctctttcttgcctctatttcttagttggaagaaataaactcacaaattatggtgcagtaattttccggggaaagtaaagcctcaggaatgcccacgcctttcttccaaagcctttgtctctgagacctcttaagttctaagattaaatgcccctcgctgttcttcctctgaaaa

SEQ ID NO: 44777 - DNA, 813 bp, Homo Sapiens
tctagcgaggtgacagcgtagaaccagttttggacttcctccgatttacacgaaaagctctgatattcattggagtactttattttttttcctcagttttgtttcttttctcatgtaaaaacaaacaaaaaggtcaacaaaaaaaaattgaggtttttcttgtttctatctagttcatgctttctttgcggtgtttgaacagtagtctgttaacttagtaggtggtacctggaaaggtattttaagtatagtgactgtttaataaatacttaattggatgatggaggaggagaaattgttttcttcccaggattctctttgggggtcattttgtgtgacagatatattttagacatttggagaaacagtttcagatcctgccaggatatttttgtaaaaaaggaaaatggaagattccaataaactagaaacagtacgtatctaagatgctgacacagaagctaatgtgacttttcagcttatcaagaggatggccaataaaacttaaaggtgtggttagatgttttctcacttttgtgacattaatttatcactgagtctcattcaaccaagtaatctaaaatactgtgcaaattctagcaatgatgttttcaataacttggatgttaggatagccaatatgtacaaaaaattaaatcaagtattttgtcctatgtataacacaaattaattttacactgagaaagatgtttctaggcaagtggaaattctggtaatttcatacaatttcttgggtatgaaccaataaaatatttttttgcccaaaaaaaaaaaaaaaaactcttcccgccg

SEQ ID NO: 44778 - DNA, 959 bp, Homo Sapiens
  misc_feature (627)..(627): n is a, c, g, or t
  misc_feature (736)..(736): n is a, c, g, or t
  misc_feature (784)..(784): n is a, c, g, or t
ggggcaggccgggcggcccgggcaccagcacggacaggagcccgaatgggcgaccgccggcgcaggcgccccagggaaccctgaggacccggcggaggccgcgcagcagctcgggcgcccctcggaggcagggcagtgccgcttcagtcgggaggagtttgagcagatccttcaggagcggaatgaactcaaagccaaagtgttcctgctcaaggaggaactggcctacttccagcgggagctgctcacagaccaccgggtccccggccttctgctcgaggccatgaaggtggctgtccggaagcagcggaagaagatcaaggccaagatgttagggacaccagaggaagcagagagcagtgaggatgaggctggcccatggatcctgctctccgatgacaagggagaccatcccccacccccggagtccaaaatacagagtttctttggcctatggtatcggggtaaagctgaatcctctgaggatgagaccagcagccctgcacccagcaagctagggggagaagaggaggcccaaccacagtctccagctcctgatccgccctgttctgccctccacgaacacctttgtctgggggcctcagccgccccagaggcctgacttangggtctggctgtggaaggatgtgtggcctcaaatgaggacagggctcccgccttcacagccctcgccaggggtctgccccaatcctggcctgcatcagggcaggacggngtctcagcccgcctccctctctacgtctctgtaccgagcctctggggncagatataagagtgcctctctgagtctcagtttccccatcccatgaatgagagctgactgcctagctcccaggctttgtgcagacgggctgagctcatgtaataaagaactgcccgtaatccaaaaaaaaaaaaaaaaactccaaggcatctatgttcgggtgccggagaaaaaa

SEQ ID NO: 44779 - DNA, 715 bp, Homo Sapiens
tcgtgccgaattcggcacgagccacaatcccacggaacccaaaaggttttggctatgtaacttttatgcatctggaagccctaagacaaagaactttcattaaggatgacacattattagtgcgctgtgaggtctccacccgctttgacatgggtagccttcggagggagggttttcagccacgaagtactgatgcaggggtatagcttgccctcacttgctcaaaaacaactacctggagaaaacagtgcctttccttgccctgttctcaataacatgcaaacaaacaagccacgggaaatatgtaatatctactagtgagtgttgttagagaggtcacttactatttcttcctgttacaaatgatctgaggcagttttttcctgggaatccacacgttccatgctttttcagaaatgttaggcctgaagtgcctgtggcatgttgcagcagctattttgccagttagtatacctctttgttgtactttcttgggcttttgctctggtgtattttattgtcagaaagtccagactcaagagtactaaacttttaataataatggattttccttaaaacttcagtctttttgtaggattatatgtaatatattaaaagggaaaatcactaccgcctggtgctagtgcccctgagaagagttattggttctagaaaattgaattctcattttttttaacctgttatagatttcaag

SEQ ID NO: 44780 - DNA, 624 bp, Homo Sapiens
aagacatgtactgaattccataactgtacagaatgtagggatgggttaagcctgcagggatcccggtgttctgtctcctgtgaagatggacggtatttcaacggccaggactgccagccctgccaccgcttctgcgccacttgtgctggggcaggagctgatgggtgcattaactgcacagagggctacttcatggaggatgggagatgcgtgcagagctgtagtatcagctattactttgaccactcttcagagaatggatacaaatcctgcaaaaaatgtgatatcagttgtttgacgtgcaatggcccaggattcaagaactgtacaagctgccctagtgggtatctcttagacttaggaatgtgtcaaatgggagccatttgcaaggatgcaacggaagagtcctgggcggaaggaggcttctgtatgcttgtgaaaaagaacaatctgtgccaacggaaggttcttcaacaactttgctgcaaaacatgtacatttcaaggctgagcagccatcttagatttctttgttcctgtagacttatagattattccatattattaaaaagaaaaaaaaaagccaaaaagaaaaaaaaaaaaaagcaagccacctctctctttc

SEQ ID NO: 44781 - DNA, 553 bp, Homo Sapiens
atcaaagtaagggcaagataaaacttgttagtaaaacatgttttattattttttagataggtagcctgcaacataaaatatattttgaaagctgttaaggggtgtataatctgttaaaaaataccatgattagtatttcacatttagtgactcagatccctttgtgtaagtcctttgcgttgtgcaaagaggtttttctatgagatgagaattatgaacacttcatataggtaaattccataggttgagctggggcagaaattaatggctcctggagattgcatctttttttttttttttgagcttagaattcccatttggacagaatttagcttttgtgctgttgattacttctgtactaaactggtagccaattgttcacttctaaatggaagggaaaaagttacccacacaagttagaaaatgatttaccgaattatttttttgagttagtatgtatatactgttttaaatcagtaatgtttgttccttttgctgcccatttgggagtatgtggcaattcctagtgctcttgtatgacattactcttctt

SEQ ID NO: 44782 - DNA, 640 bp, Homo Sapiens
  misc_feature (538)..(538): n is a, c, g, or t
gagccatggtgaccaatgcatgtcctgcaaatatggatactttctgaatgaagaaaccaacagctgtgttactcactgccctgatgggtcatatcaggataccaagaaaaatctttgccggaaatgcagtgaaaactgcaagacatgtactgaattccataactgtacagaatgtagggatgggttaagcctgcagggatcccggtgctctgtctcctgtgaagatggacggtatttcaacggccaggactgccagccctgccaccgcttctgcgccacttgtgctggggcaggagctgatgggtgcattaactgcacagagggctacttcatggaggatgggagatgcgtgcagagctgtagtatcagctattactttgaccactcttcagagaatggatacaaatcctgcaaaaaatgtgatatcagttgtttgacgtgcaatggcccaggattcaagaactgtacaagctgccctagtgggtatctcttagacttaggaatgtgtcaaatgggagccatttgcaaggatgcaacngaaggagtcctggccggaggaggcttctgtatgcttgtgaaaaagaacaatctgggccaacggaaggtttttcaacacctttggtgcaaacattgacatttt

SEQ ID NO: 44783 - DNA, 506 bp, Homo Sapiens
acagtgagaagcatcagcaccgtgaacttgtctgagaatagcagtgttgtcatccccccacccgactacttggaatgcttgtccatgggggcagctgccgacaggagagcagattcggccaggacgacatccacctttaaggccccagcgtccaagcccgagaccgcggctcctaacgatgccaacgggactgcaaagccgccttttctcagcggagaaaacccctttgccactgtgaaactccgcccgactgtgacgaatgatcgctcggcacccatcattcgatgagaggacagccaaggactctcccgggcctctccggttctcccttgcggaatgatgggcgcatcctgtctgccacgtgctgacggtcgggaagcttcagtggagaggcctaactctaatgtcgcctgcttaagcaaatcatgcttctctgtttcacgtagttgggttgacaagtttctgcctttaagataaatgagtaatagtctaatgaccagctcagc

SEQ ID NO: 44784 - DNA, 869 bp, Homo Sapiens
  misc_feature (259)..(259): n is a, c, g, or t
  misc_feature (345)..(345): n is a, c, g, or t
  misc_feature (362)..(363): n is a, c, g, or t
  misc_feature (365)..(374): n is a, c, g, or t
  misc_feature (413)..(413): n is a, c, g, or t
  misc_feature (418)..(418): n is a, c, g, or t
  misc_feature (434)..(434): n is a, c, g, or t
gggggcctctccggttctcccttgcggaatgatgggcgcgtcctgtctgccacgtgctgacggtcgggaagcttcagtggagaggcctaactctaatgtcgcctgcttaagcaaatcatgcttctctgtttcacgtagttgggttgacaagtttctgcctttaagataaatgagtaatagtctaatgaccagctcagccatttaaaatattttcttcctattctgttcaagaaacagtaaacttggtttcaatctttanaaaaaaaaaaaaaaaaaaaaaaaaaaaaaaaaaaaaaaaaaaaaaaaaaaaaaaaaaaaaaaaaaaaaaaaaaaaaaaaaaaaaanaaaaaaaaaaaaaaaannannnnnnnnnnccccccccccccccccaaaaaaactttcaaaaaccttcntttgncccccgcccccccccncccaaaaaaacataaaaatttttttttccccaaaaaaacccgccccccccacaatggtttggattccccccagaaaaaaaaccccccgggggaaacccgagggtttgaaaaaaaacccccggaatgaaccctcgaaagagatttccggggggtttaaacacaaggggggtcccaacccaaacctcccatattgaatttttgcccccccccccttgcctaattaaagaagaagggggggtggaaatttcttaaaaaaattttcgcccccacggggaacccccctcaaaagggggggagtggggaacctctaaaatccccaggggggtctaacccacttgtggcccccttgggaaaaaaatatttggccccgaggggggacacgccggggggcaaaaaaaattgccgccctttggtgcccccctttataacacccag

SEQ ID NO: 44785 - DNA, 385 bp, Homo Sapiens
tgcattgtatctaaagccttagaactagtcaggtgctccctccacccaataccatttcttaccctctaatcctacctgatctttaacaaagcattaataattctaaggataatctctattttgttgtgcttttttgtaactgttttaaataaatcaatttgtactgtatatttgtacttttgtgagatcctttttgctgttttaccattttaagtctctgtacttggctacacacagattgtatttttattgttaatgctcttcttatggatacctgcatttaacttgtggactatgtaaacacaatatctatcaatatctatatatctatatatctatctatataaactactagcttttcaaaaaaaaaaaaaaaaaaacgcgg

SEQ ID NO: 44786 - DNA, 910 bp, Homo Sapiens
  misc_feature (649)..(649): n is a, c, g, or t
  misc_feature (847)..(847): n is a, c, g, or t
taagttcgttggttgcaaacaatagaaaccaactctgcctcacttatgtttattggaggccataagagagccacagcatctaccaaaaagccaaaaaaaaaacaggttttggaaaagacaggaactagctacaggagctaatggccaatcttgtctgagttctttgatggcgacacatgaactacagccgttttgttgttgttaatttctccgtgttttcccctcagttttggatgactctgctcaaggttcagattctgaggagcaagtatctgttgggctatctgaggtcctgctaccattccttggccagtaataggtagtttcacagggattatatgcaatggaggaaaaggtgttctcaaggaaaactagggagctttctccagaatatgatgtaatggcagaaacaacaggtggttgaccacagaaggggacaataataatacttgtaatttattgtgcgcttatatgagcctcaccctctcccaggtgtcagataatgctcgtaaatgccttagtccatcatctcagtaaattttttttataacactatgagagaagcagtatttttttttttctgttacagatatggaaaccgaggttctgaaaagttaactaaaacttccgaggttatagtacgaggcanaaccaagatttaaactcagatctgtgccgatccagagtccaagcttaactctgatctactgagtgttgtcagagcatctgtttctaagacattaagaatggttaaaaggagcttcttggctcatggtcaagtgagtgttttttacaaagtgagtggtcaaaatactaaagtcgattctgggtatatctaccacatggnatggaacctctaaggacttcatgcctaaaatgaaaatggtcagttcacaaaaaagggacaaaa

SEQ ID NO: 44787 - DNA, 580 bp, Homo Sapiens
ttgaagaccttgcagacaagccatacacgtttgaggactatgatgtctcctttgggtggtgtcttaactgtcaaactgggtggagatctaggaacctatgtgatcaacaagcagacgccaaacaagcaaatctggctatcttctccatccagtggacctaagcgttatgactggactgggaaaaactgggtgtactcccacgacggcgtgtccctccatgagctgctggccgcagagctcactaaagccttaaaaaccaaactggacttgtcttccttggcctattccggaaaagatgcttgatgcccagccccgttttaaggacattaaaagctatcaggccaagaccccagcttcattatgcagctgaggtctgttttttgttgttgttgtttattttttttattcctgcttttgaggacagttgggctatgtgtcacagctctgtagaaagaatgtgttgcctcctaccttgcccccaagttctgatttttaatttctatggaagattttttggattgtcggatttcctccctcacatgatatcccttatcttttataatgtcttatgcctatacct

SEQ ID NO: 44788 - DNA, 810 bp, Homo Sapiens
  misc_feature (640)..(640): n is a, c, g, or t
  misc_feature (699)..(699): n is a, c, g, or t
  misc_feature (731)..(731): n is a, c, g, or t
  misc_feature (733)..(733): n is a, c, g, or t
  misc_feature (735)..(735): n is a, c, g, or t
  misc_feature (783)..(783): n is a, c, g, or t
agaggtaatcccttaaacttttttcaggattttaggtaatttgaaaggagtttagagacccttattgaaaatatgatttaaaaatccaaagcataaaccgtaagaaaaattttaaataaacatctttaaagctgcatcttccatactgatacatgcattgcgtatgttgacattaaatacattttataatgaagaaaaataatcatagtaaaaaattgaaagacctaattactacgttacatggacctattgaattttgggggaacgtgttagtaaacccagactagctttgttgaatagaagttgatcgctgttatttaggaaatgggtagatcaaatgacttagagactgaattatcctatcagtggttacatggggttggagacactgaaaggcagtgatcactgttgcttctaggctcccttactttgtaggaatatggtatactttcaggaatatgctatatatgttttcataagtacagacaccttagggaagaaaaaaagtgggtaattgaagcttatggttgattaatttcctaacagcacagctatgaatattttgctggggtacactggaggtaggaagactactggaaatttttgcacttgaattttgtttttaaagcttttttctttnaagaatggtagaaacagattatccattccaaaatgtcttttctctgatcacaaagagcnaaacaatgtcaatatctcttatgatggtgaananangaattatcgatgcaataaactttccagtatactttatgaaaaaaaaanaaaaaaggcgcgctcaatatctcgagc

SEQ ID NO: 44789 - DNA, 714 bp, Homo Sapiens
ccgcctcactagtgtcaccatcctgccttttctaaaacatgcaggctcacacattctactcctgcttaatgtctgtgttaaacgttttctaaccatttttgttttatttttctgaaaaagttaacccctcccaactcctcacacattggctcttcctcttgagccacaaagttttgattcttgcgatgtatgtgccttattttatgttaatcttgtcaatgagagggaccagttggtgttgcccaatcagcactccaaggctgtgtgtgcaccagccagagagcgcacggtggtagcagagtcgaggctgtcttgtatcctggtttcatgtgttgttttgaactgataggaggatgttctcttctgacaagttacccttgtgtatcctgcagacatgtaaaataaaatacaagttcatttttttcaccttttttagatttttttaaaaaataaaatgtgtaatcctttttttaaaagaaacacatgtaaatacatttaagtattgtaggcatagcgttcagatgtgactggcccaggcgttcctcggacaagcctgcattccccgtgatcacgcccacctcaagcccaggggctgcagccagcacagatgaactctacctcttgctttcagaaccacttagtccttttgttacaagaaaaacaaatgtttcttacaatgtcataaaacatcttgttgggaacacaaaaccaagg

SEQ ID NO: 44790 - DNA, 608 bp, Homo Sapiens
atttttcagataaagaaacaaaatcttagggaagataagttgagttgtccaagagcacactgaaagttgaatgttatctaatgcattcctctacctttcagaagatcagtagctggctgagaatctttgccaaatcttccttgctagccagaagtggaattggcagcttctagaatatgtacacctctggacaaaatgttcctcaatcttaagatacaaagaccctcattgtctgggtctattcccacacttactgagtacagatgaaggaaagtggtagcaatttaatcataactttcatttgctgaaaaacattatgagaaggcctcccttcctaagccacctctggtcttgctaagtcttgatcttgcttcctgccagcaccaaacattacattcaggggatttcctctggctcagtcttttccccttgaagttctctaatagatgttacttttgacaaaagatcgcctatgagttacaagcaccaggggatgctctacatcaagggatgcaccttcagtcaaactgtcaaaaagcccagaattcccaaaggcattaggtttcccaactgctttgtgctgatatcagaacagcagaaattaaatg

SEQ ID NO: 44791 - DNA, 559 bp, Homo Sapiens
aaggagagctttgcagataacaaaatagcctatccttaataaatcctccactctctggaaggagactgaggggctttgtaaaacattagtcagttgctcatttttatgggattgcttagctgggctgtaaagatgaaggcatcaaataaactcaaagtatttttaaatttttttgataatagagaaacttcgctaaccaactgttctttcttgagtgtatagccccatcttgtggtaacttgctgcttctgcacttcatatccatatttcctattgttcactttattctgtagagcagcctgccaagaattttatttctgctgttttttttgctgctaaagaaaggaactaagtcaggatgttaacagaaaagtccacataaccctagaattcttagtcaaggaataattcaagtcagcctagagaccatgttgactttcctcatgtgtttccttatgactcagtaagttggcaaggtcctgactttagtcttaataaaacattgaattgtagtaaaggtttttgtaataaaaacttactttggaaaaaaaaaaaaaaa

SEQ ID NO: 44792 - DNA, 906 bp, Homo Sapiens
attcccgggatctggctttttgcccttcctgcatgatttccagctactgtgacctggatgctgggaacccaggcatcggctccaaaaattagaaggcgagtgctgagaagacttgtcacaggtttctcaaatcagaatatactcagtcatagtggttccctgggaagccccagaccctttgacttgtgacattactggtttgcagacataataactacactcagaggaccatggaggcagagggatcatggtttcagggcactgaaaactctacgagccaagaggactagtgcatggactgaaagtcaggcatgccctcaaataggctgtattttctttccaggaatgtaacctttcccctttttcttctgacctgagccaagattggaaatcagaaagtctcctgtacatggagctgaagaggggctgctgttttccgaatgttttccatttcacaggcgccacctgcttgcccggggttggtcttgagaagacacccaaatgttcatgcctcagaaaggcagcagaatgccttttaggaaatttttttaaagtaatttgaagttatatagaagtttggtaagaagaagcagttgtttctctcttttctccctcatttcatggaggtgttaatgatcatggctggccgtgatgtacacatgggctgattttcattttttcagtttcatagctgagaaattcagctttgttttagttgaatcatcatattggaaagcagacattgaaagttttcttttctatctttgttatgaatgtgctatggccccttttggagacttctattgggtaatattctatgtgagagaaggaaacttggtattaaatgttgtggtaaataataatgatgataataataaagtatatgccgtaatggtgtactgtcaa

SEQ ID NO: 44793 - DNA, 582 bp, Homo Sapiens
  misc_feature (1)..(1): n is a, c, g, or t
  misc_feature (30)..(30): n is a, c, g, or t
  misc_feature (32)..(32): n is a, c, g, or t
  misc_feature (57)..(57): n is a, c, g, or t
  misc_feature (131)..(131): n is a, c, g, or t
ngaaaaaggatggctttaagtgctgctctncntgaaaagaaatccttttaaattacntatgaaagtgatgtcctcagatattcttaatgactatttgggcatttataaatagaaatgattatggacttttnctctgccatacggaggttcggaacctggagaacggctgtgataagtaggttttgattgagtgaaagcatgagcttgttcagagtgaggggcatagtgaaaaaggaacagccatgcctcataatcaaatcatttgcgttcccacagcatcctgaataccgactacctcttcacttgctaaagcagctaaactgtgaagctctaagtggtttgggtttgttgtttaaccttagcgagatcctttaactgcagcaatattcaagccagatatttggaagcaaatgatatttcctcttgcagtgtccacaaatctgaatattaggggcatgaaatttggcttaccatctgatttgtaattacaattttggaattctctgttttagttgctgaggcctgagttttctggctcttaaagcatagatcatttcacctgatgtttttgaagcatcctaa

SEQ ID NO: 44794 - DNA, 527 bp, Homo Sapiens
gttaccattccaacaacgagaacagagatgttctggcatcatttacgtagtttacgctaccaatctgaattcgaggcccatatgagaggagcttagaaacgaccaagaagagaggcttgttggaatcaattctgcacaatagcccatgctgtaagctcatagaagtcactgtaactgtagtgtgtctgctgttacctagagggtctcacctccccactcttcacagcaaacctgagcagcgcgtcctaagcacctcccgctccggtgaccccatccttgcacacctgactctgtcactcaagcctttctccaccaggcccctcatctgaataccaagcacagaaatgagtggtgtgactaattccttacctctcccaaggagggtacacaactagcaccattcttgatgtccagggaagaagccacctcaagacatatgaggggtgccctgggctaatgttagggcttaattttctcaaagcctgacctttcaaatccatgatgaatgccatcagtccctcctgctg

SEQ ID NO: 44795 - DNA, 675 bp, Homo Sapiens
  misc_feature (594)..(594): n is a, c, g, or t
  misc_feature (604)..(604): n is a, c, g, or t
ttttttttttttttttgttgttgtttattgaaaaaaatgcaatacaagaagcaagaccaaacagatatctaaacactacaaccacttctactacgaaaggccaaaacagcagacttgattattgcctgtgtagtctaaagattctgccaatctgattctgctgcccgagttcctattttttcaagaaatgtaaacaactacttgatatgattcataattttaaaaaaatttacaaagctccttcatttttgtcaccaaaataatacatttgagagagatttgtagaaacaaccagcctggggctgagatcctgggcagaaatttcccgtgagcatcaaaaggcgtcagtcaggccgcagctctggctccagttcccgaggtttgttgtctcctcacccccagctgccaagcatccccccaacacacactgatgggcccagcggtggaggggggggtggggacggggatgggtcacggggccctgacgggtcccgcagttaggctccctgagccctcggcttataaatacaggtcttgctttgtgggtgggtgccagagtcctcatgtggcttggaggaaatctttatttctcanattaaaatanaattgcagcgagagttgttactgtggtgtgtctgagtcactctaggaaaactgttgccaagtttctgaccc

SEQ ID NO: 44796 - DNA, 743 bp, Homo Sapiens
caggggccgggggccggtccggattcccgggatgatgattggagggaaggctgcacctgggtaccacatggccaagatgatcatcagactcgtcacagccatcggggatgtggtcaaccatgacccggcagtgggtgaccgcctccgtgtcatcttcctggagaactaccgagtctcactggccgagaaagtgatcccagctgcagacctctctgagcagatctccactgcgggcactgaagcctcaggcaccggcaacatgaagttcatgctcaacggggctctgaccattggcaccatggacggggccaatgtggagatggcagaagaggcgggagaggaaaacttcttcatctttggcatgcgggtggaggatgtggataagcttgaccaaagagggtacaatgcccaggagtactacgatcgcattcctgagcttcggcaggtcattgagcagctgagcagtggcttcttctcccccaaacagcccgacctgttcaaggacattgtcaatatgctcatgcaccatgaccggtttaaagtcttcgcagattatgaagactacattaaatgccaggagaaagtcagcgccttgtacaagaacccaagagagtggacgcggatggtgatccggaacatagccacctctggcaagttctccagtgaccgcaccattgcccagtatgcccgggagatctggggtgtggagccttcccgccagcgcctgccagccccggatgagg

SEQ ID NO: 44797 - DNA, 964 bp, Homo Sapiens
cacacatggggccagcgagatatcagaggatcagatgttaggtgatagccaatccttctctcgaacggactcagataccaccacagagacagcaccaggcaaaggcaaattgaggagtgggtctaacacaggcctggattacatcaagtttacttggaagaggctccgctcgcattcaagacagtatgtatctgggttgcacatgaaccgcgaaaggaaggccgccaaacagttgggttttatcatggcagccttcatcctctgctggatcccttatttcatcttcttcatggtcattgccttctgcaagaactgttgcaatgaacatttgcacatgttcaccatctggctgggctacatcaactccacactgaaccccctcatctaccccttgtgcaatgagaacttcaagaagacattcaagagaattctgcatattcgctcctaagggaggctctgaggggatgcaacaaaatgatccttatgatgtccaacaaggaaatagaggacgaaggcctgtgtgttgccaggcaggcacctgggctttctggaatccaaaccacagtcttaggggcttggtagtttggaaagttcttaggcaccatagaagaacagcagatggcggtgatcagcagagagattkaactttgaggaggaagcagaatctttgcaagaragtcagacctgtttcttgtaactgggttcaaaaagaaaaaratdatdagggggggggggggggggatcrgrcctgggtggactctcctkctcctcaaraamtatrggagcctcaractcattkttattcaagctttccgagtcaagtkawttacaactgragagacccgtggctaggraacaatgggggattgaaaagraaawwaaammacharaaaggrghgtwtamtgtgcgarawttttcctgcmatagtgctgtcccttcmgggkvacttkggaggatraacag

SEQ ID NO: 44798 - DNA, 571 bp, Homo Sapiens
tggcaggagcggctgcatgacattgagagcaaagggctgcagcccactcccatgactttggtgttcggctgccgatgctcccaacttgaccatctctaccgcgacgaggtgcagaacgcccagcagcgcggggtgtttggccgagtcctcaccgccttctcccgggaacctgacaaccccaagacctacgtgcaggacatcctgaggacggagctggctgcggaggtgcaccgcgtgctgtgcctcgagcggggccacatgtttgtctgcggcgatgttaccatggcaaccaacgtcctgcagaccgtgcagcgcatcctggcgacggagggcgacatggagctggacgaggccggcgacgtcatcggcgtgctgcgggatcagcaacgctaccacgaagacattttcgggctcacgctgcgcacccaggaggtgacaagccgcatacgcacccagagcttttccttgcaggagcgtcagttgcggggcgcagtgccctgggcgttcgaccctcccggctcagacaccaacagcccctgagagccgcctggctttcccttccagttccggg

SEQ ID NO: 44799 - DNA, 709 bp, Homo Sapiens
  misc_feature (34)..(34): n is a, c, g, or t
  misc_feature (41)..(41): n is a, c, g, or t
ctgccccctaaaacccggctctgccttagctagnacctaanctctgcccacattttggtctgttctctcccattacacataggtttgtctcagcatgcaagagtttttcctttaaaaaaaaaaaaaaaaaaaaaaaaaaaaaaaaaaagcaatgcttttctctaaaatcaaagagggagtcattttattccaagatgttttatcttttatgttaagagatcaaagcttataattttcttttttaatttttgaaggagggatcaactccagtttccaatgtctatgtgtctatgtgtgtatgtgccatacatatgtattcacatgaagaccggcatggccaagttctgctggaggagcactcaagtgtgacgagcagggccactggaccctgcagggctgtggtgtatatagtgcagctttggaggtggaactctattttcacacttttctatggagccttccgagtcccaggttttcacttgaggctgtctgtctggatggcggttttcagacctccattaacatccctacccagcattctgtacttcgggggccttctctcttgttataaaactttttaccaagtgaaacatcgataccacctttgtttccattctcactggtgtaaatactgagtactaactgagaattttgactttgcattctgtcggaatacttgtgttcaataaaaattgaaagaaaaaagcta

SEQ ID NO: 44800 - DNA, 764 bp, Homo Sapiens
tcggcacgaggcttatccgatgggaggacaaagaatccaaaatattccggatagtggatcccaacggactggctcgactgtggggaaaccataagaacagaacaaacatgacctatgagaaaatgtccagagccctgcgccactactacaaactaaacattatcaggaaggagccaggacaaaggcttttgttcaggtttatgaaaaccccagatgaaatcatgagtggccgaacagaccgtctggagcacctagagtcccaggagctggatgaacaaatataccaagaagatgaatgctgaaggaaccaacagtccacctcagcgggccagcagcccagggaacccctgcccaccaggattgctggaagtgtgacggagcaggcgggctgaggagagtggaaaaggaagcgacccagaaatggcagggacacttctcttgcagaccaagagggaccctggagcaccttagacaaactacccagcacaggcggggctggaattctggcggagggcacgagcctgggactccatgtcacgtttccttctgatttggaatctctccatctgtaattcctcaccctcacccttccaccgttgttagtatcatggtggttttggtttttggtttttgttttaagaacctgcagtttgactcttcatcgttcatctaggggaagacatctgatggttgttttcctatggaaatatatatctattatatatatatatttttttgcaaatctcacaaagtgcggcaagccc

SEQ ID NO: 44801 - DNA, 591 bp, Homo Sapiens
gccttgcgccgccgccactaccaccacgccttgccgccttcgcgccactatcccggccgggaggcccaggcgcggcgcgcgcaggaggaggcggaggcggaggagcgccggctgcaggagcaggaggagctggagaattacatcgagcacgtgctgctccggcgcccgtgactgcccttcccggtcccgcccccgcgcgcccccgccgcgcgcgcgcgccggcgcccccctccgtgttgcccgctccccctcggtgtttgcatgcgccccggccctgccccttggccctgcccctgtccccgggctgcgtcgggacctgccagacccccctcccgggtcctgagcccgaactcccagagctcacccgcgggtgaccgggggccagcccaggagggcgggtggtttgtgcgagttcccttgccacgcggggccccggccccatcaagtccctctggggacgtccccgtcggaaaccggaaaaagcagttccagttaattgtgtgaagtgtgtctgtctccagcccttcgggcctcccacgagcccctccagcctctccaagtcgctgtgaattgaccccttctttcctttct

SEQ ID NO: 44802 - DNA, 605 bp, Homo Sapiens
gaccgcctctggtgccaatccctgacctcagagcacttagctggggttccaggatcaaacagagtgactggaaaggaagtagggtggtgaggtgcaggacaggggcaagaaggttgcaaaaggtctggaatggagcttggaaaaatgttggatatcagcaacatggggctttcactgcagcagcaggtctgatttctacctcaagtctgtctgtctggcccttcctttcctggcgcagtctttgtcttaccttctgtctccaacttccttaaaccttctaaagaagaggataaagtggtttatgactcagccctccccaccccacctctatgaccccaaggccttgagtgaggcatccacgtccgtcctgttcccctcatcctagtcaggccatctgtttgtccctgccaaggggccctgaagtccgggaatgcatgtgtcttccttgacccactccatgtctatatgtcaccttttccttggactgcctgcccacgtctcccccctgtgtctaccttctcctaaccctgtggttccactgaaagagacattggcagtgccaaggaggagaacgttatattaaccaaacttggaccaaacctgtg

SEQ ID NO: 44803 - DNA, 780 bp, Homo Sapiens
agctcggagcgggcgctggaggcagctcgaggcgcgatgtcggtgccgctgctcaagatcggggtcgtgctgagcaccatggccatgatcactaactggatgtcccagacgctgccctcgctggtgggcctcaacaccaccaagctctcggcggccggcggcgggacgctggaccgcagcaccggcgtgctgcccaccaaccctgaggagagctggcaggtgtacagctctgcccaggacagcgagggcaggtgtatctgcacagtggtcgccccacagcagaccatgtgttcacgggatgcccgcacaaaacagctgaggcagctactggagaaggtgcagaacatgtctcaatccatagaggtcttggacaggcggacccagagagacttgcagtacgtggagaagatggagaaccaaatgaaaggactggagtccaagttcaaacaggtggaggagagtcataagcaacacctggccaggcagtttaagggctaacttaaaagagttttttcaatgctgcagtgactgaagaagcagtccactcccatgtaaccatgaaagagagccagagagctttttgcaccatgcatttttactattattttccaatacttagcaccatttcactaaggaaccttgaatacaaccaggatcctcctttgcatgcgactgtagctgcatttcatgaatagtttgaacccttgtcaatgcatttttttgaacaaagaaagaaaagaaaaagttcgtgtatgtgactcaaagcatgtaaccttacga

SEQ ID NO: 44804 - DNA, 658 bp, Homo Sapiens
  misc_feature (633)..(633): n is a, c, g, or t
cacgcgtccgatcaaatgagagctactctgttacatttcttaacatataaacatcgttttttacttcttctggtagaattttttaaagcataattggaatccttggataaattttgtagctggtacactctggcctgggtctctgaattcagcctgtcaccgatggctgactgatgaaatggacacgtctcatctgacccactcttccttccactgaaggtcttcacgggcctccaggtggaccaaagggatgcacaggcggctcgcatgccccagggccagctaagagttccaaagatctcagatttggttttagtcatgaatacataaacagtctcaaactcgcacaattttttcccccttttgaaagccactggggccaatttgtggttaagaggtggtgagataagaagtggaacgtgacatctttgccagttgtcagaagaatccaagcaggtattggcttagttgtaagggctttaggatcaggctgaatatgaggacaaagtgggccacgttagcatctgcagagatcaatctggaggcttctgtttctgcattctgccacgagagctaggtccttgatcttttctttagattgaaagtctgtctctgaacacaattatttgtaanagttagtagttcttttttaaatcat

SEQ ID NO: 44805 - DNA, 636 bp, Homo Sapiens
ggcacgagggtctcaaactcctgaccttgtgatccgcccacctcagcctccgaaagtgctgggattacaggcgtgagccaccacgtccaactgccttattttgttctgaataaatttacagtattgggcagcaattctggattctagacttgagaccacagaatcaaccatttcatgaggttgtactgtaattatacactggaatattcaggtagtcatctttgatttttcattcaagtaaatatagccataagaaaatatctgctatacaggaaaaccagtattaagcaaataccaccatccttaacagaaacaaaaatatatatatatattatttttaaaaattagcattgtcatacagtacaattcttagtgaagtgtattgtggaacaatttagaaacttcctttttttcccctagattaaggatactttccttgacttgagacttgtggtcttcaggaaaactactcagaatataatgactcctcatcagtatcatattgtatataaataatgaaatgcattaagaatattcacaacattgaacccaggaggcggagcttgcagtgagccgagattgcgccactgcgctccagcctgggcaacagagcgagactccatctcaaaaaaaaaa

SEQ ID NO: 44806 - DNA, 510 bp, Homo Sapiens
  misc_feature (22)..(22): n is a, c, g, or t
tttattttcgttttaatttttntggaaggatatacaccacatatcccatgggcaataaagcgcattcaatgtgtttataagccaaacagtcactttgtttaagcaaacacaagtacaaagtaaaatagaaccacaaaataatgaactgcatgttcataacatacaaaaatcgccgcctactcagtaggtaactacaacattccaactcctgaatatatttataaatttacattttcagttaaaaaaatagacttttgagagttcagattttgttttagattttgttttcttacattctggagaaccgaagctcagctcagccctcttccttattttgctcccaaagcctcccccaaatcatcactccctgccccccttaaggctagaggtgagcatgtccctcacaattgcacatgtcaagccatcagcaaggcgcatcacacaaaaggcaccaagacgtgaaactttttaaaccaaaaggacgaagaaaaaacactttcaaaaaaaaaa

SEQ ID NO: 44807 - DNA, 776 bp, Homo Sapiens
gccatttctagcgcttcagccacacaaagaaagcggcggaatgatccgctctcggcgaccgcaagtcccggctcgcccggcgcctgcgcggcagcgggggtgggagctgcggacggccatgtgcgcggcggagaggccgggtggccaccgaaccttcccgcctgttctgcggtgggtaggagtttggaaactaatgttcctgtgctaaccttcgtgtctctgtgacatgactgttgaaagacggagagtgcggaatctttggagttttaagcttgccaactgtgcggcctagcagaatcctgggagacggaaggacagccaagaggctaggatttacctttaagtgtccctagattcaactaggcagactgggacgggagacgctgtgaaggtaccagggaaggaacgagtgaggttccttttccactttttcataaactcaacagtcaggttcatgacgaagatatagatatttctgtagattttttccccaacattctaattatgcctcatgtttcgtagatcctagtaactgcttggattactgccacctcagaggtagagatctgtttttccgtggctggaatgccaaaaattttgttgtattttattaagaaagtagcaaaagtttggagatttgcaaagttaaaaaaaaaaaaggcattatgaacttaatctagatgtgattggctaaggaacttaatatatggatatgtttttcacaggggcgtctgggcatggctttcccaacctagtaactgcaacttttagcatcc

SEQ ID NO: 44808 - DNA, 823 bp, Homo Sapiens
atcaatattttccgggatgctttttggccaaatgggaagttggcaccaccgaccacaatcagaagcaaagagcaaagtcaggaaacaaaacagagagcacagcaaaagctgcttgaaaacattccagatatgcttcagagccttgttggacagcaaaatgcccgccacggtataataaaaatattcaatgcactgcaagaaacaagagccaacaagcatctgttatatgcgctgatggaactgctgctaattgaactgtgtcctgagctgagagttcatttagatcaacttaaagctggccaagtttgagactacacaaataaaccaccagaaaaatgtctgtgtaataatagacatgaaacattttcctcttttccacagagggcttaactgagaaccgtattgatttttattttagttacctccctctagttttatgtgaaattagtagaatcagggaggacgggacttatgctgtggtaggcaacagaaaaaaacttctattgattttaatttaatatgaatactttaaagatcaacataccgattgaaatacaaatgttaatatgtgagaacctaggaagtattttaaatatttatgaaaatattttgttttaaaatgaactatgaatattgtacagttaatttcctcactgaggactgtgaacattcttatattatttcatgtatattgaagaacattgttatgcaatgctttgtgtaaagttattgtgaagattttattgtctttatttttaccaaagatttcccatagtttgagcattcaaagcaataaaatataaaaaaaaaaaaaaaaaaaagg

SEQ ID NO: 44809 - DNA, 601 bp, Homo Sapiens
gcacccctctgggatgcgggtgagggaaggttggctgaagttcctagtctcaggccgtaggtgcctggccagtttcctgtttgtggggcagctggggcctgaggaggaggggttcacttcctcctcccaccccctgggagcggccctgcgctgtcactgacatctcattaaaaaaaaaaaaaaaaaatttgctctcaaggtgtttgaggctttaatgcaaccctttagcccttggttctttttggtgcaagaattctggctgtttacctcagactcagacccctgaaatgttgccaaattcttcaaataactgtttggggggtggggggagatgaaagagagtcgcgttttgtttacagttaaagacatccaatatcttaaaaaggagttttcctttagaaacacacacacccttcctcttgctcaaaagatctcactccatgatactgtgtaaaatatttttgcactgttgtgaagtatttttgacttttttctgtacataactgtgttctcagagctgaatgtttatatcttttgctgtgcaaaagaaacatgtaaaatgttgttcagttgtatatacagaaatgtgtataaaacattt

SEQ ID NO: 44810 - DNA, 793 bp, Homo Sapiens
cgcgtccgtgttacgatatttcgtttgatcttaggtcttcctgtggctccctctctcctggactggttatcttgttattattgttaataataataattattattattttccttccatgctcccaactcccttctgcttgtcccaaatccgccagtgtttctgaatgtttgtgtctgtggttgcagtctttcccccaggaaaaaaaaaaaaagaaattcgcatgtttaatgtgaactctcccctccccatctgtgttctaacttatttataaaaagatgatcgctgtattttgagtttcagctggaaacttctgtaaggggcagcagttgaggtggggtagtgccgcagtggggtcaagctgagctggcttcggagatggagtcccttttcattctcctcctcctccctcctcactccctaggcccaagtctcctaggggcttggtcctagggtgggaaggggctagggaggaccaaagggatggtattgagaagagagaaagaagatagtgagatttaagttcctgctgcctgggtaggccccacaaggcctggtctgggagtatacggaaacaaaaatgatcctcagtgcaaaatgtcttgtgtatttctctgtgaatccatgggtctggctagagggcccaaagcttgtaaatatggggatagtctgggtcagacccatctctcccttacccatcttgcttccaagaccatttgtagtgagcgagtggatgctgtgctacgtgtgaaatctgtctttgcggggcctgtctcagtgattcgcttttgggatt

SEQ ID NO: 44811 - DNA, 1483 bp, Homo Sapiens
ttcggcacgagggacatgctgagtgaggctttaattcagaaccttgtgaaacatcttcctgagcagaagatactcaacgaattagcagagcttaagaatgaatatgatgacctctgtgagcctgaacaatttggagttgtgatgagctctgtgaaaatgttacagcctcgtctcagtagtatcctgttcaagctcacatttgaagaacacataaacaacatcaaaccaagcatcatagcagtaactcttgcctgtgaagaactgaagaaaagtgaaagctttaacagacttttagagttagttcttcttgttggaaactacatgaactcaggctcaagaaatgcccagtctttgggatttaagatcaacttcctttgtaagatcagagatactaaatcagcggatcaaaaaacaacccttttgcattttattgccgacatttgtgaggaaaaatatcgagatatcctaaaatttcctgaagaactggaacacgtagaaagtgcaagcaaagtttcagctcaaattctcaagagcaaccttgcatcaatggaacaacaaattgttcatctggaacgtgacatcaagaaattcccccaagcagaaaatcaacacgataagtttgtggaaaagatgaccagctttacaaagactgcccgagaacagtatgaaaaactctccaccatgcacaacaacatgatgaagctctatgagaatcttggagaatacttcatttttgactcaaagacagtgagcatagaagagttctttggtgatctcaacaacttccgaactttgtttttggaagcagtgagagaaaacaataagagaagagaaatggaagagaagaccaggagggcaaaacttgcaaaagagaaagctgaacaagaaaagttagaacgccagaagaaaaagaaacaactcattgatataaacaaagagggtgatgagactggtgtgatggataatcttctagaagccctacaatcaggtgcagcattcagagaccgtcgaaagcggattccaaggaatccagataacagacgagtacctttggaaaggtcacgctctcgccacaatggagctatctcatctaagtgattcctgatgccaaagaatatgaaaatatttaagtaaaaacaaaatgatgcattttgagaaggaacaaagtgtgcactcagcggctggaaaggaaataagtgcatttctgcaaagatcaagataagctggatgaagtagtgtgcatttgtaatactattgcaagactcctcccacaattattctaatctgaacacagttatcaggattacaaaatgtgttccattttagtgtaaagatgtgtatcatttgtaattgtgtgtgacctgactgtgatgatggaagtgtaagaaattgaagagttctaaggctttcaaaaacactcagtcaaaaatttaaaatcttaaatgtgtaagtcacccccaccaaaaaaaaaaaaaaaaaaaaa

SEQ ID NO: 44812 - DNA, 582 bp, Homo Sapiens
gtcatagacacaatttctcttctgtatgccactagttacatttctaaattctgagcggtctcagttaggcctgtatgtgtgtacatgtccaagtaaagctggaaaatgtcagtcttgacacagctgtgtcttagtatgagaaacagaagactgaagaataaaaactaaggaacaagaatgagtctctttttggtggctaagtagaatcttcctaaaaccattgtcataaaagcagttaaaggcaataaatttttaaaagggacatatcactgattcattcctaaaaagcatgaacaaaaagtttttgttctgttccagctatatcttgtctaagtgctaacactgtttcagtgaaaatatctagccataagattaaaaaaatatattatttgcaatgcttaagcctgcagatacgtaatgtgaccactgttttgtgttgacaatattgctttatacagttcttgtatttgaaaggaattgatccttttaagaaacatggtgtatattgttcttacaggactatttcagtggtgtaaataataaatatcttttcttaaaaaaaaaaaaaaaaaggccacatgt

SEQ ID NO: 44813 - DNA, 594 bp, Homo Sapiens
  misc_feature (559)..(564): n is a, c, g, or t
  misc_feature (567)..(570): n is a, c, g, or t
  misc_feature (574)..(575): n is a, c, g, or t
ggtgcaaaaatgtttttaaaatgtgtgccttttattacctatcagtctatgttttgggagaaatgggaagcaacagatcactgtgtcctgatgtgcaggacgcatgttaccacactcacaaatgcctaatattggtctttatgtggccattgagtcctgttgactttccactcatgtgctttttactctagcattatggaatctgggctgtacttgagtatggaaattctcttatagacttagttttagtactctattacacctttactaagccacataaaagtaatctgtttgtgtgtaactgccagatataccacctggaattccaagtaagataaggaagaggatgacatttaaaagagaatggaattttgagagtaggaatgcaaggaagacagcatgaacatatttttttcagtgcaaataattttttcgtaacaaagaaacgaacaactttggtatgatcttaagcaaaaatactcactgaaatagtatgtggatgaattcacctacttacaattttatggtttctttgtaaataataaatgtgaatcaccannnnnnaannnnaaannaaaaaaaaaacatgtcggc

SEQ ID NO: 44814 - DNA, 782 bp, Homo Sapiens
agcctgatcttacacggtgctgatttcagcactaaagatgctgataatgacaactgtatgtgcaaatgtgccctcatgttaacaggaggatggtggtttgatgcttgtggcccctccaatctaaatggaatgttctatactgcgggacaaaaccatggaaaactgaatgggataaagtggcactacttcaaagggcccagttactccttacgttccacaactatgatgattcgacctttagatttttgaaagcgcaatgtcagaagcgattatgaaagcaacaaagaaatccggagaagctgccaggtgagaaactgtttgaaaacttcagaagcaaacaatattgtctcccttccagcaataagtggtagttatgtgaagtcaccaaggttcttgaccgtgaatctggagccgtttgagttcacaagagtctctacttggggtgacagtgctcacgtggctcgactatagaaaactccactgactgtcgggctttaaccacagggcaagaaactgctgagcttgctgtgcttcaaactactactggaccttattttggaactatggtagccagatgatcccctatggttaactttcatgtaaaaccagaacaaaacagagttgaacacagacgaatatatcattgaagaatagaaacaagcctgccataatcctttgcgaaacgatgtattattacccgtgcacaaggcgtcatattctatggcaacctataacaattattctgtgcccaattttgatacacctttgacaggcttgtcctc

SEQ ID NO: 44815 - DNA, 610 bp, Homo Sapiens
  misc_feature (577)..(577): n is a, c, g, or t
  misc_feature (581)..(581): n is a, c, g, or t
  misc_feature (586)..(609): n is a, c, g, or t
aatataatgatgttgaaaaatgatagtaggtatgtattatggattggagaagcacttattacactatctaacctaatatgtagaacaattcttgagagttgtatctgtcgttatttctgaatgtgaagctcagagaagtgacacagagtaaatggctgatcttctatattgtagtatattttgtccttccctcttccctgaggaacaaagcacgtatctttagtctttttgatatttattctgagaccaagggcttgcttgacctgatgattttccttcagctctctgaaggtgctttttccacaatccaagtgattctgatacacactaaagttgagaatcactgcactagatcactttgtgttttctgattttcaaggttgatacgtagctttaatacagctcttctgttgacagttattactttaattttgcatttgttccttgtaagaatggctggaaactgtgtgttgacatttgaggatgggtatgcaaggaaaaaatatacttctgtttacttactctgactttgaaatagtgttatttttctatatctgaaataaatgcttctaccatngaanaaaannnnnnnnnnnnnnnnnnnnnnnng

SEQ ID NO: 44816 - DNA, 657 bp, Homo Sapiens
  misc_feature (621)..(645): n is a, c, g, or t
  misc_feature (647)..(648): n is a, c, g, or t
aggagcgaagggtattcttcctgaatgagtttggtgattagaaatctgcagcgagtcatccccatcaggagagcgccacttcgcagtaagatcgagattgtaaggaggattttaggagtgcagaaatttgacctggggatcatctgtgttgacaacaagaatattcagcacattaatagaatctacagagatagaaatgtcccaaccgatgtgctttcttttccatttcatgagcatctgaaagcaggtgaatttccccagcctgattttccagatgactacaatttgggagacattttcctaggagtggagtatatcttccatcagtgtaaagaaaatgaagattacaatgacgtcctgactgtgacggccacccacggactctgtcacttgctgggattcacacacggcacggaggcagagtggcagcagatgttccagaaggagaaggcggtgctggacgagctgggccgacgcacggggacccggctgcagcccctgacccggggcctcttcggagggagctgagggccgcgttccttctgaaagcgggacgcgggaggggtggaggctgcggggagccggggtcgcacacaaataaataacgaatgaacgtaaaannnnnnnnnnnnnnnnnnnnnnnnnannaaaaaaaat

SEQ ID NO: 44817 - DNA, 671 bp, Homo Sapiens
gtgggggaaggcgctggattcccagttctcagaatgaagtggagctgggggagctgcttctgtcactgaattatctcccaagtgctggcagactgaatgttgatgtcattcgagccaagcaacttcttcagacagatgtgagccaaggttcagacccctttgtgaaaatccagctggtgcatggactcaaacttgtgaaaaccaagaagacgtccttcttaaggggcacaattgatcctttctacaatgaatccttcagcttcaaagttccccaagaagaactggaaaatgccagcctagtgtttacagttttcggccacaacatgaagagcagcaatgacttcatcgggaggatcgtcattggccagtactcttcaggcccctctgagaccaaccactggaggcgcatgctcaacacgcaccgcacagccgtggagcagtggcatagcctgaggtcccgagctgagtgtgaccgcgtgtctcctgcctccctggaggtgacctgagggctgcagggaaggcagctttcatttgtttaaaaacaaacaaaaaaatggacggaaacacacactgtgtcccatactatttacttccacacctgcataacacactcgcaacatgtctacaccacgtccacacacacagacacacagataccccaaatcctctca

SEQ ID NO: 44818 - DNA, 594 bp, Homo Sapiens
tttttttttttttttaagtcaccttgtgcgagaacctcaaccgcacctatcttgggaaccgggtatacccttttctttagcactgctatcctttttgtcttcagcacaaataagatgttcaagtgagccagaagcaagaagagccattttagtcttcatagctattggctaagagagataatgagctgatggtctattttaaccttgaaagtaaaaatgtatattttttcactacaagtacattgaacagtaaaaagtgtaacagcaaagtatatatttgatgccttctgtcttttcatgataatgtgctaacaagttgtgttaatattttactcagccagagtctcattcatttgctaagcattgggaacattatgtatattgaccttaaacataggtgtcctatatttggattgtgacttgtagactcaagctaaccttactgcctctttttcacacttgttgaaaagtctgtgaagaacatagttaaagatctccaactttggaaaatatacatgatgtgaaactggggtgctatgttaaaaataaatgtatgataactaaaaaaaaaaaaaaaaaaaaaaacctcgtgcc

SEQ ID NO: 44819 - DNA, 667 bp, Homo Sapiens
  misc_feature (26)..(26): n is a, c, g, or t
  misc_feature (76)..(76): n is a, c, g, or t
ctgtcgactgtgagaaatttcccctntgccttaatgaaaatagtgcattaagtagccaattgctgcagaattatanagcaaattagctaacagtgggtcacattggactaccactcaaagaaccaagatgcataccagatgatggaaggtacatgtggtgtggcttagggagagcgcacctgtgccagatgcatgccactttcagtagctgccaaatgtgcctttaattaagaacatctctaatttttttcttcagatcaagtcagcatttggggtcgggatttgggcagggaactctggggtgcaaatatctggtgaaaccaccagagaatttgtttgtcaaagtgacatgtataattttagttgagacgtgtttgtgtatatatgtgtatttgcctttgtttagtagcacggttatttgctaaaataattgtcaaaaaattgctctgtcggtcggtctttgatgtaagaacaaagtgtggtctatacatctaatatggcctttgtacctaaccatgttcataggtaatctttgtactctgtgtgcagcagtatttggtttgcatttaaagtgaaaataacggctgttatttttctggcattactaagataaactgaaaaataataaagaaaaatgccttacatagcccacaaaaaaaaaaaaaaa

SEQ ID NO: 44820 - DNA, 1549 bp, Homo Sapiens
gcctggttaccgggagtggggcgcccctcctccttatcccctcccctcttccctgtcccctttcacagctggctgtagctggccaaggagttctcgattaaagaggaaggggcagtgctcacatttctgggcaggtgtctggaaaatatgaggggccacccctctctgctgctgctatatatggcattaaccacctgcctggatacttcacccagtgaggggacagaccaagtccttcctcttccaggagtccaggacccagccccttcctccttcagacccaggaatctggattcccagcccctgctccttcctccaggaccccactgctttccatccccctatgactccagccctagggaccctccatttttctgtccctcatgtctttgggtccaagtcttcctgggtcccccagaggcccagagcttcctgagtagccatacccggattccaagagccaaccactgggacctggagctgctcacaccagggaacctggaacgggagtgtctggaagagaggtgttcctgggaagaggccagggagtattttgaggacaacactctcacggagcgcttttgggagagctacatctacaatggcaaaggagggcgtggacgagtggatgtggccagcctggctgtggggctgacaggtggcatcctgctcattgtcctggccggcctgggagccttttggtatctgcgctggcgacagcaccgaggccagcagccctgtccccaagaggccgggctcattagccctctgagtcctttgaaccctctgggcccaccgacgcccctgcctccacccccacccccacccccaggcctccccacctatgagcaggcgctggcagcctctggggtacacgacgcacctccacccccctacaccagcctcaggaggcctcactgaagagctgctttcgagacccggctctccgaaccgtgcccctgattcataccggattccggaagccgctaggcctcatagacgccgaagctggacttggagtggggaatggtgggagtaggggtcatccggcccgaggcctgccctggcacacgcgtttccgccgcgtatggatatacacatgttttcggcaacgtgttcccgtgtcctggcccctcacgggcccccacactctcctgaccgtgagggcactggtcagttccgcccccgtggtaggcagacgcgcggggaaattcggacccaggagcccagccccggctgtgccatcttgtgtatgggcagatatgacctgacagccccctccagtgccacagggtacgcacacgcagagccccgcctgtgcacacgcgtgtcttcgtgcactccccgtgcggtacaggggcacttcgtaacccagggaaagggcggggggcatatttgcaagcgcgctcggtgcgggcagctcgcattgcacccagggagctggagttgggctgttcccctaaataaaaaccttcggaaaggagaccaaaaaaagcagaaataatgcaaaaaataataaatgaaatgaactgcgaaaaaaaaaaaaaaa

SEQ ID NO: 44821 - DNA, 802 bp, Homo Sapiens
  misc_feature (802)..(802): n is a, c, g, or t
tgacctccagagggccagagggtgggatccagcgctatgtcctgcaggctgcagaccctgctatcagtcaggcctggatcaagcatgtggctcagatcttggagagccaacgggacttcctcaacgcattgcagtcacccattgagtaccagagacgggagagccagaccaacagcctggggcggccaagagggcctggagtggggagccctggaagaattcggcttggagatcaggcccagggcagcacacacacacccatcaatggctctctcccctctctgctgctgtcacccaaaggggaggtggccagagccctcttgccactggataaacaggcccttggtgacatcccccaggctccccatgactctcctccagtctctccaactccaaaaacccctccctgccaagccagacttgccaagctggatgaagatgagctgtaactggtgaaaaccatgggggtggtgctgactcagccgcctattccccaaggagcttcagggcagtccttctggcactgctccagaattcctccttcttggtgtgtctggagggtgggcaaggctgggagggatatcaacttggaggagaacacctagacccaaggacttttttctgcccaaggaacacagtttccttcagctcccatccctatgcatgcatcatggtccccccaaaaggaggatatgtgggtggggtgggaggggctggggcaggggccagatagaaattattggttttgttttttaattttgtttttcctgttttctgagaaaaaaaggttttgttatatccn

SEQ ID NO: 44822 - DNA, 1386 bp, Homo Sapiens
gcagcctgtcccagtgaggacagggacacagtactcggccacaccatggggcgcccactgcacctcgtcctgctcagtgcctccctggctggcctcctgctgctcggggaaagtctgttcatccgcagggagcaggccaacaacatcctggcgagggtcacgagggccaattcctttcttgaagagatgaagaaaggacacctcgaaagagagtgcatggaagagacctgctcatacgaagaggcccgcgaggtctttgaggacagcgacaagacgaatgaattctggaataaatacaaagatggcgaccagtgtgagaccagtccttgccagaaccagggcaaatgtaaagacggcctcggggaatacacctgcacctgtttagaaggattcgaaggcaaaaactgtgaattatggccctacccctgtgggaaacagaccctggaacgcaggaagaggtcagtggcccaggccaccagcagcagcggggaggcccctgacagcatcacatggaagccatatgatgcagccgacctggaccccaccgagaaccccttcgacctgcttgacttcaaccagacgcagcctgagaggggcgacaacaacctcaccaggatcgtgggaggccaggaatgcaaggacggggagtgtccctggcaggccctgctcatcaatgaggaaaacgagggtttctgtggtggaactattctgagcgagttctacatcctaacggcagcccactgtctctaccaagccaagagattcaaggtgagggtaggggaccggaacacggagcaggaggagggcggtgaggcggtgcacgaggtggaggtggtcatcaagcacaaccggttcacaaaggagacctatgacttcgacatcgccgtgctccggctcaagacccccatcaccttccgcatgaacgtggcgcctgcctgcctccccgagcgtgactgggccgagtccacgctgatgacgcagaagacggggattgtgagcggcttcgggcgcacccacgagaagggccggcagtccaccaggctcaagatgctggaggtgccctacgtggaccgcaacagctgcaagctgtccagcagcttcatcatcacccagaacatgttctgtgccggctacgacaccaagcaggaggatgcctgccagggggacagcgggggcccgcacgtcacccgcttcaaggacacctacttcgtgacaggcatcgtcagctggggagagggctgtgcccgtaaggggaagtacgggatctacaccaaggtcaccgccttcctcaagtggatcgacaggtccatgaaaaccaggggcttgcccaaggccaagagccatgccccggaggtcataacgtcctctccattaaagtgagatgcc

SEQ ID NO: 44823 - DNA, 918 bp, Homo Sapiens
ggtctgaagggctcccttgagaactaggacaagagactacaaggagtatgtcctgaggaggggttgggatggtgtgttttctctcacctcccttttatgagggtcctcttgtccatcttcaagcctcacagtgggggcttgcagaggagtgcagactgaagccagcagagaggaaggactgactgaggggctgtgtcctcttatgggaatttgggaacatccctcgtcttgtcctctcttctgcacagcacaggttccagcactggttttagaagaaaaaaataccctgcccagagggaaagccaggaaagattgggaagtgggtggtcaggagagaaggcctgataggagccttcagacaatttgggtcctagttgcttgggttggacaatacaggaattgcttctgggccctgggaaagctgggaccatagtgctccagcccaaagactaggggagcattcattaccctagtttgacctgaaaatccatagggcagggcccactactttccaaagaaataaaagaacaattatttttaacaaatggaggcagtgaaaacttgcttagctattctgtgtggaagatgggagcagtaaatagatctcatgccaaatgggataaagaccccagctcacatagctttggtaagatggatagaagccagtgaacgaaggtagggacccgaacaagacaaatggggctttgggggaaggactttatgggggtaaaagctttggggcaccccggtctagttttaaaaatagtgcctcttgttgctggccctggcctggttgtgcctttccaggtgctcagtaacagggcctaaggtcttagaaggaggggacggggagtgtttgcgaatgggggggtgaatggtgggctcttactatgaggaggtggatggcttagtaggaga

SEQ ID NO: 44824 - DNA, 812 bp, Homo Sapiens
gccttggaacccacgcagaagtaaactcatccactttgctcagagaagtgtttgacatggtctgttcctagttacatgttggctgtaatgtatgttgagaagtcagtccaaggaggtatgttcttccacaacagccttctcagcctctgctatttcctttgaggaaggtagaagtgagtttccatgtttgcagagtatttaaatacctcagattttattaatgagaaatacagtacccctccctccactccatctggtaatttatggtaaaattgtggttctgtgaaccagctattagtctcatcttcttaactccctcaggcatcatcaaattctttgatcttctcttccacctctctggctctcatggaagaatcctttacacatgaaaacaatggaactggaaaatcttgtcttttagaaaagaaattaatcacaactatctctcttgcctaaaagataaatataggtaaacccaaggaaaggggaatttagtttctctacatgtcatttcggtctccaaactccctgttggctttttaatgcaattttaattgttggaataaaaaagtcccaagggtgttttgttactgttttctccatgaataaactcacttgacttttaacattcacagatctatatctgtctttggggtttagtctatctgggattaaggtttttttctgtttttctttgctgtattgttcatgctattgaagccctctagctgtttctgccctacaccattctgctgtgccctaagtattctttgtggctgtctcacagaagagagaacatttcttaatatccc

SEQ ID NO: 44825 - DNA, 571 bp, Homo Sapiens
ggctctgaggaaggcaacacaatggtacccaagaactgctacgtcagccagcaggagctgaagccatttccctttggtgtccgcattgactacgtgctttacaaggcagtttctgggttttacatctcctgtaagagttttgaaaccactacaggctttgaccctcacaggggcacccccctctctgatcatgaagccctgatggctactctgtttgtgaggcacagccccccacagcagaaccccagctctacccacggaccagcagagaggtcgccgttgatgtgtgtgctaaaggaggcctggacggagctgggtctgggcatggctcaggctcgctggtgggccaccttcgctagctatgtgattggcctggggctgcttctcctggcactgctgtgtgtcctggcggctggaggaggggccggggaagctgccatactgctctggacccccagtgtagggctggtgctgtgggcaggtgcattctacctcttccacgtacaggaggtcaatggcttatatagggcccaggctgagctccagcatgtgctaggaagggcaagggagg

SEQ ID NO: 44826 - DNA, 607 bp, Homo Sapiens
tttactgcttgtgttttacagacccgatatcaggttcttctttagactgggcttatgacctgggcatcaaacacacatttgcctttgagctccgagataaaggcaaatttggttttctccttccagaatcccggataaagccaacgtgcagagagaccatgctagctgtcaaatttattgccaagtatatcctcaagcatacttcctaaagaactgccctctgtttggaataagccaattaatccttttttgtgcctttcatcagaaagtcaatcttcagttatccccaaatgcagcttctatttcacctgaatccttctcttgctcatttaagtcccatgttactgctgtttgcttttacttactttcagtagcaccataacgaagtagctttaagtgaaaccttttaactacctttctttgctccaagtgaagtttggacccagcagaaagcattattttgaaaggtgatatacagtggggcacagaaaacaaatgaaaaccttcagtttctcacagattttcaccatgtggcttcatcaatttatgtgctaatacaataaaataaaatgcacttaatgctttaaaattcaaaaaaaaaaaaaaa

SEQ ID NO: 44827 - DNA, 550 bp, Homo Sapiens
gcttaggccagtcagtacacccaattttaaaaaataacatattcttgctttcacaaatatagttgaacaagatttccctaaaaattccaccaggattaatctctaaaattctagtctctgatttgcaaatgcacatttgtcactgaataatggaattatgtataacaagccaaacattcttattttagacaaccatagaactgtcccacaaaatatttctaagcttatttctaactattaggaggaatgtgcttttccatctaaaatactcaccaaaatatagttaattgtggctttatgaagttaacagtctcattacagatttagtttaccaatcaacagcatgtctactgcttggatccatacaaaactatcggttcaagttgatgtgacaagggaagggagcaccagatgacacataaatctgtctgattctatgcctgtatttccaacaaacttactgtcagagaatatgacctaaatccattttctaaactgttttcatgtgttgcaaattattctagtcaactgctgttttatgtcatactct

SEQ ID NO: 44828 - DNA, 737 bp, Homo Sapiens
  misc_feature (657)..(657): n is a, c, g, or t
cactgtcacctatcccttgaattcaaatgtgcagttggctggactaaggttgataaggcatctgactattaccagtgaatatcagcatatggttacaaattatatttcagaatttcttcgtttgttaacggtgggaagtggagaaactaaagaccatgttttgggaatgcttttgaatttctctaaaaatccatctatgacaaaagacttgctcattgccaatgcaccaacatcactgattaacatttttagcaagaaagagacaaaggagaatattcttaatgctctttcactatttgaaaatataaattaccattttaaaagaagagcaaaagcatttacccaggacaaattcagtaaaaattccctttatttcctattccaacgacctaaagcatgtgccaagaaacttcgagccttagcagcagaatgcaatgaccctgaggtgaaagagagagttgagctattaataagtaaactctgattggctgtatgttcccaaacaaatttgagtaatattttggttttgcactctggaagtaatgcacattgtaaattgcattataactttgaaactgatgttacctatgatggtctatagctggaccattttatgaacaccaaatgaattcaagcttgtactaaaaatacatgtgntgatttttatcttgtctggattgagatatttttagtatgcttcatgagcagaaactgaatggattcttcataagtaaggt

SEQ ID NO: 44829 - DNA, 718 bp, Homo Sapiens
gggcactgtttggtggaaggcttggagtttttttaatgagtttagagctattagataaccactgagttaaaggtaactatgtacacacaaagtgtgcatccaagaggcatagcagcagcagaagtctttaaaggcttgtacaccaggaagaaagatgcatcctcttgccttgtggcaatcattttcctttagaaaacaggccagcttcacctgggcaccctgctgcctttcaaggctggtgatgctcggatagtgattcccagttgtggtgtttcatgcagagttgtatgagagtcctcctcttttctttctttaaaagaagttctttctttgaagaaatccgatacatatacagcctacagtgcaaaatatttaatggtataatttagatcaagttaaaaactacatacaaagttgtgatcaacagcatcctaagataaatataaacaaaaggatatactttgaggtgtacagattaagcatataaaaaattagagactaactgggattttttaaagattattccaaattaagagtgctttgttatgccttcagcaaatagcttcatttgtgccaatactgaataaaagagttatttctacatgtgaattagtttttttcaagtcataatcccctaaaaaaactatttctagcccagagcctttcacaataaaaatactaagatttacaaaatactaagtttaggaaagagcaccta

SEQ ID NO: 44830 - DNA, 762 bp, Homo Sapiens
gaacttttagtaaacatactacttactctaaaatcaaacattttattttcctaaagaatataggttgccaaaaaatattttatctctaaatataggttagctgtaattatttcatgaatttttttttttttcaatggtaacttttttgggtgaagattcatggttcctaagttctggtattcaagttttgggaaatgtttatttaaaaacggttctatacaagtgttcaaaacatggtatctaaagagagtagcctggacttaaaatatttggaaatcagcttatgcgtgcctttaaatttttttttaaagtttcttacggccacatatggtgtgaagtgacagtaagtggcttaatgacatcctgcagtatctggctggctttgggagactccagtgagatgttgacaatggtccctgtgctgggtaactactttcctctgccaggctacgccgaaacgaggatgtaatggtgaataatatacaccatccagtctttaatggtgctgcaacaaggtagtaattggtataaatcattggttcccacggccttggtgtacatagaaacatttaaaaatttcccccagtctattgagaagttaaggatgttccctaaatatattaaatatgcctttattccacaatgggtataaaaaagggtaattctaaaatgcatgaatagacttaaggtatgcgttggtaaatttttattaacggtttgtagtattggaccatatgtgggttgcagattttcaatggttac

SEQ ID NO: 44831 - DNA, 1071 bp, Homo Sapiens
  misc_feature (8)..(8): n is a, c, g, or t
  misc_feature (795)..(802): n is a, c, g, or t
  misc_feature (804)..(867): n is a, c, g, or t
  misc_feature (869)..(874): n is a, c, g, or t
  misc_feature (876)..(891): n is a, c, g, or t
  misc_feature (893)..(894): n is a, c, g, or t
  misc_feature (896)..(900): n is a, c, g, or t
  misc_feature (903)..(904): n is a, c, g, or t
  misc_feature (906)..(911): n is a, c, g, or t
ggattgcngactctgaagcatctaaattcccacctgcccaatggcagccatgttattttgtatggcttaccagatggaacctttctctgggataatttgcacaacagatatcatcctctcggccagctaaataaagacatgacctatgcgcagttgtactccttcctgaactgcctccaggtcagcccctgccacggctggatgtcttccaacaagacgttgcggactctcacttcagagagagcagagcaactctccaacacactgaaaaaaattgcagccagtgagaaatttacaaacttcaatcttttctacatggattttgccttccatgaaatcatacaggagtggcagaagagaggcggacagccctggcagctcatcgagcccgtggatggattccaccccaacgaggtggctttgctgttgttggcggatcatttctggaaaaaggtgcagctccagtggccccaaatcctgggaaaggagaatccgttcaacccccagattaaacaggtgtttggagaccaaggcgggcactgagcctctcaggagcatgcacccctggggagcacagggaggcagaggcttgggtaaactcattccacaaaccctatgggggctgccacgtcacaggcccaaaggactcttcttcagcagcatctttgcaaaatgtctttctctcaatgaagagcatatctggacgactgtgcaatgctgtgtgctcccgggatcagtaacccttccgctgttcctgaaataacctttcataaagttgctttgggtgccattccnnnnnnnnannnnnnnnnnnnnnnnnnnnnnnnnnnnnnnnnnnnnnnnnnnnnnnnnnnnnnnnnnnnnnnnannnnnnannnnnnnnnnnnnnnnannannnnnaannannnnnnaggggggggggccctcataaaaaacccccccggggggccccaatttttcgcctaccccccttttttttttaaaaaagggcccccccattgggggcgccgttatataaaaaaaaggcctgcgcccccttttttaaaacacctggggaggggggaaaaagcg

SEQ ID NO: 44832 - DNA, 631 bp, Homo Sapiens
gtagcttcaccttgtgtatgcaggccccaagttattttttagcaatcttacgagtgaaatgttctggtgggttgaaaaacgttcttattttaaagaaaggttgtgctcgctacactgctggtgtgtgcgttctgagacctcttgtattcaatctgtgaaggatatgtgtattaatccgtacacccgtatagcctcaatatttgtctgaagacacttaaattctgacccataaaggaaagttctagaagcaatattttcacttatttaacattctccaaacaacatcaagcattgatacacactgaagagtgcgtttattttttgtatcactctaagtatgttggaatatgcaaggactgtggttcaaattagaatgtataaggcatattataatttagttcatactgaaaaagaaattaacagaacattgttcggttcacacgttccaaaatttgagtgatttctggagttagacatagattttctattttgttttaatttgtcaaggtatttttcttcccttcatgaactttaggtacacataacttatgtcatttatttatggtcttttatacctagtttgtaaaattgtaaaatagcaaactaaatgcaaagagtttgcatttgaaaa

SEQ ID NO: 44833 - DNA, 552 bp, Homo Sapiens
  misc_feature (345)..(345): n is a, c, g, or t
  misc_feature (471)..(471): n is a, c, g, or t
cggcgcttcgtgcaggccgagggccgccgcgccacgctgcagcgcctggtggaggcactcgaggagaacgagctcaccagcctggcagaggacttgctgggcctgaccgatcccaatggcggcctggcctagaccaggggtgcagccagcttttggagaacctggatggccttagggttccttctgcggctattgctgaacccctgtccatccacgggaccctgaaactccacttggcctatctgctggacctgctggggcagagttgattgccttccccaggagccagaccactgggggtgcatcattggggattctgcctcaggtactttgatagagtgtggnggtgggggggacctgctttggagatcagcctcaccttctcccatcccagaagcggggcttacagccagcccttacagtttcactcatgaagcaccttgatctttggtgtcctggacttcatcctgngtgctgcagatactgcagtgaagtaaaacaggaatcaatcttgcctgcccccagctcacactcagcgtgggaccccgaatg

SEQ ID NO: 44834 - DNA, 639 bp, Homo Sapiens
taagtatgccaagcacctcgcgttgaaaggcttgactcaaaccagaagtcttgctggaattcgtctctgaacacttgaaaaacagaaaccctgagccgcaacaaacatgcctctgtgtgtcgggattgcctttgtctctgcttccatgtggcttttccttttgtagctatgcttagtgacataatcttccctcttctagccttctcctttcaagcctgtctgttaattaaccatgtcagtattggcaagcatttatcttcccccaccctaacatgcgatcttctaagaattttgcaaaattctaaacaaatatagagatggtatatagaattcatatctagaaaactttgattttaatgtgagcttatcaaatttgttctggcttttttggcactaaggcaaaaacatgttaaccagaaataatttattcttcatgtatgtaaaatatttgagaatgtttagccttttattagaattttatttggaaaatatttatctttctacacattttacacttatgttcctttgcttataacccaatttcttaacttttttgttacttaagcaaatatcaattatgttttattatctaataaagtgtaagattcttactatctaagatagaaaaatagaaacaag

SEQ ID NO: 44835 - DNA, 486 bp, Homo Sapiens
  misc_feature (482)..(482): n is a, c, g, or t
tttttttttttctcgcgaagcgcgccattgtgttggtacccgggaattcggccattatggccgggacgcaagacgccgggcctacaacgggaggcgtgaggaaagccgtgcgttgcgttccaaggcatctgtgagcccgcggagtatacaccatgagcaaagctcaccctcccgagttgaaaaatgaaattaaatggtggcagacatgtccaaggaatattgcggggatttgatccctttatgaaccttgtgatagatgaatgtgtggagatggcgactagtggacaacagaacaatattggaatggtggtaatacgaggaaatagtatcatcatgttagaagccttggaacgagtataaataatggctgttcagcagagaaacccatgtcctctctccatagggcctgttttactatgatgtaaaaattaggtcatgtacattttcatattagactttttgttaaataaacttttgtaatngccc

SEQ ID NO: 44836 - DNA, 577 bp, Homo Sapiens
agtcaggattgttacccccaccacctgcgctccctccaagaccttgtccatcacagtctgaacaagtgtcggaggccgagttactcccacagctgagcagagccccatcccaggctgcagaaagtagtccagcaaagaaggatgtactgtattctcagccaccatcaaagcccattcgtaggaaattcagaccagaaaaccaagctacagaaaaccaagagccttccactgctgcaagtgggccagcttctgcggcaaccatgaaaccgcatccaacagtccaaaagcagtcttccaaacagaagaaggccattcaaactgctatccgcaaaaataaagaggcaaacgcagtgctggctcggctgaacagtgagctccagcagcagctcaaggaggttcatcaagaacgaattgcattggaaaaccaattggaacaacttcgtccggtcactgtgttgtgacccccccatggttcaagtgacagtgggtgaccttgtctgccaagatctttcttttgaatgttttgaacccaactacttgtcatagatgtttgactgtgtcaaaagctgtgagcagc

SEQ ID NO: 44837 - DNA, 575 bp, Homo Sapiens
  misc_feature (559)..(559): n is a, c, g, or t
cgtttcttctttctagagcagttggccaagcagaaaaaaaagtgtctcaaaggagctttctcaatgtcttcccacaaatggtcccaattaagaaattccatacttctctcagatgggaacagtaaagaaagcagaatcaactgcccctgacttaactttaacttttgaaaagaccaagacttttgtctgatcaagtggttttacagctaccacccttaggggtaattggtaattacctggagaagaatggctttcaatacccttttaagtttaaaatgtgtatttttcaaggcatttattgccatattaaaatctgatgtaacaaggtggggacgtgtgtcctttggtactatggtgtgttgtactttgtaagagcaaaagcctcagaaagggattgctttgcattactgtccccttgatataaaaaactttagggaatgagagtcctctcacttagaactgaagggaattaaaagaagatgaatggctggcaatatctgtactattgggtgaatatggtggaaatattagtggatggatacagaagttactgtcagancagaaaaaaaaaaaaa

SEQ ID NO: 44838 - DNA, 581 bp, Homo Sapiens
ccttcatgatattgctccaaagtggattgactaacactttcccctcttgacccaatatcatgaaggtcaattataattccatatacctttctttgatgccacagtcagagatagaatacagtttgggtggccatggatgtgccccaatacagtacacattttttggttaaatttgttttcagatcatttcatggaatctttgaagtatctttgactctaactttgacttggtggtggaccttccttggtttttataacacctaagagatatcctttagaattacatgtattttagcataaggaaattgaaaaagtaaaacatactggtttttttcaacaagaccatatgtaaattaaatagtgaaatgtgtatgagtttcagtagaactgtaccatcaacaatgtttccataaatatgcagagttctttcttttgtattgttatttacaatattgttaaattgaatgcatttgcaatttctaggattctaaagaattgagtacagaaagtagcaattttattatttgatgataatatgagaatattgtgccaatactgttttgataaataaatagattttt

SEQ ID NO: 44839 - DNA, 865 bp, Homo Sapiens
cagcctttcaggaaagatgcagccactcctgcttctgctggcctttctcctacccactggggctgaggcaggagagatcatcggaggccgggagagcaggccccactcccgcccctacatggcgtatcttcagatccagagtccagcaggtcagagcagatgtggagggttcctggtgcgagaagactttgtgctgacagcagctcattgctggggaagcaatataaatgtcaccctgggcgcccacaatatccagagacgggaaaacacccagcaacacatcactgcgcgcagagccatccgccaccctcaatataatcagcggaccatccagaatgacatcatgttattgcagctgagcagaagagtcagacggaatcgaaacgtgagcccagtggctctgcctagagcccaggagggactgagacccgggacgctgtgcactgtggccggctggggcagggtcagcatgaggaggggaacagatacactccgagaggtgcagctgagagtgcagagggataggcagtgcctccgcatcttcggttcctacgacccccgaaggcagatttgtgtgggggaccggcgggaacggaaggctgccttcaagggggattccggaggccccctgctgtgtaacaatgtggcccacggcatcgtctcctatggaaagtcgtcaggggttcctccagaagtcttcaccagggtctcaagtttcctgccctggataaggacaacaatgagaagccttcaaactgctggatcagatggagacctccctgtgactgactctttcttctcggggacacaggccagtccacagtgttgccagagctttaataaacgtcacagagtataaaaaaca

SEQ ID NO: 44840 - DNA, 608 bp, Homo Sapiens
cggaaaccagaattagtgaatggaaggttgtctgtggataaggatcagtatgttgagcctgaaaatgtcaccatccaatgtgattctggctatggtgtggttggtccccaaagtatcacttgctctgggaacagaacctggtacccagaggtgcccaagtgtgagtgggagacccccgaaggctgtgaacaagtgctcacaggcaaaagactcatgcagtgtctcccaaacccagaggatgtgaaaatggccctggaggtatataagctgtctctggaaattgaacaactggaactacagagagacagcgcaagacaatccactttggataaagaactataatttttctcaaaagaaggaggaaaaggtgtcttgctggcttgcctcttgcaattcaatacagatcagtttagcaaatctactgtcaatttggcagtgatattcatcataataaatatctagaaatgataatttgctaaagtttagtgctttgagattgtgaaattattaatcatcctctgtgtggctcatgtttttgcttttcaacacacaaagcacaaattttttttcgattaaaaatgtatgtataaaaaaaaaaaaaaaaaatg

SEQ ID NO: 44841 - DNA, 1015 bp, Homo Sapiens
  misc_feature (544)..(605): n is a, c, g, or t
  misc_feature (607)..(608): n is a, c, g, or t
  misc_feature (610)..(617): n is a, c, g, or t
  misc_feature (619)..(619): n is a, c, g, or t
  misc_feature (622)..(629): n is a, c, g, or t
  misc_feature (631)..(645): n is a, c, g, or t
  misc_feature (648)..(659): n is a, c, g, or t
agaaaggattctgttgacagatgaacagccgaaagctggccagaccctcctgtatgcctctgcccttgtcctgtgggttgagggggtctgaccaggaggccacctacagcaggaagtgaggctgccatgtttccttgagacacagctgcctctccccagctctgtccctgtagtcacctgccggtgggcgaggatcctctccctgggataagcactcccagccccgtttatcagaaacacaggcaaggaaattggaactgccacccagcccagcatgatggctcaattggttggttgcgttgtcagttgtctcttcgttttgttaaggtttttaataagtacgtttggcataatgtcttttaatgggtttgtaatatttgtaacggttttagcagcctataacttttcagctggtgcttttacttagggaaaaaaacaatttgtaaatacagaacattgtttaaaagacataaccatagaacatagcttcctgtttgtggattttgtttcctatatattcaaagtaaaatgacttacaggagcnnnnnnnnnnnnnnnnnnnnnnnnnnnnnnnnnnnnnnnnnnnnnnnnnnnnnnnnnnnnnnannannnnnnnnanggnnnnnnnntnnnnnnnnnnnnnnnttnnnnnnnnnnnngggggggccccctcttaaaaattcctcctggggggggcccagtttcgccccaccccccttttttttttacaaaagagggccccctaaaggggggggcccatttataaaaaaagcccccccgccgccccctttttaaaaaacacgtcggcgcgggggaaaaaactgcaacttttgggggaattttttggggaagagaacccctcttttttggggggggggcacaaaattgggcccacccctccccccccgcaaattttagcgcctccgggggggaaataaaaagattttttataggggggaaagaggggggaaaaaacaaccgcccaaaagggtttgccccggctaaaaaagaattt

SEQ ID NO: 44842 - DNA, 533 bp, Homo Sapiens
gcatcgagccttgcacctcaacaaaaggctccctggatggctgtgaagcaaaaccaggagccctggctgaagcaagcagtcagtacttgcccactgacagtcaatatctgtcacctagtaagcaaccaagagaccctcccttcatggcttccgatcagatggcaagggtctttgcagatgtgcattccagagccagccgggattccagtgagatgggtgctgttcttgagcagcttgaccaccccaacagggatctgggcagagagtctgtggatgcagaggaagttgtgagagaaattgataagcttttgcaagactgccggggaaacgaccctgtggctgtgagaaagtgaaaaaagaaaaaaaaaaaaggcattggcattttcttgtctcttctgttgatttaaaaatgatccctcctggtgataacccattttacagggatgaagaaagaccaatgctgctttaaggcttttagtgaacatctgaagtgcccacaagtatgttctttccactgctgatttctttttcag

SEQ ID NO: 44843 - DNA, 539 bp, Homo Sapiens
cccacgcgtccgggccccccaaggcgtccgcaccaccctctcagtaccttcgagggtgggctctgagagtgaggatgaagacctcctgagcgagctggaacttgcagacagggacgggcagccgggctgcacgacagccacatgccccattcagggagccccagactctggtaaatgctctgcttcctcctgcctggatacttctaatgaccctgacgacctggacgtgctcagaacccggcatgccaggcacacccggaagcggaggcggctggtgtgagcagcaggacaagcactttctcagaagcccgtggccctgctgacgagagacagcccacccccagcctgcaagagaggcagccagaggccaggtatctgctggccgctgaccgaccaggtccgcagtgaacagaggcgggcctgccgactgactgtgtggcatggagcatggctgttccccaagtgcacacctgaacacttggaggaataaagttctgtttttaattgtggagctggacaaaaaaaacaaaaaaaaaaag

SEQ ID NO: 44844 - DNA, 591 bp, Homo Sapiens
  misc_feature (501)..(501): n is a, c, g, or t
  misc_feature (563)..(570): n is a, c, g, or t
  misc_feature (572)..(574): n is a, c, g, or t
  misc_feature (577)..(578): n is a, c, g, or t
  misc_feature (580)..(582): n is a, c, g, or t
  misc_feature (584)..(584): n is a, c, g, or t
ggggcaccactgatgcctcccaaccttgctctgggagaccaatgcctgaaccagggtttgtttaccttctgagctgcagagatggggcttctggaatttaaggtaacaggatgaggcaggggtatcttgatcatccggatggggcaaatactgctgtgtggcatggtggtacccacccctatggaggggcactcttggacagagcccagacctttgtgccctggagggagccaacccaccctgacacggagacactggcagaatagaccagagacagaaggtgctctcatggtatccagcctggatgccaagcccaagtcctggtggatagcagaggccagctgtttgggaaaagggcaggatgctctgaggcctggcagccacatttccatgtgtctttttaccaataaacggcttctcttctgaggcttggacagtgtgtgtgtacacacaggcatgaaaaaggtggagaggggtctctgcgcgcaaaactcagactgntaattttgtgtggttcccttgctctctgagcccattaaataaagaagttgtcttggcctaannnnnnnnannnaannannncnaaacatg

SEQ ID NO: 44845 - DNA, 582 bp, Homo Sapiens
cctcctctgcccgcctgcattatggcacagatccttgcactggtcaacctttcagattccctctggtctccgtccgaaacgtctacctcttcccaggcattccagagctgctgcggcgggtgctggaggggatgaagggactattccaaaacccagctgttcagttccactcaaaggagctatatgtggctgctgatgaagcctccatcgcccccattctggctgaggcccaggcccactttggacgtaggcttggcctgggttcctaccctgactggggcagcaactactatcaggtgaagctgactctagactcagaggaagaaggacccctggaggaatgcttggcctacctgactgcccgtttgccccagggatcgctggtcccctacatgcccaacgctgtggagcaggccagtgaggctgtatacaaactcgctgaatcaggaaattacctgatgttccaaaccccctccagatcctgtatatccgcagcatctcccctttccctgagctggaacagtttctacaggacactatcaagaggtactaggggcctggaggtttgggctccaagagaag

SEQ ID NO: 44846 - DNA, 575 bp, Homo Sapiens
ataaccaagaaactgggagagaaatatcataagaaaaaggctattgttaaggaagtaattgacaaatatacagctgttgtgaagatgattgattctggagacaagctgaaacttgaccagactcatttagagacagtaattccagcaccaggaaaaagaattctagttttaaatggaggctacagaggaaatgaaggtaccctagaatccatcaatgagaagactttttcagctactatcgtcattgaaactggccctttaaaaggacgcagagttgaaggaattcaatatgaagacatttctaaacttgcctgagtttgaaaatttgttaacaatacattaaaatcttaaagcatcaaattggtgttcgccaaggcattatgagactctactgtgttagggtatattcttttgtataaaacaaacaggtttttgaaaatattactgtatagttagttgttcagctaaactttgagaagaatttaattatgtctcatgaggtatcaaactatgtaattttgtccttgttatttttgtttcctttgtaatttacttgatgagtttatatcttcatt

SEQ ID NO: 44847 - DNA, 840 bp, Homo Sapiens
cctcatcaaacccttgggctccatgatacctacaggagaaacacaagctcggtgggctgttcgagtcctgaaaggtgtaaataagttaccaccaccaagtgtcatgatagaggaaattaatgcaaggaaagaaaacaagcccagttggtttggcttgtgctactgcaaggctttacaatcagattatatcacatacatagatgaactcctgacctatatcaatgcaaaacccaacctgttctctatgctcctaacggatccacatctggctctgaccgtcttctttggcccatgctcaccataccagttccgcttgactggcccaggaaaatgggaaggagccagaaatgccatcatgacccagtgggaccgaacattcaaggtcatcaaagctcgagttgtacaagagtctccatctccctttgaaagttttcttaaagtctttagctttctggctttgcttgtggctatttttctgattttcctataagtaaaagatctcctaaatggaagatgcacagagtagatttacaatgctccaattcctctcttacagcaatattgccttcacagttataaactgtattcaaatagtaaaggccaccctctcgcttccctggctggccccagggctaccactggtattcctgagcctctcccagctccacttctaatgctagagaatgataactaagacttctgtgcatttgaaggtgtcggaaagttacaggttcattttagaaaagaaagctgttcttggacagcactctgagccatcatacctctttcccatataaactatttcaacagatctcaactaaaacccctttacttcacaaa

SEQ ID NO: 44848 - DNA, 591 bp, Homo Sapiens
gggaggcactgatggtgaagccacaggtgttctgtatttcagctccgggagttcaacatctgtgggcgctgccaggtggcccggtactgcggctcccagtgccagcagtaaggactggcctgcccacaagaagcactgtcgggagaggaagcgtcccttccagcatgagcttgagccagagcgatgacgggcaggggagccacacatactcacagcccccgggctctaccctgggcacagcagagacagactggtggtcgaacctggaggtgccaaaaaagccagctgcgggcccaggacagctgccgtgagactcccgatgtcacaggcagtctgtgtggttacagcgcccctcagtgttcatctccagcagagacaacggaggaggctcccaccaggacggttctcattatttatatgttaatatgtttgtaaactcatgtacagttttttttgggggggaggcaatgggaagggtagaaattacaaatagaatcatttgctgtaatccttaaatggcaaacggtcaggccacgtgactaaaaactgtcctgttgtcgaagcttctcccctgggccgccgggagccccg

SEQ ID NO: 44849 - DNA, 627 bp, Homo Sapiens
gtttcttttgtaaagagaatcaactaggtatttaagactgataattttacaatttatatgcttcacatagcatgtcaacttttgactaagaattttgttttacttttttaacatgtgttaaacagagaaagggtccatgaaggaaagtgtatgagttgcatttgtaaaaatgagactttttcagtggaactctaaaccttgtgatgactactaacaaatgtaaaattatgagtgattaagaaaacattgctttgtggttatcactttaagttttgacacctagattatagtcttagtaatagcatccactggaaaaggtgaaaatgttttattcagcatttaacttacatttgtactttagagtatttttgtataaaatccatagatttattttacatttagagtatttacactatgataaagttgtaaataattttctaagacagtttttatatagtctacagttgtcctgatttcttattgaatttgttagactagttctcttgtcttgtgatctgtgtacaattttagtcactaagactttcctccaagaactaagccaacttgatgtgaaaagcacagctgtatataatggtgatgtcataataaagttgttttatcttttaa

SEQ ID NO: 44850 - DNA, 585 bp, Homo Sapiens
  misc_feature (475)..(477): n is a, c, g, or t
ggggcacaagattgtcttacaagtcgtgctggctaatttttagtttgtattcataagtggtttttaaaagcctttttttaaagtgtaatttgcatgttctactttgattgtatgtaaacatattttagaacaaaaaatgtatttgtattttattgaatatagaggcaagaaaattgtacattgtttgaaatgttctttttgtaacagtttttattcataaagcatttttgtacatttaaaatgaacatggacttgctgttatttgaggcgtagatacatctagcatgcttactgtcatgctcctccatggtcttagatgttgggttttaaacatttttttctaaaagaaagctcagtcttttccgctaccagatcaggttagcacagtttagagcacttaactattaaaaaaaaaaagttaacctattcatatgttattcattgggggaaattaaagacattcaattcaatcttnnnccgggaaaggcacaggacacggatttaaaaaaaaaaacccttggggggggggcccggggcccaattcccccttttggagaggggttacaataaagggccgggttttac

SEQ ID NO: 44851 - DNA, 389 bp, Homo Sapiens
gccctgacattttcacacctgagcctcagattccaatagctcactccctagagcctgacgccggggcccctgacccctgagcctcagattccaatacctcactccccagagcctgatgccggggcccctgacccctgatctacggaggcctgctcccggaccgtgcgggcaccagtgcagtgctgccttggttcctggacccctgggcccatcctgggaccccagatggggtaaggagaggccccagaaccccaaagcagacagcgagacccccagcggcagaggcctccctcggcactccaggcttataatttcgaactcttctggaaggtcactcaggaacaccctccctgcctgtgcaaagagaaaacaagcgccttgtttccttc

SEQ ID NO: 44852 - DNA, 590 bp, Homo Sapiens
gcccgcgatctgcgagcggtcgggggactcaaattggtggctgttttcacacagatgtgttggtttgtggtccaacttctttatctgaaaaagccagtgataaaacatttttgatttgatttttctaaactatctaccatattttaagtgtagcagctttgactttgcaataacgtggcaagtatctgatttctcctttgaggcacacgtttaagtgtaggcctgttacacttgtatgatacctttttcatgacagtctcagtatagatcagttggtacagaaatacatgaacacattttgatagggcttatttcacacaaagaagtttatggttatttgtgtggggtggtgttgttatatattattgactttaagggaaaagaagctataagattcgctgacagtcaaagtatcatttagaaaagtgaagcaacaagatttatgttgatgaaagatacatgagtttgcattttgacctgttcagtgtctgtcttccagcacggtgtgtacacttcttcaaaattgtacacagtatgctaattagaaatatcttggaaagcctcatggtcactaattttcaactagcatc

SEQ ID NO: 44853 - DNA, 839 bp, Homo Sapiens
  misc_feature (822)..(822): n is a, c, g, or t
ccacgcgtccgatagtcccatggaaagagactgtcatcatcaccctttcattcatcatagggataagattttttgtaggcacaagaccaaggtatacatcttcccctaatgcctatctgaccaaactggatagaaccaccatagtgaagtgtgaggcggccctgaccaatgtgtgaagtatgcacttggcctgactcaggaagccaggtgagaaaaccatggtctctctgcttgcttggcccttctgatcatgtatgcatcccccaaggatgaaatcagattttaactaataatgctggatggcctgaggaaagattcaactgcctctctttttgggctttcatagtgttcattgatgctgctggctaagcatttatcaaagcataagctcagtaactgtgcatctggtctgtacctggttggtccttcgtctttgcatgtaagctctttgagaggaagggtgaagccttatttgttttttatgtcccctgccagggcctgtctctgactaggtgtcaccatacacattcttagattgaatctgaaccatgtggcagaagggataagcagcttacttagtaggctctgtctacccccttccttctttgtcttgcccctaggaaggtgaatctgccctagcctggtttacggtttcttataactctcctttgctctctggccactattaagtgggtttgccccatcacttagttctcaggcagagacatctttgggcctgtccctgcccaggcctctggctttttatattgaaaatttttaaatattcacaaattttagaataaatcaaatattccattcttngaaaaaaaaaaaaaaag

SEQ ID NO: 44854 - DNA, 499 bp, Homo Sapiens
ggaaagggaagtgtgattatgctgggatacagaaggctaacagtacactttatatgagaagagcttagaggtcaggagagcacaatgctgaggggtttgtttggttttattttcccctctggaaacttggagaaaggaggacaggaaaagatgataagagggcaccattgtttggttttaaaggtccctccccaaccccccacaacaagaaagctcattttaatgagatgagagaaggggagaaagctccctccgttctgatgcttttgagcttatcagggacaccctgcagcagaaattccagctgatccttcagccttcagagttgatgaggtggggctcacacacatctggatttgaagaagaatcgtgggtttcaagaactctgtggtctcttaagcattggtattccacagctacacttccctgatactttgcactcagtaatgacaaaataaatatttgtagaattgaaaaaaaaaaaaaaaaaaaaaaggac

SEQ ID NO: 44855 - DNA, 874 bp, Homo Sapiens
gatgtgaacttagaggttgtggggccgaggggtcgtcttatatttattwtttyacaggcatttagtctamgttrraggtaaamaaatamgggtcctgcttaagaaaaaagaaaaacgtcttamagccagtgtctaaactccaaacaacggaatgtatmaatraramctagtatatggatacacgtgcatttaaaaccgccctgccggcttgtagagcttttgccgttctccagcgctttacaggggttatcgcacttaagcctcggaacaactttaccagtgattcwaccagaaaggaatgaagaamaraaccttcaggaattgagtcacaatgcagamaaatatcaaatgggagattgttgcaaggaagagattgatgatagtattttctactagccattgggaagataaaaggagacagaagattgaagcctttgccagccattctttccctttttgcttccaaactcctcaactgggaaccttcatatgtgcagtatttatattggatcatactggtgattataaaagttcctaggaggctagaagagccaaccaacagagaagggaaagcagtctgttctgaacatagggacataagttcattcatgccaagtatctttccagcatgtttctcccatttagaatatctagcatgtaaggcctttcaatattaatataagcccaatatcagctctttctctttgtatttcatctctttctactctcctatttgtattttgtgttcctatcaaagtgtcgtatctgggagatgacctgccttatcctgttctataacagttttgtttgctgctgtgtctttagaacagtgcctggcacacagtaagcactcaataaatctttgatgaatgaa

SEQ ID NO: 44856 - DNA, 579 bp, Homo Sapiens
ggaagtcagttcgtgaaggcaagtttgtcagtattttcacaaaactattcagctgaatccagaaagtgaaacagcaagaatttgcattgtaaaattgtgttataaaattggactttgaaatttcaaaaataagaaaaattttcatgtgtatttatactaaataccgttttaggaaactaggatcagggtgtttctgttggcgttggcattaactagctggatgtaaatttgaaaagccactcaagcagcttcctagtctagaaagtcagaggtttagattagatttccgacatcccttccatttctgacctgtagttcttgtctggaattctgctttgttataaactattgttctaaggagtttgttgtgatagcacatagttcattttgtaaagattccctgcgtataaagtgatgccctacatatgtgattttgtattaaaagtatataggatcattattttattttgaaaaatttaaatacagaaaagtataaaatataagtaccatccgcccagaaataacatgtgttaatgttttgtcatatgtgctttatattttttgaaataaagtgaagtc

SEQ ID NO: 44857 - DNA, 798 bp, Homo Sapiens
  misc_feature (688)..(688): n is a, c, g, or t
  misc_feature (694)..(694): n is a, c, g, or t
  misc_feature (776)..(776): n is a, c, g, or t
gtctgtcttcagagattcttgaaaggttgcagaaaattgatgctccaccaagtgccagtgtcgagtggtgcaggaagtgttttggagcgcctctcatttaaatagagattcactagaatgttgacacacaaggcttggggattagatttcatctggaaacattcaagttttttttttccaaatcgtaagaactggtgaatacggaattgaagtaactcttggggacaatatataatgaattatgattcatattgcattaccttgaaatatgaagtgccatttgaatgtcccagggcttattaatattgaagattttcaacccctgaactgcttttctgcctctgtggaaaactactttgggattcttcagtatttgtagtagtttgatagaaataatgaggaaccatattcattctaggcattgtttatatttgaagttactgagtttgaggaatggcaaattaaatttgcctaacccccaaaacaaatgaaatatctcaattataaaagcaacatggccgggcacggtggctcaggcctgtaatcccagcactttgggaggctgagcaaggtgggtggatcacttgaggccaggagttcgagaccagcctggccaacacggtgagaccctgctttactaaaaatacaaaaattagccaggcgcaccactgtagtcccagctactcangctgangcaggagaatcgcttgaactgaggcagaagctaccagtgagtggagatcacgccactggaacttccactttgggtgacagantgagaaccgctcaaaaaaaaaa

SEQ ID NO: 44858 - DNA, 517 bp, Homo Sapiens
aaggaggcttaggactttccactcctggctgagagaggaagagctgcaacggaattaggaagaccaagacacagatcacccggggcttacttagcctacagatgtcctacgggaacgtgggctggcccagcatagggctagcaaatttgacttggatgattgtttttgctcaaggcaaccagaggaaacttgcatacagagacagatatactgggagaaatgactttgaaaacctggctctaaggtgggatcactaagggatggggcagtctctgcccaaacataaagagaactctggggagcctgagccacaaaaatgttcctttattttatgtaaaccctcaagggttatagactgccatgctagacaagcttgtccatgtaatattcccatgtttttaccctgcccctgccttgattagactcctagcacctggctagtttctaacatgttttgtgcagcacagtttttaataaatgcttgttacattcaaaaaaaaaaaaaaaaaaaataggt

SEQ ID NO: 44859 - DNA, 844 bp, Homo Sapiens
agcccatacaagtattcattttttctaccctttcctttgtaagttcctgggcaacctttttgatttcttccagaaggcaaaaagacattaccatgagtaataagggggctccaggactccctctaagtggaatagcctccctgtaactccagctctgctccgtatgccaagaggagactttaattctcttactgcttcttttcacttcagagcacacttatgggccaagcccagcttaatggctcatgacctggaaataaaatttaggaccaatacctcctccagatcagattcttctcttaatttcatagattgtgtttttttttaaatagacctctcaatttctggaaaactgccttttatctgcccagaattctaagctggtgccccactgaatcttgtgtacctgtgactaaacaactacctcctcagtctgggtgggacttatgtatttatgaccttatagtgttaatatcttgaaacatagagatctatgtactgtaatagtgtgattactatgctctagagaaaagtctacccctgctaaggagttctcatccctctgtcagggtcagtaaggaaaacggtggcctagggtacaggcaacaatgagcagaccaacctaaatttggggaaattaggagaggcagagatagaacctggagccacttctatctgggctgttgctaatattgaggaggcttgccccacccaacaagccatagtggagagaactgaataaacaggaaaatgccagagcttgtgaaccctgtttctcttgaagaactgactagtgagatggcctgggggaagctgtgaaagaaccaaaagagatcacaatact

SEQ ID NO: 44860 - DNA, 901 bp, Homo Sapiens
  misc_feature (772)..(772): n is a, c, g, or t
aacaaaagaggaaagaaaggaaggaaagagacggaagaaaagaagaagagggggggggtggaaaaagcaagctgagtaccaggtccgagaattcccgcggatcaaatatttaactgttttgtatgctgcacattgcaagtctgctcatgtgcattctccctttgtcttcctttgtcatatgtgtttttgcttttttgaaagtgcagtctttattgtaccctcctccagcttgtagcaaattagaatgcttagcatttatgttcattcattattgtatttgccatgtaaaatttttattaccttagacaagcttataagctgttactacataacttatcttactgtaactcttttatttcccccgacgttgtaatttgtttgtgatgtatattgtgaaattgtattctatgttaatttaatcagcacaattcactgacatgctggactgacatgctggctgctgtttcaaagtgtaaagtttgtgtagggctgttgggacaactgcaactctgttgtcaaggtactgtgctttggttcctatagcaacactgggtgtggcccttgaattgctaagggcatttaatacatcctggagcaaattttaactgcagattttctttgtagaaattctatgtataatgcaggtacctacttggcccatggctggtaactatttgggcaattagaaaaaaagaaaaaaacataaaaactagtgtctattgctgctttgaatatgtttgaaagtctgaaaatgtaaatagtttatcaaaanaaaatcttgtacagtccagtgtaaagtttttaaatgaaccttaagggtttgccatcacattctttctcacaactctcctctttgattaataattaataaataaaaaaagttttggcctaagggatttaa

SEQ ID NO: 44861 - DNA, 675 bp, Homo Sapiens
gaaaaaaagaaaaaaacataaaaactagtgtctattgctgctttgaatatgtttgaaagtctgaaaatgtaaatagtttatcaaaaaaaaaatcttgtacagtccagtgtaaagtttttaaatgaccttaagggttgccatcacatctttctcacactctcctcttgataataataataataaaaggtttgctaaggattaaagaaatgggaaaaataaaaaaaatctcttcaaatttacaggaatgaatcattgttcttagctttgttgcatacacaaacttcttggattttgttgtgcagtattgacgtgagataaagctcaacattgaataatctttcagtggtacttttcaaagtcttcccctcctctgcctcataattaagggaaaagacaaaattgaaagacacactgtctttatctatcctggtgtatgttggcaccttagctactttttttttccctttttgcacaaggtgctttcctgattttgttcaacatgccatcttggggtgataatgttatttgccgtgatggggctcaggccccttaggggagtgtctataagaactgcctatttatgctcatttacctcaagactgtcctctctaccctaatctagttgtcatcactcccatcttttgtactgctgttgacccttcaatttcccgctat

SEQ ID NO: 44862 - DNA, 730 bp, Homo Sapiens
gtggtgcgtcccgtccggagccactctccactttctctcacaggctgctagaacagcccagccctgtcagtgttgtgatcatggtccagtcttcgggtttcacctcctagtactccacaagctgctcctctctctgtggccccggcccctgcccaggtgtgggtggttctggccaggaaggcacaaggtagctgtgggccaagacaccagccctgtcctagcccttcagtaagaccttgccaggagaggagaaggatgcctgggtgccaggcaagacaagcccctcagcaggagagaggcccagaggctccagctggccaccgtgccccacaagatggcccctgtgtggttccctttaccttggcttcctggcccagtccctgcctctccacctgcaccctgcttcctggcccagtcccaggttggagtccctctgcatagctgactactcatgcattgctcaaagctggcttttcacattaagtcaacaccaaacgtggttgccacatttcatcagacagacacctccctctggagatgcagttgagtgacaaccttgttacattgtagcctagaccaattctgtgtggatatttaagtgaacatgtttacaatttttgtatatatcactctctccctctcctgaaagaccagagattgtgtattttcagtgtcccatgttccgactgcaccttctttacaataaagactgtaactgagctgactgtga

SEQ ID NO: 44863 - DNA, 550 bp, Homo Sapiens
tgatgatggaggagattggggagctgctacctgtccttctagaagccacggtctggacaaactttctccaggatcacagaagaactgcagcttcctggggagcagtttcacctccacaggcatcgcttcatactcctcactgtcaatgctaaaagagccccctgctccctggggagaagagaatattcagaacagctcaaacacatcagtggcctactggagttggaggtctccagcagcaccagaagaagttcattatggaaaacaacatcctctcttgaggagctatcctaatgttcttttacaaaaaaaaattcagtgcctactacgatgggcacagtgctggttctggaaacatcctaattctaccatccatgaaaaaggatttattttctttttttggcccctatctcctcccagagtattttgggatttgaacaacatggttataattttcaaatatgtattaaaaggcaagggtcctgccatgtcttaaggaactcatatacatagtctttctatattatgctaatccttctcaaataaaaat

SEQ ID NO: 44864 - DNA, 592 bp, Homo Sapiens
gtccggctattccccagcgcccaggtgttgtgagtcctaataaatggtgaaaagcatttgcaaatgttctgtactatataaatgcatagtgcctaatatggagagtcttcaagcaataaatgtgctctagctcaattcagaatactaattcacccattgttttcaaaagaaatgttttactaacctgtttttttttcttttgtaaaattagtttctagtcatttgaacgtgtttttatttggtgtatagaagtgatcaatagtatatattcttgcttgtcagagaatacccaagttgtattgttaaatgttaaaacaatggggttacataacagtatagttggatagggaggaagattctagctcaaaagttgcaaaatacagaaatacaaagattagctttgaattggagattgtactataaatagtagatgttaatgtggtggtttctagatatatactttatttttaagttacaagcaaatggtcttttatttcttgcagtttggaactatatgattctttacatgttttcaaactcaagttttcatcaagtcaaaacaccacaaacggaaaaaaaaagaaaaaagaga

SEQ ID NO: 44865 - DNA, 640 bp, Homo Sapiens
ctaccatgctttgtttacgtgtaaaggaaaataatgtttgatagtaaatgtccacttaaaatacatgaatgggcatttctaaaatgttaaaacataaacacatttccattcatggatatttgtcaacagatttaaagaaaaccacagttattaattaaagaaaattaattatgtgtagttataaaccaatgaaattttgattaaccttttcaaattaatgttccagtttgaagaccaatcaaatatattatttagtcaacatatactatttagtctcaggttcaaggctacaacaaaaatcaccatctttgtcaaactttggagagggaaaatcttcactttcttaagcaacaatggatattgcctgtgtttgccactgtgtttccctgcctctcaattcgctgaaaaaggaactacctatccttacatttcacctactaatgtctcttctaacatcttagaggtccatggagaaggcatatggagaacatgttttatactgctctataaatagtattccaatcactgtgcttaatttaaatagcattatcttatcatttatcagccttttatgtattttccaagtaaaatattaacatattatttcattggtcttcttttttatctggttctatatgaa

SEQ ID NO: 44866 - DNA, 535 bp, Homo Sapiens
tgaaaaaaggccttctggaatttggtaccaggtgctagaaagaatcctacttcccctcttatctacagggaaatagaataagggcccctgtccccaacatcccccaaaccttgtggcagtttttgcatctgtagactggttgggtttgtaggtccggccacagctggggcttgggtccaagctgggtgatgtagttattggaggggcattaatcctggaactcagatcgccactcagaaagttctttgcataggaggcgaggttcggcacgctgaccacgcggctgggcacgtcctccaccttctttttctgtttgtattaatggacaggttagtgcaatgcaatgcaaaaaacaaagcattattgtaaaagcaaataatgctcacccaatcaaaattgtatcggagaagaagcaacaatttcatttatacacttacatgctattttttaaagcacttttccctccaatcttcattttgtattataaataaatatgtatgttcacaacctcttaaaaaaaaaaaaaaaaaaaacc

SEQ ID NO: 44867 - DNA, 767 bp, Homo Sapiens
  misc_feature (653)..(653): n is a, c, g, or t
gcagttgcatttaaccttaagaaaaatgtccttgggataaactccaatgtttaatacattgattttttttctaaagaaatgggttttaaactttggtatgcatcagaattccctatagatctttttgaaaatataggtacctgggtatcacacatagaacttttaattctgctggtgtaggctgttgcccaaacatctataattttactgagctcttcaagtgattctgataacacagcctggattgagaatttttataagatggcaatggaaaaacatttattcttttaaataataatttttttaaaacccaagaggtcaggggattttataaaccaatagccaagtgttctttaaataggaggcacccttcccattgtgccaaaatcatcttttcatttattttgaaatttgtatgattattttatacttgtatgttgcctttctttcgaaggcgcctgaagcactttataaacacaaatcctcacaatacctctgtgaggtaggtaaatagtacttttctatgtagtaaacctggaatatggagaatttcataacagttcattctactttaataatgcaataatggagctccaagttgtctgtggacttctacaccaactcagacttctggaagttttctgtacctcatnctttagtcctgtcagggtagcaaaaaaaaaaaaaaaaaaaaattggggggcgccggcccagaaattttaaccttttgggcggcccgggaggaaatggccggtcgagaacgggaa

SEQ ID NO: 44868 - DNA, 774 bp, Homo Sapiens
  misc_feature (631)..(631): n is a, c, g, or t
  misc_feature (692)..(692): n is a, c, g, or t
ttgtcaatttcctataagaatattattctgaagacctggaggaggaggtagcagcagcggtgaaaaatgggaatgacttctaatagtttacaatatcatgaaggaagggctgttgaattgtagcacaaacctgaacctggtcactgactgcatggaacatgctctgacatcggtgcatccgcgaactcgatattcagctggctgggatgctaaatttttcttcatccctctatcttatttacctacatcactggcagactacattttgactagatcttggcccaaaccagcccaggcagtctaaagaaaactgggttggtgcttcttggaatgaaggcaaaaatctgaaattgttagtgtctcagtaatcctgatttagaacccaggctttttgtaacaatgtgttttcttgcctaaattcatttatctggcatcatcagagtactaacatgtttatatttcagatatccaaagcttaccactttaggtgatgaatctttactattttagcccttttttgatgagactatttgtctaaagtgaatcatttgttcttgccttattaaacagagtagatggaaaacaatttaacctattttgaagtcatttctttatgaatatgaataattgntctatgctttaataatctattgtgaggaaactactaagaaatatggttggtggggtttggnccttacttgaaatggggtctgtattatggtacttttaataaatatttggatttttttctttctcttcaaaaaaaaaaaaaaa

SEQ ID NO: 44869 - DNA, 592 bp, Homo Sapiens
ttccccagaccttcttgcccccgccctcctggtctgtggacttccctctgctctgagcccagggagggggaagaagccagggggtagggtggccctgggaacctggctctgggtccccacttcctctcccagtgccgggctgggtggggtgtcaggtttatttatgtacctcttgcacactcatcaacctatgcaagtcccccaccccggccctccatgtttctgtgcctttgctcatcccctcaatctcccagggcttctccagtccccctcccactagctgcaggaagtgggatggatgggccacctcgtttggaatcagcagggtgtccctctcatgggaccctcccctctccccagcctgtcctgtcttgttcactctccatcagggtgagctgactgtgcctggcactgggaggtggtgagggacaccgtctcacacacacagggaggcaagagctgccccccaccccacctgacagcagagtgtgcaggacgcaggcggccccactctgatgggcaggaccctgaccctctcccgctccagccccctccccaggccctcctccatgaatttcaccctccctaccca

SEQ ID NO: 44870 - DNA, 480 bp, Homo Sapiens
aattcggcactaagggtgggttcaaactcaacattgcgtttcacaaaggtctttgtcactctcagcatgtgagtgtactctatcagttccagcaagtttttcctcagtttctccttgttcttagtgacttctctcagttcaacctcgagcttctgcaactgctcctgcatttctagaacctgtttcaggggtggcgcaggagggctggcctctccttcaggaaggggaatatcagctctattaatttcctgtaccaaatacaccaatattcgctctagctcttcacacctcttcacctcaccaacaaattttctttggaaagaacttacgttctggttgaggtctcggaactggaccaggcctttctcgcccagggcgctgaggcactcgtaggccgtgcacgactgcaggaagagctgcgccaggcacatggtctcgctccggaacagggaccccatggcgggccgacccacgcccgga

SEQ ID NO: 44871 - DNA, 952 bp, Homo Sapiens
tggtaatataagaatgtccctcaattgggtttcatggtgattagatttagattatatgattttttggcaggagtatcacagaagtgacccagtgatcttctcattgcatcttacctgtgaccctacagttttgatttgccctgttactggtaatgttagcattgatcactaacagtggtatctgctgaatttctcctctgtaatgttattttttcaccttgtggttaattagtattttacagggaggtaatttgagactatgtacatatctctactccccatcgaaccctcaatttattcatttgcttgtatcaaataaaccatggattcatggtttattttattcagtgagttataattcattaatattgttattaaaaatttgtttttcttttaagaaatgttatattttgacaacttcagacttacagaaagattataagaggtagtacaaataatttttggatattattccccaaatgttaacattttactgcatttactttatcctttctcccccttctcctcctgtctttctagatgaatatgaatataggtacttaatacagattttttttctaaactgtttgtaggttgcagacacgatgcctctttatttctaaataatgtgtatttcctaaataaaaggaattaccttacataactgtagtataatggtcaaaatcaggatattaacactggttcaatgttaatatctaatctatagaccttacgcagattttgccaattgtctccaaaatatccttgatagccgaggaaaattcaaratgggggattttcaccaggtgtgatgtgttggtccaattgttccgtttctatagtctccttttatctgggatagttcctgagtctttctttgattgtaatgacaattatgtttgttggagagtataggtcagctgttttgtaggcgttctctcmattttggktt

SEQ ID NO: 44872 - DNA, 584 bp, Homo Sapiens
cttaaccttattgatcagttgttccttggtgttgaataatgtgttaggtagccaggtggacctgtgtcctagcctggagaagctctatgtcaccttgtaggaagccatctgaatttgactcagcatcatatgctgggcctgtgctgcacttgagccttctttccagccgccaggagggatggttgtcctggccaacagcgaatttaatgggtggtcaaaagaagatgtgcctgcatagaaggctgaaagagggagctggaagtaggaggagacaaggagatagtgacaccagtatcttgtcacagaaatcaaggaaggcaacagtttaaaggaggggagggagatcagtggtgccaactggctcagaagaggtttgctgggttaaatctcaagatgagcccatgagatctggtggttagcagaggcctttcctgacaaccccattttaagcacctcttccccatcactctatctcatcactgttactgtctgtgtagccctgtcatgagctaaaatcatcctgtttgtttattgctagcttatgtgtctaaagtatactccttgagaacagcaactttgtcttt

SEQ ID NO: 44873 - DNA, 782 bp, Homo Sapiens
tgcagaagctccattgaccatgaggccttgtgaacatcagtggccacaggcccagtgtgctgcttggcactgcactagtttaggacctgcagcatgtaggtagcgtcctagtgtttataatacaaagctgctctgcacagcttttctgattcttcttgcaatctcctgaggattatctgccccatttttaaaacgaggtggaatacccaaggtcatgtagccagtgagtgctctggaaagccaaagcagctcatcccttcctggggaccacactgctctgctccaccagaccacactatgaaataggaataagtgctcctgttgcaggactgctgggaaaacaggtggggtgggacttaagtcaccataattttgaagacttgcatgcagagggctccaggaattgtagacattaaggaatttcactttcagttctacccactacttaagtacttgtcatgtactcttagaggaggccagtaatgatcagaaccattttactttaaaattaataatattgtattagagaatatattaaatgggtttatattgggttatgttaggatatatacttgaatggaaatacatgtactattaggcaatcatatttcatttaatccctgtaattagacaaagagagcataaatatagctctactcatgggtaccataccagtgtataagattttagaacgttacttttaaaaataaagcaaatgtgcgaaaaaaaaaaaaaaaaaaaaaaagggggggcgggggccaaaatttttaaacctggggggg

SEQ ID NO: 44874 - DNA, 773 bp, Homo Sapiens
gggatttaccttttatctcccagcgagcgagatgtttccctgttcagagaggaagtaacatcacttatgcttgactggtgtttcttttgttgttgtttgtttttctttcaattggaattctgtatttaagatgttatgtcagctgacacatgggacactcctgaagaggtgactggccccccaccctgtttggcggtgagtttccgcaccaccggcctcagaagtgtccctcttgcttcgtctcttgttcgcttgctttgtaaatactttggtcccaagctgagacaattgctgtgtaaaacgtgaagagtcaatcccaaagggtgttatttgtcagaagaacttgccgtgtgccttcaccgaaggcagtcaagtctgcagttggatttttctcactggtgaatgacaagaaacagggataattttgcactgcggagatattacgggagttgtctatatgattatatatagtacctgattctttgaacatattattgaactccaaaatgaattcgacctccattcaggcttcctgaaatctctgaagttgctgaaatttgtatattattttccttttccaatgcaagatctgctggtgacggggaatgactgtctggttttattatggtttataaattaataaatgggctattttaattctgtatataaatttacagcaagtacgtacactgggaatgaatgaagccaatcacgtttacaccaaatcagcagatccaaaagacaaacaccctatttctgaagacttgaagggc

SEQ ID NO: 44875 - DNA, 553 bp, Homo Sapiens
accccctgagaaggacatcttcctacagtgatcacctcaccagcccagtgttgtggctttgtagcgcaccccgtatctaccatattctgggccagcctagtagcattacagtgttctagaatatggtaatgctactaggctggcccagaaaaggtttaaatgttgaattcacttaaattgcaattgttgcaccatcatggaatcgtgatgtgtattatttatattggcggtggactccaaggtgtagagaaaacttgggtcttgggtaatatggaccatttcatcctcagacttgttaggagtacatttcttggtcttgagaccagtatttttcagttatgtatgcaactgcctttattacacctggttatcacaattcaattctcaggtgttgcagaaaaatctacctctttcagactgtagatggaaataactgtgaaaaaaatgatgcagatatcttctagttgtgctaaacacactgctttatttttacagcccacgtctttcatgaggatacgaattgttaagaggcagtctcgttttgcttttcaaa

SEQ ID NO: 44876 - DNA, 760 bp, Homo Sapiens
agcgggataaactgaaagcttgttctatcacaggtatgagctgctatgatacatgaagaacattccatgaagtatgttttaaaaccttgttatatctgagaggctttaaaagcctattaactgtttcagggcaaccgcggtacagacgtggtctctgtgagacttccacctgaccccagttttaagtggtacgaatgttgtgcatttaatgttaaaggacagtctggaataataaagtaagtagccaacctgggtgcccagcagtgctgagacctggctgctctattgtaagctttggaaacacaatttatgcaacagatgtccagatatgattctatttatggaaaaaagtttatatgtgttttacaaatggttttaccatcttatattaaaatgaccttttgacaggtgtgcactgttttgtctccagtgagcacataccatgcggattttatatgtacatcagtagtgtgaatccactggcacagtgtgtgtaaatgccagatgtggtgagattttatcttataaatgtgatcagataaaataactcctgacagaaactgtaaggaaaccagctgaatgtttgacctgatgactgatgttgtatggtttatgttaaatgtatattcttttaatcactgaataagcattaaaatgatcattgtaatatatctattgtatatgaagcatgactacttttagtgtttaataacttgcaatatccttatattgtgtgacaaataaaaaaattctccaggct

SEQ ID NO: 44877 - DNA, 841 bp, Homo Sapiens
cagcataaagataaggataaagatgagagaaagtggtttaaagtaccttcaaagaaggaggaaacttcaacttgtatagccacaccagacgtagagaagaaggaagatctgcctacatctagtgaaacatttgtaggacttcatgtagagaacgttccaaagatggtctttccacagccagagagcacattatcaaacaagaggaaaaataatcaaggcaactcgtttcaggcaaagagagctcgacttaacaagattactggtttgttggcatccaaagctgttggggttgatggtgctgaaaaaaaggaagactacaatgaaacagctccaatgctggagcaggcgatttcacctaaacctcaaagtcagaaaaaaaatgaagctgacattagcagttctgccaacactcagaaacctgcactgttatcctcaactttgtcttcagggaaggctcgcagcaagaaatgcaaacatgaatctggagattcttctgggtgtataaaaccccctaaatcaccactttccccagaattaatacaagtcgaggatttgacgcttgtatctcagctttcttcttcagtgataaataaaactagtcctccacagcctgtgaatccccctagacctttcaagcatagtgagcggagaagaagatctcagcgtttagccaccttacccatgcctgatgattctgtagaaaaggtttcttctccctctccagccactgatgggaaagtattctccatcagttctcaaaatcagcaagaatcttcagtaccagaggtgcctgatgttgcacatttgccacttgagaagctgggaccctgtctccctcttg

SEQ ID NO: 44878 - DNA, 642 bp, Homo Sapiens
  misc_feature (553)..(553): n is a, c, g, or t
tacacgaatcgagatctgggttatgcatgaaattgggggacccaatgtggaatcctgcggggaaggcagcatgaaagtcctggaaaagaggctgaaggacatggggttccagtacagctgtattaatgattaccgaccagtgaagctcttacagtgcgtggaccacagcacccatcctgactgtgccttaaagtcggcagcagccgctactcaaagaaaagccccaagtctttatacagaacaaagggcgggtcttatcattcccctctttctggtgctggcttccaggactcaactgtaactggaaactgtgttgctctaaccctcctccagccctgcagcctccccttgcagtcatcattcgtgttctgtgtataccaaatgattctgttatctaaagaagctttttgctgggaaaacgatgtcctgaaaatggtatttcaatgaggcatatgttcaggatttcagaaacaagagttagttctatttacaggttaaaaaatgctgcattagaattaaagcaagttattttcttatttgtataatgacacanagccttgggagtcagactgcttgtatattatcaaacattttaagagattcttattaaagctgatttttacttcaaaaaaaaaaaaaaaa

SEQ ID NO: 44879 - DNA, 466 bp, Homo Sapiens
cctgtctaccacctccacctggaaatttgatctttactgtgctcagtgatcacgaaattggtcaagcctattcatgttccttctcatctagaattctgtgtgattgttttagcataaactgccccgctcccactgtatcatttcacgatctccttttaatgtttttctttcagttttgcactgacagtctggtgacaggtgctgccagggtgcaagttacattgcaatgttctaaaccttttgaagtgttcttagcaaaagcctttctttctgggtgtttttgtcgaatgagtctatgaagactcaatgcatccatcttgggctgatcatgccacagatctcattccagctatagtactgccaagaagtgaagtttatcattgaattttacctgtgttgctctcttttaaagtaatgactttgagatgcatgctttgtatcatattgaaaagtatgttttattttc

SEQ ID NO: 44880 - DNA, 660 bp, Homo Sapiens
tttgtgtagtttgtgggaaattgacgtttttgtttaaattccacccgcgtttgtcttttcctaccacctgtggccaggtgctcgctggccatcacagttgcgattccatgagtagctgctttatgactgctttttgtactatctggatgtgcccagagttacttctgtacaagctctgtatctatgtccgttgagaacattattttaacaagaagaacaccaacagtagcatgaaatataatactgttttataattctaaagctgctgttaatttatgaagtacataataatctaatgtaaactgcagaagtcagagcaagtgcctacattttgttatttttggcattactacagagccatgtacaatagaaagcaatgcaagacttgtaaactctcaccacttcttgtaatatcaaatgttccccctcaggttattttgcttatggtacccatgagttgcctctctctgtacatagataaattgttccaatattttcctttgatgtttggaactacagatagtcaagggctggaaattttagttttcaatataagcttccagcttagcaattacctctagtcgaagacaatatttgattcctagttctgtttggggcaaattttcatttatctaaataaaatgcaatctaattaaaaaa

SEQ ID NO: 44881 - DNA, 561 bp, Homo Sapiens
  misc_feature (519)..(519): n is a, c, g, or t
gcggccgctccaaaatgatttatagaaacgaaaggcattttccatttgttgtcttctgccgaaattctgaattgcatacacacatgaaggataatgaatggtttcaacggtgctatattaggttctctgattttcatgacctatgtatgtttggaaatacaatattgtataaaatgtggatcgttttgttaccgatttaatattgccattttaatttggtgtaacaattggttacacttgtttttcaaagctatcctttgaggagaaagtcaaaatgtgttgttagcctacctccactcaggcctcttgctgtgtaatcattattccaggttatgatgtgcatagcttttaaaactgcgtgtactattattctgctctttcccatactcttgtcatgtattcagaacctaaacttatagcaaaagagccaagcagtagcagtttttgtaaatgtaaaaataattagatccagactttgtttccttcaattttaaaaataaaaaatacctcagtgctaanaaaaaaaaaaaaaaaaaaaaaaaaaaaaaaaacctcgtgcca

SEQ ID NO: 44882 - DNA, 892 bp, Homo Sapiens
aattcccgggatggaccgcgtggaaggaaggacggcaaagtgagttcagaactctatagcaaaccagctataaaaagcgttagtccctcacccccaaagaggtgcggacactttccagcacctgaaagctggggcctcagttgcaggcaggcacagaaaacctgtgggagaggtcacctttaacacagcaacagaagcacgcatctcatctctcttgcattttctgttctttaatttggccctgagtgtcttgagacagtgggccatgccactgcctctgtttgctccctacccagccactgtcaggccagttttgtctgtcatgtgccagaagcttctcagctgtggtgagccactggcattgggcaggcgggccagctggccagccagtgtgacccacactccatgggcagccacctgtttatatctggtttcagttataacccagtttttaaagaaatgctgcaaaaatttaagttttctcatgtttattttaaacaattcctcttccatcagaccaccagacaaaaaaacctttcctttcttcctcccttttcttttttcccttcctgtacacatctagaaaacttcacctttctagagtcccccaaaacaacacaaaagtkattgtgggtgctactggttttatgctgtactgtggggcgagggggaagacctgtctgtatgctggaaacactcataaccattcctttagattcgtttgccttatggttatttgtcataaacgcgatttgcaaaaacaaggagccttagtgaatgtacagtacctagacttctgtgttctcaggacgcagaagggagcaactttgctatttggtccagtragtggacaccttgtgatataaatgtggaaataaaaaaaaaaaaaaaa

SEQ ID NO: 44883 - DNA, 533 bp, Homo Sapiens
cgatgtgacatggcaaatgtagaactgacttaaattgaacaaaccctcactgagcacctctgatgttgagcacctgctgaatactgagcactgaatgggggagggggaggggagcacggggtgagtcaacctgggactcggtctcagggatatgcctaccaatagcgggtatcgtaaggcatgtacccaaacataacggatgtaaggcagaaagtgatcggagaaggaatgagaaagtgtgcgtgatgttaatgaaaagtcatatgcagctagagcagacccaggaaagctttctggaagagattgcatctgaggaaattcaggaaggatctttgtagattggggggagattctaaattgaaggggtgatggggtgaggggccagagggaagtctgctgtgttctcatgtaggatgtcagccctccctgcaacttctctttttggccaatgtcttttcactttcctgaccctttagaatcatccccagccagacgcaatcatggaagttgccttattgtcactggttaagaac

SEQ ID NO: 44884 - DNA, 684 bp, Homo Sapiens
cttgtccactggggaactgggcatcatcgacagtgccttcggccagagcggcaagttcaagatccacatcccaggtggcctcagccccgagtccaagaagatcctgacacccgccctcaagaagcgggcccgggctggccgtggggaggccaccaggcaggaggagagcgccgagcggagcgagccctcacagcatgtggtgctcagcctgactttcaagcgttatgtcttcgacacccacaagcgcatggttcagtctccctgagtgtccggtgacctcccccagggcctccttgcccagcccagtccaggctgctgtgccaaatcccaaccagccacgcctcagcctctcccagtctctccctgcagtcctgcagcagcagcccccacccccaagcttggtgctgagccctggtgaggagctgagggggatgggttgctggggccaggagggtctctcctccagcccctgcacactcccacccaggacagcccccagcccaactaggaaagggccatgggcagagggctggtagccagtatcttccactgccccatctgttggccacctgcaggccagtctcaaccctcccccaggtgggcaggcacttgatggctacaaataaatgtcccgtggccccaaaaaaaacaaaacaactaaaaacaagaaacacaaaaaaaggg

SEQ ID NO: 44885 - DNA, 806 bp, Homo Sapiens
  misc_feature (806)..(806): n is a, c, g, or t
ctgcagctaggtaccagtaaacccttttagtttgatcagacagcttgaatcagcatctcttcttccctgtcagcctgactcttcccttcccctctctcattccccatactccctattttcattccttttttaaaaaataatataagctacagaaaccaggtaagccctttatttccttaaatgttttgccagccacttaccaattgctaagtattgaatttcagaaaaaaaaaaatgcatttactggcaaggagaagagcaaagttaaggcttgataccaatcgagctaaggatacctgctttggaagcatgtttattctgttccccagcaactctggcctccaaaatgggagaaaacgccagtgtgtttaaattgatagcagatatcacgacagatttaacctctgccatgtgttttttattttgttttttagcagtgctgactaagccgaagttttgtaaggtacataaaatccaatttatatgtaaacaagcaataatttaagttgagaacttatgtgttttaattgtataatttttgtgaggtatacatattgtggaattgactcaaaaatgaggtacttcagtattaaattagatatcttcatagcaatgtctcctaaaggtgttttgtaaaggatatcaatgccttgattagacctaatttgtagacttaagactttttattttctaaaccttgtgattctgcttataagtcatttatctaatctatatgatatgcagccgctgtaggaacaattcttgattttatatgttaatattcttctaaggaacctagaagactn

SEQ ID NO: 44886 - DNA, 630 bp, Homo Sapiens
  misc_feature (450)..(450): n is a, c, g, or t
  misc_feature (517)..(517): n is a, c, g, or t
  misc_feature (555)..(555): n is a, c, g, or t
  misc_feature (626)..(626): n is a, c, g, or t
caaactggaaaaatatggtgcggaagtgatttcagtattacagaaatactctgaatggacatcgccagctgaagacagttccccagggataagcctgtccagcagcagaggccccggaagaagtgccgctgaggagctcgacgaggaaatacccgtatcttcccactactttgcaagtaaaaccagaaatgaaaggaagaggaaaaagatgccagcctcccaaaggtctaagaggagaaaaactgcttccagtggttccaaggcaaagggggggtctgccacatgtagaaagatatcttccaaaacgaaatcctccagcatcattggatccagttcagcctcacatacttctcaagcgacatcaggagccaatagcaaattggggattatggctccaccgaagcctataaatagaccgtttcttaagccttcatatgcattctcataacnaccgaatctcaatgtacatagaccctctttcttgtttgtcagcatctgaccatctgtgactataaanctgttattcttgttataccatttgaaagtttttactcntctctattaatatttaaataaatgctggggggtgatagttcttcttttttaaaataaacattttccttttngaat

SEQ ID NO: 44887 - DNA, 785 bp, Homo Sapiens
  misc_feature (745)..(752): n is a, c, g, or t
  misc_feature (755)..(762): n is a, c, g, or t
  misc_feature (765)..(766): n is a, c, g, or t
  misc_feature (769)..(769): n is a, c, g, or t
  misc_feature (772)..(772): n is a, c, g, or t
  misc_feature (776)..(779): n is a, c, g, or t
  misc_feature (782)..(783): n is a, c, g, or t
gtccggaattctccggatgctgagccagtggagggcatgtggccactgagaggagcagctgcagtcaaccatgagggtgatcagaggccagtgatggctcctggacaggggatgtagagaaaatggctcatgggaagagggggcctccaattttcctttgccatcccgggctctgtgtctagccatgtaaggaagtggagacagattcctgtctctaatccagacctgagaatgcttgaattctcaaagtcctcctagctgggaccttgggagtgtcacctgctgtaagacttgagtggcctgactgggtggttgtgaggatgcaaggagaaaaggtgcatttttgtgcttcctaagtcggggagaccattcctgggagccacgtgactgacccccaccatggctctttccctccaactcgtgctgatagctggccgctgggaggccgtccccagtgagatcctcagaccctgcacagccctgagtggcttcacatctcttggtcagtgtcttcattctccccagtcagggacctgggatgtttgttacttctagaagcccttcctcaccctcataatggaccttagccccttgctggtcccactcacatcccgtctccattgctgtctgagttccaagactgagtttcttcaagcatccacttgtgctaccaggctgagaagttctgaggatgtgaccccatctgggcatcatttaaccaataaaatttctcgaatggaccctnnnnnnnnccnnnnnnnnccnnccnccncccnnnnccnngg

SEQ ID NO: 44888 - DNA, 696 bp, Homo Sapiens
  misc_feature (12)..(12): n is a, c, g, or t
ggtatcaagggncccccaatcccttagtggccgggactcaaagtttggaataatcccagccctgccaagcattaagggtgctggtggggagtgtttgctggctgttcatgaacctctggtgtcctgggcctctctccactagacatggcagcatctctgagttacagattgcaatgtgttgccctgcatggttgaactgcttcggacatctgctaggcatcccatgtgccctgtcccctcttcaatgccagtgagtcacaatggcctatgcttattcacagcaataatacctagggagtccccatgaagcccttttgtcctggtccctcactctgcgtgggtctcctggggaggcagctgctgagtgggtcagttcatgagaacctgcatttatgaagccctgggctgtgtaggcatcaccctgggatgcagacaggttagaggcccagcccttaggggagccatggcagggagagtgccttccaccctgaggccacccagacctggaggagatgcaggccccagctctgctaaagggcctttgaggtgggtgggactgtctccagttgggcagctcttgaaaagacacacgaccggtttgtgcgccatttgctgctctgtgtttccgtgggcccctctgtctcttccttttcacatttgtgcccctaaaaaaatacctggtggttggtgttccag

SEQ ID NO: 44889 - DNA, 566 bp, Homo Sapiens
  misc_feature (533)..(535): n is a, c, g, or t
  misc_feature (537)..(537): n is a, c, g, or t
tgatgaaatgggaacagacttttgtttttgtatgttggtgttctctgagtggtgaaggcccagggagaatgttttgtttggtggtcacttagcatttgaaaacatccacttccttgtgacttagctgggtatcttttaacatctggaagccacgtccctgattgaaatctctggagacaacttacctttcaccaacttgtctgccaaattgcaccatggaccaagattgcagtggctgcatcaagtctaggcctgccctgaagtctggatttgtaagtcccccatttcaaatggggcagaaggcagaggagcagaggagccactgtgcctttcgctgtcctggagccagttggccttctggttttggtgaaccctgcttttataagaggactccctggcatcttccagtttcccgctacttgttttatgtattattttatgtctgtgtttgtcctggagtgctgtaactcctttcactgtctgctgtaagttcaacttcttcaataaaagaaatgtttcaaattggaaaaaannnanaaaaaaaaaaaaaaaaaaatcgctaatcg

SEQ ID NO: 44890 - DNA, 481 bp, Homo Sapiens
cgcgtccgagtctatataaatatcagagaattcacagtagaaatatctaaggtactgacacttcagacattgctgagtatagaatcagaatgctgagtatagaaaataatttaaaactaaagttggtaggtaaataatgtgtatataactttaaaagaagtagaatttttttgtagatgtataattacattcaaattatattttttcttgaaaaattagtttttgaaaagcaaataatgatgtaattcaactcaaattcatgctcttcattcctattgtattcacatgtgaaagcatgtgattaatttttcatgcatcaaagatatgagaaatcatttctgttaggtcggtattatttatgacactttctatgaaagaataaggacattaaaatgtaagatgcatgatgaaaacctgagtgaagaggctgtttgtgtttaacttataatattgagtgatccatgaagtaggttttcagagc

SEQ ID NO: 44891 - DNA, 552 bp, Homo Sapiens
agtgagatcctgctgagagtgtgtgagatttaggctgtggggttttttttctgtactctttggatggtgtggcatttttcactcttaacccgagggtgtgtttcagcttatgttcgttctgtttcatgcaggtttatagcacggtagagtagaaggcggcttctgatttttagggtatttttagaattcattcctgagtgaggggttcagacacccagtctcctcggaacaggggtgaggggtcgactgagctttgttgagaagcctccagttaggcttcgggcgggtctccatgttatatggtgtgtttactgagcttcccactggtagaagatgacacatttgtccatcgtcctgtgtatctgctttccagaggacaccggagcattctcctggggtcactcccacatggctgcctcacatagctgttttgcaacagcctttatggccaacacccttggaagaacatctcctgtagaagtacaagttttgcaatatggactttggaagtggttctgtgatgttcgaattttctgttagcctatggctcaa

SEQ ID NO: 44892 - DNA, 360 bp, Homo Sapiens
caactgcaagcgcgaaatatgtacttttattaggaagctctgcattctgcaaatatcaagcagaggtagaccccatccttactgaaggtcattttatatcatttcagctcggacggtgcttttggtggatgcgtctagatggataacatgacttcttctaccctaaaatattcctataatactttgagctgttctggttcctccagggtgcatggtacccattaacccaaaatatgattatttcccttttttcccattttcagtcattttggaatgttctctgtgaaccacagttgtgttgtttaaagctcacatttctttctgtcaccacagagattggcctacggtttgcagttgggg

SEQ ID NO: 44893 - DNA, 793 bp, Homo Sapiens
  misc_feature (780)..(781): n is a, c, g, or t
  misc_feature (793)..(793): n is a, c, g, or t
agttgatcttaaagaccactaacagactggctatcagatcccttttcactttggctatttttttcattttttgagatggagtcttgctgtgtcactgaggctggagtgcagtggcgcgatcttgactcactgcaacctctgcctcccaggatcaagtgattctcctgcctcagcctcctgagtagctggtattacagatgcttgccaccacgcctggctaatttttgtatttttagtagagacagggttttgccatgttgatcaggctggtcttgaactcctgacctcatgatctgcccttggcctcccaaagtgtcggaattacaggcatgagccactgcgcctggcccactttagctatttttaaaaataggacctattgttttggattactatctgagaatttcatggattcactcctgggtataggagataagaatacgtttaattcataacttttatattaaccaatatagtaaaaaaataaagctcacacatacaaaaactaagttgcctttccttgaatgaaccctgtctgaataaaacaatgaaaaataaaaataaaattaatggtatgtagtctaatttgtaaatgaatgaatatggaaataatacacactgtggatatattttaaggccttatgtagttttaattgttctgctcgttccgtggttatgtttaagactatagtatatgactctcttcaaagtatatcaagtattgtgaatgctttggttcagatgtgtcaaattaacagtaaaacaacaaatatcccaaannaaaaacaaaaan

SEQ ID NO: 44894 - DNA, 584 bp, Homo Sapiens
cacgaggcgccagagcgccacagagatcccgctgcccatgctgcctctggcggacaccgagaagctgatccgcgagaaagacgaagagctgcgccgcatgcaagagatgctggagaagatgcaggcccaaatgcagcagagccaggcccagggcgagcagtcagacgccctctgaggccacgccccgcccggccttacctcggctccgccttcagtcggcctcttgtccaatccccgcgccccacactgcccagcgccccccgggacctccgcgggtgccgccctcgcgcgggctagggggaggttctcccagcctgagtccgtagccccgccccggcgctggtcccgcccacccagacaccgcccacttcccggcccggggcctgcacaatctccgaccgcatcactgtcttccggagtccccttcttctcccagactctgtcttcaataaaaactgagcttcccgcggccacgaaaaaaaaaaaaaaaaaataggtgcggccgcaagcttattccctttagtgagggttaattttagcttggcactggccgtcgttttacaacgtcgtgactgggaaaacct

SEQ ID NO: 44895 - DNA, 628 bp, Homo Sapiens
  misc_feature (9)..(10): n is a, c, g, or t
gctggtacnncggtccggaaattcccgggatcaaactatagaccaaaaaaataggaacatcgagagaaagaatatgaagctagcataggttcacaaagaatgagtcaaatcaaacaacatgcattttttatttataaagcatgacttgttcattgtcaattcatgttagcttaatcattaggcattaatgccatcactgcaatgcatatgtcagcaataaataatcaaagaccaggcttccatcattctgtttaatatcttcaagtaatgcttaagtttgcaaatgctcttttaacacattctccatatgcagcctgcccagcactgcacacaatagacctgttacttccccctcacgagcactcctaatatttcatgtgctcatccaattgacttctcccactggtgcctcatattgaatttgtagaatcacacctgctcctttttcaaaactcttctgagttttttcttaaataattcactgaccccaaagttgtcagatatttgaagactactcgcacaattttaatattataaatgtataatgtaaatgtaattaagatttgtataatgtacgatgtactttggtaaataaaagtatgctgtgaataaaaaaaaaaaaaaaagg

SEQ ID NO: 44896 - DNA, 1085 bp, Homo Sapiens
ggaagctggctgagccggcctttggtaacgccacctgcacttctgggggcgtcgagcctggcggtagaatcttcccagtaggcggcgcgggagggaaaagaggattgargggctaggccgggcggatcccgtcctcccccgatgtgagcagttttccgaaaccccgtcaggcgaaggctgcccagagaggtggagtcggtagcggggccgggaacatgaggcagtctctcctattcctgaccagcgtggttcctttcgtgctggcgccgcgacctccggatgacccgggcttcggcccccaccagagactcgcattcgtaacgtcgaaatgctgagcagcatggattctgcatcggttcgcattatcaaaccctttcctgcgccccagactccaggccgcctgcagcctgcccctgtgatcccttcggcgccagcagctccaaaactggaccaccagagaatggacaccatccaggaagaccccagcacagactcacatatggacgaggatgggtttgagaaggaccccttcccaaatagcagcacagctgccaagtcatttgaggatctcacggaccatccggtcaccagaagtgaaaaggctgcctcctttaaactgcagcgtcagaatcgtgttgacagcaaagaaacagagtgctaatttagttctcagctcttctgacttaagtgtgcaaaatatttttatagatttgacctacaaatcaatcacagcttgtattttgtgaagactgggaagtgacttagcagatgctggtcatgtgtttgaacttcctgcaggtaaacagttcttgtgtggtttggcccttctccttttgaaaaggtaaggtgaaggtgaatctagcttattttgaggctttcaggttttagtttttaaaatatcttttgacctgtggtgcaaaagcagaaaatacagctggattgggtatgawatttacgtttttgtaawtaatctttatwttgawacagccygactagggaatgaymgttttttttwwamcgtaagaacscygawatgrgswttggmttawttkkrtgmaayggawwdttttttttttttttttttt

SEQ ID NO: 44897 - DNA, 609 bp, Homo Sapiens
gctggtaccggtccggaattcccgggatccgggctcgagtgccctgtgtgcaaggacgactacgcgctgggtgagcgtgtgcggcagctgccctgcaaccacctgttccacgacggctgcatcgtgccctggctggagcagcacgacagctgccccgtctgccgaaaaagcctcacgggacagaacacggccacgaacccccctggcctcactggggtgagcttctcctcctcgtcgtcatcgtcctcctccagctcgcccagcaacgagaacgccacaagcaactcgtgagcccacgtcggccgtcgggaaagcacggggcctttcccacccaccctcagccagcgccacacggcacccacagactgggtgccccggcggcgccacgcttggctggtcagcgctgcaggtcccgcctgttccagggcaggacccgggcccggcccaccggccccctggcttgggaaggcgtgggccacatggtcccctctggggcgtccccagcctccccgtcctctgtctaacctcaccctctaaacgttcagcggtggaaagatttttataattttaaattattactgctttgaaataaacggacgtttgagctca

SEQ ID NO: 44898 - DNA, 731 bp, Homo Sapiens
accgcgaactgcctcaccgttactttcaaggagtacgtgacggtgtagccggagggcgtcggaaggggaagcgccattcccgcgggggggcggggagctgagcacctggggcctcggggcgggctcccctctcgccaacccgccaaccgcgagagacccaggctggcccccagggtgaggacgcccggagcggaggtaaccatgttccccctgcggcggctgtcagacctgggcggaggccccttccacgcggtgccggcggggctcgccctctcctgcccttccccgctggagatggacccccggaacggacagggcagctctgcgcccggcctcagagttctagtattatattttaaccgtgctaacttgtcaagtgctgactctactcccgtttgtacgtggtgttattattgaaatgtattgtttgagctcaaaaggcccgaccaccccccttcgggctgctatatatatatttatttgtaggtatttatatattgaaatataaaaacctagatttatggagtttcctctagatcatgttatattctatatcagacaaactattttcttttgacctttcttcccctccatccagtatttcggttgatttcattttctcccctctcttccccttccacgaactgcaataccagtaaccttggtatatattttttgatactgtacacatggatgtcttgtttctatgtgcaaaaaaaaaaaaaaaaaaa

SEQ ID NO: 44899 - DNA, 542 bp, Homo Sapiens
cagaatttagtttttcaaatcctagtagtgtgttttttctgtcttgccaaaaagcagcacacctcaaagaagggaaaaggtgtgaattgtgggtatattagggttattagtgcttccgagggaagataggcatcactacttcccagagatgcccctggaaatgatatggaggatgttgaagaattcaatgtgatgacagaatgaggcatttgtagtaatgctgagaacagaaaaatggactaagtggaaaatttgtaagcatgactttgaatgtagatttgttatgtgaacaaactacctagtttatttttagttcaatacaataattgttttaagaaaacatgaaataactactcaatataaaatgcattttaaaactgtaaataagtcaaaactttattctttttatcataatggtcctagctgagtcacddtactagtacactcttctgagccatcttctttattcatatctacattgtgtggttaggcatctgttatgtggtgtcacatgataaaataaagaacttcttcccatacca

SEQ ID NO: 44900 - DNA, 578 bp, Homo Sapiens
agttcctcttggaaaagatatagcaaccattggggaatgaccttttcatttcagaagtggatgaggaaggtggtgtgagcatcaggtatattctggaccatttcaagtgctggtgagaagaaaggaactctttgcctgaactgggcttggttttccaagtgctgctttggaaatgaagacccagagatgcagagcttatggtagttcataaatcttcatgttctattatctttcatctgccaataaagttcattttcaataatgtccaccattgctgtgcccagaataaccacaggcaaacatcaaaacaatacgcataagttagacaagattaaatcttgtctgatatctgcacaaacagatatgcaccatgttggaaacatgtgttttcctagtcccatccaggcttcccacaagaaagccatgatgtgggtctaaaccatatgttttgagtaaaggagaatagaagaaggggagtgtccgcaaaatggaaagagatgaagatgttccaaggaaatatgctgaaacagaacagtgaatgttttgcccaaaactacaaaaataaaaaaaaaaaaaaa

SEQ ID NO: 44901 - DNA, 615 bp, Homo Sapiens
  misc_feature (479)..(479): n is a, c, g, or t
gaaatttatcctaccaaacaaagcacatagatgtgcaaaagtatgtatttacaagtatattctttgcaacttggtaatgtcaaagaattggaagcaacctaaatatctgccataggtaggataaccatatgcttggctttttgaacactaccagtttatacctgctgttcttggataattattaatagtgctttcattctcaatgtctcactttagataataaattacagaggattggtgaaactaatttgcccaatggaaaaaggaatgaagaagtgctttaggtactgagatgaaaagatctctaaggcataataatgtttattgagaaaagcatggtgtcaaactgtatggcatgctacaattgatgtataagaagaaaaaatgtgtatgtattcctattctgttagtactatggtagactgtctctgaagacatatactggaagaacctgatcacattggtagtctccaaggagncagaactagatacctggcgggatacggatcccaggagctgagccttctcatctgtaaactctcattgtacttcgagctttctaactgttcagaacaatactacaaattagcaacctaaaatcacaacacaacaaaa

SEQ ID NO: 44902 - DNA, 753 bp, Homo Sapiens
  misc_feature (657)..(657): n is a, c, g, or t
ggaaggaactccggagtcagctgggctacaggggagcttctctaagtcctgcgggaggccagacccagcctgagcttgctgttagctagcggaggcagctgctggtggcccaggtgctcgacaccaggcatcccctctcctcccacgaagggtgtgccataatccccttcaacaggaaatgcttcccagaagcctctcagcagcctcccctcctgtcctatcagctagaagcgcctcgcttgtcccaagaccagcagggacagggaactgtccgagcccgtggctgtgtggaggaaggcgacccccagcacaagattggtttcctttgggaagggaagagggagtgtgttggggtaaggggtagagcagaggaatggtcagggggcaacaaccgctgacagctgcaacaggtgcatggcatctcacagggaggcagggaggtgcgagctcctaagtaatggagcaaaaaaattctattctgtagaatggggagagaaaatgtgacattttaatttttttttgcatttatatttcctaattcctacttaaagtgaatatactgccgctgtagatcataaaatgtatcttttccatgggccaacaaggggcatcttttataaatgctaataacccagtttgtatcaaagggtatcgacnttaagtgaatttcaacatgctgtacttttccttttaatggtattctgtgtccccaataatggggagaactggcacacacacacacacaaaaacaaa

SEQ ID NO: 44903 - DNA, 585 bp, Homo Sapiens
cattttactacatgaacatcatggataacaagggattctgattcattattaatttcattaattatattttctgatatgagtctagaacttactgcaaaaacaagacaaaactaaaaaaatacaactgagaagggtgaagagaagtatgtttgttaaacagtaaaaatgaatagtatacttcttaactaggtttacaactggtggaccacacaccaggcactaatcacctggtgaggatttggcatatccaccaaaaaatgcatccgatttaaccaacatctccaccagcgctacggactcctcccaattctgacatctcttgcagacaatactatgctctctacacactgtttagaaatggaaaggtgatctgcactgtatcttgggtttgttggctatgcttcctttgatgacatatattatacagtatatatatacatatattttttttgttagagttctagccattttatttctccgcagggtcctttctcagacattactgcatgctgtatatggcgttagctgtgtgttgatcttctaaaagatgatagagtttactggtaattgtgtaatcagctcctg

SEQ ID NO: 44904 - DNA, 1110 bp, Homo Sapiens
ctttcacctgtagcagtctctgggcatctcccattgaggccacgtacttccttggagacctgcatttgccaacacctttttaaggggaggagagagcacttagtttctgaactagtctggggacatcctggacttgagcctagagatttaggtttaattaattttacacatctaatgtgaactgctgcctaaccactcaagagtacacagctggcaccagagcatcacagagagccctgtgagccaaaaagtatagttttggaacttaaccttggagtgagagcccaggaacaggtccctggaaaccaaagaaaaatcgcatttcaaccctttgagtgcctcattccactgaatatttaaattttcctcttaaatggtaaactgacttattgcaatcccaagacccatcaatatcagtatttcattcctccctatacagcggcctgcccacccttatctgcagccacctccccctgaacccagcagagacaacaacacaacaccgtggtcagcttccccacggctatacatcaccacacacgccaacacgggagaccacgtcccacccccgcctcgatcccaaatcccgtgaccagcctcaacagccagccccagctgcacaacaccatcctcaccatcatccaacacggatcgacaacactaaactccacaatgggcccatacacaaacacacccccactcacccacagcacaccaggcaccagccgcacaacgccaccgggcacggtgagcgcgtccccactataatgccctcacacatgccgattaaccttgcgagattacaccacgtcacatcatggtaattactcgacaattacccgaactataggggacaacacccatgatcaacaccgtcaactcgcaactccttagacggcgctataagccatacaagacagatatctacgctgctctaccaccggctaactcctgccatcgactacaaagaaaaatacgagaggaccacccatggccaccgcaccacagtccaccgcaccgccacacacagcagaacacctacccgtctagctccaatctacacccaccaacacaaccagcatgcaccgtaaccgcaacaaacgccagcgt

SEQ ID NO: 44905 - DNA, 527 bp, Homo Sapiens
ttatatttgggaatcatattgacaggtcatgaaaatgagaccaaaagatctctggaagcgattaatgataaaatttcatggagaagaaggccttgactacggaggggttgccagggtgatgacaactccgtgagggtggagattatacatctctcatcatttcagcaacaaggaaataaattagtggcagagtaagggtgacttgagatctcttggaagcgaggatcctttaaaaatcctggaatatacactgcagtaaaagaacaaagcatacctcagccttaaacgactgaagaagaatgtcaagtggggaagtggctttggttttcagtttgtgggttctgaatccacacaaagacaggattgctttctgaaaacctgaattaattattgtccttacctcaataagacaaaaaattagaatcaaaatcgttagtattacagtcacagatatcaccaagattagtttgttgttatagccatatcctggaacttctttcgtgagcyaaaaaaaaaaaaaaaaaaaa

SEQ ID NO: 44906 - DNA, 549 bp, Homo Sapiens
ggcacgagggtgagcttaaccctggaaaagaatccctctatctctaaagaaaatctctgtgaaacccctatgtggaggcggaattgctctcccagcccttgcattgcagaggggcccatgaaagaggacaggctacccctttacaaatagaatttgagcatcagtgaggttaaactaaggccctcttgaatctctgaatttgagatacaaacatgttcctgggatcactgatgactttttatactttgtaaagacaattgttggagagcccctcacacagccctggcctctgctcaactagcagatacagggatgaggcagacctgactctcttaaggaggctgagagcccaaactgctgtcccaaacatgcacttccttgcttaaggtatggtacaagcaatgcctgcccattggagagaaaaaacttaagtagataaggaaataagaaccactcataattcttcaccttaggaataatctcctgttaatatggtgtacattcttcctgattattttctacacatacatgtaaaatatgtctttcttt

SEQ ID NO: 44907 - DNA, 560 bp, Homo Sapiens
tacagtatattactgttgggccattacagtgtatgttgtcatgttggattttgaaatgctttgatattctaattgacatggaacaagttttttccctgctccccaaatagaattttgtaaccaactttgctatttttttaaagtttgtaagaatgtgtcatttcttggggagtagccatccatcaacaaatatcctgactgctacttgttatatacaaaatacttacattgaacctggtggcataatgagtattttgaaagaagaaatttcttcactctcatttttatagaaatcttggaatcagcttaagctgtagcttttatgacaaaagacagtcatttttggtcagagtgatatttggtgacggaaacttgttcataatttattgttactatagaactatttggattttctcatttttagttctgatagttaaatattttggtttgttctgtgccttcagtttaaattatttcaggatttttcagatgtttaaataatggtgtgaatcattcaggatggaaataaaagtcatcctttctgtaaaaaaaaaaaaaaa

SEQ ID NO: 44908 - DNA, 776 bp, Homo Sapiens
  misc_feature (743)..(746): n is a, c, g, or t
  misc_feature (759)..(759): n is a, c, g, or t
  misc_feature (761)..(761): n is a, c, g, or t
  misc_feature (766)..(766): n is a, c, g, or t
gattcacaggtgaagaactggaaccccagcttccctccagcctctcctccattccctatgggttctgtgaccactgctggaccaaggacgtggatgaccctcccctagtcactcatccatcccctggctccagagatggtcacatgacccaggcctggccagtcaaagtagtctctcccctggccacagtaattggtcatgtgatgcaagccagcttactagcactttgagaatgagtctcctgttgagctggtaggatgtaagcctggagctaatggcgatcatctttgccaccacctggggagagcctgcttgggaatgaaattaacacaaaggaagtccaacctgagaaatggccaaatatatttcctgataacattatgtggccctctggatccagccatgcctgaggtctacccctgggcttttggattatgtgtacagttggttcatccctttttctgctaattcgagtcatggctaatttaacaccctttagaaccttaaagaaccatcagcatcacccgggaacttttttagaaatgcaaaatctctactgctttggatcctgggtcaaaaaaaagaaaaaaaaaagaaatgcaaaactttaggccctgccccagatttactaaatcaatctgcagtttaacaaaatcctcaggtgatttgtatgctcattgaactttaagaagcagtgttttagaacaggttcttaaaaagggacaaataaactcatttaactnnnnaaaaaaaaaaaananaaaanacaaaaaaag

SEQ ID NO: 44909 - DNA, 699 bp, Homo Sapiens
tctatacctgtaattgctaatggagacatcagaagcttaaaggaagcagaaaatgtgtggcggattactgggacagatggtgtgatggttgcaagaggactcttagcaaacccggccatgtttgctggatatgaggaaaccccactgaaatgcatctgggactgggttgacattgctcttgaactcgggactccttacatgtgtttccatcaacatttaatgtacatgatggaaaagataacttcaaggcaggaaaaaagggtatttaatgctctgtcaagcacatcagcaatcatagattaccttacagaccattatggcatttgactagacttcccaaataattttaatatatacttttagacccacagtgaaaccacagaaggtcatattttgtaccttaaaccagtagctctcaaattttagtataaaaacaattcctgggagcgttttttaaaaatcagttgtagacaccaccctcagagattctgattaggtagatctggagtagacccagaaatacacagtttaaagaaaactcccagtggttcaaacatcctgatcatcctaggcaaacattgacaaatactgctctgaatcctgttctatagatattggggggatggtaaggggggaaatttttccttataatgttttaacattttaaattaaattaatcctaagaaaaaaaaaaaagtt

SEQ ID NO: 44910 - DNA, 712 bp, Homo Sapiens
gttttttaaaaatcagttgtagacaccaccctcagagattctgattaggtagatctggagtagacccagaaatacacagtttaaagaaaactcccagtggttcaaacatcctgatcatcctaggcaaacattgacaaatactgctctgaatcctgttctatagatattggggggatgggtagagtgggaattttttcctaatcatgtttttaacattttaaaataaaatttaatactaagaaattatggcttatagtatctataaattaacaagaagtatgcaggtgcaaaaaagtggtggaacaaataccaacatccatccaaaatgaaaaagaacaggaaattctgaatagaattgcactcagaacttatattaaaaattccatttggttaatgacattaaatttggtacatttcaaaacttctaggtcctccaaagattgaaagcttaataatctcctacctaaaaagataaaattaattgcaatctaccatatcttaagtataggaaatttggtgtccaacctggagatgattatatatttgaaatatttcctagagaatagtaaccaggttttgtttttaactttaaaacctaattacttttgtgcctctcagccgttgattgtaactttaaagtcccatggttttggagtgttattaatagattttgttatcggtgggcatgcactgcaagaattaagtatctcag

SEQ ID NO: 44911 - DNA, 505 bp, Homo Sapiens
  misc_feature (303)..(303): n is a, c, g, or t
  misc_feature (348)..(348): n is a, c, g, or t
  misc_feature (355)..(355): n is a, c, g, or t
ttgaactgtacggtccgtcctgcactcacccgatgcagaccttgactttgatgttgaaatgaacacacttgttttacccaagtctggtggaacaaatgcccaatcatgtgaccttaaagtgtactgcaaagctgtagctttaagtaattgctgttctgccactgcttactctgaaatctaccatcaaagaaagatagagaaaaggggctgagccttggaatatatggttataagcagatctttctttggtcagagaccagggtttgagccaaggctgtaaatgtgaacaatagctgtgcaaanccttttaacctgacttcttcattttgtaaattattatgcattaangtagcangcccaataatctgatttctagttttattttcaaagtaagtagcttcttttgggaaaaacctaagttaaactagtagttttgccataataactgctgatttatgtatttgctaaaggtacttttgtatctgctgtgtattatagcggtaaa

SEQ ID NO: 44912 - DNA, 544 bp, Homo Sapiens
ctgttcctacggcggttgcaggatgtgcgggcagaggaaggccaggacgtgtgtctcgaagtggagacaggccgagtgggtgcagcgggggccgtgcgctgggtgcgaggtgggcagcccctgccccacgactctcgcctgtccatggcccaggatgggcacatccaccgcctcttcatccatggtgtcatactggccgaccagggcacctacggctgcgagagccaccacgatcgcaccctggccaggctcagcgtgaggcgtgagtgccccgtcctctcttaatgcattacccaccctacaccacagccttttctggctgtcctggagtccctcaggcccccaccaaagtgcccctcatcgctgagaaaagtcacccatggccgtcccagcagcagcttgcccaaagcaaaacttttctttttctaatattttttatttaccttagaaatccatgtggattttgcattccattgcatatttccaagtcggctttgctataaacacaaatattctccagaaagacttgccatgggcatccttc

SEQ ID NO: 44913 - DNA, 707 bp, Homo Sapiens
tgagactaaattcaatcaccaccaggtatcaaatcaacttttatgcagcaaatatatgattctagtgtctgactttgttaaattcagtaatgcagtttttaaaaacctgtatctgacccacttgtaatttttgctccaatatccattctgtagactttgaaaaaaaagtttttaatttgatgcccaatatattctgaccgttaaaaaattctgttcatatgggagaagggggagtaatgacttgtacaaacagtatttctggtgtatattttaatgtttttaaaaagagtaatttcatttaaatatctgttattcaaatttgatgatgttaaatgtaatataatgtattttctttttattttgcactctgtaattgcactttttaagtttgaagagccatttggtaaacggtttttattaaagatgctatggaacataaagttgtattgcatgcaatttaaagtaacttatttgactatgaatattatcggattactgaattgtatcaatttgtttgtgttcaatatcagctttgataattgtgtaccttaagatattgaaggagaaaatagataatttacaagatattattaattttctatttatttttcttgggaattgaaacaaacttgacataaataaaaatgcattgaaaaaaaaaaaaaaaaaaaaagggggggagggcaaaaatattcccgagaggggca

SEQ ID NO: 44914 - DNA, 335 bp, Homo Sapiens
aagggcctggcggtggtggccacctggaaccaccctgtcctgtctgtttacatttcactatcaggttttctctgggcattacgatttgttcccctacaacagtgacctgtgcattctgctgtggcctgctgtgtctgcaggtggctctcagcgaggtacggggagggcgtcaccctgcagaacggcagagtgacgcgtcctctcgctgctgagcaccagctgtttacctgccctgcatcacttcctcggatactttactcaataagcatttcccctggaagtgtccgtgccctggtgttttttatcgatacgttgattaaaacgcgtggttcccc

SEQ ID NO: 44915 - DNA, 705 bp, Homo Sapiens
tcagagcccaaccccaggctctgctcggttggagaggggatgacttcaccaccacctgaccttcctagggtcctggtctcactgtcagctgggggtccgttgtgtgtattgtacagtttgctgtatggggttgtcacccaaaagctgatgctgagaaaggcctccctggggcccctcccgcgggcatctgagagacctggtgttccagtgtttctggaaatgggtcccagtgccgcggctgtgaagctctcagatcaatcacgggaagggcctggcggtggtggccacctggaaccaccctgtcctgtctgtttacatttcactatcaggttttctctgggcattacgatttgttcccctacaacagtgacctgtgcattctgctgtggcctgctgtgtctgcaggtggctctcagcgaggtacggggagggcgtcaccctgcagaacggcagagtgacgcgtcctctcgctgctgagcaccagctgtttacctgccctgcatcacttcctcggatactttactcaataagcatttcccctggagtgtcgtgccctggtgttttttatcgatacgttgattaaacgcgtggttcccgtgtgctgaagcagacaaaaaaaagaaagagtataaaaaaaagggggggggcaaaaatccgggggggaatggcacgttttgtaaagggcccaaggggggaaaaaagggg

SEQ ID NO: 44916 - DNA, 926 bp, Homo Sapiens
cgcgggattggggttcgggagcagggggcttccccagaacgctagtggccaggtctgagagcgctgcctctcccctaccccccccgcaggcccgcacccgaggatctgacggtggtgctcggccaggaacgccgtaaccacagctgtgagccgtgccagacgttggccgtgcgctcctaccgcttgcacgaggccttctcgcccgtcagctaccagcacgacctggctctgttgcgccttcaggaggatgcggacggcagctgcgcgctcctgtcgccttacgttcagccggtgtgcctgccaagcggcgccggcgaccctccgagaccacgctctgccaggtggccggctggggccaccagttcgagggggcggaggaatatgccagcttcctgcaggaggcgcaggtaccgttcctctccctggagcgctgctcagccccggacgtgcacggatcctccatcctccccggcatgctctgcgcagggttcctcgagggcggcaccgatgcgtgccaggtgattccggaggcccgctggtgtgtgaggaccaagctgcagagcgccggctcaccctgcaaggatcatcagctggggatcgggctgtggtgaacgaacaagccaggcgtctacaccgatgtggctactacctggctggatccgggagcacacgtttcctgatgctcagggactcatcttccctctggtgatcgcagtgagagagtggtggggcatggaggcagatggtcccattccccagtgggccgctccggccggaggggcgacccaaaaggcgtgaagccaacacaaagggggggaaatacccaagggcagtagggccacctggaagggcaaggggaaagagcgggctaccggggaaggggtggggccccggggagggccacgaacggaaagagaacgggggga

SEQ ID NO: 44917 - DNA, 875 bp, Homo Sapiens
aagataattcatttgggtaatacttcagagtactggatctagaatcaggcttcctgaatttaaactcaggctccccattaactaactgtgtgtctgtgagcccagtttctcatctgtaaaatggggcaacagtggcactcatcttaaagggttggataataaaataatgcatgtaaggccctcagcatagtgcctggcacagaattactgctcaaatgttagctgtcgtattaatattgtcacttttgcacactgatgtacatttcctgttgaccaggctcattctttaagcattctccatgcttaaaccagttccataatccctaggcctgtactccaggattgacgactgaaaggatcatttatgccatgtttctctaaaagcatcattgctggaagacttttgactaagtctgatgtgtctcaagctattctcaggccttttttatgtagagtttagaaatgaagtatttgaatcaatttagtatctcctttactatgtttctcctttaatctcagccaacccccctaactggcaggtcaaacccagcattcattaagagctgggtgggggttcctctattctgtatgcatcataatagcttaaccgtttatttaagtagctgtaacttacagcgtttactgctagatgaggatgtctcaagccgggagtgtgcttgtgtaaaatggtgtcaacatcatctcgtggtaggacttttacctgacatggtcttctgggacaaggtcaccgcactctctctgagtacgaaacacatcggcgatcgaattcaagtgtcattacctccttacacagaatttgaacgatctgttcgtgcgctatttttgcgtgcaacacaccaccggggaataataca

SEQ ID NO: 44918 - DNA, 708 bp, Homo Sapiens
agcggattatgttggacaggctggtctcaaactcctgacttcaagtgatccacccgcctcggcctcccaacgtgatgggactatagacatgagccatcgtgcttggccttcttgattcttgaatacggggtttgaggtgaaagcatttcatgaaaacttaagttcatacacaagagcatcatgaatattctaaaagaggtatctgtgctttttttgtgaccacaaaatattacttcttatgaaatgtttacactaggtgaggaaaagttcattaattacctttaaaccgttccttattttttttaagattttaaatcgtatttcggcttttgcctccagtatcctttctggttgctctggtttgaattaagttcctattatgctgcagcacatatcaaccttccctaagtaaccatttcctggaatgtgaagcatcggtgccattagcagaccatatgcagaaatgtcgtgtacttgcatttcttttttgtgcactctataaggctggttgtgactcagatcagcttaactttttatattatgttatttcactaactgctacagtcaaaatgatcaaatctttgtacaatagaaaattatttaaattttatttttctactgacatttctaattctagtgtaaatgtctatcaataaagaaattactttcaattccgagaaaaaagaaacaaaaaaactctccagcgct

SEQ ID NO: 44919 - DNA, 528 bp, Homo Sapiens
aaaaaaaaaaaaaattaaaaaacacgtgtagctgtgggtaaggaagtcgtcccattttatggatgtggaaactgaggctgacttaaacttcccgtgacttggagctctcacctcgagacacctcccagaccccacatcccctcagaacgctgcgcccagccacacccacgatcaagttacacagctttattggcccccagcagccacagttcccccaagggggctttgggacagggagggcccgggcgtccagtgcaaactacagtacgtgagtcaggccctgaggggggtgcccggggtcctccttccctaccctgccaggagggccccgctggtgggagacaggtgtatgggctctgtgggctctgtccctggctgaatggccccagactggttgcagctgggcttgaggggctgacaacaggaagtaccatcatcactgccagagctcaagatcccacacccgacatgacataaataaaaaaataaatagtgttgtatctttaaaaaaaaaaaaaaaaaacgcgg

SEQ ID NO: 44920 - DNA, 791 bp, Homo Sapiens
gggatgggatataggcgcccccacacccgggcccggctcagcgccgccgccgctcctcgcctccttgctgcacgatggcctcgctccgggtggagcgcgccggcggcccgcgtctccctaggacccgagtcgggcggccggcagcgctccgcctcctccttctgctgggcgctgtcctgaatccccacgaggccctggctcagcctcttcccaccacaggcacaccagggtcagaaggggggacggtgaagaactatgagacagctgtccaattttgctggaatcattataaggatcaaatggatcctatcgaaaaggattggtgcgactgggccatgattagcaggccttatagcaccctgcgagattgcctggagcactttgcagagttgtttgacctgggcttccccaatcccttggcagagaggatcatctttgagactcaccagatccactttgccaactgctccctggtgcagcccaccttctctgaccccccagaggatgtactcctggccatgatcatagcccccatctgcctcatccccttcctcatcactcttgtagtatggaggagtaaagacagtgaggcccaggcctagggggccacgagcttctcaacaaccatgttactccacttccccacccccaccaggcctccctcctcccctcctactcccttttctcactctcatccccaccacagatccctggattgctgggaatggaagccaggtggggtcatggcacaagttctgtaatcttcaaaataaaactttttttttgtacaa

SEQ ID NO: 44921 - DNA, 620 bp, Homo Sapiens
gatgaagagcagctgaggctggagaaggggctgcttaaacctcctcctctactgaagtcaactggggaagagagagaagcaccactcctccctcacagcacagcaaggccaccactaggagggggtctcaggttggtcctcccaaaccttgtccaaagactggagttattagttggctgactcagccacataatgggcccaagaaatgccagcgtcctagcagttcccttggttctgggtcagctgaaagagcttggctcttttttaggaactttggtgcctgaacattaagagtagatcactgctttattcttgagctgttcaccctccatgaagctctcaagtcctgcatcctgaggatccagatggatgacaaggacacaggactgccattgagaaatgaagatgaactgtgtcacagatgcagtggattactgactgcccttgtaatagtccattttgcatctgttggtaattcattgaggcactcttggttttctatgagtttgtattttttgaattcaagaattgtaacatcactgttagatccctccttatttaatgagagaaataaaatatttgacacgagaaaattttaaaaaaaaaaaaaaaaaaaggac

SEQ ID NO: 44922 - DNA, 1086 bp, Homo Sapiens
tatacatataaaatacaagctatgttaggaccaaatgctctttgtctatggagttatacttccatcaaattacatagcaatgctgaattaggcaaaaccaacatttagtggtaaatccattcctggtagtataagtcacctaaaaaagacttctagaaatatgtactttaattatttgtttttctcctatttttaaatttattatgcaaattttagaaaataaaatttgctctagttacacacctttagaattctagaatattaaaactgtaaggggcctccatccctcttactcatttgtagtctaggaaattgagattttgatacacctaaggtcacgcagctgggtagatatacagctgtcacaagagtctagatcagttagcacatgctttctactcttcgattattagtattattagctaatggtctttggcatgtttttgttttttatttctgttgagatatagcctttacatttgtacacaaatgtgactatgtcttggcaatgcacttcatacacaatgactaatctatactgtgatgatttgactcaaaaggagaaaagaaattatgtagttttcaattctgattcctattcaccttttgtttatgaatggaaagctttgtgcaaaatatacatataagcagagtaagccttttaaaaatgttctttgaaagataaattaaatacatgagtttctaaccattagaaaagaaaaaattaaaacatgaaatgataaccaaaggaaacaaaagatacctttcaaagcgaggaaacaaaacattttggacataaggccctaatataactttataattataaaacaatagaaaccccttaggtataaaattggtcagccctttgtagtttggcctaccaaaattccaattttaatggaccagaaaaaataaaggggaatgcctgggaagggaacattctctttagggggtttcctattctcacaatagaagggttgggtctctctcggggggttctccctaaaacgggccccaaagaaaacacataaagaaaaagtgggcgagaggggaagacctctagacttttgagggaacagaaggcaa

SEQ ID NO: 44923 - DNA, 1060 bp, Homo Sapiens
ccgggatctccaggcccatccgggattcgtctggcaacctccatggctacgtggctgagggtggagccaaggacatccgaggtgctgtggaggccgctcaccaggctttccctggctgggcgggccagtccccaggagcccgggcagccctgctgtgggccctggcggctgcactggagcgccggaagtctaccctggcctcgaggctggagaggcagggagcggagctcaaggctgcggaggcggaggtggagctgagcgcaagacgacttcgggcgtggggggcccgggtgcaggcccaaggccacaccctgcaggtagccgggctgagaggccctgtgctgcgcctgcgggagccgctgggtgtgctggctgtggtgtgtccggacgagtggcccctgcttgccttcgtgtccctgctggctcccgccctggcctacggcaacactgtggtcatggtgcccagtgcggcctgtcctctgctggccctggaggtctgccaggacatggccaccgtgttcccagcaggcctggccaacgtggtgacaggagaccgggaccatctgacccgctgcctggccttgcaccaagacgtccaggccatgtggtatttcggatcagcccagggttcccagtttgtcgagtgggcctcggcaggaaacctcaaaccggtgtgggcgagcaggggctgcccgcgggcctgggaccaggaggccgagggggcaggcccagagctggggctgcgagtggcgcggaccaaggccctgtggctgcctatgggggactgatgcctgagcgccacctactgcattttggacacctcacaccaaggggagatgcaccccacagacacctgggactttccccttctggttcctgtgtctcccaataaactctctgaccaacctaactgtgcttctgcgagaagaaagggtgtagmacttctggcagatatgaggytttttcttttttttttttttttkaramaagkytggstctgtcaccaggckgargsarkgccasatctcggccmygcagcycgamctytgggctaaggatc

SEQ ID NO: 44924 - DNA, 884 bp, Homo Sapiens
  misc_feature (725)..(725): n is a, c, g, or t
  misc_feature (732)..(732): n is a, c, g, or t
  misc_feature (828)..(828): n is a, c, g, or t
ctgtttgcacattatggcaagaagggcgctgttttcgacaggtgtgcaggtttcggcacatggagattgataaaaaacgcagtgaaattccttgttattgggaaaatcagccaacaggatgtcaaaaattaaactgcgctttccatcacaatagaggacgatatgttgatggccttttcctacctccgagcaaaactgtgttgcccactgtgcctgagtcaccagaagaggaagtgaaggctagccaactttcagttcagcagaacaaattgtctgtccagtccaatccttcccctcagctgcggagcgttatgaaagtagaaagttccgaaaatgttcctagccccacgcatccaccagttgtaattaatgctgcagatgatgatgaagatgatgatgatcagttttctgaggaaggtgatgaaaccaaaacacctaccctgcaaccaactcctgaagttcacaatggattacgagtgacttctgtccggaaacctgcagtcaatataaagcaaggtgaatgtttgaattttggaataaaaactcttgaggaaattaagtcaaagaaaatgaaggaaaaatctaagaagcaaggtgagggttcttcaggagtttccagtcttttactccaccctgagcccgttccaggtcctgaaaaagaaaatgtcaggactgtggtgaggacagtaactctctccaccaaacaaggagaaagaccccttggnttagatntgagtctttacctgagagactggggaaaacgaaaaatttttcagccagggcgggtgaaccagtggatccctccaattaaaagccgtaaccctggcncaccaaaaaggcttaggggggaaagaaaaaggttggaaagcctccccagaaaaacc

SEQ ID NO: 44925 - DNA, 637 bp, Homo Sapiens
  misc_feature (605)..(605): n is a, c, g, or t
  misc_feature (620)..(620): n is a, c, g, or t
tttgtgaaggaataagcatgatggaaataatagtcttgaaaggagatatgttgtatataatcaggaggaagaggaaggaaggacttacccattttgatattttgctgtaggtggccagttttgtttctcatagggaaatctgacccacctgtcatgttggctcctaaggaactgctgttgtaagcggctcatcaagagttgaacttcacgtagccttgttgggaatatggaaaaggaagaaagccacaggactgcccattcagtcttgggaagattgggatgattctgcacaagcaaaaatgactgaagtttatgtatagacacacctctaccaatccatcttcagctgactgaatgttgtatgatagcccttctccaaagcagaggtagaatgttcaggtttcaccatggattttctacttatttcgtttttggaatcaccttacagattccaggtcccttttgtatatattctttattcttttgcttttttaaaaaataattttgtttcatatttaaagcacttgtattagtcaatgtttcgtgttccgcattatttgaaccatttgcccttacagaaagagaaatacttgtttgtgttttanataaaactgatgtangaaaaaaaaaaaaaaag

SEQ ID NO: 44926 - DNA, 645 bp, Homo Sapiens
gatcacccttgcccctgcttgtcctggaccacttttaaaggggaagtcccttatttggaagagagaaaggatgtgtgtagcacacactcatcatggattgctcagagttcctttagggcagagctgagggcctgggatccaggaaccagtgggattggatgggagaagaaggaagggggtggcccgtcacccccgcaagacttgcatccaggtagcctaaggactcctggtcactgggtagggtggctgctgagatgcaggtcggaagaggcaggggaaggctccaggcctaacttggagcatgtcactggccatgggggtgaggggacagactctgctctcactggctggcagccccaggagcctgttcccttgcctctcctggatgggttgtcagccctgtgtttcactgtgaccaattcattataacatttggatattactgaaaatgtaaggaagcaggaaaaattaactactttcattcagagatagcctctatcaatagtttgacatttttccctcttttacattgagatcataccctaggtactgtttagtatgcaatattttcattttcgcagtataataattgcacctgttaaataaagttttgtaaaccatttaaccaccaaacgacaacaaaac

SEQ ID NO: 44927 - DNA, 694 bp, Homo Sapiens
ggcaatatcagaaccctggtttccatttgcagcaaaaacatgggcacctcggaaaaaatagagtccttttaactttgatttctcctctctttgatcagtagactatgccagttactaccagggcctatgggattgccatggtgaccagccagatgaactgtccttccaacggggtgacctcatccgtattctgagcaaggagtataacatgtatggctggtgggtgggagaactgaacagcctcgttgggattgttccaaaggagtatctcaccactgcctttgaagtggaagaaagatgaaacccaggaaatatattcttccctctctcctgcctttatgaggaaactgatcatcaaaagttcccactccctacttctgccaccccaccaacgccttggactcctctctttgctgaagagacccaagtctcttgacacctcagagtgactgtaagctaccagtaagacaagtgggaagaggcacgttcatcaaacctgttactaaaccagcctagtcatagctcatccccatctctaaatgtgtccacacaaccacatctgccttttccacaagcttttcacaaagaaggtgagagagaaggaaaccttgggaggaggacattactggttgttctggctggtttgaaaagcacaaataaacttgggatgtggttccttaaaaaaaaaaaaaaa

SEQ ID NO: 44928 - DNA, 706 bp, Homo Sapiens
  misc_feature (694)..(694): n is a, c, g, or t
gtggaggaagaggtggaacttctgctggccgtggacgagaaagaaatagatctaacttccgaggagaaaggggtggctttagagggggccgtggaggagcacacagaggtggctttccacctcgataattgttgaagacattgaacctattcatcctcctctaaccttctttattgtaattaaatttcaagtgggagacttaactttagaactcacttccagcttgcactttgctttaatttctctgagctgcaagaatgtcttagcgagccttgcttgcagttgtcacacacactgtccggttttttttcaggataaatgaatgattctgccttttgttatgtgcgtgaacagaatggaacaactcaagtagcttcatcttcagagactgaatttattctgatagacttcagctaattacaaaggattttgctaatttttgggaataaataatggaaaaagatccagtctgtggtatcatgctagtgctgacagggccttgatagaatagagttggaaaagatggtaagcttttgtcagggttttaacattttcttgatgaaacaataaaaagaggtaagcttttttcttctttttttttaagttttaaataaactcagatataatttgaatactgaagaaattaagagactttgaacaaatctcttcccaatctaaatttgataggggaggnggagattccagg

SEQ ID NO: 44929 - DNA, 414 bp, Homo Sapiens
gacagaggtgatggttaagctaagaactgaaacacagtaaggtttgagaggtgaaggacaagaaacaactgaccactttcttttttgtcacagaatctcgaatcctgaccttcttagaaacctaccttgcctcgggtcatcagaagccattgcccacagtccctgggggactcagtccagttcagagagagctggaggaagttgctattaaatttgctcgcctggtcaactataacaagatggtcttctgtccctactacgatgcaatcctgagtaagatcctcgtccgatcctaacgtgtatgcaccctacagcagcagtattactcactagccacagaatacctgttctgtactctaatgttgcattggaaaatggctatatagtacatgtctatttaacagcaccgattcc

SEQ ID NO: 44930 - DNA, 1027 bp, Homo Sapiens
caagaatatttgcaaagcaaaaacaaatataaagctgaaattctcaaaaaattggagcatcagagattgatagaggcagaaaggaagcggattgctcagatgcgccacagcagctagaatcggagcagtttctgtttttcgaagatcaactcaagaagcaagagttagcccgaggtcaaatgcgaagtcagcaaacctcagggctgtcagagcagattgatgggagcgctttgtcctgcttttccacacaccagaacaattccttgctgaatgtatttgcagatcaacctaataaaagtgatgcaaccaattatgctagccactctcctcctgtaaacagggccttaacgccagcygctactctaagtgctgttcagaatttagtggttgaaggactgcgatgtgtagttttgccagaagatctttgccacaaatttctgcaactggcagaatctaatacagtgagaggaatagaaacctgtggaatactctgtggaaaactgacacataatgaatttactattacccatgtaattgtgccaaagcagtytgcgggaccagactattgtgacatggagaatgtagaggaattattcaatgttcaggatcaacatgatctcctcactctaggatggatccatacacatcccactcaaactgcatttttatccagcgttgatcttcacactcactgttcctatcaactcatgttgccagaggccattgccattgtttgctcaccaaagcataaagacactggcatcttcaggctcaccaatgctggcatgcttgaggtttctgcttgtaaaaaaaagggctttcatccacacaccaaggagcccaggctgttcagtatatgcaaacatgtkttggtaaaagacataaaaataattgtgttggatctgaggtgatatgttctgaatgtwagcccgtcacatcagaaactactcatggmmtgtggttgcggatttyytwagagtttcagaatgatkatatttatattttmttttagakraaagctgatatt

SEQ ID NO: 44931 - DNA, 534 bp, Homo Sapiens
ggggatgtgcagagccccaactgcccatctgaggatgtagtcatcactccagaaagctttggaagagattcatccctcacatgcctggctgggaatgtcagtgcatgtgacgcccctattctctcctcttccaggtccctagactgcagggagagtggcaagaatgggcctcatgtgtaccaggacctcctgcttagccttgggactacaaacagcacgctgccccctccattttctctccaatctggaatcctgacattgaacccagttgctcagggtcagcccattcttacttccctgggatcaaatcaagaagaagcatatgtcaccatgtccagcttctaccaaaaccagtgaagtgtaagaaacccagactgaacttaccgtgagcgacaaagatgatttaaaagggaagtctagagttcctattctccctcacagcacagagaagacaaaattagcaaaaccccactacacagtctgcaagattctgaaacattgctttgaccactcttcctgagttcagtggcactc

SEQ ID NO: 44932 - DNA, 718 bp, Homo Sapiens
acgaggaaaataactagttatgggtctatttcttccatgattagaggagagagaacttgattcaagatactgaaaaatagagctgggactgagcctttgaatgacaggaatgatctattaccaggtgactagtcggaaactacacagacgtgcactggtctgcatttgggggctaaagtgtatatattccatttaaaatggaatttgtttgtatttggggcagtcttcagtaaagcctttctcctttcttttctccattgaggacagttctgctcagcaaaattgttgagtacctgttctgggcaggtcccacgctatatgcacaaagttaagaaaaacttggtcttagcccttgggagctgacagcccatgggcattaaggcaaagtagttccagtgatttaaaatacggttccaaatacgctaaaaccaacttgtgccaaccagatttacagattggaaatactgcagatgatgtgaagttatcagttggaggagctgtgattaagctggataataagagaacgtgccatctgtaaagcactcagaaggcagccatccctagatgttggtttcatgtatattacactatctactactatccataaatgcaataatatgcatgttaacaacatttaaaacagcaaacagcaatctaagtacagaaaagcttttttgtgggtttaaaaaaattgaagaaaattcaaggaggaaacgtg

SEQ ID NO: 44933 - DNA, 513 bp, Homo Sapiens
actgatgggtccactcatggcctcagctgacaaaggagacgatgaacgtgtagctgacatgcacgaagtttaatttactcatgtccacgggggacgtttagagggcacgtgggaaattttccagcaatcaatgccttgagaaacttaaatggggaaatattattcatcgagaaagtgaaacaaaacactaggaaatgattatgaaatgttagtgattttcaaaagatgggcttcaaataaaagtctgcagagttttttttaaatcggagggaaaatcttattttctagtatgtctcaggtatttttatgacttctactaaaattcacactgaaactttatcttctaaactggaatcattacttaattttaactaaccaacaaccacaaaagcagcagctactactaaatattggattactgacaaaggaattcagttttgtggaatctggtgtttgcactataggttaagagttgccatttaaatgtttcttattcataattaggttttgttc

SEQ ID NO: 44934 - DNA, 593 bp, Homo Sapiens
cgggtgtaggtttttttttgttttattttttagctattcagttatgtttataagtttgcatagctacttctcgacatttggtttgttttaatttttttgtatcataatagtcctatttttttttcaagttggagtgaatgtttttagttttaagatagataggagacacttttttatcacatgtagtcacaacctgttttgtttttgtaaaacataggaagtctctttaatgcaatgatttgttttatatttggactaaggttcttgagcttatctcccaaggtactttccataatttaacacagcttctataaaagtgacttcatgcttacgtgtggatcattcttgctgcttaagatgaaaagcattggttttttaaaattagagaataaaatatgtatttaaatttttggtgtgttcacataaagggatgtagctaaaatgttttcataggctattatatattctcgcagcatttccagttaagaggatattaggtatataattctcttcttaaccgaatgtcagatggtcttacgccacagggtgcaggtaacccttggtctgtaagcaccaccgatccagggatcatt

SEQ ID NO: 44935 - DNA, 588 bp, Homo Sapiens
tcaactcctgacctcaggtgatccacccaccttgccctcccaaagtgctaggattacaggcgtgagccactgcacctagcccactgatcactcttctgcttacagaatatcagaagtcattctagaggcaaatttgaagagtggaaaaatcactttttctgaatgatcttgtttttggtgtagatgtttttattgtgtgggttagtttaatgaatacataaagactaccagtaccattctgtctttactccgtggcatctgtggaataaccctgctaatgtaacacgtgagaaagcctttggtcatgccacccactctaccagttgtccccaccatcccccgccctccttcctgtgagacactgggccaaaggctcactacccctgtgcgttgtccagcacacagacactatgtgcattatttgtacataaggataatcacatctacctgagactgctatcatggaaattaatgtttagtacatgtaaagtctttgaaagtggaacgggaatattgcgaattttaataaataataactattgtgggttctataaaataaaataaataacttcaggggggcccggtacc

SEQ ID NO: 44936 - DNA, 546 bp, Homo Sapiens
  misc_feature (522)..(522): n is a, c, g, or t
gggagtggcatttgtggaaaccagatgtgctggcagcttagggggaagtggcagtgtggggtgggggattttgcattggggttggttccatttcggccaccaggactgcccctcccccactcctcccaattcctatggagcctctctattttacctctttccgtgcatccctgcacccgccacacccccttcagctatgcttttggagtcctggatgggaatctggggggagagaggaaggacaggtcaggtctcccccagccccttctgctcctgtctcctcgtgtccgcattgctggagctccacctccctcttggtttctccgcacccgcccattttccttctgtctttacctgcttcgtatcctttccctgctgatgtggctgacccctctcccacccctccctgcaggcggctggccaggtgggcaggtgccagccggagctgtaaatagagcgctgcgcttttgtgctggtttgtgcgtgtgctgtatttctgtgttttgatagaagtcacacaanaaaaaaaaaaaaaaaaaaacgcgg

SEQ ID NO: 44937 - DNA, 729 bp, Homo Sapiens
gggctcactctacaatgtgaatggactgaaagcacagccttggtggaccccaaaagaaacgggctacacagagttagtaaagtctttagaaagaaactggaagttaatccgagatgaaggccttgcagtgatggataaagccaaaggtctcttcctgcctgaggatgaaaacctgagggaaaaaggggactggagccagttcacgctgtggcagcaaggaagaagaaatgaaaatgcctgcaaaggagctcctaaaacctgtaccttactagaaaagttccccgagacaacaggatgcagaagaggacagatcaaatattccatcatgcaccccgggactcacgtgtggccgcacacagggcccacaaactgcaggctccgaatgcacctgggcttggtgattcccaaggaaggctgcaagattcgatgtgccaacgagaccaagacctgggaggaaggcaaggtgctcatctttgatgactcctttgagcacgaggtatggcaggatgcctcatctttccggctgatattcatcgtggatgtgtggcatccggaactgacaccacagcagagacgcagccttccagcaatttagcatgaattcatgcaagcttgggaaactctggagagaggctgcctttctggttccatctccttgggtgtgaggatagaatttcgaacaccaagagtcaattcccttgacttgcagcccgagtaattcaaagcctc

SEQ ID NO: 44938 - DNA, 1033 bp, Homo Sapiens
ccggaattcccgggatcgaccatccggccctagcctggccgggcgggtgccgggagcttccctttctcagcgcggcgcgaaggtggctcgccgtcagcgcctgcttccctcgacctcgtcctcctccccgctccggaggrttggcgagatgtggcgcctctgactccacttctccccgcccctgtcaccgagagggggaacgagctctcgcccactcgccggaggagacggccctggactcccaaccccgccggcgaaaccatgagctccgtccagcagcagccgccgccgccgcggagggtcaccaacgtggggtccctgttgctcaccccgcaggagaacgagtccctcttcactttcctcggcaagaaatgtgttactatgtcttcagcagtggtgcagttatatgcagcagatcggaactgtatgtggtcaaagaagtgcagtggtgttgcttgtctmtgtataaggacaatccacagagatcttattttttaagaatatttgacattaaggatgggaaactattgtgggaacaagagctatacaataactttgtatataatagtcctagaggatattttcatacctttgctggagatacttgtcaagttgctcttaattttgccaatgaagaagaagcaaaaaaatttcgaaaagcagttacagaccttttgggccgtcgacaaaggaaatctgagaaaagacgagatcccccaaatggtcctaatctacccatggctacagttgatataaaaaatccagaaatcacaacaaatagattttatggtccacaagtcaacaacatctcccataccaaagaaaagaagaagggaaagctaaaagaagagattamcaaggcagatataggacacaagcaatttcagcacattggacatgttggtkggatcaaatacagcttgatctgatatttggatcagattgagatctttcgatattgtggatctcragcmcacttaagrcrgraacacaaagtatwtwtryttttgraaacaggrgggtgagcgtaaaa

SEQ ID NO: 44939 - DNA, 917 bp, Homo Sapiens
gtgtagcagtccctccaccaccgccaaataggatgtaccctcctccacctccagcccttccctcctcagcaccttcagggcctccaccaccacctccatctgtgttgggggtagggccagtggcaccacccccaccgcctccacctccacctcctcctgggccaccgcccccgcctggcctgccttctgatggggaccatcaggttccaactactgcaggaaacaaagcagctcttttagatcaaattagagagggtgctcagctaaaaaaagtggagcagaacagtcggccagtgtcctgctctggacgagatgcactgttagaccagatacgacagggtatccaactaaaatctgtggctgatggccaagagtctacaccaccaacacctgcacccacttcaggaattgtgggtgcattaatggaagtgatgcagaaaaggagcaaagccattcattcttcagatgaagatgaagatgaagatgatgaagaaaattttgaggatgatgatgagtgggaagactgatctatatattatatatatatatatatttttaaggtgaaatactaaacactactttctggctggggattctgtaaaattatcatgaaaaggtccacccatttgctggacatttttggtgccctttttgcttttttttaatcgtgggcaaaacctcattaaatctggaaagggattgtccgaaatccccccaaccaaaccaactccccgggaatgtgtgcggcaagtctaccctccagaaaagcccccacttgatatgggagaaaaattttctccctcccattcgaaccaccgggagtctcgaatgaacaccaagtcggagaaaatcggaacacgaacccctctacacccacagatcgcagcactagacttaagccgcgcgacacaagggaa

SEQ ID NO: 44940 - DNA, 602 bp, Homo Sapiens
ttttttttttttttttttaaggagttacaataaaaatctttatttaggtttggtcagtacaggtaagatatactggagtcacagagcaatatgcattaacaggatacaacagttcataaaaactgagtaactatgcacacaaatttcttaaacagtcacctaaagagaaaatgcacagatgtatggtggaaaaaactgtatctaacactgaaactactacaggactccatcaatgagtccaacttttagtgataaaaaactactgtactgggcaaacttggcagtcataaacccacatctactctaacaagtctgaatggtgcataagtacagtaacagcatgagtacgaatgcccttacacagcacagattctaaacagacagatttatacagacatcattgtgttgtattttaaggaaaaatttccatttacaatttcacattaactcatataaaaataacttgaccctacacaaaatgtccttttagcaacattcaaagtaattaactgttacaatttccaaagcggcagaagtattgaagcaaaaaaaaaaaaaaaaaaaaaaaagcctacagccgcggccgctccaaccctcgtgcc

SEQ ID NO: 44941 - DNA, 369 bp, Homo Sapiens
agtcttctgtcttcctttgctaacttagggttttgagcaggttggggtatggtgcctgtcatacccacctgccaccctgggaacctcactgttctctctttcagcctagacctgctgatccagggtgtgtgtgagttgagggtgggtggaggggtttgcagtgtgggaatgtggccctgcagttgacctgagctgcttcacatggttgtccattctggggcttaaagaactgggaccagaccaagtagaggccttggtgctggttggggtggggcctgcagagtcttagttactgatttcattttcaataaatgtaggtttgttacatgagtttcccaattaaaaaaaaaatgacttctaaaaaaaaaa

SEQ ID NO: 44942 - DNA, 643 bp, Homo Sapiens
cgcgtccgggcaggaggatcacttgagcctatgagttcaagaccagcctaggcaatgtagtgacacctcatttctatttattttaaaaaaaagagagagtaactacagaagaactttaaaaaataaaaaataagcttaccttggattcttggcttagagtagaggttttttttaagttatggaggaaacatttttgtaaaagtttaatgacccactttagatgctccaagaacaagcatcccttccatgtatgtcttgagaaagaaatcacagaagcatttctcaccaatactctttggcttaaaatgttcagcagaattgggcagtgggggtgacttttcttatattaataatatttacatccaatacactgaatcttcctttagaggtaagactttaatatctatactgtaaatatttggtttatttggcactactgtaagttttgtttttcacaaagctcttattatgaagcaaaataaaaattctagtttcttgtatgattttttgtactcattcattcctgttaagctgccaaaaattaaagtgcaatattgtatatttttaagaacaaatttaaaatagaattttgatgtttctcagatcacaagaaatacaaatctatatagtataataaaatcca

SEQ ID NO: 44943 - DNA, 565 bp, Homo Sapiens
aagaagagagatcctaaaggcaattcagatatccccaaggctgcctctcccaccacaagcccagagtggatgggctgggggaggggtgctgttttaatttctaaaggtaggaccaacacccaggggatcagtgaaggaagagaaggccagcagatcactgagagtgcaaccccaccctccacaggaaattgcctcatgggcagggccacagcagagagacacagcatgggcagtgccttccctgcctgtgggggtcatgctgccacttttaatgggtcctccacccaacggggtcagggaggtggtgctgccccagtgggccatgattatcttaaaggcattattctccagccttaagtaagatcttaggacgtttcctttgctatgatttgtacttgcttgagtcccatgactgtttctcttcctctctttcttccttttggaatagtaatatccatcctatgtttgtcccactattgtattttggaagcacataacttgtttggtttcacaggttcacagttaagaaggaattttgcctctgaataaatagaatcttgagtct

SEQ ID NO: 44944 - DNA, 1008 bp, Homo Sapiens
cagaaaccagtgaagatgtggccacaggaggaggtgtgctgaggtggctgctgaccgtggactccctgcgcagtggcctgcagatgttggggctgggttacagctgattgaagctgagtggccctggggggtctgtgaggggagttcctccccagtgatgaaattctctccttccaccctcaaatccctagaccttgactgaaatgctccgtggtcgggagcctggtcaaggaggaggagctgctgagaggcattgttcgcccttgctcatagcttagctcgatgtccgtgtcagacaggagatgattgagaacagccttgcctgtcactgtcctagaacaccctggagtttagtgttctgtgtcagagtcttgggagcctccttcaaacccagatgacgggcctccctctgtccaaggagcagctgtaaaggagaagagggatttcatttgtttggtggctgttaccttgtctgtaagtcaaacttggagttgagcagtgctttttaaacgattcccttttgcagctaaaatttcacaggggctatttctaatacgtaagcaaaatgttaccattggactttattaataaaatatagtctttgcctttgcaaaaaaaaaaaaaaaaagggcgggccccgctctagaagtatcccctcggaggggggcccaaaggcttaccgcgttaccccagacttttcctttggcaccaaaagggggtcccccctataggtggaagctccgtatttaatataagccttaagggcaattggggccccatccgctttttttacacaacccgtccatgcgacctgggggcaaaacaacctggcctctaaccttttgcgggaaactctctttcggcggaaaagggaaaaccccttttaccctcccctcgcggcgggggggttgggaaccatttatagttttgggggaaccacaatacccttacaccccttcaccacacagaatatatctttttttaaaaaaaccccgtcccctataaaag

SEQ ID NO: 44945 - DNA, 606 bp, Homo Sapiens
cacgcgtccgaaagtattaaaactaaaaaggaccagagaattcttagattggcccggaaaggccaataaagagttagaatgaaaactcattacttttccattcccaatctagtgctagatgtataaatctttcttttgattcttcctaacaaaatattttctgggttaaaaccccagccaactcattgggttgtagccaaaggttcactctcaagaagctttaatatttaaataaaatcatattgaatgtttccaacctggagtataatattcagatataaaacagttttgtcagtctttcttagtgcctgtgtggatttttgtgaaaatgtcaaagagaaaacttatatactatttcccttgaaattttaaactatattttctttacaggtatttataatataccaatgcttttatcaaacagaattttaaagagcataataaattatattaaagaaccaaaagttttcctgagaataagaaagtttcacccaataaaatatttttgaaaggcatgttcctctgtcaatgaaaaaaagtacatgtatgtgttgtgatattaaaagtgacatttgtctaatagcctaatacaacatgtagctgagt

SEQ ID NO: 44946 - DNA, 776 bp, Homo Sapiens
  misc_feature (548)..(548): n is a, c, g, or t
  misc_feature (702)..(719): n is a, c, g, or t
  misc_feature (722)..(723): n is a, c, g, or t
  misc_feature (725)..(727): n is a, c, g, or t
ggactgtacattcccacttacgtatattttattaaaatttataagcaagaaattatacataagtggtcatgatcttagggagacaaagaatttctcttagaaaagagaagtaatggtaatgtaaataaaaatactgtttatattcacatgattttaagaaaactgtaaaagcaaagattttgtagtaatgacacaaatgtaacaaatagatgttttcttaaaattggcagtcagtataattatgtttctgcctatgatgttgaggaagttgtatcagtctgattcttagttttttcatctgttaagtagaacgtactattacttaccttaaagagtggctttgagaattttgtaaggaacaaacatgtttttggttctggaatataggaggtgctcaataaaagttgactctgactggcaaataatattgttttgtaaatgcatgatgattatttttggccatatttgacttagtttcattaggctaatattaattggtactatatgaaagtgagtcaactaattataaaagattagaaatgtcttangtgacgatgggggaaaaacttaaaatttttgcataaattatggggagatgatagagttattacagtgttattaagtattcctatgttgcattttgcaaatacttaatttaatacagatgaaaataatcttgagtcacaataaagtaatgatacnnnnnnnnnnnnnnnnnnaannannnaaaacatggtcggcccgccttcggcccctcgagaagctttctaaaacca

SEQ ID NO: 44947 - DNA, 615 bp, Homo Sapiens
ttataacctgtgttcacttcgcttattactgtggcccttctggtgactacaacataacactgagtatgaactgaggaattaaccactgaaagagacaaagcacacctaaataatgatgaacaaatcaagacctacaagaaatgaacacatagatgctttttaagtgtcattagttatcggaatcaaagaatttgaggtggtgacaactggggattatctgtaactccccaaatttactgttcttgaatgacattctcaaactatttattaatgagttagtctcatccctgctttctgtttcctctctctgcatcttctcttggcataggaagttattttactcatgctgtgttttttaatataagctttacaaaaaaagatgcattcccttcctgttcacactcttaccatgtttttgttcttccttaagaatgattgtgtgtgtgtgtgtgtgtgtgtgtgtgtgtaagtgtaacatcatgggttttctttcttcacttgtaaagttttatctagaaatacttttacaggttatgttgaggtacacaaagataatgttctaagattgtgtattggatttggatttgtgtgtgtgtgtttaaagcatttgataag

SEQ ID NO: 44948 - DNA, 683 bp, Homo Sapiens
gcgtggatgccgcatatgaagttactagcaaggacctcgttttcatttttaaaggaaatcaattctgggccatcagaggaaatgaggtacgagctggatacccaagaggcatccacaccctaggtttccctccaaccgtgaggaaaatcgatgcagccatttctgataaggaaaagaacaaaacatatttctttgtagaggacaaatactggagatttgatgagaagagaaattccatggagccaggctttcccaagcaaatagctgaagactttccagggattgactcaaagattgatgctgtttttgaagaatttgggttcttttatttctttactggatcttcacagttggagtttgacccaaatgcaaagaaagtgacacacactttgaagagtaacagctggcttaattgttgaaagagatatgtagaaggcacaatatgggcactttaaatgaagctaataattcttcacctaagtctctgtgaattgaaatgttcgttttctcctgcctgtgctgtgactcgagtcacactcaagggaacttgagcgtgaatctgtatcttgccggtcatttttatgttattacagggcattcaaatgggctgctgcttagcttgcaccttgtcacatagagtgatctttcccaagagaaggggaagcactcgtgtgcaacagaca

SEQ ID NO: 44949 - DNA, 501 bp, Homo Sapiens
atctttacaacaaatgttgcattaacatataacttttttcagttgactttaccaaaattaagcccatctttagtagatactgttttaacatgtgaaagaaatacgttataaacataccacaagatatggctataaaacaatgagatcagtatccatttttgctttaaagaattggccttattgcttcagtgtcacatctcatactcaagggcatttactacaaagaaagagttctccaatattgctgttctgttgctgcctgccctatttacacatgtacctgctacttaaataggaaagcctttcaattcatggacaatacaccttggtggtaaccaggcttttatttttatttttttttcttagtgtaaaaactgtactgttttggaaatgtgctgtgaaatattaggtttaactgtgtagatcctagaataaggggatttatatagatgaagttgtaaccaagaaactggttattaaaaatttatttactccaaaaaa

SEQ ID NO: 44950 - DNA, 857 bp, Homo Sapiens
ccgggatggaacaagtcagcaaggaatccagtgtcgagcctgtcagctgtccagagaaaggtctggacatctatctcatcattggcatatgtggaggaggcagcctcttgatggtctttgtggcactgctcgttttctatatcaccaaaaggaaaaaacagaggagtcggagaaatgatgaggagctggagacaagagcccacagagtagctactgaagaaaggggccggaagccccaccaaattccagcttcaacccctcagaatccagcaacttcccaacatcctcctccaccacctggtcatcgttcccaggcacctagtcatcgtcccccgcctcctggacaccgtgttcagcaccagcctcagaagaggcctcctgctccgtcgggcacacaagttcaccagcagaaaggcccgcccctccccagacctcgagttcagccaaaacctccccatggggcagcagaaaactcattgtccccttcctctaattaaaaaagatagaaactgtctttttcaataaaaagcactgtggatttctgccctcctgatgtgcatatccgtacttccatgaggtgttttctgtgtgcagaacattgtcacctcctgaggctgtgggccacagccacctctgcatcttcgaactcagccatgtggtcaacatctggagtttttggtctcctcagagagctccatcacaccagtaaggagaagcaatataagtgtgattgcaagaatggtagaggaccgagcacagaaatcttagagatttcttgtcccctctcaggtcatgtgtagatgcgataaatcaagtgattggtgtgcctgggtctcactacaagcagcctatctgct

SEQ ID NO: 44951 - DNA, 843 bp, Homo Sapiens
  misc_feature (761)..(762): n is a, c, g, or t
  misc_feature (780)..(780): n is a, c, g, or t
  misc_feature (843)..(843): n is a, c, g, or t
cgactccaatcttccagtggccagcacaccctagacaccccgaggagggagggctcctttctagcctgcccccccacccccacttcacccctccccagcttcccaaacttctgtctgcccaaatgggctctgaccgtgctctgtcggcccgagacatttggaagtcctgggggatgctggcaaatctcagctgttgctgaggagggggctgggaccccttcccatcccaaccttgagccccaggagataccgcgcccacacccaatcttgggacactccctatctggttggaagagagtaaccagtttccagagagccagagagtgagagagagaaagagagtgagagagatagagaaagagagagagagatgctgttgaatcagaaacagatcaacagcccaaagattttcctgtccctcgagtgccagccccaggaagcttccagggctgagtggtcaggagccagtttctccagcccctcctccccacaacccctagtggggaggggcagctgtccatttgcccaaagtattaatgcaactgaagctgtgatatttccaacgactgtaggaggaaaaattaaggggagagaggaaaacaaaaccaaccaacccctaaaatcattttcttattgtacataacgacctcattctcctgtatatgcggaagatataaccttatatttggtaagtgtttcttgggctattttatcacgtgacctgtttataaaaatttattttaaaaaagttgtaaaaaccnntgaaaaaaaaaaaaaganaccgatataaatatggggccgggccgctcctagaataatcccctccgagggggccccaagctn

SEQ ID NO: 44952 - DNA, 950 bp, Homo Sapiens
agaagagtcaactcttaagattatcattagaaaacaaatacgtcaacacctatgaaaagaagcggggaaaacaacaacaaggacaacaacaaaaaaccagtgaaattctacaagtgtcccttttaaaaatagtgtgtgctaactaagggctattcattctgccatttttaacttgagacacatttaagaataaagttggatgttctttttctgtgattatgaaatgcaataaaatctgaataaagggcaaagtttcttcctgatcagattagattaagtgcttagttttattcctaattctgccccttttaacctgatgtgtaccttactctttcctccctctcttcctcccttcctcctctccccgctcctttcctgcatttctccctccctccttccctcgtcacatctcttatatgagcacagtaattatgacctttttgttttggctacaacttgattgaaacaagttcaaaatttaaacaagttcatacaagtttttaaaaattctcaactggtagcttgcttgctgtgcgtcttccaaactaaagcctgcaagcgccacaattctaagtgccgccttccattttttttcagtatgttttcactggcttatgttttcagatatgattttcctttttcgcatatatggtttaataaatgggggataattttttttttgtaaatccgtgcttgtgccaagtctcatatttctttgccatctcagaattatctttttaccaccactgtttataaaatttccttagagactttttgaagggaaaatagagcaacagggaaaaatgaaagaratgtcttggttactgagctctaaatagacaggtttgatggcacttctcatgatacattttagttattcttataaragcaaacaggcaaacatgagtgtaaatkaaagacaaaaagaaaactctggtttawtatttgag

SEQ ID NO: 44953 - DNA, 653 bp, Homo Sapiens
gaatttgtacattgcttttcccttcttcctcttccttccacccccaatttattttattgtgtatgtttgctacgtgaaaagtgcgtatttgtttggtcacctacacttgtattagctgtttcaatgtgatttttaaacatttcatttatagttatttttagtattgttataaaccatgcttcagttttttttaatttccacccaaaagtcattgtctatttttgtattatttgtaagttaagaagttttttccaatatatggcaaaaaaaaaaaaatagtagcatattatcctggtagtattaagtccagtagcatttaacaaaaaattgtttccttggcttgggaagcttacaaaacaaccctaatgctgtttaactctattaatattgcttggaatctctcccttgggagtgacgcatttggtgctttaaattctagggagaaccttcatagaactcatgaacatacttctttctaaagtctggctggtatattccctctgtctttcacttaatttataaaccagcagatgcgatgccttaacaatgcaaatcatatccattccacttgtccttgtacctgtgcccagaactgtcagtcatcactaacattctacgataaaaaaaaacacagcaacaaaaaaactttcgcg

SEQ ID NO: 44954 - DNA, 780 bp, Homo Sapiens
  misc_feature (558)..(558): n is a, c, g, or t
  misc_feature (695)..(695): n is a, c, g, or t
  misc_feature (728)..(728): n is a, c, g, or t
ggtgccttcttttttccaatccatactcaaataatagtctttgatgtctgtcttccttgacccgtgttcgtgcaaagattcagagtctgtgtgtggcttctactaggctgatgttacaccaggtgggtttattgagatatcatgtgtctgttcctccccctgtcctgcattcactcctgtggaggaaaggaggccacgatgtccctaaggaaagctttgtcctgagctcttcattcattggctaacccctagctcccttttcttctgccctttcacaccaggagaaataattttccattttgttcctattgctttggccttttgtattattctacccccttagtccctttgcagatccccactcctgctcagcaggctcttacctctgacccccagctttcattgtggctgttagcaacatcctggggtttaaactccacccacgcccgatctggctgtctagagggattctacgcctgcgtgctgccgcctccccaagaggcattcaggttattggagaactaatctcatctcaaggggccagacaccaagtcgcanagcctacagacctctttccgccaggccctgaaacctggccccgtgccagcaggatgacaagccccagggcgctcctgatgaatatggattggagatgatgtacagtttttattcccctctggcttttgaggaatganatgatttgcactttgaaaacctgttaaccgtancctctggacactgagactggaaggagaataaggatgctgttgtttttaacta

SEQ ID NO: 44955 - DNA, 574 bp, Homo Sapiens
  misc_feature (20)..(20): n is a, c, g, or t
  misc_feature (339)..(339): n is a, c, g, or t
ttgttgtgaggatcacgtanttcatagatgtgaaagggtttaaaagtttaaaagcactgtacacatttaagttattaattcatatggccttggctgaggtaaggcagattggtttacaagatacagaagtatggatatatactgtgacttcattgcttgaatctttcctttgctggtctaacttgactgcttcatggagtttgaaatcttaatttttaaaatccctgtgtggctcattagacgactataagcacaacctgtatttgtaccttaatctcttacatttccactgctgtgtatctgacatatctactagtaagcactgttttgtcaaaccgnctttctctccttcattttactggttcttagtctcctatcaatataaggaaataagaagtgccagggagccgccattgtgtgttacggtttatatcgataatcttcaatataaaaaactggccattttttaaaatattaaatttatgtaaattctttggatttcatattatttgggtccctttttatgcctaaataacatttttaaattcggttgcctttggacattgtggaaaaa

SEQ ID NO: 44956 - DNA, 519 bp, Homo Sapiens
  misc_feature (484)..(484): n is a, c, g, or t
  misc_feature (492)..(492): n is a, c, g, or t
ggggaaactcctcaccaggagagccaaagacagggttgtgccttaccccaggagccacccctgtaccccccttgccctgccattcaccctccacccctacccctgggcggcctgctgctttttccttctcttcctcccctgccctgagctgcatggttcccccaccctgggcagccaggaaggaatctgaatggagaatcaccaaccaccagagaaaaaagactgtggggccctcccctgccaactccccttccctggccgcccactcaacccacacctctttcacgcaggacaggctgcccaccctgtccacgtgaagtgccaacgccctccccaccctgggccgagcccccacccctccctgggcccccaagtgagattgcacatttaactactgtaaggagaggagcggcgttggcaaatgtgaaccatgagaatatcagtgatactgatgagaataaactaaacgcctttgtaacagcgnaccccccnacccaaaataacaaagaccacccatgt

SEQ ID NO: 44957 - DNA, 577 bp, Homo Sapiens
ggtgaaagtcccatattctggtatgctccagaatcactgacagagagcaagttttctgtggcctcagatgtttggagctttggagtggttctgtatgaacttttcacatacattgagaagagtaaaagtccaccagcggaatttatgcgtatgattggcaatgacaaacaaggacagatgatcgtgttccatttgatagaacttttgaagaataatggaagattaccaagaccagatggatgcccagatgagatctatatgatcatgacagaatgctggaacaataatgtaaatcaacgcccctcctttagggatctagctcttcgagtggatcaaataagggataacatggctggatgaaagaaatgaccttcattctgagaccaaagtagatttacagaacaaagttttatatttcacattgctgtggactattattacatatatcattattatataaatcatgatgctagccagcaaagatgtgaaaatatctgctcaaaactttcaaagtttagtaagtttttcttcatgaggccaccagtaaaagacattaatgagaattccttagcaagga

SEQ ID NO: 44958 - DNA, 585 bp, Homo Sapiens
ttgccaatgatctcaatcctgaatctcataaatggctgttgtacaactgtaaattaaataaagtggaccaaaaggtgaaagtcttcaacttggatgggaaagacttcctccaaggaccagtcaaagaagagttaatgcagctgctgggtctgtcaaaagaaagaaaaccctctgtgcacgttgtcatgaacttgccagcaaaagctatagagtttcttagtgctttcaagtggcttttagatgggcagccatgcagcagtgagttccttcccatagtgcattgttatagcttttccaaagatgctaaccctgctgaggatgttcggcagagggctggagctgtgttaggcatttctctggaggcatgcagttcagttcacctggtaagaaatgtggccccaaacaaggaaatgctgtgcatcacgtttcagattcctgcctctgtcctctacaagaaccagaccagaaatccagagaatcatgaagatccacctcttaaaaggcagaggacggctgaagccttttcaaacgaaaaacacaaattgtttcaaacacttaattggaaatgttttctccatctcccta

SEQ ID NO: 44959 - DNA, 594 bp, Homo Sapiens
gaacgaggcctgccactctttgattacaaaaatgacggatgagctgtatcaccatatgcctgagaatcgttgtgtgttaaaggacttggatcgtcttcctactgagacgtggccccagcttctccgtgagctctgcagcacacctgttcccaccctgttctgccccaggattgtgctggaagtgctggttgtgctccgaagcatcagcgaacagtgccgccgtgtgtccaggcaggtcaccgttgcctcagagctgagacacaggcagtgggtggaaaggacgctgcggtctcgccagcggcagaactacctgcgtatgtggagtagtatcagactactgtcccctgtgctcagcctgatactgttactcattgcgctggagttggtcaacattcatgctgtttgtgggaagaatgcgcatgagtatcagcagtacctaaagtttgtaaagtcgatcttgcagtacacggagaacctggtggcttacaccagttacgaaaagaacaagtggaatgaaactatcaatcttacacatacagctttgttgaaaatgtggacttttagtgagaagaacaaatgttaatacatttagcc

SEQ ID NO: 44960 - DNA, 1038 bp, Homo Sapiens
  misc_feature (875)..(875): n is a, c, g, or t
atcgccctgggtctctcgagcctgctgcctgctcccccgccccaccagccatggtggtttctggagcgcccccagccctgggtgggggctgtctcggcaccttcacctccctgctgctgctggcgtcgacagccatcctcaatgcggccaggatacctgttcccccagcctgtgggaagccccagcagctgaaccgggttgtgggcggcgaggacagcactgacagcgagtggccctggatcgtgagcatccagaagaatgggacccaccactgcgcagttcccttgccccaccctcagaccctgcagaagctgaaggttcctatcatcgactcggaagtctgcagccatctgtactggcggggagcaggacagggacccatcactgaggacatgctgtgtgccggctacttggagggggagcgggatgcttgtctgggcgactccgggggccccctcatgtgccaggtggacggcgcctggctgctggccggcatcatcagctggggcgagggctgtgccgagcgcaacaggcccggggtctacatcagcctctctgcgcaccgctcctgggtggagaagatcgtgcaaggggtgcagctccgcgggcgcgctcaggggggtggggccctcagggcaccgagccagggctctggggccgccgcgcgctcctagggcgcacggggacgcggggctcggatctgaaaggcggccagatccacatctggatctggatctgcggcggcctcgggcggtttcccccgccgtaaataggctcatctacctctacctctgggggcccggacggctgctgcggaaaggaaacccccyccccsacccgcccgacggcctcaggscccgcctccaagggatcangccccgcccaacggcctcatgtycccgcccccacgacttccggccccgcccccgggccccagcgcttttktgtatataaatrttaatgatttttataggtatttgtaaccctgcccacatatcttatttattcctccaatttcaataaattatttattctcca

SEQ ID NO: 44961 - DNA, 583 bp, Homo Sapiens
  misc_feature (547)..(547): n is a, c, g, or t
ttttttttttttttttttgccttgtttaaaaattgctgttagtcacagagtttgcaatctctggataccttcaaatcctagctctcactgtgggattcttgatctcagaggtgtttatttttcacagtcagcataggcttgcgccactgactcctccttcagtcggctttgcccaaaacaaattttagtattactggtattaagtttagtccagtggaattagaaggataattcaatagcaacagaaatataaattatattccattcccagagagagaatgcgctttggattgtttagtcctctgattaacgagtattttctcttcctgccaagaactaggtgaatcaggaattgattgcatatgcaagccctggccacagctgcacttacaggatgcctcatagacgatgaggggtctgaaaggccaacccgaggctggcagatctgaccccaaggaggtcctgctgcaaaccccctgagcctttgccattcactacttaccaaagtttgtttctggaggattttcctgtagctttgatagtttanaaaaaaaaaaaaaaaataggcctcgtgccgaattct

SEQ ID NO: 44962 - DNA, 538 bp, Homo Sapiens
  misc_feature (532)..(532): n is a, c, g, or t
tgataatgtgctgcaaaaaatatccaacagcactacacataagtacagagtattcacaatagtaatatgttactggaaaggccacttccgaaaagtttacattcacttggaaggctgccttaaagtatatctcttatctatgaccaaatatctggggtacttttagaagttttcagtatacccccttagagaatagcttatgagttatttcacacattcctgagcacatggctgtgtttagaatgatctagtgtaattcatacatgagctgacatacgttgatactttgacgagtaaattgtacagtcaaatgttcattgatttcatgttatttcaaagcattttcttattaaaaatatatctttagttaatcctattttgctatgctttctagtaaagtaaattcactgtagctaatgatgttacagacttacgtatacccttgtatacctgggacagggctgttttataccaataaacagcaaaatattgtccttactcattcaagaattaaaaggataaattttaaaanaaaaaa

SEQ ID NO: 44963 - DNA, 734 bp, Homo Sapiens
  misc_feature (734)..(734): n is a, c, g, or t
ggagacacctgccagagtgaagtttgattcctatgggtgagaagatgtagatgactattgttctcactaaagttctaaaataatagcaagtgtagagaagagccgttgctttgaaaatacataccacatttgttataaagcatttgtttgttatgtattaatcacataggtagaaagagtttgagttttactgtggattaaaaagccttccctaaaaagagagcatgccagtcatagagacactaatttggcacttttcctccttcttaggtttaaatgttataccaatgcatgtgtttgaaatatccattaagatgatttaaaatttgtcttgtattttgagtttcttaaatgcgtggattcttgttcatttatctctgaatatgtctcttttatattttggcacaattatacacattggaaagggccaacctattagggctcaagtatgtatatgcaaaaaaaaaaaagttatatcaaacaggcacagttattacaactagagagaaattccagaaatatttgtttttttaagagaaagtaaattttcacattagatttctatttcaagtactaatatctacatggtccacactttttctattttaaaaaattgtgttctcttgttaaatagattaacattttccacttctgtttatcacaaaaagactggtatttgaaatatgcataacgaaaaattgaaaattatattagtaataaaatgtaacttggan

SEQ ID NO: 44964 - DNA, 737 bp, Homo Sapiens
agggattccgtattgaacacactgagagtggtatgagccctcaggactgcaccacagagtaaacacaaccttgatatggtggcgaatatgtgtgtctttcttgtttcatttgtggttggggacaaaatcgatgtatttgtctaaatagtcgatattcatcttaacatggttggttgtgtaatcaccagctatattgtgaactgtgcaataaaacagaagcgtttgtgtatataattacctttggatacctgaaattcccaagcttggttacaatgtaatgctcagtataaggctgtgcaaacatgtaagggaataatggtggtcgatgggatatatgaaatgggatctagagggcttcgagtgaagccaatcatgttgaacgaacactggttcagtgtagatgaagtagagtgaggcgtatgcagtcataaaatgaagggtggacaggagattacatttgaagaaaggataagcactcagacttggtctcttttaaattaaaatatttcttttctcatgtgcaaatgtatatcaaagacttgaacaggtattctcttgaaatttgaggatttttagtttttaatgctgtctttgcttaatattaaatatgtgttgccaattggctcccaaattgtgtgggagtctctaaatgtttcctcttgaaggttcattattgaaagtggttaagtgcacaatgctatttttgtttgatagttttgagttttatgacccctatg

SEQ ID NO: 44965 - DNA, 519 bp, Homo Sapiens
  misc_feature (459)..(459): n is a, c, g, or t
  misc_feature (489)..(489): n is a, c, g, or t
gcaagaggggcatccgatccttggccgggccctggtggcctccgtggccccaagatcacaagggcgtagcgaaggcgagccggcgatcgcacctcgtcccgcccaccctgcccggactcgcaacgccgagcttggggagggccgggacgcgcagccgccgccgagcgtgaccaagtttggaaacgcgcgcggggccgggacgctggctcggggggccctgccgaggagcggtcgccccctccgctgctccccgcgccaggcctggggcctggagggaggggggggggtctccgaggagtgcctcggtaccccagctcgagttctcgacgggtctctgagccttccccgcgccaggacccggcgcactgtgggggaagccccagccccatgtctgttgagtgttgctttgttattttttttcctcctatgtgtgggttttttcttggagctgtttcatangaattcctgtaataaacagttggtgttcanaaaaaaaaaaaaaaaaaaacacttaatggg

SEQ ID NO: 44966 - DNA, 728 bp, Homo Sapiens
  misc_feature (15)..(15): n is a, c, g, or t
  misc_feature (37)..(37): n is a, c, g, or t
  misc_feature (687)..(687): n is a, c, g, or t
tttttttggccctangaccccagttttcggcacgagncgaactcctgggctcaggtgatctgcccgcctcgtcctgtcaaagtgctggaatacaggcatgagccaccatacccagcctatgctgtgactttagacaagttaggaaagtacctagcagagtacctgggacataagtaggttttctgtaaatgtttgtgacctttggctccgttgtgaggagagactgagcatacattactccacgctacaaataattaactatctatttgatttgactttcagtgtggagtgcagagctttttttctaaaagtgctaataaagccagtcctcattaaaaatatagtcagatgagtcagcaaagcaagttatttcaaaatttgaagaaatgagacaaaacaactttttgagtaatactataacctatgaaaatttggcagttagcaattgaaaaccttgtactttatcatctgtcccttaaccatggcctaccattgaggagaaaagattatagagcttgacataggccacaatgaagaggttctgaagagtcaaactattattgctttcatttcataaaccacactgttaaattcatttgtgtgtttggcatgggtgtgcacacatgtgtttcctaggttaagcatttaggaaaaacattatgaaatatgacatagacacaaaaaagnttattaaaaatttatgtgagcttggtaaaaaaaaaaaaaaa

SEQ ID NO: 44967 - DNA, 606 bp, Homo Sapiens
caagccttcttagacaccagaaactccacctgtgaagagaagcttgtccagtgtcctcattctgaagacattcaccaaatggagcttggcactaaaatttatgtaaaagaaaaatcacaaaccttgaaaaattttacatcagaaaatgggataaacatacatttcacagaaaataatcaagacttgctctgcagccactcagtagtcttctgtggtcacagaagtaaacattgttggctttgtattgatctctccagtcatttttgaacacatccaatagaaacattggcagcatggtcttccaaaacaaaaagcagtaacatgcatgtttaattgcataccattctcttcacagtagcaggcttaccaatttccatagtctcatgaggccgaaatgaattacaatgtaaagtgttccaggaaccaaattggattttctttcttttgtcattggacacggtttgcaaagttggacatcacttgagttccttcttaaacttttcggcaacttctcttggatcctgttatcacagttttttactgtgatgaaatcttgttaaccaccactagggaatctccagatgaactattaatgcactgtcttat

SEQ ID NO: 44968 - DNA, 636 bp, Homo Sapiens
tacaaaaaagcaggctggtaccggtccggaattcccgggatcttccaaggcttttttgccgctggtgtcaggagtattttcatattccaataccgataaatctttgaggtttctgggtgtctctggggagcccctgggccagattttcctctagactccagcccatctcttcagagcagctctgcttgagttcacagatgactgccaagcttcagacaccctacagaaaaagggttgagacccagtgtggccatgccagctaattggacctcacctcagaaatcctcagccctggctccagaggatcatggcagctcctatgagtgttaaccttgatgcctgaaagaactggaaattatgaagatagattcagaagtcaaatatgttaactaactgcattgaagagtagaagaaaacaatagcctagtaggtttttactgggattagtgaaacaactgctatgttctcagcaacccactccaaagccaaagtcaaaactaaaattgtaaaatatctcaaaaacaataaaaatggtatatatatatcagaagctctggtatatagcaaaactgtactaaaaataatttagaaaaataatttatctcatgcaaatgaataaaaaaatctaaatgaaaa

SEQ ID NO: 44969 - DNA, 497 bp, Homo Sapiens
cttgaatttctcaggttttggacattcagagagatgaattgtgagaacagcaaagaaatccatcagaaaaacagaaagaggcagacgtttcccagggcgttcaggcagccctgatggaccgaaggctctggtgtctggtttggccccacagcagtgtgggccgatcctgtttacctcatacatccctgcactgtgtgttttcatttttgtctgctttagttctcttttattttctattcaccacacactcaccactcccagcttctcgtgtccagtgaaacccctgaaccaagatcactgaatttttgtttttttcttgttgctttgggaaatttttttttctctgtagggtttttaagaggtttcgggggttttgttgtgtaaatattctattttattcttggggggatcaaaccttaggaaaaggatatctatatatctatatagctatatatttgtgttccttcagggaaactggtcttgaaaaagcaagaaaa

SEQ ID NO: 44970 - DNA, 686 bp, Homo Sapiens
  misc_feature (32)..(32): n is a, c, g, or t
  misc_feature (640)..(640): n is a, c, g, or t
  misc_feature (645)..(645): n is a, c, g, or t
ccgatctctgtttctctggaggaagccaaggnacaagagcagttgctgtggctgggactctgccttttaggggagcccgtgtatctctttgggatcctgaaagggggcaggaaaggctggggtcccagtccatcctaatggtatctgagtgtcctagggcttcagttttcccacctgtccaatgggaccctttctgtcctcaccctacaaggggcacaaagggatgacaccaaacctggcaggaacttttcacgcaatcaagggaaggaaaggcattcctggcagagggaacagcatgccaagcgtgagaaggctcagagtaaggaggttaagagcccaagtattggagcctacagttttgccccttccatgcagtgtgacagtgggcaagttcctttccctctctgggtctcagttctgtcccctgcaaaatggtcagagcttaccccttggctgtgcagggtcaactttctgactggtgagagggattctcatgcaggttaagcttctgctgctcctcctcacctgcaaagcttttctgccacttttgcctccttggaaaactcttatccatctctcaaaactccagctaccacatccttgcagccttccctcatatacccccactactactgtagcncctgnccttccctccagcccccactctggccctggggctggggaag

SEQ ID NO: 44971 - DNA, 574 bp, Homo Sapiens
aatccatgcttctcaagtcccttatgtaaaatggtgcagtatttgcatataacctacataccttctcttgtgcaatccctaatataatgtaaatgctatgtaatcgttgttatactgtattgtttttatttgtattatgttttattgtcatattgttattttctctcatctttttcaagtcttttccatccacagttggttgaatttgtggatgtggaacccatggatacagagggccaactgtatttaggataatttcatcacttttaattcaaaccagaatatgtgaataagcagacagaaagaatctttttgatgtcgatgttcaactatttttggcaccatagtagaacatggttgctttctattttttcttgggtatggaggtttcttgaagacctagaacatagaagaatgcctagttaaaaaaaaaaatcaatgaaactacgagttttaggccaaatctgagaaaagaccaaagatgactatgtttgggactgaagtaaacatatcaagttagaactctcatcacatgtttgactcaaattgtggagcaaaatagtaaataaaatat

SEQ ID NO: 44972 - DNA, 597 bp, Homo Sapiens
atcggcagctcgctcctctttgtgcacgatcactgccatcgcgccggcgtgtggctcatcgacttcggcaagaccacgcccctccccgatggccagatcctggaccaccggcggccctgggaggagggcaaccgcgaggacggctatttgctggggctggacaatctcattggcatcctggccagcctggctgagagatgaggctggactcctgtccccgcgggccgctcacctgacatgtggacctgcagctttgtccccactgtgcatgccggcttgagactggagccccgcggtgcagggcagttcaccgggtcctgcaggaccaggtgccagccactaagggggggcaccgcgatgccagggttttgcccacccgggccccagcgttcccagagccaaatgacactaacttatagaaggggagggggcaaagggcttcttcctcaggccagctcttctgaggaggctctgccctctccagaggtgccagaccgcggattttatttagcaagcccagaccttccggtctaacgtctcacaccacgacggactccccttcctaataaaactcaaagacaagagaaaaaaaaaaaa

SEQ ID NO: 44973 - DNA, 688 bp, Homo Sapiens
aaaaagctgcaaataacattttcaagaatataaaaaaatgagtaaacaaagggaaggttgtttggtcctttatagacaattaagcacagactgtagatgtccttccaattcttgggaggctaaactgagtctaccatttcttacatttcttttacctattttttgagaattgccagttgtacagtgtttagcatgtggaatgtaccaaatatatctatgttgtgacttaagatattctaaatgtggataacttctgacctaggaaacatgaagtttgtagtgaagtaagtgaaaagaatgttcaggaaattttttttctccatctcttcagttggcatttattgagagttttatttgaatgcttattaaaagtatatgatttataatatttagaaaatagaagaaaaaagaaaactgtagatgttttatcttgttttaatactgtatgtttagtacgtatacatttatgttctagtgtatcaaaatttttcattttcattaaagtgaatccaattttccatattctaggtccattttaaaccatgaaaactttaatcacatattttgtaaagggctgaaagtatgatttaaactacagattgatatattttaattctaaatgaaaggtaatgtaaataagcatggatctgattgaataaagattttaaaatagaaaaaaaaaaaaaaa

SEQ ID NO: 44974 - DNA, 655 bp, Homo Sapiens
gctgatcaagacttttcctttaaagctggccagtgggttgatttctttattccaggagtctctgtggttggtgggttttcaatatgctccagtcccagactgctagaacaagagagagtgatagaattggcagtgaaatatacgaaccaccctcctgccctctgggttcacaatacgtgtacacttgactgtgaagtggctgtgagagtgggtggagagttcttctttgaccctcagcctgcggatgcctctagaaacctcgtgttgattgcaggaggagtcggaattaaccctctgctttccatcctgcggcacgcagcagatctcctcagagagcaggcaaacaaaagaaatggatatgagataggaacaataaaactattctacagtgcaaaaaataccagcgaactcctgtttaagaaaaatatccttgatttagtaaatgaatttcctgagaagattgcatgcagtttgcatgttacaaaacagactacacaaatcaatgcggaactcaagccatacatcacggaaggaagaataacggagaaggagataagagatcatatttcaaaagagactttgttctatatttgtggcccacctccaatgacagactttttctccaagcaactggaaaacaaccatgtacccaaaa

SEQ ID NO: 44975 - DNA, 601 bp, Homo Sapiens
cgcgtccgaaggaatcacttttatgagggctaaagataaagaatttggccagaaaatgcagccatccttgtgtgattaggagggtttcaggggccactggactatttgcaaggtgacagggactggagccatggctcagaggtgattcgggcagccagggacaggagccaccctccccaggcccaactctgctagcttcccagaccacccccatcgagtgcggagagagtgggagtgctcagggaaagaaggtgatttgtatttgtctccccgctgaaaagaacaggattcaagtccagagttttcatcttcagcctgtgatctgtccagggacccttgggatctggggcttcctggcctggccagagctggagcccccacagggtaaggaagagagagtgggaggcagagtgtgatggggaggagggacaggaagacccttttaatgatgagggtaactatttcagttgtgagccttctagggccccaggctgggaggctcagaggactgaatctgggacctgtgttccccccggcaggcagggacaagatggcatggcaagcatgggggcggggtgggtggggaagggatgctgcattt

SEQ ID NO: 44976 - DNA, 862 bp, Homo Sapiens
aatccaaacctcagcatatatatgtcccaaacaattatctagtaccaacagagaagaaaaggtctgcactccgttggggtgttcgttgtgaccttgcaaatggtgtcatacccaggaagcttcccttccctctttctccttcttaaatctttttaaacttctttcacaggattgtttgagataacctagctctttatatcttcccttttaaatagaaacaactgtcttgagaagctcttcgaaacattttatggtaaggacttcacctatcattggtctttcctagctatatatcacattggtatcagatgatacttccaaattgccactcaaatccagcaattgcaagataaatcatatcagagaaagaacaacagacctggtctttctattttgtcaaattagtaagggccctttgtgtcctgtaactttttttacctatcaatatgagttgctgtgcttcagtgtgtgttttttaagttgctgggcattacacttaccaattaaaagaattttggaaattcaaaaaaacaaaaaaaaggccggccgccaagtcttctaccaccacgatggtcacctatggagccagggatacttgttcgatgggatctcgcctgggcaaaatgcattcctcctcaagtaaccggagaccttgcctggagcccacgacaagtgttggtccagtcatggttgcgaaaaggtaagagcctccctcaatgcaaaaatcgagtggctgcaacgcaggatgaaaactcggggtaaataggatccacacgaagaacgtgacacatatcgaactgtagacagaagagacaacaacgaaccattgcaactatcaattagacttatagataccatcacc

SEQ ID NO: 44977 - DNA, 594 bp, Homo Sapiens
aaaatacagcagaacctcactgtagcattctttactgcagagcaaaattcaatttaagatgggcttctctgaggtccacatcatggcagttcatttactcttgtgccaaatggcaacaccacgtctaaagcagtttcacagcatggtcccctacaatgttataccaaggctctgatgtatttcttttagtagtttctaagtgtaaaatttattctaaatgtttttatggctattatctatttcatcagttattgaattaagaatgattttcattacttgagtgggatttgtgatttaatgacagttgaataatcaaaaatattttattaggcccccaaaatttaatagatatctatttctgttacattttattactgtatggcacaagaaagaagtgacattgggtatgttagaaatgaaataaggagtaaaaatgcattaccatttgtttaataattatctttacagaatgctagtttaatgacttttttaactgaattttttgaataaatcagaaatgtttgtattggtcacagatctatcataattgcttttctgatgcatttaaaaataaatggaacacttaaatgtaaa

SEQ ID NO: 44978 - DNA, 697 bp, Homo Sapiens
acaggcagacccatactggcactgacatggccgtcttctgtctgctgtgtgggaagcgcttccaggcgcagagcgcactgcagcagcacatggaggtccacgcgggcgtgcgcagctacatctgcagtgagtgcaaccgcaccttccccagccacacggctctcaaacgccacctgcgctcacatacaggcgaccacccctacgagtgtgagttctgtggcagctgcttccgggatgagagcacactcaagagccacaaacgcatccacacgggtgagaaaccctacgagtgcaatggctgtggcaagaagttcagcctcaagcatcagctggagacgcactatagggtgcacacaggtgagaagccctttgagtgtaagctctgccaccagcgctcccgggactactcggccatgatcaagcacctgagaacgcacaacggcgcctcgccctaccagtgcaccatctgcacagagtactgccccagcctctcctccatgcagaagcacatgaagggccacaagcccgaggagatcccgcccgactggaggatagagaagacgtacctctacctgtgctatgtgtgaagggaggcccgcggcggtggagccgagcggggagccaggaaagaagagttggagtgagatgaaggaaggactatgacaaaaaaaaaaaaaaggggcggcggtcaaagtat

SEQ ID NO: 44979 - DNA, 634 bp, Homo Sapiens
cggcgatagccgtgtggacggtgaccggctcactctgcggcgccgtgctcccgctgctcacccaaagaggttgtttccattttaaaccggtcttttggggctgcagtaaaaaataagaaatggagttttcttgctttttactctaaaattcaatgtaattaaatttcatatatatataatatatacatatatacatagtgtaaaataaaatgtttcttggacaagaaatcccctgaaattcagctgttatagtgcttcactgtttttgcactgatttttctataccttaggtggtcagaagacaaccttgaatgcactcatagagaaaactgttactttctgacgtaatgtaattcaggaagacagacgctgcaatcacagattttaaaaaattgtttgcacttaaaaatagttgaatgctggtggaaagttactttgcagatgggtgtaaggactcatggccctctgaggtgcggcgtgaagatgccctttttacccgttgacgtttattttacgtaaaataaactgttgtttccaatgcaatcaactctgtattatatgtataaatattgtaattctgcaattggggaaaatagttacttcactagtaattttcatcatttaagagtgatat

SEQ ID NO: 44980 - DNA, 867 bp, Homo Sapiens
atcaacagtaaaagcaatgatgattaaggacttctttcaaattgagagaatggaaaacagactcaggttgtagtaaagaaatttaaaagacactgtttacaagaaaaaatgaattttgtttggacttcttttactcatgatcttgtgacatattatgtcttcatgcaaggggaaaatctcagcaatgattactctttgagatagaagaactgcaaaggtaataatacagccaaagataatctctcagcttttaaatgggtagagaaacactaaagcattcaatttattcaagaaaagtaagcccttgaagatatcttgaaatgaaagtataactgagttaaattatactggagaagtcttagacttgaaatactacttaccatatgtgcttgcctcagtaaaatgaaccccactgggtgggcagaggttcatttcaaatacatctttgatacttgttcaaaatatgttctttaaaaatataattttttagagagctgttcccaaattttctaacgagtggaccattatcactttaaagccctttatttataatacatttcctacgggctgtgttccaacaaccatttttttttcagcagactatgaatattatagtattataggccaaactggcaaacttcagactgaacatgtacactggtttgagcttagtgaaatgacttctggataattattttcataattcatggactttcacccatctttctttctggcatatctcctgttgctccacgtacggctatatacttgtaccaattcttcataatctattcttcctattacagacactttatcaaggcataccaggagaaacttcaaatcctggcaaatttcgggaaacaagat

SEQ ID NO: 44981 - DNA, 491 bp, Homo Sapiens
ccaaggcctgtacaactgtggcctctccagagaagtggttctcagccttgactgcacactgtaatcacctggggactttaaaaagtactgaggcctggggcccacccacaaatgctgatttaactcctccagggtggggtctgggcagtggggaggcaggagccacccaggtgattccaatgataggtgtaggttgagaagcgccaccttccagcttcctaactggctctgggaggggagctgggtgggaagttcaggaggtgggaactttgtacacgcagagcacctggagcacctacagcatggctgtggttccacactcctctgtcatttaaccttcacacatcacctcgttctgacatcaagggtgcgtcacagccacagtgaggcctcgcctgggcagagcaactctgggtgccccactgggtccctcccacaggggcaggcaagcctaatgggaacccgaggcaaaaggaaacatcagtaatacg

SEQ ID NO: 44982 - DNA, 612 bp, Homo Sapiens
cattgaactaaaataattttattatgcaaccagtttatccaccaagaacataagaattttttataagtagaaagaattggccaggcttggtggctcatgcctgtaatcccagcactttgggaggccaagggtaggcagatcacctgaggtcaggagttcaagaccagcctggccaacatggcaaaaccccatctttactaaaaatataaagtacatctctactaaaaatacgaaaaaattagctgggcatggtggcgcacacctgtagtcccagctactccggaggctgaggcaggagaatctcttgaacctgggaggcggaggttgcaatgagccgagatcacgtcactgcactccagcttgggcaacagagcaagactccatctcaaaaaagaaaaaagaaaagaaatagaattatcaagcttttaaaaactagagcacagaaggaataaggtcatgaaatttaaaaggttaaatattgtcataggattaagcagtttaaagattgttggatgaaattatttgtcattcattcaagtaataaatatttaatgaatacttgctataaaaaaaaaaaaaaaaaaaaagagaaaaaaacaaaaacgggggggg

SEQ ID NO: 44983 - DNA, 871 bp, Homo Sapiens
cccacgcgtccgctgcccctgcgggctggtgaccgccttcgtggcatgcgaggacggccgcagccacggaccggtgcgcttccacagcgtcccggccttcgtgctggccacagatctcatggtggatgttcctggacatggaaaggtgatggtggacattgcatatggcggtgcattttatgcatttgttactgctgaaaagttaggactagacatttgttctgcaaagaccagggaccttgtggatgcagcgagtgcagtgacagaggcagtgaaagctcagtttaaaattaatcatcctgatagtgaagaccttgcctttttatatggaactatattaacagatggaaaagatgcttataccaaggaaccaaccaccaacatttgtgtttttgcagatgaacaggttgacagaagtcccactggctcaggagtgacagcccgaattgccttacagtatcacaaagggcttctggaactgaaccagatgagagccttcaaaagcagtgcaactggctcagtattcacagggaaagctgtgagggaagcgaaatgtggtgattttaaagctgttatagtggaagtatcaggacaagcccattacacgggtacagcaagctttataatagaagatgacgacccattgagggatggatttcttctcaagtgacttcttccatgattttaagggctttctttttaaagtaatcattatcccttaaggactggtttttctctaaattatatgaaaaaccaataaattattacctataaaaaacacaaaaaaaaagggccgggccggctcctagagttatcccttcccagggggccccaagccttaacgccgtacccccgccttttcctttggacc

SEQ ID NO: 44984 - DNA, 550 bp, Homo Sapiens
gaaatataccctcctatgtacccatctgtcttagtgtttgcgtctggggtgtgttatcaaacagagcatggtctacatcccactgtgtcaaccagaagagccaagtgttatctcaattggcccagtgtttctccaggctggggactgttaagggctctaagggaatgtagacagagtctccctgttattctgacttcctgcttgatgagctttcagttcctgtttttgctattgtttcctaaatttgacctacatattacatgggtgtagtgtgttgaggcttttcaaagaagggtctagtgagctaagtttcatcttctggtactcattgatcaaactgacctttctattctcataagcgtttctacccaaagttgtgtgtggaaggagtgtatagcaaagaggaaatccctttcaacagagtcagctgctaactgatttcctataagcacactggattaagggcagccacagtggtttctactgtatgtatgaaccgaatggaggaatgttttcaaagattgatttggtgtggattgcaattgtaatg

SEQ ID NO: 44985 - DNA, 715 bp, Homo Sapiens
aagcggaagcagaatgaggctgccaaggaggcagagactcctcaggccaagaagataaagcttcagacccctaacacatttccaaaaaggaagaaaggagaaaaaagggcatcatccccattccgaagggtcagggaggaggaaattgaggtggattcacgagttgcggacaactcctttgatgccaagcgaggtgcagccggagactggggagagcgagccaatcaggttttgaagttcaccaaaggcaagtcctttcggcatgagaaaaccaagaagaagcggggcagctaccggggaggctcaatctctgtccaggtcaattctattaagtttgacagcgagtgacctgaggccatcttcggtgaagcaagggtgatgatcggagactacttactttctccagtggacctgggaaccctcaggtctctaggtgagggtcttgatgaggacagaagtttagagtaggtcctaagactttacagtgtaacatcctctctggtccttttctgtgttcctagttttgtacagacttgtttttgagtgttgagtagcagggacaaaataagggaatgttattttttaagaaaattcattttcattgttgtctccttccttttctgtgaaagtcctcatactgagaaatttgtatattttatattaaatcacttactattgatttttgttgtgattttcaaaggtggattcccacaga

SEQ ID NO: 44986 - DNA, 733 bp, Homo Sapiens
ggctggaccggtccggattcccgggatgaggtttttccatgttggtcaggctggtctcaaactcctgaccttaggtgatcgcctcggcctcctaaagtgctggaattacaggcatgagccaccatgcctggccaggacatgtgttcttaaggacatgctaagcaggagttaaagcagcccaagagataaggcctcttaaagtgactggcaatgtgtattgctcaagattcaaaggtacttgaattggccatagacaagtctgtaatgaagtgttatcgttttccctcatctgagtctgaattagataaaatgccttcccatcagccagtgctctgaggtatcaagtctaaattgaactagagatttttgtccttagtttctttgctatctaatgtttacacaagtaaatagtctaagatttgctggatgacagaaaaaacaggtaaggcctttaatagatggccaatagatgccctgataatgaaagttgacacctgtaagatttaccagtagagaattcttgacatgcaaggaagcaagatttaactgaaaaattgttcccactggaagcaggaatgagtcagtttacttgcatatactgagattgagattaacttcctgtgaaacccagtgtcttagacaactgtggcttgagcaccacctgctggtattcattacaaacttgctcactacaataaatgaattttaagctttaaaaaaaaaaaaaaaaagg

SEQ ID NO: 44987 - DNA, 556 bp, Homo Sapiens
  misc_feature (452)..(452): n is a, c, g, or t
  misc_feature (538)..(538): n is a, c, g, or t
tctctcatcacgtggcagcatctttttaaaggtgtgatgatctgaagaatcatgaaactctgcggggtttcctaggttttcagctcctcagtagtgacaaagccatacccatcattgtcgattcgatcaacaatcttccctagcctctccttgctctcgtccggggtgagctcgtcgaagttcttggagtcctccttgcccaggaaggcctcgtggtcgtactggaagctctggttgtcctcagggggccgctcgcccagctccgagtcgggccgcaccacgcgctctttgcgcaccgtgggcttggcccgcagaacccgcggcgccagcaccagcgccagcagcagccccagggctaaccccaggcggccaccgcgcgccatcgtcccgaggagagggcggccgggagggagacgctgagcgagcgacaacagcggcagctcgggaatggnggctcggagcgcggcgggcaagttttatgttatgtatattttacaagtaaaaaaattttttcacctcagcctgaactgaacactanaaaaaaaaaaaaaaaata

SEQ ID NO: 44988 - DNA, 887 bp, Homo Sapiens
  misc_feature (763)..(763): n is a, c, g, or t
  misc_feature (781)..(781): n is a, c, g, or t
  misc_feature (852)..(852): n is a, c, g, or t
  misc_feature (873)..(873): n is a, c, g, or t
  misc_feature (885)..(885): n is a, c, g, or t
gtggcccgaaagctggaactcaccaaagcggagaagcacgttcataacttcatgatggacactcagctcaccaagcggatcaagaatgctgcagccaatgtccttcgggaaacatggttaatctataaacacacaaagctgctaaagaagattgaccatgccaaagtgaggaaacaccagaggaagttcctccaagctatccaccagttgaggagcgtcaagatggaacagaggaagctgagtgaccaagccaacactctggtggacctttccaagatgcagaatgtcatgtatgacttaatcacagaactcaatgaccggagcgaagacctggagaagcagattggcagcctggagtcgaagctggagcatctcaccgccagcttcaactccctgccgctgctcatcgccgacaccctgcgccagcagcagcagcagctcctgtctgccatcatcgaggcccggggtgtcagcgtggcagtgggcaccacccacaccccaatctccgatagccccattggggtcagctccacctccttcccgaccccgtacacaagttcaagcagttgctaaataaatctccccactccagaagcattacccataggtcttaagatgcaaatcaactctctcctggtcgctttgccatcaagaaacattcagaccagggaacggaaagaagagagaccgagctaattaaccatgttcattcagcgtgcttggtccgacatgccttgaaaccagaaatctaatctctggttangtgcctctactttggganccgggaagaagagatgacaggaacgaccctttgcaaggcccttgcttgaaaattggtggagaacagaaatncacgctcaatctcaggtcttnaccccggggggngg

SEQ ID NO: 44989 - DNA, 913 bp, Homo Sapiens
  misc_feature (38)..(38): n is a, c, g, or t
tccccggaatatcatactgacctggcgtcaggatgggngtatctttgagccacgacacccagcagtggggggatgtcctgcctgatgggaatggaacctaccagacctgggtggccaccaggatttgccgaggagaggagcagaggttcacctgctacatggaacacagcgggaatcacagcactcaccctgtgccctctgggaaagtgctggtgcttcagagtcattggcagacattccatgtttctgctgttgctgctggctgctgctatttttgttattattattttctatgtccgttgttgtaagaagaaaacatcagctgcagagggtccagagctcgtgagcctgcaggtcctggatcaacacccagttgggacgagtgaccacagggatgccacacagctcggatttcagcctctgatgtcagctcttgggtccactggctccactgagggcacctagactctacagccaggcggctggaattgaattccctgcctggatctcacaagcactttccctcttggtgcctcagtttcctgacctatgaaacagagaaaataaaagcccttatttattgttggtggaaggttgcaaatggtagtaaatatgaaggatttggcgctgggccattattaattgggggccattggtttttggcggatttcgaaataatattttttttttttaaagaaagagtcccaggccaaggcacggggggctcaagcccgggaatccccaccccttttgggaaggccaaggggtcggcgaatccccaagggccaaaagaaagcaaaccctccccggattaaacatgcgggaaaacccctggtctgtgcctaagaatatcacaaaaattttattctcggggcctggcaaggcgctatggcccttgtggaccccaaactcg

SEQ ID NO: 44990 - DNA, 490 bp, Homo Sapiens
ttccttcaaggaactgggtgcctccttccgtcaaatatcaggaatggaaagaactgagcctggtcggctgaggccagtcctgtcctgtcagggtcgagattgcacgcgggtcactcattcccactcaggcccgcgctccctgggaggaccctcgtaatttatgctctgccctagagccgctttcctggtaggatcctttcatggcgtcttcccaggacctcctgccagctcccattgggagttttgggtcccctccaccccagtaggtgcatacttctgccctccccagccccagctcacaccccccaacacccccaagctggtgagtgaggtggaggagctgtacaagtccatcacagcgctgcgggagaagcttctacaagcggagcagtccctgcgcaacctcaaggacatccacatgagcctggagaaggacgtcactgccatgaccaacagtctcttcatcgaccgccagaagtgcatggcccat

SEQ ID NO: 44991 - DNA, 752 bp, Homo Sapiens
  misc_feature (715)..(715): n is a, c, g, or t
  misc_feature (722)..(722): n is a, c, g, or t
tcacacaacaaactacaagacatcccatataatatttttaatcttcccaacattgtagaactcagtgttggacacaacaaattgaagcaagcattctatattccaagaaatttggaacacctatacctacaaaataatgaaatagaaaagatgaatcttacagtgatgtgtccttctattgacccactacattaccaccatttaacatacattcgtgtggaccaaaataaactaaaagaaccaataagctcatacatcttcttctgcttccctcatatacacactatttattatggtgaacaacgaagcactaatggtcaaacaatacaactaaagacacaagttttcaggagatttccagatgatgatgatgaaagtgaagatcacgatgatcctgacaatgctcatgagagcccagaacaagaaggagcagaagggcactttgaccttcattattatgaaaatcaagaatagcaagaaactatataggtatacacttacgacttcacaaaacctatacttaatatagtaaatctaagtaaacatgtattactcaaagtaatatatttagaattatgtattagtataagatcagaattgaatttaagttgttggtgacatctgcatcatttcataggattagaacttactcaaaataatgtaaatctttaaaaatataaattagaatgacaagtgggaatcataaattaaacgntaatggnttcttatgctctttttaaatatagaaatat

SEQ ID NO: 44992 - DNA, 605 bp, Homo Sapiens
  misc_feature (597)..(597): n is a, c, g, or t
  misc_feature (600)..(600): n is a, c, g, or t
  misc_feature (602)..(603): n is a, c, g, or t
  misc_feature (605)..(605): n is a, c, g, or t
ccggaccaggtctcagaatgtatatttattccgtgccattaaaagggacctgaacaaaattggatgtcttataggcataagggaggaaaataaaatatacttggaaccaagtctatgtcatgaagggaaaataaaaatgtattcagtagcacgtgggttatggtttctcatagaccaggggataagattaaaagtcactgaagagtgggaaaatgcatgttgagaagatgagaatggcctgtattttctccaggggaatctgtgtaatgtgccttttccctctccaaatgcctagaaccatggcactgtgtcttatttatttaaccgttgggctgtctcatactaaacttgcaaagatatttgcctatgaactgaacaagacttccaggagttgaagtctggttcacaagggtaccccttgcctcctgtgatggagtgagaactcttaaacccctcaggccccaactcagttgtggagatgaggacaagattacaatatcaaaagaaagatgaatgaattcttggttaatatgacgaaccccagctcaatgagtaactgatgtgaactgctgggaataaaggacttcaaagatgggnaanannan

SEQ ID NO: 44993 - DNA, 505 bp, Homo Sapiens
ccccctggcctgtgcaagccctgactccctcatggtgcctcggagagtggggagcatattgggctggggtaagcactagacccaagtagactggacacaaagggctcgcccagggccctggcgccacccccaccccttcccaccagctgctgctagcctctgtggttgtacatcccacttgcccccacacggagactgactctaaaacccttcatccaatggtgctaacccccggctctcccctgccccacctcacccacccagagaagcacagaccccgccaggggcaggggcccaccgcacacccttgtcccgggcctgtctgggactggccttcccggctcagccagtgaggctcagaagggacacaaagagggatggaagaaaagaacaaagagaaactgttcctcccacccccttccctgatgccaggggcaccagactgattctgaggcacaaataaaagaggcttcataccggaaaaaaaaaaaaaaaaaaaaaggac

SEQ ID NO: 44994 - DNA, 519 bp, Homo Sapiens
gcggccgccaacttcaacaatggcttgcagctgtaccctgttggctgcacccaggacgcccttttcactgctaagcagtcctacctgaggcccaggggctgccagattgacccataaataatctccggcgcctcagatccagaagctgctgagcctgatcttagtgccttctcctttctctgtgtggccccccagcccctttccccactgccttgtgtccaaggccctttccttcatgtatccatggaggagagacaaaaatacacatcaataaaataagatagggaatccataaatagacattcagaagtatggccaacggatttatcttaaaaccaatggaggaagaagagtttcaataaatgttgtggacttccatttgtcaaagaccaaaacaaaggaaccccaaccttacatgtaatacaaacttaactcaaaatggatcatatatctaaatgtaaaatggaaagctataaaactgaaaacagactatctttacaacctaggcgtaggtatagt

SEQ ID NO: 44995 - DNA, 588 bp, Homo Sapiens
agagatggatctgtctgtagaaactctgttcagcttcatgcaggagcgccagaaaagatacgccaagtatgccgagcagatccagaaagtgaacgagatgtccgccatcctccgccgcatacagatgggcatcgaccagactgtgcccctgctggacaggctcaacagcatgctgcccgagggcgagcggctggagcccttcagcatgaagcccgaccgcgagctcaggctgtagctgccgcccggcctgcctggggctgggagccccagacaccgacaccctgaggacgtgtggagctaaggtcatatcatctgaccaggtctggaggctggcgggaggctccctgaaagtgggtgcgaaggagtccggctggcatgaaaatctgactttgcccagctcttttccttgatgcagtttcccggtgtggaaggaacctaaccagttctcggtgataactgaagctggaacgtgtgaattattaggaattctttgaagaactctgcattgagaattatttttatttagtttttttttttttttaattgagagtatatagtccagtccaggtaccggaataaaaatatgga

SEQ ID NO: 44996 - DNA, 643 bp, Homo Sapiens
ataacatcatggaagcggctgatcttttacataaaccatgacttcaagctggagagagaagtctggaagcggctacacgatgaagggataatccggctgtaccagcgtcctggtcccggaactgccaaagccaagaactgaccggggccagggctgccatggtctccttgcctgctccaaggcacaggatacagtgggaatcttgagactctttggccatttcccatggctcagactaagctccaagcccttcaagagttccaagggaacacttgaaccatggacaagactctctcaagatggcaaatggctaattgaggttctgaagttcttcagtacattgctgtaggtcctgaggccagggatttttaattaaatggggtgatgggtggccaataccacaattcctgctgaaaaacactcttccagtccaaaagcttcttgatacagaaaaaagagcctggatttacagaaacatatagatctggtttgaattccagatcgagtttacagttgtgaaatcttgaaggtattacttaacttcactacagattgtctagaagacctttctaggagttatctgattctagaagggtctatacttgtccttgtctttaagctatttgacaactctacgtgttgt

SEQ ID NO: 44997 - DNA, 582 bp, Homo Sapiens
atttggggaactttcaactattatttcttcaaatattttttcaccccccagtcttgtcttttttagggacttcaataacatgagtggcagatcttgttttacactcccatgggtccttcaggctctcatcttttttctttttccagtctattttctgtcttgttaatattgattaatttttattgaccttccatggtcctcactgattgttttctttgtcatacctaatctgttgagtttgtgcagtgagttttcattttggttttgtattttccagttgtttaatttccattgggtgggttcttttgtacaccttctgtttctttgcttattttttaacgccaaagaaagactctcagagaatagacaactatattccaaagtcatggttctctggtggtttgtcttgacatttgaatagaaatgttaaactatctgggggaatagaaagcccacagtcttctgagttgtgctacaccaatatttctatgaacagatcttacaactgagagtgatctgcagatttttcagagtcatgttctccatggaaatgtttgtaaaattccctagctctctgcactg

SEQ ID NO: 44998 - DNA, 885 bp, Homo Sapiens
aagaggtaaaacagaaatggaatgtatctggaacatttttggcctccatagtgcagatatactatattaacaagtaatacatttatttacctgtcagatctccaggttttaagattttgagctttctagtattaggattcattaaatgttcaattcatttcatattctaaggaattaggttatttacttactaattcaggatgttaaaataacatccaagtcggacaaccaccaccaatgcacacagttaatgagatttctaaaatataataagtacaatgtaacaaacgtatagaattttgcatttgttgccaaaattagatgtttaatgacagcttatttagttcccatttgtgggacttctggaacatagaaaccattatcttacctggttatcccttgactaaatagcatatctgcaggaaaatatcttgtttgtagtgatatgccccaatagtgattgatttcactcttgaaatgagttatatcacttaatttgtataaatgttatgagtggagagacatgtacatgttaaaagcatgttgcattatatattcattttttaaactctataaatgttaagaataatataattgcagaaatatttttcttaaatacaatgtgtaacaaaattctccgtagcaactcacccactttgcagtttatgtgatccacacttttaaagaaattccataaatgtatattttgtattatggattatttcctggtccaaagaaaatatgtgaattcagttctaactttaagaatgtactgtttgttttcaagttcattgaaaaattgcattcagcctgcgaatggttgcagattgtatgttagatgaaaagtagaaataatttctagtttggaaaactggtgcccctaaa

SEQ ID NO: 44999 - DNA, 724 bp, Homo Sapiens
  misc_feature (582)..(582): n is a, c, g, or t
aacgaggcacacccccacccagcccctatttggacctaaactgtgccatttgaacagtcacttccaagctcagtctaaatgaaaccgaaacgtgaccacgcacaaaggcagtcactgcctcgaggggtgcagaccgcagaattttcacagcaggggctcttggaactctggaaacccccttcttaaatttgggaggaggagtatgcctttggtgtccccctcccaaggggcaattctgaaccccatctttggcaggcatacatatttcactgtttccaaagctatctactctgccaaacaacacccagtcctattccaaactctcaacgattctatcttgttcctgtttttctatgtatttatggttgccgtttgtgtctgatttgattttactgttttttccctgattttatggagtagcattgtgacctgttttcctttgtcttatataactttagtaaactaaccactgtcaatgattgagggcaggtggcacgtggggaagaggggacttggcacgcagtggctacctgggcatttgtggtcatttcagtttccatctccccagcgggggctccctgngtgaaggccacagtattttgggtggtaggcaattgcacattctgacatgcctgagaaggcctctctatagatctcagacaatctagacaagaccagcagacagtcccagcccgctgaagatcgtctcatctcccaagactgc

SEQ ID NO: 45000 - DNA, 601 bp, Homo Sapiens
gatgattatcatttcaggtagcaaggatatgtatttactatgtggggaaataatttgcaactttaatttgtttccaaagcattttgattggcttccttttcctttaaaccaaaaaattgtttaaatgttataagggtcatgtggaacagctgagcttctggcaggaccacagaactgtcctctgagtctgagggctgggcagtgccacaggacagtccctgggctgcaggactgtcagtgcttgttgtgtgaggaaatgaggcccttcaaaaacccagtcatcttgacagagggcacactcccaaggaaggcctgactggggaatcatacagcctctcctccaggcctctgggctcactgaggtgcccccagaaccctgattgccctcccctctttcccttttcccattcatcacacagctagaagcactcactagctaacagctcagctggggcagcagcctccatggaggcctgcaagtgatgctcccagtcctggttcccgctcaggagggaggccccaccacgtgcatcactgcctcagctctgcaaagtcaccagaggcttcttcctgatttttgtgaaagatttattatatggca

SEQ ID NO: 45001 - DNA, 686 bp, Homo Sapiens
aaataatgtctcaaggactaaaggagcaattcaataggtttagacattgtagctctctacatcttgaattggaagctggaataaagagcccccaccccccccccaccctcatcgaatgctgcttactttgtcaaaagactggctatgaccaaggtgaggatatttctggaaaactgggcaaaaagggaaagcccacagtattcttccttggcagtcaaccacaggtttactttacaatgatgtattaaaaacttgcagcttgaaaaatggaatgcaaataaaaggttctctttgggtttgtcttaatggagttaaactggagcagcctataaaacatttttagggtgatgtcctctgggtccttctgttctgcacacccactcagtcttctctcccagccccttgactgcacacacccctctttgcctgaagatctcctgacttgtcgccagccatagaggctcgaaagctctggttgtgaagcataacgcaatgcatagacctgtcagccataaaaaaaaaaaaaaaaaaaaaaaaaaaagcgacttggataacttgtatgccttcttttgtatcaatgtaccaattgtaaataatgctgatcaacctttgtagagaatagtttatacagcatattctattattgctgattctcagtgaactcttgttttaaaaaaaaaaaaaaa

SEQ ID NO: 45002 - DNA, 661 bp, Homo Sapiens
  misc_feature (550)..(550): n is a, c, g, or t
  misc_feature (639)..(639): n is a, c, g, or t
ggcgggatgactgggggcttctccctctgaacctgggtccagtgtagcctggctctgagagaaggtggtgagcatgtggagaaggttccatagtccactcttaggggaaccagcaaagcctcatggcagttggctccatctggacctcccatggtcactacaggatggtggagcagggggcatcttttagcctccccccgccaccacatccaggccctctcaggcacctcctgcctcagcccacacctgcctcacccattgcccccctccccccacctactgccatcccactcctctgccagccacttcccagccgccccaccccactccatccaccaaatcacctcctgacttaatcctttctggaaggagctgccgcccaggaaccggtattgcctagagcctccaggaggggccctcctcaggcctccagtggccccatgcccacctgcctgaccctccactgcccctggaagcaaagtgcctatcagcagcgttgcgtcctctggggcccccggtcgggggggagggggtgtgggctaaccttggncaccaccacaaaaggaatgtgccagaatgctgaaccttcttgttaatgctatgaccgtgccttgaataaacaagtcctcccaacctcanaaaaaaaaaaaaaaaaacgcgg

SEQ ID NO: 45003 - DNA, 904 bp, Homo Sapiens
  misc_feature (824)..(904): n is a, c, g, or t
ccacgcgtccggctgatgacacgttcaccccagccttcgttagcaccgtgggcatcgacttcaaggtgaagacagtctaccgtcacgagaagcgggtgaaactgcagatctgggacacagctgggcaggagcggtaccggaccatcacaacagcctattaccgtggggccatgggcttcattctgatgtatgacatcaccaatgaagagtccttcaatgctgtccaagactgggctactcagatcaagacctactcctgggacaatgcacaagttattctggtggggaacaagtgtgacatggaggaagagagggttgttcccactgagaagggccagctccttgcagagcagcttgggtttgatttctttgaagccagtgcaaaggagaacatcagtgtaaggcaggcctttgagcgcctggtggatgccatttgtgacaagatgtctgattcgctggacacagacccgtcgatgctgggctcctccaagaacacgcgtctctcggacaccccaccgctgctgcagcagaactgctcatgctaggcaaggcccaccttcctgacctcccctcattgtggccccacacccagtctgcttctccctgttacacactgtccgctctcagcccactctccctgttacacactgcccacactcagagcaagatgagttgctgctattctttgcctgcccctggggttctctgcagatggtcccagtaatagatactcagcactagactaacataacaggtcactacacggggtgcagaatcactttacaaaagaagactctgttttacgaaagggattcactacaggnnnnnnnnnnnnnnnnnnnnnnnnnnnnnnnnnnnnnnnnnnnnnnnnnnnnnnnnnnnnnnnnnnnnnnnnnnnnnnnnn

SEQ ID NO: 45004 - DNA, 900 bp, Homo Sapiens
gtagattttattgtattgcttaatgtcttttggtttggatttaggatgatagaaaacagaagtataattggtaaacccttaggaagaaattagaaaaacatggacgtaagacaagaagtctctgtgaagggttgaagagtgacaagcattggtaacagtgccttagaactgtgtcagttagtctgatttggaaatcctttatgtaaagctgagactggtcctggttttgttccctttgggtacagacctcttgtcagtgctataaattgtttaatgaggccattccagcagaaatcaacagaataattgattactcttctctctctctgtcactctccctctttctaaacatcattgaaggctgtctctcttttaatttttgtcagacacagtattttagggtgcatccagtataccattgagcattgtaacctcaggaaacagtttattttgggttctgatatgtagcatggtattttccctaaggcagaactttaaaaataaagaactttcacacaagggtctgtaacaattgtatatcttacaatatttttccttgcattgtaatttttaagtatttatcattttatagtacacatgtcaagaatatatgagccttgtatggagtgatgtttcatttacctgggttgtgttaatgactgaatgttgaccataaatctgttttatactgactgaagtttgtcatttttaagttccttgtaaccatcttgcgcgcatattcaccattgaactattctttcccaatataaaaatacacgaacacacacactttttctggccctctggcccctctaaaaaatttttttgacaccaatcgttgggcggcggccccgtgtgtttggaacaagtgtgaacaaggttccaaaaaaaccggctaat

SEQ ID NO: 45005 - DNA, 842 bp, Homo Sapiens
  misc_feature (772)..(772): n is a, c, g, or t
  misc_feature (779)..(779): n is a, c, g, or t
ttgaatctaataagtatgtgtgtaccgtaaagaatatatcttatctggagctcagcctcaatcatgtcttaacaaaatgacaggtctcagaaagggggagctcaatagctcaaaagtgacaagtccttttcacagcaccgttctcagaacacctctgagtaacgtgtttgccagtagctattctcactgatgcactgatggccctgaagaagcggatccagtcacataggaaaggaggctgtgttagtgaaagcacatggaaggtgttgctttagaaaggtagtcaggaaaaacattcaggaatagatttatacaccattattgttttatttttaaattttcattcactcttctgtttggatacttttgctaattaacgtcctatgttaatttccaccaagctataagtccatagtcagtaaaacattccccttgggctgtcatgagctaaaagcagtgtcatctccgcatgttggagcagccaagaaatagtttggtactaccgacattgtctaatccatgtcacatcctcatacaatttaattgctcaaccatgcatttaaaactcctcaagaaaggattggtactgcaactgtaggtaaactgaaaaaaaataagaaagaaagagttggatgaaaatgtgaaagcccaagtttagatgtgcattaagtattaatagcacagtatcttcttcatggagcctttttttctccccatcccctgcagctgcctttttttggggcaggtgggggtgatgtgaaacttagagttnaaagttnagctatgagagtgtcataaaatatatgcgattcaaaactctctgaaactaatttttttcctga

SEQ ID NO: 45006 - DNA, 639 bp, Homo Sapiens
  misc_feature (430)..(430): n is a, c, g, or t
  misc_feature (504)..(504): n is a, c, g, or t
gtcgcccacctgtgggccagccgattcctccagccctggtgctgtacccccgacgtgctcccctgctcggcaccgccagccgccttccctttaaccctcacactgctccagtttcacctctttgctccctgagttcactctccgaagtctgatccctgccaaaaagtggctggaagagtcccttagtactcttctagcatttagatctacactctcgagttaaagatggggaaactgagggcagagaggttaacagatttatctaaggtccccagcagaattgacagttgaacagagctagaggccatgtctcctgcatagcttttccctgtcctgacaccaggcaagaaaagcgcagagaaatcggtgtctgacgattttggaaatgagaacaatctcaaaaaaaaaaaaaaaaaaaaaaaaaaaaaangaaaagagaaaaaaaagactagccagccaggaagatgaatcctagcttcttccattggaaaatttaagacaagntcaacaacaaaacatttgctctggggggcagggaaaacacagatgtgttgcaaaggtaggttgaagggacctctctcttaccagtaccagaaacacaattgtaaaattaaaaaaaaaaaaactctttctatttaa

SEQ ID NO: 45007 - DNA, 745 bp, Homo Sapiens
  misc_feature (727)..(727): n is a, c, g, or t
tctagcgaggtgacagcgtagaaccagtacagtttctcgatggaattgtgtgatcagaaggtggaattctagtgataggcgacctcagacccgcattcatgttctgtgtgcctcttctattgcacatacactgatttttagcattgtctattcctatttttcctttgcccattgtacttccatatatcttttcattaacttacttgctgccttttttttttcttggtacacatttaaataaagtaatccttaacctgtgctgtaaagttcacccttggcatgctgttccaagaacctgggtttgaatcccaatcgttgtgaaacatactcagtattgataaaacctttttaataagtgatgcagagcagccaaggatatgttgacccagatgtcaaccaggctatttttatacttaaaacatgtcagcagagcataggcagaataaaatggtttaaataccccacagcaaatagagtaactgacaaaccaccaaaaactgaaaccccagacccaccagaaagacaagtgtctagcaatgccttggtacctgatctttttcattcaaataattgtcataggttgtttcaaaaaaaaaaaaaaaagggaacaaaaacacaatagaagtccattatcccttggatattatttcttaaagcaaatgggagtagtgttcttatctggaaaataataataaatgctcaaggtatcacacttcattatcagcanctggacaagttcaaatgg

SEQ ID NO: 45008 - DNA, 726 bp, Homo Sapiens
agggctggggacggtccggattcccgggatgtgtggaatgccggggcggctccaccctaggagctgtcactgaagagcgagcagctggtgctgcacacagcccgggcaagggccatcgaggcgctggttgagctattcctgaacgagcttaagaaggactccggctatgtcatcgccctgcgcagctacatcactgacaactgcagcctcctcagcttccaccgtggggacctcatcaagctgctgccggtggccaccctggagccaggctggcagtttggctctgccgggggccgttccggactctttcctgccgacatagtgcagccggctgccgctcccgacttttccttctccaaggagcagaggagtggctggcacaagggtcagctgtccaacggggaaccagggctggctcggtgggacagggcctcagaggtgaggaagatgggagagggacaagcagaggcaaggcctgcctgagactgaggaaggaaaggggtttgaccactcccgaggctgccatgcggtgggaccaccctgctgtccgtctcctgtggctgcccctctgccccctcctgatggatcgccttgtctctccagcaagactgtgcactccttgcaggcaggggctgggctgggtgctgctcttgtgtcccacgtggtacttagttcaaggctgccccagcagatgcttaataaacagctcttcactttcctggctta

SEQ ID NO: 45009 - DNA, 837 bp, Homo Sapiens
  misc_feature (810)..(815): n is a, c, g, or t
  misc_feature (817)..(818): n is a, c, g, or t
  misc_feature (824)..(824): n is a, c, g, or t
tccggaattcccgggatgacaagagctcagatctccctcccgatctccctccccacctccgaagtctcctccgtggaccacaggtggatctttgtgcgaacaacttgcatttcggaagccactgtccgtctttaaacagaaagtcgaaggagccacgaagcaagcggccgtccgggcgtccgcctccgtccccttccatgttcctcctcttccttcgcttcagcctcttctgttatgttttgtcttgaattttatttagactttttcagtgggtatttttctgtcttccaacctctactgtaaactttctggtccgagaacgagccgaacacagcgcgacgcagggactaggacggcccggtgaccgcgcggattcaggattgcggggacgcagaaaggttaaggcacttttaaaaactatagcaaggctcctgtttatttattctactttctttccctaataatcaaaacaccgcgtaggctcctccgtttatcagtattaatggtgtaactttgttggcaatatttgccgtgtagaattttttttagatatccattgtaaatttgaaacaaagaccgatctgtgtaaaaacaaatttccatatgttttatataaatatatatataatatgaaggactaccctcctttttttttttgtattttggctgctagagtgcagcatttgtgacacgtatttgaaatttgaaatttccttctgcactgtataaaaggaccatttgaggatgttttgccttttgggtattttttcctaaaaaaagaacaaaaataaaaatgtataacattttgtnnnnnnannaaaaanaaaaaaaaaaaag

SEQ ID NO: 45010 - DNA, 921 bp, Homo Sapiens
  misc_feature (768)..(777): n is a, c, g, or t
  misc_feature (780)..(781): n is a, c, g, or t
  misc_feature (786)..(786): n is a, c, g, or t
  misc_feature (792)..(796): n is a, c, g, or t
  misc_feature (814)..(814): n is a, c, g, or t
  misc_feature (818)..(818): n is a, c, g, or t
tggatgaaagagaataagaattcagctgacaggaggcctctatcctgtccctccaccccaccctccacctcaatcccctcccatcttccccagacctacctcacctactaggacctgaggcagctccttagcagagacccctggggtttagctgactctgggggtcaggggttcctgtccccaaacttcgcaagacagccctgaagtcacaagtgctttcttttaagtggcattggcaattggcgtgtaatgatggcagtagaatctgaatctcggatcccaggcagggttcacatttccaaacctttttgatttcccctgacctctaatggctggatcctatttttctacaacctttcagtgacatcgttcaggtttctttcttggccatttaaaaaaacaaatttttttttctcacttgtaagtcaccgccagtacctaagttaggctaacggagactttgacaggactggatttttcttccaccagaagagaagccttttccgttggtttggggccacctctttgaccatgaccatgtgatgttccgtttacagtgacttgctttgggggaggggaggctctcttaaccgattcccatgttgtacagtagatggttagaccttttgtatattagtgtgttttaagttattgatttgttttatataaaataatttatttttcaggtgccatttttcattttaactttggttttacatgggtttgttttcaataaagtctgacactggtgtccaaaagtccacattnnnnnnnnnnccnnaaaanaaaaannnnnaaactcacaacaaccacncccncactaaccacaacataccaaaagggggggggcccccctaagaagatcccccccaggggcccaagcttaccgttccccagttttttttgaaaaagggggcccct

SEQ ID NO: 45011 - DNA, 566 bp, Homo Sapiens
gagtgactatctggaaagtaacaaccatgctaagatggcaaacacactggaaacaattgggccacttggctttcttttgctgtattgttttataagcctgctttacctccccgtcttggaaacaagttttagtttattgctttggagactagagccaatagtgtaatgttctcaaaggaaacagacttgagttgttggattagaggaactaactcaacttctaattttttttgttgtaattatggcactgtcatgttttaacatttgcaactagggatagtaagtacaacatttttaactctcatttggcagactactactaatcacagaccacaagggtaatgaccaaatttatgtggttgttacacttccatagttgtcttagccgaatccttccatattcttatgattacttgggttaaagcttctgtgaggaccttttggctcttaagatatcctaaatatttaaaatatttagatatcctaaatataggatatagagtttgtaccaaatatgaatgaatattgttcacagcaaggagtatgttaaaatgaccagacacctg

SEQ ID NO: 45012 - DNA, 731 bp, Homo Sapiens
gctgggatggagacaactatttactatgtctgtgacccctcccttctgcctccctccccttcctctctttcctgtcctctatccttgctgcccctcccccaatatgtcccccaaacccaggggctcagtatttatttatttatataattgcagggtgactgggggcctctctcggcaactcgtagagagcctttggataatggcagggtggggaatgggcgaggagtctttgggaagagcaggggcctgaactttcaactcctttctggcctcttgtcccactgcttccaccatcaccttccaaatccaggctgcactagggcaaggtgaccaccctacttggtaaagacctgattggcgcagcccattctggtgtgggtgtctttcaccacccagaatgaccaggttggaatgggggtgggtgaagttggagggggtggcaagtacaaggcaagggtgcccaggaaccggcatccagaaatcagccctggagtagacctgcctttcctccatccttaccaagttagcctccctttcagttccgtctgacccctgtgttggtagccccttccttcccttcctgtaccccctccgtctcttctcgtggtagcgggttagtgtttcagtgttcttaactccaatctgcttgttcattgtacaatgtgcttcttttaaggccccatttttgtaacttgagtgtgtcattcatctgaacaaaaaatcaaaaaata

SEQ ID NO: 45013 - DNA, 573 bp, Homo Sapiens
gagcaggacaccagcgcccaccttgagcggatgaagaagaacctggaacagacggtgaaggacctgcagcatcgtctagatgaggccgagcagctggcgctgaagggcgggaagaagcagatccagaaactggagaccaggatccgagagctggagtttgaacttgagggagagcagaagaagaacacagagtctgttaagggcctgaggaagtatgagcggagggtcaaggagctgacgtaccagagtgaagaggacaggaagaatgtgctgagattgcaggatctggtggataaactgcaagtgaaagtcaagtcctacaagaggcaggcggaggaggctgatgaacaagccaatgctcatctcaccaaattccgaaaggctcagcatgagctggaggaggccgaggaacgtgcggatatcgcagaatctcaagtcaacaagctccgcgctaagactcgagacttcacctccagcaggatggtggtccacgagagtgaagagtgagccagcccttctggagcaggacagaagatatgcaaaatgtatattttcttgattcctgaccattga

SEQ ID NO: 45014 - DNA, 433 bp, Homo Sapiens
gacaacaacagtgaaagtaagtgtccccagatgcttgtggcaaatgaaaagatggatactttaaagattaatgttgagtatacatctaccacacatatttttcagcccagagacattttccttttgtcaaacacgtgaaagtttggggagaaaggctgaatctgttgggggagggttctaatttttataggctcttgactccattcccacccttttagttcacgctaagttgctttaaagacacaaatgtcttgctaaaattggtagaaatcttttctcggaaaatctgagttatgctttattagaaatgttctgacactcatttaattttcctcccagttcaacagaagaaaagtaatggactctgatgaagatgacgattattgaactacaagtgctcacagactagaacttaacggaacaagtctaggac

SEQ ID NO: 45015 - DNA, 526 bp, Homo Sapiens
cgggctgtgtccactgctcctgatctgcagagcttggcggcagtccccacattagagcctctgactccaccccctgcctatgatgtctgctttggtcaccctgatgatgatagtgttttttatgaggacaactgggcacccccttaaatgactctcccaagatttctcttctctccacaccagacctcgttcatttgactaacattttccagcgcctactatgtgtcagaaacaagtgtttctgcctggacatcataaatggggacttggaccctgaggagagtcaggccacggtaagcccttcccagctgagatatgggtggcataatttgagtcttctggcaacatttggtgacctaccccatatccaatatttccagcgttagattgaggatgaggtagggaggtgatccagagaaggcggagaaggaagaagtaacctctgagtggcggctattgcttctgttccaggtgctgttcgagctgttagaacccttaggcttgacagctttgtgagttattattg

SEQ ID NO: 45016 - DNA, 583 bp, Homo Sapiens
atgttctctcttctccacctcccacaaaggagagctagcagcagggagggcttctgccatttctgagatcaaaacggttttactgcagctttgtttgttgtcagctgaacctgggtaactagggaagataatattaaggaagacaatgtgaaaagaaaaatgagcctggcaagaatgcgtttaaacttggtttttaaaaaactgctgactgttttctcttgagagggtggaatatccaatattcgctgtgtcagcatagaagtaacttacttaggtgtgggggaagcaccataactttgtttagcccaaaaccaagtcaagtgaaaaaggaggaagagaaaaaatattttcctgccaggcatggtggcccacgcacttcgggaggtcgaggcaggaggatcacttgagtccagaagtttgagatcagcctgggcaatgtgataaaaccccatctctacaaaaagcataaaaattagccaagtgtggtagagtgtgcctgaagtcccagatacttggggggctgaggtgggaggatctcttgagcctggggggtcaaggctgcagtgagccgagattgcaccac

SEQ ID NO: 45017 - DNA, 843 bp, Homo Sapiens
  misc_feature (816)..(816): n is a, c, g, or t
cggacgcgtgggtggaggggctctacctccacaccctccgtggtggccatgctcccccctagaaggtgcttcctggcctacctcctgatcggatggggcctccccaccgtctgcatcggtgcatggactgcggccaggctctacttagaagacaccggttgctgggatacaaacgaccacagtgtgccctggtgggtcatacgaataccgattttaatttccatcatcgtcaattttgtccttttcattagtattatacgaattttgctgcagaagttaacatccccagatgtcggcggcaacgaccagtctcagtacaagaggctggccaagtccacgctcctgcttatcccgctgttcggcgtccactacatggtgtttgccgtgtttcccatcagcatctcctccaaataccagatactgtttgagctgtgcctcgggtcgttccagggcctggtggtggccgtcctctactgtttcctgaacagtgaggtgcagtgcgagctgaagcgaaaatggcgaagccggtgcccgaccccgtccgcgagccgggattacagggtctgcggttcctccttctcccgcaacggctcggagggcgccctgcagttccaccgcggctcccgcgcccagtccttcctgcaaacggagacctcggtccatctagccccagccctgcctgtcggacgcggcgggaagcccacggttcgggggcttctgcggggctgagacgccggttcctccttccagatgcccgagcaccgtgtcgggcacgtcagcgcggtcctgaattcgtccagcttggttgtccactanaacgcatactgggaaaaaaaaaaaacg

SEQ ID NO: 45018 - DNA, 684 bp, Homo Sapiens
atggccctcatctccagctaactgtggagaagcccctgggggctccctgattaatggaggcttagctttctggatggcatctagccagaggctggagacaggtgtgcccctggtggtcacaggctgtgccttggtttcctgagccacctttactctgctctatgccaggctgtgctagcaacacccaaaggtggcctgcggggagccatcacctaggactgactcggcagtgtgcagtggtgcatgcactgtctcagccaacccgctccactacccggcagggtacacattcgcacccctacttcacagaggaagaaacctggaaccagagggggcgtgcctgccaagctcacacagcaggaactgagccagaaacgcagattgggctggctctgaagccaagcctcttcttacttcacccggctgggctcctcatttttacgggtaacagtgaggctgggaaggggaacacagaccaggaagctcggtgagtgatggcagaacgatgcctgcaggcatggaactttttccgttatcacccaggcctgattcactggcctggcggagatgcttctaaggcatggtcgggggagagggccaacaactgtccctccttgagcaccagccccacccaagcaagcagacatttatcttttgggtctgtcctctctgttgcctttttac

SEQ ID NO: 45019 - DNA, 615 bp, Homo Sapiens
  misc_feature (580)..(580): n is a, c, g, or t
tttttgtgggatcctgcagtaaaattgacttttttgtgtctttgggagatttaaattgcgctaacagtgttgcgcaaaaatgagttcatgccatttaacatattgtattttaattattaactgtattaatttactatgaaatggacatccttttaactaaaatggaattgaacattgcagttttcaaatatttttccttgttgggtctggaaaaggaattctactttgatctgcatagaaaattttgatacaattttttgaaagttcttaggtgaaacatttacccattaaaaaggaagcagaaatactgagacatgaaaggcattatcaactaactctagactctagaacccattctagcatatctcacgtgcaatttttaaaaataagttaataattcatctcatatcaacaaaagcctttgaaacatgggttttcactagatatcacctagtgctaagataaaaaccaaaacaatatcagaattacatttatgctctaaatttgtagttgtccattgttgtgcttagtaaatgtgtgtcattaatgctgtattctcctagctattatggaaacttgnttaaataaagatatggatataaaaaaaaaaaaaaa

SEQ ID NO: 45020 - DNA, 539 bp, Homo Sapiens
gattttagtaggactcggaacattcaagatggtagtgagggcacatgaaactcacttcaggatgaaatctgggcagagacttattaattaattttgcatttactacctcagagctcagaagaaactccgaagtcagcatttgctttactctttctttatgattgcatctgaccgcaccaaggtgggccatgcgttgtttggtcttatacctgatgaagaaatggcaacagctgacagaaatgggtacagctcatcaaaaatgtgcagcaccggcagagggaagatacggggcaaatgtgcttcctgatgcttccatggggatgtgccctggtgtgcatctgcttgtcaggaagagtcacattgctgcttaacatgctggattgccctagtcttcagaatggtcctgagaaaacatcactacttcgatgttctactttgctttccaaggagcaaaaataactttggagccttctgggaagtgtgcctgggattcttcagtggtttcaggcagatagttgagactggggctttgatattca

SEQ ID NO: 45021 - DNA, 762 bp, Homo Sapiens
  misc_feature (652)..(652): n is a, c, g, or t
  misc_feature (716)..(716): n is a, c, g, or t
gataccccaagagcaagaagcagttctttgaggaagttgggatagagacggatgaagattacaacgtcacactcccagacccctgaggggcccacggtcaggactggtggggactgcaggatgtcagaagagtgagatgtcttgcactggctaccttgtttttggttggcttttgttgttgttcctgctactttcacctttaagcagagcagtcaggagacaagcataaaccagagcactgggtagagaggatgagggctggtggctgggggtagacccagcccatttcattgtctaaattgcagtagcttgaggttaacatttagacttggaacaatgctaaaggaaagcatttggcaatatttattataatttaattttatataaaaatatttaatttcctctggatagtcaaacctgccagatatcaaacctgaggaaggcagaagtgaatttggagaactagggtagagagaggttgctataaaacgagcatttggagggcccacggcttcactcaggacctgctgggcttgtgtaccccaggagcccttttaagtatcttttgtacgcttttcaccccacccccaagtcctgggagaaatgcaggcaacactgagacatgggagaggccaagatatgcttgacaganagggtgattttgaggctcagttaatatttcaaaattgtaaccgtagcaaaactgcattggtatntagaaaaataaaaaattttcaatatgtaaaaaaaaaaaaaaaaaaa

SEQ ID NO: 45022 - DNA, 500 bp, Homo Sapiens
gttaaggccaaatgtaacaataaaaccctgtcgatggttttagctaaattagaggaagttgtatgagacttaatgatctaaaaacttaaaattgaattggtttgattaaaaataaagcttgcaattttaaaagtagctcacatttaatttcttgtgtgaaatagaacatgctttaaaggaagtatttttatgtgaatttgcattccagtataaatagtattcacaaaaaagattttcctagattttatctattgaataggtgtcaatatggcatgcatattgtaactttcattagaaataagttgctttgacttttaaaaatgacatagttagattatttaaagtcaatgtatatagtatatattatgtatggatttatataccaaattttggaatacagcctatctcatgaccatattgaaatgtacggaatttgatccatgcgatactatgtgtgcattatttgaaagttattggaaattttattcaaaccgtggaac

SEQ ID NO: 45023 - DNA, 622 bp, Homo Sapiens
ttatcattgttgctatgaatcctatgaatgatcttttttttattttaaagacctacacttaacctacaaaacatttgctgtataatttggtcaacagtttctatctatctgtatactgtcatgatgtcttaaactgcaggagttacatactgagtttatatttttatttgctttgagcaaggtagataaacattttggccattataatgtgaaaccacttcttctttctttacagtatttgaccaaacttgtgtgtctatgatatttgtaaatacatgcgaatatctgtatttcttatcataagcctatttagttttattctcagtagggttttttggattgtacagtgtttatatgatctgaactccttatacataagaaggtgtgtatattaatccaattatggacttaaaatattttaaaagtataaatacccttatttgctgcaaagaccagtgtgtaggcatttgctttttagcaatatttttaagtgcttcattttaatgccgaggaataagtcttttggcaacacaaactggtcaataataggtaatgcaggtatgttcaggttaagccaacaatgttttgcatttttatgcttattttctgtcaacactaatga

SEQ ID NO: 45024 - DNA, 554 bp, Homo Sapiens
gctctggtcacattctgcataaaagaaatcctcttaagcctatggttaagaaaagccttgaagtttatattcagttaaaatatatgtcggtggagatagccagtgcttctaattttgacttagtttcatacagtaaagcctaaatgtgaaacgcacacgctggaagatattgttcctatcaatattttgctttttataacaagggtttgttcatattgatgccatttttgcaggatttcttcgtgatttctgtccatatgaaaatgctgacattaaacattaacacatggagaccgtgccctgtggccctgccgtggctgccagcatggtctgtgtttccttgtggattcacctgtggccctgctgtggtcatcagcatggtctgtgtcctcgtggattcactgcagctgtcggatgcgagtttctgtcataatcatttgtttcctgatacaattgttcttattcttttccaaaactgtaaaataatctcctccctcaaatgcaaaggatgtttttgttctgtttctgttttctttgaaataaaattataatgc

SEQ ID NO: 45025 - DNA, 574 bp, Homo Sapiens
gtgacaactgctctctgtattatagcaatcttgaatggaaacatttctgtcaagttgtaagttttaaaagagtaaagtgttttggttagtaatgatgtggagaaaaatacagtattgcatgtgttcgtgtttatagattgtggttcgaggattgggagggctctgagaagcagagtactacatcaaaattgttttaagtattttttgccaataaaaaattaattttatggaaatggcttgtgctttgagaagcccagttttattctgtcttatgaaactaatttccactttgaaaattgttcttctgttgtttatggtataaatgaatggaatataatgatatcctccttctaggaaacaaagcatttccttaaaatgtttgctaggttaagctgtgctgttctactgatggttgttttaaattaataatgagaactataatttaaataatatttctttgttagacattataatgttaaactgaaagactaaattctgcaagtactatataatatttttggcttataatgctacatttttattcttgtaccttccgttttgaggatttatatct

SEQ ID NO: 45026 - DNA, 925 bp, Homo Sapiens
  misc_feature (743)..(743): n is a, c, g, or t
tttttattctggacccaaaccctcaattttctgggctctgtgcagccctcttccctcccctgtcaagtcacttaccatgcaaaccacaggctctaagagtttgtccccagggacatccatccaagtcatctccatggctcctgggtcccctggtgagcatggagtcaggaggtcatcaatcatcatgctggggttggtgcgagaggggccacagacctgaaaccaaatggatctgactggggcagctgcccctcagtgtcagaggggctcgacccctccggtctctaaggaagtcccaaagagaatgctctgtgggtccctagcatctgaggaggacgggctccttcagaactcgggctgggtggtccgagcgactcatgatttgcatgggactctggcaatctgtagccccaatgccttgatgtcttcctcattaacactgtcacgtctcaccaggaatacagtgacattaaaagtgtgatatggtttagctgtgcccccacccacatttcaacttgaactgtatctatctcccagaattcccacatgttgtgggagggacccagggggaggtaactgaatcatgggggctggtctttcccgtgctattctcgtgatggtgaagtctcacgagatctgatgggtttatcaggggttttccacttttgtttcttcattttctcttggccccagcattgtaagaagggcctttgggtctcctaaccatgattcctgaggcctcncttagccatgtggaaactgtaaagagccaattaaaacctcttttttccttccccaaaaaaaaaaaaaaaaaaaaattccaagagcatctatggtccggggggggggagaaaagaagggaaatggaaaatgggcccattgggcccaaaggctttgttttcctggaacccaacctttttttttg

SEQ ID NO: 45027 - DNA, 1052 bp, Homo Sapiens
  misc_feature (861)..(861): n is a, c, g, or t
attagctgcctcggctccctgtggcttgtgcccatgcacctgccagggcccagcaggccaacccatcatctagagtagtggccatcagcacccgcctaacgggcaccatgccaagcactttcatcattatttatacatcgtcaccacaccccctctattcatgagaagtaaagctgagaaaggaccagattgaccaagcgccagagacaaaatgtggcacaacgagaaccccagccctgtccaggtggctccgcgcccagggcccaggcttagcagtgctccctgccctatctttgggaaaatcttgcttttatggtcttcccccctcgccctcaagaacaagggccttgtgcgtgggccttcccattgctgctttcccaagaaggcctggattcaggggagaggccttcccagggccactccccttacaccctcccagaggcctgagcaacccctctctgggtggtttggggctggtgctgcctggcggaaggacagtgagggcggccctagccgcctccaccctcttgcgcctctgccctctcccagtccccctgtggcttctgaaaatctcagggacagatgaggctgagcccctagtcccctctgtgtgctttgagcctccagactcgaggctggtcactgcaggtcccaggtggaatttggacaactggcctggccgctcccatcctgtaagcccccaccacgggggagaccctcatccctgcccctgtgtggctgcgccagtattctgcccgcctcccaccatcagcctttcgcccaaggggccctttctgccctctggcttcccttcccttctcctctggtcttgccctgggcccacgcacggcctgtctcggnctttccctgggttttgcctgcacctcaactttttttaataacctcggaacaaaaaaaaaaaaaaaaaaggggggggcccgcttcttaaagaaaatccccctccgaaggggggccccagagtttttaacccgcgtaccccaagctttttttttgtgtgacaaaaagaggggggtccccctctataaaggggg

SEQ ID NO: 45028 - DNA, 769 bp, Homo Sapiens
  misc_feature (751)..(751): n is a, c, g, or t
ggtttgagaaaaattactatgagcaaggtccatgatttagttttcaatataaagggaattccattctatactgtaaaatccaaaaatgctagttgccctcagcttttgagttgacttccagaaagttgagatcttttgaccattttttctcatgtcatataaaatgtgccacatggtagttgtcaagctgtggtagtcatgtacacttttttcttttttttaactttctaaaaggaaaagttcaaagtcctttccacagttagtcttcgcttcttttggatttttctttttagagctaaattattcataccaatgaataagtgagtctgttctaagatataggggccattatctatttttgcttaatggactcatgtggcattgttcactatcatgcctttccatacttgtaatatttctgagtcacttattaatgtgaccaacagataaactgttcaagctaatacagcatttcctaacttcatagttgtcgcagatgtttgttctagtagcgattatttaataaacatacattgtactgaatcttactagcaactaactattttcaggtaatctcagtctgcttattcactttttccatttgatttgctaatgccacaatcatttttctagaaaatagtagggtaatgtatttttttcctgtctgctataatggagactatatttctgcattcattacctctcattaggtgaaaatattaaatttaaataatattgtttttgaatccanaaaaaaaaaaaaaaaaaa

SEQ ID NO: 45029 - DNA, 767 bp, Homo Sapiens
  misc_feature (26)..(26): n is a, c, g, or t
  misc_feature (33)..(33): n is a, c, g, or t
  misc_feature (47)..(47): n is a, c, g, or t
  misc_feature (766)..(766): n is a, c, g, or t
catggagtggtttggttattagtagngttacgnaaaggtagcatggnaaactgagatggcctcgtgggtgttggaaggcttttcagcaaggggaggtgaatgttattaggtccaacctgaaaggtgcatatttcaggcagatagataggtgtttggcatcttataactgctcactttccttttccttagtaatctgaaagtaattcactgtactgaatagttaatggttcccttaatagactcttgtccttggaaaaataaaatgaaatgactggggttctattagtaactgaaaaattgtcaacaattaaaactctaaaacctactcatgagaaaataaagctcttttgtttaggaataataaaagccgacttaatgacttctgaaagaagtaagtgtccctgtaaaggccaggtgaaactgccattctttaacctgttactcggtgtacttgactgcggaaagaacccagaaacagaacaggccaggcccaaaggatagaagtgtaggtttcctctggaagcttactgttctgctaaatgacctaaaaattgctagaacactccagataagtcaatttctgctataaaaatcattgcagaaagagattatttttagttgtctttatttaaaaaatgaaacacattagttacaaaaaccgttgctccaaatagataccgtgtatcttacaaatgttttttgcttggttttgagtgtttactgtagaaatttcaatatcataaataatgattatttctttctcagna

SEQ ID NO: 45030 - DNA, 668 bp, Homo Sapiens
aatttgaggttccctgctccctgagaggtttataaaggacatgtttatacaatccaaattatggcagttctgagctggctaaaaaatatccagggttcctagatgtgagggcagcccctttgttggctgatgacaacaaattacgtggcttacccctgacctatgtcatcacctgtcaatatgatctcttaagagatgatggactcatgtatgtcacccgacttcgcaacactggggttcaggtgactcataaccatgttgaggatggattccatggagcattttcatttctgggacttaaaattagtcacagacttataaatcagtatattgagtggctaaaggaaaatctatagtaaaacatgtagctataacatattttaaaaataaaatctgaaaacctcagaaaatttgcattagaaattggtctttcttagaatggtctagttaagttccacatgtagcataattcttaaataggcacttttctgttttttttttcttactgtgggatttcatttcaattttctacattgtctatctgctttttctgagattttccttcttacactgttaatcttattttaaaaaatattacattcttgtatactttatttttgtgagttggctactatttacgatgcaagagaataaatgtgagcaaatat

SEQ ID NO: 45031 - DNA, 692 bp, Homo Sapiens
ccgcctctttgggcaccttaacaaggtctgccacggagactgtgaggacgtcttcctggaccaggtggtgggcgggctggcgcccctgctgctgcacctgcaggaccctcaggccaccgtggccagcgcctgcaggtttgccctgcgcatgtgtggccccaatctggcatgtgaggagctctcagctgctttccagaaacacctgcaggagggccgagccctgcacttcggggagttcctcaacaccacctgcaagcacctgatgcaccatttcccagacctgctgggccgtctcctgaccacctgcctgttctacttcaagagcagctgggagaacgtccgagctgctgcacccctgttcaccgggttcctggtgctgcactcggagcccaggcagcagccgcaggtggacctggaccagctcattgcggcgctccagatcctgctgaaggacccggcccccgaggtgcggacgagggctgctgaggccctgggccgcctggtgaagctcgcctaaggctccggccagcacccccagcgaggagtatgcacccagacctgtgcctgagctccaagacagggcctcctgaggaccacagcctgggcacacgactggaggggcctggccccagaacaggcactgctggggaccaaaccccaagccccttcagtgagggatgtgcccaataaac

SEQ ID NO: 45032 - DNA, 501 bp, Homo Sapiens
agctcacctgttcagcagagaagtggaactcactttgctcctggagcctgtctacacagtgttatcagcttcattgtcatcctggtggttgtggtgatcatcctagttggtgtggtcagcctgaggttcaagtgtcggaagagcaaggagtctgaagatccccagaaacctgggagttcagggctgtctgaaagctgctccacagccaatggagagaaagacagcatcacccttatctccatgaagaacatcaacatgaataatggcaaacaaagtctctcagcagagaagatctaaaggacactagcattgccccagatctgggagcaagctaccaacaggggagactctttcctgtatggacagctgctgtggaaatactgcctgcttctcccacctcctcagagccacaggaaagaggaggtgacagagagagagcaaggaaagtgatgaggtggattgatactttctactttgcattaaaattattttctagcctgc

SEQ ID NO: 45033 - DNA, 478 bp, Homo Sapiens
ccgaagaagaaacagactaagacagaggtgcatttccagtcacccagaaccgggcgctgcagctgctttatgatctgcgttacctcaacattgttctgacagccaagggtgacgaggtgaagagtggccggagcaagccagactccagaattgagaaagtgactgaccacctggaagccctcattgatccatttgacctggacgttttcacgccacacctcaacagcaaccttcatcgcctggtgcagcgaacttctgttctgtttggattggtgacctggtacagagaatcagctcgcccccccggagcagtacgttcaactcccaagaaccccataacatcctgccactggcatccagtcagatcaggtttggacttctcccactgagcatgacaagcactcgaaaggctaaatcaaccagaaacatcgaaacaagagctcaggttgtcccccgggcacgctccacagctggtgac

SEQ ID NO: 45034 - DNA, 596 bp, Homo Sapiens
gtcttgtaagccacttgtttggttatgatttgtgtcttatcagggaaaaggtgcccagctgccagcccagctccgctgctatctttgcctcacttagtcatgtgcaattcgcgttgcagagtggcagaccattagttgctgagttctgtcagcactctgatgtgctcagaagagcacctgcccaaagtttttctggttttaatttaaaggacaaggctacatatattcagctttttgagatgaccaaagctagttagggtctccttgatgtagctaagctgcttcagtgatcttcacatttgcactccagtttttttttctttaaaaaagcggtttctacctctctatgtgcctgagtgatgatacaatcgctgtttagttactagatgaacaaatccacagaatgggtaaagagtacaatctgaactatatcttgacaaatattattcaaacttgaatgtaaatatatacagtatgtatattttttaaaaagatttgcttgcaatgaccttataagtgacatttaatgtcctagcatgtaacgggttttttttggaataaaaattatagaatctacaaaaaaaaaaaaaaaaaaa

SEQ ID NO: 45035 - DNA, 736 bp, Homo Sapiens
gggcacaggtagggcgccccgcagacccggacaacgctgggtgtggctgaaaacagggagtcatggctaaggcagctggataagcacagccaggccacagcccagcagctggtgcagctcctcagcaagcagaaccagcttctcctggagaggcagagcctgtcggaagaggtggaccggctgcggacccagttacccagcatgccacaatctgattgctgacctggatggaacagagtgaaataaatgatttacaaagagatatttacattcatctggtttagacttaatatgccacaacgcaccacgaccttcccaggtgacaccgcctcagcctgcagtggggctggtcctcatcaacgcgggcgctgtccccgcacgcagtcgggctggagctggagtctgactctagctgagcagagctcctggtgtatgttttcagaaatggcttgaagttatgtgtttaaatctgctcattcgtatgctaggttatacatatgattttcaataaatgaactttttaaacggacacaaaaaaaaagaaacaaactagcaaaacaaaacaactttgtgtgcgggccgcgccttgggccttgagaaaaggtttttaaaccccttcgtgttggggccgcgggggccccaatggggtaccgtgaacaccttggggcaaacggttgtccacaaggagaaactccggggccaggcacaaggggtggggtttctccccaatgaaaag

SEQ ID NO: 45036 - DNA, 551 bp, Homo Sapiens
cgcctgcccagcctgagtggctcagatgggatcccatatcgaaccgtctctgagtggctcgagtccatacgcatgaaacgctacatcctgcacttccactcggctgggctggacaccatggagtgtgtgctggagctgaccgctgaggacctgacgcagatgggaatcacactgcccgggcaccagaagcgcattctttgcagtattcagggattcaaggactgatccctcctctcaccccatgcccaatcagggtgcaaggagcaaggacggggccaaggtcgctcatggtcactccctgcgccccttcccacaacctgccagactaggctatcggtgctgcttctgcccactttcaggagaaccctgctctgcaccccagaaaacctctttgttttaaaagggaggtgggggtagaagtaaaaggatgatcatgggagggagctgaggggttaatatatatacatacatacacatatatatatttttgtaaataaacaggaactgattttctgcctccatcccacccatgagggctgcaggcactacaa

SEQ ID NO: 45037 - DNA, 610 bp, Homo Sapiens
  misc_feature (574)..(574): n is a, c, g, or t
tgtcataacaggcattgccaacctcactgacacagggtcatagtgtataataatatactgtactatataatatatcatctttagaggtatgattttttcatgaaagataagcttttggtaatattcattttaaagtggacttattaaaattggatgctagagaatcaagtttattttatgtatatatttttctgattataagagtaatatatgttcattgtaaaaatttttaaaacacagaaactatatgcaaagaaaaaataaaaattatctataatctcagaacccagaaatagccactattaacatttcctacctattttattttacatagatcatattgtatatagttagtatctttattaatttttattatgaaactttcctttgtcattattagtcttcaaaagcatgatttttaatagttgttgagtattccaccacaggaatgtatcacaacttaaccgttcccgtttgttagactagtttcttattaatgttgatgaatgttgtttaaaaataattttgttgctacatttactttaatttccttgactgtaaagagaagtaattntgctccttgataaagtattatattaataataaatct

SEQ ID NO: 45038 - DNA, 496 bp, Homo Sapiens
ccctgccacgcacgactgaacacagacagcagccgcctcgccatgaagctgctgatggtcctcatgctggcggccctcctcctgcactgctatgcagattctggctgcaaactcctggaggacatggttgaaaagaccatcaattccgacatatctatacctgaatacaaagagcttcttcaagagttcatagacagtgatgccgctgcagaggctatggggaaattcaagcagtgtttcctcaaccagtcacatagaactctgaaaaactttggactgatgatgcatacagtgtacgacagcatttggtgtaatatgaagagtaattaactttacccaaggcgtttggctcagagggctacagactatggccagaactcatctgttgattgctagaaaccacttttctttcttgtgttgtctttttatgtggaaactgctagacaactgttgaaacctcaaattcatttccatttcaataaactaactgcaaatc

SEQ ID NO: 45039 - DNA, 712 bp, Homo Sapiens
ggctggtaacagccccggagtatcgggatagagcacaactacgtcgtcctccgctacctcatgggcttcctgcatgcggtgtcccgggagagcatcttcaacaaaatgaacagctctaacctggcctgtgtcttcgggctgaatttgatctggccatcccagggggtctcctccctgagtgcccttgtgcccctgaacatgttcactgaactgctgatcgagtactatgaaaagatcttcagcaccctggaggcacctggggagcacggcctggcaccatgggaacaggggagcagggcagcccctttgcaggaggctgtgccacggacacaagccacgggcctcaccaagcctaccctacctccgagtcccctgatggcagccagaagacgtctctagtgttgcgaacactctgtttcgagctacctcccacacctgtctgtgcacttgtatgttttataaacttggcatctgtaaaaataaccagccattagatgaattcagaaccttctaatgaaaactccatgcctctgctcaaaaaaaaaaaaaaaatagaaaagaaaaaaacaaaagaaaaaaagcgaatagaaaacaaaacaagagaaagaatcaaaaaaaaaaggaggggggggggcggggacacagatccccctccggggggggcgaccgtttccgtccgccaccccgttttttgggccaggagggggccctc

SEQ ID NO: 45040 - DNA, 743 bp, Homo Sapiens
  misc_feature (294)..(294): n is a, c, g, or t
  misc_feature (339)..(339): n is a, c, g, or t
  misc_feature (585)..(585): n is a, c, g, or t
  misc_feature (600)..(600): n is a, c, g, or t
gtcagcttgtgggaaagtgacatcagcgtccacccgctaaccctgccctctgcaacctgcttggagctgctgttgatattgtcaaagagtaatgccaatctgccttcatcccttcgccgtgtgaattcctttcaggtggcctttttgaagatgtaactattagagctgggcattctcctcccccggcagacagctctcaagcaggagcacaccgaggccagcagtcagctcaggaggcatcaattacaaagacaagaaccagagctatgggataagagcattgcattgaagttntaagtttacttgtttgcatgtattctctaagagaagagttaactntagatctttgaaaacccaggactgtgaagaaagtcatagtagcaggttgaggcaagtgtagaagttacatctctatttcccacagagaggaatattcacatatgtgcagtgtcagcaccacctggaaggttattacctaatggagatccatctgtcctgtgtggaatccagtgaggaattttattggtggaactgaatgttaactgctgtaaatcctaggaaataaacttttaaagagtttctcangatgatttaaaacanattttaaaaaagaaaagtagaaaacattttatactttattcagaggagtgctcaatagatgtttggtgatgaatgatatcaaattaaggatttctatttaaaaaaaagccgcgtttaaacgggggatggccctggcgtcccat

SEQ ID NO: 45041 - DNA, 549 bp, Homo Sapiens
cagctgatgagcagtgcaggagcagggcgagaggaacagagccaatgatgtgtgggttacactgaggagccaaggacagggcctcaggtctcccccttacaaggcgtggctcatggcctgcattccagagaccaacatgatagcttttaattcagctgcatgacctgtgccttttaagccataaagatacctcaagcctagcacctcttgaaatccagatgttcatattagactcgaaaaaataggctccaggcctaggtgcccaggctatgatgagtctgcttttgaaggaggtagggaatgacatcttccttggacccaaagcttaaaagtaatgtatgctttgctgaccactgtttgttaggccttaaacaacattcactgtggtggtatcaggcacactgctatgtgcatcaattatttttttgctttccaaacagaatctctggggcacaagttttacactcaagctaagtataactttgtcatttcaggtaaatatgacaagtggtggagcatgaagttttctaatttgacttaatcctaata

SEQ ID NO: 45042 - DNA, 522 bp, Homo Sapiens
ttttttttttttttttttatacctacatagcacatgactgggggggataaagcatgtataagttgggagagggtaaagaatgtgtgactatgtatacagaaaatagactaaaatgtgcagcaaaatgatatatactgtaatctggtttttgaagtatctactattctggaatattgttaaacaactttttgcttttgaaaaaaaaaggtgccttgattcagttgcgtgacttagaacattcatcctattttattgtgatttttaatgtcttctgaccccaaactgtgtttttggttgcagtctggcggctgcaggcatagcgtcggttttgttccaataacagagaccaaagagttaatcagatatggttcagctgctacaattgtatgattcaaaggcaatttaatcaccccaaatttccatggcccccacagtcaagacctgccattcgttttctcttgcaggttggagtaaatttgcactttgaatcatgtgggtcatttggggaccttgttcttttct

SEQ ID NO: 45043 - DNA, 549 bp, Homo Sapiens
ggcacgaggcttgctactttgctttggtgtaagcagagttctttctgtaggttttttcaaatgaaaacattgcaagaatatcaaagagagcagtgtttgcgttagtgattataaactgcagcatggtgctgacattgataactgaaagtcaactaatgagaatttgagacttctgaagtacacttagttgctagtgtctcccttttggtgtcactggaaagtttagaaagcatggttttgtttttgctcaggtttctctttctgtgatgcagagactctcagctgttcctcctctatgtctacattatgtctgaaggaaagaatttaacaaaacttgaaatactgctgtttttctacaatgtttgtaaatatttatcttgctgcttttctaggtttgtcttctggatttaaaatttggggcggctggggtggaattgcatggtttgggaatgggtaattgagctgctgctcattatggtatgtaacagtgatttgtctgtttaatatgtacaagaactggaaggtcaataaaatgaaagtggttgtctt

SEQ ID NO: 45044 - DNA, 702 bp, Homo Sapiens
agcgaggcctgggtggcgttctcggacgaggccacccttgcctggttcctggtggctcagggcaaggagtggccctgggcgcccgtgtcggtcctgtttccgctgcccttatctcaaagtccgtggctgtttccccttcactgactcagctagacccgtaagcccacccttcccacagggaacaggctgctcccacctgggtcccgctgtggccacggtgggcagcccaaaagatcaggggtggaggggcttccaggctgtactcctgccccgtgggccccgttctagaggtgcccttggcaggaccgtgcaggcagctcccctctgtggggcagtatctggtcctgtgccccagctgccaaaggagagtgggggccatgccccgcagtcagtgttggggggctcctgcctacagggagagggatggtggggaaggggtggagctgggggcagggcagcacagggaatatttttgtaactaactaactgctgtggttggagcgaatggaagttgggtgattttaagttattgttgccaaagagatgtaaagtttattgttgcttcgcagggggatttgttttgtgttttgcttgaggcttagaacgctggtgcaatgttttcttgttccttgttttttaagagaaatgaagctaagaaacaagaattcccctacattgtgccgaattataagattcacccca

SEQ ID NO: 45045 - DNA, 937 bp, Homo Sapiens
  misc_feature (654)..(654): n is a, c, g, or t
  misc_feature (836)..(836): n is a, c, g, or t
gggggatagagaatgaggaagacagagggcctccaagtgagagaagcatgaaaaatgagcagtggcctggatcagtggggtgtattcagagcacctctccagatgcaccatgcatgctcacagtcccttgcctatgtgtggcagagtgtcccagccagatgtgtgcccccaccccatgtccatttacatgtccttcaatgcccacctcaaaaggtacctcttctgtaaagctttccctggtatcaggaatcaaaattaatcagggatcttttcacactgctgttttttcctctttggtccttctatcactaaaactcatctcattcagccttacagcataactaattatttgttttcctcactacattgtacatgtgggaattacagataaacggaagccggctggggtggtggctcacgcctgtaaccccaacactttgggaggccaaggcaggcggatcacctggggtcaggagttcgagattagtctggccaacatggtgaaaccccatctctactaaaaatacgaaattagccaggtgtggtggcacacatctgtagtcccagctactctggaggctgagacaggagaatcgcttgaacccaggaagtggaggtttgcagtgagctgagatcacaccagtgcactccagnctgggagagagagagtgagtctccatcccaaaaaaaaagctaataagaagaaaaaaaactgtggccgcatcggccagctgatttagactcgagcagattatcatggggcgaaatgaggcactgtgcatcgcccaattgattgataaatcagtgcgcgtaaaagcctagtgaaacgtggtccnaaagctgtgaaacccttcagtggtaaaaagacgggacctccaagttcgcatggtagaaagggatgtagcgaatgtacgaataacggggagctttaacaaag

SEQ ID NO: 45046 - DNA, 719 bp, Homo Sapiens
  misc_feature (688)..(688): n is a, c, g, or t
tccggagatgcaagtattcatgatacagtagaaaatctgatcctcctagcaaacaacagtttgtcttctaatgggaatgtaacagaatctggatgcaaagaatgtgaggaactggaggaaaaaaatattaaagaatttttgcagagttttgtacatattgtccaaatgttcatcaacacttcttgattgcaattgattctttttaaagtgtttctgttattaacaaacatcactctgctgcttagacataacaaaacactcggcatttcaaatgtgctgtcaaaacaagtttttctgtcaagaagatgatcagaccttggatcagatgaactcttagaaatgaaggcagaaaaatgtcattgagtaatatagtgactatgaacttctctcagacttactttactcatttttttaatttattattgaaattgtacatatttgtggaataatgtaaaatgttgaataaaaatatgtacaagtgttgttttttaagttgcactgatattttacctcttattgcaaaatagcatttgtttaagggtgatagtcaaattatgtattggtgggggctgggtaccaatgctgcaggtcaacagctatgctggtaggctcctgcctgtgtggaaccactgactactggctctcattgacttccttactaagcatagcaaacagaggaagaatttgntatcagtaagaaaaagaagaactatatgtga

SEQ ID NO: 45047 - DNA, 510 bp, Homo Sapiens
gaatgggttatatggtatttgcatataacctacatacatcctcctgtgtactttaaatcatctgaagatgattacttatacctaataaaatacctacacatcacttcatttgcatggattcaacatagtgcttggtgttcagtaaattcaagttttgcttttttggaactttgtggaatttttctttttctgaatatttttgattggcagttggttgaagccatggatgcagaacccatggatatggagggctgactgtacttacttacatatctatctatctttgagtaacaaactctttgggggaaaagagggaagtgtattgagcaagagaaggcaaaaaacattacataatattttgattctgttacgtgtgtctatagattgtttcattctaatcaagacctaagaaggtatgattctgtgactgatttagaattctggggtggaaatatcctggaaccatgttttttaataaattctgtctcttggaaagagttaacaacagcc

SEQ ID NO: 45048 - DNA, 1129 bp, Homo Sapiens
tgcccggcctggccttttccagccacttgcacgggcagcagttctttgggccgctgggagccggccagccgctcttcctgcaccctggacagttcaccatgggccctggcgccttctccgccatgggcatgggtcacctactggcctcggtggcaggcggcggcaacggcggaggtggcgggcctgggaccgccgcggggctggacgcaggcgggctgggtcccgcggccagcgcacaagcaccgccgcgcccttcccgttccacctctcccagcacatgctggcatctcagggaattccaatgcccactttcggaggcctcttcccctacccctacacctacatggcagcagcagccgcagccgcctcggctttgcccgccactagtgctgcagctgccgccgccgcagccgccggctccctctcccggagccccttcctgggcagtgcccggccccgactgcgtttcagcccctatcagatcccggtcaccatcccgcctagcactagcctcctcaccaccgggctggcctctgagggctccaaggccgctggtggaaacagccgggagcctagccccctgcccgagctggctctccgcaaagtaggggccccatcccgcggtgccctgtcgcccagtggctcggccaaggaggcggccaatgaactgcagagcatccagagactggtgagtgggctggagagccagcgagccctctccccaggccgggagtcgcccaagtgaggggctgcccagctgctcccctgccacgcaggcccacccgggctgcctgcccctgctgcttgggacgtgtacagcacagaatgagtatttatttaaataaaggagaaagtgggctgcagcagccggaatagagcctcgtctggcaagtcdgggggcctgggacacttccctgggcctcaacaaggatcaggctgctgggaaacacagtcacttgggagctgctgggctaggtccagatccgctccacgtcaaggtggcatcgragtgtctctggtcttcarcggagkgggaraggctcatcarggsccacggtcctgcaraacaagaagkgcagggcaagggkgggagawyggaggratccaaagcctggactttggctaracc

SEQ ID NO: 45049 - DNA, 787 bp, Homo Sapiens
  misc_feature (752)..(752): n is a, c, g, or t
catacacacacacggaccaaaatacttacacctgcaaaggaataaagatgtgagagtatgtctccattgttcactgtagcatagggatagataagatcctgctttatttggacttggcgcagataatgtatatatttagcaactttgcactatgtaaagtaccttatgtattgcactttaaatttctctcctgatgggtactttaatttgaaatgcactttatgcacagttatgtcttataacttgattgaaaatgacaactttttgcacccatgtcacagaatacttgttacgcattgttcaaactgaaggaaatttctaataatcccgaataatgaacgtagaaatctatctccataaattgagagaagaagaaggtgataagtgttgaaaattaaatgtgataacctttgaaccttgaattttggagatgtattcccaacagcagaatgcaactgtgggcatttcttgtcttatttctttccagagaacgtggttttcatttatttttccctcaaaagagagtcaaatactgacagattcgttctaaatatattgtttctgtcataaaattattgtgatttcctgatgagtcatattactgtgattttcataataatgaagacaccatgaatatactttttttctatatagttcagcaatggcctgaatagaagcaaccaggcaccatctcagcaatggtttctcttggttgtaattatttgctcctttgaaattaaatcactattaantacattaaaaatcaaatgggaaaaaaaaaaaaaaa

SEQ ID NO: 45050 - DNA, 866 bp, Homo Sapiens
  misc_feature (610)..(612): n is a, c, g, or t
ggggaaccaaaccaccttagtgagtaaccctaagaattgacacaaatctcatattttaggagattatattggttctgcctctggcatgctggtagactagggccatcctaacttattattttccagaggttctcctccagacaagacctgcagtaagcaaagagttatattctacctctctctcaattttctttttcttttctctgtatcctcatcgttagccacacacagatttgtgtggcttttattgtagaactaaacttagcatagtgttctgttgtttacatgaagtgtgtttttctttggtttcttctgttttcccaactaaatatttttttctacataaatattttcaacaattgatttgaaaaatttgtcaggattatttcaacttttcacatttgttatctgaaattcctatttccctgttaaataggaggtgtgtgcagaacctttattaatgtgaggaaaagaaatgctcaattgaaggacatttcccctgttttctataaaagcaatggttgaaacctcattttctattttgttatttctaaaaggaactgcataccaaaaaaatgcattctttctattaaactgtgagaactacccnnnacccccccgtcatctcccccccattcctatccacctctcccccaatccccctttatataaaatgtatcgtcttgttttccccgccctctggacataacaaaacactttttttagcatcttcttcctcggcgccccgggaaccccccatggtcacatgaacatgcgtcgcaccccgcgttccataggaagactcggtcgcttcacaacactcccccctctattctcccccaataaaccacacccttgagtccgaa

SEQ ID NO: 45051 - DNA, 749 bp, Homo Sapiens
gtcctacgctatgtcatccaaagattgtcctttccattctcaaatcctgtgactgggatcactcaacagcactgtgatgtattattttcaatgaggtgcctttcttaactgaccaaatgctgccttgtttggcccctaaatcaataaaatatgttaaaatttgtatcccctgttgtggcattttttttagataatctaagctagaaaaatgacattgaattctggacctggctggaaggaaaagaagccctttcttgtcgctggcagctgtgtggtagggaggtccaagtatgtgcatatgagataagcctgcaacctcttgaccttcagctcctatgcaggcttctcttgagcccagagacaaggcagcttggtctagtggagatagcactgtgcttggagttcaggggacctaggacaaatcccagccagttagttattcactgtgctcctgtttcctcagctgaaaaaggaagttggttatgccaccttcttggccttaatggcattaaatgaaatttataggaagaaggtttttgctcagtacctggcatgcaacagacattggataaatgttagttggatccagatatacacagaaagatatctgcttcctgccaggctggataactgttgaatggacacttgtccatagtctagaaagccagtgcttctaatccttaagccagatctttgactaccttttcagttgcttctttaacactctttgttgcttctctgtgtgtcct

SEQ ID NO: 45052 - DNA, 657 bp, Homo Sapiens
gacttctccattgtggttggggtgctgttcccaatggcggtcatttttgtggtggttgctatggtaatccggcaccagagctccagagaaaagcagaagaaagatcagaggccactatctaccactggcaccaggccacacaaacagaagaggaaaccccagatggtaaaggctgttcaaccccaagagatgagtcagatgaagccccatgtgtatgatctgccagtagaaggcaatgagcccccagcctcttttcataaagacacaaacgcacttccccctactgttttcaaggataatccaatgtctacacctaaggactcaaatccaaaagcatgaagcaacagctaagcaagaactaatggctaaattatcaacttggaaaactggaaaatctggatggcagagaaatatactatctcaccagtatttgctctcgactcaagaaggttaacattttctgattcatgttagactttgaagagactaaagaaaattttcaagaggaacatatgcctgagaacctttgcatgaatttaaaatttcaattatccattcttataagaaggaagatgattgtaaagaaatatctccgaagttaaaatctgtaataggaattgattcattctctaatgaaaacaaaacataaaaacatca

SEQ ID NO: 45053 - DNA, 586 bp, Homo Sapiens
acgctcagattattcccaattgctatgagacttgagagggtctgcaaaaaagatgttgagatcaatgggatgttcattcccaaaggggtggtggtgatgattccaagctatgctcttcaccgtgacccaaagtactggacagagcctgagaagttcctccctgaaagattcagcaagaagaacaaggacaacatagatccttacatatacacaccctttggaagtggacccagaaactgcattggcatgaggtttgctctcatgaacatgaaacttgctctaatcagagtccttcagaacttctccttcaaaccttgtaaagaaacacagatccccctgaaattaagcttaggaggacttcttcaaccagaaaaacccgttgttctaaaggttgagtcaagggatggcaccgtaagtggagcctgaattttcctaaggacttctgctttgctcttcaagaaatctgtgcctgagaacaccagagacctcaaattactttgtgaatagaactctgaaatgaagatgggcttcatccaatggactgcataaataaccggggattctgtacatgcattgagctctctca

SEQ ID NO: 45054 - DNA, 702 bp, Homo Sapiens
gtgacaatcaaaaaagactcatttgtatacttgccaaagtttaaaagttttttacattccttaccctaaacccactgccccatccacccagaattcagaaagggtttggcatagatccagggctccagggcccaggtcattttgttattagtctagggcttttgtcctccacagtctaggcagggcatctttgtatgtgtgttgctggttggggccagggacgggggcaggcgggagttgtccaggtttaagattgtttgttttccatcagatccacaagcaatatctgtgggctgaaatccaggttatacctattcactatgacttttttttttttaactttctactgtaattatttcagttccccgaagttgtatctcaaatgttggggaaatgctgccttgactattttactttggaaggttttactagatatcagtttagtagattaatgacgttgttaatctgtctgctcaaaagacaccagcaagggggtatactttgctgaactgataaattattctattaaggactaacccagtacgtggcaaaattaggaataacttttcccctccttctttactaataaattttccaagttgcatactgttgttgcaagtttctggtatttttttctgtatacctttctattgtctgaatttaagataaaatgtttctaataaaaaaaaaaaaaaaaaaaaa

SEQ ID NO: 45055 - DNA, 506 bp, Homo Sapiens
ttttttttttttttttttaagggacttgagaattaattctggagagaatgccccattgaacatcatcaatattggagagctttctgtttttctacatttgttaggaaacttgtgagcattcacactacagagaaacttgaaatataaagaagaagagaaagccttcagtgatgcctctgtgttagggaaaatatggaacttctccctggatgcaaaacctatgagtatattaatattggaaaatttttcagtgattcttctctttcttgtatatgagagaacttatatggagaaacccctaggaatgtaatcagtgttaggatgcctcagcctgaactcttcactgagtggccacaattttcactgggaacaaaaagtataatcactgttttgagtgtgggatatcctttatcagtgtctcatctgtagattggactgctggctcattaatttttttaggccttttttcttttaatataaacatttgtgtatagctgttccctaaa

SEQ ID NO: 45056 - DNA, 873 bp, Homo Sapiens
gggaccccatccgctggctctcacccctcggagacgctcgcccgacagcatagtacttgccgcccagccacgcccgcgcgccagccaccatgctaggtaacaagcgactggggctgtccggactgaccctcgccctgtccctgctcgtgtgcctgggtgcgctggccgaggcgtacccctccaagccggacaacccgggcgaggacgcaccagcggaggacatggccagatactactcggcgctgcgacactacatcaacctcatcaccaggcagagatatggaaaacgatccagcccagagacactgatttcagacctcttgatgagagaaagcacagaaaatgttcccagaactcggcttgaagaccctgcaatgtggtgatgggaaatgagacttgctctctggccttttcctattttcagcccatatttcatcgtgtaaaacgagaatccacccatcctaccaatgcatgcagccactgtgctgaattctgcaatgttttcctttgccatcattgtatatatgtgcggttaaataaagtatcatgcatcccctcaccaattacgccaacccaaaacacccttgtcggccgcctccggccctccagaagttttttgaaaccattccgtttgggggcgcggggccccagaagggaaatgggaccatgggccataagctggtttccctaaagaagatccctgggcctatggacctaggggcttgggaattccctcaccacaaaaaaaaaccccgccccggggcgggttacaccgaatcgggtttcctgaacactaaatttcccagatatggggagcgtttcggcgaggggcctctttcaccgggggatcccccatctcccacccgggggggc

SEQ ID NO: 45057 - DNA, 644 bp, Homo Sapiens
cactggctggagaaagcccgactgatgggaatgagactttggccaaaaatcccaaaacatcattttcaatcagtagagaagtgcttagggttgaaaattgatttcatttgctactgaatttggtaaatcctgggtaacttttatcaagatgaagacattttaccctacctactctagaaatatacaacaatgttatattttacactccttggaaacatttgaggaaaaaaatgcaatttgcacttcactttgttggaatatcccatagcactcaataaactcagctgctagagtgccgatgtcaggagggctgtgtcgggtaatgcgtgtggctgaatgggcataaccactgtggcttcttgtgctgcagaagctcgttgacaagactgaggaggatttcaagagcaaccaagtaaagtcatgcattttctaattttgtgtatatggaatatatttttaaatagagatttttctactttagataatgtgttaatattgctattacctaggttaagcactattgtctgtgctagtaagaaaaagaaaggaaaaccatcattgctttatagtagcttatatcaatttagatttcatcattactattttgcatactggaatttataaatgggtaaattatcattttc

SEQ ID NO: 45058 - DNA, 578 bp, Homo Sapiens
tgttaaattccaatatacattcagtgataccactctttttcttctaagcctgtgtgttataatttaccagttccccaaaatgccatttttaacgccgaactgtgtaatatacatggaaaacagctttttacaattaattttcaaagttgtaattttaaagaatttgggtgtatacctatgttaatgaaacaacagaagtacaaaaaagaatatcagatacaaaaatcaatcgtgaagaaaatctgttcttaatatatttcattatgattgaaaaacataaaaactaacataggaaagtgaatgatcagttacttatgatatattttgtttcctcttgtggtttaataaagtgaagtgtgtgtgtgtgtgtgtgtgtgtatacctgggggtgggcagtgctctttttctaaaactaatatggcttatatatctgaattatgccctttttagtgtgtattaggatgtgggctggtttgcttttctaccacctttgtaattttatgtatcccatctcctttgtgtgaattcatatattatagcaaaatacaagagacatgggactgtttgcaataccatat

SEQ ID NO: 45059 - DNA, 631 bp, Homo Sapiens
gtaactaaatcgtaaaatagcatctcaagaggtacttataagacatttccaaagtcaagttaatgagctgcagagtaaacaagagtctctcgtagtttctgaagttcgagaagaaattctacagaaagagattacaaaactcttagaagaattgagagaagccaaagaaaaccatacaccagagatgaaacatttcgtgggcttagaaaagaaaattaagcagatggaaatgagacatgcacaaagagaacaggaacttcaacagataatacagcaaacacaccaagtagtagaaactgagcaaaacaaagaagttgaaaaatggaaaagactggcacagttaaagaatcgtgagctggagaagttccgcacagaactagactcaatattagatgttctccgagagctgcaccggcaaggagtggttgtgccagttgcttttgcagatgaaatgaatgcaccagagtattaatagaaattcagatttcataatgaccttattaaaaggcctgaagatggatgggattgtgccactgtcaggacagcttatgaaaaacaagtgttccaatatgtttccagaaagcaaacaaccaaagcaacatttcaaaataaattgcctttaaccaataag

SEQ ID NO: 45060 - DNA, 594 bp, Homo Sapiens
tttggccttgatattcagtatttggaaatgtcttaaagaaaaccattttcattgtagaaaatccttttttaaatacttgttatatcccagggagattagtttataccttccacctcaggcagtcatcagctgctttagagaatggaatccaccctgcccctccattttttggttcctggggctcaattcaagtctggtcaagtctccctggctggggattctgtcctgggaacagatactcagttgtagtctcatgtgtctgcactcacccaagactctatatacttgcttgctcagagcatagttagggcagctcctaaaaatgcattcagcagaagactgaaaaacttcaattgcttcatttgtatgcaaatagaaaatggtagataattatatattatacgcctttgtgtaagttcatttaatacttgaagcagtctttgtctcaaaagagtatgcccttactgagaaaggatatgtgaacggtacatttattgttggggagagtggcttgtttacatcatgtctggacttttgtctagttgggtagacagttctacaccagcagcccccttaataaagaagtctacacag

SEQ ID NO: 45061 - DNA, 649 bp, Homo Sapiens
  misc_feature (168)..(168): n is a, c, g, or t
  misc_feature (359)..(359): n is a, c, g, or t
  misc_feature (392)..(392): n is a, c, g, or t
  misc_feature (408)..(408): n is a, c, g, or t
  misc_feature (453)..(453): n is a, c, g, or t
  misc_feature (574)..(574): n is a, c, g, or t
  misc_feature (583)..(583): n is a, c, g, or t
  misc_feature (647)..(647): n is a, c, g, or t
tactggactaaaaatcattaaccagtctcattttaagtgatttatggacagtttcctttatagcagagaagggctcacttgtatgctagaaatagaaagaaaagaaaattgaacatactccgccacatttttattgataatgtgaggtttttaaaatttttattttanatccagggggtacatgtgcttgttgtaacatgggtgtattgaataatggtgggaattgggcttctagtgtacccatcatccaaatattaaacactgtacccaacaggtaatttttcaacgcttactgccgctcacactctttcccctattggagtccccagtgtctgttatctccatctttatgtctctgngtacccattgtttagctcctacttttaagtganaatatatgcaatattntattttttatgtctgatttagttcacataggataatggcctccanctctatccatgttgctgcaaatgacatgatttcattcttttttatagttgcataatactccatttatatatctctctctatatatatctcacgttttctttatccagtcaattgttggtangatacttangttggttccgtgaatttgctattggaaatattgctgcaataaacataccatgttccagaaaaantt

SEQ ID NO: 45062 - DNA, 785 bp, Homo Sapiens
cccaggaggctgggagctgctccaaggccctggaactctgcctcagtcgcggcatgctggagaggggtacggacttactttcttggagttgtcccaggttggaatgagactgaactcaagaagagaccctaagggactggggaatggttcggttcctgccttcaggaaagtgaaagacgcttaggctgtcaacacttaaaggaagtccccttgaagcccagagtggacagactagacccattgatggggccactggccatggtccgtggacaagacattcctgtgggccatggcacaccgggggggatcaaaatgtgtacttgtggggtctcgccccttgccaaaagccaaaccagtcccactcctgtcattggacgtttcttcccattccctcctcccaaatgcacttcccctcctccctctgccccctcctgtgtttggatttctgttcactcagaattgtaaatgtttagttgtgaccatgacgtatgtttgggtcaatgtccctttccaatgcatactaatatattatggttattatatatgaatatatttaatgacatggaaaaagtcgtggattttctttctttccttttattaggggggggtggggggtaggaagagtcgtaatggacccagatggaacttgtaacgtgggccccacatgatagaactacattcagatatcattaaataaactcttgtcactaaaaaaaaaaaacaaaaggcgggcggcaaaatttcctcgagggcaagtaacggtacaccagttcttgaaaagggcc

SEQ ID NO: 45063 - DNA, 848 bp, Homo Sapiens
gcaacgaggatactggagcccaaagtcaagtttagagaccagctgggaacgtgaatggggctcttgattttcttatcaaaatcaccactcctcccagcttggactaaatattctttctagcaagcagctttgtgagctccctgaagcccaaggaaacccttcggtgggagaaatttcatttctgtctgagaggattaaggcagcaggtgactccccctcctcgcctgccgtgtcctgctattctcaggcagctctaaggagaattcttatcacagttcaagtgatttccagaagttccagggcttctgagagaccatcaagggaactttaacaacttgacaaatgtccttgaagtaagatgcctcatctttagggaaaaatggggtttggatttctgcttaggcaaagtctcctgcagttcatccttctctgtcctcttcttgcttcaggcttggggaccgtccctgctgtccccactgtggtggcaatcaggacctaaggtgaagcaaacttgaagttctatctgacaagtttaggcagtaagagaaggagggaaatcggagcaaagctccctcactttattgttgagaaactggcatctggaaagaggaaggaatttgcccaaagtcagtcagctgggataaaaacctgggtgtcctgtccagaaagtgcagggtgctttctgctctgtagcaaggcagcagacattctctgagccaggccaccaaaaggcccttatctggtgggttggactcctgatcccattttggcttggacattgctctcaagaagattaagaaccctggaggaacactagggcccttgaccaatgtatctgagaacaactg

SEQ ID NO: 45064 - DNA, 771 bp, Homo Sapiens
gcttctgaagctgggcggccccctgggctggagacctatggcttcccctcagtgaccctcatctcctgtcagcagccaggggcccccaggctggagggcagccattgtgtagagccagaggggaaccactttgggaacccccaaccctccatggatggagaactgctgctgagggcagagggatctacgccagcaggtggaggcttgtcagggggtggtggctttcagccctctggcttggcctttgcttcacacgtgtaaatatccctccccattcttctcttcccctctcttccctttcctctctccccctcggtgaatgatggctgcttctaaaacaaatacaaccaaaactcagcagtgtgatctatagcaggatggcccagtacctggctccactgatcacctctctcctgtgaccatcaccaacgggtgcctcttggcctggctttcccttggccttcctcagcttcaccttgatactgggcctcttccttgtcatgtctgaagctgtggaccagagacctggacttttgtctgcttaagggaaatgagggaagtaaagacagtgaaggggtggagggttgatcagggcacagtggacagggagacctcacagagaaaggcctggaaggtgatttcccgtgtgactcatggataggatacaaaatgtggtccatgtaccattaatcttgacatatgccatgcataaagacttcctattaaaataagcttttggaagagattaaaaaaaaaaaaaaaaaaagggcg

SEQ ID NO: 45065 - DNA, 531 bp, Homo Sapiens
acagatctaccagcatcacgagatcgacctcagtgcctgagaccaccaacgggactctgggcatggctggggcccctggacggccccttggctggctcctggccctacttggggtgatggcccgcctgtgagctgctgaccgtgggccacgttcatcagccacacgtctaggccttaagcccacttcttaaaggatctgcacccatggggggacatagagggtcccagcctactggacctcccgagctgcccttcaggtctaaagcaacatctggacatctcggctggggcagattccccatcaaaggcaacctggggggtgcaggctggtgcactgcatggagtcgaggtggaggtcacgtgcagagctccatgaggtcccggagcccccctctcaacccgctcctaccccgctggtccctctgaaagcaccgaggggttgatggcattcctttcccattctaaactccacgcagccaatcgctttcctggaggagcgccaacctcgaagacaactcagcactgggcggg

SEQ ID NO: 45066 - DNA, 470 bp, Homo Sapiens
  misc_feature (411)..(411): n is a, c, g, or t
  misc_feature (461)..(461): n is a, c, g, or t
gaagtcgactgccaaagaggcccagcagagggcagcacccccatcatttttttgaatttctcccttaggaattttgccttcctttgtcttctgtccaccaggccttctctccagctggacacaaacctcctttgacgggaaataattgccgttaggcttcacagtagtgctttttcctttcacttggatttgcattttaacctgcatttcgaagatttttatacatgttttctatttccgacaatgccaggaggcttcattgacgttgtagtctgtgttaataaacttgtgtatcactctgctctgatcttttaggaattaacttgcaaatgaaatgaatatgttgggactttggcataatttgaatatagcattgtgtgagttgtgattgtctcttcctaattgtgctgnaataacctgtgtatgagaataaaatgatttccaccatcaggattctcccntgcccccct

SEQ ID NO: 45067 - DNA, 708 bp, Homo Sapiens
  misc_feature (637)..(637): n is a, c, g, or t
tgatgattttataaattgtgtgaagcgaatttcccatttggcaatcatttactgatttgcagtgatgaatatttttatgagaatttaaacttagcaagaatggccatggaggcaaagccttcacccagacccatcccactctcctgtgatccaggtggtccaggagcccaggacaggccttttctgtgggccctggccagacagggttacctggtgaggtgcagagagtccctctagtggccattttgtatggtagttgctaatgcagaacaagttctgtcttgggcttaaattgactgaagactttagggggaaagaatagtaaatgcatgtaaacaaatggggacactctgttcaggagaataatccgactggcatttgtggcagtttttgaaatgtaaatgtattcatgtgtgttcttgtaaatacgtgtcgctcagatgtcctttgaagtgggagggaatcaatccggggataatttcaaatggaatagagtattttgatattgttcattcagagggtgatgtgtacatatctatattgtatatatgtgatgaaaatgcattggctttttgtgcagatacaacctgctctctgtactgctgttggacagtcagtgttttaatgtttctacagntttgctattgcacgatttcatattttgcctctatgatgaacggcaaccattatttgtaactgcttagtgct

SEQ ID NO: 45068 - DNA, 947 bp, Homo Sapiens
ccacgcgtccgggagaagcaccgggtcccactcctcgctgagtaccgccacctccgaaagctgcaggattgcagagagctggaatcttctcgacggctggcagagatccaagaactgcaccagagtgtccgggcggctgctgaagaggcccgcaggaaggaggaggtctataagcagctgatgtcagagctggagactctgcccagagatgtgtcccggctggcctacacccagcgcatcctggagatcgtgggcaacatccggaagcagaaggaagagatcaccaagatcttgtctgatacgaaggagcttcagaaggaaatcaactccctatctgggaagctggaccggacgtttgcggtgactgatgagcttgtgttcaaggatgccaagaaggacgatgctgttcggaaggcctataagtatctagctgctctgcacgagaactgcagccagctcatccagaccatcgaggacacaggcaccatcatgcgggaggttcgagacctcgaggagcagatcgagacagagctgggcaagaagaccctcagcaacctggagaagatccgggaggactaccgagccctccgccaggagaacgctgggcctcctaggccgggtccgggaagcctgaggagccgccggcagaggtctctccccagcctcaggcaggaatttggggtgctggaggcagtgggccaagcacatgcccctaactaacttcctccgctggccaggttcctcctgctgggggcctttgaacccaaaccccctgccccactggaccggcaaccccttatattgggggtgaaaatcccacgcattgtgggggaaccctccggttggcaggtttatatggtgggaacgggtactggggggggttggggggggcccttgtgggatccccacaataaaaatgggaggtggggtcccccttcgtgcaaaaa

SEQ ID NO: 45069 - DNA, 601 bp, Homo Sapiens
  misc_feature (51)..(51): n is a, c, g, or t
ccagatttccatgtgtgcagtattataagttatcatggaactatatggtgngacgcagaccttgagaacaacctaaattatggggagaattttaaaatgttaaactgtaatttgtatttaaaaagcattcgtagtaaaggtgcccaagaaattattttggccatttattgttttgtccttttctttaaagaactgtttttttttcttttgtttacttttagaccaaagattgggttctagaaaatgcacttggtatactaagtattaaaacaaacaaaaaggaaagttgtttcagttggcaacactgcccattcaattgaatcagaaggggacaaaattaacgattgccttcagtttgtgttgtgtatattttgatgtatgtggtcactaacaggtcacttttattttttctaaatgtagtgaaatgttaatacctattgtacttataggtaaaccttgcaaatatgtaacctgtgttgcgcaaatgccgcataaatttgagtgattgttaatgttgtcttaaaatttcttgattgtgatactgtggtcatatgcccgtgtttgtcacttacaaaaatgtttactatgaacacacagaaat

SEQ ID NO: 45070 - DNA, 751 bp, Homo Sapiens
gccgcctggaaaggagagcgtctgcaggacagtgggcacaaggaactgaacccagctctgctaatatgtgatttcagagaaaaagcaggacatgccccttttctagccaggaggatgctccttttggccaaatgtatggagaagtagaaaaatcaaagcagttcatcaccctttccaggtctcggaatggtgctgaaaaatcctctccaacactgtggatggagatcggagaaacgcgactgtggtttctcttgatttctgaggatctcagaagtttcagcagacttccttgctctgtgttattcctttgcaaaaggaaagatcattatagcatgagggctgggaatagcagggtgaacttaacccaataaatgcaatttcctaaatgacttcatgctatggaggtgattctgattcaaatagcatgatccatgcttattatttaaggctgatttttaaaatcttgtgttgcaagggcaacctcgtccattttaactggcacctcagggattaaaatcctactttttagtgtagttcccacctcattcatgaaaatgaatagaactatcgtattatgggagatgtgtcagtgaactagaaaatgtcaataacctcaaaggatgaagggttttattttaaatagtttataaaatatatatggacatgcatatttgaaaatgctgcataaaaataaaagtggtgtgtttccccctctttggagacaagaaaattttattatgactctagataa

SEQ ID NO: 45071 - DNA, 633 bp, Homo Sapiens
  misc_feature (278)..(278): n is a, c, g, or t
  misc_feature (502)..(502): n is a, c, g, or t
  misc_feature (535)..(535): n is a, c, g, or t
  misc_feature (610)..(610): n is a, c, g, or t
  misc_feature (623)..(623): n is a, c, g, or t
  misc_feature (631)..(631): n is a, c, g, or t
cgagacactgtgctgggtgccccagacacaagacagaaactcgggtcgctctgtgtgcctccacactggccttccctgctgcgtggacgaggctctgtctcctaggctttaagcccatgcatcaggtggaagacaatttccagcagcctctgcccgcttgtttttcctcctctccttttcctgccgccttggtcttttttgtcttttgtgcagggccgtctctcgcagcgcccgtctgtgctccgcagcgtctaggaaaggattacgtgtgagcaganattgcaggctttggtgaacacgaagccgagcttggtttcaacatctaattcaatttgttctgccgagattgaaatatgaaatggttgccaagtcaaacgttcaaaggacggggaaggggagagtgaagcgcatgctggaaatttaaattttaatgaaaatgactttaaccctttgggtacaccttgcaaaatgtaacccatccctcccatcctgtgaaagcggnctctcgggttaagagcttttcacccacttctcnttccactgaagcttcactaataatatgtaatcattttttttcagccggcctaataataaaagattatagaaaaanaaagagaaggagnagaaaggnaa

SEQ ID NO: 45072 - DNA, 781 bp, Homo Sapiens
aaaattggatttatgtctgtgctgctggatggatggctaagggcagagttggataccccattgtgaagccagggcccaactgtggatttggaaaaactggcattattgattatggaatccgtctcaataggagtgaaagatgggatgcctattgctacaacccacacgcaaaggagtgtggtggcgtctttacagatccaaagcaaatttttaaatctccaggcttcccaaatgagtacgaagataaccaaatctgctactggcacattagactcaagtatggtcagcgtattcacctgagttttttagattttgaccttgaagatgacccaggttgcttggctgattatgttgaaatatatgacagttacgatgatgtccatggctttgtgggaagatactgtggagatgagcttccagatgacatcatcagtacaggaaatgtcatgaccttgaagtttctaagtgatgcttcagtgacagctggaggtttccaaatcaaatatgttgcaatggatcctgtatccaaatccagtcaaggaaaaaatacaagtactacttctactggaaataaaaactttttagctggaagatttagccacttataaaaaaaaaaaaaggatgatcaaaacacacagtgtttatgttggaatcttttggaactcctttgatctcactgttattattaacatttatttattatttttctaaatgggaaagcaatacataatttagggaaaattggaaaatatagggaaactttaaacgagaaaatgaaacc

SEQ ID NO: 45073 - DNA, 684 bp, Homo Sapiens
ggatacaccactgcactccagcctcactgacagaacaaaactctgactcaaaaaactgatctctggaaaggcattttctttttctgcaacgtagccaactagctaagtttgtattgaagccatcctttaatttttaacagggcaagaaagctttctaagaccccgaactccagatatgcgatggggcaaatcctgaagcgtacatggctatctctcacagctaaagcatccctcacccctatccagcgcttcttacccctggcgcaagagaatcacctgcggggaggaaaactttcaaaatcccttaaacccaagttgtaaccgcacaactaaatcagaatccttggagctggatctgaaaaaaatacggttgaaagtcgtgcaggtgattacaatgtgtaggcaaaccagaaaaccatggctttaaccagcagcttttgttagaaatgatttctccaatgaatgtagaaacgtttgctgctgaattgtgacctttccattttacctgcttttcctgcaaagtatattttgcagacccaggcagtgctgctcgctctgttcctggttcacccagtgccgtgtgtgctcagtgcatcctgtgcacgggtcactgtgtgccctggcctgggtgagcatcattcttcggggagaaccttgatgaaaacaaagctgcattccaaaaag

SEQ ID NO: 45074 - DNA, 693 bp, Homo Sapiens
agtttttttgtgtgtgaatactatccctataccactacccctaaaacctcagaattatttgctttattttttcatacaacttggggaagggaaccatgggagtatgcacatgggatcataatccattctgtggtttggaaaaagaaaatgttaacctctgctttagagggtagctactagctttgttggggataaaagtgtaatacatgcacttttgaactctgaaagtttgccaatctgaaaaggggtgtttctgaagaccactatcttttacgaacacttaaaaataagtgtttgcagttgtgtatgggcacgatactgtattctttacatttttatggccctacagctacttcttatccctgcaagtatataaattaaaaccaagtcactttagaacagctttgaaactagagtttcaaaggtaaaaggatctcatgtttctgaatctgcataaagcaagatggctgtgatttgacaggtttaattgctaggttttataggtggatagaaatgaatagtttggagtctttaaaatgttttaaaaaatgtttgcttactatctatatatatgacattattcccaattagttttatatctccaagatatatatatgtatataggtatatacacatattgtatatatacatagtctatatattctatataagaatatattccaataagaatat

SEQ ID NO: 45075 - DNA, 717 bp, Homo Sapiens
gggggaatcaggatgaggatggccaggcctctggagcaggcggtagctgccatcgtgtgcaccttccaggaatacgcagggcgctgtggggacaaatacaagctctgccaggcggagctcaaggagctgctgcagaaggagctggccacctggaccccgactgagtttcgggaatgtgactacaacaaattcatgagtgttctggacaccaacaaggactgcgaggtggactttgtggagtatgtgcgctcacttgcctgcctctgtctctactgccacgagtacttcaaggactgcccctcagagcccccctgctcccagtagcctctgctccagggggtgcgctggctgtcgggggctgggcatgtctcccacaccccctcctaccctctctcctgtacccctttcaatctggacttgcccaggtcttctgcgatcagttaacccattttacctaggaggcccagagatgtgagggctccttcctcaggatgcccagcgaatgaggggtagagccactctggggcccagcctgcctgccgcacccctgtggcctcccttgtggatgggaggaggcgggatctgctctgaggccctcgaggctcagcagagcgtgcaccaatgagaccacgatgggaaagggcctatttaactcctaataaaaaactggcatcagcaaaaaaaaaaaaaaaaaaacaacaaaacacaacacaaaag

SEQ ID NO: 45076 - DNA, 1157 bp, Homo Sapiens
  misc_feature (316)..(316): n is a, c, g, or t
gaatttcctccctgcgcaattgaggtctataaaattatagagaaagttgattacccccgggatgaaaatggagaaattgctgctatcatccatcctaatctgcaggatcaagactggaaaccactgcatcctggggatcccatgtttttaactcttgatgggaagacgatcccactgggcggagactgtaccgtgtaccccgtgtttgtgaatgaggccgcatattacgaaaagaaagaagcttttgcaaagacaactaaactaacgctcaatgcaaaaagtattcgctgctgtttacattagaaatcacttccangcttacatcttacacggtgtcttacaaattctgctagtctgtaagctccttaagagtagggttgtgccttattcaactgcatacatagctcctagcacagtgccttattcggtaggcatctaagcaaatttcttaaattaattaatatatctttaaagatatcatattttatgtatgtagcttattcaaagaagtgtttcctatttctatatagtttattatacatgatacttgggtagctcaacattcttaataaacaggcttgtattcaatataaaattgaataggatattattattcaccgtcttcaacaccacacaactccaacaacacaccccacagcccccataaaaccgccaacaatgaacaccaaaaaacacaaaaaccacacacaaagaacacccaactgcaaaccttccccacactacacaaacgctcgacccgcgggcgcacaccaatcacacagtcccccacacgctcacaaacttctcggatgcctccctcccttctcttttctttccatcaagacaccgcagtccgcctgctatgaggcctgcgttatatttttcttcaactggaggctgcgtggcgttcgcatttttacaccttacaccgtgcgagcacgcaacagatccactcacctctcgttccccctgctcgacgcggcgccccaccctcctcctggcggcgcgctcagctgaaaacatcgagactcccgcccacgaaacaatctcgtccgctgtcgcgaaaataccaaagcaggtcatctgctagtggtgttgacccacactacattgcgcgctggcaaaaattcgtgttcacctgcgccagcccgcacaac

SEQ ID NO: 45077 - DNA, 449 bp, Homo Sapiens
gggaagagatcactattttgaagcacagctttacagatgagtatctatgatacatatgtataataaattttgattgggtattaaaagtattagaaggtggttataattgcagagtattccatgaatagtacactgacacaggggttttactttgaggaccagtgtagtcaagggaaaacatgagttaaaaagaaaagcaggcaatattgcagtcttgattctgccacttacaggatagataacgcctgaactttaatgacaagatgatccaaccataaaggtgctctgtgcttcacagtgaatcttttccccatgcaggagtgtgctcccctacaaacgttaagactgatcatttcaaaaatctattagctatatcaaaagccttacattttaatataggttgaaccaaaatttcaattccagtaacttctattgtaaccattattttt

SEQ ID NO: 45078 - DNA, 744 bp, Homo Sapiens
tcatctgagcctgcagtttgcgtagctgcttgatggcttcctccctccccttgatggcagaggtcggcctgaagctccaggtctttcaggtccccttccagcttcttctttgctgcagctgccaggcacgttgctttcgctcgtcttccagttccgtctcatactcgtgaagctgtctctgcagttgcctcctcttctcctcattctgctcgtcccgggcttggagatccctttcgaactggcccttgagcgcctgcatgttgacttccagccgcagtttggcgtcctccgtggcttgcagctcgtcctccagctcttccagctgcgtcttcatctcctccatctgggtctccagggcccgcttggacttctccagctcatggacgttcttgcccacgtcatccttggagctgaccaggtcttccatttcggctttgagcattttgttggtccgctcgagttcctctttggcttccaaggcctcttcaagggcccgagccagggacagggccttggtttccttctccctggcttctgcctcagctctgtccctctcatccgcgtatttggaagagatgtttttctcctcggctaacaactgatcaaatttcctctgcttcttttccaggttggacacgagttgccgctggttgtccaaatcaacaaccaggtcgtccagctcctgctgaagcctgttcttggtcttttccagtttatcatacgcggcgctctagagtatccctc

SEQ ID NO: 45079 - DNA, 756 bp, Homo Sapiens
  misc_feature (662)..(662): n is a, c, g, or t
  misc_feature (741)..(741): n is a, c, g, or t
tgaaggtaagatttcagaggtactggatgctgggacagtcgatcccctgacaaagctggtccttgtgaatgccatttatttcaagggaaagtggaatgagcaatttgacagaaagtacacaaggggaatgctctttaaaaccaacgaggaaaaaaagacagtgcagatgatgtttaaggaagctaagtttaaaatggggtatgcggatgaggtacacacccaggtcctggagctgccctatgtggaagaggagctgagcatggtcattctgcttcccgatgacaacacggacctcgccgtggtggaaaaagcacttacatatgagaaattcaaagcctggacaaattcagaaaagttgacaaaaagtaaggttcaagttttccttcccagattaaagctggaggagagttatgacttggagcctttccttcgaagattaggaatgatcgatgcttttgacgaagccaaggcagacttttctggaatgtcaactgagaagaatgtgcctctgtccaaggttgcccacaagtgcttcgtggaggtcaatgaggaaggcacagaggctgccgcagccactgctgtggtcaggaattcccggtgcagcagaatggagccaagattctgtgcagacacccttttcttttcttcatcaggcaccacanaaccaactgcatcttgttctgtggcaggttctcttctcccgtaagaggagcattgctgtacatacctcctttccttctnactatcttgccttaa

SEQ ID NO: 45080 - DNA, 558 bp, Homo Sapiens
tctattttctatccatcagccatccattcattcatatccatccatccatctatccatccagatgtttattgagcacctgtgttctgggtcctatttgggagccttgttaaccaccaagaccttcctaagccatattgtggtatacagacagatacaaaaaaaaaggctctctccctgtctgatctcatgcagcctgccttggagacaagactctcccagtgctgtgtgcttggagagaggaaagcacacagccctggagtcagagacctgggtttcaattctgtctccacctcttattagctagctatggactcctctctgagcctcgattgcctcatctgtgaaatggggtaatggtgtgagcagcgtttccctgggggatgtgatgcagcccacttggggcctcatgcactcagcatctctttattagcaaacacttattgaacccctagtacatgccaggcactgttatgaggtcccggggatactttataacaaaagggacagaagcattcctgctcttgtgaagtttacattgactagatagtaaacaaaata

SEQ ID NO: 45081 - DNA, 642 bp, Homo Sapiens
tattcaaacatcaacaacagggaccagataatttttatggtgggacgaggatacctgtctccagatctcagtaaggtacggagtaactgtccaaaagccatgaagagattaatggcagagtgcctcaaaaagaaaagagatgagagaccactctttccccaaattctcgcctctattgagctgctggcccgctcattgccaaaaattcaccgcagtgcatcagaaccctccttgaatcgggctggtttccaaacagaggattttagtctatatgcttgtgcttctccaaaaacacccatccaggcagggggatatggagaatttgcagccttcaagtagccaccatcatggcagcatctgctcttatttcttaagccttgtgttcgtacaatttgttaacatcaaaacacagttctgttcctcaaatctttttttaaagatacaaaatttccaatgcataagctgatgtggaacagaatggaatttcccatccaacaaaagaggaaagaatgttttaggaaccagaattctctgctgccagtgtttcttcaacaaaaataccacgagcatacaagtctgcccagtcccaggaagaaagaggagagaccctgaattctgaccttttgatggtcaggcatgatg

SEQ ID NO: 45082 - DNA, 783 bp, Homo Sapiens
cgcgtccgggctttagtgatattttgggttttgttagagaacctaaaatctttacactttcatctcaaagattataaaggaaaggggggtagttaagatttagaattcaagttaaatttcagaaattggggcagtcaggcatttgtatctttggtagggcaacaagtaaaacatgtagagtgcttgctatcccacttcataaagcttttacccaatcttatttctaaacctctgtgcattcttagtgtcttctcattctgaaacagaaaataaggaaaaacatttaacttagttttctaaaatcagataatcctaaacaaaaatgttagtcagggtcactaaaaagtattgcacatttatataaatacagtccttttaaaatttgacttttaaaaaacaaaagactttgtacgatattgtgtttttattgcgtttgcaatatttttatagtagcctttatgaactcagtataagtgcaagttgtttgaaaaggtgtttttattagtgcacaatagaattgtgaggttttcaatagatgtcatgagattttgtatatctacataaaatatcagtacatttttttctaatgctactggaaattttacttttcctttgcaacacataaatgatatgatgtacaaaataacagctctggttccaccagtacctaatgttgaaaacatttttaaagtaatttttaatactaactatttagtatactgtcagtactgtacatctgcacactggtggtaatagggtatatattaaattatataaagaaat

SEQ ID NO: 45083 - DNA, 776 bp, Homo Sapiens
  misc_feature (744)..(744): n is a, c, g, or t
  misc_feature (746)..(746): n is a, c, g, or t
  misc_feature (748)..(749): n is a, c, g, or t
  misc_feature (762)..(762): n is a, c, g, or t
  misc_feature (771)..(773): n is a, c, g, or t
atctgtgccgtgtcctcagggccaaggagagcctgaaggagctcagcctggccggcaacgagctgggggatgagggtgcccgactgctgtgtgagaccctgctggaacctggctgccagctggagtcgctgtgggtgaagtcctgcagcttcacagccgcctgctgctcccacttcagctcagtgctggcccagaacaggtttctcctggagctacagataagcaacaacaggctggaggatgcgggcgtgcgggagctgtgccagggcctgggccagcctggctctgtgctgcgggtgctctggttggccgactgcgatgtgagtgacagcagctgcagcagcctcgccgcaaccctgttggccaaccacagcctgcgtgagctggacctcagcaacaactgcctgggggacgccggcatcctgcagctggtggagagcgtccggcagccgggctgcctcctggagcagctggtcctgtacgacatttactggtctgaggagatggaggaccggctgcaggccctggagaaggacaagccatccctgagggtcatctcctgaggctcttcctgctgctgctctccctggacgaccggcctcgaggcaaccctggggcccaccagcccctgccatgctctcaccctgcatatcctaggtttgaagagaaacgctcagatccgcttatttctgccagtatattttggacactttataatcattaaagcactttcttggcaggaananannaaaaaaaaaaaanaaaaaaaannnaaa

SEQ ID NO: 45084 - DNA, 599 bp, Homo Sapiens
gactggcacacggtccccgggagcatgaatgactgcagctacctacacaccaactgctttgaggtcactgtggagctgtcctgtgacaagttccctcacgagaatgaattgccccaggagtgggagaacaacaaagacgccctcctcacctacctggagcaggtgcgcatgggcattgcaggagtggtgagggacaaggacacggagcttgggattgctgacgctgtcattgccgtggatgggattaaccatgacgtgaccacggcgtggggcggggattattggcgtctgctgaccccaggggactacatggtgactgccagtgccgagggctaccattcagtgacacggaactgtcgggtcacctttgaagagggccccttcccctgcaatttcgtgctcaccaagactcccaaacagaggctgcgcgagctgctggcagctggggccaaggtgcccccggaccttcgcaggcgcctggagcggctaaggggacagaaggattgatacctgcggtttaagagccctagggcaggctggacctgtcaagacgggaaggggaagagtagagagggagggacaaagtgaggaaaacggtg

SEQ ID NO: 45085 - DNA, 885 bp, Homo Sapiens
tgcctggtattaaatgtttcctctgtattctagggtgaattaatgtagtaatatttaaaattacaaaatagattgttaactgttacactgtggcattggaattttaactctttgtatttactggtatgagagggctatctacaagggtaatatttctgattaccctggtttacagaaacctccagcagtctttgaaacatctcacatgactctagttattgattgcttttaatggttttatggtactgttgatagtcatagtggctgcctatagaacaatcttcaaactgagccatgctttaggggagggaaaggggctaaagtctcttctgttggtaatttattagttactcttgaaacaataaaatccaacagaaaggaagagatagctactgtatattacagtaaagaaagctgcatagttattttaaatttaatggagatgaatatggttaaaatatataactactgctgcttgagaatagcaagagtattgttttaaaacatattccacccaacttgagagttcttttaaaatgattggccatatgaacatttgtaatcttgccattaggtttggacctgccatattttgttttattctgtgatcctaactagttccttttataggctaaaatatttatcaatactgatcagactttaaagaaattactttgtaaacctgctgactacctgtatgtattggatatatattatatattaaatatataatatatttgagattattaaaagatgaaaatattgaatccttataattttttaagttgcagaatgtatgttaaaaaagtgacttgaatgagatgtattttgtatctagaaattttatttctttttgggatgagattaaatacattttggaagttc

SEQ ID NO: 45086 - DNA, 1150 bp, Homo Sapiens
  misc_feature (603)..(603): n is a, c, g, or t
  misc_feature (760)..(760): n is a, c, g, or t
  misc_feature (899)..(908): n is a, c, g, or t
  misc_feature (910)..(910): n is a, c, g, or t
  misc_feature (913)..(917): n is a, c, g, or t
  misc_feature (987)..(987): n is a, c, g, or t
attctaatcaggaataattgtatgtaaagatacctctgaggtccaacagctctgatcattttgggcttcaagtctctctctgtgactggtgattttgtgggttgaaacttctgacctaaaattccactttaggagtttgtcgtcttggactcaacaactaacaaaatgaaaaggacccagcaagcctcacttgtggaatgaaaatggggcattcaggaaagcacctgtcctggccccacagtatgtcagctgtataggcaatagtagtagctgtctcttagaagggaaataatgtatcacctctttccagaacgaagcaaagttgctggcttagtagagccctcaattcatagaggttactgtaattgggcctggctcactgatgctttcgccaactgaaactactaggatcctgtgtgtgttcaaactcagtgccattaacaaacccaaagtgaagcggtcactcctctcagtggaaagagcacgaggatgttctcagctctggccaatactccatttcataaaccatgttacatttttgttaagccttggctctggatgtggcctagatatttgatattctaattggaaattacagattanaaagcaccctttctttgtacagtgggggtaaaagtcacagctgcttagtacaaccatctgggttgctcaagtagatgcccataataagagactattttctgataagactgactggaatcaagctgccgacagctttctccatccagattgtgacggntgctacctggatccatcattttactgggatggcaaaaaatcacccatgtgacactgggtgacatggtaaaaagtacatggtacttttacagtaccatgtactgttaaaaaataaagggtctcctttatctggaaaaaannnnnnnnnnanaannnnnacactccgaggcattctatgtcggggtgccgaaaaaagaagggaagtgaaagggccacatggcccaaaancctggtttcctggacccaactttcctttgtaaaaaaagggggtaaaaatttggccggtccttccccctataaagggggagccctatatataatttccgaaaaaccccgcggtttaaccgtgggcttttaaggggaactcggggttgcccccaaaaccccgccg

SEQ ID NO: 45087 - DNA, 843 bp, Homo Sapiens
  misc_feature (792)..(798): n is a, c, g, or t
  misc_feature (800)..(803): n is a, c, g, or t
  misc_feature (808)..(810): n is a, c, g, or t
  misc_feature (812)..(820): n is a, c, g, or t
  misc_feature (822)..(822): n is a, c, g, or t
gggaagaccaagacagtgcctggataccttcgaataggggacatgggcggctttgccatctggtgcaagaaggccaaggccccgaggccagtgcccaagccccgaggtctcagccgggacatgcagggcctctctctggatgcagccagccagccaagtaagggcggcctcctggagcggacagcgtcaaggctgggctctcgggcatccactctgcggaggaatgactccatctacgaggcctccagcctctatggcatctcagccatggatggggttcccttcacactccacccacgatttgagggcaagagctgcagccccctggccttctctgcttttggggacctgaccatcaagtctctggcggacattgaggaggagtataactacggcttcgtggtggagaagaccgcggctgcccgcctgccccccagcgtctcatagtccctcacccttccgcggaaagagcccccttactccacctccccgccagcctggggccaccccccctcactgcatcctggggccacccccactcactgcatcctgggaaccttcgccctgcaaggcgtttgctatcttcagccactgggcggagctgcagccctggaggagggggcgggtcgaggctgcgtggtgatggggtctccgcccccacgccctgccggggcagggctggagctggacagaagccagtgcctttaagtcatttgtgtcaaaaccctctggggtccggaaggctgtgcgggtgtccctcctggcaataaaacactaccccgggttcttccnnnnnnnannnnaaaannnannnnnnnnnanggggcgggcccgcttctagaa

SEQ ID NO: 45088 - DNA, 814 bp, Homo Sapiens
  misc_feature (814)..(814): n is a, c, g, or t
agtttgaaaattttgcgaaacatgaaaaagagtatctgtaattcttgcccaccaaacaagcctgcagaatctgttcagtcaaataactccagctcatttctgaattttggtcttgcaaaccgtttttcaaaacccaaaggaccaaggaatccaccaccaacttggaatatttaataaaactccagatttataataatatgggctgcaagtacacctgcaaataaaactactagaatactgctagttaaaataagtgctctatatgcataatatcaaatatgaagatatgctaatgtgttaatagcttttaaaagaaaagcaaaatgccaataagtgccagttttgcattttcatatcatttgcattgagttgaaaactgcaaataaaagtttgtcacttgagcttatgtacagaatgctatatgagaaacacttttagaatggatttatttttcatttttgccagttatttttattttcttttacttttttacataaacataaacttcaaaaggtttgtaagaattggatctcaactaatttctacattgccagaatatactataaaaagttaaacaaaatacttactttgtgggttgcaatacaaactgctcttgacaatgactattccctggacagtatttttagcctaaatggagtataccttggaaatcttcccaaatgttgtggaatactggaatattaaggaacatgagaaattttttttttttaggaataacattgtgcaaattaatgacaattttttcgattggtaacaagggatttcaactgtattcctgaaaagttataacccn

SEQ ID NO: 45089 - DNA, 889 bp, Homo Sapiens
gcctcattttattttgctggtttgattttttttttttaaagaagaaaaaaaaactgccctgaattaaatggctgttttaacagtaggctcttagcattataccacatagtcatttttcatgttctgtgtttaacaggcactgaggttctggtttaaattaaatagctgcaaatgagacaatttataacccattaggttgggtggaaaatggtttctcaaaagcaaataagtaataaatctggtatctgcctataactcacagttgataagaaagtggccatttctcactagcattatatatgattggggctcgtgggtaattgggaagtgttaggttggtgtcttggtagcagtatttttattagaaaagaatctatgggccttttacagggtattaatcccttgtgtcacctaccattgatgccttaagttttctgagtctcaattaaaaatcttccttttcttgatgcatgacaagtgtaatcagtacttgctccatttattggtctggtattaagttaatgctgtactatttaattatccttccagcgtttttttctccttacaaatttgatactctttagggttaagctaaggcattgattcatgtatctctgtgccttataatgaacttactaaacctattctcaaaacacgagacacaaaaacacaagaaaaaactttgttgggcgccactgggccccagaaaaagttccaagacccatctgtggtggcgacggcggccgcaaggagtatcagtggacacggggacaagagtgttcccagagagaactcggggacagaacagagcggggggattccacccaagaaaaagcccgggggcaccgcacgttttgagacaaccaagggatcgaggcaaagggcatac

SEQ ID NO: 45090 - DNA, 804 bp, Homo Sapiens
  misc_feature (680)..(680): n is a, c, g, or t
  misc_feature (735)..(735): n is a, c, g, or t
  misc_feature (745)..(746): n is a, c, g, or t
  misc_feature (790)..(790): n is a, c, g, or t
agaggtaatccctaggctgttgctctaacaaaataaatctgcagcatattttataagtaaccaatcaattataaaatctgcagcatattttaggtgtgatatgtctaaggtttattttgttagagcaacagcctagaaggcaaaattatttgccataaacatttccatcagtgggaactacctggcaggaggactttagtaaaatggggtgtttagccaaagatcatttttatgataaaaaatatccgtagactacatattctggtttttaaaatgtcttcagtatacatatgacagaaattttagtatgatcctgtaataagttacaactatactagtgagttgtaagtatcacgctgtctcaacgtctaatgcataataaaatgaaaggaatgtaaaacagtttgttccaaaaagatcagagattaaagactatccatgaaggtttcacttttaaggcaagaacccttttttatgcaagactatgtggcatcagaaaactaaaatgtgattcaccaacatgccagccaatgttcattaaaaatctgtcccttactatcaggtgcaacagcgaccgggaacatcaccttacacagtataacgtggaaagaaaagacaacattggcgcacttctcctctcgaaaaccttatctttctattcagcttatcaactactgcangactggcactactgcacacacggagagatggagaagaatctacatcatcctaggnactgctgganngttaagctccatggccttctacacctagcaagctgactaaaccnaaaaaaaacaaact

SEQ ID NO: 45091 - DNA, 904 bp, Homo Sapiens
tttgaattgagctagagcctggtttaggacaaaggattaagtttgttaatgaacactaattcagggcttctacttgagaccccaccgagatcaccagttctcatgtaacctgggaagagccataaaggggtaccccccaccccaactgccttcctggaagcatgcctgggaagtaagctgtaggcctgatccgagccaggaccactgggatccgtgcaaaggccaggggagggtagaattgaatcataggagtgaactccggcacctgttgtcttctgcgggtgacgcacactttaaatggaagagaggttgtggctataacttgtggctgggaataataaagatggcaccgccaaggagcctcaccttgcgtgagtgagtactcagttgggcgctgcagggtctggagtctgtgtgagacgtgtgtgattgtgatgggtgcgaatcagcgtatagcacttgagaacaaggcagaccttggagcagaatggttatgtgaaggatcacatcacccatgggaaggggggggaagtcatacgtcctggaggtgctggtcctcctcctggaactgccagccttgctaggactatcaacatcaacagcattgcctggtaaaccctactgtttgtgctccccactgtgtcccatgactggtgttaaaattctccctactttgatcatctgccctgcccaggcctttgggctttatgccagcacagagctcaaaggccaggtagcagcacatcctcaagcatgagagctcaaaggggtacatttgagtctctggacctggcttggaagaaataaaaatacgggtggaattccatctccaaaccccagaataccggcccttaagggcgggccggctctaaaagaatcccctccaagggggccacaagcttac

SEQ ID NO: 45092 - DNA, 717 bp, Homo Sapiens
gcctcttcctttgtatccagtactaggagagtactcactggacagctgtgatttgggactgctttccagcccttgctggcggctgcccggagtctactggcaaaacggactctctcctggagtccagagcaccttggaaccaagtacagcgaagcccactgagttcagttggccggggacacagaagcagcaagaggcacccgtagaagaggtggggcaggcagaggaacccgacagactcaggctccggcagcttccctggagcagtcctctccatccctgggacagacagcaggacaccgaggtctgtgacagcgggtgccttttggaacgccgccatcctcctgccctccagccgtggcgccacctcccgggtttctcagactgcctggagtggattcttcgcgttggttttgccgcgttctctgtactctgggcgtgctgttcacggatctgtggagctaagcagccttagatagcagcagaaggctttttggattctcctccttgaaaagattctcagttaccaaacgtctccacctagaaaataaaaatacattaagatgtgctttcattgctggttgtcagtttttaaattctctttttcccttatgtttctttcttgtttcgcgtcgcttattactttcagtttccttgtattttaaatatttgtatttatttcattaaatatttcattcgtaaaaaaaaaaaaaaaaa

SEQ ID NO: 45093 - DNA, 550 bp, Homo Sapiens
  misc_feature (479)..(479): n is a, c, g, or t
  misc_feature (498)..(498): n is a, c, g, or t
  misc_feature (500)..(500): n is a, c, g, or t
  misc_feature (526)..(526): n is a, c, g, or t
  misc_feature (532)..(532): n is a, c, g, or t
  misc_feature (538)..(538): n is a, c, g, or t
aaggtgttacttggctggatcaattccagcatctaatttagttaagagactttaaaaagggattatatattggagaaaaaggcagaaattaaaagtgtattttcagtcttaatatctcacataaatgaccttagaattggctatgttagtagttagtttatgtggtacatgttaaacaccagtagagaaacaactatggttgtgattaaatcacttgactttcctgccagagctagaatcttaactcctttaaaagacgactctgggaaatccagtgtttgtatgtaaaaataaaaggtaagttaattctagattgaggggcagaggctatttcttaatctccaatctccttgggaagggaaagtattaggaggcagtaatggagtagaaaggtggggatggcaaataagagaaagatttaatgtaacaaaactgttttgccctcttcttaagtaaataattattggaataattagtgnaaccatcacatagtaatgngnattttgggcttgactaagtgggtaanggatgncttttnattcacctttct

SEQ ID NO: 45094 - DNA, 783 bp, Homo Sapiens
gacctctgacagcctgctcaggccccccagtgcgggtatagccatatctgtctgtctagactctgcagtcaccagctctgccagctcgaggaggcctgctaggctgccactcagcctcctggctttggctgtccctctccccagcctggagagggctggcctggtcactagaagggaggattgtctcaggcgagtcttggcctgagaggaaagccccctcccaagctcccaagaggctcctgaggaactcggggtgtgaacccgcattggggtgtgctcagggttgtgagtgtgttgcccgtgtgtctgtgtgtatgtgtgtgggggtgggcaggcttggaggggacgctgggacccttgccttagatttctgactggtagggtttctccaggctcagccccacctcttcactccctgccaaggtcccatgggccacctcctgcatgtctccgcggaggggctaccttccttcccatcgccctgcctcgcagccagactcatctaagggttcttgtccttgtctatggggcaaactgtagcatccctcaccctggtcccctggcctctgtaaagccaccagcctgagggcagtggcaggagatgggggtgggggggtgctgctctgggctgggttgggaagggagttggggaggggtttaaatgcacggtgcatgtctggtgtctgtcatgccaacctagacacctcatgcttctgtctcccccaccccactctgttttacatcttttataaatgtgccaaactgtgtggcctctgccaggaa

SEQ ID NO: 45095 - DNA, 417 bp, Homo Sapiens
tgttggagtgagccgagatcgtgccactgtactctggcctgggagacagagcgagactccatctcaaagaaaaaaaaaaaaaaaaaaagagagagagacctggagtagagattctgtcaaagaactttttctttcttgagaagcatctgaaatggaatctgttgtctcttcgaaatatgtactgctgtaacagtgaaacaaccctcagagtatgccttcgtgtgggctgctcgttgtggttttgaacttgggggaactgtctgtgtttgggtcaagaatatgcaactggctgggcacattggctcacgcctgtaatcccagcaatttgggaggctgaggcaggtggatcacctgaggtcagggcttcaagaccagactggccaacatggtgaaaccccgtctctactgaaaatacaa

SEQ ID NO: 45096 - DNA, 564 bp, Homo Sapiens
gcacgaggacaacctctgccagaagcaggtggtggagaagataccactgcccttttttgccatgtccctgagcctgtcccccgggacccacctcctggctgttggctttgctgagtgcatgctgaggctggtagactgtgccatggggactgcccaagactttgccggccacgacaacgcagtgcacctgtgcaggtttacaccgtccgccaggctgctcttcacggccgcccgcaacgagatccttgtgtgggaggtccccggcctctgagatgcagcagggactgtggtggtgggcatcacgcctggtcatgccaggcacctggacacaggcttggcagaggcgccaggttgtcaatggcctcatgctgggacaggccaggattcacgtaaatcgcctggagcaagctgttgtaaatttggcgccctgtgaatactttcatacctgttgcccttttgcctaagaaatctttaatgtttctatcttgtaataaacatgggcatttattgcaaaaaaaaaaaaaaaaaaaaacacttaatgggcggccgcaagcttattccctt

SEQ ID NO: 45097 - DNA, 519 bp, Homo Sapiens
cagacgcatcactggccgagcccactggggctcacaccacgcagggaggtggggaagacagggctccagctaccacaggacgggctctgggtatagccgttccagtcagggacagccgtggagagaccagggaccaggaagcagacagtatgagcatgaccagtggagaaggtactagtcaacctccagaaagagtatggagagaaaaagaggcacacctggacgcagagccctgccagcgccctcctctgctgttgcagctgcaaggagaccatgcctgtgggagccaggcctcgcttgcatgaagaaggaacgatgcctttttcaatggtgtctccctcccattgtgcagaagagcttttgttggcttctctcccgagcttgtgcctgattctgtggcccaaaacaatcattgttaacatcttcatgtgtttcattctgatctttcattcatatatatgatgcctagctaatttcattttaaaataaatgggaatctgttgtaaaaaaaaaaaaaaa

SEQ ID NO: 45098 - DNA, 617 bp, Homo Sapiens
cccatatcaaccttataaggaaggtgtttgtagatgatgcaactgagccttaagaggactaattccctttttctaaggcacagagctggtaaaatgtgaagtaatagtgaacctaacagtcagagacaggcagcatgctcttaactagtgctcttcctaaagttcctttaatgtccttttgagattttgagccatggaacttacttgttcacctggctaagaactcatggccactgtggaaatcttggttagggagtcaaagaaactgagcctggggcaaacgaggcttcccacactgccaggggagcctcactgtgaagtctaggctcagacaggcatcaacaaacctattcaccccaccatcatcctgatctaaccattccccagtcatcccaggaaaaccactcacagcctgacactgggctgactttcttgaagatcctcatccaattggtgtttttcagaagtgttccaatattatgaattctgtgttgtggagaaaagcaaccatgcatttactggtcaatgccttcttgtatatgtaattcaatacttttacttttaatatcctcaccttatctaatctttgaattttgtcatgtaatttattgcttcat

SEQ ID NO: 45099 - DNA, 598 bp, Homo Sapiens
  misc_feature (548)..(548): n is a, c, g, or t
  misc_feature (585)..(585): n is a, c, g, or t
atacaaccttcagctcttccctctctgtttcccttttgcccacattgcaaatagtcttcataatagaaccctcactgcaacttaaaagggtcccatttcttaactcagcatttcatataccaagaacacttgcaaagatttcttcataatgtgattttttaatttttcagttccagaagcatttcctacagttcgaacgttattttttctctcagattttcaacttgaagctttgatttgcactgaattaacttggataaaattttagtttctctcttcagctaacagatttggaagcaaattacagtatacttgaataattcaggtactacctgttgacctggaattttagtgattctgggaaagttttccagacaaagacaccaatagagtgaagggttttttccccaattactattttattgttttttaaaatgcctttttaaaacttgtgtgatgtggcaaaatagtcatatgttcaattaatttatattttattcattccttttcaattctggttattatgtaacctcaagtactttatctgntcttttaaagtattttataaaatgaacgttaactaanaaaaaaaaaaaat

SEQ ID NO: 45100 - DNA, 667 bp, Homo Sapiens
  misc_feature (351)..(351): n is a, c, g, or t
ggacaaggctgtgttcgcccagtacgactccttccacgtagactcggctgcggagtactaccgcctccacttggagggctaccacggcaccgcaggggactccatgagctaccacagcggcagtgtcttctctgcccgtgatcggaaccccaacaacttgctcatctcctgcgctgtctcctaccgaggggcctggtggtacaggaactgccactacgccaacctcaacgggctctacgggagcacagtggaccatcagggagtgagctggtaccactggaagggcttcgagttctcggtgcccttcacggaaatgaagctgagaccaagaaactttcgctccccagcggngggaggctgagctgctgcccacctatctcgcaccccagtatgactgccgagcactgaggggtcgccccgagagaagagccagggtccttcaccacccagccgctggaggaggccttctctgccagcgatctcgcagcactgtgtttacaggggggagtccatgatgccttcggcatgcatttgacatcgatccctttggaccgggatagagtccaaaaagataacgccatgtaggccatgcaccatatcggaataaaagcgcttttggaattgagctgtcggccaggccacttgctgaacttctgagcactggact

SEQ ID NO: 45101 - DNA, 858 bp, Homo Sapiens
  misc_feature (746)..(746): n is a, c, g, or t
cagtgttttctgcttaatcatttgctttgttggcatctgtgtttatttacttgtacaccacatgcagtttacatctgtcttaactactccttcccaggtaaattccaattatatttgacatccagctaagagggcccatctcttctcacctctttcctagtcagtatattcagcaaatatttattgagcccttactgtgggcaaatcattgtactggataattgagaaaaatagataattcccttattcagtaaatgtctactgagcacaatctagtgaatcattacagtatggcctcattgttttgtttgaggtgtgttattcataacaatattttacaccattcgtatcaatgtaattatagaacacaatatacgatcaaggataagtaattgtgtggttatctgccatttaaaagtatccagtatttgatcacattattataaataatgaaaaaatgatttaatctgtaataaactggtttattgtgcagtgactgtaatatactagagttataataaattgtttactctgcctcaccaaacacatgctaggatataacccccaaaataagtatttaactttgcattaggtataaaggagactgggtgctataattagattattttgaggcagacagagagctgttatcctaactgatttagtatgttctgtaattgagaaaatgttcaccaaattatactttttagtgatttacatgtcattttataggggacatgttctgngtatagcgaataaataacttttatagtatcacaaaatgttttggattccttagtttcttattaggatatgaggttctttacctatacattgattcatccatttggattttgc

SEQ ID NO: 45102 - DNA, 524 bp, Homo Sapiens
taatgatgctatttggggaaaggtcttttttgcttaattttgttttttaaaactctgatgattgcttgagcaacaggcaggttatctgcctggttgaattctggttgaaccgtgtattctaatatttctggttaagtggtgactgggtaaggaaaccacttggggtagcagttcaacaattcacttacgaatgtttataagctttccatttcctaggtaattttttaaaagccagtcaaaacaaaaactttactgaaaatggacagaaataggaaatggactttttccttactgtctatacctcctgaaccttggtattgtaaggatctggggacctctgggtctgttctgaccattccctagtctccatggccaagcactcaaggattgatggacaccacacaccagctatattcatttgccaagatcaacagctccttctccaaacaactcaagcccccaattcccatcgcattccatttgggtgagatgcaactaacagccccttcctggatgaaggagtc

SEQ ID NO: 45103 - DNA, 1037 bp, Homo Sapiens
tagttctggagctggttggcatggcaactatcatggacccagacatgagacacacaaggaatcccactggcaaggcacaggaagtacttccgggttcgacaatgctgatccgcaattagaagacactggtaagctgtgttacactgcaagaaaagaagcagagccaatgggtttggtgacttctgtggaaagctcctaagcagcagccataatgagccatgaagagcagatctgaagactcccaactactacccaaaatgtgatttagtctatcctgcccaaggccactcttctcactggaaggcccaagtaatttccatagatgttctctctgcctcacctgcagcatactgaggacctaaatcctcaacggacaaccaaaacctatgaactcagcctttcaggctaaaaatcagcaaccctaataggggtttctactactaaacataaacatcaatcttcttttgtcccagcaacagaaccatagccattaactaacccaaggtcctaccttctcttccctatacacaacaaaaattctatttcatgcaaaaacattttggcagtttctcagttcctgaaatctctggctactttatccaggttccccaacccctccccagcctcttctcaacacagcaagttggctcttatcattgccactatattaggttacccaaagaaactcctcccctgggcttccttggaatcttcaaggatatagccagctcctgctcgaagctgggattccgaataccgccttggtgaaaggaggaaattccccaaattcctatattaaaaaaaaaacccagattttttttataccccttaaaaacaaattcccctttactcccacgtcttccaaatccacccgaagaccaaatactaagtaaaacagcgccattttatacccccaatgggggggcggcccctttccaaaaaacccccccgggggggggccccaactattacgaccgcacacaccttttttttttaacagaaaggtcccctctctaaatgggggggctggtcacaac

SEQ ID NO: 45104 - DNA, 1092 bp, Homo Sapiens
  misc_feature (898)..(898): n is a, c, g, or t
ttgatgaagcacgagctcgcttcatgctgcagaaatcatttcggctctcatgttcctccatgataaaggaatcatctatagagatctgaaactggacaatgtcctgttggaccacgagggtcactgtaaactggcagacttcggaatgtgcaaggaggggatttgcaatggtgtcaccacggccacattctgtggcacgccagactatatcgctccagagatcctccaggaaatgctgtacgggcctgcagtagactggtgggcaatgggcgtgttgctctatgagatgctctgtggtcacgcgccttttgaggcagagaatgaagatgacctctttgaggccatactgaatgatgaggtggtctaccctacctggctccatgaagatgccacagggatcctaaaatctttcatgaccaagaaccccaccatgcgcttgggcagcctgactcagggaggcgagcacgccatcttgagacatcctttttttaaggaaatcgactgggcccagctgaaccatcgccaaatagaaccgcctttcagacccagaatcaaatcccgagaagatgtcagtaattttgaccctgacttcataaaggaagagccagttttaactccaattgatgagggacatcttccaatgattaaccaggatgagtttagaaacttttcctatgtgtctccagaattgcaaccatagccttatggggagtgagagagagggcacgagaacccaaagggaatagagattctccaggaaatttcctctatggggaccttcccagcatcagccttaaaacaagacccttacccttccaggagcaagtgaagaactctgtgaaagatgggactttcagatatcaactattttagagtccaaggggagccatgccactanaaataattgataatgaaatgagattttatggaggtatacccgctccacctatgagcggcctgtctctgtggggcttggggatgttaacagggagcccaaaggagggaaaagtgtgaagaaataagttagatctgagaaaattcttgagcccaattcaggcttcctaatttccggagaccaacccagaaccgtct

SEQ ID NO: 45105 - DNA, 567 bp, Homo Sapiens
caaggggctcatcctgggactctggaagctgcttccctactgggagaaatgtgtgtcggagctgcaggggtccctaccctcagagacccccgactgcagggaacccaccccataagagggtcacggatgtccatgtccgcccaccccccgtggcttctgctgtggctatattggcctagaggggctgactggggaggagcagggctaagccctcagcatttgctcctgtccctgccttttcacccctgctgcctgaagtggtagccccgcctgctgcttctctacctcccctccccacctcttctctcccctacagggcccttgctgcgtgatggggtctccatgcactttatttatttgcagtctgttttctaggcggtggagcttctagacaccgaccggaatgacatacgtttctgtgtgtgattcactgtgtactggtcagcacaggctggccagagagatgttcttgtttctggtgttgtcacgtcttcttgttttctctaagtttaaaaaaaaaaaaaagtccttggtttaatacactaaaatcccaaaaaaaaaaaaaaa

SEQ ID NO: 45106 - DNA, 623 bp, Homo Sapiens
  misc_feature (449)..(449): n is a, c, g, or t
  misc_feature (462)..(462): n is a, c, g, or t
  misc_feature (553)..(553): n is a, c, g, or t
cttgactggagaaactccacgatcttcctgaagaagagaaatggatgtttccaaattccacaataagcaatatgtggtgataatgaaaagaatgattcagtcttgacggtgaatggaagacacttacctaacaagtactgctcatttacactcaaattaatcttgaagtagtcttaaaatgtgtaagaagttaaaacttgagaagcaaaaaaatgcctgcaaaaagaagatcattttgtatacagagaaccggatgaatataagcaatgaagatgaacatttattgatcttctacatacaagacttcaccataaggccaggagcagtggctcacaccttgtaatcccagcactttgggaggccaaggtgggcggatcaccttgaggtcaggagttcaaaaccagcctgaccaacatggtgaaaccctgtctctactaaatattagcggngtgtggtggcggncacctgtaatcgcagcctttcaggaggctgagacaggagaatcgcttgaaccctagaggcggagtttgcagtgagccgagatagtgccatngtacttcagcttgggcaacagagtaagactctgtctcaaaaaaaaaaaaaacaaaaacaaacaaaccaaa

SEQ ID NO: 45107 - DNA, 684 bp, Homo Sapiens
gcgtccgctagatgggtggatcacttgagctcaggagttccagaccagcccgggcctatggcgaaactccgtctctacaaaaaaatagaaaaaattagccgggtgtggtggtgcatgcctgtagtcacagttacacggcaggctgaggtgggaggatcacttgaaccccagaggtcaagactgcagtgagctgagatcacaccactgtactccagcctgggtgacaaagtgagactctatctcaaaaagaaattaggatcaatttgtcaatttctacaacaacaacaacaaaaacccctgttgggcaccttgattgagattgcattgaatttatataaaactgttgggagaattgacatcttaataatattgagtcttctggcctataaacaaggtctgtcttcctaggtattaatgttttgtcttctatttctcttaataatcttttgtagttttcagtgtacaggtctaccatgtcagcatttcatagttttgatgctaaatggtattttaaaatttcaaattctaaccacttgttgctagtaaatagaaatacaattgatgttgaacttgtatccttcagccttgctaaactgtgagttctcatggtgtttttgtaaattacatcaacagtcatgtgttctatgaataaagagttttactccttcctttctaaaaaaaaaa

SEQ ID NO: 45108 - DNA, 623 bp, Homo Sapiens
aaaattttctagtccatcctaatctgaatggtgctgtttctatattggtcattgccttgccaaacaggagctccagcaaaagcgcaggaagagagactggcctccttggctgaaagagtcctttcaggaaggtggagctgcattggtttgatatgtttaaagttgactttaacaaggggttaattgaaatcctgggtctcttggcctgtcctgtagctggtttattttttactttgccccctccccactttttttgagatccatcctttatcaagaagtctgaagcgactataaaggtttttgaattcagatttaaaaaccaacttataaagcattgcaacaaggttacctctattttgccacaagcgtctcgggattgtgtttgacttgtgtctgtccaagaacttttcccccaaagatgtgtatagttattggttaaaatgactgttttctctctctatggaaataaaaaggaaaaaaaaaaaggaaactttttttgtttgctcttgcattgcaaaaattataaagtaatttattatttattgtcggaagacttgccacttttcatgtcatttgacattttttgtttgctgaagtgaaaaaaaaagataaaggttgtacgg

SEQ ID NO: 45109 - DNA, 660 bp, Homo Sapiens
tttctccccatgtgatagtctgaaatatggcctcgtgggatgagaaagacctgacggtccccccagcgcgacacccataaaagatctgtgctgaggtggattagtcaaagaggaaagacttgcagttgagatagaggaaggccactgtctcctgactgcccctgggaactgaatgtctcggtataaaacacgattgtacatttgttcagttctgagatgggagaaaaaccgccctatggtgggaggcgagacatgtttacagcaatgctgccttgttcttctttactccactgagatgtttgggtggagagaaacataaatctggcttacatgcacgtccagtcatagtaccttcccttgaacttcattatgacatagattctattgctcacgtttgttgctgaccttctccttattatcaccctgccctcctactacattcctttttgctgaaataatgaagattataatcaataaaaactgagggaattcagagacctgtgccagtgcaggtccttagcatgctaagcgcaggtcccctgggccgctgttgtttctctataaaaaaaaaacatgcaatcatatcaccactccgtctgatgatgaaccagccacgctacattatcagataacctgagagcaatcaaagcacccgaaaca

SEQ ID NO: 45110 - DNA, 558 bp, Homo Sapiens
  misc_feature (557)..(557): n is a, c, g, or t
ctaagcccaagtctgatcggggctcccattcacattctcgaagcagatctaaggatgagtatgagaaatctcgaagcaggtctcggtcccgatcccccaaagaaaatggaaagggtgatataaagtcaaaatccagatcaaggagccagtcccgttccaattcgccgctacctgttccaccctcaaaggcccgttctgtgtcccctccaccaaaaagagctacttcaagatcccgttctagatctcgctcaaagtcaagatcaaggtccaggtcgagttccagagattaactcagaactccttgtttgcacattattatggaacactttcctacttaggcagttactcttccatgtttatacttggcctcttctgcaagaggaatctcttgaaaacaggggcacacagaaatttgatttgtggccaaattggatgaaaaagatgaggctctaaggaaatggtggcatgaagaccctctcccttctttgtagaattaagataactttgattttatagcttttgagctaacgtaacttttgtaaagattaagctcattna

SEQ ID NO: 45111 - DNA, 628 bp, Homo Sapiens
atgttagagaaagtgtccccatctcactgccaaaaatgaaagaaaataattaaactctttaaatgattaaatgtaatgattctactcgcagtgcataacagcacatatttttgacagattattttttaggcaattacctttccttaaggtatctgatacagtatagtaaagaatcacttatatcagtaatagcacttgagagatagcaagtcaccaagaaacttaattttcatttaaaattttattttgtgaataaggtcaatctacaatcccagataactacattttttttcatagatggccagtgttttcaacagagatttaaaatggaatattaaaattatagtgattattcagaagcattttaatttagaaaggagctggtttgttagttcactgatgacattttttgacaaacattttataccattatcacaataatcagacttgaattttttttggagttccttcatgtgaatgaaaactgagttaaaagaaagtaggcatttaggtctggatgcagtggctcatgcttgtgatcccagcactttgggaagctgaagcaggaggattgcttgagcccagaagttcgagactagcctgggcaacatagtgagactcggtctct

SEQ ID NO: 45112 - DNA, 845 bp, Homo Sapiens
  misc_feature (701)..(701): n is a, c, g, or t
ctttaactcctggcagcgcccagccaaggcctgcttccatgcaacactccttccaaatggccatcccagcatgcttccaagcaggcttcatccgttcctctggaccctcatctcttaagacctgccgcctataaaaaggattatatcttgagaccctatcctctaaaattttttccacacccaaaacaaaaaatctctgggtcaaaagtctaaaacgcttaggctggcaaccatcagatccttgcccatggtgtcctcaagcctactctcatgaaatggacaacagtacacgcatatggggccagttccacatatttggcaaccagaccagcatccaggacaacacaaagtatgttgtttgttgttagagggcttgggacatttcactctttgccagcctcagcttaatccaggagacaaagattattttccttattatctcttctgcataggatctgcaatcagaactattgaacttctccattcagaccgccactcacacctatgggaaaagggtaatgtatcatcggcttagcaacagggaatactattcgtatgatggaaaatggggacaaaaggctttggtacataaaacattattccttccttggcctaaaaactcatcgccacctacattaaagctaatatgcctgattactgtttttagagaacttattttattagggcagttccaagctcanaaatacgctaactggcaccttgttagctacataaaaatgcaccctagacccgaaacttactagactcattataaaattttctttaaggtgtccacgcagtccctggtcacacttgaagcagtccggagaaatatcagccctacc

SEQ ID NO: 45113 - DNA, 556 bp, Homo Sapiens
gtgatgttatcgcccaacacgagagactgttacatcttggtgcactgctgagactacgacacttggtttctttgagtttgactaaatattttacatgagtgtaattatacagctttcctttttgactgtcttattttacttaacagaatgttttgaagatttgtccttattgtagtacttttcaagatttcctcatttttaaggctgaatgctatcccagtgattgtacgtgccctgtttgctgaatctactcatccttaagggtacatttgcttccaggtaacatgtttgtgagtaatactacaatgtgcatatatctattccatgtcctgctttgtctgtttgggatatttttcatacactgattcagtaccatgtgtattcccttgcttttgttgtctcatccgttgatgctacgtcccccaaattattgccacgaccagttgtaatgaagcttcacccttctgtattgtgctaggaattttacagctataggttttacattatagtcttcattcatttttttaaaattgacacatgtaactgtgcatatttg

SEQ ID NO: 45114 - DNA, 678 bp, Homo Sapiens
acaaactcatccgcaaccccaacagcttgaagaggacagggacggagagctccagacctaacactgccttgttggatccaagctcccctgaattctctgctgtggtatcagtgggcgattggctccaggccattaaaatggaccggtataaggataacttcacagctgctggttataccacactagaggctgtggtgcacgtgaaccaggaggacctggcaagaattggtatcacagccatcacgcaccagaataagattttgagcagtgtccaggcaatgcgaacccaaatgcagcagatgcacggcagaatggttcccgtctgagccagtactgaataaactcaaaactcttgaaattagtttacctcatccatgcactttaattgaagaactgcactttttttacttcgtcttcgccctctgaaattaaagaaatgaaaaaaaaaaacaatatctgcagcgttgcttggtgcacagattgctgaaactgtggggcttacagaaatgactgccggtcatttgaatgagacctggaacaaatcgtttctcagaagtacttttctgttcatcaccagtctgtaaaatacatgtacctatagaaatagaacactgcctctgagttttgatgctgtatttgctgccagacactgagcttctgaaacatccctgattctct

SEQ ID NO: 45115 - DNA, 838 bp, Homo Sapiens
tatgctctccagatatatatgtatataaatagtgttgatataactgtatatacacatgtatatgtatgagttttaaatggcaatcttttacatttagcaaaatgctgcccctactggaatattgtcactgcagtggcagttgtatgtaatgatttaaaatacattatcaaaagttatttaaagaacatttaaagtctcatctaaagacatccacacactatttatttatcttccttttccttttattgttgtgtttttcttaactgaaagggagactgtcattttaaaaatgccatctgtcccatgagagtaagaaagagctggagattcacttgaggagctttgtgcatttttcctctctctgaagtggagatgttccacagaccagactgtttatttcacttataaagcaatcctaatatttccgttagtgtatgtcagccaccatctcctagatcaacttaattcaccaatttgcctcctcctttcattaataaataatgattattgagatcattttgcctgggggaagttaactactcccatgctccagggaaatatatcacctaatcgttattttgccttgttcaaaattcaaatttgaaagaaggcagctctctcatgaagctgtcttaagcacattttagttaggggccctcaccagagtctttttttctttctttcttctctttactttatataatatctgggcaagtcccaagtttgacatgttgctgacaatagaattaatgcttattcccaacagttagggtatttcacataggaccctactttgccacattgattgcagatatttagggcagaaggataaatatat

SEQ ID NO: 45116 - DNA, 793 bp, Homo Sapiens
  misc_feature (374)..(374): n is a, c, g, or t
  misc_feature (389)..(389): n is a, c, g, or t
  misc_feature (532)..(532): n is a, c, g, or t
  misc_feature (536)..(536): n is a, c, g, or t
  misc_feature (630)..(630): n is a, c, g, or t
gtgaatttccaggtacttggactttttgtagaaggagagagaagaagatgaagtttgccaggagggcccatattttttcagctgaagggtaaaatctttctttgcagagacagtattttgctgaatactttttataatgtgatgattattaaaaaagcaaaaattttggtcacttccaagctagaaggaggaatcagataccctttaatattttttcctcgctccttctggtatatgcatgtcactgcatgataattgagttttcctttgttttaataaaactgttctcagacattaagctaaactaagagaaaaataactttgttgccaaaaggttgtgctatccagattttttatatgtctgcatgtttaanaaaaaaaagcaacanaagaaaatgcactctaacttatgtgaactgagagaaaaaaatcaggttttaaacaggaaaacctatggggaatgatattttttgaaagacttttgtataaagttgagtacttagaaaaaagacaaaccagatgtaatatattntggnggatgtttttatttcttggatttatagtaccttatactaaggttaaaaaaatatgcttgatattgtgaaaaggtgaaattcttcaccaacattncatttgctcctttgtcatattggaatgccaatataatatagttaatgaaaacagcattttttaaaaccgaaatattgaaatgggggaatggtgtaccatttgcactgtgagcaaatgctaatacagtaaatataatggggtttgctgacaatcaaaaaaaaaa

SEQ ID NO: 45117 - DNA, 589 bp, Homo Sapiens
  misc_feature (19)..(19): n is a, c, g, or t
  misc_feature (33)..(34): n is a, c, g, or t
  misc_feature (180)..(180): n is a, c, g, or t
  misc_feature (206)..(206): n is a, c, g, or t
  misc_feature (272)..(272): n is a, c, g, or t
  misc_feature (277)..(277): n is a, c, g, or t
  misc_feature (307)..(307): n is a, c, g, or t
  misc_feature (311)..(311): n is a, c, g, or t
  misc_feature (315)..(316): n is a, c, g, or t
  misc_feature (330)..(330): n is a, c, g, or t
  misc_feature (358)..(358): n is a, c, g, or t
  misc_feature (368)..(368): n is a, c, g, or t
  misc_feature (374)..(374): n is a, c, g, or t
  misc_feature (387)..(388): n is a, c, g, or t
  misc_feature (433)..(433): n is a, c, g, or t
  misc_feature (441)..(442): n is a, c, g, or t
  misc_feature (449)..(449): n is a, c, g, or t
  misc_feature (451)..(451): n is a, c, g, or t
  misc_feature (453)..(453): n is a, c, g, or t
  misc_feature (457)..(457): n is a, c, g, or t
  misc_feature (464)..(464): n is a, c, g, or t
  misc_feature (483)..(483): n is a, c, g, or t
  misc_feature (492)..(492): n is a, c, g, or t
  misc_feature (495)..(495): n is a, c, g, or t
  misc_feature (497)..(497): n is a, c, g, or t
  misc_feature (499)..(499): n is a, c, g, or t
  misc_feature (501)..(501): n is a, c, g, or t
  misc_feature (510)..(510): n is a, c, g, or t
  misc_feature (513)..(513): n is a, c, g, or t
  misc_feature (524)..(524): n is a, c, g, or t
  misc_feature (531)..(531): n is a, c, g, or t
  misc_feature (533)..(533): n is a, c, g, or t
  misc_feature (542)..(542): n is a, c, g, or t
  misc_feature (548)..(549): n is a, c, g, or t
  misc_feature (571)..(571): n is a, c, g, or t
  misc_feature (573)..(574): n is a, c, g, or t
  misc_feature (578)..(578): n is a, c, g, or t
ctgcaggaatttggcacgngcctcgtgtccatnntgggtctttgactctgggctctctgctctgcatttcttgaaaccattattatttatcattttcctcacactcttttgcgtatggctcctattgcactcaaaatgtttttgagattcatccatcttgttttgtgtgtcaaaagtttnttcctttagccgttccatggaatgantgtatcacagtttattgatccattcttgtattgatagatatttgaatgtttccagtttttcctatnatgantaaaactgctatgaacattcttgtataaanaaangtanncaaaaatctcgagnctagggggggcccggatacccaattcgncctatagtgngtcgtntttacaattcacnnggccgtcgtttttacaacggtcgtgacttggggaaaacccttggngttacccnnactttantngntttncatgcanatcccccatttccgccagnttgggtaantancngngnggccggaancgntcggcctgtcnaaacagntngggaccttnaattgnngattggaaattttgtaatgggntnnaaantttgtttaatt

SEQ ID NO: 45118 - DNA, 594 bp, Homo Sapiens
  misc_feature (570)..(570): n is a, c, g, or t
gggatttgaacccatgcaatctgacacaagagttcatgtgtctaatcattatctgtggtttgggggacaccattacattaaaatgaatgagtcactaagtgagtcactgtatataaaatacttggaaattgtaaagtaatatacaaaagatattaacaaagtattattcatggtaaacaaatcacatcagtagcaaacacagggtgggaactcaatcttatgttatagcttactcttaagaagaatatgtgaagccaggaacatggttaaaggtacagaccagaaaatttctgacatgtgataaatatttcagtgacttttcagatttatttcttgttagccgctgtgtctatttggtgctacaaaaactgaaagaaacaaaatccctgatgtaagggcttataataaatacacagtttggagatgaactaaggatattttacatttacgggaaaggattggacaatagtatcattttctcaccatttgcatgtacatcatgtctttccaattgttttcattatttttctgaaagagctgcaaaattgtgcagtggttcaacctgaccanagtggtattatgctgctgggaagt

SEQ ID NO: 45119 - DNA, 676 bp, Homo Sapiens
gctcaacagcctgagaaaggaacgaggcatgaatacgtttctgttccgacctcactgtggagaagctggagccctcacccatctcatgacagcattcatgatagcagatgatatctctcatggcctaaatttaaaaaagagtcccgtgctacagtacttgtttttcttagcccaaattcccatcgccatgtcaccactaagtaacaatagcctatttctagagtatgccaaaaatccttttttggatttccttcagaaagggctaatgatctcactgtctacagatgacccaatgcaattccactttaccaaggagcccctaatggaagaatatgctattgctgcacaagtcttcaagctgagcacctgtgatatgtgcgaagtggcaaggaacagtgtcttgcagtgtggaatttctcatgaggagaaagtaaagtttctgggcgacaattaccttgaggaaggccctgctggaaatgatatccggaggacaaatgtagcccaaatccgcatggcctatcgctttgaaacctggtgttatgaactcaatttaattgctgaaggtcttaaatcaacagaatttaaaaaagtataccctaaaaaaaaaaaaaaaaacttccaggggggcccggttcccaattcgccctttagtgagtcgtttacaattaactggcgt

SEQ ID NO: 45120 - DNA, 854 bp, Homo Sapiens
  misc_feature (568)..(568): n is a, c, g, or t
aaatgaaagaagggagtttgtactggtgccatttctcccttcagttgctggttaatgggatttgctagaaaaaattctcccggttgaagggtgaaaacagacccttatgtgtatatctgtacagagatgtgtatatgggatgtggtggcactttgctgaatgtgaacttgccttgtcaatggaaagattgaaaagtattatgtttatttatacatttgtataaatctatatatacacgtatgtatatgtgtgtgtatagataaagctatatacatatatttcccttaaaaatgtgtgtgtataataggtaaacagcctttgttaagcaagattaatgtctatggaaagttctggattattctgtaagccagaggaggtgacagtctagagtacatcatcagaacatactaaaatggaagtcctttggattatagttttgtttatggatattacacaatgaatgcttgtctgaacagttcttacttgccagttccactattcttcatcttcaccaccttctactggtcagtctttcatcacttaaaaaaaaaaaaaaatcacacatcanttgtggtttttttcccccttaattctgtctcttctagccagaagcatctggcttaagcatatttcatcaacttctctgttatttcttttaaagatctttatctctgaaattttcccagaagatacaagttttggtaatattatcaataggaattttgagacttgggcattcatctttgtctcaaaaacaaacagaaagccaaccttcaaataaaacaaattttgaagttttagctcaataattttggggacattttaccttaaattaccaaagaaccttaattatg

SEQ ID NO: 45121 - DNA, 831 bp, Homo Sapiens
  misc_feature (595)..(595): n is a, c, g, or t
  misc_feature (623)..(637): n is a, c, g, or t
  misc_feature (639)..(650): n is a, c, g, or t
  misc_feature (697)..(697): n is a, c, g, or t
  misc_feature (720)..(720): n is a, c, g, or t
  misc_feature (742)..(743): n is a, c, g, or t
  misc_feature (777)..(777): n is a, c, g, or t
ggcattatctgtattcaaaaaacagggtagttatattaaagcttaccaaattgatggtgaatttatcagattaacctttttgtggtgcagatggttctaagtatcaggtgacagggtattctactctttctagtcaattaaaattgataatgcagcatgattcataaactaaccagctgtgcctccttttattttgaggaccctgtagtcactataataaatttctaagccaaatttttcaaacaagatagttcttatagaaggagaaataataaatatgtgtgtgttgatgcatgcacacagaatgacctgtgaaaggaaacttaaattttgccggtaaaacaaacatatctctacagactgtgattatacttcataagcatttaaatacagttttatttatttccttaaatatattacttgggtaattaattttagatttgattgcaaagagcactgtatagcagttgggaccagctcttggcttggcttggcttggcttattgttaagagtttattggatcaagactaacaaataactttgtgatgaaaattcttcaaaaatatagctactctttttcagtataccatttanaatatttcatcaggcagagccctgaccnnnnnnnnnnnnnnnannnnnnnnnnnnacatgtcgggccgcctcggcccctccgagaagcttttctagacattncgtttggccgcggcgggcccagntagggtaaggggaaacatgggnncaatagctggttttcccaaggaagaaccctgggnccatggactaaggggctttgggatttcttcaccaattaaaaaaaacgcccccgc

SEQ ID NO: 45122 - DNA, 609 bp, Homo Sapiens
ggtgcttccgctaacccgggctggcgctgctaacctcacccaacgatccctgctgtcggaaaatgtccagaggcaccatccctgctatgaagagggaatgccagtacaacagccacaaggggtcttcctgtggccctcaaacaaaaaatcactgcattacatcagcagactgcattggagagaaaggcgccgggacagaaaagcctgagataaaccacctgtcattcttggagaaaaggatgctgcggctttcccgatttggttgatgagatggaaaatcaacccttacaggaaggacatcaccaattccggaaaggatgctgcgccagtcatgtttccgcactctgtgagacgttgaaatctccagaagttgcccaaggttttcaagctgaacacaggagaaatgactctggatctctgaggactgttttcctcaataaggagctgcaatcttggctccaccaccctccctccaaaacatctcgtgtgtctggtatctggttatattgtggcctgacagagaagtttctttcggggccagtgaattaaaaaaaaaaaaaaaaagaaaagcgggtcctaccaactcattaatactttaatactttaaaa

SEQ ID NO: 45123 - DNA, 937 bp, Homo Sapiens
  misc_feature (25)..(25): n is a, c, g, or t
  misc_feature (32)..(32): n is a, c, g, or t
  misc_feature (782)..(782): n is a, c, g, or t
  misc_feature (872)..(872): n is a, c, g, or t
tttgaaaaaaactttgcctgttggnaaaccanaattcttccttcatctcttccagtcaagctgctgaaaataaacttccacgaggagaaagagttcgtccaaagacaagaagtataaacagatttcctcttcattctgaaagttcatcaaagaaagcaccaggaagcaaaaacaaaaccttggatccacttttgatgtcagagcccaagcccaggaccagctcccctagaggagataaagcagcctatgacattctgaggagatgttctcagtgtggcatcctgcttcccctgccgatcctaaatcaacatcaggagaaatgccggtggttagcttcatcaaaaggaaaacaagtgagaaatttcagctagatttggaaaaggaaaggtactacaaattcaaaagatttcacttttaacactggcattcctgcctacttgctgtggtggtcttgtgaaaggtgatgggttttattcgttgggctttaaaagaaaaggtttggcagaactaaaaacaaaactcacgtatcatctcaatagatacagaaaaggcttttgataaaattcaacttgacttcatgttaaaaaccctcaacaaaccaggcgtcgaaggaacatacctcaaaataataagagccatctatgacaaaaccacagccaacatcatactgaatgagcaaaagctggagcattactcttgagaagtagaacaaggcacttcagtcctattcaacatagtactggaagtcctcgccacagcaaatcaggcagagaaagaaatanagggcaccaaaaaaaaggaagtcgaagttctctgtttgcagacgatatgattctatatctagaaaaccccatgatcttggcccaaagctnctagatctgataaacaacttcagctaactgtcaggagacaaaatcatataccaaatatggtagca

SEQ ID NO: 45124 - DNA, 751 bp, Homo Sapiens
ttggagtgtaccaatctctgctgtgaagccctaacgtgtaaactgaagcctggaactgattgcggaggagatgctccaaaccataccacagagtgaatccaaaagtctgcttcactgagatgctaccttgccaggacaagaaccaagaactctaactgtcccaggaatcttgtgaattttcacccataatggtctttcactcgtcattctactttctatattgttatcagtccaggaaacaggtaaacagatgtaattagagacattggctctttgtttaggcctaatctttctttttactttttttttttcttttttctttttttttaaagatcatgaatttgtgacttagttctgccctttggagaacaaaagaaagcagtcttccatcaaatcaccttaaaatgcacggctaaactattcagagttaacactccagaattgttaaattacaagtactatgctttaatgcttctttcatcttactagtatggcctataaaaaaaataataccacttgatgggtgaaggctttggcaatagaaagaagaatagaattcaggttttatgttattcctctgtgttcacttcgccttgctcttgaaggtgcagtatttttctacatcatgtcgagactgattcaatgtaaatatttttcattttatcatgtatatcctatacacacatctccttcatcatcatatatgaagtttattttgagaagtctacattggttacattctaattgagcg

SEQ ID NO: 45125 - DNA, 688 bp, Homo Sapiens
  misc_feature (669)..(669): n is a, c, g, or t
ttttttttttttttttttaaaaaaaacatttcttctgtggcttagaaatgtgccagtgtgttcaaaacatttacaccaatttcaccagatttaggacctattaaaaattcaaacaagtttctttttttttttttttttctgtgtaacagggatttttaaataacggactatatgcattcttttgttatttcacacttcagttaaagtgataacaatggtaaactgtgatcattatcagactgactgaatgctttctgatttccagtgagtgatctagttctacgtattacacaggtgtaatatctgtgagtgtaaataactggaactgtacactgattaacatgacagtttctcttttgttgttcttatctgtactgtattatagtatgtgggtataaatatctacaagtatacacacatatgtacttgtattccactattgtaacctgaaagaaagactatgtattcccttttttaattccgtactggtatttgtgttatttaaaaagcaaaattctgctctatttagttgtataatattagaggatactttgctgtgcacaattccaagtgccttagaacattgtttagctttcctaagtatatataaatgcatatatgtataaaattgggaaaagttacctcaataaaatcattgggaaatcccanaaaaaaaaaaaaaaaaaaa

SEQ ID NO: 45126 - DNA, 610 bp, Homo Sapiens
gcacgagaggccatcctcttattccgttctggggcccaggaagtggggaagagtaggttctcggtacttaggacttgatcctgtggttggccactggccatgctgctgcccagctctacccctcccagggacctacccctcccagggaccgacccctggcccaagctccccttgctggcgggcgctgcgtgggccctgcacttgctgaggttccccatcatgggcaaggaagggaattcccacagccctccagtgtactgagggtactggcctagccatgtggaattccctaccctgactccttccccaaacccagggaaaagagctctcaattttttatttttaatttttgtttgaaataaagtccttagttagccacttgtgtcatttccaggttttctggggggagtgcagggggagatgggtgatgaggtatgaacggatgcctcagtgtccaagatacaaaaggcaccacatagaagtttgctttttccctgcctgtcttggtcactaccacctcttccctgagaagggcgggccttccatgttctctcacccgcttcaactccacattgtccaagtcacagaaaaagagaggcctgaatggaga

SEQ ID NO: 45127 - DNA, 502 bp, Homo Sapiens
tgataccaacactgaacattcatcaggtaactttcctgaagttcagctcaagactaccctacctgctgtgtttgtgagaagagtaggatcacacacacaggtgcaatcttgaccacacttacctgcaagaggagtaaccagaggacacacttccttccttctttggtgtctgaggagtgtgaactgttggggtcagttaagacccaacataactctatcagaagaaaactgttgtttgcctttcaaccttgttttacagttctgcagtgtaatggaggacgggcaacgtgcatgtgcaggctcaccactcccaggcctctgacatgagggacatgtgacagtgtcattcagtattatgttcaaaagacatttttatcctgatcataattaatttgaaaactctttaagttcatgttatacaagatgatttactgtattatacttttccttttttatataatgtctaacaaaaaatacagctgcaacattttgattcctgtta

SEQ ID NO: 45128 - DNA, 572 bp, Homo Sapiens
cggccgccgctgcctcctcctcaagcgccttgacctcactacatctgctttccactggagtgaccgggcagaggcccaaggagaggccatgagggcagtgctgatcccaattcgagaggttctgaccccagaatcggacatctccattgcacacgttctggctgcccgagccgacctgtcttgtctcgtcccagccaccagcgtggctgtccgcagagggacctgctgtgccatcaacaaggtgcttatgggcaacgttccagaccgggggggccgcccaaatgagctggagcctcccatgcccacctggaggagccgaagagaggatggaggcccccagtgttggggtcgcaagaagaagaagaagaagtaaagggggactggtggtcgggggcggggggtcctccatgagatgctaatgctatcggtaatctctggggagtccgtttaaggctttccttggtatttggcacccaagccccccatctcctattcctgagtccccaaatgccctgctcccattcacgtcaataccaagaaacatgttctccagagaataaatttaatttatg

SEQ ID NO: 45129 - DNA, 669 bp, Homo Sapiens
cgtttttttggggaaatcctcgacaggtgcaggaaaattgtgttattgtaacaatttaccgttatctctctttcacggctctccatcagttgtgaacatctattggtttatcccaagtcactaagcatattttcattaggtaaacctgtttttccttctacagctgtttctggagtatagggtcgcatactcataaacccagtgtaactcagaaacgcatctaatattccagtaaacccatcataacgttgaaaaatcgtaaatcaaaccatcataagtcacggtttgtccgtggatatgggcgtcatcaattccattgtattcagtaatgctgtacaccattaacaatggcagactgattgggagtggatattgatagcattataaaagtcagttattagagggatacttctttaacctgactgaagaactgatctaatggctttagtacagtgcatgattatgtgcgatgttttgagacagagtagtacatttgtgaatgaaattttatggcttttttttcacttagtaggaaccattgtgtgtggaaaagtgagaaaatggctttctgctgtagggtctggcattcattgtagatgtaagcttatttttctgtgagcaaatcttattcaataaaatactactctttatactaaaaaaaaaaaaaaa

SEQ ID NO: 45130 - DNA, 955 bp, Homo Sapiens
gtgacttctgtggttttcctagcatttgtctctaacaaatggtgaaataattactcatggccctctctgccattgtctttcattttttcacagtgaaattagacccctttacttcaccattctgccactgcaaattaagtataaagaaaatagcaagagtgtccacaccagtagacagtaagcttctctacctgtaagtgatgaaatcatagctaatgcacttgccatggagttttcaagatgattggtgtcagacagttttcactttgtttaaaaagtgttggtggccttttgtggtggtgttacaatcctctgggggcttaggaggatgttgatgcaacttttagaagcttttaatttcaaaaacaactcaaaaatctgaaggacagtcatagctgccactcagccccagttagtcaaaccccagtgacctttgcccctggttgccaagggctttgcaacatcaagcagggaaataaggatctgtctgtttagtggataccgtgtatcctttaatagaccaggtaacagttcgtgttagtttagactattgtattgtactgtactttcttgggtggcagaggaaagaaagtaaaacattaaaaaaaaaaaaaaaacgggttctttaaatcctgtttttttagcacctcgtgtgtccataggttcggtcataacgtatgaatggatccttatgtcctttgtaggttgcaaccctgactttcggatcacgaactgcttggggtttggagctccctgtgtcccgggtcgcaaaggagttcagtggtggacctgccatacggactgttggtctgcccccattttgatcctcctctggcggacaggctttgtcattgtcgcgtaagtcgatggacggcccctcccatggtgggggaaactctccggggaggagaagattcgagtatgtgcgagagaaggctgaatgtctcacttcctc

SEQ ID NO: 45131 - DNA, 671 bp, Homo Sapiens
tttgttttgtttttttttaatttgggcagagagatctgtgtctaaaaaccgacagaaggaactttccctgcagctagttcttgcttcttctactggacttctctaaaagccacatccttctacagaatccgtctacacagaacaatatttgaaccaattcttgggtctcctgttggatgtcttcccatggtttgcccaggacactctagtgggtgtgaagatgtcatattatactggactgtgaagcgagaaggtgatatttaagccactaaagcttgtggcagccaccaaattttccaatgccttctgcaatcttgcatttaactggcttcaccgccattcccacccccacccagtgggaaaggctttaggagcatttggtcaggtgggggtgctgtcagggtttacggttcaccttcaaggaagtcctgggtgcgctgactccggggtggggggcacctggcaaggtagcggggacccccgtaggcccggagaagctggggcagcctttgccacgtggacagcaaccgcgctgctgcaagttcccgggcgtgcccgtcgaaagcggccaggaggtcaactggggcggcttccctcagtgccttgggcaggggaccacctcggcagccgccccaccagggcccaggacgcagtggaagagcgtatggcgt

SEQ ID NO: 45132 - DNA, 816 bp, Homo Sapiens
  misc_feature (651)..(651): n is a, c, g, or t
ggataattctcaggtgtactgttaacattttaatttaaaagtatttctcttagcagtttttgttttgtagacagttcccataaaaatattttatcagaattgcagaactgtagtaacagttcagtcaactttgtttttttcctggagtcaccaaccagctttgggagacacagccgccactcccccagtctacttctttaaaaagcatttaacagatggagtttcactcttgttgcccaggctggagtgcaatagctcgatctcggctcactgcaacctcgcctccctggttcaagcaattctcctgcctcagcgattacaggaatgcaccaccacgcccagctaattttgtagagatggggtttctccatgttggtcaggctggtctcaaactcctgacctcaggtgatccgcccacctcggccttgcaaaatgctgggattacaggcatgagccaccatgcccagccatgtttggggctttattttataagttagaactttgaagaggaaatggtgctatatgtttattgttattactttgtgtaactttgatgtaatgtttataagctatgagaatcagttataaaagtattagcccatttgttgtaaatgccaataaaaatattcaccagggggcaaatgtacattnttctttttagaaaaaccaatgtaccttaaaacatgaatgccactatttaaagaataaccttcatttatgtttattccttacatggcataagaatcttacttaaacctggccttcctttccagttgtttgtatggagatgcttgtacccacttgaacagccctcag

SEQ ID NO: 45133 - DNA, 591 bp, Homo Sapiens
  misc_feature (1)..(1): n is a, c, g, or t
  misc_feature (575)..(575): n is a, c, g, or t
ngattgctatgcctcaactcatagaagatgaacccttcaagaaaacgtgaagtagaacgggtgggccagaaatgaaaacaggcaagtaaagtatttcttcggaaaacattttatcaaaccaaatgttaaaaagactttccttttgtaaaactggattagagaagacttttcagtgggttatctctaggatgatcagtagttcagcacttaaaaactgcagagaaaactgaaagttatgttccagataactttccgttgtttaccaaattttcttagatttggtcatcatcaggaagcatttgtaaaaataaaaatctccacaaattactggcccatctcggacttgctgaatcaatttgataggattaatctccagtgaagctgtgtttacagggcattccaagttgattcttatcaggaaatgtgaaaaacactcctggtacataatcggttaatttaaaattttacttaataagtgaacaagtaatgaagatttcacctgtttacttagggtatctacccagacccatcgattctgagttcgggagatgattttgaaatactggtttcccaantaaaggtgctccctct

SEQ ID NO: 45134 - DNA, 825 bp, Homo Sapiens
ccctgcctgtattttttatcagccacaaatccagcaacaagctgaggattcagctcataaaacaggtttggtgtcttggtgatctcacataaccaagatgctaccccgtggggaaccacatccccctggatgccctccagccttggtttgggctggagtcagggcctggatacagtattttgaatttgtatgccactggtttgcattgctggtcaggaactctagtgctttgcatagccctggtttagaaacatgttatagcagttcttggtatagagcaaactagaagaaccagcaatcattccactgtcctgccaaggtacacctcagtactccccttcccaactgaagtggtatgaggctagctctttccaaaagcattcaagtttggcttctgatgtgactcagaatttaggaaccagatgctagatcaaataagctctgaaaatctgaggaacattgtaggaaaggtttgttaagcatctcttaagtgccatgatgagcataacagccggccgtggtggctcacgcctgttatcccagcactttgggaggccaaggtgggaggatgacaaggtcaggagttcaagaccagcctggccaacatgctgaaacctcacctctactaaaaatacaaaaattagctgggcatggtggcacatgcctgtaatcccagctacttgggaggctgaggcaggagaatcgcttgaacccgggaggcggaggttgcagtgagccgagacagtgccagtgcactccagcctcggtgacagcgcaaggctccgtctcaataattaaaaaaaaaaaaaaaaaaaaaaybggcgg

SEQ ID NO: 45135 - DNA, 551 bp, Homo Sapiens
  misc_feature (551)..(551): n is a, c, g, or t
gcagacccaagagctgcagcacctcaagtccctcctggaagggagccagaggccccaggcagtcccggaggaagctagctttcccagggaccaagaagccacgcatttccccaaggtctccaccaagagcctctccaagaaatgcctgcttctgagcccacctgtggcggagcgtgccatcctgcccgcactgaagcagaccccgaagaacaactttgccgagaggcagaagaggctgcaggcaatgcagaaacggcgcctgcatcgctcggtgctttgagctacccgcatctggtcagtgccaggcccaccaacctgcagctggagattggctctctatagcatttcctgacacttccgctacttttaggcctggctaaattccaagatagataacactcaagatagataaagtacttgatctccaaactgacaaactgtttattttctagctgttattttgctatttggcatttacataaaagcacacgatgaagcaggtatcgccttacctgttgaaactgaaaataaagcttgtttatttccaagtn

SEQ ID NO: 45136 - DNA, 692 bp, Homo Sapiens
actagtcttgtcacatccgggggaatattgttgggtggggagtcacagagatccagccacatggaggagctcagtatgtttcataaatgttgtgaaactccacttgaagccaaagaaagaaactcacacttaaaacacatgccagttgggaaggtctgaaaactcagtgcataataggaacacttgagactaatgaaagagagagttgagaccaatctttatttgtactggccaaatactgaataaacagttgaaggaaagacattggaaaaagcttttgaggataatgttactagactttatgccatggtgctttcagtttaatgctgtgtctctgtcagataaactctcaaataattaaaaaggactgtattgttgaacagagggacaattgttttacttttctttggttaattttgttttggccagagatgaattttacattggaagaataacaaaataagatttgttgtccattgttcattgttattggtatgtaccttattacaaaaaaaatgatgaaaacatatttatactacaaggtgacttaacaactataaatgtaggttatgtgttataatcgaatgtcacgtttttgagaagaaagtcatataagttattttgcaaaaagggatttggttttaatttaagaactatttttgtaaagcttttctgtaaataaaatattttat

SEQ ID NO: 45137 - DNA, 527 bp, Homo Sapiens
ggccaagacaggcagatcacttgagcccaggagtttgaggccagcctgggcaacatggtgaaacccggtgtctaccaaaaatacaaaatgtatccagacatggtggtgtgtacctgtagtcccagctactcaggaggcaaagatgggaggattacttgagcccaggaggtcaaggctacagtgagccatgattgcactactgcagtgcaacctgggtgacagagtgagaccctgactcagaaagaaccacttgcccacagtccagacagatggattgtaggtgggttttctggagattagtagatactgtatagagttgtatacataaaattgtgtcagtagtacaaagtgtatataggctgtttactcttacatttcctactgtaagatacagatttatggtactgatacctttaaattatatcatattttgaaaatgtaattactgatattcaaaataaattaaaggacttaaaatcataaaaaaaaaaaaaaaaaaaaaaaaaagtactctgcgttgttaccac

SEQ ID NO: 45138 - DNA, 649 bp, Homo Sapiens
atggctcgctgcagcctccacctcccaggctcaagcgatcctcccacctcagctccctgagaagctgggaccacaggcctggctaaattttgactttttgtagagacaaggttttgccatgttgcccagtcagatctcaagcgaggggctgttacatctgatcagggcaaaaggggctgtgctccttggacactttgcacagccccagtgggcttctttctcctctgttagtgtggttaatgttcatctgcctgcatccctgagtcacccaagtgtaacctcagccataacacgtactgcagccggaacggtgtccgcagctcagcgtccctctcccatgcactttctgaactttggtcttttaaccaggtttaccagccgctttctgcctctttgtgcttttgagggttttttggtttgtttgttctgttttgtttttaaataaagatgattatttggcccaggctgagggtgcaaacagaactcttcacgtgtccacgacaagaaaaatagtttttacaaacttctagttgtggcatcaaaagtgtgagtttttgcacctgcaaaattgtaatgcaagccctgactgggtggaagctgaagtcttgctgttttaaattaaataaataaattatttttctcctcaaaa

SEQ ID NO: 45139 - DNA, 745 bp, Homo Sapiens
cccttgtgatttgaagcatgaaagttctggcaggttatgagcagcactagggataaagtatggttttattttggtgtaatttaggtttttcaacaaagcccttgtctaaaataaaaggcattattggaaatatttgaaaactagaaaatgatggataaaagggctgataagaaaatttctgactgtcagtagaagtgagataagatcctcagaggaaacagtaagaagggataatcattaagatagtaaaacaggcaaagcagaatcacatgtgcacacacacatacacatgtaaacattggaatgcataagttttaatattttagcgctatcagtttctaaatgcattaattactaactgccctctcccaagattcatttagttcaaacagtatccgtaaactaggaataatgccacatgcattcaatgggatcttttaagtactcttcagtttgttccaagaaatgtgcctactgaaatcaaattaatttgtattcaatgtgtacttcaagactgctaattgtttcatctgaaagcctacactgaatcattgttcaaccttgaaacataaaattttgtaaatcaaaaaaccaaacaaccacccccccaacccacccaaacaaaagacaacagcagctctcactaccacagaatacacaaacgacaagagaccacagcgccccgggaggcaaggggagagaaaaagaagaggacaaggagtaatgaggaaagtaatagaggggg

SEQ ID NO: 45140 - DNA, 555 bp, Homo Sapiens
ccaaagccactagtattagaagacttctttccacacgatttcctatctcccttgaaaagtacaccgtaacactccgtaaacagcccagctgtaacgccagaccgagacgaacactctgcctaactatcaaaggattatagcaatcctggtgatttaggtgcatctgtctgtgagtaaacacgatttggatatgccatctgaaagaaactgtaatgtatattttgatttgtaacaaatattgtgatctcacattgtctttgaaagtgtggatgttggtgttttgtgatttggtgaacagaacttaaattgccattctggatacttccagacattttccactaacaaagatatcatttaaaggtagatttcttcctggtacttttatctgtctttgaaagtgtctgaactttaaaaagtttacattttgtttcaaatattgcttgttctatttctaacattccataaatatacttgaaatgttatttaaatatattcaaagaaatttgaattcagcttatataataacgcttgaatatctgaattatatatttgaaa

SEQ ID NO: 45141 - DNA, 1017 bp, Homo Sapiens
  misc_feature (836)..(836): n is a, c, g, or t
  misc_feature (869)..(869): n is a, c, g, or t
  misc_feature (876)..(877): n is a, c, g, or t
  misc_feature (886)..(886): n is a, c, g, or t
  misc_feature (896)..(897): n is a, c, g, or t
  misc_feature (910)..(910): n is a, c, g, or t
  misc_feature (917)..(917): n is a, c, g, or t
  misc_feature (922)..(922): n is a, c, g, or t
  misc_feature (924)..(924): n is a, c, g, or t
  misc_feature (936)..(937): n is a, c, g, or t
  misc_feature (943)..(943): n is a, c, g, or t
  misc_feature (969)..(969): n is a, c, g, or t
  misc_feature (971)..(972): n is a, c, g, or t
ctctcccgtgttctggtggaatgagatgctccttggcactatagcctgatgtcccacattgacccactgaccacacaggaaaagcagcgaaacctgcaccctctcttctgagtcacgcctgtggctcatcggcttccctcttaacctttagtgccctgaagactgctgccgctgtcaccgttgcgctgaaaccccatgggcccgttctgattgaaggtgaagcccaccagattatttttcaaagtcttaggtttcggtgtatctaacctgctcagtaaatatggacgcaattaaagatgctctaggaaatttggggactgtatttaatttttctttccttccatctgaggagcaaggaaatcctactgctgaatagctgttagtatctattttacaagatttactcattttcaggtacctaatgtagctgctagcatgcatgcacaacaatacaatttatatggtaaatggaaccaaataatggcttcactgaatgttatggctgcactgaagggaaatgtcacggtaaatagctgccaaattatggatcatgccgaagtgtcacaactgcactaaagacaaatagcactagaggctattgccactgtgacgcttttgagttatgaagaagggtagcggcctgatgcgaggctctttgtgtcctcattatagcaaagggttactggtgcaggggactaggaaaaacccgtccagtgtggtgcttagttattcatccatccctttcagacctaacagccacagccacacggaaagagactttgcctcacttttacattcacaaacaaacaaaggaggggggggagcagggttttatngaatgtaaactgtgcacagggaaatggactggntaatggnnaaaaatggntgtaaataannaataatctaaatncaagaantattnantttaaatttaanncatagntcctatggtcccaaaaggcctttagntnntgctttcttaatggccagaaatagaatgtggttggaaaatcctaa

SEQ ID NO: 45142 - DNA, 656 bp, Homo Sapiens
  misc_feature (17)..(17): n is a, c, g, or t
cccactgacccacaggnaaaagcagcgaaacctgcaccctctcttctgagtcacgcctgtggctcatcggcttccctcttaacctttagtgccctgaagactgctgccgctgtcaccgttgcgctgaaaccccatgggcccgttctgattgaaggtgaagcccaccagattatttttcaaagtcttaggtttcggtgtatctaacctgctcagtaaatatggacgcaattaaagatgctctaggaaatttggggactgtatttaatttttctttccttccatctgaggagcaaggaaatcctactgctgaatagctgttagtatctattttacaagatttactcattttcaggtacctaatgtagctgctagcatgcatgcacaacaatacaatttatatggtaaatggaaccaaataatggcttcactgaatgttatggctgcactgaagggaaatgtcacggtaaatagctgccaaattatggatcatgccgaagtgtcacaactgcactaaagacaaatagcactagaggctattgccactgtgacgcttttgagttatgaagaagggtagcggcctgatgcgaggctctttgtgtcctcattatagcaaagggttactggtgcaggggactaggaaaaacccgtccagtgtg

SEQ ID NO: 45143 - DNA, 606 bp, Homo Sapiens
gtttaaggggtcaaagttggtatcattaacagggcaatgacttgacccttctttcaactgatcttactggtagttgtctctagtttttaagtaaattaatgatggaccatcccccaaacagagaactatgggggtatgaaacaaggctgaaggcttttaaccatgggagaaaaaggtgctggtattattcatatagcataacctgaggttggagaggaccacttgggagcctgtaaccaaaactagaaggtaacttctgggatggacggaggttcccttgaagcagtgccaacctaaatctacctcaggtaagtagttagattaactttttcaagatttcagaccaaacaagacaacttgtattcagttgatgtattcctatgctttaatgtttttgtttgcccttaattattaaataaacatttgttctgaaaaaaaaaaaaaaaaaaaaccatttgcggccgcaagcttattccctttagtgagggttaattttagcttggcactggccgtcgttttaacaacgtttgactgggaaaaccctggcgtttccccaaattaattgcctttgcagacataccccttttgccgcttggcgtaatagca

SEQ ID NO: 45144 - DNA, 606 bp, Homo Sapiens
accctatcgtctatgcctataaaataaagaagttcaaggaaacctaccttttgatcctcaaagcctgtgtggtctgccatccctctgattctttggacacaagcattgagaagaattctgagtagttatccatcagagatgactctgtctcattgaccttcagattccccatcaacaaacacttgagggcctgtatgcctgggccaagggatttttacatccttgattacttccactgaggtgggagcatctccagtgctccccaattatatctcccccactccactactctcttcctccacttcatttttcctttgtcctttctctctaattcagtgttttggaggcctgacttggggacaacgtattattgatattattgtctgttttccttcttcccaatagaataataagtcatggagcctgaagggtgcctagttgacttactgactacacgctctagttgggctgatcatgtgtgtggtggtgactcatattcatgctattgtgtaattgagcagagaacctgctctttgacgatgcctagaagatgttagaaactagatgatataaacatagtttcatgtggactgtatctgctgtatt

SEQ ID NO: 45145 - DNA, 585 bp, Homo Sapiens
  misc_feature (12)..(12): n is a, c, g, or t
caggaacaaggnaggagaagacaatcataaaaaagctgttcttttttcgatcggggaaacagacctagatccaaggccacaagtaaggctatggctctgattctagaagacaaccttccaagatgcctggcaaaaccacctccctgtgccacacagacacactaggcctgtgtatttatttccccttcaaagcagactgaggagggaggagacgaggttctcttggcatcactttctccctggctgcagaactagacacccttgaagatttggcctgggccagtgagactgaaatcaagaaaaacagaagggatgtgcagggtgggggggtccacttcctgctcccatgtcaacccccagggcctccagcgtgcagacgcgtgtcctactcatctgctcccacggatgaccctggtcttcaatggttagcagaagggagaaaagaaagcaggaaaatgtgctattgagattccagtggtgacttcactgatatttagtgaatatttgatttagccaacatgcctttctttatgtgattttgtattaaagtaaaatgatttttatactttcaaaaaaaaaaaaaaa

SEQ ID NO: 45146 - DNA, 609 bp, Homo Sapiens
attgctccactgaaccccagaccccagcctcgttctgggccctcatcccctagatccagggaccccagccccatttcagcccttgggcccttgtaggatgcgaggccctgggcctcagcccccagcccatccgtggcccaggcactggggggggctgaggtcctctgagaagggacacagggcctggggggctctctcagcccatcagcaggagaggactgactccagaaaaatcagcgtttgtacccactcaggctgccaagacctgtgtccgtccttccaagctcaaccttcagagttcatgaggccccttgcccagaatgtccacagagttcatgaggccccttgaatgtccacagagttcatgaggctccttgcccggaatgtccacatttgaaacctcccaacaccgagccccatttcaagtataaccaggagggaaaatggtgcttgaaataagcatgccacaaaggaaaacctgctttctcgaaatgggccctggccgcccaggccctgacctccccggccaggatggaacgttccagagacccattagtgccaaaggcaaatgaaaacacaccctgtgaaaatgtcaaaaaaaaaaaaaaa

SEQ ID NO: 45147 - DNA, 764 bp, Homo Sapiens
  misc_feature (26)..(26): n is a, c, g, or t
  misc_feature (642)..(642): n is a, c, g, or t
ggctcaccacccccaactgctgtggngtgaatttgagccggagcagaagctgcaaagctgtgctttccctggggaaggggatgtgctgcggcctcctgggtgggcgtggagagggcgccatcacaacgagtccaggtttttgcttttggaaggtctctgataatttaggggtgctggaaaccagcactgtgttatccccaatccctcctgtgccaccagttttgtgatttaggttgctttagtgggtgactaacttttgttcagtgaaaccagggtttgtttggggtttttttctttgctacttacatatttaaaggtacaagtttcttatttcaaatctctactgatagtgccctatggggagatgctggaacacattttgcaaatgtgactttttttttttttttttaatttttgcttgaagcctgtgtcatgttagttgctgctgccttctttccttttgtgaggttcccaatgtttcgtccagaaaagtactttatttatgcaagtcaggtgactcttaggccacaaaaccatttgatgataaacagattatcattaggtgcatatcttattgatattttgtgaaatgttatgcctatgttgcaaaagttgaatagttttgtctttatatattgctgncttcagtgtacagcatggttttacttaattgaatgttaatgtttaatattttcttcttatagaagagatcatgcccttttgtatgacatgtttatataaaatgtatctgtaaccttggaaaa

SEQ ID NO: 45148 - DNA, 553 bp, Homo Sapiens
cggaacgaggtgagtgcattgaatgtgggaaggcctacaacttaatctcccacctcaatcggcaccataaagttaacactgcaggcaggctttaagagtgctttgaatacaacaggactcatcaatcaaatgtcgaatttcatgtatctgaacattgacacaaaggatataccttatggtgccatgtacgtgagaaccttctagggatatgttgcactttctgacttgctcaggttttttgccagagttatgtcactgtcaatccatgtggccgaaaccatcttaactctaccagctaagataccccagcattggggaaggcagggttttgtattgtccagtccctggagaaaatcatgaaatgcctgagttcattgggggtcctcattcccttctgtatgacaggtataggtatggatatgacccatttttagccaagagggtctgagctgtatctgctggtggcttatacaaaaagtttactttcttcatggatattcttggtctcacatacttgtaatcaagtttttccagcctccaagtcacctggcct

SEQ ID NO: 45149 - DNA, 717 bp, Homo Sapiens
ggcagggttcttcccatgactgtaaggtagtgatgtttcctcttcctccacagcccaggcttgcatccctccctgcggtctccaggagttcgcccggcgtttcctctgcagcgggtgctactctagggtctgcgacctcccgctggactgcccagttcaggatgtgacagtgactcggggcgaccaggctatgtttcttgcatcgtaaacttccagctgccaaaggaggagatcacctattcctgtaagttcgcaggaggagctccggactcaggacttgtcctatttccgagatatgccgcgggccgaaggatacctggcgcggatccggccggctcagctcacgcaccgcgggacgttctcctgcgtgatcaagcaagaccagcgccccctggcccggctctacttctttcttaacgtgacgggcccgcccccgcgggcggagacagagttgcaggcctcgttccgggaagtgctgcgctgggcgccgcgggatgccgagctgatcgagccctggaggcccagcctgggcgagctgctggccaggcccgaggctctgacgcccagcaatctgttcctgcttgcagtcctcggggccctcgcatcagcgagtgcgacagtgttggcggtggatgttctttcgatggtactgcagtggcaactaacaaaggtatctttcctccttccctatcctatttccatcctgaaaataaagaa

SEQ ID NO: 45150 - DNA, 895 bp, Homo Sapiens
  misc_feature (798)..(801): n is a, c, g, or t
  misc_feature (808)..(810): n is a, c, g, or t
  misc_feature (812)..(814): n is a, c, g, or t
  misc_feature (817)..(817): n is a, c, g, or t
  misc_feature (820)..(822): n is a, c, g, or t
cgccccgcgcggcgaaggcggtgccgggagctggggagccccgcctcggtaaataacccagcgcggcggctccacccgctggggagcgcccttcatgacggaaggccgctgacccgaggggctcctccacccccatgcgcagatcccaccagccagcaagctaaagcatggcggccatcccctccagcggctcgctcgtggccacccacgactactaccggcgccgcctgggttccacttccagcaacagctcctgcagcagtaccgagtgccccggggaagccattccccaccccccaggtctccccaaggctgacccgggtcattggtgggccagcttctttttcgggaagtccaccctcccgttcatggccacggtgttggagtccgcagagcactcggaacctccccaggcctccagcagcatgaccgcctgtggcctggctcgggacgccccgaggaagcagcccggcggtcagtccagcacagccagcgctgggcccccgtcctgacctgagcggttaccaccagccccaggcctgcggaggcgctagtccccctccccacctcccaccccccaccctgtaaactaggcggctgcagcaagcagaccttcgcatcaacacagcagacaccaaaaaccagtgagagccccgctctctaccgcccggccccagcactcgctagctttcctgacacctggaactgtgcacctggcaccaagcgggaaataaactccaagcagccagtagccccgatggtggtgtgcctgagctgtgtggccccgagggttcaaannnnaaaaaannnannnaanaannnaaaaactccaggcatctatggtcgggtgggggaagaaaaaggtaatggaaatgccccatgggtcaatacctgg

SEQ ID NO: 45151 - DNA, 450 bp, Homo Sapiens
actgacgaccgaagatagaatctctcatacaaaagcatggtgagtccagacagcagcaaaagcttttgtgaaaaccaattgtgttcatctagatagtaagtaactcctatttttactgttaatttttaaaagagaatttttccctgtggaaactccctgttagtacgtcctaggggagaaagcctgtggaatatggtggttattgatggcgttgcctttgtttcatctttgagtttgccctttgtgggatctagtgggataatgagcactgacagaactcttaacagcgtgctgtatttttgacattgaaaatgttaatgacttgatttgtacataactctgtaactaggtgaaagtagatcacagctgacatttacaaaatgtttttgtaccttagaatttctgcattaaataaaatgttttgttttagataaaaaaaaaaaaaaaccc

SEQ ID NO: 45152 - DNA, 731 bp, Homo Sapiens
taaaatttgaagtcaacttctatcaacttcaggccaggcccgtggctcatgcctgtataatcccagcactttgggaggccgaggcaggcggatcacttgaggtcaggagttcaaaaccagcctggccaagatggtgaaaccccatctctactaaaaatacaaaaaaattagccaggcgtggtggcaggcgcctgtagaatcccagctactcgggaggctgaggcaggagaattgcttgaacctgggaggtggaggtttcagtgagctgagatcgtggcattgcactctagcctgggcaaccaagagtgaaactgtctcaaaaaacaacttttatcaatgtctgcaaaaagaaagtcttctgggatttatagatcaatttagggagaaatgacattttaacaattctgagttttccaattgttgaacatggtgtactgccccatttatttagatctgttaatttctctcagtttgcagctctcacattttgttaaattcatgtatttaatatttctgcatgctattgcaagtggtaaggttttcaaaaagctgttttctagttattgctagtatatagaaatgcattagacttgtacattgatcttgtatcaagcaacttagatcagttaacttattctagtagcttttttctagattctttagcattttctatgtagataatcatgtcatctgtgaataaagtattttacttttccaaaaaaaaaaaaaaa

SEQ ID NO: 45153 - DNA, 451 bp, Homo Sapiens
tcagctcctggagtcgcaggcccttggggcccctctgtgagatctcaatgctgtctggggaccctaagagttttctcacctgttcagtctcatctaaccttccaatgtctgatgttcctgccaaattcctgcctgattctgggtccgtcctgacctccaaaggtcagcttggtgcttgaggtctccctgctcttggtggcagtggtagcagcaacagcagcagcagcagcagcagcagcagcagagacctctccactttcccttagcccctctgctgggtagagaggcactttcagggacttccctccagctgcctcttcatctgggaatgagctaagcaaggctgagcctcctcctgttgcttgaaataatgatgatataaaggctggatttggagtttgtatcccctggtccctctgggatgctcattaaaaccttcccactccttgga

SEQ ID NO: 45154 - DNA, 677 bp, Homo Sapiens
tttcccattggtctttaactaagactttcttgtagcaatctcgtaagcagtgaaccccctcagatcagtagaatatagtatctgggggagaagacttacttccttcagggcagcagccacagccaggcttctgtcatacaggtagatcccgaagcacagagacataaaaaaggtctcccagaaaactatagaccattctccaagtggaattcccacttagggctctggtcactagattgcaacctgtgtgtttgtcatcatcctcatctcaccattgtattgctatgccctcccataaaaacacattgatccctagcaagattattgcattccagattttactgcctttgctaggcttttgcttagcaaagggctgactttccattgttatcatggtgtatatatttttgtcaccattcccacaagtatacttgatgttgtcatagaacgaacatcctactctatgatttactaaccaattactttcccagatcatagacctctctgcatagtagtcataggtcttgactttggggaaagaaaaggaagctgcaggaatatttatctccaaagtcgaatgagaaagaactccagcaaatccaatggctacaaactaaaaatcagcattatttcatattgctgtttcttagctgaatatggaataaaagaactattat

SEQ ID NO: 45155 - DNA, 539 bp, Homo Sapiens
  misc_feature (479)..(480): n is a, c, g, or t
ggctggaccggtccggaattctccggatctccgatttcctgaacggtctaagggagccagtgggctaggcccatgctttggttcaaagcgtttggagaacatcttcttgctccttttccggaaacgagataatggacacagagtcccagacgtcatcctttggaccaggaagaaacaggctcctgccagcaccgacagcaacgaaaatgttcccacggagatcaggatgacttgctgaagctcagtggaggctaaaaagaggacacgaaagtgaacagaatgatcttcctacgcacaacacaaacgtcagttaatgttccatccatgctgcttaaagagcattcctgtcctagtaaaatgggcaagtccctctaccccccaccctcacctggtatgcttacattaatagctaaagtcaatcctgtaatgaaataaagcaagtggtagctgtctggtagcctccactactgcaaatctcnnaaaaaaaaaaaaaaaaaaaaaaaaaaaaaaaaaaaaaaaaaaaaaaaaaaaaaaaaagg

SEQ ID NO: 45156 - DNA, 640 bp, Homo Sapiens
  misc_feature (49)..(49): n is a, c, g, or t
  misc_feature (134)..(134): n is a, c, g, or t
ccaaagcccacctgtgggaaatacaaagttttaatgctgtgtgtttttntgtttttgtattttgtctcatcgacaaaactggcagaaaaaaacgctttcgtatatttttcctgctgggtggtcagaaggaaagnccgtgaagctaaaggtctcccactgagacgctgttctgcaaggagccgacctcacgtgccgccgccgccagagaagagagcacctgttcatctcggctcactgtgaggctgagctcagcgctggcaggcgaggggccgcaagcatcccccacagccaccgagagggcatccctgcagggaaatcatatccgacatgcctgtgcccacagcagacttaagactgcctctaaaatgtccatgaagccattgtccagtagagctgttagttttaacaccagtgagtattacctttggttaaaaggatgcatgtgtataggtgtatgtgtgtgcgtgtgtgtttgtgtttttggacttgtgtggagaatgaagaaagggttccatttaggcatttgcaaatattcgatggcatcatgaaaagacaaaaaaatcctataaaatatatcatattttgctatgattttgtgtgtacatgtaataaaattattaagtataaaaaaaaaaaaaaa

SEQ ID NO: 45157 - DNA, 784 bp, Homo Sapiens
  misc_feature (736)..(736): n is a, c, g, or t
caccattgttcagagaagaaaactacgcctcagccctgagcaatgtagtaacttttatgtggaaaagtatggaaaaatgtttttccccaacttaacagcttacatgagttctggaccacttgtcgccatgatattagctagacataaagccatctcttattggttagaacttttgggaccaaataatagcttagtagcgaaggagacacatccagacagtctgagggcaatttatggcacagatgacctaaggaatgcacttcatgggagtaatgactttgctgctgcggaaagagaaatacgttttatgtttcctgaagtgattgttgagcccattccaattggacaagctgctaaggactatttaaatttacatataatgccaactctgcttgaaggactcacagagctttgtaagcaaaaaccagcagatcctttgatttggctagctgattggctgctgaaaaataatcctaacaaacccaaactttgtcaccatccaattgtagaagaaccttattaaaaaaaaaatcctcgaaagaacaaatcatgaacaatcttattataaaaggctgtacttctactgtttgaaaaaattatttctagggtttaagtaactaccagtaaaataaatttatttcttaaaaataagtgttaaaggaataactattctatgaagcagataacattaaggtaaaatatagggcctagagtatgattttaaccatgatgtacnctgggtatgggaaaactctgtaagatgttgccagaggttttgttttct

SEQ ID NO: 45158 - DNA, 679 bp, Homo Sapiens
  misc_feature (679)..(679): n is a, c, g, or t
tttttttaaagatggtgtatttcaaagtatttcatattaatgtactatatctacttgaagttccaatagtacattatgacagaaaccaaaagatctaacaattctgcttagctttttggttaagactccatgctttcattaccagaaaagggtcttacgtagtcattatgattcatggaattctattccatgaagccttaagaaaaaaaactttttttaactttccctgaaactttatcatttgataagtaaatttacttttcaagaagagtataaccaaagagtaaagataatgtgacactaagttatcaatgttttatgaatacacataaggcataaatttcagctgtaaaaaagctacattcaatctgactctggttttaaaacaaaactgctgtcataattatacatgatactgcaacttttggaaggctaatttggtggaatgttgcctcatcatagaacaccatagatcattaaaaattctataaaaattttaccaagctaccatatagttaataaaagggtatacagtcacttttatttctgaaaatataaaacattgagcctttcagtgtatctgatgcttctctttggtaaggaatacttttatttcatggatcccaggcaggcatataaaagttacggaatttataaaatcatctgggataattagaan

SEQ ID NO: 45159 - DNA, 674 bp, Homo Sapiens
  misc_feature (541)..(541): n is a, c, g, or t
  misc_feature (552)..(558): n is a, c, g, or t
tggagtgcagtggcacagttctctgcaacctcagcctttgggctcaaatgaccctcctacctcagtctcctgagtagctgggactacaggctcatgccactatacctggctagtttttggtttttttgtatagatggggctttgccatgttgcccaggttgatcttgaattcctgggcccaagtgatctgctcgcttcagcctcccaaagtgctgggactgtaggcatgagccaccatccctggccaagaaacaaagttttaatttcaaaaaaatctacaaaaacaggataggcattgtctttcaaatgttcagaccccagtttattaaaggatacttcaaatagttggctaaattttatgatctctcccgttgaaaagtaggtgatgattttaatgtgacatgcacaaaaaatccttgccagtttacttctgcaatttaattttagcctttactaattacccacttctgtttaattccaatttttaacagcaggtacataaagcattatgtgcacaatggaaaaaaaaaaaaaaaaaaanaaaaaaaaaannnnnnnaaactcgaggggggggcccggtaccccaattcgcccctatagtgagtcgttttaacaattcaactgggccggcgttttaaaaacgttcggaacggggaaaaaccctggccgttccc

SEQ ID NO: 45160 - DNA, 568 bp, Homo Sapiens
agagcatatcacctatgagaagtatatcagagaattccctggtagcaatggacttctcaggccagaaaagcagagttatagaaaatcccactgaagccctttcagttgcggttgaagaaggactcgcttggaggaaaaaaggatgtttacgcctgggcactcacggtagccccactgcctcttcacagagctctgccacaaacatggctatccaccggtcccagccatggtttcaccacaaaatttctagagatgaggctcagcgattgattattcagcaaggacttgtggatggagttttcttggtacgggatagtcagagtaaccccaaaactttcgtactgtcaatgagtcatggacaaaaaataaagcactttcaaattataccagtagaagatgacggtgaaatgttccacacactggatgatggccacacaagatttacagatctaatacagctggtggagttctatcaactcaataagggcgttcttccttgcaagttgaaacattattgtgctaggattgctctctagacaagccagaagtgacttattaaactattgaa

SEQ ID NO: 45161 - DNA, 922 bp, Homo Sapiens
ccggaattcccgggatgccgatgtgttttggagcctcgccccccggggaagcggtggatggtggctggcctggggaatcccggactgcccggcacgcgacacagcgtgggcatggcggtgctggggcagctggcgcggcggctgggtgtggcggagagttggacgcgcgaccggcactgtgccgccgacctcgccctggccccgctgggggatgcccaactggtcctgctccggccacggcggcttatgaacgccaacgggcgcagcgtggcccgggctgcggagctgtttgggctgactgccgaggaagtctacctggtgcatgatgagctggacaagcccctggggagactggctctgaagctggggggcagtgccaggggccacaatggagtccgttcctgcattagctgcctcaactccaatgcaatgccaaggctgcgggtgggtatcgggcgcccggcgcaccctgaggcggttcaggcccatgtgctgggctgcttctcccctgctgagcaggagctgctgcctctgttgctggatcgagccaccgacctgatcttggaccacatccgtgagcgaagccaggggccctcactggggccgtgacactagtggccatggctgcctgcctgactgtagtgcccaccaacccagccactgccacagagctggccacgcccagccctgggtatctactttttatacaaatcctcctctagactggttcaggctgcctgcgggataaagtggggggtggactgtgaaaagaacccaccctcctcgagggtagggcacattgagctggggcgcaggggggcaggtaacaaataaggaggcggtaatctgggagcttacccctttagagcatttggggggtcccccaaaaaacaacgcctcgggggggaacaagtcttccggg

SEQ ID NO: 45162 - DNA, 643 bp, Homo Sapiens
ctagctgaaacagaacgattttttgatgaacttacaaaagaaaaggaccagattgaggcagcactaagcaggatgccttctcctggaggacgaatcactttacagacaagattaaatcaggaagccttggaagatcgtttggaaaggattaatcgagaactgggttcagttcgcatgacgctaaagaaattccatgttttgcgcacctctgcaaatttttgagatttgtagccattaaattttgagacatttttgtttgcactaatgtataattatgcagtcagaaaaggcaaactattttgtactgtttataagccttcaaacagtagttttacaatcatgctattcttacacttgctattttatacttcaaatggccacatattttcaagatatttttgttatgctcaggaatctcttgtatattttactatttaaaaagcattatttttaaatagtatctgtctccaatttatatcaagaataaggaaatataaacagaggaagcagcttgtttctaaacaaatagtgttatccttttacaattaactgcacatcaattttatagacttgttctacattgtaaatacaattcagtttttaaaaaataaagcttaatagcttccataaaaaaaaaaaaaaa

SEQ ID NO: 45163 - DNA, 560 bp, Homo Sapiens
gatagggaaaaaatagcagtaattggacattcttttggtggagcaacggttattcagactcttagtgaagatcagagattcagatgtggtattgccctggatgcatggatgtttccactgggtgatgaagtatattccagaattcctcagcccctcttttttatcaactctgaatatttccaatatcctgctaatatcataaaaatgaaaaaatgctactcacctgataaagaaagaaagatgattacaatcaggggttcagtccaccagaattttgctgacttcacttttgcaactggcaaaataattggacacatgctcaaattaaagggagacatagattcaaatgcagctattgatcttagcaacaaagcttcattagcattcttacaaaagcatttaggacttcataaagattttgatcagtgggactgcttgattgaaggagatgatgagaatcttattccagggaccaacattaacacaaccaatcaacacatcatgttacagaactcttcaggaatagagaaatacaattaggattaaaataggttttttaa

SEQ ID NO: 45164 - DNA, 717 bp, Homo Sapiens
  misc_feature (38)..(38): n is a, c, g, or t
atttctaggcataaattgagactaggaaatttatatcngaatagagggtgcttgacacatatatatgcttaaattgaaggacagctcagattcatttttaggagaagaaagtaaactaatgtgctcttaaagaataaaaatttattctatggtttctgtctctgatcatcaccttccattctataaaaagctcagttactgatttgctgggtcatggtcaaaattcttacctattatttatttcatatcaactttaaaaaataaattacttgcattctacatattactaattgggaagtaatatgcctcaaatcagttttatactggattattccctatgctttaaaccactgctctcaataaaacacttcctgattaatgtttgattattagatattttagtcttgttggggatattttagtcttgttgggttagccatgctctgaagaatctgtgaaagtacagtaaagttttaataagcaataaatgtaaccttttatataaatctcagtgctaggttaacttctaataagcagacgaacatgttacataaattataatgtctgtcttgtaaaaaagttgaggggactaaaagtttatgactctgatatgggaagttgtcatattaaaaaactacattttaaaacatcaaatatttatactatttgcttttcaaataaaagcatagtgctgtttggcataaaaaaaaaaaaaaa

SEQ ID NO: 45165 - DNA, 591 bp, Homo Sapiens
atttggccctcgaggccaagaattcggcacgaggcgagctggccactggtgactacctgttcgagccgcattctggagaagactacagtcgtgatgaggaccacatcgctcacatagtggagcttctgggggacatccccccagccttcgccctctcaggccgctattcccgggagttcttcaaccggagaggagagctgcggcacatccacaatctcaagcactggggcctgtacgaggtactcatggaaaagtacgagtggcccctagagcaggccacacagttcagcgcctttctgctgcccatgatggagtacatccccgaaaagcgggccagtgccgctgactgcctccagcacccctggctcaacccctaggcccggctgtggctccacctccagctctccgtgccttaagggaaaagcgggacagctcccaccaccctgctgggcgccagttctccacaaccacagggcagagagacgctggagccaggcccggctctcagagcgtgttctgcctgagacccccgtgagggctctcggagaaaagggtgtgtattcctttcttaaataagtgtggactgaaaaa

SEQ ID NO: 45166 - DNA, 571 bp, Homo Sapiens
caacctccagactcagcagagtgagggggtaaagcagttcctgtcccacatggccatcttctttcttccacccacaaactccaggctggaagtacttggcccccttcaggagcctggccaggcagggagagagtagctgcagccttcatcagaactcttcctcctcccaaggcattctcccagctctagcctctggactggaaagcacaagactggcccagtgccagcaagtccttaggctactgtaatgctgcctcaggacccatccctgcctggaggctcctctaggccctgtgagcacaaagaagaaagctgatttttgtcttttaatccatttcaggactctctccaggagggctcggggtgtgtcatttctatattcctccagctgggattggggggtgggctttgttgtgagaatggcctggagcaggcccaatgctgcttttgggggtcagcatccagtgtgagatactgtgtatataaactatatataatgtatataaactgggatgtaagtttgtgtaaattaatgttttattctttgcaaataaaacgctttccccgtcaa

SEQ ID NO: 45167 - DNA, 634 bp, Homo Sapiens
  misc_feature (557)..(557): n is a, c, g, or t
cggatcacagagaaaaaggctttccgggggcttacggagctggtggagttttaccagcagaactctctaaaggattgcttcaagtctctggacaccaccttgcagttccccttcaaggagcctgaaaagagaaccatcagcaggccagcagtgggaagcacaaagtattttggcacagccaaagcccgctatgacttctgcgcccgagaccgatcagagctgtcgctcaaggagggtgacatcatcaagatccttaacaagaagggacagcaaggctggtggcgaggggagatctatggccgggttggctggttccctgccaactacgtggaggaagattattctgaatactgctgagccctggtgccttggcagagagacgagaaactccaggctctgagcccggcgtgggcaggcagcggagccaggggctgtgacagctcccggcgggtggagactttgggatggactggaggaagccagcgtccagctggcggtgctcccgggatgtgccctgacatggttaatttaaaacaccccgatttcctcttgggtcncctcaagcagacggggctcaagggggttacatttaataaaaggatgaagatggaaaaaaaaaaaaaaaaaaacgcgg

SEQ ID NO: 45168 - DNA, 650 bp, Homo Sapiens
gagaaatatttaggctaaaattaagactatgtaaacatcagaggatttacagtagaaagaactaaggaactaacacttcagactttaaaataaatcagagtattaagtataacaaaagttgaacctgttagaaaatttccttgtatataagttgaaaagtaggtttttgaagagatatattcgaaatatattttttcacttgaaaaaagtaaaaatttttttcaaaagcaaataattcaactctaaaattatactatttcaacattctcatttatgtgaaagcatgtgataaattgttgctgcgtcagagatatgagaaattcctttgcattaggtgggcattattcatagacttctacatgaaagagaagagaaataaaagatgcaccaggaaaatctgagcagagaggcttttagtggttgacttactgagtgatgcctgaagtaggtgttcagagtaatactttgcgttatactgagagagaatctgaattttagtagtaaattgttttgccaactgtatatttatgtaataagtgcaataaaatgcagtaaattttacaattctcttaagataatgtgtgaacttaatttttgaaataaaaattgttattgtggtaaaaaaaaaaaaaaaaaatcttgattctgcg

SEQ ID NO: 45169 - DNA, 473 bp, Homo Sapiens
gcacgagactgcactcccgcctgggtgacaaagcaatattctgtgtcaaataaataaattcattcttctgctctcctgacttagagaaatggtttgcttaaaatgctagtaacaaacatcacagtcaacaggagcttgcttcatgcgaaggatcaatgtgatttgtggatggagatgatagtgatgaaattcctgtttcatggggctgtttttcttttcatctcactgggcagcaggtttagtgaggcagtgagatgctgctgctgtggattcttgtagctatgcctcggcttcttggcatatcaggtaggaacctgttacaagtgaaatacttgaaacctctctgaccaagagcctctgatggagtgggaggtgagctaattctctgaccagcttagggcactgtttcagccactggtcacattccttgcttcaaactgaaattcagtttggctttgagtatagggatacat

SEQ ID NO: 45170 - DNA, 800 bp, Homo Sapiens
  misc_feature (736)..(736): n is a, c, g, or t
gggaggatattatgacttggtgaccattcttaggagtagaaaaccaaggacaattgcttctgtattcagtatccacttcttaatgtggctttatatgtaaaaataataatgcagtggttgtttctgtcaggaaaataaatcttacagaacaactggtggaattgaagctgctgcgctagacttggatattttgggtagtgaagaagcaatggcaatcttgagtctattattgtataatttagtaaaagaaaaaataatcgttggtggtcctactaagagaatgcagcttttttgagttgtcacagaggctgtgtgtgccctacactgaccagggtttgtaaaaccctttcattctggtacaagagtcgggggtataacttttatacttgaatctacctaccaagtttacatttctcaattcctttttgtaaggtgctatttctgtatttaaataactttcttttaacgtaaagctgctttctgcttatcttattgcactgctagttgtatgtaggtattaattttattgctgcttactgcttttgttttcttattatttaagctctgcctcttttttcctaatggctatattatctatagctatttacttggaaactgtactacatgtaaactgatttttttgttctgattttttttctaaaatttttaggaaaatattaagcttttataaaatagcaataaaaaaatatttcatcctaaaaaaaaaagaacaacnaaaaaaatataaccttgttcgggccgccttccggcccttcaaaaaacttttctaaaacctttca

SEQ ID NO: 45171 - DNA, 1095 bp, Homo Sapiens
ttatagacattttttatttgcatgaaaaaaactcactaaatttacatcactaaacaaaggttaacccttgtgtgaaatgaaggaactgtcaataattgacagccaactaatacagtaaactgttatactagttttgagctttagacctcagccttttgtgtggaagaagtcacagctttcttaggctttaaaggaaaagaaggaaggacttaaatagcttttcttcctaccgggattacctatgtttttccttgcttgcaatctcatctgattttgctagaaatcacaaccatattgtttatgcatattgcatgagtattaccaagaaaaatcttaaaagttgtgatgtgacatgatataaaggatctctttatgttaaatgtctttccatgtacctctggtgtgtcagggattttgtgcctcaaaaaatgtttccaaggttgtgtgtttatactgtgtattttttttaaattcacggtgaacagcacttttattatttccagttcagaagagccaaaaaaaagtatcttcatttaaaaagaaatcaagtcagttttttttaaaagaatgatctatggaagaaaacccaatagtacttataatatacaaatgaattatactattagataagaattaaatattctatttttataaagataaatacttagtagataaaaccaattttaagtttagttttcagacatagaatttcactttttggaggggacccttgaatgttagtttctttcaaactatattttggtttttttcacttttaagagataaaatctctggcggttaattactaaaattttcttttctaaaagtataattttatacaaaatttccttaaaataactgtgatcggaatccggggccccggaaaataacaaggggcctccccaagggaacccactcaaatacccccaccttttaatggttttggctcaaaacaaaccgggagcgctccatttcgtgggcatatacgcgaccaaagggccgctctaaatcaaattctcctcccctggctccagcccctcccgccacgaatttctggcgcccattttttgcccagacgcacgtactcccccgaac

SEQ ID NO: 45172 - DNA, 796 bp, Homo Sapiens
  misc_feature (710)..(710): n is a, c, g, or t
  misc_feature (796)..(796): n is a, c, g, or t
agaggtaatccaaataattgaatccttacactttgagaaaatggatagcttctgtgttatgataccaaacaaaatattttcatatttatttcttagaactatttccaaaatatttatatttcagtttttttatggtactcgaaaaatcaaaccttctgaagattatgatatttgtacttcatttgtgtattagttcattttctgtttctattacatagtttttaaagtcaatgaaagagattgagaatgttaacatttgttgatcaatgtggagctgtccacattcggtatcttttcatttttatatatattctacagtttcaagaaaacttagtactactagtatctgccttattttcttaagtctgatgttaatttttgtttcaggagtgagatataaacattttgctttttttcagttttgaaatatagtttgtcatcctgtgaaaaccacctcgtttgctttttgtttgtttgttttgcttttttagtgtagacctaaaattatttttgcctataaacagtgaacttaatatgtttctgtgagagtgacagagctgtgcccgtttatcttcattgtattaattattacataaagattaacaaatacattgcaaatgcaaattataggatgtttggaggatttattaatgagcatgtattgattgcctattccatatccagtgcaatgctaggtatgtctatggaanggagtatatacttcattctaaacaatgagtcagcaaatgagtcttctgaatatgagactctctgtactatcgtgtattctagccan

SEQ ID NO: 45173 - DNA, 581 bp, Homo Sapiens
  misc_feature (543)..(543): n is a, c, g, or t
ggactcgtatgctgttattaatgacctgagtaccaaaaatgaggggacaaggttagctattaaagccttggagcttcggtttcatggagcaaaagtagtttcttgtttagctgagggagtgtctcatgtaataattggggaagatcatagtcgtgttgcagattttaaagcttttagaagaacttttaagagaaagtttaaaatcctaaaagaaagttgggtaactgattcaatagacaagtgtgaattacaagaagaaaaccagtatttgatttaaagctaggtttcctagtgaggaaagcctctgatctggcagactcattgcagcaggtggtaatgataaaatactaaactacattttatttttgtatcttaaaaatctatgcctaaaaagtatcattacatataggaaaacaataattttaacttttaaggttgaaaagacaatagcccaaagccaagaaagaaaaattatcttgaatgtagtattcaatgattttttatgatcaaggtgaaataaacagtctaaagaaagaggtgttnttataatatccatatagaaatctagaatttttacttag

SEQ ID NO: 45174 - DNA, 752 bp, Homo Sapiens
  misc_feature (601)..(601): n is a, c, g, or t
  misc_feature (664)..(664): n is a, c, g, or t
  misc_feature (720)..(720): n is a, c, g, or t
ggtgttttaaccaatgacttaatttaacttagtgggtatactgttcccagtcccattactgatttttattcctctgtgataacatacacccaaataaagactgctatgtatttgactttaaaactataaagatgtaaaaaaggttcactaagccaaacaccttagaaaatagcctcagctatttgctatgtttatattatacctgcataaaagtatttatgtatagatgtacttaccttacacagtaagtacctaaaatttgtaaattgaatacttttgaatgtaagcagttgaagtaaaacctgtagtgagttcttcagtcagtcaacactaaacctgttttgtaaatttgatgctagtattacactggactttctcaaaatgaagtacacctatatatgcatatagtatatgagcatgcgtatttgtacaaaagcccttcaaaaggagttcagcttttataaacaccaaaacactctctgcctgtaaaatgtttttgctgaaatttgtatcattaactctcaaatttacatcttcatgtttgagatacgcttttaggactgtctatgcatgtagactttggtcaactctctcctcctcnctcaataaatcagttaacttaaaaaatatattgtgaccatttttataaaatacatgttcatanaacagatcaacatatttagcttatacagaaaataaattaagtcaatccactcacanagaatttctattttgtaaaaatgtagcttgta

SEQ ID NO: 45175 - DNA, 919 bp, Homo Sapiens
  misc_feature (796)..(796): n is a, c, g, or t
  misc_feature (890)..(890): n is a, c, g, or t
cggtcgcggcggcgactctcggcgtgcggtgatagccaagccatgggagacaagaagagccccaccaggccgaagcggcagccgaagccgtcctcggatgagggttactgggactgtagcgtctgcaccttccggaacagcgccgaggccttcaagtgcatgatgtgcgatgtgcggaagggcacctccacccggaaacctcgacctgtctcccagttggttgcacagcaggttactcagcagtttgtgcctcctacacagtcaaagaaagagaaaaaagataaagtagaaaaagaaaaaagtgaaaaggaaacaactagcaaaaagaatagccataagaaaaccaggccaagattgaaaaatgtggatcggagtagtgctcagcatttggaagttactgttggagatctgacagtcattattacagactttaaggagaaaacaaagtcaccgcctgcatctagtgctgcttctgcagatcaacacagtcaaagcggctctagctctgataacacagagagaggaatgtccaggtcatcttcacccagaggagaagcctcatcattgaatggagaatctcattaaagtttattttctccaatttcttagtcacttctgtcctaccatgcaaatacacagattatgccaagaggtaccacattttcatgacagatacattcatgcacaatccataatttgagttttacataaaatagaaatttgttagaatttgttagattttattgcaatgatgcctaccaaacatttccagacttaacattttggtctctgcagntaagtgccatgaaaatgtggttgaattattcattatgcagtggtattggtaagtgtattttcactttttagtttagtgaattctaacacataanttcttgaatttctctactattgggcatgt

SEQ ID NO: 45176 - DNA, 714 bp, Homo Sapiens
gaatctttctcgccaagatttgcccctgttttaatcaatgctgctgaaataattattgatatatatctgcctgtaattggtcagtcccctgtagttgataaaaagtttttactacttcaaggacttgtagaaaaagagattgattaccaaagagaattgttagaaaccttggggatgatggatatgctttttgccaccatgagaaggaaggaaggcacttctgtgttggaacacacatctgatggatttccagagaataagaagatagaatcatagtgtctgctaaataagacatataagaactctgaagttggaatagatttgactgtattaaatgttggcgagagactctctttgatacattaaaaaaactgtttgcagaagcagttctgtggaagagactggaataattatggccggaaaacaagtacccgttttaagtaagacatggttttccatgtaatattttgaattatagcatcttcacctagaagatctcaattgtcttagtcacagagtaggtttatctgggatggatattaattttaatacaggagtgttctgtatcaacatttgggttggtattcagatgggaattcaaatatgaatcctctctggagagggtccaactgggaatcctgctaaaggagcaaagccttgtattacctctggaagacaacaaaaacaattggcaacaacaaaaaaaaaaaaaaa

SEQ ID NO: 45177 - DNA, 382 bp, Homo Sapiens
tgtggtcggaattcagcagtagcgcggcggctggaagctgctaagtcagagccgcgatgttccggattgagggcctcgcgccgaagctggacccggaggagatgaaacggaagatgcgcgaggatgtgatctcctccatacggaactttctcatctacgtggccctcctgcgagtcactccatttatcttaaagaaattggacagcatatgaagacaggacatcacatatgaatgcacgatatgaagagcctggttacagtttcgactcctctctgcaagtgaataggcccagaaaggtgtaagagactctttgaatggacataaaattctgcttgttaagaacaagtttggctctggtaactgaccttcaaagctaaaata

SEQ ID NO: 45178 - DNA, 693 bp, Homo Sapiens
  misc_feature (602)..(602): n is a, c, g, or t
  misc_feature (641)..(641): n is a, c, g, or t
  misc_feature (689)..(689): n is a, c, g, or t
tttaattgcacccatgaatgtggctaggcgaggagctggagtggctgttcttaatggaaaactgtttgtatgtggtggctttgatggttctcatgccatcagttgtgtggaaatgtatgatccaactagaaatgaatggaagatgatgggaaatatgacttcaccaaggagcaatgctgggattgcaactgtagggaacaccatttatgcagtgggaggattcgatggcaatgaatttctgaatacggtggaagtctataaccttgagtcaaatgaatggagcccctatacaaagattttccagttttaacaaatttaagaccctctcaaactaacaggcttagtgatgtaattatggttagcagaggtacacttgtgaataaagagggtgggtgggtatagatgttgctaacagcaacacaaagcttttgcatattgcatactattaaacatgctgtacatactttttgggtttatttggaaaggaatgcaaagatgaaggtctgttttgtgtacttttaagactttggttattttactttttggaaaagaataaaccaagaattgattgggcacatcatttcaagaagtcccctctcctncacatttgttttgccaatttgcacattaaatgactcttncctcaaatgtgtactatggggtaaaaggggtagggtttaaagatgtanacag

SEQ ID NO: 45179 - DNA, 672 bp, Homo Sapiens
gtccaatactaggttgtggggcccttaacagtgccataggtgaattggtatcattatttctgttgtttttgtttgtgtttttgtttttgtttttgagacagagtctcactctgtcacccaggctgcagttcactggtgtgatctcagctcactgcaacctctgcctcccaggttcaagcacttctcgtacctcagactcccgaatagctgggattacagacaggcaccaccacacccagctaatttttgtattttttgtagagacggggtttcgccaagttgaccagcccagtttcaaactcctgacctcaggtgatctgcctgccttggcatcccaaagtgctgggattacaagaatgagccaccgtgcctggcctattttattatattgtaatatattttattatattagccaccatgcctgtcctattttcttatgttttaatatattttaatatattacatgtgcagtaattagattatcatgggtgaactttatgagtgagtatcttggtgatgactcctcctgaccagcccaggaccagctttcttgtcaccttgaggtcccctcgccccgtcacaccgttatgcattactctgtgtctactattatgtgtgcataatttataccgtaaatgtttactctttaaatagaaaacaatacacgcaaac

SEQ ID NO: 45180 - DNA, 605 bp, Homo Sapiens
  misc_feature (516)..(516): n is a, c, g, or t
  misc_feature (563)..(563): n is a, c, g, or t
gcgggaaatgggagtaggacaacattaactttagctgttttagtttctgagatttcataacctcagtagacaccagcaaaattttcagtttctaactccaccaccaatctctcctcaatgaataagactttagcaatttatatagaatttgatcaggtaagagcgaaccacaattctcctgaaccctgctagagattaagtggtggttctcacttcctcaatgaaaacttgcactggggacagcgcttgccttggtcagaccttcccacatctacatactctcaaatacatgaccaggtgatcaagcaatggaaaaatttgcaccaccgtgtcccatgaaattgtttcaatgtttagtttagatattgctaacttgtgctattaaccttttgacaagcgtgtagtattgtttgttttgggtttctttttgatttataactacttagtagtccccagctagctaccagtacagattttaccccatgggtaggattctattgttaagccacataacanagcacactaattctgacaacactgcaaatggaaaatacgaaccaaanaaaaagttacaccgataagttcaacaaactgtccatttttga

SEQ ID NO: 45181 - DNA, 686 bp, Homo Sapiens
cgcgtccggaagaatatacaatattgaggatatttttttcttttttttttcaagtcttgatttgtggcttacctcaagttaccatttttcagtcaagtctgtttgtttgcttcttcagaaatgttttttacaatctcaagaaaaaatatgtcccagaaattgagtttactgttgcttgtatttggactcatttggggattgatgttactgcactatacttttcaacaaccaagacatcaaagcagtgtcaagttacgtgagcaaatactagacttaagcaaaagatatgttaaagctctagcagaggaaaataagaacacagtggatgtcgagaacggtgcttctatggcaggatatgcggatctgaaaagaacaattgctgtccttctggatgacattttgcaacgattggtgaagctggagaacaaagttgactatattgttgtgaatggctcagcagccaacaccaccaatggtactagtgggaatttggtgccagtaaccacaaataaaagaacgaatgtctcgggcagtatcagatagcagttgaaaatcaccttgtgctgctccatccactgtggatttatatcctatggcagaaaagctttataatttgctggcttaggacagagcaatactttacaataaaagctctacacattttcaaggagtatgctgggattcat

SEQ ID NO: 45182 - DNA, 580 bp, Homo Sapiens
atgactgaacacgttctcagtgcttaattcttaaatttctttactcatgacatttcgcagtgcagagaaggcagaacccaagaaaaacgtcatctttgagactttgcttttgtaacgcagacatcagctttacacttcacaggagattgatggcattgaggaagattgcaatggagatcatgacactactgttaataaggccaggaaaactgccatttcaagttctgaaaaatgttttgagtatttgaatttagagaaacaacatggttccaagaaggagggtgtaaaacctgtaaaatactgtcaacatatgtattcattagttacaatctcatgtttgtgttttcttagtactgtctatttacaaacacgtaaaaaataccccaaatatgtttaagtattaaatcactttacctagcgttttagaaatattaatttacttgaagagatgtagaatgtagcaaattatgtaaagcatgtgtatccagcgttatgtactttgcgccttgtgacgtctttctgtcatgtagcttttagggtgtagctgtgaaaatcatcagaactcttcactgaagctaat

SEQ ID NO: 45183 - DNA, 576 bp, Homo Sapiens
gggtttgaaggggcaaagtttgagtctggatggaacctgggctgaggtaccttaagcttccccccgcaacaccccagcctcagggattgcgggagttgtcagagatctgatggatccgaaaggggcagggccaggggattaggtttggggtcagaggttctgttttccaggggaggggtgagataggcctggatcatgccctctgccatgccctccagctaggaggatcttgagtcagagaggattggaagtgctttctcctccacccaggtgaggtcaggggagcttaggtcttagggagatggcaagttgaggtatgaagggaagctggggcttttggagctgccgaacaactgagggacccagtgcgccttccatcccgcactagtgaatagcgccccctcttcccccgaaaacgaggtgcgagaggaacaattcccacgctggggaaggacttgtctccttttctgtgaaaatgctttgtaaaaagttgttattgtttgcatagagcagattcttgagaaaaactgttttggaccataaaagttttgtttgttttaaaaaaaaaaaaaaaaa

SEQ ID NO: 45184 - DNA, 892 bp, Homo Sapiens
  misc_feature (662)..(662): n is a, c, g, or t
ctccaaccttatccttaccatattggtttcagggataggattaagaagtgtctttggaagagaaaaatacacacaaccctgtggtttagaatgacgctgaggccttaggctgtgggcctagaacaactatgtgagtgaattcacccatctcatactttgaatcaagcatgcattcctgtttctcattgtgaagtatccccagttgttttccttcagtgttgagtttttgtccttttaaattttattatattttgctctccctaacatttgactgttttttataaaagaaaagaaaaaaaaagaaataaataataccctcgatgccactggatactcacaagcagggttatgctccttcatcttgggcttgtttgcctaaatgaaagggtttaatttattttgtacctcctatgcgtgggatagtccagggtgcagagccaggacttgcttgtaattgcacctgctatacttaaatgtatagccctaggctcaatcacactatggaaagaaacaaaaaaagtatatttagagctttaaaagcttttttatttttttgtggggatgagggtggggaatgggaaagggaatgtatggggatgttatttggcatttttaagtgttttagagtttttttggggttttgggggtgggtttttttttcntttgtttttctttttttcctttttaattgggatggcattggacctggccccaggaaaaaggaaagagattcctctttttgatggctatttaccaaatgtttatccttaaaagtgaacaagtcacccttgtaaacaaaaaaaggtgggccacccagaacaatgaatccactgggatggttttttatttggccacaatcaaaaaatttttttaaattttggggaaatcccgg

SEQ ID NO: 45185 - DNA, 764 bp, Homo Sapiens
  misc_feature (762)..(762): n is a, c, g, or t
ccctttcgtgtttacttttcgctctagatttttaaaaatgtgattgtgcccttgactgtaccaaagtgctgttgctataacagtgaacatttgtgaacagaggatgtttgtagtttcaaatgcagtacccatatgaccttgatcatattttagctatttaaaaattaagttggaggattttggcagaagtagtcacatgcatgattgctctgatagattggttggcgtgtgctgcagggggcttgtccttttaactctcccacaggatggatgtaggcagtgtcacattcattatgctgagagtgaaggttcatcactcctgtatcatggtagcaaatctcaacaggatagcttctaggatgttaagtgagcagttctccagcagaaatgatgtagaaggaaaaaattgaataattaaatttccttgtcttcacagtttgtattctacagagtacagtaatgtattacattccatttgcacccttccttagggaagaactttgtggttatctaccttctgagtggaatgttacagaaaatattttaaaatattggaataaacctatgattttattaatattttttgttttagaataatattccttaaaattatgggtgatgttttgtcatctttattttttttcaaagtttccctgtagtggccttctcacacaaagccagaggccctccctaacactgcttacagaggtgggcctagaacagacatgaatggacactgcacctggaataccagcacctggngg

SEQ ID NO: 45186 - DNA, 480 bp, Homo Sapiens
  misc_feature (4)..(4): n is a, c, g, or t
  misc_feature (16)..(16): n is a, c, g, or t
  misc_feature (21)..(21): n is a, c, g, or t
attnggccctcgcggnccagnaattcggaacgagggttggtcgtggctggtctccaactcctgacctcgggtgatccgcgccccgcggcctccggaggtgctgggattgcaggcgtgagccaccgtgcccggcctaaataaaattttgaagaggctagaaccccgcacttgtgccttgagcttactgacctcaacaccctggttccactaaaactttatttacaaaattatgctgccggtctgcaggatgtagtttaacaatttgattattttggatattaaaatattttttaagtcttgaaaatattgtttactattaccaaagtttttgaaccttcttaaattctgtaccagaggtgagtgccacaccctaacctagtctgagtttttatgtgtaaagatcataaaacgttgtaagttttctaaaacacataagctctcaataaacgttagcttatcattgtcaaaaaaaaaaaaaaa

SEQ ID NO: 45187 - DNA, 651 bp, Homo Sapiens
gacatgtcttgtgactatgacaacatggctgtgaacccatcagaaagtgggtttgtgactctggtgagcgtggagagtggatttgtgaccaatgacatttatgagttctccccagaccaaatggggaggagtaaggagtctggatgggtggaaaatgaaatatatggttattaggacatataaaaaactgaaactgacaacaatggaacaagaaatgataagcaaaatcctcttattttctataaggaaaatacacagaaggtctatgaacaagcttagatcaggtcctgtggatgagcatgtggtccccacgacctcctgttggacccccacgttttggctgtatcctttatcccagccagtcatccagctcgaccttatgagaaggtaccttgcccaggtctggcacatagtagagtctcaataaatgtcacttggttggttgtatctaacttttaagggacagagctttacctggcagtgataaagatgggctgtggagcttggaaaaccacctctgttttccttgctctatacagcagcacatattatcatacagacagaaaatccagaatcttttcaaagcccacatatggtagcacaggttggcctgtgcatcggcaattctcatatctgtttttttcaaagaat

SEQ ID NO: 45188 - DNA, 584 bp, Homo Sapiens
aagggactttgaggcgggtgtttttgaactagaagcaattgttaacagcatcaaaagaagcagaaaaattatttttgttataacacaccatctattaaaagacccattatgcaaaagattcaaggtacatcatgcagttcaacaagctattgaacaaaatctggattccattatattggttttccttgaggagattccagattataaactgaaccatgcactctgtttgcgaagaggaatgtttaaatctcactgcatcttgaactggccagttcagaaagaacggataggtgcctttcgtcataaattgcaagtagcacttggatccaaaaactctgtacattaaatttatttaaatattcaattagcaaaggagaaactttctcaatttaaaaagttctatggcaaatttaagttttccataaaggtgttataatttgtttattcatatttgtaaatgattatattctatcacaattacatctcttctaggaaaatgtgtctccttatttcaggcctatttttgacaattgacttaattttacccaaaataaaacatataagcacgtaaaaaaaaaaaaaaa

SEQ ID NO: 45189 - DNA, 534 bp, Homo Sapiens
gggatggacagcatgcagggcttttggggcgcttcccccgctcctccatcaccctcagcctccacacttcaaagttcaagttcaaagctgttcaagtttcctaccagcaaatagccctaacttgcctctagagtaggccaaatgccaactctgtaaaacacacttacattataggttacagaatgtcactcttaccgtcatgtcttgcaacaaccctgtgaggacagtattaatgcccccttacagcagaagacactgcagctcggagaagacagcttaagtggcagaataatgctagaacagctaaggtttacatgtaccaaataacatgtttcagctcattccatcctcacaacagccccctgaaagtgggtactatcattagtcccatgtatatagaaactgcagacagagttgaaaattgcctccaaattaccggaagagtgtatgaagattgaatgtgatgtattcacgtaacatgcttgaaactgcctggcatatactaaacgctaaataaatacatgctaactgcga

SEQ ID NO: 45190 - DNA, 622 bp, Homo Sapiens
  misc_feature (553)..(553): n is a, c, g, or t
acacgtgttacttctgtaagaaacgtgtgtacgtgatggaacggctgagcgccgagggccacttcttccaccgggagtgtttccgctgcagcatctgtgccaccaccttgcgcctggccgcctacacctttgactgcgatgaaggcaaattttactgcaagcctcacttcattcactgtaaaaccaatagcaaacaacggaagagacgggcagagttgaagcaacaaagagaggaggaggcaacatggcaagagcaggaagcccctcggagagacactcccaccgaaagttcttgcgcagtggccgccattggcaccctggaaggcagccccccagttcatttcagccttccagtgctacacccacttcttggctgacacacttctgctctaaggtgactggttttcttgccaattttcaaagagtggtactaacccccaaacccgttttccgcaccccgtcctttccgccagcagtactgtttgcactaactgtgagtgtcttgcatactgatggactcatttggtggcatggttggctaacacatgggggngggtgtcagcttgagacccatgcctgtgtcatttccatgagctggagcctgtttacccaagtgctgccc

SEQ ID NO: 45191 - DNA, 910 bp, Homo Sapiens
  misc_feature (708)..(708): n is a, c, g, or t
tggaaggatcattgctataattatcttttcagaataaaaaatagagtattctttatcctttctgttgtctcacatgacaagcatgggatggtgaggaaatggcatattgcctatgttcgccgccccacccccttagttccaccaccccttcaccgtcacccccagttcactagtgtatcagaatgcatcttcagaattacacactgaagatacaaaaggtccagttggtaagctcatcagtaaataacaaggctttgaaatctgacaaattagctatttttgtaggaagataatagaacagcaagatggaagacaagtgatgagtatcatctgttttgaggttgacagggtgtgacataaccctgttaatagacacaagtaaaagaaaatcatactaggattggatattagtgagcgagcaccgaccagtagaaacaacaacagcataaatctgttatttaagtatcccaataatgaggttaaaaaaaaaaaaaaaacagaacaaagcatgaaaagaccacaattagtgctggctatgcttagagaggagcagtctcttggtaaactcaggcagtgatgatgaacagaaaatggccgactgatactgtaatagaggcatagaactaaggacactccgtgagctggcataaatacaggggagtctttaagactgaaaaaagttcatgggtatgacacttaatatgactncacattactgcagaattttaaagcaaacatgaaagcttgagaataaacactagtccctctacttcaagaaaaagcaaaacctgtactagaacattgagaaacttagagaatcaaagacagcccggactatgatgaaatattttgaaagcagtgggcaacatttttaaagatttttttttggaagaactttttgaagctggtt

SEQ ID NO: 45192 - DNA, 499 bp, Homo Sapiens
gcacgaggacgagcctaaaacttgtatcctgaagaaaatatttttttccaccagaagaaattgctttcaatttcttaaccttcaaaacaatgtcagtgttgtcacctgtgcatttgatagccacagcacaagtattcttcaggagcataaatcctccagccttgaatggaccattgtccagctcctgtgaaaaacttaatatttgagaaagacattcaatggtacatgttttctgtacacttcatgagtagttgagattttcttgtattaaggttaatcactaaaaaggtgtttacttgggtttcgttaactaaaccccctaaagatgttttccattttattgttaaacacttggtgttagcaagggtcagcacgagaaaaggcccaatggcaagaatttctgcaaactctgtaaagcttactgaattcatttgtcatttattacattgctgagtggtgcttgaataaggaaacatgcaataaatttacttatttaacc

SEQ ID NO: 45193 - DNA, 785 bp, Homo Sapiens
tgaatctgcagaatcagaaggkgtaattgattctcataaacgtagagaaatcctttcacgaagaccctcttataggaaaatactgaatgaactgtcctctgatgtgcctggkgttcccaagattgaagaagagagatcagaggaagaaggaacaccacctagtattgstaccatggcagtaccaactagcatatatcagactagcacggggcaatacagtatgtatgctgcaattcgatatgatacagtgctagctttaagtcttctctagttatattgaagcaactcaggttttggcattaaattgttccattttaaaatgcatcattaatacctaaactgtatcatagaatgaragtatatgttaaaragtgagatctttgtattgacagctgtcatataattttgaraagtaaaaattttgactgccgaatatagaagaaaattttggggtaaaaaggrgaatttttcctatttacatgtttatattaatctctagtaaaacattgtttttgttgtctttatgatgcatgcgaacataaatgtctgtatttcattcttgttggcttttgttacccacaattacatactattcttactaatctgagagttttctaaagtatgttttcratgtttcactactctctactctgttaatttgtgctacagtttttcctaaaagagaatggaaaaatgatttaattttttaaactgtagcaattggatagataattttatttgaaattttacacactgaaagctctaaataaacagatacattcaca

SEQ ID NO: 45194 - DNA, 581 bp, Homo Sapiens
cacgaagaagactaatccagagataaaagaaaaaccctgccattttgaaagatgtgaaggggagaaacacatttactccccaataattgtacgggaggtgatcgaggaagaagaaccaagtgaaaaatcagaggccacctacatgaccatgcacccagtttggccttctctgaggtcagatcggaacaactcacttgaaaaaaagtcaggtgggggaatgccaaaaacacagcaagccttttgagaagaatggagagtcccttcatctcagcagcggtggagactctctcctgtgtgtgtcctgggccactctaccagtgatttcagactcccgctctcccagctgtcctcctgtctcattgtttggtcaatacactgaagatggagaatttggagcctggcagagagactggacagctctggaggaacaggcctgctgaggggagggggagcatgggactttgcctctggagtgggacactggcccctggaaccaggctgagctgagtggcctcaaaacccccgttggatcagaccctcctgtgggcagggttctttagtggatgagttactggggaaga

SEQ ID NO: 45195 - DNA, 709 bp, Homo Sapiens
cctcagcctctcgaagtgctgagattacacacgtgagcaactgcgcaaggcctggtgtttcttgatacatgtaattctaccaaggtcttcttaatatgttcttttaaatgattgaattatatcttcagattattggagactaattctaatgtggaccttagaatacagttttgagtagagttgatcaaaatcaattaaaatagtctctttaaaaggaaagaaaacatctttaaggggaggaaccagagtgctgaaggaatggaagtccatctgcgtgtgtgcagggagactgggtaggaaagaggaagcaaatagaagagagaggttgaaaaacaaaatgggttacttgattggtgattaggtggtggtagagaagcaagtaaaaaggctaaatggaagggcgagtttccatcatctatagaaagctatataagacaagaactcccctttttttcccaaaggcattgtaaaaagaatgaagcctccttagaaaaaaaattatacctcaatgtccccaacaagattgcttaataaattgtgtttcctccaagctattcaattcttttaactgttgtagaagacaaaatgttcacaatatatttagttgtaaaccaagtgatcaaactacatattgtaaagcccatttttaaaatacattgtatatatgtgtatgcacagtaaaaatggaaactataaaaaaaaaaaaaaa

SEQ ID NO: 45196 - DNA, 861 bp, Homo Sapiens
  misc_feature (699)..(699): n is a, c, g, or t
  misc_feature (793)..(793): n is a, c, g, or t
  misc_feature (859)..(859): n is a, c, g, or t
catccagatgctttgcatgcatactttgggatctgtggcctgtcactaatggaggaaagtggaatttgtaaagttcatcctgctctgaatgtaagcacacggacttctgaacgccttctagatctccatcaaagctggaaaaccaaggactctaaacaatgctcagagaatgtacatatctccacatgactgattttagattgggagggtggggggatttgtagcataactgtagctcaagtttaaaagccatgtataaccaagtgtgctctttttttaaaaggtagagtcttacaatcaaatctcctgctgatttcactttgggatatggtcttgagccagtaatctttatactgggtttcaagaaaatctttgttgaagtttgaaccacaactttgtcgtggttcttaaatgtttatactgtatttctaagaagttgtttgaggcaaattaactgtatgtgtgtaggttatctttttaaaaactcttcagtgcaaattgtatcttattataaaatggacacaaattttcaagtttacacttcatatagcattgataatcttcaggtgaacacttagtgatcatttaaaaagctcactgctgatcgtagaaaatttgctttaattaattaagtatctgggattattctttgaaaacagatgaccataattttttttaaagaagagtgacttattttgncttattcttaagtaaagtgtgccaattaaacctgtgtggcctatataaatgaagttaataacttcatagtaagaataaataggttaactaatgngatagtttctaaaaggagatggttgaagacactatatgactgaggaaaacacttactgatggatgnaa

SEQ ID NO: 45197 - DNA, 657 bp, Homo Sapiens
ctcgcgatgtgcttcagcagagcagacgctgcggataactacccttttggaacatgtcaacagaggaaactttttcctcacttccatcccccgaatttgattgggaacaagtttgtccctcttaggggatcaccccacagagggcctgggtgttatttttcagatgaaatgacacctcatgcaggcaggtaccagaaagtaagtcctcagcaggaaaaacacaaacaaaattttgctccatttaatgtcttggtgcctcgatttaagaactacccaaaggacacttactatcccagccctggtgcatacaacccagagaagaagccaccgccaaaaattgcctggccaatgaaatttggatctccagactgggctcaggttccatgtctacagaaaagaaccctaaaagctgagctgtccacagacaaagactttagaaagcatcggaaccgtgtggcctacctaagcctgtattataattgagcggctgtaactaccttcacgtgctcctcttatacacagactctccaggactgaggacagagctgctcttcttcttctacgttactgtggccctcttgtctggcagcctggagcccagggagggacaggggcttatagctgctgtatgagaacataaagactagtgcacagtgc

SEQ ID NO: 45198 - DNA, 675 bp, Homo Sapiens
ggagccgttactaatgtttacaaccaggggccgcccctccttagatgtgtttactcgcattcacaggccacctgttggtttgagtttcatgtgtctccttccctggcctaggttgacttgagcacacaactcgatctttcttcccctccatcaaggcagtgtgtgaggactgtgtgggaatgacatttcttgtacataattagcacagcacctagagtatgaacttgtactattgttctgtaaagagggtgaaatagagcttattgtaaagtgtcgggagaagtatagtattgtatttgtaacaatatcgttctttgtatacacaaaactcaatgatctatatataaatataaataaatatataaataaaatatatctacacgtgagcctggaatgtggacaccgcacacccactgaatgtacttccttgacagtctggtcactggtccctccctccctccctcctccgtcccgtggccacagtcatccagtttggggttgtgatgtatttactgtgctatctatcttcctttatttaactgaacgctaatgtctgtataagagttgctgcaacaataaacaagaacttcacctcttggaagacaaaaaaaaaaaaaaaataaagaacataaaaacaaaaaaaatacaagttatccaacctcctccatcccccct

SEQ ID NO: 45199 - DNA, 700 bp, Homo Sapiens
aaggaaatcggcctctatttgaagatatgactgattctgactgtagagataatgcaccccggaccatatttattataagtatgtataaagatagccagcctagaggtatggctgtaactatctctgtgaagtgtgagaaaatttcaactctctcctgtgagaacaaaattatttcctttaaggaaatgaatcctcctgataacatcaaggatacaaaaagtgacatcatattctttcagagaagtgtcccaggacatgataataagatgcaatttgaatcttcatcatacgaaggatactttctagcttgtgaaaaagagagagacctttttaaactcattttgaaaaaagaggatgaattgggggatagatctataatgttcactgttcaaaacgaagactagctattaaaatttcatgccgggcgcagtggctcacgcctgtaatcccagccctttgggaggctgaggcgggcagatcaccagaggtcaggtgttcaagaccagcctgaccaacatggtgaaacctcatctctactaaaaatacaaaaaattagctgagtgtagtgacccatgccctcaatcccagctactcaagaggctgaggcaggagaatcacttgcactccggaggtggaggttgtggtgagccgagattgcaccattgcgctctagcctgggcaacaacagcaaaactccatc

SEQ ID NO: 45200 - DNA, 460 bp, Homo Sapiens
  misc_feature (13)..(13): n is a, c, g, or t
  misc_feature (28)..(28): n is a, c, g, or t
  misc_feature (162)..(162): n is a, c, g, or t
  misc_feature (195)..(195): n is a, c, g, or t
atctagataatcntgttaaatatgatgntattacctattaatcactgtactggcatacataatgtacactagcttgccgagctctatattatgatgccggtaacccacgtgtggactccctgtatatatgaacatcactgcctaaatgttagcacagtagcncatatggaaaatttgaatgagctaggttaaganatgctaagtgcaggtaccagaatctcagaagcggactgaagtgttaaataagatgtttggcttgggaagcaatctgggcttaaattgaatgcaatttagtgactggaaatttttgaagttcaaaaattttttaaaaacagttatgttagaatagactctgtatctgaattcttgatactaatgaccttataacaagttgggtttgatcccattcacttgagccagttggttttttgtaagtgaatttcccaaaaaaaaaaaaaaa

SEQ ID NO: 45201 - DNA, 515 bp, Homo Sapiens
ctttctatggaaaaaaaaaaaaggttaggaatcacaaattgtgtaaatatatagcaactttaagaagagagaagaatgcttataacctagtgaatatttctgctgagccttagttgtcttgtctaaaggaaaaaagagggaattgtagaataaaagtatttgttagtggaaattattgacctgaaaccatatcatattgttagtgtaactgaatgtatcagaaattgttcctatgtaggtattctgtgaaactggtttctaaaatgttacaggaaactgtttcctttttttttgtttgtttgtttaagtggaggtgggaggaggtagggaagaggtctgaatattaaaatatgtttatgttcatgtgttcataatacgttcctttttctctctgtgtgtgtataaaagtgccttgctcatgaatgcatttttgctattcacttcgaaaggaagcctttccccagcttggcagctgaataaaccaatagctttgtacatgctgaaaaaaaaaaaaa

SEQ ID NO: 45202 - DNA, 875 bp, Homo Sapiens
ggctggtaaccgggtccgggaattccccggatcaataaataaaactctttttcatttcagtaagaaatcagattgtaagtttaatggctccattatagataccaccgtgtaatagaagacttaagtcaatgaaatctaatcagtgtgtcatttctcagcggccattggtgacttaaaattaagatgaggcagagccaaaatggaaaacagtcattttgttgtaggtataaacacatgaacgattcagaaaattattcatctcagctgccatgcagcatgacattaacattaggattgatagcactagtctgatctgctcaaggaaaataatagttctattatacttaatgatgttggtttttacacagctcatttcatttttcactagaaagccagttatgaaagagagctggcctaggcatcccggccctgagtcctaggcccagtctccaactggaaaaccttaggctggtgtttacacatccctgagcctcagtttcctcatctgcaaaacggtgtgaatagtaatccctgtgctgcttatctcacagggctattgtgaggaccaaatggattagactgtaaactgcaaagtgctgtccgcacatgaggtcatctgattactgtcctcagatctcttttgtagaggatttcaatgtatttctttatcatttgagtgtgtgtgtgatggacgaatatgtgtgtgagtttgagaagcatatcgttcgtgtccagttactttgcaaatttgtggacatttgtgattggacagaggggtttgtgctgtggcctaacacttgccaagtgaggtgtaggttatgcctatatgcaaattaaacttcacctttcttgaaaaaaaaaaaaaaaagggcggt

SEQ ID NO: 45203 - DNA, 586 bp, Homo Sapiens
ccaagctctaatacgactcactatagggaaagctggtacgcctgcaggtaccggtccggaattcccgggtcgacccacgcgtccgcaaggaataaacgtgatttcagtttaaactatatacaaatatcttctgtaattttgctgctctaatttttaggctataaattttgtaatagagcttatcagatcgcaaatttcctttgtttacaatctcatgtagtagggctcagataatttcttagctataaaccttttctcccactctcatattgtttcatttaaaatatttaagctaagcctaaaaattgaaatcagttaagaatttggagagtttatcttaaatggaaatggtgtattcttttcaaagaattttgtaaccatctttacagtttctttgcttggaaaacttgggttgttaactaccagttaacaatggcattactttccaaaacgttatctaatgggcccaatgtgtacctcaagataaacacagtatgttatgtctaaaaatttccttgtctgttgatttaaatggttctgaaatgtctgtaataaagaaattttcaagttgcttttcttgcagttg

SEQ ID NO: 45204 - DNA, 527 bp, Homo Sapiens
ttgctgttctagagcatccctctcagcttcgggctaaccagtagcccaggcctggaggatttgcaggtcgtgtcagaatttgattgcagttccttccacttggcataaggagacactatcagcctgattgggagggtgatggtgggatggagcctgccgaggtggcggcgctgagctgaccacaccaccggccatagagtgggagcctttcctgcccgcttaactgcagctaatatcaaaagcactggtatgggctgtctatctgtgctggaacctgagtttatctttgtctgcaattacgattcttctgggtttattttgccagctcattatccagccccctggaatcaggcctcccaaatttatcaggtgctggggaggaccctagggagtggtgtatgggggctagctggtgaaactgccctttcctttctgttctatgagtgtgatggtgtttgagaaaatgtggggctatggttcaggcgcacttcacatgtgcaaagatggagaaagcactcacctacacg

SEQ ID NO: 45205 - DNA, 753 bp, Homo Sapiens
actggggcatgacagttaagataatacccaatgaccctgctctgtacccttaagagcagactcagtgggaatgagttatccaaatatagggtgtacatgtagtcaggagagagcctcatacagcttgccttggcagaatccttcaaacctcttgtcttcctacttcttgatattacaaatcatgagcctttcacatgcattgactctaaagaggtgggttcctggatagcagaagtagataggaaggcatcattgacatttactgagatggattgaatcagagggtgtacaattctgctccatcaatgttgaaaaagactagcccaccccaaaggtttatcactgtcaccatgtctaatgtctattctggaagaagctgaagaagtctgcctttgtttagggaaccggttccagaatcagaggggttgaggatataaaagacccttgcacaagagttggtatttaccctgtcagatgctgctaccaagatttggatgtgtacagtccgaggaattaaaaatgaccttttaacgacaaaaaacaaacaacaacaaaaaaaaaaaaatacaaaaaaaaaaaaaaacgcccggggcggtctctcttggggggggcggaagacaaagggggtgttataaagggggcaaggggcaaagctgttttccctggaccccctctttttgtccaccggggggaacatcgggggggccccccaaaaggggggcggaaaaatcaaaaacccggcgcacccgtaag

SEQ ID NO: 45206 - DNA, 550 bp, Homo Sapiens
caaacagaattatcatctgggatttctgaatcatcccattttattccgtatgttcgaacaaatgagatctattaccttgatcccgatgcaccattgtctgggccttcaacccaggaccctcagtaccaaaattcacaagactgtggccaaaaacgacagctatttgattctgactgtgtcagggatccacttcttaatcctaacatggtgaaaaatagggatcgacagcaagcaatccttaagggactttcagaactgagacagggccttctccagaagcaaaaggagttggaaagtagtctcctgcctttagctgaaaatcaagaagagagttttggttcttcattttaaatgtagaaaatcaaatccttcacatttgatttgtgtcttccaaattataaaatgtgctcactggctcaactgtatttttcaaatagcctagatttacttatttttttaaatgctcattaaaaacttgtatactatgtagtaaaatgctgtacttgttctatacaataaaacagatacttcttttgtaaaagcttagtag

SEQ ID NO: 45207 - DNA, 497 bp, Homo Sapiens
acttttaaattttaacttttaaaatctatttcatttcttagttatgcatctcataatcagactccatgctttttaaagacagagataatatcttctctattctattctacttcctccatttcaccatttatacaaagtcattcaaaaaggctgattcatgccttcctgcctcttggctatggccctccccatctactctttaaactttaatctataacttttcatcagttttgttccctatctagaaaacattttcttctgtttgctaatctttgtccctcacaatttttgaaatccatctcatcactgaaatactttcttcttcaagtacttttttatttttcttcaacttctcttgatttgacctcagtgctttgaattcactggtgctacaatatgtaactgtggttaattgccttgtaaattttgcgtgtctgtatacttttataccaacttattgtaggctctttgaggtcaggtatgtatttctttcccat

SEQ ID NO: 45208 - DNA, 776 bp, Homo Sapiens
gatactacctgatactgggtaatttattaaaaaaaaaaaagaggtttaattgactgacagttctgcagggctggggaggcctcaggaaacttaaatcatggtggaaggcgaaggggaagcaagcaccttcttcacaaggtggcaagagagagtgcaggggaaatgctaggcacttatcaatcagccaaatctcatgagaattcactatcatgagaacaagggggaaatctgctcccatgatctaatcacctcccaccacgaccctccctcaacacctggggattactattggagatttgggtggggacacaagagccaaaccatatcactgctgttgtgggtaataggggaggtgaaattggggggacaattcggcctctttgtgtccagaggttgtgcagttatcgagtgaggttgatcagaagtctaaagggatctttcaaatggatagtgagttgccttttcctataggtgacaatcagagatttaatgttttaagtatcatataataggtttttctcctgattgtgaattgtaagtgttggtaatacagaaaatgagaaagtataaaccacccccaatcccaatgcccatagaaacgttgttaacattttggagtactttctattagtgtttatttttcccaatcctagtatttttagtaaaactactgtttagtaaatgatttttggtaactaatttcaaaatttatacttcaaccgtttattattagaatgtaatgcaagatgtattgcaataaaacttgagttttaaaa

SEQ ID NO: 45209 - DNA, 637 bp, Homo Sapiens
attccagggatctcaggtgcatgcaattttactttctaaagtaaacacttagaaaatagattataacccagacgttttggattatactgagacaaatatgtaaataagttttagcaagtctgaacatgtaccagcgagatcttcaggttaactaagaaaagcccagaaacttcattatttactgtgctttgtatggcataactggtaacaaggcagtaaaatgatacatatttgaactggaccatagtaattaaatgatttatcaatatcatttgcaagataattgtcaggttgagttaatagtaagtggcagcttcccagaaatttgggttatttggcctaagctgtgccctgggattacctcttcatcttccttgacttttaagttcaaatttggaggttatgtgaagtgattgaaataaatctttcaggctgaggaagtcggtaatttcaagaatatagtgaaaacaaggttgtaatctaaacatgagaagcttaagtttaggaaatggttagaatataaattgctaaagccatcatgattttggccacaaatgaaaatatgaacactggaaatgagcgccatttaaatgagatgctgtatgtaagccaggggtcagcaaagttcagcctgtga

SEQ ID NO: 45210 - DNA, 824 bp, Homo Sapiens
gtggtaagtgctttggtaggaaaaatgcgggtttccatcaaagtacatggcagggataccgagatctggtctatgagtcactaaagacttcctggatatgatggtatctcagacataaaggtgggtagaaggtagcaagggcaggggagaagagaacaggatctggagacactccatgaagactcttctctactgcagaaattgtcatagacctaatttttaaaaaaatgaatctgaaggagtaattcaacaaatatttattgccctcaagtataatagctcagggcctgcaaagcctggtaaggaggggtgtgggcagggaatggggaatagcagagcctgggaaggcagatcaccgtgttcctttatacttcccactgcctgagtcccagagtcatgggacacaaacactccagtccccactgtctctctagcctctgatatgcattctttccctgtgtatatacatgccttttcccataaaatgcaccagtctctcaccacactaattctgagtacttcagagtctcacaggtcattctgggtctagaataggctccccaactcagtgattataagtaggaagaggaaaagcaacacatggggattctgagccaggctttatgacaactaattcctgctggagagaagagtcctgatgatgggctgtctccagatcctatcttatcttcatgccattgtatgggctataacctctgccgtgtaactctctctgctaattttatatttaggcagtgttaattaacccacaattgctgagggcaataattacctaaaagaaggttgatcctcgtctaagatac

SEQ ID NO: 45211 - DNA, 592 bp, Homo Sapiens
cgcccagccaatttttgtatttttagtagagacaatttcactatgttggccaggctggtcttgaactcctgacctcaagtgatctgctcgcctcggcctcccaaaggatgggattacaggcaccagccactgcgcctggctggcctctggtttttaataaaacatgactagagtgactccatcttaaagtgagtagctaggcacttacaaggttcatgcttatggcctgaaaataaccacatcccaggctgaccaccaattataattacagaatatttatggccatacagaacatgttccaccaagcctgcagaatgtccaaatgtcctaagaatgcagcccccattacttaaatataacataaatgagcaagcttaggttgcaggattaatggtcgtggataacaccaatagcccctacctttagtgagcttatctgcacactccaagtttaactatagttccttatagtttcttataagtagaaatactaacaaagggccgtgggtttctccccctgctttctgaggacactctactctgtaaaggagtagtttccaataaacttgtttctttcactgtgaaaaaaaaaa

SEQ ID NO: 45212 - DNA, 764 bp, Homo Sapiens
tttttttttttttttttgtgtgtgtgtgtgtttttttttttttttatcagagtcccatacctcacgggtattttctcaatcagtgaacacctcaagtactagcccatgtgttttgagtaaaaagggctcctttcaacgaggatccccttctagaggctttgactaaccagtctcttggcacccttagaatgaagttgagagcgtcacagggatgcttaacgaggccgaggggaaggccattaagctggccaaggacgtggcgtccctcagttcccagctccaggacacccaggtgagtgtcctgccacatcatccaggggacctggggggtggccttcctcggggcaggtccctgggacctctttgcatcccttttgcaggagctgcttcaagaagaaacccggcagaagctcaacgtgtctacgaagctgcgccagctggaggaggagcggaacagcctgcaagaccagctggacgaggagatggaggccaagcagaacctggagcgccacatctccactctcaacatccaggtgcctgccccgtgtccttgcttccttcatgggtcctctcaacttctctgcgctgagatcccccgcaggcagatcgcggtggagtgttggtgcgatggtgcttgaccccccagcttcccctgctattgggtttctccaacgaggagacatggtcttcgcttctcagagtctgtgggggcagggacaggggcattcatggtcccctctcaccctacctggacctgtcttgta

SEQ ID NO: 45213 - DNA, 692 bp, Homo Sapiens
ggaactgtgagagtgacactgaggaggacatcgccaggaggaaagccctccacccacggaggaggagcagcacctcctaactggcctgacctgcagtggccgccagggaggtctgggcccagcggggctcccttctgtgcagacttttggacccagctcagcaccagcacccgggcgtcctgagcactttgcaagagagatgggcccaaggaattcagaagagcttgcaggcaagccaggagaccctgggagctgtggctgtcttctgtggaggaggctccagcattcccaaagctcttaattctccataaaatgggctttcctctgtctgccatcctcagagtctggggtgggagtgtggacttaggaaaacaatataaaggacatcctcatcatcacggggtgaaggtcagactaaggcagccttcttcacaggctgagggggttcagaaccagcctggccaaaaattacaccagagagacagagtcctccccattgggaacagggtgattgaggaaagtgaaccttgggtgtgagggaccaatcctgtgacctcccagaaccatggaagccaggacgtcaggctgaccaacacctcagaccttctgaagcagcccattgctggcccgccatgttgtaattttgctcatttttattaaacttctggtttacctgatgcttggcttctttt

SEQ ID NO: 45214 - DNA, 744 bp, Homo Sapiens
  misc_feature (693)..(693): n is a, c, g, or t
tgtcaagttgcatattccttatactacaaaatgataatcagccattgtgaaactgctaatattagcttgtcataattatggccctaaactaatttttctataaaagacgtggaagaaagcttaagtaaacaataaaataaaacctatacactattttaagaaggggcttgagcatgacccctaaagctacatgtaaagttcttgtacaaaaaatggaatgataggttgatcagattcagtaaagttgatctgtatgcattttcccatctcaagcatataagttgacctgcatctctggaaggaccttgagattgatgcattttgagcaggtctcccttttactcttcccaactgggaacttggagctgaaaaacattggcactgaggccagatggccttgggtttaatcctggctcagtgcctcacagattgtgtgactttaggcaaacatacttctcctagctgagtattttttatcagtaagtacaaatacaatgcagagctcattttcagttaatattagtactttttaaatctttactctctatcttgaagcattagatgttaagactaatgtgtaaaaaccacgtctgagcttgcttttccctctggacactctgcttttgattgcctatccctataagtggctcattttactgtcttctgatcctggtggccttatttttgctatgntaaaggttggggttttttaatacttgggatttattttcatatacttacata

SEQ ID NO: 45215 - DNA, 598 bp, Homo Sapiens
ggaactgtgtagccagcagggacctaaactttggcaaaaagtgaacacaattcaaatacgaatgaaggaagagccctcagatggaacgaaaggcgatgtgcaaggccatcccagagagacggaagcaggtgcgatactaagcctcagcccaagaataaaagagagttcaactgttactcttttctttcatcaatcccctatcagttagaactgcaggccagttccaaagagtgtttgcttaagattcaaaagtgggtaagtaaaatggatcagtgggaaggataaggtgtccaacagaaagtgtggaggagaaactcttggcctatcaagtgctcctgagagaaaccatgcaatttaacacttcagttaaagaaatacatgagaactgcttgtcatgaccagacaagataggaaaggggaaaccccagaaacgtgctcttcatctgtcagccttttggaccaagaagctgtcactatcacacataagcaccattcccttagagtggatccaggtgttgactataaccagatttactctttgcttactaggttttccattgtcaccattggatgaacctctggtttagccacagttgtg

SEQ ID NO: 45216 - DNA, 601 bp, Homo Sapiens
ctttgctactgaagtgtgctcccgtgagatgctgaatctcctttgcagcaatgccttatttataatttgtggatttgacagtaagaactttaacacgagtcgcttggatgtgtatctatcacataatccagcaggaacttctgttcaaaacatgttccattggacccaggctgttaagtctgggaaattccaagcttatgactggggaagcccagttcagaataggatgcactatgatcagtcccaacctccctactacaatgtgacagccatgaatgtaccaattgcagtgtggaacggtggcaaggacctgttggctgacccccaagatgttggccttttgcttccaaaactccccaatcttatttaccacaaggagattcctttttacaatcacttggactttatctgggcaatggatgcccctcaagaagtttacaatgacattgtttctatgatatcagaagataaaaagtagttctggatttaaagaattatccgtttgtttttccaaaatactttattctctcatacatagtattttcataatgtttgacatgcagtgcttctttctgtaattttgactttagaaatatattgg

SEQ ID NO: 45217 - DNA, 575 bp, Homo Sapiens
  misc_feature (24)..(24): n is a, c, g, or t
  misc_feature (86)..(86): n is a, c, g, or t
  misc_feature (177)..(177): n is a, c, g, or t
  misc_feature (473)..(473): n is a, c, g, or t
  misc_feature (520)..(520): n is a, c, g, or t
  misc_feature (547)..(547): n is a, c, g, or t
  misc_feature (561)..(561): n is a, c, g, or t
actactactactaaattgcggccncgtcgacagtgtgcatgatgtattttacgtagtacctgtgaggaagtctctttataaaaccntacctaccacttagtataaatttgtttgaatttatatcttttgttactgtaaattcagcttattccaattaggttggcacagatttaaacntgatacacattccacaaaaaccaattcagtgtataagtattgaagtataagcagtcattgcagcttgatgccagatcatgtatgtaataacaagtggaagttaatagggccttctaatactgtatgggtactcctgagaattatttcattttggatataaagaagttatgaggcctcctgtcacattcacagctggttctccaaaataatttggttgtttcaaaaacaaatggtaatcatttggttggattcttcagtatcatgactagatcatggtggttttaccatagttgccnagtggtgggaggtagcatacctgaaaatgtacgtgtgtgtttggtgnatttttccacattttgggaaccaagcnccatttattaaaantttaaaatttccag

SEQ ID NO: 45218 - DNA, 825 bp, Homo Sapiens
agcggaacggcgagtttcagaacgatggagagctcccgcgtgaggctgctgcccctcctgggcgccgccctgctgctgatgctacctctgttgggtacccgtgcccaggaggacgccgagctccagccccgagccctggacatctactctgctgtggatgatgcctcccacgagaaggagctgatcgaagcgctgcaagaagtcttgaagaagctcaagagtaaacgtgttcccatctatgagaagaagtatggccaagtccccatgtgtgacgccggtgagcagtgtgcagtgaggaaaggggcaaggatcgggaagctgtgtgactgtccccgaggaacctcctgcaattccttcctcctgaagtgcttatgaaggggcgtccattctcctccatacatccccatccctctactttccccagaggaccacaccttcctccctggagtttggcttaagcaacagataaagtttttattttcctctgaagggaaagggctcttttcctgctgtttcaaaaataaaagaacacattagatgttactgtgtgaagaataatgccttgtatggtgttgatacgtgtgtgaagtattcttattttatttgtctgacaaactcttgtgtacctttgtgtaaagaagggaagctttgtttgaaaattgtatttctgtatgtggcatggcagaatgaaaattagatctagctaatctcggtagatgtcattacaacctgcgaaaataaatcaccctaaagtgacacaaattgaagcatgtacaaattatacattataaagtgttttaataattgacaaaaaaaaaaggtctc

SEQ ID NO: 45219 - DNA, 447 bp, Homo Sapiens
gtgggtggtggggtgggtgggatggctgggggtgggagtgtaagtcccttttcctactttcatgtaaagtgccacaggtgtcttggtttgcatattcaaatattatataggaaaaacagtctgttatgtatttcttcacctagcttcttgtaatatttatggacgtttccagtttttgtaccttcttagctaaagcagttgcctttttgtaatggcaattaatttatatgataaaactttgtatccactgtagttgacagtattggttgctaattaactgccatattgccctgtctttctattaaaaaaatactgtacctgtacttagaggctaacagattcatgtggacatttaccaggcaagaccaacttgtattgtccatgatttctacgatttccactatcttcaaatgaaaaataaacgctgagtagaaaaaaaaaaaaaaa

SEQ ID NO: 45220 - DNA, 782 bp, Homo Sapiens
gataattggccagtgacagagtttacccttgcctcctttcttggtctgccagctttgtcctttctgagtgattctctttctgtattgagaggaagtgtgggtctacatagggatgtttggatgctatggcaagaatctttttgtgtttggagtgtagtccatttgcaatagaaataaaaaatccgtcaccaaattgtaacctggatgttatagcccagcatctagaaatcctatgaaatgtattagcacaatatcttgccattgtcccatctaggaaattttttcttgttgtgaggtagggaagtgaggaggaaagccatgccgaagcaaatgttagaatcttaggcatcctatttgttcatgccatgggtatttgctttggacttggagtctgtactttgaaagaggcctttgaaaaacaaataattctgtgtgaattttcttgtagcgtgcttcatgaaaatatctacttatccaggtttgcaaatgtacatgttcatttgaatgtaaatcaccatttcttggaaccccacgttttttcttaaaaattattctgaattaaatgtatatttctttagccttccctacacagtactaataaaagacttttctttctgttcatgaaaaataaaataataaaaaactcgagggggggcccggtacccaattcggccttaagtgaggcgatttacaattcactgcccgtcgttttcaacggtcggactgggaaaaccttgcggttacccaacttaaacgccttgaggcaattcccctttttgtca

SEQ ID NO: 45221 - DNA, 454 bp, Homo Sapiens
tttttgaggcagagtttcactcttgttgcccaggctggaggttgcggtgagctgagatcacaccactgtattccagcctgggtgactgagactctaactaaaaaaaaaaaaaaaaaaaattgattgctgggcctcattacaaatgcatatgatgtttgagtgctgttgtttgaaattatttttcttttcgggtcttcaaaaattcaagaaaagttgatgattgacttgaagattacaaaatttaaggttttttggcatgtgtgttttctattaataattggttatatgatgtcaaagtaatactttcataatagaattgacatgctctgggatagtttgacaaaggtaaattataaagtgaaatctcttgtttcattatcttccattctaacctcagagatctgtttctctagaaaaaatgtccatctctggctttaataaaattatgcatcag

SEQ ID NO: 45222 - DNA, 753 bp, Homo Sapiens
  misc_feature (753)..(753): n is a, c, g, or t
ggaacatggaggatgtgtacgcagtgaagcacttctcagtgaaaggggacgtgtacatttgcttgacaagattcattggtgattccaaagtcatgaaatggggaggctcctcgttccaggatattcagaggatgccatcgcgaggatccatggtgttccagcctcttcaaataaataattaccaatatgcaattcttggaagtgattactcctttactcaagtgtataactgggatgcagagaaagccaaatttgtgaaatttcaggaattaaatgttcaggcaccaagatcattcacacatgtgtccattaataagcgtaattttctttttgcttccagttttaagggaaatacacagatttacaaacatgtcatagttgacttaagcgcatgagacaccaaattctgtggctgccatcagaaattttctacagtacatgacccggatgaactcaatgcatgatgactcttcttatcacacttgcaaatgaatgcctttcaaacattgagactgctagaaccaagcactaccagtatctccatccttaactgtccagtccagtgatgtgggaagttaccttttataagacaaaatttaattgtgtaactgttctttgcagtgaagatgtgtaaataagcgtttaatggtatctgttactccaaaaagaaatattaatatgtactttttcattttatttattcatgtgtacagaaacaactgcccaaataaaaatgtttacatttttcataan

SEQ ID NO: 45223 - DNA, 774 bp, Homo Sapiens
ctcagcctcccaagtgctgggattacaggcgtgagccactgcgcccggccaaattatttttgtgggtagattcattctctttacctaatagtcataatttagtcagtgaagggacaacatctggggtaagagctatggaggaggtgctcagctttgtgagttttgtgccaggcatctttgctgaaaatggagatggcagcaagtgtgaatctgggggaatataagggaagacagaaaagccttaagagtagacggaggaagaagggtaccagaatagtccctgtggaggcaggcagatcagagctcagggtttgaaagtgggcctgagtaagggtcctgctagagaaactgcagatggaagctgagcagttaccaactgctaatgtgccaagtataccaagcacagcatgtgtcctgtagaggagcattattttaaacaatgttctactatcatctaccaaaataattgtggtaaaagtgtagtattttattttttccttttatgtcagcaatattttaaaatattgatctgtttatcttatatttttatggataaatgtagtatttgcctcatgattgtgagccactgagagtgcactgaacctattcacatgtctttaagatgttttgctgtgttaaaattttaggagagaaaaatacaagtgaataattatttaataggcatttattactttattttggagttgaattctgtcatttgaaaaagttcagtaatgtaataaatacaaagtgatctgcaaaaaaaaaaaaaaa

SEQ ID NO: 45224 - DNA, 1041 bp, Homo Sapiens
  misc_feature (688)..(688): n is a, c, g, or t
  misc_feature (703)..(703): n is a, c, g, or t
  misc_feature (847)..(847): n is a, c, g, or t
  misc_feature (849)..(849): n is a, c, g, or t
  misc_feature (851)..(851): n is a, c, g, or t
  misc_feature (862)..(862): n is a, c, g, or t
taagttatatatatatcctaccttctgtaaagtgaaatgaggccccaaaaagctaaagaggtagagctgctacctcgtttttagttgattcatcatctagtctatatcacccaaaagaattggaaataggtattcaaacaaaaacctgtatacaagtattcatagaagcactacttacaatagccgaaaggtagaaacaaccaaatgtctatcagctgatgaatggataagtaaaatacatccatataatggaatattcagccatgaaaaggaatgaggcactgatacataatgaatagatgtgagtgaaccctaagaaagcatgctaagtggaagaagccagccacatgattccatttatatgaaatattcaaaataggcaaatccatggtgacaaagccaattagtagttatcaggaactagggagggggtgaaaagggagtgactgcgtaatgcgtatggggattccttttaggatgatgaaaattggatgaattacagctggtctgatggtagtgggttatcagaacttattaacattagtgtcattaaagttggtatatagcccctcactgctaaatctggctcaaaaattaaaagattattaaaatttgatgaattagtggtgatggttgcacaacattgtaaatataataaatgtcactgaattgtacactttaaggtggnttaaatggcaaattntacatgtcttactgaaactactgtactatttaatacaaagtacatagtataaaattttaaaagggataggaaaatgctttagattaatattccacctattccaagtatattttaaattaaaaacaggtccttggtaaaaggaanananacaacaacaanaaaaaagaacaaaaaaaacacagggggccggccggcctcctaaagatatccccctcgaagggggcgcccaaggctttaacccggaaaccccaggcttttcttgtgtgtaacaaaagaggggggccccccctataggggggggagggccgctaattttttaaaaaggccttagggggcaa

SEQ ID NO: 45225 - DNA, 527 bp, Homo Sapiens
gccgtgaactgttctggaaaagcgagggctttgcagtcagaccttcatatgcactttgttctatctgttgcgctctgcctaaatgaccacgggccagtgactttacctctctgatccctgctccttgcctagatagtggggatcacgtcgtaatgtatgtaaagaaccgggtgcgggacttggcacctgggaattgtcttaatacatgtctgtcgagaaaaggaagggtctcgacgtgcggaaacaagacggatgccaggaaatacgtctgcccacctccacgcccctgacagcggaggctcctggaggtctggtgagaggccccacgtgctccagccccctccgctctgtgctgagctctgcctttaagagactgcagctcctgcctctaaaaagcctttcaaaattctttattaaattttcatggcgcataaagtcaaggttctgttacttggcctcagttgtcttggcaacttcataaaacgcaataataaaacgaagctgagtgttgctaaacacaggctcat

SEQ ID NO: 45226 - DNA, 641 bp, Homo Sapiens
gcacgaggcatgcccctccctccaaaaaataactggttttaacattaattttccatattaattaccccaatctttcaaaagtaaattttcctgtgtgtctagtcaagcaacacaaacaagatgctttttttaatgaaaagcgtaatatctggagtgttctatttcatggaccaaacagaacggaagagaactttgtgtttgtttcctgttcaggatggctagggcgagaagggcccctttgtgccaacctcttttgttctctttaatcaatgagattcttaaaaagtaaaaaggaagggatacagattctcagtaactaaaacaatctcgtgtgcccttgaggggaaagtccttgatgtttttaagaatgtcactttattgttttttaactgaatgatatagaggtatacaattttcaaactgtttgccattttaatcaagcaatttgaaaattaaaatgtttttgtcaggcattaccaaatggcacagaatgtgataggccagcctggttttggggtcctttctctactggttgatatgcataaaaccttctaaaaatcaagaatattgccagagagcaacaggaataaagaagctaaagtaaagaataaaaaaaaaaaaaaaaaaaaaaaaaaaaaact

SEQ ID NO: 45227 - DNA, 674 bp, Homo Sapiens
tttgggaatctgaattcgaggaacctttctaagaaattggaaaggtccgatctagttttagcacagagctttgaaccttgagttataaaatgcagaataattcaagtaaaaataagaccaccatctggcacccctgaccagcccccattcaccccatcccaggaggggaagcacaggccgggcctccggtggagattgctgccactgctcggcctgctgggttcttaacctccagtgtcctcttcatcttttccacccgtagggaaaccttgagccatgtgttcaaacaagaagtggggctagagcccgagagcagcagctctaagcccacactcagaaagtggcgccctcctggttgtgcagccttttaatgtgggcagtggaggggcctctgtttcaggttatcctggaattcaaaacgttatgtaccaacctcatcctctttggagtctgcatcctgtgcaaccgtcttgggcaatccagatgtcgaaggatgtgaccgagagcatggtctgtggatgctaaccctaagtttgtcgtaaggaaatttctgtaagaaacctggaaagccccaacgctgtgtttcatgctgtatacttaagaggagaagaaaaagtcctatatttgtgatcaaaaagaggaaacttgaaatgtgatggtgtttataataaaag

SEQ ID NO: 45228 - DNA, 513 bp, Homo Sapiens
cacggaattcacgctactaccattcagcctgaatttgctagtgtaggctctaaatcaagtgtagttccgtgtgaacttgcctgcagaacccagtgtgctttgaagcaatgttgtgggacactaccacaagccccttctggaaaggatgcagaaaagaccccagcagttagcatttcttgtttagaacttagtaacaatctagagaagaagcccaggaggactaaagctgaaaacatccctgctgttgtgatagagattaaaaacatgccaaacaaacaacctgaatcatctttgtgagtcttgaaaaagatgtgatatttgacttttgctttaaactgcaagaggaaaaagactccactgaaattctaagtttgccaagtagtgtaattgaagtccttgtctggtcacacagtttaattctatttttgtaagaacataatgggactgcataacagagttctatattacaattttgtgattattagtacagagtacagctatgctgtgactgtt

SEQ ID NO: 45229 - DNA, 773 bp, Homo Sapiens
gaatgctttgcagtcagtggagaattgtccagaagacttggctcagctggaggagctgatagacatggctgtgctggaggaaattcaacaggagctgatcaaccaagagcagtccatcatcagcgagtatgagaagagcttgcagtttgatgaaaagtgtctcagcatcatgctggctgagtgggaggcaaacccactcatctgtcctgtatgtacaaagtacaacctgagaatcacaagcggtgtggtggtgtgtcagtgtggcctgtccatcccatctcattcttctgagttgacagagcagaagcttcgtgcctgtttagagggtagtataaatgagcacagtgcacattgtccccacacacctgaattttcagtcactggaggaacagaagaaaagtccagtcttctcatgagctgtctggcctgtgatacttgggctgtgatcctctagagccagcttggactcacatcattctatggggttgaagacaactcattccctctgaggagccttgtacatacaagccttttatttataacttattttgtattgaaacttttaaacaatactgaagaaaaaaaaacttttccgacatctgttcttggtcttttgtgacgcaggttgaagggggaggaatagaaaaagacaaactggccttggaggagataaaccaattttatgtctatcatgttatccaaaaatctagaaataatagatttgtacagaaaaaaatgataataaatgagaacccaaaaaaaaaaaaaaaaaa

SEQ ID NO: 45230 - DNA, 658 bp, Homo Sapiens
  misc_feature (561)..(561): n is a, c, g, or t
  misc_feature (568)..(568): n is a, c, g, or t
  misc_feature (634)..(634): n is a, c, g, or t
ggcgtggcacctctgaaggccacacaccaagctgtcgagggctttgtgcaccccatcacgcacatccaccactgtccctgcctgcagggcagagtaaagccagccggaatgcagaattctctgcctaggaattttttcctccacccagtgcagcacattcaggcccaagaaaaaattggcaagaccaatgtacacagtcttcagaggagcatagaagagcatcttccaaagatggcagagccatcgtcatttgtctgcagaagcactggatcgttactcaaaacgtgttgcgaccccgagaataaacaaagggaactctgtaaaaatagagacgtgagcaatctggagagcagtggagggactgaaaacaaggcaggagggaaagtggagctgagcttgtcacagacggatgcaagtgtgaactcagaacatttcaatcagaatgaaccaaaagtcctatttaatcatttaatgggggaggctggttgtaggtcttgcccaaataattcacaaagttgtggcagaattgtgagagtgaagtgcaattctgtggactgtcanatgccanacatggaagccaatgtgcctgctgtattaacacactcggaactttctggtgaaagtttgttaatanaaacactataataaatgcagcatt

SEQ ID NO: 45231 - DNA, 644 bp, Homo Sapiens
aaaacaaataggagttcagggaagagaaacatccttcaaaggacagtgttgttttgaccgggagatctagagagtgctcagaattagggcctggcatttggaatcacaggatttatcatcacagaaacaactgttttaagattagttccatcactctcatcctgtatttttataagaaacacaagagtgcataccagaattgaatataccatatgggattggagaaagacaaatgtggaagaaatcatagagctggagactacttttgtgctttacaaaactgtgaaggattgtggtcacctggaacaggtctccaatctatgttagcactatgtggctcagcctctgttaccccttggattatatatcaacctgtaaacatgtgcctgtaacttacttccaaaaacaaaatcatacttattagaagaaaattctgattttatagaaaaaaaatagagcaaggagaatataacatgtttgcaaagtcatgtgttttctttctcaatgagggaaaaacaattttattacctgcttaatggtccacctggaactaaaagggatactattttctaacaaggtatatctagtaggggagaaagccaccacaataaatatatttgttaatagttaaaaaaaaaaaaaaa

SEQ ID NO: 45232 - DNA, 667 bp, Homo Sapiens
ccactgactgaaggcagtggaaggttggcagaaggaggctgttcaaggctgtttttgccttcactatggcaaaaatcattttgaggcacctcatagagattccagtgcgttaccaggaagagtttgaagctcgaggtctagaagactgcaggctggatcatgctttatatgcactgcctgggccaaccatcgtggacctgaggaaaaccagggcagcgcagtctcctccagtggactcagcggcagagacgccaccccgagaaggcaaatcccactttcagatcctgctggacgtggtccagttcctccctgaagacatcatcattcagaccttcgaaggctggctactgataaaagcacaacacggaaccagaatggatgagcacggttttatctcaagaagcttcacccgacagtacaaactaccagatggcgtggaaatcaaagatttgtctgcagtcctctgtcattatggaattttggtggtggaagtaaaggatccagttgggactaagtgacatcgtatcggttcctgttcagatgacatggggaagatgatggttcagccactggtactacgagaatgtttgtattacccacatttgaaatgatttgctatgatttttatgaagattaaaaatatatacacaaaaaaaaaaaaaaaaaa

SEQ ID NO: 45233 - DNA, 961 bp, Homo Sapiens
tggagctcgcctggcgcctcgccttacctcaagcagccgcctgccctgacgcccagcagcaaccccgccgcctcggcaggcctgcactccagcatgtcctcctactcgctggagcagagctacttgcaccagaacgctcgcgaggacctctcagctagcgggtcgtattatcaccatcaccaccagagcgtctgtcaggatattaagccctgcgtcatgtgaacggaaagaggccaagcgatggccgctctctcctctcccctcctcagagggggcagatagaaactgggacggattcaagtcacatgcacgcggatagcagtaagccacacacctgccacttagccagaatgcccaggatcgcgttggtcactgttatttgcctactgctggaagaaggacaaccgctggcaaggtagcgttccccaatctgaatacctgcaggctcccacatgagggagagggcagactcaggtgggaagatgtgccatgcgtaaggcatcaacgtgtatctgtgggatcttcgttgccttcagtaatcagggtgtgaaaaaagcagacaagttgtgtgtgtgtgtgtgtgtctaagaaaacttgtgtgcttttcaaaaaggcagtgctaagcacaagatttcaagaaagcctcttcttgttgcctagctgagtgggagagtcattttccccagacactacatttgggatacaggtgccaaagaacattattaaggaattatttagaaacaatgtgtctagtttaagaaagtggttttcagtattgtgacaatacaacgtttttacaaggktgttttctaccaccatattttaaagatatttttatgaccgtgtatactcacactttgcttgtattttaaaggaggatatatttgcacttatgtatacttttacagtttgccaaaatattttgttgtaaaattkttttcaataaaatgtatataacaaa

SEQ ID NO: 45234 - DNA, 670 bp, Homo Sapiens
  misc_feature (604)..(604): n is a, c, g, or t
  misc_feature (615)..(615): n is a, c, g, or t
  misc_feature (639)..(647): n is a, c, g, or t
  misc_feature (650)..(651): n is a, c, g, or t
  misc_feature (653)..(658): n is a, c, g, or t
ggcaaaattctcagtttgtactgaagaccagaagatcagagaaggaaactttaatgctgtctagcctcctgctattaatgcaatcaaagaatacttttgcatatgtcttgataattaaatagtatttgttaactgtgatatgcatacacttatataagcagaattatgagttaaagtaatacttagcaatatgattttataatggctcctcattatgcttgctgttgaaccttttatgaggagtgaatataaagtattggttttccctcacaaatttaaagattatgttattaatactattataactgcatcaatcaagtcagataaaggcaactataaaatagtagtagtgtttgtttcctatctcaagggcgaaattttatgggaactcaatttattatgcagtttttaagtttaaaataccaagaaagatgtcactagattctcttctatgtgatttttgttttttatataaagcagtgtagtggtgtttagaagctgaggccacctgtaaggcaaatctgccttaagtgtattatgtgttacttaaaggcaaatttgtgatctaaaagtacaagagtgatttttgagctaggattataanatacataatanagatgtgagaagattaaaaaaaannnnnnnnnaannannnnnnaacatggtcggc

SEQ ID NO: 45235 - DNA, 664 bp, Homo Sapiens
ggaggtgatttcatcattgtgtgaacatcatgaagtgtacttacacaaacctaggtggtagagcctactgcacacctgggctagatggcaaagtctgtcgcttctgggctacagacctgtacagcatggtactgtattgaatactgtaggcaactgtaacacaatggtatctgtgtaatctaaacatagaacagataatacattgtgctacaatgtaacaatggctgtggcatcactaggtgataggaatttttcagttccattataatcttataggatctctgtcatatgtggtcaattgttgatcgaaacatgactgtatgtcgtattttcagaaaatggaataggtaatcatcacttgtgtgaattttaatcaaatgacttaggaaagaaactggatgtttcaaaagctgttgcatttattacaaatgtcacaaatacagctcttgccttttgagaatgttggagagatgtctttaaaaaatatgtttgtgtgtaaaaatgtgtctgtatgcaatagctagaaaaatgcctgtgtcttaagtcattactcatgttctaatttttgttctttgtactatttatctgtatgcttgttcatcagtatttcagactcaaaataatttatttgtttatgataaaaaaaaaaaaaaaaaaaaaaaac

SEQ ID NO: 45236 - DNA, 620 bp, Homo Sapiens
ggcattccagctgacatatcaaacagaaggcagtaatgagagcctacaaatgggagggacctaagtgcctacctactcactaatcgcaggtgcaaacacacaaggagtttggtgggcttaaggtcagaggagtgtgtagggagggatgtatgtggaaggtaagattcagggcaagctaaaaatccgatactgcaacgttttccaaaatcccagaaggcaaactgtgcatgttctaccctgaaccacccaagcaacactttctaccttgccttatttttaattggattcactgtccaaaatgcagaggtttgctttgcttttttttcagaagttccaaacagcaactttgagagcagtggggtgcttggcagctgttctgtgttttccaggaatccaactgagcattgaaatctctcatttgccgacttatttttataggaagccaatttaaaaaaaaaaaaaagtttccttatagtattggaactacttctaattttaaaatgactttttggatgtattttctggttaaatacctatgtacgtgtaatgtataatggccctggtttattggcctttacaatccatatttattaaaccagataatgtctctaaaaaaaaaa

SEQ ID NO: 45237 - DNA, 790 bp, Homo Sapiens
  misc_feature (766)..(766): n is a, c, g, or t
  misc_feature (768)..(768): n is a, c, g, or t
ttttttttttttttttttaaaacaaaataatttatatttaactttattataaacttgctaactttagtgcatccttgttcttcagaagtgcagcacttctggaagtgaatcaatgaggccctcgtcttggaggtaaaagagcaggaactttatcctccaccagccaaagagggggaaaaaccacaaacaccattctctcacgattacataactcttaaatccatgtgctgatgcagaggtacagggagatgtccacacggagctgaagatgtggactctctccaaccagagtgctggggaacacggacagaaatgtgcacagagcagggccggggccatcagctcacaggggtcaaaacaacatcatggtacaacttctggtaacatgtcagtgggcaacaaagtgtatgttttcatgtaggttctattcacaatgtgctttgaatttatattacataatagccacttgaaactggagtgagaagctggttacttgcttgcagtgcatcagaaccaaggtttctggggtggcccctgcaggttcactccgcccaggagatcaaaaaggatgcgctctctacattcttaaatgccacagtcccctaccaacggcttaggtggaagcacagctcccacatcagcactgatgccctggcgcggccagcactgcctctacgaggccacacctgcctctgccaaggccactggccctcattcatctgcggggacgttctagagatatgcacttacagaccagttacttaananaaaaaaaaaaaagcctcgtgcc

SEQ ID NO: 45238 - DNA, 803 bp, Homo Sapiens
  misc_feature (772)..(772): n is a, c, g, or t
  misc_feature (774)..(774): n is a, c, g, or t
gctgattcttgtatattagcaattataatgtttgtatatgcaaaactgctagcttgatttaaaaaaaaaacaaatctttaaaatctgctgcaaatttaaataattcccaaaatgaggaattctgtagttctgtgaaaaatttttttcttcagaatactaatattttgatgcatgtgtatcaccttattttgattaaatcttttccaattttgcaaacactacagtatactgcaacacaaaagattttatctgtaaacacaaagcccttcatctaatatttgttgctattgccaatttttcaatgaaatgacctaaaaacaacaaaaaaaaataacctatacggtagttgctttagggggtggggggatgctatctgttagtgcttaaaagggggtaaatgcttgccgctttagaggtggatggtgctcataaaaggccccagtcgggggtatttaaaaaggactgaacagaaatccttagctagtagaatggcagcacgctgtaaaattattactgtattgtgtactggctataagatgtagacacctttcagtaagccaatcatttgtaaccattctagcagtgtcatattaggttaataaggctgctgtgttttaaagggcatttttatttgggttttggtgaaattctttaatttgttgattatattcacataaaatcagcattcattgacacatagctctaatgacatatgtatgaaaaaccatacactggatgacctagtcgattatttaagcataaaataaattgngntaaactcttcacctaaaaaaaaaaaaaaa

SEQ ID NO: 45239 - DNA, 484 bp, Homo Sapiens
  misc_feature (421)..(424): n is a, c, g, or t
  misc_feature (427)..(427): n is a, c, g, or t
aagatcccttcttcctgggcggtggcctgcaggaactggaacagctgctctgtgtagcccaactctgcagaagagagaagacctagacctggcacccagcacagacacagcctgcctcgaggactgcaagggaacaagggcctcaccagtatcgggcagctggccctggcggaggaaggcggcagcctgtgcaaaggccttgagcagcgggctgagcaggcggcagaggaaaagaaagaaatctgggcagtgtgactgctggctgagctggaggggacaggccggggtgagtgcagctccccaccgcctccctaccacctccctccaggggcagctttttgaaacacaccctgaagtaccggccgtcagcctctccgaagtcatcactgtcactatcagtaaagtccccactcggtttccnnnnaanaaaaaaaaaaaaaaaaaaaaaaaaaaaaaacaaaacaaaaaaaaaaaaaaaaaaaaa

SEQ ID NO: 45240 - DNA, 639 bp, Homo Sapiens
gcttcttaaccacttacattaaaattgagaggagaaaggcattttcagtttctttagttaataaaaagaagccatttctggaggagttttatgcctgtaccagcagaggttcagccttccaggaatctcatcatgatccatactgctgacacaggcctttgtcacctgaagcattcttaaaataaggagactgacattaaacaggacaattgtgaactccactttgtaagcatcatacatatcttacaactcattctgaagactcctttattcttgctcttcccagagagctactgtgtttagtcatgctcactgcactcacaagagaaaaagagtaagtggcatatttgcaggtgttgatggttacaagagcatttttactttttcctccatgtttgttctgcagcatttccattgatgcatgctattgtagacttcttaggttgaccttggccttgacctccaccactagctcatgacccaaaactgaagatgtgcatcagaaagggacagatttggtctttctgctgtaaaagatattctgccttagtgcctgctaatttgttgtgcatagtcctgtgctgccaatcttccccaccaattgttaaggtttgtgtgttttatatgtgtattcacctt

SEQ ID NO: 45241 - DNA, 858 bp, Homo Sapiens
cgaaagaaccctttccgatttgccatgggaatggcccaggctctcctgacagctctcatgatctcttccagttcagcaacactgcctgtcaccttccgctgtgctgaagaaaataaccaggtggacaagaggatcactcgattcgtgttacccgttggtgcaacaatcaacatggatgggactgcgctctatgaagcagtggcagcggtgtttattgcacagttgaatgacctggacttgggcattgggcagatcatcaccatcagtatcacggccacatctgccagcatcggagctgctggcgtgccccaggctggcctggtgaccatggtgattgtgctgagtgccgtgggcctgcccgccgaggatgtcaccctgatcattgctgtcgactggctcctggaccggttcaggaccatggtcaacgtccttggtgatgcttttgggacgggcattgtggaaaagctctccaagaaggagctggagcagatggatgtttcatctgaagtcaacattgtgaatccctttgccttggaatccacaatccttgacaacgaagactcagacaccaagaagtcttatgtcaatggaggctttgcagtagacaagtctgacaccatctcattcacccagacctcacagttctagggcccctggctgcagatgactggaaacaaggaaggacatttccgtgagagtcatctcaaacactgctttaaggaaaagagaaacactaatggcccagtgtacatttgatttgatatacagaccttcagattaatttccatatttgggatcacagccctttgcgctctggggttttgggattttgggtggtggggtaagattgaaagggaa

SEQ ID NO: 45242 - DNA, 501 bp, Homo Sapiens
ccctgggtcctgaggatgaagactccttctccaacgctgagtcttatgagaacgaggatgaagagctgacccagccggtcgccaggacaatggacttcctgagccctcatgggtcagcctgggaccccagccgggaagcaacctccctggggtcccagtcctatgaggatatgagaggaatcctgtatgcagccccccagctccgctccattcggggccagcctggacccaatcatgaggaagatgcagactcttatgagaacatggataatcccgatgggccagacccagcctggggaggagggggccgcatgggcacctggagcaccaggtgatcctcaggtggccagcctggatctcctcaagtccccaagattcacacctgactctgaaatctgaagacctcgagcagatgatgccaacctctggagcaatgttgcttaggatgtgtgcatgtgtgtaagtgtgtgtgtgtgtgtgtgtgtgtatacatgccagtga

SEQ ID NO: 45243 - DNA, 649 bp, Homo Sapiens
  misc_feature (6)..(6): n is a, c, g, or t
cccagnataccagtgcctcaactttttatgtacctattgtgatttaatgtaaataaaggtttgtatagtacttttgtagttcttaagtatgaagaaatgggtaaactttttattttgttagaaactgttatattttgagtgtaatatttatggtttatagcaaaatgaatgtgcttattgttgaatgcatgtatttagaagcctttactcagcccctgtgttctgtgctaggagcttgagctctacaggtaaggcagagctaccggtgaatgaaaggaaatcatgtcagtgaaaaatcatggtggaaagcccctggcatcacatgtgcatgctgtaggcaggacctgagctgcctccgctgcaggttcagatgcaccgctgcagctgtccttcagttagttcacagggctgcaagaggaggacacatccctccagaaaacagcctgagccgggaactggctgtgctaaagagcactgctatcaagttgaggagagagggcttccgtgtactcaggatgtagagtcattgctcagaagtgaacaaaaaatcaaaaacaaaagtcttctcaagggactgatcggccaagtatgcttttctttagagcaatgttttgcccctagagaattgtaaaatttatgtcatgactca

SEQ ID NO: 45244 - DNA, 765 bp, Homo Sapiens
  misc_feature (14)..(14): n is a, c, g, or t
  misc_feature (670)..(670): n is a, c, g, or t
gaaaaggcctaagnacaaaatctgatgggaactgaattccagtttttaatagagttataatccatagttttatttacacacaaacacacacacacacactctttcctgcagagataagcaagccgttcagtgtggctgtggcttggccaggatttgtttgatctttgtttttcctgcagggccagtcttgtctttgtgtccccgaggactggtctgtttagttgtgcctgcctggaatcaaaaggcttagtcaggccccataattggtgatgactggcatactatatgcaaacttcacaatgccccttccagtggttgaaaggtcgcataccatgctgtgtaagaactttagctctctgcaatgagacttaaattcagattcactctactccttattagttatctgatttttggaaacttaatctctttaaacctcagtttcatctctaaaatgggcataatagtttacctcatagagtttggggagaattgagtgaattaatgtgtgtgaggacactaagattcccatatagaaataggctcaatgaatagtagctgtttttatttctatgtaaagtgagtagcggtagttgatgggagctgttgaaacaggtaaacagcattctagcaatccttcgacttttgtgatagcaaaccataaaaacaattntagtggctggtttactaattaaaggacatccacaattcaatgtataacagaaaaagtaatgattaaagcttgggaatctgaaaaaaaaaaaaaaa

SEQ ID NO: 45245 - DNA, 713 bp, Homo Sapiens
  misc_feature (708)..(708): n is a, c, g, or t
ccaagctgtaatacgactcactatagggaaagctggtacgcctgcaggtaccggtccggaattcccgggtcgacccacgcgtccgtgattttagatttttctaattgtgtaaatataacatagaaatagaatttatttttggttcatgaatacttagtgagatataagttatgtatttcctttttgttctctatccatagatgttggtccaaactgaaagttgatgagtcactgtgcctctcggggtagtgagttatcagctacagtgagagagcagtgtttggcctgcagctgggacagcaaaacgtttcaccagggttctcatgcagttcagaacccactgtccacagatccagacatttcccttttttcttacagaaagttgatgattggacatactaaatttccactacagttaggagacagtcagtttgctttgggagtctacataaatcttctaagatagttctgtgaccatttaatagcaagaagcatgaatgccactacaaaggcaaaaatccacctctgagatcggccgttaataaacgtcccgtcatgtcagtttagattcaagaatgttaagcaactttgtttttgcggtgctccctatttcatagtatcttcaaatcaaaaataaaaattatctccattttgttaaagaacttacagggtcagggttctccttgtcacttagaattgggacactgncaagc

SEQ ID NO: 45246 - DNA, 684 bp, Homo Sapiens
gtaacatcttgctgtactaaatacagcagaaaatctactctttagcaatatataacacagtatatgcttttttatatattcaatgttagcccaagtctgaatttacatttgactaaagcagcacataagataatttgctaaaatgctaatctttactaaatagtgagctaaattagaatttctaactcttatattgtgctcttttaaatgccaattacagtcccttactggaattctaactgtaatttgctttgcaatcaaactgcttttagggcagccaatattttattattggaattcagacactgttcttaccgtgtttgtttttaatcaagtattacctaaaaatgtacaaattagtgaaatggttaaacttctgcactttcttagttaccacagtcttcataccaagtattgggtacaggttacaattttgaagccatatgagtttatattgattttttttttccatttaaaaatccactaatggtgtaaaagagaccagtagattttcaatgggaaatgtacctagcaagctggttcttgcttatatatagtggtaaacttggtagctgcctctttaaccaagaatttgtcaacacaactctcaataactgtgagtcttaaaggattgtcatttactacttcggattgtccttagaacactgcacatctgtcttcaaa

SEQ ID NO: 45247 - DNA, 692 bp, Homo Sapiens
  misc_feature (42)..(42): n is a, c, g, or t
ctgtctggagtccttctggagcctggagcttagccccaaggnaatatgcctgcctgaaagggaccatcctcttcaaccccgatgtgccaggcctccaagccgcctcccacattgggcacctgcagcaggaggctcactgggtgctgtgtgaagtcctggaaccctggtgcccagcagcccaaggccgcctgacccgtgtcctcctcacggcctccaccctcaagtccattccgaccagcctgcttggggacctcttctttcgccctatcattggagatgttgacatcgctggccttcttggggacatgcttttgctcaggtgacctgttccagcccaggcagagatcaggtgggcagaggctggcagtgctgattcagcctggccatccccagaggtgacccaatgctcctggagggggcaagcctgtatagacagcacttggctccttaggaacagctcttcactcagccacaccccacattggacttccttggtttggacacagtgttccagctgcctgggaggcttttggtggtccccacagcctctgggccaagactcctgtcccttcttgggatgagaatgaaagcttaggctgcttattggaccagaagtcctatcgactttatacagaactgaattaagttattgatttttgtaataaaaggtatgaaacaaaaaaaaaaaaaaa

SEQ ID NO: 45248 - DNA, 895 bp, Homo Sapiens
  misc_feature (802)..(802): n is a, c, g, or t
  misc_feature (816)..(816): n is a, c, g, or t
ttagacagcttttactaaatgagaaaactactttaaaatgtgctttaaaacaaaacggagttagaaaaaaagacatatgcattttaaagaacttttgcactgtgctgaaaatgaaatatctcttgcagtaagtaatacaatgtgccaattcataaaatgtaagttaacaggtttctcaatttaacattttcaaagacgatattaaggtcaaaaatgtcacatctatggtagcacatatagaagggcattatagatatgatgtccatccctatgaagcttacaaatttgacaatgctcaataaaagcttttagaatcacatccaatagtgtcacagtcaaagaatcacaaatctgtgtcctgtaagttctctccttctaaaatcttcatgttaacttttctactcattgccatttgttaatactaacccttaaaaaaaagaaataggaaaagaaaggctgcaataaacttgatcaggtacagaaattattgctactatacttcactacaaagcttgtctatacagtatcatatgacctttgattatgaaaaaatcagaataaaaatctttagtgacataagccttacaatcgtatacaacattcacatggcaatattagacagttaagcacccaatacccatagttgacaaaatgtcccactgaccagcattcatttaaatacatccttcgtatagagggaggaaaaagagacagtgtcagctttccaaagcttgtcaaaaaaggattctcatgtactgtggatctaaaaacaaacaacaactcataaaaaaaaacaaaaaanaaaggaaggaaaangaaaaagaaacccatgcaggtgaaggtgttccccaggaagttaagccttgcaaaagggtgttccgtgccgaatgaaaac

SEQ ID NO: 45249 - DNA, 528 bp, Homo Sapiens
cgcgtccgctccctttcctctggggaaagcaagaagaaggggagggattccctcctgctacagctgtgatgcattattgaagcactttagctgaagcattggaccacaaacacttctccttggaagtgtgagagtttaaagtgggcaggacatactagggtttagcattttagccaatgtcttcctaggtggggctaggaatattgttacagtagagaggaagggaactccactgtgtgacagtcctttcaatctgccccttttcagccctacttttggcattccttgggagcctcagttgttgttcaaggccaaagttatctccgtgctgcaaggtcaccctcttcctcccccagcccctgagatcagatcttatttgctctgcaaagatgaatccctgcctcaggttagggtgagacaaaatcggtctggtaaaagggcctgttttcagggacaaagggaatgaggatgatctttggctgttgctgctctttatgaagaatcttatttgtaactttttattcatat

SEQ ID NO: 45250 - DNA, 588 bp, Homo Sapiens
ttagacgctgctgctggtatgttgtatctcgagagtaaaaactgtatacacagggaccttgctgcaagaaactgcctggtaggtgaaaataatgttctgaaaatcagtgactttggaatgtctcgtcaagaggatggtggagtgtattcatcttctggcttaaagcagattcccattaaatggacagcaccggaagctcttaattatgggagatacagttcagagagtgacgtgtggagctttggcatccttctctgggagaccttcagcttaggggtttgtccgtaccctggaatgacaaatcagcaagcaagagagcaagtagaaagaggataccggatgtcagctccccagcactgtccagaggatatttccaaaatcatgatgaagtgttgggattataaacctgaaaatcgccctaagttcagtgaacttcagaaagagctcactatcatcaagagaaaactcacatagtgacaggatggcgccaaactcagccttcaggactctgtcctccagcagagtaacattattgttctcattaacaatgaatttataccacattaaaaaaaaaaaaaaaaaaatggc

SEQ ID NO: 45251 - DNA, 653 bp, Homo Sapiens
cttctcacctttcttttttgctaattatggaaaatagggcccatttcatcatagcctccttcccccgtgctccactacaatcgccgcattctttctagctgcagctggtttcttcaaggctcctgcttaaagtccacacgttattatggccgaaagcaacctggtgcttcggcctggataagagccccttctgcatcttattcacagcttgcagcctcagcccctttgatgaggccctcaggggagaggtcattaccttgatcctgcaaacccagactcgttgagcagcaacgcaatcaccatcatcccactgcccaatctagaatatgtctgctctcctttgctctctgcagctgtaagccagaggggattcaaggtaaataggctttacaggctcccctcctccaaacacacacagaatgggctggtttctttcaagtttaaaaaaagcccccttctccatgcacaagttcattccctccatgctgtcgtcatcgacatatacaggtgtgtacgtaggtgtatgtgtgtactctgcacgtatatctcttctgtcttgaagaccctgttaactttgtgaaataacttccacatttcaacacacttcacagtacaggaaataaagtaatatgaaaaacaaaaaaaaaaaaaaa

SEQ ID NO: 45252 - DNA, 542 bp, Homo Sapiens
tcccaaagtgctgagattacagacgtgagccactgtgctcggccgcctcagttgtaatgttatgcttttctctgaagccaatttttaagaagttcagtcctcagctgtctgacccctccacagttggctttatattcagaaagtaaaaattacttaaggcagcttggaagtgaggcctgggaactactgggggcaactagtatgaacagcactatttacaggtctctttctcttgcctttgattcagagctgtcattctcagtaaatattgatagttttattgaaacaaaaggggtctttagcatgggaatagtaacagcagtgcataatcaagataattctgtatccttcactctttttctctgcctttttttacttaaaagtaaattcagactcttaaaatggtatagaattattagcttgaacattgaattatctcgtcttaactagaatgttttttaaaaaacagtttttaaatgtttttaaataaacatcttgctagtatggtggaaaaaaaaaaaaaaaaaaaaaaaaaaaaaaaa

SEQ ID NO: 45253 - DNA, 774 bp, Homo Sapiens
  misc_feature (757)..(757): n is a, c, g, or t
ttttttttttttttttttaaagcactacatctgttttcactaattgttaatttctgtttgaacccttcatttaattttctcatagatttaagtaaacagatgtattttgcacagtgcacttatgtctattttaacaatcctcctgcatctgtattttatagtcagccttttgaccacctggtgccagctatataaggaataaagttgattcatatcaacattagaactccagtcccaaactaatctgtcaggttcactggtacataaatacctaggaaatatttttccagtctacaatttggtgctattgtgcagtaactaatagtactcttaccagaggagaaattatattaacgaccctgctaatatcctttcttagttatttgctccttgcaaattaaaaaagcaactaagagaaagaaaaacattgtagatatctatttatatttaaagtttatgtttcatgaactgcagctgcaggattctggcattttgcatgccattctccatcagatctgggatgatggctcagaacatgtacacagactaagagtaactgtgtgatctgttaaggggtggataacataatatgcagcttaggatgctattttgagatgtatgatattcagttcattcacctgattactttggttgcagcacaactgtatatattgtataaccgaaattgattattttcattgtccttaatgcagtgatttataattagagcatgtttaataagtttactcttcttgtntactagtcatttgactg

SEQ ID NO: 45254 - DNA, 583 bp, Homo Sapiens
ttcggtttgaatttccccgttttagtttagaagcctagtctgtttgttcccctccaccgctctccctctcattcctgatgagccctctcattcctcctttccttgcccagctatggccccctctcattcacaaagtgccccctccatgtccctggacccttaagatatccccttggcaccctggtcagagactctgtgtctgactcaggtggtccctgcagagtgccctgggaagggaaggagcactgatttgggggttttgagggtcaagtaggggttggtaacacctggaaagaaggactctttcacttcgatccctggacaattatggaggattcggaggtagaagaggggaaggaagatggtttctatctcatgacccccactccctgtgagagggaatgggggaagcctgatgaccctcagctgttccaatctagtattttttttcttttttaaaattactgtatttattatgacgatggtgactccccagtgcaaaggggggccagattctgtgtgtttctctaacctctttgtaaataaatgcacagtgtaacataaaaaaaaaaaaaaaaaaaaa

SEQ ID NO: 45255 - DNA, 1100 bp, Homo Sapiens
tgaagcaggcgggctcttgcagttggacacggccttcgtgtgacgcagctgaaaagcaacaacaaaagggtttggttgcaacagccagtgtgggtacctctggggagagaggacctcctctgacaaactggtctggtacccaccatgtgccaggatccaccctggcctctttttacccactgactccccagaacaacccttccaggcttctcttgtcatctttctctgcctgaggggaaactgaagctctgaaatgcgatgtgatctgtaccaggtcacccagctatgctgcaaagtgggttggccaaggccctttgcactgcatcaccctggtgcccagcaacatcaggtaaccttcactgagcaccaagcttatgccaggtctgtgctggccactctcatatacctcttcagatcctctgcttgtacccccagcccttgccttccctggattttgggcacccaggactttgctctgcctggtggagggtacttgatttctctgggcttccttcatctcaattctgacagtgtggaaggaaatctgtaggtacccaggtcctcagctccagactgggtgatgctggagacccaggagcaagtcagcacaggctctgcccacaggaggcatgcacaatctggcaggagaacagcacaagtacacataggttgctctctgattcctccccctttcccttccccccctcccaaggggcggccgcccctacactacccctcctatggggccccaccctcatgcccactttgctcttccccgctccaacccgtccttctcccccctttcccctataatattaactctagcgccccgcgcccgctctcctgttttaccaccctcccttttctcccccgacacccctttgccctcttcccccacccttcttttatttcccacttcccccctcccttgttttctgtctttctccccgtatctttacattctccaccccggactctcgttctaggcccccaccgccttcccttcgtacctcttttttacttttggcccaccctcctcattttcatttactccccccccccacccccctcctcattattatctcctccctctatcctcc

SEQ ID NO: 45256 - DNA, 496 bp, Homo Sapiens
  misc_feature (481)..(481): n is a, c, g, or t
cgagaccctgtcttaaaaaaaaaaacaaaacaaaaccagcatctgttactggaacagagacctcagcccaagctcaggacaaggaggcctccctgggagagggggcctttctcccaccatcaccgcctgtgtccttcaggggctgctggagggcagcccaaagccaggggcccaccccgccccaccccaccccaccccaccctctgaaatgtgaaaagcctgcactcttcctgtgggctgcgcagtgggctcgggggttggggggtgccggggcgatgcttccaccctggactgagtgttcggggcagcctgctcggctgtatgtttctcgcacgctcacccgcttcagtgcggctctgtccctgctgccgcctccagtcctgagggaggggcttgccccaccttctacattccaatttttatatctttgaattatgtgattagatattaatttaatgataaaaccactctgaaagctcanaaaaaaaaaaaaaaa

SEQ ID NO: 45257 - DNA, 949 bp, Homo Sapiens
atcgctcgccatctgcaaaccaatctcattctattttgtgtcggtgctgtgggcgcctgtactctctctgtcacacaaccgtggtacctagaagtggactacactcatgaggccgtcaccataaagtgtaccttctccgcaaccggatgcccttctgagcaaccaacatgcctgtggtttcgctacggtgctcaccagcctgagaacctgtgcttggacgggtgcaaaagtgaggcagacaagttcacagtgagggaggccctcaaagaaaaccaagtttccctcactgtaaacagagtgacttcaaatgacagtgcaatttacatctgtggaatagcattccccagtgtgccggaagcgagagctaaacagacaggaggagggaccacactggtggtaagagaaattaagctgctcagcaaggaactgcggagttcctgacagctcttgtatcactgctctctgtctatgtgaccggtgtgtgcgtggccttcatactcctctccaaatcaaaatccaaccctctaagaaacaaagaaataaaagaagactcacaaaagaagaagagtgctcggcgtatttttcaggaaattgctcaagaactataccataagagacatgtggaaacaaatcagcaatctgagaaagataacaacacttatgaaaacagaagagtactttccaactatgaaaggccatagaaacgttttaattttcaatgaagtcactgaaaatccaactccaggagctatggcagtgttaatgaacatatatcatcaggtcttaaaaaaaaaataaaggtaaactgaaaagacaactggctacaaagaaggatgccagaatgtaaggaaactataactaatagtcattaccaaaatactaaaacccaacaaaatgcaactgaaaaataccttccaaatttgccaagaaaaaaaattctattttaaac

SEQ ID NO: 45258 - DNA, 542 bp, Homo Sapiens
cgctccacccctcagatactggaacctacctctgccaagtcaacaacccaccagatttctacaccaatgggttggggctaatcaaccttactgtgctggttccccccagtaatcccttatgcagtcagagtggacaaacctctgtgggaggctctactgcactgagatgcagctcttccgagggggctcctaagccagtgtacaactgggtgcgtcttggaacttttcctacaccttctcctggcagcatggttcaagatgaggtgtctggccagctcattctcaccaacctctccctgacctcctcgggcacctaccgctgtgtggccaccaaccagatgggcagtgcatcctgtgagctgaccctctctgtgaccgaaccctcccaaggccgagtggccggagctctgattggggtgctcctgggcgtgctgttgctgtcagttgctgcgttctgcctggtcaggttccagaaagagagggggaagaagcccaaggagacatatgggggtagtgaccttcgggaggatgccatcgctcct

SEQ ID NO: 45259 - DNA, 593 bp, Homo Sapiens
aaaaataaatttttatagagatccttgagtaaagacattttgcttaatttcttttttcttattccccacttgtatatcccctaccagtaccgggatctgcacacatctttttgcagttacctcttcatagccatgaaccaaaacgttctatgaggagcatgcaagtaagtcaagcctcctattctgttagtacttattagaggaggagatggttttcattgcatagtgacattttcttagccttaacgttctgatagtagcttactactcacttctctttttcagttttcataataagtattcattttttttgccataatgcttcctgtaaagccaattttatatactaataaaacatgaactgcccactcttcatgcctgccaaacttggggcaattgatgctaaatggtatttttaaaataaatgtttttattctttactcttgactaaacttgtttattttcaactccaatgaagattgtggaagagtgttttgaaatgaagcatcgatttgtacttcatagagcaccagacacaatgtctcacccaatttggagtccatatttttttttatgataaagaaaaatgttgg

SEQ ID NO: 45260 - DNA, 689 bp, Homo Sapiens
ggacgcgtgttcctgccaccaggtgcccgctccccgcgaggccggctcaggagcagaaggaagcccggtgccagccagccttcctgaaagaccaagcccgcgccatccggcttcctccagtggacgcctgcaggacccaggaacactacatcaacactgttggcggggacctggacacagaagactcctgtttcaagaaaatacaatcatctctcaaaggctgtaatttatatgcattttaaaactctaggcattgaaaaccacccaagtgtcccaaatagaagggtaatatataatcaatcactcagtgtaatattatacatcctttaaaaatgttattgggaaatgttttatgatctgtaagtccaaggaatcctctcccaccatttctttccccccgctgttcccccatacccacacttctttgttccaattggcatgtaaatttggttttcccgccaaatgagtcagtcatgatgggaacctcaactgatttgaacagatgtgtgtcaatgttacttggaaaactagatgtcaataaccagggtcacagaaaaaggcagtggtcacaactctgtaaaaatgtatgcatgcacacagacaagaactaaagtggaaccccacacaggaaaacagtgggctgtactccagtgctgggacattgaatgactgtatgctgcttttgattt

SEQ ID NO: 45261 - DNA, 576 bp, Homo Sapiens
aatgatgataagatagttcagcagactaacgctgatgagcaatattaagtctttcgctcctatctgatgtatctggcggtaacattctagtttatgccccgaaaaaggggaatatagccattctataatgtttggagattttggattactcctaattgtatgcaagttgtcttactgtgtattgtcccttaatttcaggactcagaattcatgattgaagaaatgcaggcagacctgttatcctaaactagggtttttaatgaccacaacaagcaagcatgcagcttactgcttgaaaggtgaggattggaaatgttgggactattataattgcagaatacatgatgatctcaatccaacttgaactctctcactgattacttgatgacaataaaatatctgatattctgcattcccatgtagcattttaattgaagtctgtaaatgtggctaaaagtcttgtcttattttttgagacacggtcttgcctcacccaagctggagtgcagtggcctttgaagcttactacagcctcaaacttctgggctcaagtgatcctcagcctcccagtggtct

SEQ ID NO: 45262 - DNA, 894 bp, Homo Sapiens
ctctcccagaggccaggatcagcaggtttgagtggataagtggcttgtggtcattttctcataggatttttcttttagtagtggaaactgtttttcaaatcaaatttggatgccaactatgtggaacagaagtgtggctgctctggtggaagtggcaatggtagtcctagagtctccctgtcagccacaccctttgtctccccctacccaagggaccctgtggcctggaaccgcagtgtgaaatgctatatagtgcaatgaagtcaattctaagacaagagttctttgtctttctcatctaatttttagttatggatatgagacgcttgttcagaagtatggaaaagtatatataatatgttatcttttagatgtgggtgtaaatatgcttatgtatgcaatgtgcttatattttaacgcataaacaacatgaataaagcaaacactctagacttctccaaatgtatcttgttttacagttttcatttctggaaaaattgtcaacattttttacattaacaaccatattactcaggccattagaaaaaacacatacatcgacaaaagacagaataacaagaaaaatctcttaaaaaacactattataaaaatataaaataaatctaataaagaggggggagcatcacgtcatcagtaatatctcccttggagaggagcccatactacttcagctggcacccacacgtttgctttatgtcgtataatagattgtgcctccacaatattaaaagcgccgcgctcgcctttactcacgcatactgcgcagctgttcagccctctatattaaaacataatgttttcgtctgagtgtgatatataacgttcttctgtcgtgcttttcttatggcagtgagtacttctctttctgctggg

SEQ ID NO: 45263 - DNA, 742 bp, Homo Sapiens
  misc_feature (27)..(27): n is a, c, g, or t
ggggggaggggaccgcctgtacgttanaaatattccttcttgcgccttgaaaagcatcagtttccctcccacggctgggtttttgtgtctgaaatacatctaattctccagactgcagcccctctcagccccgagcacctgagcgctggggaggcccttattgagctcagcctggagaggggagggtcgcacgggtcccgggggcaggtctcctgcactggctcttcccttctgccagcttggaatttggttctcatcttgccacaggggtgcgtttcctaaagggcagccggagcagctcaaaggtgacaactgagatgcatttctaggcaggggcagggaaggccaacccaccttgcagccagttttctgtttctgtaaatagcagtgtatagagatggaagggcagcgtgggtgtatccacagatgggtttaggttttttttttggatgttttctattacctcattcagcaactttatgtttcacaatgactcaatgatgctttatttatattgtttgtactgtaattaaaaccattgacagacatttcactttgcttgttatttcatatgatcttgttttgattaaatatgccagtttgtattttcctgccttgggatttttttgtgtccgctgtacagtattctaagggaaaaagaaaaagaagatgtgtaaagtaacagagagaggtggctatggtgtacagacctctttcctattaagaaatgaaaatatgtcta

SEQ ID NO: 45264 - DNA, 721 bp, Homo Sapiens
atttctgtttcccaagtccagcagtgtcgtgggataggttttgctttcttttactgtctccatcctacttacacctccctgatcctggggtctggggactccccatggtttccttccttctgcaggcccaaaatgatggcccctcttaacccaaggcaggggatcttcctcccaactccctggaccaaggtggcatttcctgcacacccctccaggccaagatgatgctcgctctcaactctgtaggccaaggtggcgtctcctcttgactctccagacctaaagtgacacccttcaggcacttcgggcccaattcagcccagtcctggtgctttcagcgccagatgacagcactttgcagataagaacgatatgatgtgtggatttcactacatttggctcctggatgctataaaaggacttggatttctgacttggctcagggactggggttagcagtctctttctgctccttttcacctgtgttttcttccgatcccagctctggtccctcagccgcattcatatttactctcctctcccagcctgatatccctgtccctcatctcaacccgaagccaagatctgagcccccaagatggagaatggggaggagctttttatggcggactgattaaaactcttaagcatttaacaaaaaaaacaaaaaccaacaacacaaacactaaaacaaaaaaaaacaagacaacaaaaaacccgg

SEQ ID NO: 45265 - DNA, 662 bp, Homo Sapiens
  misc_feature (625)..(625): n is a, c, g, or t
  misc_feature (648)..(648): n is a, c, g, or t
ttttttttttttcccgggctgcgttcggacccctgtcgattgtaaatcccaagtaaggtacctgccgtgggcagatctgagctttcttcttggacaccccatacccacagtcctccaggccacccttaagtacaatgttctcctacctaagaaggcatctggattttctctttccttggaaatagtaaagaactactctttgactgtttttgacctcacagtgaacctcaaatacactggaattcgcaataaatccagtatggtggttatagatgtaaaaatgctatcaggatttactccaaccatgtcatccattgaagagcttgaaaacaagggccaagtgatgaagactgaagtcaagaatgaccatgttcttttctacttggaaaatgtttttggtcgagcagacagtttcactttttctgttgagcagagcaaccttgtgttcaacattcagccagccccaggcatggtctacgattactacgaaaaagatggagaagcatttcttttaacaaactgattcttctgtatcaaacctggaaaaaaatcatgaaccatctgacatcgtgaacagtctgcagtgggctatggtttcttgacaagtcttatttccttatcatcncattaaatgttgtcattttgcanaaaaaaaaaaaaaa

SEQ ID NO: 45266 - DNA, 684 bp, Homo Sapiens
  misc_feature (615)..(615): n is a, c, g, or t
ttgggatgaagcatttcatctcacttcataacacctctttgactgcacttcagtgaattgttcttatgtgcactgtgtagcaacttacattataacaaagcagataagggctgtaagctgctgcttatgttgaaaagtggttcttcagattttctctcataaaatccagttgaagataaataatttttttatactttatcactgaacccaagtgtttatttaaatgtcaacagtacttctaagaacgttgcctgtcatcgtggtctttggtcttggataactaaactgcctttccagagaaccaaatgtcagagttactagaccaaatagtggttaaaacctccaaaggaagtaatgtaatcttattcataatgggattaacatattttagacattcattttaaacactacctcagttaatatagagtataaaaatctgtggtttaatccctcaaaagttaacagtaattttttttttgtcttacacacacacacaccccctcccccaccatcactatccctgtaccctcaccttggtcatctatcctgaaataaggcttagttagtattggcctgaatgttttgtgttttttttttgttttttttttttactgntactttgaaaaatatgtatgtataccttatcatatctgcctatatcacttactttggggagatactcag

SEQ ID NO: 45267 - DNA, 847 bp, Homo Sapiens
  misc_feature (55)..(55): n is a, c, g, or t
  misc_feature (245)..(245): n is a, c, g, or t
  misc_feature (451)..(451): n is a, c, g, or t
  misc_feature (565)..(565): n is a, c, g, or t
tttggaaatctgtctttgttgctctgggagaggggactcctgcaatgtgtctgtnaataaagactagccgaagatactgtggcctcatgaataggaatgtctgcccatatgtcaggattggaaataatggatgaagatcaattaatcaaagacgtcttggataaattccttaattgtcatgagcaaacatatgatgaagaatttctgaacacttttactcatctttcacaagaggatcatgtgtncaaaaggggagtgtttggaactgattcttcagaaaacatttttacctcagcaaaagttactcataaaaatgaagcagatgactaccatcttagaaataaaaccatctttcttcgtacttcatcacaatgtttggaagaacaggtagataatttcctagatttagaagatttggacatggatgaagagattaaaccccaaatgagtnaggatttgctgctgcttccaggagaagtggagcaggatgtaagcaccagcattccttcctgtatcccttttgtggcccagcctcctacctgtcaagtgaagccaaagcccagtnttaaaagaatggacaaacagacggaagagatacttggagatgaagttcaacttttttcacttgatgaagaatttgattatkacaatgtgatgctaacctccaagtttagtcctgcagagatagagaacatcaaagagctatgcaagcagcagaagagaaaggacaccagcccagacttagagaaatcctgtkactgaatcacagaggcattttgtgtgtttttccttattttaattttgttcttattctagccacattagaataaaagataaacctactata

SEQ ID NO: 45268 - DNA, 739 bp, Homo Sapiens
  misc_feature (726)..(726): n is a, c, g, or t
ggtaaacatgcctttaaaaatatatatattttcaactagtattgtctataatgctgaaatattacttattggtgatttttctgtttcacacactctaaaatataagtaaagccaaccttttttttaaggctgagattcccaaaatgagaatactactttataccatttgtttataagtaagaactgttcttataaatattaatatttacatattcactaatttaacataaatgaaaattaggattaaaaattgcaccaaagcatcggcaaaaacaatactatattctttaaaagtgctcaggtagccaaggcccttgcttttggtatcaaccctcatgaacccataggagctgaatatttgtttcactgcttaataatcctcaatttacactattcataactcttaaaattattctctttttttctaagagcccctcccttccaaaagtgtatttttttcaaagattttcacttctcaattgttgcctttgtacatactatagagtgttgcttgtaagaaaggctaatatggaaccaaactcttgtaagtaatgtaaatagaaaggtgggtggataaagttttcaatactttctactacctcagtttacttgagtactacattatagtttattctttgcttatctggtctaagagacttttaatgctagtagtaaagttgggttctgctttcattgactattttcatcataatttcatcattgatnaaaaaagaaaacc

SEQ ID NO: 45269 - DNA, 940 bp, Homo Sapiens
  misc_feature (475)..(475): n is a, c, g, or t
cactaggggcgaagcgaggcttgggctgctggagcgggaatgagggggcgccaagtggctccggaaactgggggaggttgtactggcctctccgcaaacacagtgtgtgcgggcgtgagggctgtgagtctgtcctctgtgaagttgcggctgctctgcagccaggtactaaaggagctgctgggacaggggattgattatgagaagatcctgaagctcacggctgacgccaagtttgagtcaggcgatgtgaaggccacagtggcagtgctgagtttcatcctctccagtgcggccaagcacagtgtcgatggcgaatccttgtccagtgaactgcagcagctggggctgcccaaagagcacgcggccagcctgtgccgctgttatgaggagaagcaaagccccttgcagaagcacttgcgggtctgcagcctacgcaaactgaagcaggcccagaccctgatgagctccctgngctgaggagaagggtgttccaggcctgtgtggagccgccctgcccgtatggagtcacgccctctgaactgctcttcgggaggcagccctggttctaggatgctgaggccctggcccggactctggcctcccagatccccagctgcctcacttctctcttgagaacttggctcagggctcctgaggacctttcccaacattacctttccctcccttgaaaaggcaattgttggctgtttttcataagcagggaaaaataaacagaagtataaagggaaaaaaaaaaaaaaaagggggggcccgcctctagaagtatccccttcgaggggcccccaaggctttaacgccgtaccccaagcctttcctttggtaacaaagtgtggtctccccttataaattggaggtccgtaatttaattaaagctttagggcaaccgtgggcgcgcgtcctgttttttaacacaacc

SEQ ID NO: 45270 - DNA, 582 bp, Homo Sapiens
aacaatgcaatgaaatgtaactgcaaatatgatggacatagaatctgggtgcacaactgccacattggtgatgccttcagtgaagaggccaacaggaggtttgaacgctaccctggccagaccaacaaccagattatctaagtgccactgccctctgcaaaccaccactggcccctaatggcaggggtctgaggctgccattacctcaggagcttaccaagaaacccatgtcagcaaccgcactcatcagaccatgcactatggatgtggaactgtcaagcagaagttttcaccctccttcagaggccagctgtcagtatctgtagccaagcatgggaatctttgctcccaggcccagcaccgagcagaacagaccagagcccaccacaccacaaagagcagcacctgactaactgcccacaaaagatggcagcagctcattttctttaataggaggtcaggatggacagctccagtatctcccctaagtttagggggatacagctttacctctagccttttggtgggggaaaagatacagccctcccacctcattttttactataatatgttgctaggtat

SEQ ID NO: 45271 - DNA, 601 bp, Homo Sapiens
ggcacgagggagcaagatcatagccaaaaggcaaacaaaatatcataccaatcttcaagtacggaagaaagacgactccactatggagaaaatggtgtgcagaaagatgtatcccaacgcagtatttatagccaaactgaaaagctagtagcaggcaagtctcaaatccaggcaccaaatcctaagcaagagccatggcatggtgaaaatgcaaaaggagagtctggccaatctacaaatagagaacaagacctactcagtcatgaacaaaaaggcagacaccaacatggatctcatgggggattggatattgtaattatagagcaggaagatgacagtgatcgtcatttggcacaacatcttaacaacgaccgaaacccattatttacataaacctaccattcggtaaccatgtgaaaggatggaccaatatcaaggtgtcagttgacctcagtgaattctgtgatgtttctgagatgcagactcccgtgtagtttcagattcttggtccatggatgacaccacctgcccatgcttccttgaattaggctttcctaacctgaagcgccttcaaacttccaataaagagatcattttctgc

SEQ ID NO: 45272 - DNA, 693 bp, Homo Sapiens
cctagattcagctggggtcattatgctcatcagtgtgcaagctggacacctagcagttatggacacctccactattaccacgtctagttggctctgtcatccaactataaacgatcttatttcactaattttactagtccaagctggtctcttgtctagacaacaataagcaacctagttcaactaccttttcttgcaaatctgattttccaccatggatttatcttgctttaataaagccagagggagcctgaagtggtctggcttctttacctacctcttcagcctcattttgtaacactctcacctcccataatagccatcttacaagcctcagtaaggactcagttctaaaacagggcactgaagagggaaagcagccaaaactgtctcaaaagtaagtggactaacggtatcttttttctagcccaagcctctgtatacgtcattcccccagttttgccttgtgaaaaatatgacacatacctttagtctcaactctttctcaggtttccctaagaaaatcctatcacggaactcatctcatagtgaagttttacatttgtgatgacattccctccacttatctatgtttccaaagggaagaactgtgttgtgctcatcatcgtgttctcagctcctagtacagtgctttcaataaattttttgaatacctctaaaaaaaaaaaaaaa

SEQ ID NO: 45273 - DNA, 806 bp, Homo Sapiens
aactgtgaaggaggctcatttgacaaaggatcaaaggaagcagttccaggtactggtagagaacaagttttatgaatggttgattaatacaggacatcgccaacagctggacagccttgtaccccctgcagcaggctccaaacaagcagctggataaggatcttacatgcagacactgggccctggaaatacaaggataaatggaggatggtgctcatcttgaaacttgaaactaaattgggaaggtgctattgctgcttaagagacattgggacttttctgtctttttttttttttttgaggcagagtcttgttctgtcgcccaggctggcgtgcagtggcgcgatctcggctcactgcaagctctgcctcccgggttcacgccattctcctgcctcagcctcctgagtagctgggactacaggcgcccgccaccacgcccggccaattttttttgtatttttagtagagacggggtttcaccgtgttagtcaggatggtctcgatttcctgacctcgtgatccgcccatctcggcctcccaaagtgctgggattacaggcgtgagccaccgtgcccagccttctgttctatttaagaactttgatttccattccattttcatttattactgtttaggccgaattttcgctaaacttctgactttcatataaacatattgcttatagaacatcagaagactcatctttgtgatgcccaaatgaaaaagttggtgaagggagaacatttggatgtatgttaatattaaagcaactgagtgtagatttgcaaaaaaaaaaaaaaaag

SEQ ID NO: 45274 - DNA, 521 bp, Homo Sapiens
tgctgagggagtggggggcccagccccttctcttctcccccgccaaaccacagtgggagctggggcagggggagagccaggcaatcgggggccaaagatgggggtgctcgcctacagtctgcatctgtagtgccttgtggggtatccaggaacaccctcccagcaggggatgggaaccctgtcccatgaagccctctcctcagctttacttgctcccccgcccttagccttggggagaaatggcccgtggtgggctgaccccccaccctccacacacacagttccatgacccagcgggcccccaggggcatcaggtgctggtcctcctccctcctggcctcgacccctaagggcttcgcccctcccaggggcctgtaactaagtcgggtcctgccaggcagggggcctgtgttctgtgccccttgggagacaggaactggcgagttcaggtggggtggggacagcacagactgttccaccgttgtgcatattgttgcttctgaaccacaaactgtataaat

SEQ ID NO: 45275 - DNA, 549 bp, Homo Sapiens
cccttccaagagagaacaaaggtcagagatgttgaagattccagcaaatttctcctcttatttctaccaagcctttgtgaacattgctcttcattttggcctgtacttctccctcagggacgtagaacaatggaatgtcagtcagtctctgtagttaaaactttttctttaaaattcaattaaggtacttctccctcagggacgtagaacaatggaatgtcagtcagtctctgtagttaaaactttttctttaaaattcaattaagttacaccagaatttacaggcaagattttttttttcattgctcccataagcaaatttgttttaaaataattgtaaatgaggtatatacttagttcttggttaaaaaatatattgctttgttaagtattaaagattatttgtaagtcattgtattaataatactaataaaatttatcaagcctttatagcaagggtcagtgaattaccactgcctgtgggccaaatctagctcactatctgtttttgtaaataaaattttataatagtacacagccaaaaaaaaa

SEQ ID NO: 45276 - DNA, 462 bp, Homo Sapiens
  misc_feature (432)..(433): n is a, c, g, or t
  misc_feature (435)..(436): n is a, c, g, or t
gggaggtgggagaatcacttgagcctgggaggttgaggctgcagtgagctgtgtttataccactgcactccagcctgctgggtaacagagcaagactccatctcaaaaagaaaagaaaaaatgctttgctacataatgaggccaggcaaaaaaaaaaaagtcctgtggaaatcatatagacaaacatttgcaaagctgctactgccattgtaccagtgttaaactgtgttctaccttgcatcttttactgatttttatgacagattttatattgtaaccattcgagaactctgtaagtgctatggcttccttaaactacgatttatcatatgctcccggtgtttactttgagactgaatggcaaccagagaatgtaaacaaccaaggtgcatctggttatgttttaaaataaagattaataaaagttaaaannannaaaaaaaaaaaaaaaaaaaaacatgt

SEQ ID NO: 45277 - DNA, 746 bp, Homo Sapiens
ggggagccggggtgtgaggggactggaccagcttggactgagacctgagaccgggccggtgggcgcccatttgggactgcgccacccccaggcttgttcttgttttactgtattgagcggcggcacccgccggacccgcattatggctgggggcgccagcccaagaatggggaccatgggactcctccagcctggctcttcccactctttcatcgtcatggaaacttgtatcccatttgcccagggaactgccactcctggttgccatggaaatagcagccaacggacacctcccgatgccagtgctaaggctggaaatggccccctcttagttgccatgggaacctagtaacagactctgctggccctccttccctgccccttcctcgagcgcggggtggggcttcgggaccccggggatgagccgggccaggtcccgcccctccgcgcaggcctccggggggccggggcttaccatgtaggggaggggagatctatccacatacctcaggtaacaggcaggtgcgcgggtggggggagggctgggcggaccaaaggccggaggggtggggcctggggatagcgagaggcttgagaatggggccgcttgggggagggaagaggcagccggcgaggggcaagcgggggacccagccgggctgggcccctgggccccgggtctgtacaatacggtttgctataaaactcaagaatcttccagccgggaaaagaacaaaaaagaaaaa

SEQ ID NO: 45278 - DNA, 830 bp, Homo Sapiens
ggaacaccacaaagccatgatcgctggccttgccctgctgagaaacccagagctactcctagagatcccactggcattgttggtggtaggcctgggcgggggcagcctccccctctttgtccacgatcattttccaaagtcctgcattgatgctgtggagatcgatccctccatgttggaagtggccacccagtggtttggcttctcccagagtgaccgaatgaaggtccacattgcagatggcctggactatatcgccagcttggcaggaggaggagaagcacggccttgctacgatgtcataatgtttgatgttgacagtaaggacccaacactgggaatgagttgtccgcccccagcatttgtggagcaatcttttctacagaaggttaaaagcatcttgactcctgaaggtgtttttattctcaaccttgtgtgccgagacttggggctaaaagactcagtgctggctgggctcaaggcagtgttccccctcctatatgtccggcgaattgagggtgaagtgaatgagatcctgttctgtcagctgcaccctgagcaaaaacttgccacaccagagctcctagaaacaggccaggcttcggagcggaccctgaggaagcctgggaggggttgggatgacaccgtatgtcttgtcagatatgctcaagacggtgaaacattgtgtgactggcttagggccaagcagccctcctgccttagactgaccttgggactcccaagctgccagagaatgacgcaaatacaacgcaccagtactttttgaagcttcgcatttctcctggtttcacacttcagcttacatgtga

SEQ ID NO: 45279 - DNA, 505 bp, Homo Sapiens
atacttggttcttctttttgtctaggttttatatataccttaattaattctttcttggctgttttatatctatgttgctgtcagcatgggaatctctattattagaaagctattaacttttaaaatatgtatcttttggtgattttctttgttctaacagttttagatggcctgtttgctctttctaaatataaaatcataggtatttctattttgtttttgtgtttcataaaattgtaataagtttttttgatattttttcattacatatgaagttaattgttggttttaaacaaatgttctttgttaggataacagaaataacatcttctattcttgtttgttggaagctaaaagcttgataaaaggaattggtgtcttttgatacaatcaaatttttatcacttaaattgcctaatatgattataataagggtttttgtaatattaaaacatccttaaattcctgagataaaactctacctggttatagtatatgttctttt

SEQ ID NO: 45280 - DNA, 687 bp, Homo Sapiens
attcccgggatcataggtctagggaaatgccttgctgcctatcatttccctgatcaacaagagttaccaagaaagaaactgaaacatattagacaaggaaccaataaaggtttaattaagaagaaattaaagaatatgcttgcagcagttgttacgaaaaagaaaactcataaatataactgtaaaagttcaggctggatttccaaatgtccagacattcaagtcttagcagcacctcagctgcaccctattcttggacctgattcttgttcagaagtcaaatgttgccttccattttcagaaaaaggcccaccttcagtgtgtgaaactcgaagtgcttggtcacctgaattgttttcataaaaagtcacctgaacccaattcctgaacttttaaatctgtttggaaatgtttgccttcaggggtacggaaagcattctttacattttgaacacttggagagaagcaaattgaaaacaggactctgctgggagctactgtgccttttaaaatataaagccattgttttccccagggttttatctagaatactatgattaggtagttgagcactttatcttatactgtttattgtactttaataatattgttaagattgtttttgaaagtattaatgtttgttaaaatcacatatacatccagaaataaagactttgcaaaccaaaa

SEQ ID NO: 45281 - DNA, 664 bp, Homo Sapiens
  misc_feature (21)..(21): n is a, c, g, or t
  misc_feature (309)..(309): n is a, c, g, or t
  misc_feature (318)..(318): n is a, c, g, or t
  misc_feature (494)..(494): n is a, c, g, or t
  misc_feature (552)..(552): n is a, c, g, or t
  misc_feature (557)..(557): n is a, c, g, or t
  misc_feature (565)..(565): n is a, c, g, or t
  misc_feature (653)..(653): n is a, c, g, or t
aaaaaagtttcccagctttcnagggttataatattgattaaaatttagataaacttaaccttacacaaacgactcttactttcctttttattgagagcattttctttggagcactctttcttctttggaggattataccttgctcatcttggcacaaaagaaggcgaaaggaagtaacatgggattgggaaaagagcaaggagataaagtttgaggaaaaaaaatcaccatgttgatgtcttcttgagtaggccaagttgcgtataaagagaaaatgacaacaggagattttaaggtatgatatattgntaagagtantacatatttaagaagagaaaatatgtttttgaaaacaaatttaaacttgaaaggatgatttctcatattttgaagggatttataacttcacaaagcatctccattctatcttgctcagctttacatttaaaaataaactcttcttgttcatataaaccttatctcttacataaagngaaatctgttaattttttgttttgacaaggataaactacttacctgcatctgtttaanaatanattaactnattttgagaagaaattctgggcaccatttttgaccattgaagacttatttgtaatttaatttctactttacattgcgaatgttcattntctaataaaca

SEQ ID NO: 45282 - DNA, 918 bp, Homo Sapiens
  misc_feature (588)..(588): n is a, c, g, or t
  misc_feature (655)..(655): n is a, c, g, or t
cctgttatgccctggccattagccctgacgccaaagtctgcttctcctgctgcagcgatgggaacattgctgtctgggacctgcacaaccagaccctggtcaggcagttccagggccacacagatggggccagctgcatagacatctcccatgatggcaccaaactgtggacagggggcctggacaacacggtgcgctcctgggacctgcgggagggccgacagctacagcagcatgacttcacttcccagatcttctcgctgggctactgccccactggggagtggctggctgtgggcatggagagcagcaacgtggaggtgctgcaccacaccaagcctgacaagtaccagctgcacctgcacgagagctgcgtgctctccctcaagttcgcctactgcggcaagtggttcgtgagcactgggaaagataaccttctcaacgcctggaggacgccttatggagccagcatattccagtctaaagaatcctcgtctgtcttgagttgtgacatttcagcggatgacaaatacattgtaacaggctctggtgacaagaagggccacagtttatgaggtcatctactanacaagaactccagcagggctgtcaaactctgggagaaaccgactcggctctgacagggagacccccnagcgaggggccccgaagatggcggaggatgggccgcaggcagccgagcgttcagggctgcgctccggccggctgagagggcacgtgcccccgtcacagtctggactcctggggcctggattgatgtgtctcacagaactcggaaggggttctggttcctcttcctccccctgaaccatgctgggcagttgctaacaaatagaatttaattggaaggccttattggctcccggttccccccacaaaggccattctattgtcggt

SEQ ID NO: 45283 - DNA, 663 bp, Homo Sapiens
  misc_feature (19)..(19): n is a, c, g, or t
cgatgcagagcaccacagnggtgagaggccgggcaagccagattaggactttgtcctcatactcttacagtgctgcaaagttgtgtgcatcgctaaagagagccccaacctatacagagagcaaacaatgagataagaggaactgtcgcaaagctttccactgaaacacaggtcaccctggaagtttgcagggtttgctgtgggcatctgtagatttctcgatctcgttagattgcaggcatcttgacatcttggcaactgcctagttaatgccagtggcctgtaccatattatggaaaactgttaactgcttaattgggtaattttcaaagaaagtaatgttgttaaatggggcgaaataagaagttaaatttgaaagtgaatgtgttcaaatgaaaggtttgataattgcatctgttactacttagtttcataggctttaattctagtatgcattaaatattgggcaaaattgcacttgactaattttttgaagaaaagtaatttattctgtcaagaaataaaaaaataggctttgtgtatggttaaactgtaaatcttatgtttacaaaatactgtaattttcaggaaatcactgtattaggaatgtgcaatgacttatataaataaaagccatttttaaaactgaaaaaaaaaaaaaaa

SEQ ID NO: 45284 - DNA, 721 bp, Homo Sapiens
ccgcgtgcggaggcctacgtggctgcctgagcagcagctgaccgcccgtctcactgttggccagggctttgtggcgtgggtgttttccagtctgcctggagcagcgagaagcagctgtgcagactggtggcggtgggagggtttgctgggactgatggggacaccggccagcttgtctggtgtccagcagccctgccggacttggcctcctgtcctgtcgttgggagccctggctggggctgctttgagcaatgacgctggcccagagcagcttcccacatgaccccagagccgagggtctgccctgtcctaggttaggtcttcatggtttagagtaaaaccgtgagggatgttaattatgggcattgaagacttaaggttttcttaaatttttagtgagcagtgattggccttcaatacttgtgctgagaggaattttaagccaggggaagtgtaagaaaatgttcccattcaggagagattgtgttggagtttctttcttcctctgtatgtattttgtggtgtccacctttaaccacgtttcatccaaaacgatgatgcagctttaacatgaatgttacatttttattttcaaggaattattatctatgttccctttgtaaaggaaagataatgttgtaaatctttttattagataatgtaaagatgtatatcagtatttttggatcatggtatagattatggatatattgtttaataa

SEQ ID NO: 45285 - DNA, 500 bp, Homo Sapiens
tggaggggcagctgaggtggggcggcatcaggctgatacaacaccccagggaaccctgcttccatgtaaccctgaccttaaatccctatcctataataaagagttgggcacaacagaagggaaaaggaagtattctgcaaattgttttccataacagtgcagaggacacactttgcaatgtgtaatttgtgcagtatgacatgcatttgggtgtgtctggtcaggtacatcatgtggtgtccctgttatgcattttgcagactgacactctgcttaaccagtccttccgtgctgtgctgttttgtaagctcttaaccagaatgcaaaaatgttaaataactgtctggttttattttccagccctctgggatgagtctgatgacagtaactcagaaattgaggctgctttacgccccagaaaccataacaccgatgattctgatgatttttatgactaacgtgctgtgacattggtttcaaataaagtctttaaacaaact

SEQ ID NO: 45286 - DNA, 536 bp, Homo Sapiens
tatgtcctctttcattgggcaacagctaagagggcccagcaaggtaatttatggttgagctgatgtcaattggttcttgtcttgagtcgactcaatttagcccaagtgctgaaacaagaaatgtcatttttttcatcaaagacaccagggcagatttttaagtaaagaaagacaattggacccttaagaatttatgcatttgtaaagttgctgttgatccaaatattttcaagccatgtaatccattggttttgtgggcagtttaataaacctgaacctttgtgtgttttctaattgtacctgagttgaccatcctttctttttatagtatatttcttgtatgatattttgtaaagctctcacctggttcttttatggggactttttttttttgggcaactccagtgtatttatgtgaaactttataagagaattaatttttccatttgcatattaatatgttcctccacacatgtaaaggcacagtggctccgtgtgttaaaaaacagctgtattttatgtatgctttactgata

SEQ ID NO: 45287 - DNA, 975 bp, Homo Sapiens
caagaggctgtacctaaaattcctcaacctaagaggcagtccaccatggtcaacagcagtaactatctggatcgagggattctcaaggcttatagtgactctcaggaagatgagtggctctcggcagcaattgactgtttagaataccttccagaccaaatggtggtggaaataagcagaagctttcctgagcaaccagaccgaacagacttagtgaaagaacttctgtttgatgccattggcagatattacagtagtagggaacctctgttaaatcacttatctgatgttcataatggaattgcagaactcttagtgaatgggaagacggaaatavctttagaagctacccagctccttctaaagcttttagatttccaaaatagagaagaatttagaagactactgtatttcatggctgttgcagcaaatccttctgagtttaaattacagaaagaaagtgacaaccgaatggttgtgaaaaggatattctcaaaagctattgttgacaataaaaatttatccaaaggcaaaacagatcttctggtactctttttaatggatcatcagaaagatgtttttaagattcctggaactctacataaaattgtaagtgttaagcttatggccatacagaacggaagagatccaaatagagatgcaggatatatttattgccagagaattgatcaacgtgactattccaacaatacagagaagacaaccaaagatgagctgttgaatttactaaaaactcttgatgaggattcaaaactttctgccaaagagaagaaaaaattgctaggtcaattctataagtgtcacccagamatctttattgagcattttggagactgagtttttaatatctgtatataagttgtgtattttaagaataaattatgtatcctaaatatccaatcacatttgtaagtgtggagctctaaatttgaamtgtacttataaaaatttttt

SEQ ID NO: 45288 - DNA, 586 bp, Homo Sapiens
ttttttttttttttctccttcaaaaatatttattggatgtctacgacgtgccagcagtggccctggtgctgggaatatgcttggctctccctcgccacagcctctggcttccatccttggtatcgccgagtcttggcaactctcccacaggggcagcccccggccatcctgaagcgtgggcaggaccggctggtgccacagctgaccagtccagacctaagccacttcacaccagagactctcccagcgtccccaacagacccctcactcggtgcttgaagcctggggtccaacctctgaagagggtggtcacatcccggcccgcggtgaggaactcggatcttccctcctccctcaacccacgctgggacctttcccagcaccctttgggacgcttctagaactgttctcagcccttcagagccttaaggaatccaccggtcccgctctaaggggttctaggagccagcaatcctggccacccccactccccacacacaccccgcaaacatcccccgcaccaccacgggtccgctgaggtccagtccactagcgcgcctcctccttggggctgcacgcaggggcc

SEQ ID NO: 45289 - DNA, 1032 bp, Homo Sapiens
  misc_feature (781)..(781): n is a, c, g, or t
  misc_feature (931)..(931): n is a, c, g, or t
agaagcgaggcctgggtggcgcgcgagggagaacctgcactgggacggggtgcactggaatggacgtgtgcaccgctgcctctcccagctgctgctggcccacgtggccgacgcctggggtgtggagctgccccaccgccaccccgtgggcgagtggatcaagaagaaaaaacctggcccgagagtcgaagggccgccccaggccaacagaaatcacccggccttacctctgtccccacccttaccttcccccacataccgccccctgcttgggttcccaccccagcgcttgccgctgctcccgctcctgtccccacagcctcctcctcccattctccatcaccagggaatgccccggttcccacagggtcccccagatgcctgtttttcctcagaccatactttccagtcggatcaattctattgccattcagatgtcccctcatcagcccatgcaggtttcttcgtcgaagacaattttatggttggtcctcagctgcctatgcccttcttccccacaccccgttatcagcggcctgccccagtggtacataggggttttggcaggtatcgtccccgtggcccctatacgccctggggacagcggcctcgaccttcaaagagaagggccccagccaatcctgagccaaggcctcaatagacggacctaggccttatttcctctttatgaacatggattggacagatctgacacttcctttccattgcttggcctgaacagactgaccttgttaacttaagcctggagtccatgcctcgncttccttttgttcattgctgttaccaagaaagccaaggaagagcagcctgactcattcttcttggctgcagcctcttccccacttcctgggaagtgacccagcgttatttcctggcctcctcactccctattctcccttgcccttggggnaaacaataacatgggaaataaaacaagttgccacagaaaaaaaaaaaaaaaaaaaattcaagggcatctaaggttcggggggccgggagaaaaaggttatt

SEQ ID NO: 45290 - DNA, 628 bp, Homo Sapiens
  misc_feature (550)..(550): n is a, c, g, or t
gagagagggacaggtaatgccttccagcccctaacttctaacaatctggaagcacaacgtgaaaatcacgtagcccaaccctatcattttcatattatgaaactgagtccaggtaagtgaatctgtccaaggtcacccagcaaggtatcagtagccctgagggtaaggactctgataaggctcgggagggtcctggaaagcctgaggcggcaggaagagtgtgcagagttgagcgtgtctggaaggctgatccactgctgggcccacatcaaagcccccatggggagcagacccgactgcacatggctcttttgctggaagaagagcatggctgcgcagaggactaaaatttcatctgggaaggcttcttttgactgtcagtagcaggatgtcaccagatgagggtgctatgggaccacagctgtctttgttcccattgcaactcaaccctgcgggaggccgcctgcatccctgagagccttctggagcctacagaggagacattggccagccaaaaggaaaggagtggccagggtacgacctggagtanggaagggaaaaagttcccggaaagaagagaattggatgagaggtctcggtggaaatacaggttttctggcattggtca

SEQ ID NO: 45291 - DNA, 811 bp, Homo Sapiens
  misc_feature (677)..(677): n is a, c, g, or t
  misc_feature (729)..(729): n is a, c, g, or t
  misc_feature (794)..(794): n is a, c, g, or t
  misc_feature (800)..(800): n is a, c, g, or t
aataggaaacctgtggtaccaggacatgtccttgtgtgcccgctgcggccagtggagcgcttccatgacctgcgtcctgatgaagtggccgatttgtttcagacgacccagagagtcgggacagtggtggaaaaacatttccatgggacctctctcaccttttccatgcaggatggccccgaagccggacagactgtgaagcacgttcacgtccatgttcttcccaggaaggctggagactttcacaggaatgacagcatctatgaggagctccagaaacatgacaaggaggactttcctgcctcttggagatcagaggaggaaatggcagcagaagccgcagctctgcgggtctactttcagtgacacagatgtttttcagatcctgaattccagcaaaagagctattgccaaccagtttgaagaccgcccccccgcctctccccaagaggaactgaatcagcatgaaaatgcagtttcttcatctcaccatcctgtattcttcaaccagtgatcccccacctcggtcactccaactcccttaaaatacctagacctaaacggctcagacaggcagatttgaggtttccccctgtctccttattcggcagccttatgattaaacttcttctctgctgcaaccctgtgtctcggtgtattgacttgccatgaattangcaacaaacctattacaggtacaggtacttttttaaaaggaaattcaatcgntggattggtcccctgcttatttctttcctttttaaaaaaaatgtctacctattgaattttatacnttaagngggtcatgaaa

SEQ ID NO: 45292 - DNA, 798 bp, Homo Sapiens
  misc_feature (587)..(587): n is a, c, g, or t
cagaagtgggatacaaagctgactcacctcatggagaatcattggcctttggagttatggcatgaggtacccatgttggggccctttgaaccccctacacccccaccactttcacaggtaatcctttctccctccagtaagtatctcttggacagaactctcagatatggttcgagttctgttttatttgggatatgattagggagaggtctttccccctcttgtttggtagatctgttgggtagaattattttccccctgttgacctcagctgcgaggtttggaccttgaggcttggatgagggaatttttccctttctttggagaaggcttatcattcttactggtaagcatgtattttattttctgtcctgtcttgtatttatttggcctttgtgtattcagtgcttgcatttacttggcttttgcatagttgacattaaatcagagcacccacgaaatgagctctcaaagttcaaaggcatgccagaatattttctggaactccagctagtaacatattcaaacattacagggatcatttagtctgtttttcttaaaactgaactaaaagatggaggctatanaatcatacactccaaataagatatgcatatttcattgatatcttgagtctaaaaaaaataaaaacaaaaccaaacacattcaggatacaaatattgccttgttaaaaatactgtctcaaggtggctgaaactttctttctagacctttcccctcccttcttacatatcccctcttattcctctctaacagctattctacatactactaaat

SEQ ID NO: 45293 - DNA, 665 bp, Homo Sapiens
ggtgttgtaactgggaacatctgaatgctgaggcctagagatcgttcagggtgttgtaactgggaacatctgaatgctgaggcctagagatcgttcagggtgttgtaactgggaacatctgaatgctgaggcctagagatcgttcagggtgttgtaactgggaacatctgaatgctgaggcctagagatcgttcagggtgttgtaactgggaacatctgaatgctgaggcttagtccagtgttctctctcccttaccactcctcttccccttccctctataatggcagtacccagggcccggtccatagactactatcgagtgctcctatgtgcatcttagtacgtatcattttcccttgcctttttccttctatcctttcagtggtagcaactgcccttgctaatcaccgtaacctcggctgagaaagaagaggaagcgaaatccaagatgcagctcagttcatcaaagcctagcaggtcccctcagctgccttttcatgcctgccacagactacagtaggacaaaacctgacctggtctttgaagttaagagctaagaaagcttcctatagtagtatctcgcatggcacttaccacattctatctggtattacaattatttgtatgcaattaatcactcttagatggtatgttcctggagggc

SEQ ID NO: 45294 - DNA, 618 bp, Homo Sapiens
gtaccgttaaaagcgtagtaccaaagccctattacctcccattcccagtgctgcttatttgtacctcttctgcccactcatttctgttccacctgcccctttacttcttaagcagcatcctcatccttcttcctcttcagctcttatgttgaaactcctgttatctcataatcacgttgaatgtgctcattggttggttgattttttaaagtctagtttaaatccatttaatttcagccctgcaaagactctatccgtgtggttatttggaaatacgataaattagtagttagtatagagggttctcccacttacaaatggagaagagcctgtacatttcatattcacagaaagttttcctgcattcaaagacttgtcactggacccaagccacatgtgtagttggggtcaacatgattatcactggactcggctcgtaaatcctcctctactcttgtctaaaggaattcaagcccacatttaaatcttgtcagcttcatagttgttggctttgctgtggcctacgctccctattttcattcagattctgagccctggataaaatgcagagagtctaaccctctcccaccctctgcctctccagcggatgcagtggtg

SEQ ID NO: 45295 - DNA, 678 bp, Homo Sapiens
  misc_feature (622)..(622): n is a, c, g, or t
  misc_feature (649)..(649): n is a, c, g, or t
ttttaaatcaacatactataagctcctgcttgcttgactcaagttgtttgaaaatctgaattaaacaggatctcattgtcaggaaacatcttctaagcttgacatctacgtttaagaagggaacgtggaagagaaggtgagacatgaaactaaaacagctgggagggtaggatcagactgcacctgatttttggaccaaagtttcatataggaataaataaaaaggaggaccacttgtgagccaacctaggaaggacttgccagaaagtagcagctcctgctgcaaaatacagtgccttcaaaatgattctctgtgtgaattgcatgcaatttcatgtaaccataaagtgtaacctgtatgtgcatgacatgtgtctagaatgtgtaaagttaggattcagcaggaaggggcctggccctgtcactgtggtggatcagtggacctgctgaagtcactggactcatgtgacttaggtttgcagcatcagacccctgtgtttgcattaagtggccacatcgttgaaatcggatcaatctctccctcagctttctttcctactttgcagctttgctggttttaactgcttcattcttctgcttcttggtatccttttttcttttngaataaaacatgaaatacttaattcanaaaaaaaaaaaaaaaaaaatcgctaatcg

SEQ ID NO: 45296 - DNA, 912 bp, Homo Sapiens
  misc_feature (727)..(727): n is a, c, g, or t
ccaggcagttttatgatgacacctgtgttgtcccagaaaaattcgatggagacatcaaacaagagccaggaatgtatcgggaaggacccacataccaacggcgaggatcacttcagctctggcagtttttggtagctcttctggatgacccttcaaattctcattttattgcctggactggtcgaggcatggaatttaaactgattgagcctgaagaggtggcccgacgttggggcattcagaaaaacaggccagctatgaactatgataaacttagccgttcactccgctattactatgagaaaggaattatgcaaaaggtggctggagagagatatgtctacaagtttgtgtgtgatccagaagcccttttctccatggcctttccagataatcagcgtccactgctgaagacagacatggaacgtcacatcaacgaggaggacacagtgcctctttctcactttgatgagagcatggcctacatgccggaagggggctgctgcaacccccacccctacaacgaaggctacgtgtattaacacaagtgacagtcaagcagggcgtttttgcgcttttccttttttctgcaagatacagagaattgctgaatctttgttttatttctgttgtttgtattttatttttaaataataatacacaaaaagggggcttttcctgttgcattattctatgggtctgccatggactgtgcactttatttganagtgggtggggagtaatctaaacatttattctgtgtaacaggaagctaatgggtgaatgggcagaggggatttggggattactttttacttaagccttgggatgggggtccctacatttttgagtatgatgaaactatatcatgtcctggttggatttcctaccaccctaagaaaatggttattt

SEQ ID NO: 45297 - DNA, 599 bp, Homo Sapiens
gcacgagaaacagcttggttcttagcagactgcttaaaagatcaagaaaattttctcatcttttctttctacttagaaacattgcaagaaaccttggacagtcttcaccagacctgccatgattttataagatttaggcctcagtgacatgctcctgaaagtttcctgccagccatccaaactaagcatccactcattccatcttcccaaagtcactcaccgataaaggtagcatccttaagttcatttttgaaaggtggaggaggatctccccctgcccaaaggaatttttttatcagaataccttgaaaggggggtatataaatttggaaaacttaatttcttggctgtgtttgataacagttcctatgcatggtttttaatgtgaggtaaatttgtttctttcttcagaatacctctctccaccccccaccttattcttcctctttaatgaatatttttattggagctcaaactccatgacttacgtgctcactaagttttcttttttccccttgtttactctgtctgtatgtatgtcaaaagctggcaaaacctctaaaactgtcaagaaaatgcttgaaagttgatttgtcata

SEQ ID NO: 45298 - DNA, 530 bp, Homo Sapiens
  misc_feature (8)..(8): n is a, c, g, or t
agttatanttatagtgttatttcttacttgctatatttctttgcactaaaaaagagctatgtgtttgttttataggacactttagtaccgtattgcctacaataactcagtttgctccttaaattccaaactctgggaagttgataaataacttccatgatcacttgtaaaagttacatgcacatctgaaaaaaaatcacaaatctctatgacagtaggttatgttttgagcttgttaccttgcagtattcttctctgttccataggtgaaaacaaagggtgacagaggttatcaggcaggaaatgcctaaatagatacatctctgcatggtacaatttctcatattcatgtattccataaacagtgttttttctctgtttaagcagactgttgtttcttctgagtcagtgatatgtgatcttcgttggtttcattttgtgaagctcagtctgtctctgtaacatactttaggatttgcaccttgtgctccccaggaattatgttagtgtccttttctatgctgtcttca

SEQ ID NO: 45299 - DNA, 677 bp, Homo Sapiens
aggcggtagggtcatggagtacatacagcagttgaaggactttactaccgatgacctgttgcagctattaatgtcatgtccccaagttgaattaattcagtgtctcactaaagagttgaatgagaaacaaccatctttatctttggtcttgctatacttcatctgttctctgtagacatgaaaaaagttggattaagctacttcaagaaatccataaaggtgggatagatgcagtagaaagtcttatgataaatgattccttttgctccatagaaaagtggcaagaagtggcaaatatatgttcacagaatggctttgacaaattatctaatgacatcacgtctattcttcgatctcaggctgcagttacagaaatttctgaagaggatgacgcagtcaacctaatggaacatgtgtttggtagttctatatcttaaccagctgagggagcttgtacaacaccttatgtatgctggttgggacaaacttgattttaacgtaactaacttataaataacatctagagtaagaagatctcagaaataaatcaccactttcgttatgatgacatctagattcgccttcgcacctatttatacctattgctttccctttttccccatatgggtcattttctccataatttgaaatctttgatcacaatccaacgatttatc

SEQ ID NO: 45300 - DNA, 742 bp, Homo Sapiens
ttagctcaatatgcagaattctgtgaaagtcgacaattaagtttctccaaaaaagcttccaaatttcgagactggttggactgcagcagtatggagataaaacccaatgttgtcgcaatggaaatcttagcatatttagcgtatgaaactgtggcacagttagtggatctggctcttcttgtgaggcaagacatggtaaccaaggcaggggaccccttcagccatgccatttctgcaaccttcattcagtatcacaactctgctgagagcactgcagcctgtggtgttgaggctcacagcgatgccatccagccctgccacatcagagaggccattcgacgctacagccacaggattggcccactttccccattcacaaatgcctaccgcaggaatgggatggcttttctagcctgctgatgtgacaactgtgatgtgcctgcaacaacaggaaaggcaatgttatattaaggagtaaaccaagccaattcagcacttcctgtttacttccttgtcatatgtaccatagatggtgacagacctgctctcaaaacaagcttccttcgtttaattctgcattttctgcttaggcaaccaccctatcaatatacttgaacaatgaaacaatttggctacggaagcactgtctctgaattcctccttcaacttgtcagtggaaaggaaagtcccttggtggaatggtaggaatagttttaagcggggtatcacacagtgccttaca

SEQ ID NO: 45301 - DNA, 369 bp, Homo Sapiens
cgtgcccatgtggagtgcctgcctgctcacacacgtgcccatgtggagtgcccgcctgctcacacaaagccctggcatggtggttctgtaggtttcctgtcctgccggccgagtcagacgctgttaccgtacattctactcatggtggctttttaatacgtttttatgtcaaggatcccttttatatttctctgcacctcgagataacgtaggaatattagggatgagatggaagaggagagggtgtttttgtaaaattgaattcaggactgatttgttagcctggtgcttttcgtatcagaccttttaatgaattttcatggatgctgattaaaagacaaaaaaaaaaaaaaaaaacccgaggggggg

SEQ ID NO: 45302 - DNA, 705 bp, Homo Sapiens
gcttccttttaccctctctgtcttgccttttccccctttcctcttcctttcccttccttctcttttcttttttctgctttctgtctttctccctctccttgtatgctttccttctagatttctagcttgccaccgttcattctctccttctgtctctccctttctctctccttctctgtttctcctctcttctctcctgccagtctcttgtactctgtgtcctggtccctccgtatgtacccctgtctttctcctcctgactggtggtctatctgcccctacctctggccctcgctttaccggagtagggggtgggagagggaagaggagagaaaagacagggactttgaacctaggccatctcctgaggccttttccctcgcccatgtgggtcagtgggagctgcaggtgtcagcttttcgtctagtaacttaagtgagagagaaagggcagcgccacagaagcccctaaacgccgcctcgtcatacgcccctcctccttctctcttggcgaggccccgacacaccgcgctcttcctcccgggactgtgactacagcgctcccggctgagcgcgccccccgagccgccgacttgccgtctccccgtaatgccctcatgtgaatgttcttcgggaaatatttctgcttttattttataataaaattagaaatcataacaaaaaaaaaaaaattcggaggcttcta

SEQ ID NO: 45303 - DNA, 911 bp, Homo Sapiens
  misc_feature (29)..(29): n is a, c, g, or t
  misc_feature (688)..(688): n is a, c, g, or t
  misc_feature (813)..(813): n is a, c, g, or t
  misc_feature (872)..(872): n is a, c, g, or t
  misc_feature (910)..(910): n is a, c, g, or t
actccatatctaacagcccaacccgctgnatggcagcggcaagtcggtgttaggcagctcggaggatgagaagactccatcggggacgccagaccactcatcatccagccccgcactgctcctcagcccgccgccccctgggctgccgtccctgcacagcctgggccaccctccgggccccagcgcagtgccagtgccggtgccaggcggaggtggagcggacccactgcaacaccaccatggcctgcaggactccatcctcaaccccatgtcagccaacctcgtggacctgggctcctagaacccatttgccttgatgagcttgccttttgtgacttgacactggggacgtggagtggcggtgtccaggggcgccccgcccctgcggccccaccaggtactgaaagacccgcaggctgagcgggtagaacagccgggtagggcagatagctgtctatgttggttcttgtttgggatttattttcaacaagttacttttaggatccttttggggctggagactgagtcttgaaccacagaagggaataaattatacaccactgtcattctctctctccctctgtctcttccttttaccctctcttgtcttgccttttccccctttcctcttcctttcccttccttctcttttcttttttctgctttctggctttctccctctccttgnattgctttccttctagatttctagcttgccaaccgtcattctctccttctggctctccctttctctctccttctctggttctcctctcttctctcctgccagtctctagtactctgtgtcctggntcctacgtatgtacccctggtcttcttctcctgactgggggtctatctgcccctacctntggccctcgctttaccggaatagggggtaggagagagna

SEQ ID NO: 45304 - DNA, 531 bp, Homo Sapiens
ccaatattatgtatgaagtagacaaaaaaatttactcaaacttcattcaaatcctaattgtgataatttttgttttatatttaattataaaccaaaatacatttgcatttttaagctaatttgtctcaaaattttgctttatatttttggatcaggttaaagtcctgtggatcccctgaatgttattgtccctcttgattggtttttacttctgagctatacgtcaaaagacacataagcttcaaaagtcaagacaaacctcatttgccataaaaatcaagatatagatgttctgttccgtaaactccttgaaaaacattttaaagtcatcaatatgatctgtttcccatgaaacttaagttagctttcttattggagttatttcttttctgtaagtctgaaaagtagagattttgttttacgcattttagtaacctgcaacaaccaactctaaaaaagatttggcttgtaatgacggtctctgcttttttgggtttggagtacacaattgtaatatttacttagttattt

SEQ ID NO: 45305 - DNA, 698 bp, Homo Sapiens
  misc_feature (673)..(673): n is a, c, g, or t
ttttttttttttctattaggttttctttaataatgttaaatttctaaattatagcatatgttttagttaattctgaaatcagttacttcatttgttaatttatccctcatatcatgaatattgttttttaaatgttctatacaaatttgcatcacttcttttcttacagcttttgcagttaatatattctaaacttgaaaatgtggtatcaatcaataatagaagtatcactggaggatttatttagctttgtatttcttaattttagtcctagctactaaagtatgtaagccttaaagtttaaaatgtttttcttaaattagctttatacacaaacattttcatttactttatgaaatgggaggagatagtccactgtgcttatgtttttttgtttaatttctatattctgaagcagtgcagatatagggtatgctaatcaagtgagcaaggtggaacatgtacaatataaggagaagctgtaaaaatcacagtataaaattatgaagtttggtaactgtaaaatgtactgtatttatatgtaactctcattctaaaagttgccacacaagctgaattggaagcttcatgtctgcatgaaatttcctatatttttactgtgtatgatgaaattaatttttcttgaatattaaagtctgccacttgctatganaaaaaacctcgtgccgaattcttgg

SEQ ID NO: 45306 - DNA, 661 bp, Homo Sapiens
gatttaattagataacaattattccatggctggatatgtactggattttcacttacagtacattgatttggtgttgatacacatttgaaaagagtgaggaatacaatacatttttaatacaataggtttacaaattttcctactggtgtgaatatggagtcaaataaaaatccagtttacatctctgcagagagaaaaattgttatccatatgtcttttatattatacatctttactagagataacttattgttaattttgtcaagttatgtgtaagtcccatttatttttaaatactaagcaaaaagttccaagtttgccttaaaatacaagtgaagttaaagaactggatgataatgcctatatttttgccttatgaattgtgctgtgtattataaaccagcaacggttttgattttaacaggattctgaaattttgtagctgtagagtactaatatttgtactctcttgcaaagaatgtgatctagttgtggattatgttagtttaaatgttttgtatattgtattttacctctgaacattgtacctttttagcatcaggtttttattttatttatgtttacacactaaagtgtcatttaactagtttaagaattgtattcttttttatcttaaaggttatttgtgtgtatcatcgtg

SEQ ID NO: 45307 - DNA, 633 bp, Homo Sapiens
gaggtggtggaagagttgaagaagtacctgtcgtagggagatttgggtagaagccctcatgctgaggtttgaaatgggaagtggggggcgcgaccgctgttgaggaagagaaggcattgatcttggtgtggctacaagtacccacctggcgtgggtagctcacgcctgcaatcccagcactctgggaggtcgaggcaggagtggatggccaacacagagagaccctatttgaaaacaaaaaacaaaaaaaagacacaatattgttttctgtctagtgtgccctaagtggaatttatgtcctttgggagactgtagttgacttgccctgggggtatggacaagttttccatttggaagtttatttcatgttacttcatttatgcttatccctaccctcttctgtttggttcttgggtgttctgttactgtcctgtgttaacactgcattacaataccattaaatttggttacaaggattttgaccttgtctttgtccctagtgcttcatacagtgctttggcatgttgttctgcacttattatgttgagtgagatttggaggaaggatgcaatccttgagcttcagggtttgtgagttcaagggttggggaacatgtcttcctcagtcctttaa

SEQ ID NO: 45308 - DNA, 501 bp, Homo Sapiens
aacggcggggagggaatggaggaggcgaccgttgttatcgagcattgcactagctgacgcgtctatgggcgcaacgccgcggccctgagccaggcgctgcgcctggaggccccagagcttccagtaaaggtgaacccgacgaagccccggaggggcagcttcgaggtgacgctgctgcgcccggacggcagcagtgcggagctctggactgggattaagaaggggcccccacgcaaactcaaattccctgagcctcaagaggtggtggaagagttgaagaagtacctgtcgtagggagatttgggtagaagccctcatgctgagctttgtgtccctggtgatgttggaacattaatgatggaacatggccaaacttcagtcatgatcctgaagccatggtttcttccctgccagaaatgaaggttcagttatgaggcaaccctctagtaaggcattgtaaaagttactggatttggtttaataaaagttgaaataaagtaa

SEQ ID NO: 45309 - DNA, 541 bp, Homo Sapiens
tatatcatacatttacacttacaaagagtctttatctagacaacataatttttggaaaaataaagcaaattcaactttattggagttattggacagatcagcaaattgttattttaaaaagttttcttgtttaggcaatttggtaagtggtttctagttataaactagccactgttgattaacttgagaaggtgaagcaggggagttctgaagagattacctagagctacataaccctaagttaagtaaaattttcactttcattcttttcattctctcataaactggttgaaaaaacactgtactaccaacaaaggtgtcagttgcttgtgctgccctgtctatgttatgctctgaataggtctcggtaaagattatatggaaatactataaagaatacataaggtaaaatactagtcagaaagggttcagaagaagttagcatcaactgtatgaaaattctaggtaaagctaagtactattgagttggaaaaaagtaattctatcatgtttgcttgttttcctctactgtttttaatgg

SEQ ID NO: 45310 - DNA, 1025 bp, Homo Sapiens
  misc_feature (33)..(33): n is a, c, g, or t
aagggggggccggggtcccggtccgcgattccncgggatgcctcactctgttgctcaggctggagtgcggtggtgtgatctcggctcatgtagcctcaacctccccggctcaagtgatcctcctgcctcagcctcccaagtagctgggactacaggcgttcactactacacccagctaatttttaagttttttatagagatgagggctccctatgttgcccaggttggtctcgaactcctggactcaaagtatcctcccgcctcggcctcccaaagtgttgggattataggagtgagccaccacaccggccaagatgcttttcaaactgatacagatgacaatgggagcctcataaagatggcttttgtttcttcccttcaaggtcatttacttgtacgagacagaaaaagatagcattggggacatgggatgggggagggagggcaatagtggaacgaactttccatgggaaactttcccttttgtaagttgagggccaggggtagggatattttttagtttgtgattttacatttatctgtacatactttttcaagattgatcatttttataaccatggttttcctgaaatcctcaattcatcaatatgaaggaaatgaaccacatagactttatgcaataaataacagtgcaagtgagtataactctaactgatgttccacaaaacatttttgatttcaggtttgtatgatgtagtttttaatcgtacattttcatatgcttcaaactaacacatttttaaagctttcccccacttttctctctatttgtattgttagccatcttgaagtgatgttgtttaacataaattgtactgttgaatttggctttacgggtgtaaacactgatggtatatcagtatctgagaccccaaactctccaaatactgatggtgcattttattcttgaagtgaaatctgtgcaataaaataacagactgtctgccaaaaaaaaaaaaaaaaaaaaaaaaaaaaaaaaaaaaaaaaaaaacaaaaaaaaaaaa

SEQ ID NO: 45311 - DNA, 455 bp, Homo Sapiens
  misc_feature (434)..(434): n is a, c, g, or t
cctaaactcaagatactacaccagaagtgggcagtactcactatgttcaggggaacaaaaagataaaaactaaaaagcatcagactgttttttgtgtgaaggaaatttgtaaggtaggagaattaggtcacttactacagcacaaattgcatgtctatctaaattgacgtttaagtgcaaaagcatggatattactcatgcagttttactggaaaaccatacagatgtttttcaggaatgtacagaatgaatcaaaggaaataactgatcgacaggaaaactgtaggaaatttgtgggctggctgtgaggcagtggctcctattatgtacaattttagtgctaagtactgtgttaatgatggctatcaaacaatatgttaacatctgaaaggaaatatgtatattgagcataataaatattttataaataacanaaaaaaaaaaaaaaaacgcgg

SEQ ID NO: 45312 - DNA, 503 bp, Homo Sapiens
  misc_feature (239)..(239): n is a, c, g, or t
gggcgtctggcctttttcattcctgggacccacagctcgaggtctggtttccatgccctatcccttacgatgagcgccctattttgttccttctgtctatctctgttgctgagatcagggagcccacgttcacagcagctctttcaagcagcctcccaggcctagagaggaaaatcagcagagcctcgtgaatgtatttctcgtggcaagaagggagctcatcttctgggtcctgccanagggcagtgagggggttgatgggctgggtgcatgccagggacccaatcaagcatttttatcttctgaaatctttgaattcctgcctttcttggatgtttggtcttttgatataatttagcatgggccaacatttggtccagatttgtattaggccaagccctcctaaaatagtaataacagtatctggcgatttgagcttttacgtagaatgtagaatctctggtgagtgaacatatcaataaagacaacctgaaccaaaaaaa

SEQ ID NO: 45313 - DNA, 796 bp, Homo Sapiens
  misc_feature (666)..(789): n is a, c, g, or t
  misc_feature (791)..(793): n is a, c, g, or t
  misc_feature (796)..(796): n is a, c, g, or t
ggggtctctctctgtcacccaggctggagtagagtggcattatcctggctcattgcaatctgggcctcctggtttcaagtgattctggtgtctcagccacctgagtagtcaggattacaggtgcacaccaccacgcatggctaaatttttgtgtttttagtagagatggggtttcaccatgttgagcaagctggtcttgaactcctgacctcaagtgatccgtctgtcttggcctttcagagtgctgggattataggcgtgatccactgtgcctggcctggtgtttctttaggtataatgtctttaccagagagctaatgcagactgtcatgggtgagattgttctctgatgttcaattcccctactttgtatattgagtcagtatgagatgcgatttgtttggcaagcacctttgttcctgctgttactgacccttatcttgtagcctcacagctactatgcttttgtccagtccaactagataggagcttcttcctctgctgcagtgactggtctcacccagggctttcaggaaggtgagaataagcaccttcctcctcccaggaagttttgagtttcctgtgtttcatttctgaatgtaatgtctccatttattttcaattatgtttgattatatttgattaaaaacaataatttttttggcnnnnnnnnnnnnnnnnnnnnnnnnnnnnnnnnnnnnnnnnnnnnnnnnnnnnnnnnnnnnnnnnnnnnnnnnnnnnnnnnnnnnnnnnnnnnnnnnnnnnnnnnnnnnnnnnnnnnnnnnnnnncnnnccn

SEQ ID NO: 45314 - DNA, 555 bp, Homo Sapiens
ggcacgaggacaatattcatttaactcattcacttgaggagtgtctggtaagaactactgagaaaacaccatcactaactagaagaattgatgataccatcttccaaaatcctatggtacaagaagctatacgaatggggttcagtttcaaggacattaagaaaataatggaggaaaaaattcagatatctgggagcaactataaatcacttgaggttctggttgcagatctagtgaatgctcagaaagacagtatgcaagatgagtcaagtcagacttcattacagaaagagattagtactgaagagcagctaaggcgcctgcaagaggagaagctttgcaaaatctgtatggatagaaatattgctatcgtttttgttccttgtggacatctagtcacttgtaaacaatgtgctgaagcagttgacaagtgtcccatgtgctacacagtcattactttcaagcaaaaaatttttatgtcttaatctaactctatagtaggcatgttatgttgttcttattaccctgattgaatgtgtgatgtgaactgacttt

SEQ ID NO: 45315 - DNA, 724 bp, Homo Sapiens
  misc_feature (628)..(628): n is a, c, g, or t
  misc_feature (637)..(637): n is a, c, g, or t
  misc_feature (670)..(670): n is a, c, g, or t
atgtttgctttaaatttagcaatagaataggcaatggactgctttgcatttccttagtttttcattctgaaacagagcaaaacatcttcccaaagagatggagacaatctcttctgggtagattccaagtataacctgtcccagggtcctcttgctcagctgtgactaacaaaagtctgttcaatttaactacttagataagaagcgcaatgcttttatttaaaaatttaatattttctatggggctgtattttccaaataatagcaacaaaactgtcctaacgttttcactgttctgtaattttgttttaatatagaggatacccataatttcttaacactggaaacatcattctgaacgatgtaggaagcggtcagtaacgtgaatgatgttattgtaccgtctccagctttttccttcttcccccagatggtcgcacctgtgcatacatccctgtgcatgtgggggcacatgagtgggaaagtgggtgtcactcctattttctgtcctagagtgtcagcgttggaagggatttttttttgttcctccagtccggccctctagttgatagtccagtagtctgttaacaatttgtaaggacctgggttatattttaaaggtggttgntggtggtgnttgggttcacttatgtatatgcagcttgactgntcaacccagatttttaaacaataaaaagatttaatgtataaaaaaaaaaaaaaa

SEQ ID NO: 45316 - DNA, 574 bp, Homo Sapiens
ctcgaaggagaaaggtgaaatccaaaatattctacaaaaggtaaatattcctttggtaacaaatgaagaatgccagaaaagatatcaagattataaaataacccaacggatggtctgtgctggctataaagaagggggaaaagatgcttgtaagggagattcaggtggtcccttagtttgcaaacacaacggaatgtggcgtttggtgggcatcaccagctggggtgaaggctgtgcccgcagggagcaacctggtgtctacaccaaagtcgctgagtacatggactggattttagagaaaacacagagcagtgatggaaaagctcagatgcagtcaccagcatgagaagcagtccagagtctaggcaatttttacaacctgagttcaagtcaaattctgagcctggggggtcctcatctgcaaagcatggagagtggcatcttctttgcatcctaaggacgaaagacacagtgcactcagagctgctgaggacaatgtctggctgaagcccgctttcagcacgccgtaaccaggggctgacaatgcgaggtcgcaactgagatctccatgact

SEQ ID NO: 45317 - DNA, 549 bp, Homo Sapiens
gcgcagtgtgcgtggattccttcctcccctgtctcatttctacccagtgagttcatttgtcatataggcactgggttgtttctatatcatcatcgtctataaactagctttaggatagtgccagacaaacatatgatatcatggtgtaaaaaacacacacatacacaaatatttgtaacatattgtgaccaaatgggcctcaaagattcagattgaaacaaacaaaaagcttttgatggaaaatatgtgggtggatagtatatttctatgggtgggtctaatttggtaacggtttgattgtgcctggttttatcacctgttcagatgagaagatttttgtcttttgtagcactgataaccaggagaagccattaaaagccactggttattttatttttcatcaggcaattttcgaggtttttatttgttcggtattgtttttttacactgtggtacatataagcaactttaataggtgataaatgtacagtagttagatttcacctgcatatacatttttccattttatgctctatgatctgaacaaaa

SEQ ID NO: 45318 - DNA, 710 bp, Homo Sapiens
gcctgcctgggcctgccaaagtgctaggattgcaggtgtgagccactgtgcctggctggcagagcttttccatatgttactcctcatgctggttggaatcatggctgcaggcttccacttggtctgatcagactggtattcattcctgcctatgtccccgtgaaggattcggtaagagtgctatttcctcctccctttagaagacaggctgtcttctttcatcaacttagagcagataatccccatgtgtgcctctctccttccttagatggggaacaggatccctttttgggacaatcaagaaaaaaactcatgtaaacagtaatcttattacttgtatttgtgactaactccagggaaaagggtagaatatttaggccacttcaggcactaccatggagtgaactgaattcatacggatggcttgggctgacacagtttcttcccagtggaccaataaatcagactcacccgaacccctggggttttggtagaattggacctactctaggactgtggggaactaaaggagcatttggctcactgtagctcttctatcatgagccttgaccgtcaggccgcaatcagaccttactgatgggatctctgcagtttattacgtaggcctcccgttaccctggtacccaaatacgtccccccacctctagctccctagcctcacattggaatgtctcttcaacagcagattg

SEQ ID NO: 45319 - DNA, 933 bp, Homo Sapiens
tggatttcaaaaaaataaaggaaaggattcgtaatcataagtaccggagcctaggcgacctggagaaggatgtcatgcttctctgtcacaacgctcagacgttcaacctggagggatcccagatctatgaagactccatcgtcttacagtcagtgtttaagagtgcccggcagaaaattgccaaagaggaagagagtgaggatgaaagcaatgaagaggaggaagaggaagatgaagaagagtcagagtccgaggcaaaatcagtcaaggtgaaaattaagctcaataaaaaagatgacaaaggccgggacaaagggaaaggcaagaaaaggccaaatcgaggaaaagccaaacctgtagtgagcgattttgacagcgatgaggagcaggatgaacgtgaacagtcagaaggaagtgggacggatgatgagtgatcagtatggacctttttccttggtagaactgaattccttcctcccctgtctcatttctacccagtgagttcatttgtcatataggcactgggttgtttctatatcatcatcgtctataaactagctttaggatagtgccagacaaacatatgatatcatggtgtaaaaaaacacacacatacacaaatatttgtaacatattgtgacccaatgggccctcaaagattcagattggaaccaacaaaaagcttttgaatggaaaaatatgtggggtgggatagaatattttcaatggggtgggttctaatttgggtaacggttttgattggtgcctggggtttttatcaccctgtttcggaatgaaaagaaatttttggtccttttggaagcccctgaaataacccaggaaaaagcccctttaaaaagccacctgggttaaattttgattttttccatcaaggcaaattttttccaagggttttttaaattgggtttcggg

SEQ ID NO: 45320 - DNA, 954 bp, Homo Sapiens
  misc_feature (656)..(656): n is a, c, g, or t
ggaatttgctgacccatttaaacttgcagagtgcaaacttgcaataattcattgtgccggttattcagaccctatattggtgcagacactttggcaagatatcatagagaaagaattgagtgacagtgtgacattgagctcctcggatagaatgcatgctcttagtctcaagattgttctccttggcaaaatttatgctggcacaccacgcttctttcctttagattttattgtacagtttttagaacagcaggttgtactttgaactgggatgtgggcttcgtaatacagacaatgaatgaaattggagtaccattacctagactactagaagtttatgatcagttgttcaaatcacgggatccattctggaacagaatgaagaagccactgcacctttggattgtatacatgtattattgataagatatgttgagaatcccagccaagttttaaattgtgaaaggagaagatttacaaatctctgcctggatgctgttagtggttaccttgttgagctccagtctatgagctcgtcagtagcagtacaagccatcactgggaattttaaatctcttcaagctaaattagaacgggttcattaattactgtgatatactttcatccgttttatgatctgtaaataaaaactcagnctgggtcagatatcaggtgttctaatctaagaatgtaagaacaatctttatagacatatgttttataagtggtaatatctacaaatagtccttgtaatgattcttctatgactattggtttagaattgggggaaaaaccggatggattttctctttcttgggtgtacattgaacctcttgatggctggggcgaatcatttattcatccggccggtgggtaaacaagggggaggacggtacacctggggggggagaacggaaggacagcccaaaaagaaggggccgcaggaggagggcg

SEQ ID NO: 45321 - DNA, 470 bp, Homo Sapiens
  misc_feature (230)..(230): n is a, c, g, or t
  misc_feature (316)..(316): n is a, c, g, or t
gattgaaaagtggattttatatgacaaccggcgacgatcagctcagtggttggatcaagaagaagctccaaagcacttcccaaagccaatcttgcacccaaaaaaggtcatggtcactatttggtggtctgctgctggtctgatccactacagctttctgaatcccggtgaaacattacatctgagaagtatgctcaggaaatcgatgagatgaaccaaaaactgcaacncctgcagcgtggcattggtcaacagaaagggcccaattcttctccacgacaatgcccgaccgcatgttgcacaacccacacttcanaagttgaatgaattgggctatgaagttttgcctcatccaccgtattcacctgacctcttgccaaccaactaccacgtctttaagcatctcaacaactttttgcagggaaaacgcttccacaaccagcaggatgcagaaaatgctttccaagagt

SEQ ID NO: 45322 - DNA, 576 bp, Homo Sapiens
agaaggcagggcctgagaccccaggcgaaaagaaaacctaacgtccccgggtaacctaatggccactggctagcagcacacaatctcgccagggaaaatctgaggccacacaggagagaatatacagcctgcagagagtgcgtggcaatccttactcccagccgactgtgcgccaagatgcttctaaacccatcacctgctgtcttcactcaaatgatttcagaacaggatttgcgaccaggtttatggggagattgaatcaacgattgctctcaaagacagtccattctttatatacacgtttagcatttttaccaacctcacatcatgtgtatatttgtgtatttgcacatggttgtgctgtcgaggacctggtgctgagaagagtctgttcacagccaaaattcttcccactgtcattcctaacctgggatttctagacacatcctgctgtgatgtaaacagaaatcacgaattcgctcactggatcaagttgttccactggtgtctaatacgctattgttgccggaggtgggttctgtgacgtgaagccatttcccatcattcaacagccag

SEQ ID NO: 45323 - DNA, 424 bp, Homo Sapiens
  misc_feature (90)..(90): n is a, c, g, or t
cagattcctgtggtttggaactgctggggccaagtttatacaaaaatctacatttttgagtaaactccccatgactctagtaagtttccncagtatttgagtattctttatttcctaaagctgtacaaacatcagataatcaatatttgtaaggatcgataatataatttataatgaaattgctttatcagctattaatgttaactacatcatcttcatatagccttataactcatttgtgctattccattttcctctgttcctttaaatttcacttcccttgtaatgttagtctctttgtactgatttctgaagagttcatttatgattaaacatgttaacattttgtctagaattgcaaatatgttttttctcattcattttactatggtgttttattttttggttatacagaagttgtata

SEQ ID NO: 45324 - DNA, 1035 bp, Homo Sapiens
ggatggaacacatatttaattcccctttatgccttggttcttgctcctctttccacgttggataacaattttttggttgttttgtttaagttggtgctctgaagcttaatctcagtaccctttactctgaattgtcaaattttgataaaacgtgccattttctttggtaagagaaagcaggtcttaatgtctgccagaacacaatttatatgccttattggcttcattaaacttttagaaaactttagcatttgttacttttttccattgcatttactttcaaatgcacctaatgaattcgtcacccagtcgcaacttttcccttctctgtcccattgctttctcctttccccgacgcacagaataaacatgaagctcagcagtagaagcgtaatgatttccctcaggaaaaacttctgacagctaggtttttcaagggtttccctgtgctagctgagatgcaaaacaaatcatggaagattgcatacctgtgtggtattttaaaaacaagttgactttttcagtttcttgaacggttaagggtggatttaaaaactagacagtttagttttggggaacagaagctctcttcgtcttaagccagattctctgattcttttagacgtcatagctccttagttctgytcctgtcgycctaayttggcatgggcaagttgaagttcatccttagactgcagcgttctgagcatggctgaagtattaaaatktttcatatttttttagagcaawattkatggwwagcatttggctgaatctaaakacctgcagtcagattcttcaatgtggtttacccaactggagtagtgataaacaccttaatcwmtaaaawkaatawwaacaaaaaaaccwtggggcttgtctgcagttttgttttggtcatcacatctgaataactctttgatgcaaycaatgatgttaggctttwaaaragaatagyttctaaatgtttttttctwaggstccggactcataamccgwwaaatttkgyttgggckgagattccttcacagtgaa

SEQ ID NO: 45325 - DNA, 607 bp, Homo Sapiens
  misc_feature (589)..(589): n is a, c, g, or t
tcatgctttaggagtcctcacccctcagactgctgcaggacattgccaggcctctctccacttccttcctcagcatacagacttcatgctatcttccaattccggggagtcttagctattagggcagtttctgcttctccattttggggacaaaggccttgcccagtacaaatctagccccttgtcccacagacttctggatggtataaacctagtggcaatgtagcaaccataggctagaaccaaacccaagatttgggtcagtgccctgttaagggttttaggattggtaaggacaccacagctaaatctgacatgtaaaaggatacccttcccctgtcccactacgggtggaggctaaggacctcctcagatcccacagattgcctggtgacattgggcacagggctggatggtgtgctgtttgagaggacagcatgctcaggagatttcagtgggaatgatctctaggctgatgtgtatttggggaagtgggggtggggaagaggtaggtgcctgctgcctcaaaccaccttgtgtaaaatctgcaatacggcttcttccatgtacctgtgcctgaactgtctgncataaagaagaatttgtc

SEQ ID NO: 45326 - DNA, 521 bp, Homo Sapiens
  misc_feature (32)..(36): n is a, c, g, or t
  misc_feature (398)..(398): n is a, c, g, or t
  misc_feature (504)..(504): n is a, c, g, or t
  misc_feature (514)..(514): n is a, c, g, or t
ctttctcaaacttgaccttgaacagagctggnnnnnggtgggagggaaacagatttggggcatatggaagatattcttgggagccccatattctacctcagttaccgaagctattagaacctctgaatttttcctcctctgaaatcctaagcacaacttcagaaaaccatgtctgatagcggatgtcttcctgctgtgaggagctgcttgatgtggggaccaaggtgtgggtgtgggcggaatgtatcctagtagaaacagtgaacctcagatatgaataaataagcaagagaccgaaagttaagtgtgtgacaacctcagtactgtagttaagctacattctttaaattagcttttgtggaactgattgggaacctaactcctttgtaactggttgnggaaaactctgaagcacctggtattccaaaccaaactttatgggtactactaactccattttgtaaaattggccgatggtacctggcctggtaggaatgcctttgntaattttttncttttgg

SEQ ID NO: 45327 - DNA, 847 bp, Homo Sapiens
  misc_feature (576)..(579): n is a, c, g, or t
  misc_feature (582)..(582): n is a, c, g, or t
  misc_feature (587)..(587): n is a, c, g, or t
  misc_feature (594)..(594): n is a, c, g, or t
  misc_feature (728)..(728): n is a, c, g, or t
ggggttaacggctgcggttcgaagtggctgtgggtattgctgcggctggtgcgtcgtcgctctagccagtaaatgacctgcgacataactatttgcaaaacaaatggggaagaccaagataaagataagttatatcacaggaaagcaattgaaaatgcaaaaatgaagcatctgaatgaaggactaataacactgaattcagcttttgtgaatcttatctgcagatatgtacagaccacatcctaagattgacttctgcctcaacagaaatacatgagccagtgccttattggaaatgatttgcgtgttttaagaactggtgtatataggtacatcttgaatgttctgctttccttgccttatgcctgtacttcacctcagccttcaattccattgtgtttccttgctacttggtatcttgaaatctggtacgaaactattgcatgatccctgcacctttgcttctgcatatatcatagctctcttatagtgagtgtgcacaatctatttcatttgatgtaatcaaagtttaatatattggatagttaaaaataaaatacaacttttaataccccnnnnaanaaaanaaaaagnaaaaaaaaaacctgtcggccgccctcggcccctcgagaaagctttctaaaccagttcttttggcggcgcgggcccccagtaaggtaaagtgaacatggggccataagctggttttccctaagaaaatccctggncccatgactaaaggggctttggaattcctccccccaataaaaaaaaccgccccgcggggggcaaaccggaaagcggtttcttggaaaacaaatcccccaaagtgggaaagttcctggag

SEQ ID NO: 45328 - DNA, 829 bp, Homo Sapiens
  misc_feature (70)..(70): n is a, c, g, or t
gggtagaagaccagccaaaaagaaaaaattattgaaattttaaatgataagaaactctttaagcctccantgttagtattgtggactgcaaactaggagcagatcttttgagtgaagccgttcagaaaatcacagggctgaaaagcatatctatacattcggagaagtcgcaaatagaaaggaaaaacatattgaagggattacttgaaggagactatgaagttgtagtgagcacaggagtcttgggacgaggcctagacttgatcagtgtcaggctggttgtcaattttgatatgccttcaagtatggatgagtatgtccatcagattggaagagtaggaagattaggtcaaaatggaacagcgattactttcatcaataataattcaaaaagactcttctgggatattgcaaaacgagtaaagcccacaggatccattcttccccctcagttattaaattccccataccttcatgaccagaagagaaaggaacaacagaaagataaacagacacagaatgatctggttacaggagctaatcttatggatattatcagaaaaccatgataaaagtaattctcagaaatgattttctctgccacttgaatattttttttatggtatatagtcagaaaaaattacggttgcataaatggaaatgtccatgaaattttaacacacttctcagaatattttaatttactaaaacttcatatacctactatgtacttcattcccttaattctataatttccaacatctgaactgcattcttacctccagacgggttccttctgcacaatccactacacgggcgccgcctactt

SEQ ID NO: 45329 - DNA, 565 bp, Homo Sapiens
acaaactcattccaggctgataccatgttaaagatgggttttcaacaacaagtgcttgacattttggaaaacattcctaatgattgtcagaccattttggtttcagccacaattccaactagcatagaacagctagcaagccagcttctgcataatcctgtgagaattatcactggagaaaagaacctaccttgtgccaatgtacgtcagattattttgtgggtagaagacccagccaaaaagaaaaaattatttgaaattttaaatgataagaaactctttaagcctccagtgttagtatttgtggactgcaaactaggagcagatcttttgagtgaagccgttcagaaaatcacagggctgaaaagcatatctatacattcggagaagtcgcaaatagaaaggaaaaacatattgaagggattacttgaaggagactatgaagttgtagtgagcacaggagtcttgggacgaggcctagacttgatcagtgtcaggctggttgtcaattttgatatgccttcaagtatggatgagtatgtccatcagattggaagagtaggaa

SEQ ID NO: 45330 - DNA, 920 bp, Homo Sapiens
  misc_feature (10)..(10): n is a, c, g, or t
  misc_feature (20)..(20): n is a, c, g, or t
  misc_feature (62)..(62): n is a, c, g, or t
  misc_feature (826)..(826): n is a, c, g, or t
  misc_feature (856)..(856): n is a, c, g, or t
  misc_feature (862)..(862): n is a, c, g, or t
  misc_feature (887)..(887): n is a, c, g, or t
  misc_feature (906)..(906): n is a, c, g, or t
tgtcacaggnaaggcacagnaccctatgagtgtgaaaacagaacccatgagtgcgaaccgcnagtgacccagtcaccttgatgtcacctatggcccggacacccccaccatttccccttcagacacctattaccgtccaggggcaaacctcagcctctcctgctatgcagcctctaacccacctgcacagtactcctggcttatcaatggaacattccagcaaagcacacaagagctctttatccctaacatcactgtgaataatagtggatcctatacctgccacgccaataactcagtcactggctgcaacaggaccacagtcaagacgatcatagtcactgagctaagtccagtagtagcaaagccccaaatcaaagccagcaagaccacagtcacaggagataaggactctgtgaacctgacctgctccacaaatgacactggaatctccatccgttggttcttcaaaaaccagagtctcccgtcctcggagaggatgaagctgtcccagggcaacaccaccctcagcataaaccctgtcaagagggaggatgctgggacgtattggtgtgaggtcttcaacccaatcagtaagaaccaaagcgaccccatcatgctgaacgtaaactataatgctctaccacaagaaaatggcctctcacctggggccattgctggcattgtgattggagtagtggccctggttgctctgatagcagtagccctggcatgttttctgcatttcgggaagaccggcagctcaagaccactccaatgacccacctaacaagatgaatgaagttacttactctaccctgaactntgaagccccagcacccacacaaccaacttnagcctncccatccctaacagccacagaaatnatttatttcagaaagtaanaaagcagtatgaaa

SEQ ID NO: 45331 - DNA, 579 bp, Homo Sapiens
ctgttggctactggagctagcaatggttctcaggttagtgagcatttagcttgcctgctgcagaatttgacccagatgggggtgtattctaggtctctcacaaatgagacaagcgaaacaattgtctccttttattctctttggtgcattggtgctggggaaacatgaactagcggcagtgtaactgcagaacatagacccagttctaccaggccaggccagcgttgggaaccaccagacagggctgctttgggctttgcttacagtatttccatgtgtagcctggcgtgtgagaaagtattaggtgaaatgccagtttcatggttcaggtgaaagtctgtgatcattcccctcgtggctcgtccttcacatcacttttgcccttcaaggagttgccgcgtccccgctcagtgccgcctgagccctcagagctcccctgtgcttttctggatggggactggcggggtcacctagcctcaccgtggagccaccgtgcaatgcccatctctgagaggcccacgcggtattcctcgtgccctgtgttagtgctttctgtataagggacagacagaactgggt

SEQ ID NO: 45332 - DNA, 920 bp, Homo Sapiens
  misc_feature (654)..(654): n is a, c, g, or t
  misc_feature (746)..(746): n is a, c, g, or t
  misc_feature (863)..(863): n is a, c, g, or t
cgagcggccctacacctgtgactctgcccaaagccttccggaggcaagaccacctgcgagaccacagatatattcactccaaagagaagcccttcaagtgtcaagagtgtgggaaaggattctgccagtccaggactctcgctgtccacaagacgctacactcacaggtgaaggagctcaaaacctccaagatcaaattctaaatagaacctgtgggtcacaaggaccctaggcccagcggccctctcctccatagggaccagaagcctgactctggcgggcagcgggagaggcgctcgctcgggaccttccacctctccaacattgtcccctgggtccctggcgcacgcggcacttcagagccccgcccggggccgcgaccccgaccgtccctgctgctcccctaggacgcggctaaactcttggccaaaaggcggtactcacgtggcggaagggaaactgcattaaaaaaagaacgaaagctccgcggagccgcagcggcgcctctcccagaagtattactttttctattgttattttatacgttttcttttttatttttgtctttgaccatataagcttgtaactctgactgcggagagtgagtggagagaggagaggcaacgaagtccttagcactggcagctcccaatntcctcctcccgcccctgcccccacccccggagcctgcaaaagtgtaatccctgtatctgcttcagcctcctgccctagggccgcggggcagncccctcccagctcttgcaggctagctggcggccgtgggcctcgggactaggagagcggtacggggacctcggcccgggggtttgcgggggcccgacctccgttgccgggacactgcnagggagcagccagccagagccgggcggtatatggcgatggcactttatgctcaccat

SEQ ID NO: 45333 - DNA, 769 bp, Homo Sapiens
tttacttctcttcagtttaattgtccatggtagtgctggcttcattgttaggttggagttattattttccttttagaacaacatgaattttattcaccttactattagaaaaaggaataactacagccagaaataacttcatttcctacaaggtataaaaagtggtcaagtgaatgtgaaggggcttttctacacaggaatatattatcgggaacaaagtatttcctgctgccttaactctttgggatgcataggataaaatgataaagaccattttaatatcagaaagggttgtcttattaatttttaaataaaacttcacatttcttaatggggagctcattcagaaactaaataatggtttctcaaagtgtggtcaggatacgatctgcatcagaatccttggaatgcttgttaaaaataccaattgctatgacaaaaccaagtctgctggaaactgcatttcagcaggtttcccatgttattctgatgtattttaacatttgagagccactaccaatcatctgtacagttcctactgttatgatcacaataagactaacatgaatttaataatctggataattttaaaatttaaataaacagaaattgaagttaaatttaaaattaaaataacctcagaaagttgaaaaaaaaattcgtctctctctactattgttcgtatatgtatagcagttacaaaaacctctcggggggggcccgggtcccaatttccccctttagggagcgtttttcacatgaacttgcc

SEQ ID NO: 45334 - DNA, 924 bp, Homo Sapiens
ggatgcaggagtggagaaagggaaaggcaggtctggggtgtggtcgtgttttcttaactctgcttctgtcttgctctcccctcccctggctttcctctctgcctgctcctgtctctccctggggtttctggtggtggaaaagctcaagcctttgcgaastaatgacctgcctctgtgcgaasttacgggaggctggacctcgacacagactctgctgatggcctctcggcccctctgctggsgtccccggagcccagtgctggccccctacaggtggcagcccctgcccactcccatgctggtggccctggccccactgagcacgcctgagcctccggggccacgcttcgttctcaggaacaaaacctgaggcagccctttggatgccctcacagccttgcttctctcagcctaggttcccatttggggacttcaggaccccagagccactaggacttccttgggaagcccgttagcccagggtgggtcccgccaggacagtagggaaacagttgtttccctagccatttccgaatagcccatcattccgagtcatcatctctgtttgctgccttcctggccagccaggtggaagaaagtttccaagctaggtctggcccgttggggrtctcagcagtggggsaggagggtgcctgatttcggggagtcctgacccgagcctgttgtcagagttgggaggggctctgagcagtgttgggcaggccgggtctcccatcccgaggccagcgttcctgtgcagagccccatccactggttcttkccctgagccacatatgtctgtgccatgggstgagtgccacgacaggcccgtgtgacarctgctgcccacgcatgtgrragctaaggtgggrctcattcctaattctgccgttgtaatgagacttgattwaaaaacgccacttt

SEQ ID NO: 45335 - DNA, 607 bp, Homo Sapiens
  misc_feature (582)..(582): n is a, c, g, or t
  misc_feature (597)..(598): n is a, c, g, or t
  misc_feature (607)..(607): n is a, c, g, or t
ctgtcctcatcgctgccgtcattccagggagccaggccgcggcggctggcctgaaggagggcgactacattgtgtcagtgaatgggcagccatgcaggtggtggagacacgcggaggtggtgacggagctgaaggctgcgggagaggcgggcgccagcctgcaggtggtgtcgctgctgcccagctctagactgcccagcttgggggaccgccggcccgtcctgctgggccccagggggcttctaaggagccagagggagcatggttgcaagaccccggcatccacgtgggccagtccccggcccctcctcaactggagccgaaaggcccagcagggcaagactggaggctgcccccagccctgtgccccagtgaagccagctccgccctcatccttgaagcacccagggtggccgtgagggccaggatccctgcacgcctcagccctggctccagctggcagcaagcaccgagcatgccctccccacccagaggacctccgggcaatgcctgtcccgcctcatgctggaggctgcctcgggcacctgcctgcccattaaagactggtcagacctgtcaaanaaaaaaaaaaaaaannaaaaaaaan

SEQ ID NO: 45336 - DNA, 583 bp, Homo Sapiens
agatcttctctcctgcaatcataccgtattggatccagatctgcgaatgacattttgcaaagctttgatcttgctgagaaataagaatctcatcaatccatcaagcctgctagaactcttctttgaactttttcgttgccatgataaacttctgcgaaagactttatacacacatattgtgactgatatcaagaatataaatgcaaaacacaagaacaataaagtgaatgtagtattgcaaaatttcatgtacaccatgttaagagatagcaatgcaaccgcagccaagatgtctttagatgtaatgattgaactctacagaaggaacatctggaatgatgcaaaaactgtcaatgttatcacaactgcatgtttctctaaggtcaccaagatattagttgccgctttgacattctttcttgggaaagatgaagatgaaaaacaggacagtgactccgaatctgaggatgatggaccaacagcaagagacctgctagtacaatatgctacagggaagaaaagttccaaaaacaagaaaaagttggaaaaggcaatgaaagtgctcaagaaacaaaaaagaaga

SEQ ID NO: 45337 - DNA, 399 bp, Homo Sapiens
  misc_feature (278)..(278): n is a, c, g, or t
ggacgacaaacacgagacgccactgtggaatgagcaacttcggagcacggggtgacttgcttgggaccgtgcccacgtgacagccccttatgcagaggaggaaagagaagccccgagtgggaggggaacctgtccaaagtcacacggtgtgtgggtgacacagctggggtgagtcgaggctggcccctgaggcccatgctccctgaacgctggagaccactgtcggctagcagcggctctcagggaaggcctggtctccaccctcccagcctagcctngcggaccctcgtcctccccacatcggacctgctcacctgcctggaccctgggctgccagatgcaggaagcatcaaaccccccagcctcgtgggtgcggggcagggcgcaggcagcacagct

SEQ ID NO: 45338 - DNA, 513 bp, Homo Sapiens
ggcacgagaagatctatgaaaatgtgttttgaccaaacttagtattaggcaggtacacagataagattttccattcttaacattctcactgtaatgcacgacatttgaagcacctggatgtgctatcaatcaggtgggaaatttagcattatatattggaagcattgagaaacattggtctttcatttctatttttttttcccctcctttcctcctcctgccccacaatatattattcatctggttttaatgctacataaatatgcattgcctcatgcctgtttgtgttggatgccttgtgctaagctgtaacaaaatgttgcttcttttgctgtctgtatacagctgcttgctttaaaatagtagattctgaaatagctttccttgcatgtctaaaataaaagtattgcatgtaaaaaaaaaaaaaaaaaacttgaggggggggccccggtccccaattcgccctatagtgagtccgattacaattcacctggcccccggtttaccaacgtc

SEQ ID NO: 45339 - DNA, 475 bp, Homo Sapiens
gacttatgggccgaggctgttctgagcctgggaagatgtacctatgtcaagagaagggatgaggccaaggctgccttcaattagaagcagccgcccacagagacaggcactgtgtgcctggcagcaggacttcctacccagaggaggttcgagctaggatcccactgcccccgcctctcagcacagggcaggggctgcaggtccccagtggacatcagagtcaaaagcactggcaaagggtacccctgcaaacaactgtggtgggggctggcagcagaccccccacctggcagggcttctaatgctcagggttctggagggctctgtccttccggcaaggagaggcacacatgtgtgcccagccgtgtgtgtgcgtgtgcttgtgtgtgtgcactgctgtgtgtgtgtgcacgcacaggaagcctttccacatatcacctcatttctaagaaataaactacaaggtgccaagaag

SEQ ID NO: 45340 - DNA, 493 bp, Homo Sapiens
ttttttttttttttttttaaagaaagaagcttcatcacagatactttccagtttctcttttatacttttttgaaagattactttttaggaacatttggtatgatatgcataaaattatttatccatttatgggcaaaatgatacaagtagcatcttgattgaacatcatttacctcagatattcaaccagcagtacgttttttatgcagtctcaacccatatcccatttgttacctctcagaatattggtaagcagttattttcgctttactctgtatttcttgtgttttgggcacaggttattgtactactgtcaaatcgtacttgctattttttctgcaagtatttaacagaaagcttaaaatccccataaaaccccaccttggataagtgattgttaaatattgtacaaataaaatgtatgctatccccattccatccccaagttaaataaaaaaatgaatacggaaaaaaaaaaaaaaaaacctcgtgc

SEQ ID NO: 45341 - DNA, 698 bp, Homo Sapiens
tttctgcattgattaaaattcctggagtttgggacccttttgtgaagagttatgtagaaatgctggaattctatggggatcgagatggagcccaagaggtactcaccaattatgcatatgatgaaaagtttccatcaaatccaaatgcccatatctacttatacaactttctaaagagacagaaggcaccaagatcaaaattgataagtgtgcttaagattttgtatcagattgtaccatctcataaattgatgttggaattccatacattacttagaaaatcagaaaaagaagaacaccgtaaactggggttggaggtattatttggagtcttagattttgccggatgcactaagaatataactgcttggaaatacttggcaaaatatctgaaaaatatcttaatgggaaaccaccttgcgtgggttcaagaagagtggaactccaggaaaaactggtggccaggctttcatttcagctacttttgggcaaaaagtgattggaaggaagatacagctttggcctgtgagaaagcttttgtggctggtttactgttaggaaaaggttgtagatatttccggtatattttaaagcaagatcaccaaatcttagggaagaaaattaagcggatgaagagatctgtgaaaaaatacagtattgtaaatccaagactctgatactgaattttagttatttca

SEQ ID NO: 45342 - DNA, 733 bp, Homo Sapiens
agcgacagggtctttaaaggaaatctcaaggaaggcatcatgttctgggtgtgctccagggatgctgagtaagaaaagaccagcctttctgtgtgtgtctttactctgccaagaaagaagggtgttttgtaggaaagtcaaggtgagaggaggtgcccaggacttggctcctttctttgaagggtgacggtgtaaattctccatgctggggatcctactgatggatggaggcatgtcgatctcatcatttcacagagtggggagctatggccacaacgtgcctatcacacaagttcagcctcacgtcagctggacaccagctgttctgacacttgtcagcacatggggcacccggaagttcatggtgttctgcaaagaacgccacaaaacagtgagctcaacttcttgaaagtcataatgtgttgctaagtccgatcccagatcctaaaaataatatgaggtagtggccattgaacagaaaaaatttacatcttaaacttgaagataagtacaagtgtacctttttctaccactgttgttcagttttattatattgacaagcacctctgcccaccctgtggggtaaaactgtttgaaagtgtctatgaaagttttatataaatattggttgatcaaatgtacaaaatatgcatgatggcaccatatcgtgtataatagtgacaaatacagtctatgtgggtggagaaaccaaaaaaaaaaaaactctccaggc

SEQ ID NO: 45343 - DNA, 502 bp, Homo Sapiens
ctgggaacaaggtgacctggagcgcacggtgctgcaacagaatcccattcccatgatggacagaaacaaagcagatgaactccctaagcttcaagtcggcttcattgactttgtttgcaccttcgtctacaaggaattctcccgtttccacgaggagatcaccccaatgttggacgggatcaccaacaatcgcaaggagtggaaggcgcttgctgatgagtacgatgccaagatgaaggtgcaggaggagaagaagcagaaacagcagtcggccaagtcagcagccgcaggaaatcagccggggggaaaccccagcccagggggtgcaactacatccaagtcctgctgcatccagtaacaccactggggatgttgctgggctggacggcaccaccctttcctgggaagagattgactcaagccagtggaagaccacacaccttgagaagtagaagagtcataggatttgaaagctgttagagatttagcttccaggactgtt

SEQ ID NO: 45344 - DNA, 589 bp, Homo Sapiens
tcagtgtataagacacatgcagggtgaagtgtacagagttttgtaacaaatgactggtcctaatctgtaaatgagaaaggtatatatactatgttaatgtctgactgttaattcttaagcaagaaactttttttgatgaaaacaagtcagatctacacagtcacacaattattttttgttgtgttcactacattgtgcaattgatattgcctgctttgagcagtttggtcaacttaccaacttccccccaaaaaagggaacataaaagagcccatctttgtcagtttacaccaatagtttcttgttaatccttctttcctggatatataaggctggtggtaacttttgaattatatggttgatgtggaaaattggcagtgtaacatttctagatacttttcattacctttttattctggtatataggctaaccactttaaagctattcttatgctgtaacagttagcatggcttcacactgtttgtgtagccaagaggacagaattacatgaatgacagtgcccagagtgacagctgtatattgctcagagcttttatttcttatacctagaataaatataaaatgggg

SEQ ID NO: 45345 - DNA, 917 bp, Homo Sapiens
  misc_feature (732)..(732): n is a, c, g, or t
  misc_feature (785)..(785): n is a, c, g, or t
  misc_feature (871)..(871): n is a, c, g, or t
gaacagttagagtaaaaacacactgttgatctggacaaaagaagaaaaattaccctttttgcttgtgttgtgacaacttcatttaatatggtttaaagatttatgagactgtcagctaaaagtcttttcacaagaatgtcaacagagaatggcatctcaaaatatatatatttctttgcacaatttgtgaaaccttataagccattttccccaggtacaatgtagttcctgctgatagaaaggaaatattttgtcaagagctttcatttaaaagctactacctccacaatcacccccaaacccagaaaatccccactggctcttgccagtctggttttcgtattgcagttattccaattgtatttgatctccctgataacgtattttcatgggtttgggtagaagatgctaatcagattagaagcaggaatagttatttgctgtctgtgaaattgagccttttggtgcgccacgtggtgccagatcaacacttctatccctctgcactgaccacgttgtgaactgggagaccaaatgcaagccatttcatggacatagcaatatacaaccaaactctgttccttggagttatattgtaaactcttgcaggtgggagagcagctcacctccttagctctgtttgccagctcttacagggtaaaataaacctggcaatttatcctcagtcctagtttgtggattaatggtgctatcttaagcactggcatttgngcaaaacatgactgtgttctgtgggagaatcccaaggcattattcactctagntgagatagaatttgggtggctaaacagggtgtgtggtacccaaaagaataaaatgttacatggtccttttagtccctggaacaggntctagccttgggcagaagccaggggagccacctaaagccaaactcc

SEQ ID NO: 45346 - DNA, 509 bp, Homo Sapiens
tttttaaaaagccacctcctcatgcctgtccaaaatgaaccacgcaactggttacctttctctgcctaccttttgggctggggaagaggggcacctttctcatcactctcagggaagtcctgaggaactgtgcaagccaggaagcatgagtcgctgaattggtgatggaggggtgtccacttttttctagttcctcagctgcttctggagcagtgttcacaacgggaatgtttttactgtccttggtaggctacaggttcacagcttcaaatcaaggcctccaaggattttattctcttacatcacagttttgacaagtatgcttttaaaaaacaacatttgcaaaactggtctttaagcgacgtgagtcagaggtaacaaaggcatatatataccgaacaaaggtgctccggtgcagtggagagaacagtattagtgtcgcaagcacaggagtgcagacagccccgccttcatcgtgatgcctgcagcacaccacgattatcatgaga

SEQ ID NO: 45347 - DNA, 1460 bp, Homo Sapiens
cacaagctccggtagcccatggagccctggcctctcctcctgctctttagcctttgctcagctggcctcgtcctgggctccgaacatgagacccgtctggtggcaaagctatttaaagactacagcagcgtggtgcggccagtggaagaccaccgccaggtcgtggaggtcaccgtgggcctgcagctgatacagctcatcaatgtggatgaagtaaatcagatcgtgacaaccaatgtgcgtctgaaacagaactgcagcatgaagctgggcacctggacctacgacggctctgtcgtggccatcaacccggaaagcgaccagccagacctgagcaacttcatggagagcggggagtgggtgatcaaggagtcccggggctggaagcactccgtgacctattcctgctgccccgacaccccctacctggacatcacctaccacttcgtcatgcagcgcctgcccctctacttcatcgtcaacgtcatcatcccctgcctgctcttctccttcttaactggcctggtattctacctgcccacagactcaggggagaagatgactctgagcatctctgtcttactgtctttgactgtgttccttctggtcatcgtggagctgatcccctccacgtccagtgctgtgcccttgattggaaaatacatgctgttcaccatggtgttcgtcattgcctccatcatcatcactgtcatcgtcatcaacacacaccaccgctcacccagcacccatgtcatgcccaactgggtgcggaaggtttttatcgacactatcccaaatatcatgtttttctccacaatgaaaagaccatccagagaaaagcaagacaaaaagatttttacagaagacattgatatctctgacatttctggaaagccagggcctccacccatgggcttccactctcccctgatcaaacaccccgaggtgaaaagtgccatcgagggcatcaagtacatcgcagagaccatgaagtcagaccaggagtctaacaatgcggcggcagagtggaagtacgttgcaatggtgatggaccacatactcctcggagtcttcatgcttgtttgcatcatcggaaccctagccgtgtttgcaggtcgactcattgaattaaatcagcaaggatgagcagaaaatgagctgagcttagctctgccctggaacctaccagagcagagaagggcaggagaggaagatttgtctacttgctccactcgcacttatcaaacgtgttatattccatacttattattgatgataagatttacctttatgtaagtttatggccttgaagtgttttcatattgcttctccctttagttctgctgtctccctgaagagtgaaccctctttagtaaatgaaactaatcactaaaaaaagggtcatttccagtgtctggaagagtttttgccaggataaccgaggtttctgttgcattgca

SEQ ID NO: 45348 - DNA, 536 bp, Homo Sapiens
ttttaatgtatcttttattagcttgcaacaaggctttgttttcttggggagggaaagatctgttccatttcacttactgttctgaggagggtttcaaggttctgtgtttaaagtcaggatttacctgtctgtagaacataaagtgaacaaagtttgaatagtttagagtaagctagccttttgcacatttacattgacatgtttcttcttgaatttggactgttgcagcatatctatgatatggtattcagtgtcattagtgaaatcttatttttgtttctgtaaaaaaaaaaatacatatatatatttatgcattgtgaaaaatgcagtccatgatgtaaaattgtacatattccagaatccctaacaacctgtactaaatatatgtacaaagaactatgctgtcttatttatgttttgtttacataatgtatagttttttaagtattttagtaattttggaccagtgaactgttagcaacaatgcagaagaatctgcatgtaataaactgagttgctgtaaaaaaaaaaaaaaa

SEQ ID NO: 45349 - DNA, 556 bp, Homo Sapiens
gataaaactcagccagtctcattctatatcccaaacgtactgaatgaaactgattttggttccacaagcagtgttgggtgttgccttcctgaaggtgaccaagcttccaaagctcgtcccactggcctctgtacatttccctgtggttctccgtccttccctggcgagggagctgggactgaagctttcccgctgtttccctgcctgcaaaagcagccccaagagctgcgcattggcttccctcagcaatctgtcctgtctgtgctcccattcggtccacatagctttctttgcctctctgaggcagacaggaagtgtctaattacgattttgtggcctgggtttcgttgcataccacagattgtctatgtaacatgtagcgcacacctctcttggtgctatttcattcctgctgtacgagaatgacaaaaatattcatgtatagccaattgattgtgacgtgcttgtggtctgtgcttgctcagaaaaacaaacaaacaaacagtttttccaattataaataaatgctaaagacgaaaacaaccacacaaacaac

SEQ ID NO: 45350 - DNA, 533 bp, Homo Sapiens
aaatatgttttctacaaagacttacgtcatttaatgagcctggggttctggtgttagaatatttttaagtaggctttactgagagaaactaaatattggcatacgttatcagcaacttcccctgttcaatagtatgggaaaaataagatgactgggaaaaagacacacccacaccgtagaacatatattaatctactggcgaatgggaaaggagaccattttcttagaaagcaaataaacttgatttttttaaatctaaaatttacattaatgagtgcaaaataacacataaaatgaaaattcacacatcacatttttctggaaaacagacggattttacttctggagacatggcatacggttactgacttatgagctaccaaaactaaattctttctctgctattaactggctagaagacattcatctatttttcaaatgttctttcaaaacatttttataagtaatgtttgtatctatttcatgctttactgtctatatactaataaagaaatgttttaatactgaaaaaa

SEQ ID NO: 45351 - DNA, 588 bp, Homo Sapiens
ggtgacaatcgagcagcagaagaatggtgtgcctaccctttaatgctgcagtttaagagaacttgtattgtgtcatttcagattgtaggctgagagttgtaaatagtgaaaatttgagtacttctattatttgttttggttagaaagtgaatttaaaaaacaaaccaaactctaaactttctcagattaaaagtcctgagacctgaagattgtaatattcatgtctgtgaagcttttaaacattacacttgagatcagtcatgacttgatattcaggtaaattttcttttccaagaagcttttgaataagcatatttcctccaaaggtctctctctttctctctctttttttgagtgtagattattttaaagcactaattgcattacattggtaactgcaatataaaatagccattattgttttgtgaagcatggttgaaattagctagtggtcccttttgaatttcatgagcctctcaaaaaagaaaaacttaaaaaaaaaaaaaaaaaaaacaaaaagctgctggaatatttcaaaagatatatattttaccttattataggttttgtaaagttagtttgtaatat

SEQ ID NO: 45352 - DNA, 505 bp, Homo Sapiens
  misc_feature (489)..(489): n is a, c, g, or t
gttctgcctacacctgcaagaactgagttgatctgtacatcaacatttctgatgtttctttggtagttgctgctggagtcagaagttaggaacaaatctaatggcctttgtaatgtcctctgtcatttcacggaggaatgacttagaggaacaaagctttcctgtgatttctttcttcaacagatggctaatggcacagcattgcagttagaatcctgtttaagatactaggagcacgtcctggactaaaaatttctacataagctttagcaacaaccttatagcttcctttgacttttttgtagagcttacagaatgtatggctgcctaagtaatagtctctgaattaatgggtaaaaaatatattatgagttttttatcctcacgtatggtgctaggctatactggatttgggctaacaaaagcttgttaacttttttttgtctcattgacagaagtattttatatctcatattttacattacatangtgtgtgtgtgtgtat

SEQ ID NO: 45353 - DNA, 586 bp, Homo Sapiens
  misc_feature (2)..(2): n is a, c, g, or t
  misc_feature (150)..(150): n is a, c, g, or t
  misc_feature (152)..(152): n is a, c, g, or t
  misc_feature (579)..(579): n is a, c, g, or t
cnaatccaagttaatctcaaaaacctccgaggacattgagcacaagcagattactgtaagggcactggtggcagattgtggtggagagagggctgagtgacccagagcaaagcctgcccgggttactcgctgccacttcaggagagggancntatcagctctcattaccttttgtcatgaggcagttcataaattaaatatgatatcatgcattatctcaaaatatttctatattaattagataattcacgatgtaaaacgtgttcatgcagaagcaaaggcggatgtaatagtcaagtatcagggaaaaacccctttaggatacccagacattaaaaatgtaaaaagtagcttataagaaatgtggattatcagatttttactatatataggttgtgtttaatagtaatttctgacacctgcacatagatgaagaaaggcagttgttaccacttttcaccattcaaaaaatgggcttgtctcttagagtattggttaatgctttgcttatttgttaatgaagacagcattttaattttaaagcctccctttgtaggactgatggcccgggcagaatcncatttaa

SEQ ID NO: 45354 - DNA, 538 bp, Homo Sapiens
tcgcgacccgacatggagcgtccccgcagtccccaatgctcggccccggcctctgcctcagcttcggttaccctggcgcagctcctgcagctggtccagcagggccaggaactcccgggcctggagaaacgccacatcgcggcgatccacggcgaacccacagcgtcccggctgccgcggaggcccaagccctgggaggccgcggctttggctgagtcccttccccctccgaccctcaggataggaacggccccggcggagcctggcttggttgaggcagcgactgcgccttcttcatggcatacagtgggcccctgaggttccaggtcctttgcggcggcgatctggagggcgtggctacaggacccgggatgccattcagttactcatcttttatgctttcgtcctgacctgtctcaactagacttgctcctgcaaccaccatgggggttttgcatttacatttgtggaccatgttacagttaagaaaaatcctgtttcagtccttatatgtaaaaaaatgttttatgatgtaaaa

SEQ ID NO: 45355 - DNA, 2260 bp, Homo Sapiens
gcttgacgcacggagcttgtctgcgccggccagcactggcttctctggactttgcacacctccaggagaagaacccagacaattgatcagttctaaaaaaccatgccccacttgttggtgactttcagggatgtggccattgacttctctcaggaggaatgggaatgcctggaccctgctcagagggacttgtacaggatgtgatgttggagaactacagcaacctgtatctcattggacttggaatccattgtgtgaccaaaaagttatctccaggaaaaggaaatttatgaaatggaatcactccagtgggagaatatggggaaacgtatcaaccatcacctttcaatacaatggtcttggagacaatatggagtgcaaaggcaacttagagggtcaagtaagcaagtcagaagggctttacatgtgtgtcaaaattacctgtgaagaaaaggccactgaaagtcattcaacctcttctacttttcatcggataattcctaccaaggaaaaattgtcaaatgtaaggaatgcagacaaggtttcagctacctgtcatgccttattcaacatgaggaaaatcataatatataaaaatgctctgaagttaataaacacaggaatacctttagcaaaaagccaagctatatttaacatcagagaattcagactgggtgagaaaccttatgagtgtatggaatgtggaaaggcctttggtcgtacttctgatctcattcaacatcagaaaattcatactaatgaaaaaccttatcagtgtaacgcatgtgggaaagcttttattcgtggttcacagctcactgaacatcagagagttcatacaggagagaaaccatatgattgtaagaaatgtggaaaagcctttagttattgtcacaatatactcttcatcagagaattcatagtggtgaaaaaccctatgaatgtaagattgtgggaaggcctttatcttggctctcaacttacttaccatcagagaattcatagtggtgagaaaccttatgagtgtaaggaatgtggaaaggcctttattcttggttcacaccttacataccatcagagagttcatactggtgaaaagccttacatatgtaaagaatgtgggaaagcctttttatgtgcctcccaactgaatgaacatcagagaattcatacaggagagaaaccctatgaatgtaaagaatgcgggaagaccttttttcgtggctcacaacttacttaccacctgagagttcattcaggtgagagaccttataaatgcaaagaatgtgggaaagcctttatttctaattctaatcttattcaacatcaaagaattcataccggagagaagccctacaaatgtaaggaatgtggaaaggcctttatttgtggcaaacaacttagtgaacatcagagaattcatacaggtgagaaaccctttgaatgtaaggaatgtggaaaggcctttattcgtgttgcatatcttactcaacatgagaaattcatggtgagaaacattatgaatgtaaggaatgtgggaagacctttgtacgtgctactcaacttacattatcatcaaagaattcatacaggtgaaaagccctacaaatgtaaggaatgtgacaaggcctttatttatggctcacaatacttagtgaacatcagagaattcacagaggtgaaaaaccttatgaatgtaaacagtgtggaaggcttttattcgtggctcacaccttacgaacatctgagaactcatactggagagaaaccctatgaatgtaaggaatgtgggagggcctttagtcgtggctcagaacatactctgcatcaaaggatccatactggtgagaaaccctatacatgtgtccagtgtggtaaagactttagatgtccttcacaacttactcaacatacaaggcttcataattgagaaagccttgaatgtgattaaatttaagaaaatcttcatctatttcatatctataatgaatgtagaacatcttgcttctgctcagaactgctcattcttagaaggcctacttaacatggatgcagaataatttcagaaaccccttaaataattccttaacatctctataaacgctagaatataatgctgaattatatcctttattaagcatcatctccatttcaccatatcctaactgaaaccctatatatttcttgtgtgttcttttctatttgtaaatactgtaattgtattacatgactaaattatattaatactataattccccgg

SEQ ID NO: 45356 - DNA, 611 bp, Homo Sapiens
cgcgtccggaaagagcaagtgggttaaggaagcctgtgggggacctggtggatggagttgaccaacatcgctgggtggctacggccctccttaggaagcccagaaggacctttattattaaaataatcattttgaaccctgctctatcccctgccctcttccagccccacccctccctggtcttgaaagaagactaatcagtgggcacaccaagggccctgaggggcagggagatgccaccatgcttctctgtcaccgtaagaaggctgaccagccacgcccacctcctctgtctgactgagttccttcctgtggccacagggaggggctggtccttccccttggtgctggctctctgtcacaatgcctcaaaagacatggaacccaggcctacaaccgtcccaactgctaattcttttcctttcattttgctttctgaaagcagtttgttatactattcataacattgtagagtttaatttcatgtcattttggatcttatataaaaatgtgaggatttggatttttaaaaagaatgactccattttaggtagccacttttgatgttaatatatagtgagtccaatgtatgctttaaaagtaagacattg

SEQ ID NO: 45357 - DNA, 1230 bp, Homo Sapiens
  misc_feature (518)..(519): n is a, c, g, or t
  misc_feature (525)..(526): n is a, c, g, or t
  misc_feature (563)..(563): n is a, c, g, or t
  misc_feature (566)..(566): n is a, c, g, or t
  misc_feature (594)..(594): n is a, c, g, or t
agttattacttataatcagtttttttattgttactatggcaatattttatacacaagaatggctgaggttaggaatttgtgccctgaaaattgtatcaacatatcaaatatgaagtaaataacaatttcttgctttaaatataacaaagatgtgggaagaagtggtaggcaagagtctctgtgttaccatgggaacgattaagttttccaaggtgcaaaccagcctcattccagcttcagggtcaatgacttactagctcagagggaaatgtataaatatttaagtacatacctactatctgtacagagtgactctcattacccagagaactgctgtaaaatattatttattcacagattacacaaaaccaatctaaattagtacttttatacattctatttggggagtacttaaggtgtatgagcaaacaaattgttatccaggtcactccagaactgttgtatacagattaagaattgatgttggatactaattaaaatcattaaagcaaaatcannaaaccnnaaaaaaaaaaaaaaaaaaaaaaccaaacacaaaaggnccnaaccctctaaaaaaaccctcccagggcncaaacccccacgcgcaaccccaactcccttggcgcaaacgggcttcctatccccccataccgcctcgttggcccccgggcccctggttccttcgttttccccaatgggccgctgacctgggtcacaacgcgcccccccttttgtggacaaccccggggaacccttacccattaccttcccgccgtccggagacaccccaattgggccgcggctctccctttcttccaaattctaaaggccttctagagggcaaacgcataacactttcttttcattctcgttaaaacggccattttcaccctcccgtcgtgcccgtgcggtttgtctccgccttgcaccatctcccttgcctttacctgggacaaacggctttttatcgcgacaaaaaaaattttcccattttgtcgacgcgaggtagaattatctcctttgcccctatttgtgcgtagttcttatccttttgcccgagcgcgcccaacagggagatccccctttttacaagggacccccccgtaccctctcttttaaacaaagatcccgcgccccccatgcgcccccgaggatttcacccgtccttttccccacacaattttgcgccggtaagcgcgtcatataacttctcttcccctcggacca

SEQ ID NO: 45358 - DNA, 729 bp, Homo Sapiens
ccgtcgacccacgcgtccgcagaagtactaccccttctgagtagtactattatttcctatgccaattttttttaagtctctgatgctgccctttttaaatttttgtcttattttttagcctctttagtattagggggtgaggtgacattcctagactctacagtagcagtttggcatgttagtgacaggaaattgtgattccctatctccccctcctcctaccttttctgcttttgtgattccattgttcctatctcattgaggctttcccaggcattcgaatttagttagtaggtcatttctaatctctgggccttgtcttttctctctccgttcccctccttccctaccacatattttttgtttattctgaggtggtttgtttctgaaagttaatctaggtcaccttctatatcctgtgctttctagttggctttagacatcttgttctagcaacaatgatggtagcagctctctccctgaccttgccccatgtgctctccttctgtcaaggccatttgtgtgtgtactgcggcaggtgtgtgtgtggggggatgcgcccagactgttctcacaatgtcctcagtttttcaggttgtctgacagctttatgtacagcgtatttttagaaaaacttaaatatacttctttatttagggttttattctgatgagcaaagtttgtgtgtatatgtgtgtatgagcatttgtatgtatatatacttataca

SEQ ID NO: 45359 - DNA, 583 bp, Homo Sapiens
tcttaaacaaaacaaaactttctaagtacagtcattctctaggatttgggaagctccttgcacttggaacagggctcaggtgggtggagcagtaaggcactacccagagagcttgctgctgcggccctgtcctgcggcctcaaagttcttctttactatatataacgtgcggtcatacctttcttcgttgtggtggggatggaagagcagagggagcatggcccaggggtgttgaggccagcggtgagagccgtgttagccaagacatggaactgtgttctcaagggttatgtggggcgtgggctctccatagtgtgtatgaaaagcttgttgactctagcggctcagagaggactttgctgggtttctttctgtgaatatctccgtgctgaccatgctggaattggatgattctgcaattcgggacctactgcaggggtccgtttagtaacgtcttgtctgtgatctttgttcttgacctctagaccccaagatgtgaacagtgcacgtgttaatgtcatctttgctcatgtgttataagccccaagttgctgtatattttcacaagtatgtctacacactg

SEQ ID NO: 45360 - DNA, 777 bp, Homo Sapiens
gcacccgcccgagggatggtgcccctagggtccctcgcgcccaaaagattgaacttaaatgcccccctcccaacagcgctttaaaagcgacctctcttgaggtaggagaggcgggagaactgaagtttccgcccccgccccacagggcaaggacacagcgcggttttttccacgcagcacccttctcggagacccattgcgatggccgctccgtgttcctcggtgggccagagctgaaccttgaggggctaggttcagctttctcgcgccctcccccatgggggtgagaccctcgcagacctaagccctgccccgggatgcaccggttatttgggggggcgtgagacccagtgcactccggtcccaaatgtagcaggtgtaaccgtaacccaaccccaacccgtttcccggttcaggaccactttttgtaatacttttgtaatctattcctgtaaataagagttgctttgccagagcaggagcccctggggctgtatttatctctgaggcatggtgtgtggtgctacagggaatttgtacgtttataccgcaggcgggcgagccgcgggcgctcgctcaggtgatcaacaataccaggcgctaatttactaaaacacacacacacaacacacaacaaacaaaaacccgccgacgccactcctacccacgcgccgccgaaaaaaagagggtccggcaacgggccccacggccacacagccggcaccctgaacccaggtttcctggcaacacaggctgacaaacacgcgcgggtcccca

SEQ ID NO: 45361 - DNA, 440 bp, Homo Sapiens
caaaaagaagaatgagactctttaaaaattatgcacatacacatgcacacatatatgtgtgcgtgtgtatatatatatatatgtgtgtgtgtgtgtgtagttcatcagccagctacacatgaggaccaaaatgcttcagtctaaaatggaagatacacatttttttccttcaaaatgcaagtgagaactgaagtagcttttttatggagttaaatgtaatctttctgtgtaccagtctttgttgtattttatatttcttaggacacagatttctagttgaccacttaacatttgtaactgatgatgtgttgaccttttttttttttttttgccaaactagagaaaatgtccatatacttttgctgtaaatgtgtttatatttatttgaaatgaaacaaatggtgaggaaacatccattatttgttctctattttaattgc

SEQ ID NO: 45362 - DNA, 583 bp, Homo Sapiens
gttactctagaagaaccaatagaaatcaactggtcatgaagatcaccatcaattttagttgtcaatgggaaaaaacaccaggatttaagtttcacagcacttacaattttccctcttcacttggttcttgtactctacaaaatatagctttcataacatcgaaaagttattttgtagcgtacatcaatgataatgctaattttattatagtaatgtgacttggattcaattttaaggcatatttaacaaaatttgaatagccctatttatccttgttaagtatcagctacaattgtaaactagttactaaacatgtatgtaaatagctaagatataatttaaacgtgatttttaaattaaataaaatttttatgtaattatatatactatatttttctcaatgtttagcagatttaagatatgtaacaacaattatttgaagatttaattacttcttagtatgtgcatttaattagaaaaagagaataaaaaatgttagtgtttcaaaaaaaaaaatcatttttaaacatccctccaaaattaaaaacaaaaatcttactgtgtaaatctcaaaaaaacttcg

SEQ ID NO: 45363 - DNA, 989 bp, Homo Sapiens
atccctccggccggagctggtttttttgccagccaccgcgaggccggctgagttaccggcatccccgcagccacctcctctcccgacctgtgatacaaaagatcttccgggggctgcacctgcctgcctttgcctaaggcggatttgaataatcttatcttggctttggatcttagaagagaatcactaaccagagacgagactcagtgagtgagcaggtgttttggacaatggactggttgagcccatccctattataaaaatgtctcagagcaaccgggagctggtggttgactttctctcctacaagctttcccagaaaggatacagctggagtcagtttagtgatgtggaagagaacaggactgaggccccagaagggactgaatcggagatggagacccccagtgccatcaatggcaacccatcctggcacctggcagacagccccgcggtgaatggagccactggccacagcagcagtttggatgcccgggaggtgatccccatggcagcagtaaagcaagcgctgagggaggcaggcgacgagtttgaactgcggtaccggcgggcattcagtgacctgacatcccagctccacatcaccccagggacagcatatcagagctttgaacaggtagtgaatgaactcttccgggatggggtaaactggggtcgcattgtggcctttttctccttcggcggggcactgtgcgtggaaagcgtagacaaggagatgcaggtattggtgagtcggatcgcagcttggatggccacttacctgaatgaccacctagagccttggatccaggagaacggcggctgggatacttttgtggaactctatgggaacaatgcagcagccgagagccgaaagggccaggaacgcttcaaccgctggttcctgacgggcatgactgtggccggcgtggttctgctgggctcactcttcagtcggaaatgaccagacactgaccatccactcthcc

SEQ ID NO: 45364 - DNA, 657 bp, Homo Sapiens
ttttttttttttttttttgaatttaagactttactttattcagcaaaatcatttatttacacaatggggaatgctggtttgattttgtcaatgaaataaaaacaaaatgaacagagacaatactgaactgtatatatactttgtatcagagttgaccaactgtttccttacctgtatcaggaacatcaagagcaacagtatcacaaggacactggtttaacaatacaccacataggtccagtaataccctgggaatttcccaatgcaatcaccaactttttctttttttataaatatataaaaaaacaaaaagtcagcaaaaccagcattatgatgtagcaaacagagtataactctgaagtcagtggggtcagtaaaagccttatcagaccatccatagttttacaatgtgatctgctcttcctcagaccactaatatagaatccaaacaggtgaaaaatacgtcactccttagaatacaacaatgatctgataaggatttgacttagtggaaggaaaaaaaaaaaaaaagggaattgcagagcatagcccctattagaacaagctaactttccagattttacaaattaaaaaaacaaaaacaaaaacaaaaaaccacttcaacatgaagctaccatacaaagtttttccattttt

SEQ ID NO: 45365 - DNA, 722 bp, Homo Sapiens
  misc_feature (696)..(696): n is a, c, g, or t
aaaatttataccattctcaagagttacatcagatcctcaatcaaatgatatcatgctggttaagcttcaaacagccgcaaaactcaataaacatgtcaagatgctccacataagatccaaaacctctcttagatctggaaccaaatgcaaggttacctggctggggagccaccgatccagattcattaagaccttctgacaccctgcgagaagtcactgttactgtcctaagtcgaaaactttgcaacagccaaagttactacaacggcgacccttttatcaccaaagacatggtctgtgcaggagatgccaaaggccagaaggattcctgtaagggtgactcagggggccccttgatctgtaaaggtgtcttccacgctatagtctctggaggtcatgaatgtggtgttgccacaaagcctggaatctacaccctgttaaccaagaaataccagacttggatcaaaagcaaccttgtcccgcctcatacaaattaagttacaaataattttattggatgcacttgcttcttttttcctaatatgctcgcaggttagagttgggtgtaagtaaagcagagcacatatggggtccatttttgcacttgtaagtcattttattaaggaatcaagttctttttcacttgtatcactgatgtatttctaccatgctggttttattctaaataaaatttanaagactctctgaaaaaaaaaaaaaaa

SEQ ID NO: 45366 - DNA, 1035 bp, Homo Sapiens
cgggatcgtgagcgcgccgggggcggcggcctcgcctcgtctctctctctgcgcctgggctcgggtgggtgacgccgagagccagagagatgtcggatttcgacagtaacccgtttgccgacccggatctcaacaatcccttcaaggatccatcagttacacaagtgacaagaaatgttccaccaggacttgatgaatatmatccattctcggattctagaacacctccaccaggcggtgtgaagatgcctaatgtacccaatacacaaccagcaataatgamaccaacagaggaacatccagcttatacacagattgcaaaggaacatgcattggcccaagctgaacttcttaagcgccaggmagaactagaaagamaagccgcagaattagatcgtcgggaacgagaaatgcaaaacctcagtcaacatggtagaaamcmtaattggccacctcttcctagcaattttcctgtcggaccttgtttctatcaggatttttctgtagacattcctgtagaattccaaaagacagtaaagcttatgtactacttgtggatgttccatgcagtaacactgtttctaaatatcttcggatgcttggcttggttttgtgttgattctgcaagagcggttgattttggattgagtatcctgtggttcttgctttttactccttgttcatttgtctgttggtacagaccactttatggagctttcaggagtgacagttcatttagattctttgtattcttcttcgtctatatttgtcagtttgctgtacatgtactccaagctgcaggatttcataactggggcaattgtggttggatttcatcccttactggtctcaaccaaaatattcctgttggaatcatgatgataatcatagcagcacttttcacagcatcagcagtcatmtmamtagttatgttcaaaaaagtacatggactatatcgcacaamaggtgctagttttgagaaggcccamcaggagtttgcmacaggtgtgatgtccamcaaactgtccagaccgc

SEQ ID NO: 45367 - DNA, 755 bp, Homo Sapiens
cctgtctcaaaaaaaaaattacatataagcccggtttaaagagaggataatatgcaaccaccctagttgaaacagagtgtatcacttctttctcaccctaaatttaatgcctagtttgaaaatcagtagacaataataaagttgataagctttaggttggtaggaaagctatgtaatctatatagtgtactaaatccttatatgtttttggtaaaaaaagactttaatagctaatttggacttcagaaaatgggttaatttcacgagtgcatatcacttttgactatattagtcaagcatattattaaagtttaaaaaactctaaaacttctgtactgtttttttcttaagtgctctcttccttatttctacattactacattcacatttctgctgtcaataagccctaatggagtgataaactttaagctagtagatactgcaccatgtcttgtggtggtgttttcttaatgaaatggaagctgtacttcctgttgtttttaaatacttttgaaacagacagttcatgtaccccatcatttagagatgcagttgtgaatttccatggaacaaaggtgccaatttgtggatcgggaaaggagctgaagccccagtcaagactttgccatttggggtaatgcagcagattcctgtgtctgtatctttccagtgtgtgtgttactccatagtgttctgagcaccagaagggtcatgtaaatctgaagttgttatcacaggttttctatagtgacaaa

SEQ ID NO: 45368 - DNA, 969 bp, Homo Sapiens
gccccttgcagaaaaaatattacatgctaaataaatattctccatatttttgggggatgacattcagtgaattatttcagtggtgacccactgaaaattaataatggtacttatgattaaaaacgcatttaatactaactgcagtagttctttcaagaatctttagagataaggattgcacattggaaaagtaaaccatgtttcattcctttttccctatttatattgaaagaaataggccagcagagacttagggattttaaattggcttgctttttagctgtttcagtcaccagtgaagagcctatgtgcattttgtagtagataatgtaaaatttgtcatctttttcttttcttttttttagaatagctgatattttgataacaatctctaatttgcatgggcaccacatttcttatattaaaagaattagtgttttggcttctgtactgcttatggttgtaggattcaggggttaatggaatcacagaaatgatattctgcaagaatttcttttaaataaaaagtttgggggtgcaatataagaagtttatataatatgcagtacattatccaaaagagaaggtagttaatgcagtagaaagtagtggtaataattcctttttaacaacacatttcggtagtcatatagtaacattttgctatatgaaaactttggtatattctgtggttacactaacgatgcgtccggcagctctaaatgggcgatgtgtgctgatgtgacttttagccgcagcgtctcacagggctaacctaacaggtggccaacacgacttggcacgaacttaagggaaattgcctttaaaactttacagctcacatggatataacctctaaggaacgtgcgatcttgccctttttaaatcgcctaatgacccgtattacacatggtgaacagacgacatatacacaaattctcgcagcacataacagagtcatatagcacc

SEQ ID NO: 45369 - DNA, 590 bp, Homo Sapiens
  misc_feature (18)..(18): n is a, c, g, or t
agtacctaaacacacagnatttgttttattttagagcttcacaatttgagatctcaaaatacaaaacctaataaggctgaaacacagggtctatgaaggctaagaacccacattaattcaaaaagttgacacagctaaacatcttacaagcatgaggtgagaactgcagaaaccaaagctgtgctaacatctcacctctactgctttgatgtgatctagatgcacagttagcttcagtgtggcccgttatctaatagaaccatctttcaaggcttttcattagaaatgacaaaaagccagttgctctggctgtgtggcttcagaggcacatttccagttaatcagtacaaccaaagtcaaccaaatagttgactggtatttaatttattttaatttacttttattatagatctaggggggtacacacgtaggtttgatagatggatatattgagtaatgctggggtttaggcttctagtgaacccatcacccaaacagcaaacatagtacctagttcaaagactattatcttacttaggtagacgacacacgtttaaaatatatacctttaaattaaaaaaaaaaaaaaa

SEQ ID NO: 45370 - DNA, 1170 bp, Homo Sapiens
caacaacattacagtattattgggaaactatgcagagtgcacataaatgcaagtgacatcacattaatttgttttctttgttggccttatagaggatgaaccattagtgtctttcaggtttgatcctgtcttatatgtgacatcctcagcaacaagctaaaatgatctgaattataccaatagcggggctcaagcagcagtgatcaaaacataatatgtatgtggtaaaaaggaacacttgttcttcagtggttttgcctaggtccagtgtaattacttatcaaaacatgttttaagctacagcatctcctgttaaatttagaaatgtgaaacatggaagagttatcaacttggaatacaatactaaaactgaatataactgacccaaaactacctgtcaaaagcacagtaaagcttaacaggcataaaaactaaggggtaaaatccaactgctctgacataagagtgaaaaacagcaaatgcaaaccatcaggttaaagtgaatcacaaaacattaggcatgtagagcatgttttaaaaataggaaaatgacactgagctgtattaccaggaataatatttttaaaattccaggtatggccttctacatttaatagcaatggagagaaacaagcctatgggggaggtgcagaaaatgaatgggatctagaaagggagttgagtttggaagttaaggaagtcaaagaaacaaatacatccaaaatggatttagaatctctcctctaaatccatcctttccaaaaaatgtttcctatattgagagatttggtaaaaaaaaaaaattagctagtgacagtatgtaaaaatattaccttataaaataaagtagtatttaaatgtagatcagaaattatgctgtcaaagataaatctgctgactaggctgtagaatctgaaacttaaatgctactatcagtgatagaaggcagaaaagtgtctcaaaaacagaattgccatattagggctcaacattaatgaatctattaaggaacaagtacttatctgtttgtattgaagctactgaaaaacacatttgtatgtttaataagggtctaaatgtttttactggcggaaattctgcggataatttcagtattttaggggaaaacagtcttgaatttctagttcggtttctgggcccaaaccactt

SEQ ID NO: 45371 - DNA, 754 bp, Homo Sapiens
gactacacagtatgggtgctgcctctgatcatcgtctgcctctttgctttcctagtcgctcattgcttcctgtctatttatgaaatggtagtggatgtattattcttgtgttttgccattgatacaaaatacaatgatgggagccctggcagagaattctatatggataaagtgctgatggagtttgtggaaaacagtaggaaagcaatgaaagaagctggtaagggaggcgtcgctgattccagagagctaaagccgatgctgaagaaaaggtgactggtctcatgagccctgaagaatgaactcagaggaggttgtttacatgaggttctcccactcaccagctgttgagagtctgcgattatgaagagcaggatcttattacttcaatgaaagcatgtaacaagtttctcaaaccaccaacagccaagtggatttggtacagtgcggctgtctaataaataatcaaaaacaaaaagaagaaaagaagaaaaagactagagaaacaattgttggggcgcgctgggccccggaaaaaagtcttctaaaacccctcggtggggcggggggcgccagtgggctcgggaactgggcaaaagctggcccacaggagacccgggcgcctaaacagggggctggggttcccacccataataaaacgcgcggggggaaaccgagggtgtgtgagaacaacccaaggcgagccagaaggaaaacgggggcctcaacgggggccaaggaaccagataatacg

SEQ ID NO: 45372 - DNA, 773 bp, Homo Sapiens
  misc_feature (733)..(733): n is a, c, g, or t
tctagcgaggtgacagcgtagaaccaaaaacaaagtgggaattggccttgttgctgccgcttcatctccgcttcttgtgaaagatgtcatttgtgaggatgataagggaaaaatcatggaagaagtaatgagaacttatttaaaacaacaggaaaaactaaacttgattttgcaaaagaagcaacaacttcagatggaagtaaaaatgttgagtagttcaaaatctatgaaggaactcactgaagaacagcagaatttacagaaagagcttgaatctttgcagaatgaacatgctcaaagaatggaagaattttatgttgaacagaaagacttagagaaaaaattggagcagataatgaagcaaaaatgtacctgtgactcaaatttagaaaaagacaaagaggctgaatatgcaggacagttggcagaactgaggcagagattggaccatgctgaggccgataggcaagaactccaagatgaactcagacaggaacgggaagcaagacagaagttagagataatgataaaagagctaaagctgcaaattctgaatcatcaaagactgctaaagaatagaaactgttaaagagattcatctgtgtattactgacaaggtttttttttgtttgttgcttgctttggtaattgaattctgaagaatttatctgcatgacgataactaggcattctatccatttgtagatcagagaaagtgaagagattatatatntagtactttaaatttttacatttttccaaatgaaatgaaa

SEQ ID NO: 45373 - DNA, 813 bp, Homo Sapiens
  misc_feature (683)..(683): n is a, c, g, or t
  misc_feature (760)..(760): n is a, c, g, or t
  misc_feature (778)..(778): n is a, c, g, or t
ctcgtggaaaacttagtattttgacattctgatgcttcggaagtggtggctcctcctccttcacccctccgccacctgtgggcctcctctctgcatctcaagagaacaaccagatctttgggctcctggggtgtgtgccatgcaatttagacgaagtgctttgaaaatatgccattcagtctctgactaggaaaataagtctgacctgataggtccgatgtcatcagctcttcaacatgagacaaaagaggggattttatgttttgagtccttagaatgatataataattttctgaattgacatctggatgttgaaattaggatggtgcaaaaggggtccagggcctcaggctgggcgcagcagccagctcccaacgacgcagaagctgcttcaaaaccccctcaacaaagaggggcacatgcaagtcaccaaagtgggaagccttcaccaaggccacacccaaagtctactgattgtctgtccaaagttcgttgattcctggccatgaacaagcacaatagaaaaagacacagggtcctagtggctacaagtcaatgtgaattggcacatggtctagcagttttaaaatctgacagtagagtatggcaataggcaagggccaagaagtcctgagatgggaggtcagcgctctaactgggctcagtggaggtctgtgaccagngtctggacactagctacaggggaccgggcagaggattctgggcagaaggaaaatgtctaaaagtactttgggagggnaaaggacaggggccttanttaaataaagactgaaggataaaaaaaaaaaaaaa

SEQ ID NO: 45374 - DNA, 780 bp, Homo Sapiens
agcaataaactcaccaactacgtgtggtattttgaaggaatctgtttctcaggcatcatgatgcttatagtaacaacagttcttctggtactggagaataataacaactataaatgttgccagagtgaaaactgcagcaaaaaatatgtgacactgctgtcaattatcttttcttccctcggaattgctttttctggatactgcctggtcatctctgccttgggtcttgtccaagggccatattgccgcacccttgatggctgggagtatgcttttgaaggcactgctggacgtttccttacagattctagcatatggattcagtgcctggaacctgcacatgttgtggagtggaacatcattttattttccattctcataaccctcagtgggcttcaagtgatcatctgcctcatcagagtagtcatgcaactatccaagatactgtgtggaagctattcagtgatcttccagcctggaatcatttgaataaggacaaaatgttttccattatcaagacatggccatctatctaaatattatatcaactgtgtagacttgagggcaatattgaaatgatggtgctttctgcatttggtgtttatttgtaaaaaatttgcagtcctcactgcacatgcaagtataccacccttccatttagtatgttttttaagtaatatgcatcagaaacttcagaaatacttctgccctttgatcaaacaaatccatttccaagaatctgtactaggggaagtaaataagaatatgagagaaaccttt

SEQ ID NO: 45375 - DNA, 567 bp, Homo Sapiens
  misc_feature (339)..(339): n is a, c, g, or t
gccttcttgctcaagaagtcaagtccgcagtgaagtaccggccatcgacctagcccgggttctagatttggggcccatcactcggagaggtgcacagtctcccggtgtcatgaatggaacccctagcactgcagggttcctggtggcctggcctatggtcctcctgactgtcctcctggcttggctgttctgagagctccgctgagcatctggccttgaagtttgtgttcttccctctggcaatggctcccttcagcacttctgctttccactccaattcacacaggcttggtattaacagaatcaaggccaggctaggttaggaaaagggaagagctntcaccttctttaaaactctcggctgggcgcagtggctcatgcctgtaatcccagcattttgggaggctgaggcaggtggatcacctgaggtcagcagttcaaaatcagcctggccaaaatgctgaaactccgtctctactaaaaatacaaaaattagccaggcatggtggcaggcgcctgtaatcccagctactcgggaggccaaggcaggagaattgctcgaactca

SEQ ID NO: 45376 - DNA, 511 bp, Homo Sapiens
  misc_feature (483)..(483): n is a, c, g, or t
ggcactccagccagataacacctcccaacaacatgaaatttagttagtgcttagtgaaattccttaaatatatatgtatatgttttcttcaacattatttaatataactactgcttttatattttttaatggtgttgcaaccacttgtacacctgctacaccttactgacaaaactgggcagctgaaaataaaagagaataaattctattccactgtaagaagttgatttcttttcagctttctttgtatatcagtaaagaacacgaattgtttgaaaataattttaagtctgataagtatggatagcatgttacctaagcttttaatttgtacattttgatgtctgatcatttgcatggaagagacaatagtgccacgtctgaattgttctcttgtgcttggttaatatgtacttctctagattgttcaaaaagtttcaaatgacattccttactctttggttttcagaggcattcaagcanaatatcacagtggtcttttgttttctga

SEQ ID NO: 45377 - DNA, 609 bp, Homo Sapiens
ttttttttttttgataaagactttttatgccaggaatggattaattaccaacaaaatttatactaatcaggctgatgtcaatctatttttgtaatgtatcattaacaaatttattttggaaaagataaaaatattgccccttgataataaatctttttttcctttgatgcaaacagctagaacacctttttctttttctttttgatattctaagacaaaaaaatggttaatcttcagattaataaattaggtcattataataataaattaattttttttaaagttcagcaacctctgtccaagtatttacaacaatacttgaaagttcctttacaaaacagaacacattttcttttcacgttaagcatactgggtatctgtgtctttcacaacaagcatttttaaaagaaaactcaatgcacaaatgggttaattagtataaaagtgctaagggctgtttgaaaagttaccactatagtatacagtcagttatatttgaggcatactacaacaaacttccagcttattgtggacaatattccagtagttgtttcaaaccattgtttgaaaaaaaaaaaaaaaaaatccaggagctgattagtgatgcag

SEQ ID NO: 45378 - DNA, 719 bp, Homo Sapiens
  misc_feature (2)..(3): n is a, c, g, or t
  misc_feature (12)..(12): n is a, c, g, or t
  misc_feature (627)..(627): n is a, c, g, or t
gnngcccagtanttcggcacgagtcaagtgcctttgtgtccggagcctttcctggcctgtgcctggtagggtagcacatctttccagcctcccagggctttgcagcctgcagatgccacctgtccctgagagaagttagcgtccctggccctggccggtggtctctcatccttgtgtgctgctctgctaagagatgtccaaggcggagccggggcaagatccttccagactcatctgtcagagccccaagccctttagacccagagcccaaggaccatgcctttgggacattaagactgcagcctttgcttctgtgtattttggagttttggtgacttttgtcacctggacacactcatttgttagccatagtgggttcccttggtcagcaacagtgcatgtacctctggatgtcatctgaggtgagaccaccgaggccttttctctctgtgtacagaggggagttaggagttgctggactggatgcattacgaggactggggacagggtagagggacatccagggatcagggcatgagtgggggcaaccccccggcctctgccctggcatggtctccgcatgggctgaggtgtagctgattggctgccacatttcggccatgctgnctggcgtgcccatgttgcagatattttcccgagttccccagaatggatggtattgaatctcagccacatgcaacactgtgtccagcattctt

SEQ ID NO: 45379 - DNA, 666 bp, Homo Sapiens
  misc_feature (630)..(630): n is a, c, g, or t
aatcttcccctaaagatgctaatctcctttgggctgtctcagaacacagtatccttcaaataagaaaaactgagtgggaagtgcagtgtttccaaacaatacctatcataatacgtattcattgtctacctgctaagtcaagggttcactgcatttctccttcctcagaatacactctggacctgtgctgtctaatatggtagccactaacaaaatgtggccattttgatggaaatccattaaaatcaaagaaaatttaaaactcaattcctcaattgggctggccacatttcaaatgctcactacccacctgtggctagggtctacttctactgtattggcgagcatggatatagaacatttcatcacagttctgttggaccaatctagatagattcattatcccatctagagaagagactttagtcactgtcttcttgcttcagacccatctatatttaaaacaaatttccctaaatcctgagactgagacggagctacaaattctcagatggcgaccgtgtaaatggtattagcggctgaagaaaaaaaatttttcaagacctctgtttttttaactgaactttatcattggcattgtggggtctttgaaagtgcttggattaattnaatatattaaaattaaggactgaatttaaattgcat

SEQ ID NO: 45380 - DNA, 514 bp, Homo Sapiens
gcacgagatgatctcaagccttaactactataatctttttctgcccctcagaaattgaataacctaaccaagatgcctttaggggatgccctaagtaaatgtaatttcagatttcagggttttttttttttcctctctaagtgttccttccctttcttctcctgctctccatcatgttatggagaccagtgaggaaccagtgttaacttggtgacaatgtgacagctggtgctttatctaagctccgttttctatttcttgggaatgctttattgtggaaactgcttcagatacttaaattgaatcataacttgcttctgtaaattgcgtaaagacaacaaactgattttagtttgaaaagtttatcttttacttgtaaaccttgtttgccagttaccttccgaaagctgtgtaaagagttatttttaacaaagtcttaacaatatatgttactttttagatactatagaaaataataaatataacctgtaaaccaaaaaaaaaaaaaaaaaac

SEQ ID NO: 45381 - DNA, 731 bp, Homo Sapiens
  misc_feature (626)..(627): n is a, c, g, or t
  misc_feature (631)..(631): n is a, c, g, or t
gggtctgtaagcatcctgttgatgggcatcgtgggaccaattactgctggaatcttgacaagtgcagctattgctggagtttaccgagcagcagggaaggaaatgataccatttgaagccctcacactgggcactggacagacattttgcgtcttggtggtctcctttttacggattttagctactctatagcatacatccttatgctgagatgttgaacttaaactttatggaatcctccaaaagaatacattatggagtgtagtgttttcttagttcttcaaagggaagcaacttggatgaacaggaacatgaaggacaacacatctcagccttttcttcattttgaagctcctagaattgaagacttatgtggactcctattgttctcaaccaaaacaagtcttttggctttcttttttgtagatatttaatttaagcagttttcatgtgtacctttacccaagccaagtcaacagtgtctctggggtggcatcctttgcactgaaatttacagtattctgtgagatgtcgcatattttgaagaaaccgtggaaagatactggtttatttcaaatgagcaaagtatgttgtatttaaatcctaatctaatcttgaaaaaaaannaacnaataccgacaaactaatgcagctacacgcttcttccatgaacgaaacacacaccagccgaaagcaccacacggaaaccacacgctcacggacttcacaac

SEQ ID NO: 45382 - DNA, 675 bp, Homo Sapiens
ggataatttccctcagatcttaatttagaaagttggtgattgcagtcatttttgtagtatccctctttctaatcacgttttgtcagatgccggcaccttcttttctctttgaggttctatgaatctttcattcttacctgaatatttccatcgcacttacttgctactttcaatgttctcaatgtcctattggactcactagggcttagctctgtggttgacacatagatatgcagattttcaaatgtctggaatgtgttactctactacatgttttttgaaatggaaacagatggaatgactggctactgtaataatactacagcagctccataatgcatgaaatcctaaaaagtatgtaatattataagtatcttttcaatacaggtttcattgctattattcatcagtttccgtttagattacctgttccgatttaataacctttgataaatttgaaaaatttgtctttcaaacagagcctgttagtattaatgaagaaaatgagggatttgaacataacacacaagttagaaatcaaggaattatagctttgagttaccgtgactgggaggtaaagctctgcctgttgcccctgcatagttctgactctgccttcacttgcagtaagcccagtgcctaaatgttcattattgtctgccaggagattgtgaa

SEQ ID NO: 45383 - DNA, 712 bp, Homo Sapiens
  misc_feature (686)..(689): n is a, c, g, or t
  misc_feature (691)..(702): n is a, c, g, or t
  misc_feature (704)..(707): n is a, c, g, or t
accacatggtttattatgggaatcctgaatccagcccagggatttctcttgtctttggccttctacggctggacaggatgcagcctgggttttcagtctcccaggaaggagatccagtgggaatcactgaccacctcggctgctgagggggctcacccatccccactgatgccccatgaaaaccctgcttccgggaaggtgtctcaagtgggtgggcagacttctgacgaagccctgagcatgctgtctgaaggttctgatgccagcacaattgaaattcacactgcaagtgaatcctgcaacaaaaatgagggtgaccctgctctcccaacccatggagacctatgaaggggatgtgctgggggtccagaccccatattcctcagactcaacaattcttgttctttagaactgtgttctcaccttcccaacactgcactgccgaagtgtagcggcccccaaaccttgctctcatcaccagctagagcttcttcccgaagggcctttaggataggagaaagggttcatgcacacacgtgtgagaatggaagagccccctccagaccactctacagctgctctagccttagttgccactaggaagttttctgaggctggctgtaaagtaagtgtaaggtccacatcccttggggaagtagttaaataaaatagttatgactgaaaannnnannnnnnnnnnnnannnnaaaaa

SEQ ID NO: 45384 - DNA, 978 bp, Homo Sapiens
  misc_feature (18)..(18): n is a, c, g, or t
  misc_feature (35)..(35): n is a, c, g, or t
  misc_feature (811)..(811): n is a, c, g, or t
gcctggggtggcgaattncggcacgaaggaagganattggggttccaaaatggacagcagtagaaattgttttgatttgggtggtctctgtggttctggctgtccctgaagccataggttttgatataattacgatggactacaaaggaagttatctgcgaatctgcttgcttcatcccgttcagaagacagctttcatgcagttttacaagacagcaaaagattggtggctgttcagtttctatttctgcttgccattggccatcactgcatttttttatacactaatgacctgtgaaatgttgagaaagaaaagtggcatgcagattgctttaaatgatcacctaaagcagagacgggaagtggccaaaaccgtcttttgcctggtccttgtctttgccctctgctggcttccccttcacctcagcaggattctgaagctcactctttataatcagaatgatcccaatagatgtgaacttttgagctttctgttggtattggactatattggtatcaacatggcttcactgaattcctgcattaacccaattgctctgtatttggtgagcaaaagattcaaaaactgctttaagtcatgcttatgctgctggtgccagtcatttgaagaaaaacagtccttggaggaaaagcagtcgtgcttaaagttcaaagctaatgatcacggatatgacaacttccggtccagtaataaatacagctcatcctgaaagaaaaactattcactgaatttcattttcctttaaattggacccgaatccattaaaaacaaaatgaaaccttttgccanacccataaaagacaaaaaaaaaacctccaggcatctatgtccggggggccggaaaaaaggggtattggaaagggccaaggggcctaaactggttttcctggcccacacttttcttggtaccaagtgggtaaaatttggcgggaactccctacatgtggcggcccatt

SEQ ID NO: 45385 - DNA, 669 bp, Homo Sapiens
gatgtgttaaagcatatagcacagatggcgaaccaagatcctgattccattctcttcaactagaatcatagagttctggatgtaaagcgggaaggacattacagaccatggatatgttgtattaactgggtacccaaaacacattttccatatttggatggtgaagtcacattagtgtgttgtctctttcctacaagttaaccagttgcactacataatctctggaaattaattttctctttaggagaaattatagttaggcttccatgatgttacattaggaagatatcatgaaagaataaataagattgctatggtttaattatatttgctttttaaaagatttttttaacttaaaaagtagttagccaatatgcaatcactgaaaactatgcaagagaaattccaaccgtcctgacctataacctgtaggaaaccgacgaaaaagtcactcttttgggatctaactgttgttactggaagacgaagtgtaaactaaggggctttgcttttcaaaccagagaaaggaaagccagaaggaaaagagtaatggtattttctagactgtgaagattcaattcaaatgttatccttgttccctgtacaatatttagcattataaggttggtaagggggtatgtttatgtaaatttaaattcctggatatag

SEQ ID NO: 45386 - DNA, 490 bp, Homo Sapiens
  misc_feature (490)..(490): n is a, c, g, or t
gagccagcgtggccaccaggtctcactttcttggagggcttgttggggctgaggaatctgctagtaatcgttacctgcctctagtgctgtggtgaacttgcgacagggtctggctgcacattggaatcacctgagaagctttaaaatactcatgcctggatcccatccctagagactggggtacagcctagttattgggaatttctttaaaagagttcctgggattctgataagaagccaggttgagaaccactacattagaagactgaatggtttaatttacatcctatgttatgattggtctaagggataagatttggggtctaacctttcctttcactctagttagtcatagtccttgacttatgcctatatctttgtaagaaatagtatgtttcatttgtgatagtattggtagggctgaatatggatggcatctactgtaaaacaagtctaccttgtcagatgtgcaaaagctttcactcttgtn

SEQ ID NO: 45387 - DNA, 486 bp, Homo Sapiens
cgcagttccaggctgagaagcaggcagtgctggcagagctggcggccaaggccaagctcaccgagcaggtcttcaatgaggctcctggcatcagctgcaacccagtgcagggcgccatgtactccttcccgcgcgtgcagctgcccccgcgggcggtggagcgcgctcaggagctgggcctggcccccgatatgttcttctgcctgcgcctcctggaggagaccggcatctgcgtggtgccagggagcggctttgggcagcgggaaggcacctaccacttccggatgaccattctgccccccttggagaaactgcggctgctgctggagaagctgagcaggttccatgccaagttcaccctcgagtactcctgagcaccccagctggggccaggctgggtcgccctggactgtgtgctcaggagccctgggaggctctggagcccactgtacttgctcttgatgcctggcggggtggggtgggggg

SEQ ID NO: 45388 - DNA, 830 bp, Homo Sapiens
aacagctggtccggccgggattatgggatcctctgccagctgtggcgggccatcatcctgcgggacgacgccgccatgagggcgcagcgcagccgcactgggggtgcaagactacctcctgttcgccgagatgctcatgcagcgccccgtgcgcctggggcagctgtggggctcgcacctactgagccgcgaagaggcggcctacatggtggacatggcccgcgagcgcttcgaggccgtcatggcggtgctcagggagcttgccgcggcccatgctgctggtgctgcgcaacatcaacaccgtgcgcgctatcaacgtggccctcggcgcccccgtggaccgctacttccttatggctaaaagggctgtccggggctggagccgcctggcgggcgccacgtatcggggtgtctacggcaccagcctcctgcgccacgccaaggtcgtctgggagatgctcaagtttgaagtggcgctcaggctggagaccttggccatgcggctgaccgccctcctggctcgtgctctggtccacctgagcctcgtgcccccagcggaggagctctaccagtacctggagacctagggtgcagccgcccagtggccggcggggcccttttcaccttgggctgacggaggtggcggggctagaggtgtagacaccccgagccccgtgggcactcgcactgggggggcttgtgacagcagcttgggccaggaggccgtgtatgaccacacactcctctcaagcaaaaaaaaaacaacaaaaaaaaaaacaaaataaaaattcaaaaaaaacaacaaaaaccaagaaaaaacaaacaaaaaa

SEQ ID NO: 45389 - DNA, 544 bp, Homo Sapiens
atatgcaatactcaattgtaaataaccattctctttactgaatcagatgtttcattaactgttagcagttatttcgagttatttatatatcacagaattttgaactaaagatcatctagctgaatttcctttatattaaagaagaggagaaaatcttaatactaagtatgtgtgagcctggagctgccatggagcatgtagagagagtctcctagttgataccaactcaggaaagcagaatcaagcaataaagagacattttgggcctgatgacatcatttcagcacctggatccagcgatgcctaaagatgtgactcctagacttttcacttacatgagccaaaacggttcctttgcatcaataaatcgctctgtgatgcattttataatgtacaaccaagaatctcaatatttattattttgcattaaatatcagtaagtttgatataaaaagctcagtaaaattcattaatttgagaatgtgtctatatcatagtaaagttctaaacctacataattttcaatatttataccttttactgc

SEQ ID NO: 45390 - DNA, 645 bp, Homo Sapiens
  misc_feature (538)..(538): n is a, c, g, or t
  misc_feature (644)..(644): n is a, c, g, or t
cacaggacaaaaacctggttttcttttttggtttcttcaaccaaaaaagaaagaaattgcaaaggaccaaaaaagtgttggggaatctatacattataagggacttaacaactaaagggcaacatatagactttagatcctaatttgagcaaaatctaaaatcaattattaggcaatcagaaaaatttgaacacagactagatatttgaggatattaaggtactatattattgaagattccatggttatgttttttaaagagttcatgccttttagagatacatactaaagtatttgtaaataaatgacatgatctagaatcagtaattttgtgtttggggtgtggggggtggtgaaagggaagtagaaccgaaacaagattagtcctgagttaacaatggctgcaagctggatacatggaattcagcacacttttctccctcttactgattatgcttttgaaattttctcttgtaaaacatttagaaaacaaaaacaaaaaaaatgtgatttgtttctgtcttcaaaatctcattanaattttttcactggaggaagattttcccttgcttctgcataaaattttaactccataacttataagctcactctttattggtactttctaattgacaaataaaaant

SEQ ID NO: 45391 - DNA, 1116 bp, Homo Sapiens
ttttgtagtcactgctaaagaagttggaattttctaaaatgtttgtattcaagaaggaaacaaatgaatttactaaatgttgtcagagtattttttgtttagataaccaccaagaacagaacaaacctaaaagatacttgggaaaatatctaatcagtcaacattctaaggactgttaaatgtgaaatagcatagttattttttgtcttttgttactagtgtgaacaaagaacggcgcctaacatataatgggcatttagtaactctgttagatgaaagactctccaatttcagattttcttttagcatcttattagtcactacttaattctgatgatttagctctaaatttattttgatctcagtttttttatttttatttctgggtgacagagcaagactccgtctcaaaaacaaaaaaaattaaaataaaaattattgttttagctgcatgtcttcagctatttagaattcaaagactaatgaattgtttctaagtcaccctaacatcaaggtacttattttataaagaatttcctccttatttgtgttctaattgacccaggaatttttactttaataaaagtttaactttatttcctatggaaaatcactagggggagtgctccctcaggcagagcaggcgacactttggtgccactacaaattgatgtgtagtatatagaagaatacagtcttatatttaaagacttttagttctgtctttttgaagtttatctctctttctagtaaaatggtgcttactgtgaatggataatcttttttttcatttttcatttgttgatttcccattcgatgatgtagtgcttccaccgagaattgatgaaatgcttcaaaataataaaagtatttgttaaattccactttwataaaaataaggcatgtaacacagtcattttaacaggaagccacagggtttctgtggtgttaccaaagtcctagtaaaaattaattaaattgctwaaagggcagaatgtggcactctcaacagtggggtaggcagtcttcagwacatagagmctccttctttccttcctgtcttcacattgcttgtcccttatcccacctgaaataaaatctattgggtctgagaaa

SEQ ID NO: 45392 - DNA, 1027 bp, Homo Sapiens
  misc_feature (575)..(575): n is a, c, g, or t
  misc_feature (655)..(655): n is a, c, g, or t
tccccagaccgccccgtgcaacctccaccacgccgtcggcctgaatctctcccacgtgcgcaagcgctgcctctccgagacccacggcgagcgcgagccctgcaagaagcggctgactgcgcgcagcatcagcacccccacctgcctggggggcagcccagccgctgagcgcccggccgacctgccaccagccgccgccctcccgcagcccgaggtcatcctgctagactcagacctggatgaacccatagacttgcgctgcgtcaagacgcgcagcgaggccggggagccgcccagctccctccaggtgaagcccgagacaccggcgtcggcggcggtggcggtggcggcggcagcggcacccaccacgacggcggagaagcctccagccgaggcccaggacgaacctgcagagtcgctgagcgagttcaagcccttctttgggaatataattatcaccgacgtcaccgcgaactgcctcaccgttactttcaaggagtacgtgacggtgtagccggagggcgtcggaaagggaagcgccattcccgcgggggggcggggagctgagcacctgnggcctcggggcgggctcccctctcgccaacccgccaaccgcgagagacccaggctggcccccaggttgaggacgccccgnagccgaggtaaccatgttccccctgcggcggctgtcagacctggggcgaggccccttccacgcggtgccggcggggctcgccctctcctgccctccccgctggagatggacccccggaacgaacaggcagctctgcgcccggcctcagagatctagtattatattttaacccggctaacttggccagggctgaactctacccccggtttgaaccggggggtattaattgtaaatggattggtttggactccaaaaagggcccgaacccccccccccttggggcgggcaaaaaaaaaaaattaaattggggaggggattttttatattttggaaaaattaaaaaacccccaaaatttttggggggggtttccc

SEQ ID NO: 45393 - DNA, 505 bp, Homo Sapiens
cttccccttctctctgggaacagttacccgggtattctttgggaagctatcctttctcagctatgtggtttggcaccaccaccatcttcatgagtggaccctgtttggcttgtgtcaatcagtttatcccatccccttggccacagagccattgtgatatgaggagatactggctcttctggaaaagagaggcttttcttcatcgagagctaccagaggagatattatctgtcctctgtgtggcacataggaaaatgtgagacctagaattatagcaactttttttttctgttaaaaggggagattctcaagcttccaggtgctaccatatggagcctaaggataaagccaataccaaagaaaacagtgactaaacagagagaaactaggtccttggtgacatcttttgagccactagaccaagctttacctgaagcagagctacctcagaacttttcagctatgtgagccaataaacatctgtcaaacgaaaaaaaaaaaaaaa

SEQ ID NO: 45394 - DNA, 664 bp, Homo Sapiens
ccagaggctgggaagtctaagatcaaggcatcagcagattcagtgtctggtgagggcccactttctggttcatagatggcaccttctcactgtctccccacgtgatggaaggggcaagaggtctctcttggtactcttttattaagggcactaatcccatccatggggctccaccttcatgacctattcatctcccagaggccctacctgcagataccatcgtatgggggatttgatttcagcctgtgaatttgggggaagcgggacaaacattcgttttgtagcaaaaggagtagagtaatatctgccaataactggaggaaagaattgttcttttaaaactattaaattgtttaatgggatttaaatgatttcaggaatgaaatggaaatcctggtaatgggtagaaacataggtaaattctccttttccacttaccaccacctgtgtgaacaacaatcatttctcattaatagtcaagaatttgaagagatcatgagtaaaaagtcttgatcagaaattgtgtatagctgtttccagcataaaaccttatataaaatgcatattcatagaagatgctcaagtatgtcatgaaaaatatgaagtttatttaaatatttatacaaattaaagatttactgtattctctaaaaaaaaaaaaaaa

SEQ ID NO: 45395 - DNA, 1058 bp, Homo Sapiens
  misc_feature (31)..(31): n is a, c, g, or t
  misc_feature (760)..(760): n is a, c, g, or t
  misc_feature (782)..(783): n is a, c, g, or t
  misc_feature (800)..(801): n is a, c, g, or t
ggattgaccatgcagaagagatggagttgcntgttggaaaactactaccgattggctgacgatctctccaatgcagctcgtgagcttagggtgctgattgatgattcacaaagtattattttcattaatctggacagccaccgaaacgtgatgatgaggttgaatctacagctgaccatgggaaccttctctctttcgctctttggactaatgggagttgcttttggaatgaatttggaatcttcccttgaagaggaccatagaattttttggctgattacaggaattatgttcatgggaagtggcctcatctggaggcgcctgctttcattccttggacgacagctagaagctccattgcctcctatggtatgaaggatatggttcacggcggtattgtggaagggttatgatcatgggccctaaagtcagagcgcctgggattaagttgtcacaggcactatggcccttgcgagttgctttctcaaacttccttcagtttccctatctgtcagttaagtcggtattacctgcttcatagggttatgggaagaattaaacaatatgtgtaaagcacttactagcacactgcctaacacaataagttagaaatataatttgtgtagaactctgacaacatacatttaaacagatgttagtaattctggtataaggtttgtcataaccaaatggaaatgtaggaaacatttataacgttcttaaaagatagaaaatttcacctcatttttctttgtacttngaagatggcacccactggaatnnaatacttaggacactgnnaaaaaaaaaaaaaagggcggccgcctctagaagtatcccctccaagggggcccaagctttaccgcgtaacccaggctttctttggaacaaaggggttcccctaataaggggaggtcggtatttaattaagctaaggccacctgggcccgtccgttttttaacaaacgctccgggggaactggggggaaaaactggggcttaccctttggggggaacacttttttggtggagaagggggaaccctttttaatctttcc

SEQ ID NO: 45396 - DNA, 779 bp, Homo Sapiens
  misc_feature (691)..(691): n is a, c, g, or t
  misc_feature (716)..(716): n is a, c, g, or t
  misc_feature (763)..(763): n is a, c, g, or t
cacgaggcgagtttgtgtgtgtgtgttgatggagagtagcttagtagtatcttcatcttttttttggtcactgtccttttaaacttgatcaaataaaggacagtgggtcatataagttactgctttcagggtcccttatatctgaataaaggagtgtgggcagacactttttggaagagtctgtctgggtgatcctggtagaagccccattagggtcactgtccagtgcttagggttgttactgagaagcactgccgagcttgtgagaaggaagggatggatagtagcatccacctgagtagtctgatcagtcggcatgatgacgaagccacgagaacatcgacctcagaaggactggaggaaggtgaagtggagggagagacgctcctgatcgtcgaatccgaggatcaggcatcagtggacttatcgcacgaccagagtggggattccctcaacagtgatgaaggagacgtgtcttggatggaggagcagctgtcctacttctgtgacaagtgccaaaaatggataccagccagtcagctgagggaacagctcagttaccttaagggtgataatttttttaggtttacttgttcggattgctcagcagatggcaaggagcagtatgaaaggctgaagctgacatggcagcaagtcgtcatgttggcaatgtacaacttgtctctggaangaaagtggacgtcaggttatttcangtggaaagaaatatctgtgcttttatgagaacttggactttttacanggaatagaaagacgtt

SEQ ID NO: 45397 - DNA, 501 bp, Homo Sapiens
ccgtgttgagcctgcatgctgacactgtggccgatctggactctagaagtgctagtttgaaatatatccattaccgtcatttccttttgagcttgtggacaagctgaatgtcaggactgacttctccagctcccagccctgcgggggtgtccttggcatcccatcagcagaggagatgcgtccctgttgcattttggcgtttggggctttgggtttatccacatgagctctgaacgtccgttatagttagggtgattggaaggtctccatcactgggtgttttaaaggtgattcaccaccatttgtgaaaggaccaatgtgctgataaacaggaccgatccgagtgctacatgactgtgcgtttgctatttcaatgggcctgaacgactacaaagccagctaggtctggaaggggaagccagctctggccacgacatctggtcggagggaagtggggatgtggcatggtagcgtctgttcatccatggaataaaacattat

SEQ ID NO: 45398 - DNA, 497 bp, Homo Sapiens
  misc_feature (444)..(444): n is a, c, g, or t
  misc_feature (462)..(468): n is a, c, g, or t
  misc_feature (470)..(470): n is a, c, g, or t
gcacgagcctcaatggaaaaagaaaagagaggaacagagttagaaagagaaaatgacttgaatcccaagtatcttcataccaaacatatcagggttccctgcatagtttgcagttgattgaggatttcacacgacttggcataaatttgattacatctctagactgtaacttttctgattgattatgcttcttttttatccatgtaatgtgttgcctttttttaaaagaacaaatactacaataacgtgtgaagtggtcaatccctaagacatcaaagaaaggccacataaccctacccttctagtgctttgtgtgattgggtatcaaaggggttttcttcttctttttttgtttgtttgtttttctgttgcaaggccaatttatccattattggaaatgctaagcaagtggaatttactgttttgttaataaaatatttcttntcccacaaaaaaaaaaannnnnnnancctcgaggggggggggccccggtaccc

SEQ ID NO: 45399 - DNA, 461 bp, Homo Sapiens
tttcctattctctttgtaatggcctgttcccgtttatgagtttgattgtaggctttgtatctcaaacgttttgggtttttttttttttttttgagacagagtcttgctctgtcgcccaggctggagtgcagtgagctgagatcacaccactgcactctaccctgggcaacagagccagactgttttttgagaaaaaataaataaataaagctgggacaatggcataaatgaatctcacaaacataatattgagcaaaagaagccagactcaagggtatatactctgtgattctattcataggacttaaacaggcacaatcaaaaccatctcagtcagaagtcagagcgtggtacctgggagagaaccccgaggggcatctggagtgttggggccatgttggtgatatggacgtacttcacttgtgaaaattctcaccaaaatgttcacaagttcttttgaa

SEQ ID NO: 45400 - DNA, 680 bp, Homo Sapiens
agtatttattactttactgtttagcataaataggagacagaaaaggataataaactactaggtcctttattcctattaaaataaatttataaatcccttgaatcaactgaattctaagctttttgaagaggttgctgatgtagtgtgatcaaaagaatctaaggagaacctcatctccaaaatctgattggagctgttcaccctctcaaggacaagataaagattgacttcagagatatatcacatcaagctagaggaaaaaaaaaaaacctcaaataaaatttttcctcattcgaagggatccagggtatccttgggttatgtaggagggaatcatatttgttctaatttacctgaatgtacttgtgtgtgaatccaatcttgattctaaacaccaaatcttgtcaacagtagagaagtatagtaaggagttcctgttgtcaatcaaatgagggtgtgaaacatttagaatgctctgtgttacacttgaaccatgtataaatgtaacctgtgtatcttttttttaattagcttttctgaatttaaattatattgtttttctttgtattgttagcaaatgcatcagaactggttttttttctcatctgaacataatataaatttgaaagagtattgtgatattaagcactttaacatacatatcagacaaactgacgtgg

SEQ ID NO: 45401 - DNA, 627 bp, Homo Sapiens
  misc_feature (20)..(20): n is a, c, g, or t
  misc_feature (620)..(620): n is a, c, g, or t
cacatacttattttctatgnaatgttttaaatttcccctaacatactttgactgttttgcacatggtagatattcacatttttttgtgttgaagttgatgcaatcttcaaagttatctaccccgttgcttattagtaaaactagtgttaatacttggcaagagatgcagggaatctttctcatgactcacgccctatttagttattaatgctactaccctattttgagtaagtagtaggtccctaagtacattgtccagagttatacttttaaagatatttagccccatatacttcttgaatctaaagtcatacaccttgctcctcatttctgagtgggaaagacatttgagagtatgttgacaattgttctgaaggtttttgccaagaaggtgaaactgtcctttcatctgtgtatgcctggggctgggtccctggcagtgatggggtgacaatgcaaagctgtaaaaactaggtgctagtgggcacctaatatcatcatcatatacttattttcaagctaatatgcaaaatcccatctctgtttttaaactaagtgtagatttcagagaaaatattttgtggttcacataagaaaacagtctactcagcttgacaagngctttat

SEQ ID NO: 45402 - DNA, 567 bp, Homo Sapiens
tagtccttgttttaatgatgggttctctcaccactgtcttgatgctctgagcaagttacctcttccctctgaccctcagtttccatatttgtaaaatgagaataaacataccaacttaataaagatattgtgaggattaatgggtacagagtgactagaatgatatttgatagaaattaaatggtagcagtataactattctgatcactgacattaatattcctattgttattattctttactcacgagggtatacaactcttgttttgctgttgggctgccctctttatgtaggtttactgttaatgctgaggatatactcggactcaaatgtctcagcagaaggctgagagacaccaaatgaagtggtcatctagctgaatgtaggaaaaatgaaatgtagtagcaaatcagtatattctaaggaaattttcaaggaatattaatcttcacccaaattttgaatttttatgtaaaaaattataatttaagggtaaacatagatgacacagctttcgagtgatttcattgaataaaattctactgacttctaaaaaaaaaaaaaaa

SEQ ID NO: 45403 - DNA, 634 bp, Homo Sapiens
  misc_feature (580)..(580): n is a, c, g, or t
aaagacaaaaccaacggagctctggaagatgcacaaccaattgaccagcagcctatagacaaggagattgagccagatggtgcagagctggaaggccctgaagagaaacgtgagggtgaggagcgggacgaagagtccaggagaccctgtgccatggtcacacccggtgcagaggaaccatctatacctgagcctccaaagcctgcggctgatcaggatggagctgaggtgcttgggactaggagcagaagcctgccagaaaaaggccctcccaaggctttggcctataagacagtggaagtggtggaatctatcgagaagatttccacggagagcattcagacatatgaagaaaccgctgtgatcgtggagaccatgattggaaagacaaagtcagacaagaagaaatcaggagagaagagctcttaaaatgcccaggcttgatgggataaaatgtatttggggccactgtaggggtaatgctttgatattttagagcaaatgataaaacgggtgagggttcctgtttggattagaccatagttgacccatctggcattgccaacgaagccttcattanaatgttttctttgcttgcaaaaaaaaaaaaaaaaaaaaaaaccaaaaaaaaggg

SEQ ID NO: 45404 - DNA, 572 bp, Homo Sapiens
  misc_feature (47)..(47): n is a, c, g, or t
  misc_feature (164)..(164): n is a, c, g, or t
  misc_feature (169)..(169): n is a, c, g, or t
tgggcagcatggcaaaatcccatctctacaaaaaatacaaaaattanctgggcatggtggtgtgcatctgtagcctcagctactcagggggttgaggtgggaagatggcttgagcccaggaggtggaggttgcagtgagccgagatagtgccactgtgctccancctgnatgacggagccagatcctgtttcaaaaaaagaaaaagacaagaaagaagtatggactctaccttcttgcccttgtggagattgggaactgcctgcccttggcctctttcctgtccatcttgtattatgaaaggctgtttctggcacacccgggctcctctgtgtggtttctgggaagtgactgagggtcaggggaatggagcccctctgcagccggccgctggtaccttccctattgaacccttctttaggcttgctcactctttttgatgggtgtctttccaaagctggctggggacctccctgattgagagacatggggccagttctgttgctgtggctacacgggaataataaagcagaacacctgaggaaagctgatgtttactaaaaaaaaaaaaaaa

SEQ ID NO: 45405 - DNA, 609 bp, Homo Sapiens
ctggtttttgtcactatggacttaccaattctgaatatttcccataaacagaatcatacaatatttgattttttttttttttgaaactaagccttgctctgtctcccaggctggagtgctatggtgcaatttttgttcactgcaacctctgccttccaagatcaagagattctccagtctcagctcccaagtagctgggattacaggcatgtactaccatgcctggctaattttcttgtagttttagtagggacatgttggccaggctggtggtgagctcctggcctcaggtgatccacccacctcagtgttccaaagtgctgatattacaggcataatatgtgatcttttgtgtctggttgctttcatgttgaatgctatttttgaggttcgtgcctgttgtagaccacagtcacacactgctgtagtcttcccccatcctcattcccagctgcctcctcctactgcttccgtctatcaaaaagcccccttggcccaggttccctgagctgtgggattctgcactggtgctttggattccctgatatgttccttcaaatctgctgagaattaaataaacatctctaaagcctgaaaaaaaaaaaaaaa

SEQ ID NO: 45406 - DNA, 793 bp, Homo Sapiens
  misc_feature (712)..(725): n is a, c, g, or t
  misc_feature (729)..(730): n is a, c, g, or t
  misc_feature (732)..(738): n is a, c, g, or t
ggagggatacatgagccagatttggttttatgtaaaaaaaatctttcagttgatgagttcttgtttaaattgtattgctgtggcaatttcttattgtaataatatgtaggagaatttctaatttgaatccctttatttacagaaagctcactgtaaatttgtaggaatgtcatggtactaccccattaagttatttttattagtgtttagttattgattcagcagtctctaattgtgccaaaaatggtgcttagattagattgccattgctacccatgggagctgctacttaattattcccacctcaaattcccagctctcaagttagcactactcctttgcaatttactccttctctgctcgtataaataccctcagatgatgatagttggtggccactatacctttgaagaggttgcccacttctacatggaaaggaaaagatggtttttttttttaaaagatgaatttgataattaacttgccactatttcaccttgtgatgaaacctcaattttaaacatagtgttaattgttttattgtccacagaattaagggtaagtaatgtcatacaatttttgtctttagtcttttagtatggtttctttaacttctattgagcttctgttgcagatattggacatgggcgtatcttctaacgatgtcgtcaccattagtatattcttcctgctaaaaataatatcaaacccnnnnnnnnnnnnnnaaannannnnnnnaacttgttcggccgccctcggccctcgaaaagcttttctagaaccattcggttgg

SEQ ID NO: 45407 - DNA, 638 bp, Homo Sapiens
  misc_feature (586)..(586): n is a, c, g, or t
gaaagttcaaaatattggaagtgctagaaggctgcaacttgtaaaattgtactccccaagttcagtaggatagtagagaagtcgtgctaagttgatttcattgaaatgtcacgtctcacatcctgtggtccaaaggtactagtttgttttgtggaataattttctgttcacttgctgataagaaatttagcagtcagaagtaatttttaattaataacctttctttttaaaagttgctttatggtttacaagtaatactgatgcaaaaaggatttgttaacctaaattaagtagcacgcactttgtttacatgcttcagtatattgtggggttggtcccttctcacgaacccaggacctgtgcttggggaacattttgccatcatgctgttctcttgtaccaaggatcagtgaaagtgttttatcttttttatgtagtttgtattgactggattttataactgtaagaaaacagaaacagagtgttgtattttgatctgaaatttgtgtatgctaaagtaattttgttttatgtattggaagttcacttaaaaacttgaaatattttctagaagggtaccacacanaaggaatcatctttaagctgtttaattaacctaataaaataatttgatgggg

SEQ ID NO: 45408 - DNA, 799 bp, Homo Sapiens
  misc_feature (557)..(749): n is a, c, g, or t
  misc_feature (751)..(775): n is a, c, g, or t
  misc_feature (777)..(778): n is a, c, g, or t
  misc_feature (784)..(789): n is a, c, g, or t
  misc_feature (792)..(793): n is a, c, g, or t
gggggacttgacttgctaccaacaactgctgtgcaattctgctgagcaggaatatcatgagctgttcaataatgacggacgcattggttgagatgaagtttccagtaaggaagtgacagtgcaatgtggatatttatggctgtaaaataggaagagctttagttcccaggctgaacctgccactgctggagccatttcaacaaggcatcctcacaacaaagaagagatgtgatttggtaccatttcacaccagcaggtgtctggacgaaaacatcaatgtgaataagggccaagtgcagtcctgtcttgattaaattacttaataatattattaaataataataggtctgggcagtattgtttttaacctgactcatccagctgtccttcaaatagctccgtctccctctacccagaactgatttttaaaaagaagtaatttttctccctgggctgggaaaaccctaatgaactgaaacacacttttactttaaaatttttctgtctggcgtttttgtaatcatactattaaatgactctggagtcatgttaatgannnnnnnnnnnnnnnnnnnnnnnnnnnnnnnnnnnnnnnnnnnnnnnnnnnnnnnnnnnnnnnnnnnnnnnnnnnnnnnnnnnnnnnnnnnnnnnnnnnnnnnnnnnnnnnnnnnnnnnnnnnnnnnnnnnnnnnnnnnnnnnnnnnnnnnnnnnnnnnnnnnnnnnnnnnnnnnnnnnnnnnnnnnnnnnnntnnnnnnnnnnnnnnnnnnnnnnnnnannaatttnnnnnnaannattttt

SEQ ID NO: 45409 - DNA, 615 bp, Homo Sapiens
ctgaaatcctatcaggaggattccttcacaatgtattttatttgctagactttggttgggagggaaaaggacattaatttgaagtttcatgttattcatgccaggattgtttgatagagcatgaaggttttgtttacccataaaagtattagaggcagcgtttctctgatacagagaggcctgtccacaagaagcatgggcacccagccaaacttgaacctggaagggagggttcccggcctgcaggtgctctttcctcttggtcccaagcatctgtgcagggtcgtgggagccacactgagagacttgtgtgggccagacaagcttcattctgatgcgctagtcccttggtttaatttgtgccttatgctttcattggaccagctgaaatcactgtatttattcaacttgtgatttttttttctttctcactttaacttaaagagaattttatatgtcttggaaatttaataatttagtgttctcagtatcaattggtgtttttgttaaacgaatgaatcatctgttcatgcatgctctactttgatattataacctatgtcacatgtgtttaataaataccatatattttgttctactaaaaaaaaaaaaaaa

SEQ ID NO: 45410 - DNA, 741 bp, Homo Sapiens
  misc_feature (199)..(199): n is a, c, g, or t
ggattattataatgaaagtttatatcaacagggtttcgttggctctgccatatattataagcaaaagagatggtaaagtgccacagtattccagataacttttcagttgcggcctttcttctcgttctttaatttgaaacctagatacatgcagtaaaaactaggagaatgacttttacccttggggacagccaagttntgttgataaacctatttcctagcatgccttcaggaagttgtgccagaccctagattgtgaaggacccactgttcttctgttgtacgagctccctgaaccattgttcagaggaccaatgtcacatcgcttcatgggcatggcccatggagcatctgggtgatatctgtctacagtattggctcttctgcgaggctgatacacaaggcctctcttccacatgatcatttgcaaacctcccccagcccctaccatccaatgtggaaggaaaacaagaactgcctgaagaagagtccaagctacagatacacagcgtgtgcattgcggctgtcaccttcctcctcccacttctgtatcctcagagatgctgcgtggatgtttccttaacctcagctgacttccctgtgaatgtctaatgctagttcagggcctccaggcattgatttgtacagtggtaactcccaatgaggcttctgttatcatttggtgtgctttctctgtcattaaaagaaatgattttcccaggcaaaaaacaaaacagaaac

SEQ ID NO: 45411 - DNA, 629 bp, Homo Sapiens
  misc_feature (604)..(606): n is a, c, g, or t
  misc_feature (610)..(618): n is a, c, g, or t
aacaaaccttgctgaatgaaagactccagacacaaaagccaacatgctgtatgattccttctatataaattataaagacgggcaaaacttgtatacgtggtttaaaattaggatagcagttagccttggccaaggctgaaagggggcatttatctggtgctgggaataatctgtttctaaacctaggtgctaagtatttgagtgtgttctgagctgtgcacttaagatatgtgtatttttctgcatgtgtgttacactttccataaaagttttctaaaatcacaaatggctaacatttgtgtcgctcatcactctaatcatatttttctagatgtgtatgaatatgctgcacaacaggaattaaatggcagattttgcataattctgtgcaggaaatacatatttatagtaattttgatggcaactactaagatttcctacgctgtccttaaagcttagcataatgtatattttaagtgaaatatttgagaaggttaaagaatcattacatactttgtcatcctatacttttgcatatataaataggtctgagctgcctcttcaataaagaagctaatgtgtaacatttcatatttccccaaannnaaannnnnnnnnaaaaaaaaaaa

SEQ ID NO: 45412 - DNA, 623 bp, Homo Sapiens
cgccctgggaccatcggtaggggtggggagcagcagtcacccaagcccactggaagggaggcacaagcagcactccagcttcccagtgttgccctcacactcacctggacaggtcaggggacacaggatgaaagccatggcccaatctaagagcaagacaagtgaaaagtgagtactctcactgtgtaccccagcataggaatagtgaaacctgctacaactggaggctgcgttcccatgacttcctcctccgctctccttgtctgggacttgctggttccaggggtgcatatagggagggggcgggggccacaacccccgagacggtgaggacaggcttccgacccccctgtaagccagatccagtgggatgtgggagagctgggcggtcaccttccctcttgccccggtggcccatcacactcacactgcaccctgggcaagcagttccctgaacccccaaggggctcacaacccttaaagctggagcttaaagcctcctggcttagtacaagcaggagaacgcctcaccttccactcctgcgtctcctttgctctaccctggctcccctgcccggagggaaaaatatttacaaaacaaaacaaataaaaaaaaaaaaaaa

SEQ ID NO: 45413 - DNA, 704 bp, Homo Sapiens
  misc_feature (462)..(462): n is a, c, g, or t
aatgaagcctttctataaatttaatggcactttatattttatatagagaaatagcttctgtttgattttctggacaccatgtcagtcaagatctactttctgtgtaaaaatgaataagtcttgcacataatccattcgtgttgcataaggttgcaaaaacaattaagtgggaaatgactcctaacttatgtgtctactctgcctagaaagaaagttttgaaggcatctatatatatttcataacaatgtctgttctttatggatttgatccataaatatttatctatctgaaaactttgatacttggaatgttttccttagagcatttggtgctccaagaaaaaacatttggtgctaagagttgcagcactgatgcctttccctaagttaattctattttaaaaatttatatttccttcccaatgagatgcagagtaaaatttgagaccctccattgactanggagcagcatctgtcatctatggttaattactattttgacaaaaatatagaaggtttaaacccccatgtatttcagattgttagagaaagaagtaagtttgcttatatttcccttgaactttattctaaccatttaaataataaattattcaatatttggtataataaatccttactagatccagaatttggtggttcttgggaagtaactttattatctaatatcactaaccttgttactg

SEQ ID NO: 45414 - DNA, 591 bp, Homo Sapiens
  misc_feature (272)..(272): n is a, c, g, or t
agtatacttgaatcagacattttaaggatgtcactatggcactgttgtcatttccaaattcctagaaaagtttgttttactttgtttttattctgttaatgcattctttcttctctttacttcctttcttaccagtacactcctatctcaactctgtttatttgatgagttctgtcccgtaaatcatatttcccttacaattaataaatgtcacttcatattttataataaaccactcagtaaaagcaaaagcttgtcctgagaagtagagngagttctttttcactctgtgtctaataatgttaaggtgggaaaaaaaaaagtgtggcatagctacctgcccatccccaaccctcagcaaagtagaatctcttttctggtaattttgggtttccgctctgggctctggcaagttgaacaatcctagccattgacaatcgtgatagttattattttcccatttgctgtctttttgtatctaaagtcttcctattgtactgcacaaaccatggattgtacatatttttatatattatgtcttattttattatttctaaataaaaaaattaaaaattgaaaaaaaaaaaaaaa

SEQ ID NO: 45415 - DNA, 497 bp, Homo Sapiens
gcagcttcaggatcagaatatggagtcatgtagcagattttgaagcagtgtgaagaatatttagtcttggcatgggttgatggaaatcacaatcttctgacaaagctttctctggaagaggaaaactgtcttattcagctgaagtgtgaaaaccttcaacaaaaattagaacagatggacgctgaaaataaagagcttgagaagaagctggcaaaccaagaagaatgtcttaagcacagcaatcttaagtttaaagagaaatctgcagaatatacagcataggccagacaactggaagctgctttagaagaaggaagacaaaaggttgctgaagaaatagagaaaatgtcatctagagagagtgctttacaaattaaaatattagatctggaaactgagcttagaaagagaaatgaagagcaaaatcaacttgtttggcaaatgaacagtaaagcacaacatcaggaagtgtgtttgaaagaagtacaaatagtctc

SEQ ID NO: 45416 - DNA, 661 bp, Homo Sapiens
ttggaggaagctctggatcacagttgcctcaaatccagacagatgttgtacttccatcatgcaaaaaaaaagctcctgctgaaactcctgtgaaagaaagactttttattgtgtttaatcctcatcctttacctttagacgtattagaagatatattctgtcgttttggtaacctgatcgaagtttaccttgtgtcaggaaaaaatgtggggtatgccaagtatgccgatagaataagtgctaatgatgccattgccactctacatggaaagattctgaatggggtgagacttaaagttatgctggcagattcgccaagagaagaatctaacaaacggcaaagaacttactgattcttgagaacaaagactaaataatgacataatcctcagctgactgactgaaaatgtgactggacgcattccctgtggacagttgacagctttttttttttccatatacctgatagtctgtgtacagcattgttttgtctgggaagcagggattgctgacatgtatttttgaatccatacattaatgctaaaacgaatatagtagttgttccttagagcaatatgttgttacgtgtagcagaaataaaggtttctttgcttaactaaaaaaaaaaaaaaaaaaactgagggggggcccggtacccaat

SEQ ID NO: 45417 - DNA, 631 bp, Homo Sapiens
ccatcaatgtagttttacttattgaaaggaaaaaagacttaacacaagataggaaagatgagtatgagaagtaaaacattctgctggggtgctacatagaaggttaggttgtaggggctttgattttaatttaaacttattatcgattgatatttctgtatctcactaaatgcggttgaagagtgtgtgtgtgtgtgtgtgtgcgcgcgcgcgcatgtggccaaaaaatagtgccataatgtcaaattcttcctttgctctgtttttgagagttgatgacatcaggcacttttcagtgtttggggaaattgattgggatacctcccccaaaccaactcaagtctgtaactggaagccaggtggttggttttctggtccgctttgtcctctttcttttaccgtcatcctattcaccagcacttaatgtaagtagatgttttagaattgcaatatttattggtttagtatttgtcatccttagaaatgttaatgatgtatttttatattgataatataaatttgtgtacagtatgtgtgtatatgtatttcaggatgttatagtattgtactttgtatgtgatggtttttgtgtcttcataataaatatgtcccttttaaaaaaaaaaaaaaa

SEQ ID NO: 45418 - DNA, 501 bp, Homo Sapiens
aagaatttactctctgaccagcaataaacaagcactgagagacacagagagccagattcagattttacccatggggataaaaagactcagactttcaccacatttggaaaactacttgcatcataaatatataataactggtagtttatatgaagcagacactaagtgctatagacactctcagaatatcatacttggaaacaatgtaattaaaatgccgaatctgagtcaacagctgccctacttttcaattcagatatactagtaccttacctagaaataatgttaacctagggtgaagtcactataatctgtagtctattatttgggcatttgctacatgatgagtgctgccagattgtggcaggtaaagagacaatgtaatttgcactccctatgatatttctacatttttagcgaccactagtggaagacattccccaaaattagaaaaaaaggagatagaagatttctgtctatgtaaagttctcaaaatttgtt

SEQ ID NO: 45419 - DNA, 405 bp, Homo Sapiens
ccttcctgcgggtccctggcccgctctccccaccctgttctgagccaaaacagacatgagcccactgcttggaacaacaaactgtcctggttgctggtcagagggaggggaggctttacaagcaggtgtgggttcccacgtgggcacagagtggccccctgggcagattcccctgggtatgcctctgtgccacaggagcgattatagtgaccgcagtttgctgcagaggctgtgaaagtaaaggcgttgggaggtgggagatgattgtatatgtgttggtttcgtccagggttcctaactcataactcacatgaccatggttacagtcttacgttgtcatgttggggtgcctcaggcctcaaaaaacagcctttcgtctctcaaaaaaaaaaaaaaaaaaaagac

SEQ ID NO: 45420 - DNA, 722 bp, Homo Sapiens
catttttagtgaccactagtggaagacattccccaaaattagaaaaaaaggagatagaagatttctgtctatgtaaagttctcaaaatttgttctaaattaataaaactatctttgtgttcttttctgcaacagatgattccaacatgggtgtttgtctattcttctttactcttgaaacattagaccatgggaggctcttacagccttgagttgatatttatacaacccaaatctaggtttgaacggtgaggtgtcaggtcatcaaatattcatgtctatatagtcttacacaggttctcaaaaaaaatgttcatgggataggtcattgataatggattccttattctgagaactccagacgactgaaatatatgagagaaggaaaaggacatagtaggagcaggcctgagaaaaaaatgaaagtcagaaatctttaaaaaaatacaagatcttatttctatcttattttttctcctcttctgaaatatatatgaggattcctctccaaacccatggtttctctaagaattttgagtcatttgtatgacctcaaataattagttttagctgacctcacataactccttacaataggagacatctttaatgtctgctattaaagaaggatgaaaattcctatgaccttctccctgattatccctttggcaatatagagtcaaataataacattgaccaatagtaaacatgctttgccaagaa

SEQ ID NO: 45421 - DNA, 1140 bp, Homo Sapiens
  misc_feature (16)..(16): n is a, c, g, or t
  misc_feature (32)..(32): n is a, c, g, or t
agactccccggaacgnagcccacgcgggcggngcgcctgaaacaaagggaagcgggcgtccgggcgccgcgggtgggcggtcagtcggtcagcgcggascagccagcgggtgcccgcgcaascccgagcgcggccggccggcgcggcctcagggcgggaagatgccgcgcgtcgtgcccgaccagagaagcaagttcgagaacgaggagttttttaggaagctgagccgcgagtgtgagattaagtacacgggcttcagggaccggccccacgaggaacgccaggcacgcttccagaacgcctgccgcgacggccgctcggaaatcgcttttgtggccacaggaaccaatctgtctctccagttttttccggccagctggcagggagaacagcgacaaacacctagccgagagtatgtcgacttagaaagagaagcaggcaaggtatatttgaaggctcccatgattctgaatggagtctgtgttatctggaaaggctggattgatctccaaagactggatggtatgggctgtctggagtttgatgaggagcgagcccagcaggaggatgcattagcacaacaggcctttgaagaggctcggagaaggacacgcgaatttgaagatagagacaggtctcatcgggaggaaatggaggcaagaagacaacaagaccctagtcctggttccaatttaggtggtggtgatgacctcaaacttcgttaattaatagcacagcagatgtgtgctgcccatctttacatacacattgcttctagttggcagaaataattgattaaaagaccagaaactgtgataactggaggtactacggtctatttctcaaccttaggcagtaatagacatcacaaactgccatggttttgcactatgattataatacctgcatttctaattttttaagcatgtagccagtaataatttgaagttttttttctatgcaagcttaccttgttggcattatttttagggagttgaamtatcaactgtaaactccttttctycactttaatttaaaagtcatgtcattaaaaaaartcaagaattaaattkttyagakggtctgtctaatcattttctdtttttttttttmttytagakgtttggtatmarctcattt

SEQ ID NO: 45422 - DNA, 565 bp, Homo Sapiens
cccgaggtcgcagcttccactggcgcgggttgagttccctgttgcccttggtctcggggtcgctgtcggcgctgaggctgcagagactcgctgtatcccccaggctggagtgtagtggcgtcatctcagctcactgcaacctctgcctcccgagttcaagcgattctcctgcctcagcctcctgagtagctgggactacagctatcatggtgaacttacttcagattgtgcgggaccactgggttcatgttcttgtccctatgggatttgtcattggatgttatttagacagaaagagtgatgaacggctaactgccttccggaacaagagtatgttatttaaaagggaattgcaacccagtgaagaagttacctggaagtaaagactggctagattatcgaatgttcacattttaaagttctgagagaaataaaaacatgaagaatctgaaatacatttaaaaaactcagtaccattagatattgaatattatcctaatcgtcaacaatcaccattataaacattcatacggtccccctctttttccgcccgttttgcccttcc

SEQ ID NO: 45423 - DNA, 929 bp, Homo Sapiens
  misc_feature (857)..(857): n is a, c, g, or t
  misc_feature (886)..(886): n is a, c, g, or t
ggacgcgtgggaaaggaattagggtgtgtcatgtgtgccatgaaacaacaaaaccaactaccctagaatcatttatgcagggggtactagagttagaaataataatgagggcagataacatttgtacctcagtctaccaaaaaattatagtactaaatttaacttctaggcgtttcctggaagcagatgctctataatttgtgatagcattctcataaatggagtcctacacataattggacagagatgtggaaatggtggtttccttctgataagggatacagtggaccatgtcgcttatatatcaccctactaggggatataattttcccttctaagcaagggaaatggcagtgctaaatagttttgtaaagtttttgaatgagaagcttttaggtaaagataaactgtcataatatttttcagatgcatttgcattgactatgggagaaaaattagggggaaatgacagtcatggtgtttttttttaattttaaggactgaaattctgttacatgatgtatgacaatataaaaacatacttagttttatactaaatctttttttaaggtcttggcatttaatataaagcaaattcacacgttttctaactttccataagttccaaaagggaaagaagaaacctcagtcttggaaattttgatttctaaaaatcatgacactgttttaccatgaaattgagtagctaacttttggtaaacaccttttggttcctttgaatggttggaaataatggcacattttaaaacaccaggaatggtttggggtttggaacagacttttgacaaaatggtggggttaaataaaaaattccattattggacctcccaccaaanaaaacagacatgacacctccaaacgtaanctggggggcggggccgccctcctacaaaataatccccctctcg

SEQ ID NO: 45424 - DNA, 583 bp, Homo Sapiens
tggatcgcgagctacgcccggaccgagaagccccggcatggccacgtccatcggagtgtccttctcggtgggcgacggggtgcctgaggctgagaagaacgcaggggagcccgagaacacctatattctgcggcctgttttccagcagaggttcaggccctctgtggttaaagactgtatccatgctgtgctcaaggaggaactggcaaatgctgaatattctccagaagaaatgcctcagcttacaaaacatttatcagaaaacattaaagataaattaaaagaaatgggatttgaccgatacaaaatggtggtgcaagtagtgattggagaacaaagaggtgaaggagtattcatggcttctcgctgtttctgggatgctgacactgacaactatactcatgatgttttcatgaatgacagtttattctgcgttgtagcagcatttggctgtttctactactgaatggatctttgaaaagctggtaaaagcactgccctgaagaaaacggacctttaaaatggtaaatttttgccaaaaaaagagtttgggttgccaccggaaaaaaaaaaaaaaggccca

SEQ ID NO: 45425 - DNA, 500 bp, Homo Sapiens
ctcacaggttagggatcacacaacttacttaatcgttttttgtttttgttttttttccttatatgtcaatggcccatgtcctccgggaaaattagaaaagcaaaatgattacaaagtgctgttagatttcttgtgctgggccagccaagtagaagtggacttgacttggacctttaactattttattacagattggacatttgctgttcagatgttttttaacagagggattatctcagaatcctgtgacctccaggttgttttataatctatttttctctatttaacattcctcagatagataggcaaataggacattccttctgtgtcacagaagtatcgtggtagtggcaagtctacagtttatatgattcattgtaactatgagataaagaacaaccagtcatgtggccaaaaggattagatttgatttgatgttcacttggagtttactttttgtacatacaagataaaataaatattggatttgtaaaataaaa

SEQ ID NO: 45426 - DNA, 615 bp, Homo Sapiens
ttttttttttttttttttcagtaattccttattgtttattctcctcttaaaaaagacacttgggacaaataaatacaaaatggcatatatcatatttagcaatgggcaaatacacattttcttggtattctccacaagaataaactaataaaattttcagaggcatactcttctacccatctcttaccctctaaaaaaaaaaaggcaattattttaattccctgtaatttttaacaatgaattctcaaaataagtaatctaggactattcagggaccaagacatctgaatcaacaagttaaaaaaaaaatgtctgtatacacacacacacacacacacacacacacacacacgatgttgcccagaagctccaattaatgaagagtcttaaaagtttttcatttcatatagtttgcatgaatagagcctgttctattctaatctcaatggcaaataatataaaacagaaagctgaacacaacatgtgtgtgtgtgtgtgtgtgtgtccacttttctgtcctaagagaaaacattaaatacaggtatatttaatatacagtgaacataccatgtgttttcttaaagccaacaaaatcctgatttcctatagcttgga

SEQ ID NO: 45427 - DNA, 595 bp, Homo Sapiens
ttatatatacttagaatccctgatcaataaaataaattgtaatagaaatttttattcctcaaacacatttttgttcctcaaacacatttttaaataaacatgtcttgggaaagccaaagaaaaaaaaatcatacctatatccaaatatgttatattaaaaccttgttccttggcaatttcactaagcagctggatgtaatctgtatttggaatactaaggaggcttcttttcagtaagttgatcttttcaccaggagaattcctcaaggaatgccaagtacatcctaaagaatgtcctactacatttgtctgaaaaacagagatgaagatttagactcttgactaggactgggttccaacacccgtaccagtatcattaaaagtacttattaagcactcacatttaatatgttataaagcatgtttaaatggataacatttggttaattttccaatttaaacaagacaacattaaaaagtacacatttaacaatactatatgtttttaagaagcacttgcaataatatactgaaagcattttgtattttgtatagtacaaatgtttctcagtcaagttttctgatggtcacatta

SEQ ID NO: 45428 - DNA, 945 bp, Homo Sapiens
  misc_feature (942)..(942): n is a, c, g, or t
  misc_feature (945)..(945): n is a, c, g, or t
gaggcgctgacgtcgctggagctggagctcgggctgcaccgtcgtgcgcgagctgcccgagctcttcctgggccagagcgagttcgactgcttctcggacttggggtccgcgccgcccgccggctccgtgagctgctgagggcggccggcgcccgcccggcgtgccggagaggagaaagggcccgactgcccgccggaccctgcacccagcgactgggccccgcgcgcgccctccgcgagggtggaggcggcggctgtgtgcgcagggcccggcaccggactgggaccctggcgtccctccaggccttgcctcctgcgggaggacagtttggcttcacttctctgaccccagcctcggccgtaaagtgaaagagaccggaccagcttcagctttcggactctggttcttggatcgtgtcctctccccctcgccgcctcttcccccaatctgagccattgcaggcctctgcctgctgccccctctctcctcgggatcgggtccccagagccaccatctcctgagctcccacccgttgctgggcctgtggttgctgggctcccactcaaggaggggaaggttgtacagccgaacccgtgagcaatgcctgtttggctcaaaacaaataaactggtcacttacaacccacacataaagacacaaaaataaaacaaacaaaaaacagaaacaaacaaaacaagaggggcgccaaaaaaccacggacacaaagagaccctgtagaaaaagagcccccaaaggaacgacaaaaagaccaggaccaacacaaaacgcggagcaaacacccgcacaattggacacacgggcgtggagaaacacaccacacagacagaaccaatgagcgaggtacccgtcgtgaaaagacagaaaacaagcaaagagagccacagcgtcggaccgagagcacaacacaagcaaacaaaacngcn

SEQ ID NO: 45429 - DNA, 537 bp, Homo Sapiens
  misc_feature (5)..(5): n is a, c, g, or t
cgatnacctgaggtcgggagtttgagacctgcctgatcaacatggagaaacctcgtctctactaaaaacacgaaaaaattagctgggcgtggtggcgcatgcctcattcacgtacatgggagagtctacaaagtcacacgtattcataggttaagccacatgctgacaaatgtcataagaagaccctacacttttaccttggccgatccctcccctcagtgcaagctctgtgcaagagtgaacttgaacttcactcagtgcaagagtgaacacacactttgtgccggctttaaagaacccagcacaaagccagtctgcatggcctacagacatattttgctggacaatgattacttgcttttctttttgtttttcttgtatttgcctgtttgattggctcctgacataccagaaaatcactgtcaaaacattagcttaacatttgttaaggaaacaaaaagacttcggtgaccacaccttataaaccaaacagttttgtaaatcactttggaaaatttcactaaaaaaaaaaaaaaa

SEQ ID NO: 45430 - DNA, 408 bp, Homo Sapiens
tgggcttacattcccaaggcagctgatggaggtgtctcaactgttgcgactctaccaggctcggggctggggggctctgcctgctgaggatctcctgctctacctgaagaggctggaacacagcgggactgatggccgaggggataatgtccccagaaggaacacagactcccgcttgggtgagatcccccggaaagagattccctcccaggctgtccctcgccgccttgctacagcccccaagactgaaaaacctcccgcacggaagaaaagtgggcaccctgccccgagtagcatgaggagccgggggggagtctggagatgagcccccctaccctctctcctctttgttctctcattgttgttattttaataaatgctcagtagtctgtaaaaaaaaaaaaaaag

SEQ ID NO: 45431 - DNA, 700 bp, Homo Sapiens
agcggggggccattgcattgtgcccaagtaataataaaactatttcagatgtattatatgattgagcaaatgagaaaacatgttgatgttgatgggagtcaggatgttcactatggaaaaacaaatatacaaatatgaaatgagggaaggcaagaaagaagcatgtggaaatggaatagaattggtataaactcataatttctaaaccatgtatatgtacgtttatatgtattataattgcatacacatgcctccatgcatatatgtgtgtgataatacacatgcatttatgtgcgtgtgtgtatacacatgcatatatttactaatcctatctgccaaaatggcttagacacaaaaacacctcagcagaaatgaatatacctagcactcagatcttcgtgtctaatatagtttgccactaaaaggaaccaaggctacttggaaaaatggatgattccaaagcaagggcaaggtaggaacaagatgagcttgaaatatcttgttatgccagaaagtaatgttaaaaaaaaaaatagaggtatattgccaaaacatagagccagcttgaaggggctcccactggccaaacttgagccaatctgagagcaaaataattgagaaaacttaataacaagataatcgagaaaaaactaaaataaattcccaattccatggggaaaaactagaaatccatgaatcc

SEQ ID NO: 45432 - DNA, 483 bp, Homo Sapiens
agcaccaagggttcattttcagggaccacgaaccatgccttgtgccatcctttgccacccttctccatgtagtgcaggaagctgcagatgacgctgttctctgcagccactgaggcctgtttctgtggccagagacaccgggcatcaatgttgacagaaggcctagcctggctcctcctagctttaatacctcctcagtgtagggactgctattcctatctcagatgaagacgctcaagctcaggtggcaggagtgatttgtccagtgccacccagtgaatcagctagagctgagattcaaagctaggttcgtctgcctcatttgggcaacggctgctgcctctacaggccagtggaaggagtgtgcggatctcaggcattctttcttcagtcagagcattcattcctcaagccattcacacatttaggcctcatgcttttttctgtctttcatcacatccatttcctacactcattgagagg

SEQ ID NO: 45433 - DNA, 362 bp, Homo Sapiens
aataaaaagtgagcatgatcatgaatatagtaaatcttgtgagttgtgacctaggtgaaggtataatgataacatctggaggaagcatcatttgttcagctacctagggtttactttcagacttttcctacagtttaaagcacttgcgttcagtgtggtacgatctgtttgtaatgttaatcattgactattgttctgctacttggatgttgatagtgaagcagagaacaatttatcatcgtttattatgagtcactatgcacgcaactatgcttaacatggcgaaatgtattaaacactcgtccaactatttatgaaatactttgcataatttaattcgcttttgtacagttttatgtaaa

SEQ ID NO: 45434 - DNA, 543 bp, Homo Sapiens
aaaagaagttgagaaccagagaaaccgacctaagggtattctcccatttggcccgtcctcccctaaagtcaccacctgctgcttttctggagcgcttaccagtgaccaagaggaacagaacacagagcagcctggcagtgtccaagcaacaagcctccgctcctccttcctgcaccctggggctcctgaaactcacatgggtaaaaaagatacagtaaagacataaataccacatttgacaaatggaaaaaaaggagtgtccagaaaagagtagcagcagtgaggaagagctgccgagacgggacagtggatccagtaggaacatagatgcatccaaactcattagactacaaggatcacggaaactgttggttgacaatagcatacgggaactgcaatacacaaaaactggaattttttttcaggctgaggcctgtgtgacaaatgatacgtaagggacatctatttgttgggaaaaaattaaagattgggaatttgcaaaaaaaaaaaaaaacaaaaacaacaacaacacaaacaagaggg

SEQ ID NO: 45435 - DNA, 499 bp, Homo Sapiens
tgggcatggtgactcatgcctgttatcccaacactttgggagtccagggtgggagtattgcttgaggtaagaagtttgagactagcctgggtcccatagtaagaccctgtctcttaaaaaataaatactatctttctctctggcctctccatcctccagacaatcactgaattacaatatttgcttaacagtagattaatgtcaattttctggaattttatatgactgatataacatgtttcctcttttcatacctgagtactctcctgagccctatttatttagatgttcttcttttttctttattattatttttatttcacatagcagggatgcatattttgacattcatcaatcatgatatatgagtagttcattctttttatcttagaatatgacatgctatggaaatcactgtatacgaattcatctgcttatggatatgttattgcttcttatttttgtctgttaggaataaaactgcttgttaagcacaaaa

SEQ ID NO: 45436 - DNA, 700 bp, Homo Sapiens
cttttctacttatgaaatagataattttttaaaattgtttaaactcctggaaattaagtgttattttttattactgcagttgagagataccttttcagaggaaaacaagaggctaaattccatgttaagagctaagtagtatttttttcttaacaattttgccaaaatttcttctactggaccaaaaggaaataaatctacaataaatctactttctaaatattatttaagatgggaaatgtcttttataggtatattctgtataatacccttaattagatgaattatcccttatcattccaaaaatgaaatgctgtgttaaatatctccagggcaaagtggtatgttgactgggacaaacgttagaaattgtattgttcattgcacttgttgccctgttccccaagcttgtcaatgtttagagatactattcgggttgctaaagccattattcatagaaaatttctgcccctacagaagtgtgtgcatgggccttggaaaatctacatgtgtatatctgagtagcgaagcacagattcactctaattgaaagcagcagtttggttttgtaaatgtaattgcaattgacactttcttttccctttcagttattattttttttaaaggacgttatgagaaggcactatgaaaagcctaattggaatagcattatgaaccatgtaatgcatgcccatgcaca

SEQ ID NO: 45437 - DNA, 733 bp, Homo Sapiens
aagaaaggatacaacaaggaaaataagaggttgttaaataaaaattatgccaaagataagcctgtagaaagcttctgtggtgcgtatttggtagattttatggatggatttcgtgaaggataaatagcagcgtcctgaggggggaaaaaaggatagaagtggccaaatacaagagaggaaatgggagaaagaataggatatgaagaagcctggcattgagaggtggtattggcttgttaagaaaacttgtttgcctagcccctaagttctagtctcactcagtattgggtttagggctcctctagattctagtacatcatgatagatcatgcagtcagtaaaagtcctgctgattttccccagtaaagtgctttagtccacacaaagcctgatctttaatccatgcctagaattggcaaatgatgccaggaaagaaaacagttggtagtctcagctatgtagaaaagacaaagacttttagtacatctagtcttaagcgcttccacagctctttcgtatctgtaatgtattttgcatttgatccattttttcctagttactgcacctgggagcgactgccagtactaccacatcatttcggtagtggaggtccccattgaagggtttttttcatagcacatagcatgatcacgtctaggaagatcgttctggctgtagatagtataattatctactaatacaaagggggaaagggacgtgagatgatgtgaaa

SEQ ID NO: 45438 - DNA, 672 bp, Homo Sapiens
  misc_feature (637)..(637): n is a, c, g, or t
aaatgttaacaaggagccaaacttattcgttctggttgtacaatttattttgaccgttttttgggtgaaaattgcaaacagccaagcaagtggctggaatgccccagtctaagaaattcaaaaacaatcactgagtaagccctaattacattaattacattttactcttgactccaggaaaagaaagcaagcttttatctaatctagagggaagtattcgtgagcaataaaaatcacttttttgagttgaataataatcagttaagaatatttaccgcatagcaacacaacatataaagatttgttacaagttgtttacggatgtttgactatttttgctgaagtattttagagtattgaatgtcttctctcttcaagtttctttcatgttcctaatttcagctcctgtagccagagatcacaggtcttccctgtgaaactttggtttctttctataaatgtgtgtggttttcagcgctcaactcctgtcttcaaatggtagtaagttctacttctacttctgtcattcagaacattttatgtcaaatgatgtaatgcagaaattcttgtgcatatttgtaactgaaggaagctttttagatttattttgtttttaataaaattcagatttcctatntctaaaaaaaaaaaaaaaaaaaaaaaaaaaggggg

SEQ ID NO: 45439 - DNA, 702 bp, Homo Sapiens
atttgttttgaatgacttccttgatctttaagcactgatgattttcttatatatgaggatgcaaagcattcaagagtttcagcctgttctggtgaggggctccctgacttacataaagttttcagtgcaattttaatagtacatatgctttaatttatttttcttctgcgtgtggtcagacccaattacactgtggctaagactctcaaagtgccagggtttctgtgatgattctgagaatgctgaatacaaatataccttatattctttaaggaaaacggaaaggaaagatcagcagaaatagggttttctcatcttcaccatcaataaacatttattgcgtacctcctatattctgcaaattttccccaaatagaagccagttcagtccacaccatctcttctttgagttgtttatggcctcccttaaggcattttacaaacccataagcctacaatagatgagtatttttactatttgtattaagtgtcataatagcatcaatgtgcacattaccagtatagactgttggagttcactgattgttttcatagatgatgcttcttggggaaaaatagtataggatgtgaaagttttgaattacggttatttaaaaactaacatttgctatggccaaagtgtttacaataagcaataaagtgaaagaacctattataacacagattaaaaaaaaaaaaaaa

SEQ ID NO: 45440 - DNA, 481 bp, Homo Sapiens
tacaattttactgtttcattgcataacatggtagcatctgtgacttgaatgagcagcactttgcaacttcaaaacagatgcagtgaactgtggctgtatatgcatgctcattgtgtgaaggctagcctaacagaacaggaggtatcaaactagctgctatgtgcaaacagcgtccattttttcatattagaggtggaacctcaagaatgactttattcttgtatctcatctcaaaatattaataatttttttcccaaaagatggtatataccaagttaaagacagggtattataaatttagagtgattggtggtatattacggaaatacggaacctttagggatagttccgtgtaagggctttgatgccagcatccttggatcagtactgaactcagttccatccgtaaaatatgtaaaggtaagtggcagctgctctatttaatgaaagcagttttaccggattttgttagactaaaatt

SEQ ID NO: 45441 - DNA, 965 bp, Homo Sapiens
cccagctgcgacctgtgggggagctcagttgggccgacattgaccacctgcagacacacttccgctgccagtgctacttgggctggagtggtgagcaatgccagtgggaccataggcaggcagctggaggtgccagcgaggcctgggctgggtcccacctcaccagtctgctggctctggcagccctggcctttacctggaccttgtaggggtctcctgcctagctgcctagcaagctggcctctaccacaagggctctcttaggcatgtaggaccctgcagggggtggacaaactggagtctggagtgggcagagcccccaggaagcccaggagggcatccataccagctcgcacccccctgttctaagggggaggggaagtccctgggaggccccttctctccctgccagaggggaaggagggtacagctgggctggggaggacctgaccctactcccttgccctagatagtttattattattattattttggggtctcttttgtaaattaaacataaaacaattgcttctctgaaaaaaaaaaacacaaaaaacaacaacagcacaacaaaaaaaaagaaacataacaacaacaacacgacagcaacagcacatgaaaacacaagaaacactagcacgaggggggggcaccacctcatgactcccccaggggggcaccaccacataagataacaccgacaccaacactacgttatacgaacaaacagagaggcacacacctaataaaaggacgggagagtacaaacagacaaagaggaaggagacgcccccgcaggacagcagtagtaaagaaacaagacccgtaagcgtgcgcaggagacgcaaacaacgcccagcgggagggcggagtcacttattgaggaaggagaaggagacaaccactaacttatgtagcggtggaggggagagaacaacatgagaaaggaagaacacaaccagaga

SEQ ID NO: 45442 - DNA, 851 bp, Homo Sapiens
  misc_feature (450)..(450): n is a, c, g, or t
caggccgcccacagtcaacagatgttcacgggagatggatcagcccctctttgcttgtgctatcaaggaaagagatctaaccatgggcaagggtggaacacacccggttcaggtcagggaatgagtgctctaagtgaacagtgaattcttacttctcagcctgtatcaattgtacccagggttcatgattactgtgacccactaagggacgatctttgaggaaacagacctggagggaggtaatttaaggagggaaagtgagtgggttttacagactgcttgtggcgacattcaggaacagaccattcaatggatgacttttcagtacataaaagcaagcagtaatggccaggagagagcaaagatgccctaagaatgacatcagactgaccaaatgtgccttttcaaataagttatgagaacgaatgaattggaattagagcaaggtantggacagaaccatgctagtctttgagagaacgtgtggattgggtggatgttggaccgaatgaatggtaaccttttaatgtgaaacagagaactgatatatgggctgtcatgtcaccctagggtactgtcgctctgtcatgtgtagcaatctttccaaatttttgttggtgggctgaacaaagataaaactaataaagtatgtgtggataccactagacagcacagcttactggactggatgtactagcatgactgaaactatagaaaaaaagaaaagaagataagaaaagtgagagaaggaaagaaaagaagagaaaaaggagaagacagaggaggaagagaataagaagaatgagaagaaaaaaaaggaagaagagaagaggagagaaaggaaagagaga

SEQ ID NO: 45443 - DNA, 942 bp, Homo Sapiens
ggacgcgtgggcggcgaggaggcgagccggagcgacggcggggctggggctggagccgagccggggtcgggcagcagcagggaccccccagaggcggggcctgtgggaccgctatgggcgtggagatcgagaccatctcccccggagacggaaggacattccccaagaagggccaaacgtgtgtggtgcactacacaggaatgctccaaaatgggaagaagtttgattcatccagagacagaaacaaacctttcaagttcagaattggcaaacaggaagtcatcaaaggttttgaagagggtgcagcccagatgagcttggggcagagggcgaagctgacctgcacccctgatgtggcatatggagccacgggccaccccggtgtcatccctcccaatgccaccctcatctttgacgtggagctgctcaacttagagtgaaggcaggaaggaactcaaggtggctggagatggctgctgctcaccctcctagcctgctctgccactgggacggctcctgcttttggggctcttgatcagtgtgctaacctcactgcctcatggcatcatccattctctctgcccaagttgctctgtatgtgttcgtcagtgttcatgcgaattcttgcttgaggaaacttcggttgcagattgaagcatttcaggttgtgcattttgtgtgatgcatgtagtagcctttcctgatgacagaacacagatctcttgttcgcacaatctacactgccttaccttcacttaaaccacacacacaaggtgctcagacatgaaatgtacatggcgtaccgtacacagagggacttgagccagttacctttgctgtcactttctctcttataaattctgttagctgctcacttaaacaatgtcctcttttgagaaatgtaaaataaaggctctgtgcttgacaaaaaaaaaaaaaaag

SEQ ID NO: 45444 - DNA, 687 bp, Homo Sapiens
tagatgcctggaggttttggcgtaaacgagctgaatttgatattcacaggagaaagttggatcccagttccaagcctttagcacaagtttttgtgagttgcaatttctgtggcaagtcaatctcctacagctgttcagctgtgcctcatcagggcagaggttttagtcagtatggtgtgagtggctcaccaacgaaatctaaagtcacaagttgtcctggctgtcgaaaaccacttcctcgatgtgcgctttgtctcattaatatgggaacaccagtttctagctgtcctggaggaaccaaatcagatgaaaaagtggacttgagcaaggacaaaaaattagcccaatttaacaactggtttacatggtgtcataattgcaggcatggtggacatgctggacatatgcttagttggttcagggaccatgcagagtgccctgtgtctgcatgcacgtgtaaatgtatgcagttggatacaacagggaatctggtacctgcagagactgtccagccataaaatgttaccaccttaagagaacccttcaagtgtggagctttctagtaggtgtccttcatagctcagaaacatacctcagaacaagccattcatgacttacctgtaatgggaaaataaatcattctatcagatcagcagaaaaaaaaaaaaaaaaaaaaaaaaaaatggc

SEQ ID NO: 45445 - DNA, 561 bp, Homo Sapiens
  misc_feature (475)..(475): n is a, c, g, or t
aggaaccccccgacctaaccccacctccaagggatgattgataggtcctgtcatttcaaccattcccgtctctggtccgacccttgttcattcatatttaggccccgcccctcagtctggacaagctccgcctccactccaagctccgcccccggagtccctggcactcccaccaggagctggaagggacttccttagcctccgcccttcgccccaatcccccgacccccacaggagctcagagtttgattcagagcacaacctaacaagcaatgaagggcacagtctgaaaaacctggagcaccgcctaaatgagatggagagaactcaggctcagctgagggatgctgtccagagcctgcagctttctccaaggacgcgggggtcttggagtcaaccccagcccctcaaagcaccctgcctcaatggagacaccacctgagctgcccatcctgcctcatcacacgtggtctgngagcagagagatagccatcttagggggggtgtctgactttgccttagccctacttggcttacagtgggattaggtctggggtaccg

SEQ ID NO: 45446 - DNA, 904 bp, Homo Sapiens
tctctggtaatgctttattgatttgagggatcctgctgcacctggctccctacctctccattctcatctgaagtgcccctcaggccttccagacacttgcccccaccagagattataatacactcatgagaattgatatatgtgtgtgtctgtgcaaatgcgtgtgtgtatatatatgtatgtgtatatatatacacacatatatatgtgtgtgtatctctataaacacatatacacacacacacacacacacatatatatatatatatatatatattagctgtacagtatttacaggtacaaataaaataggcttgaaaattacagtggtggttgggacccatctcatttcagtttactcagcagatagaaaaataaagcaccagtggcctttgaatggcatttgaatttccatgtgagcaaagatggctggccagtgggacagaacaggtttggcttaagctccagctggctaagataggcccttccatctggctggcccaggggccaggtctctgcttgagaaaggggctgttatgttagcccactaccataagcaaaagggatgatgacatagacccttgtctcttaaccacactctgcttttgcttggcctgggcagtgtcagtgcgtggccaaaggctacacaggaccccatggggtgggcgataaagtgtgaaacccaagtcagggaatactggtttcactggcatctcgagacttgagaaggaaggtactccactctcacatccttatctatgcccaatcggtatgttacatattaggggcccggcagtgcccattcttaacttagccttataaaattcagaatcggatttacacaaaagaaacagcttcgtggtgaactgggggttgtcactggccttccacccttgtgtccatt

SEQ ID NO: 45447 - DNA, 530 bp, Homo Sapiens
aaatgtcgaggtgaaacgtaaaagcatctggcaggaaggtgagtctgaagccctgcacccgcgttccgactatcagtggggagctgttagcacgtaggattcttcagagcagctgggctggagctcccctgagctcaggaagccccagggtgcaagggcaaggaaatgaggggtggtgggtcagtgaagatctgggcagaccttgtgtggggaaggggtgctgctgtgacttcagggtctgaggtccaaagacagcatttgaaaagaggctctgaagccagtgtttgaagaatttgttcctgaagtacctcctgggggtaggctagaggcttctggcttcagggtcctgaagaacacattgaggtgccgtctgacactggaatagggtgcccttcattcctatgcctgagtccttaactatatttccaacctccagtgaggaggagaagattcggaaatgtgacaggagagcaaacaggacagtttgcatgtgtgtgtgcgcacacatacatgtgcgtgaaagattatca

SEQ ID NO: 45448 - DNA, 607 bp, Homo Sapiens
tgagacccaccttaatgaagggtctctgatttcttgagcatcagcgagtttcagaagtgactatttttttgtactcttctagtttccttgtaactatacactttttcccattccacactgtgcttaaatgacaaagactcttctgagaagccaaattctgtccaagtattaactagagatattgttgattaaagaaaatctagaactgaagtgaaagaagagagttccagttctaatagtcttttgattaacaattcttttctgagaaatgatttttataagaaatggggtgattctttaaatgcttttcttaagttgaaggcacaacagttaatggctgtattgttgctattccgttgctgacatgtttttgataaagctttaacattcctgctactaattttggcggagagtgtttgccaggtttcaatgtgggctgcagctttttgtgctccttctctggtttgcagtgtaatgagttcataagctaaattttcagaaagaattttgtttaagattatgcctcttatctacttgagagcaacatgtcttttcaatcatgggattgacacatgaaaaataaagttatttcttaatcaaaaaaaaa

SEQ ID NO: 45449 - DNA, 611 bp, Homo Sapiens
tataaactgtactttgctgtctgagacagcacatttgtgaatgatgcttgctgcctgccattttcaacctattctctcttaagagtgctaggtaccaaattgtgaaagtttgttttcagttatattacttttgaggctggtgaaaaatttaaatgtaactttgtgggaacactgattcatatttagaaaatgtaaatgtctgtagcactttcttgcagttaatttgaaaactttggatgctgaaccttgtttgtcagtgatttagatgatttaaaaatgcatgtgtgatttgaattttataattgttttgacaagcataatttacttggacaacttcgtaggtagccttaacttctggccaagtttgttttttatataaatatatatacatatatacatattatgtatggttgtaaattcatacacttatcacatgaatgtgttactgtatacaaaactcttaatgctttattctcaaatgctgggttgaaaaatgttttgaaagccttttaaaatatatatctttataaagtaatattcaggatgatgataaaaattgtttatattgttatgataaaaatgacagtataatgttgaaaaaaaaaaaaaaa

SEQ ID NO: 45450 - DNA, 689 bp, Homo Sapiens
  misc_feature (670)..(670): n is a, c, g, or t
ccacaacaccatttgggaaggctgctgcagactggagcccacactgaagaatgcaagaattattggtgaacgaactggcttccggccagtacgcccccagattcggctagaaagagaacagcttcgcactggaccttcaaacacagaggtcatccacaactatggccatggaggctacgggctcaccatccactggggatgtgccctggaggcagccaagctctttgggagaatcctggaagaaaagaaattgtccagaatgccaccatcccacctctgaagactccagtgactgctgcctccccccacaagaactcccttctcccctcagccaatgaatcaatgtgctccttcataagccattgcttctccctcacttctttcctcaaagaagcatgaggtgagagaaagccacaaagtcagtgcctggagaagggttcagcccaacatggggcccctctcatcactgaaatccctctaccttctctgggtctggcattataaagaacagctgaggctgtcattccatgagtcttcagaagaaaggacagctcagaaaatcaaagaggccaactgcccagagccacagaaaatggaggataattgaggctaagtaacctgattacaagttgtactaacatattaaaggttctgaaaagtcctgcagcanagacaaaaaaaaaaaaaaa

SEQ ID NO: 45451 - DNA, 887 bp, Homo Sapiens
cttagacaaattttataacctctctaagcccattttctttatctgtaaataaaggaaaaagatctgtttggatttgggacaggagagttgtctgttttatagggtaatgtttatgaaaataatttatcacctaggtacttagtaaataccagtttctgtctctgtttttcttcaaagctttgttgacaatgtaggatattgccaactaatcctttgacttgagtgcttagccatgccccaatccaggcagcatgaagaatgatcaagaaggggacacctagtggcagttgacctttgaggatctatctaggatcaggttactgatttgggacctctgaatcagtacatcataacatcgagagtgatctctgccaaaattaaaattctgtcagaacagtataagcagaaggaagacattaggtctttctgaaatatggagctgataacttctatcagttctgaattctgtactgtcccacccccaaatcatctatattgttgcatgtgcttagctttgtgccttgaattgctatttcctttttatcttgcactcagatggtatttttagagatgtttcttcaatcaaaacaagataaagttaaaaaaaaaaaaaaaacagtgacccttttgcataagccagaagagcagtgccttgcttcctgtgaaaaatgcttggcagttagcctgtgtaattatttagcaatcatgttaatagatgtttaagaataatggaactggagctgtactgagccaaggatggaaatgaagacatggtgagactatttttttcttcatccaccgatactcttcagttacaagggatttaatttaaaaagggtttttaatttaatgggaatccagaaagctttggaacgcctccagttttt

SEQ ID NO: 45452 - DNA, 736 bp, Homo Sapiens
  misc_feature (716)..(716): n is a, c, g, or t
caaactgtttattcacttctgataggtctgtcattgaaagagatatgtgcacttactgccgaaaacccttgggtgtagaaactaaaatgattttagatgaattacaaatttgctgccattctacttgctttaagtgtgaaatatgcaagcagcctttggaaaatctgcaagcgggtgatagtatttggatttatagacagacaatacactgtgaaccttgctactctaaaattatggcaaagtggattccataactctggcacaaggaaatcaagatgaaaagcactcattaaggaattaaagttacaagttttatcttaataatatgtaatctagaaaagctttcacattgaagatcaactcttgtacaaaattaacaattctgttattgcataagtaatctaattgtcttcaataaggtcacacacataaaaagagccatctggtctctggctagagttagcaataaaaagttcaaatggttccagattccagtgtcaaaggagtgatgcattacactccagccaggtccatccctgctccgtatgttggctgtgagtggtggtttccatttaaaccaagtttctcatttcttcacctttttttctctaagaatttggattcgtagaccttgacatcccgaagaactgtcaaggaagcaagatatgctttcttcatctgcaaaagaaatactaacaacaattttcttatacagnttggcagaaagatgttaaca

SEQ ID NO: 45453 - DNA, 651 bp, Homo Sapiens
attcggcacgaggtccattgctagcttttctgtgttggtgtctaatatttgggtagggtgggggatccccaacaatcaggtcccctgagatagctggtcattgggctgatcattgccagaatcttcttctcctggggtctggccccccaaaatgcctaacccaggaccttggaaattctactcatcccaaatgataattccaaatgctgttacccaaggttagggtgttgaaggaaggtagagggtggggcttcaggtctcaacggcttccctaaccacccctcttctcttggcccagcctggttccccccacttccactcccctctactctctctaggactgggctgatgaaggcactgcccaaaatttcccctacccccaactttcccctacccccaactttccccaccagctccacaaccctgtttggagctactgcaggaccagaagcacaaagtgcggtttcccaagcctttgtccatctcagcccccagagtatatctgtgcttggggaatctcacacagaaactcaggagcaccccctgcctgagctaagggaggtcttatctctcagggggggtttaagtgccgtttgcaataatgtcgtcttatttatttagcggggtgaatattttatactgtaagtgagc

SEQ ID NO: 45454 - DNA, 703 bp, Homo Sapiens
  misc_feature (3)..(3): n is a, c, g, or t
  misc_feature (662)..(662): n is a, c, g, or t
ccngcttccttactctcttttctgggatttcttttttttttctttctgctcttcctccactgctgaactggtccctaactgaaacagcccctgacttagcccaagcatgcttcctttagctgctgtgagaatttgtcttcctcaccagccaggtcctcaggcaaagtcctcagccagtgctttagagcaacttcccgcaaatcagaaactcactgtgattccaaaaatgtttctgagccctggacccctgcccccaaaatattttcatctttcccccaaacctcctttaaaggagcatgcataacagtgtgctgaaagacagttgttggttttttgattttagcatattatttcctgtatgaaatatgttttatataatctcctattatttttatcttatgttttgtattgttgataaatcctttttgtccttctaagatgtcctattgtaaaatcacttataaggtatgattactctttatgctattactttatatgccatttggtaataaatagtaaattgttgatgatatgattgactgatgcgcagtccagagcatgtatgaataatctcataaaacagtatcacagacattaagctaaactgcttcgtttttttgaaagaacaactcatactttggaacagttgtcaatattaattngctgcaaatatttaatttaaataaacatttttgtaccatgg

SEQ ID NO: 45455 - DNA, 666 bp, Homo Sapiens
gctcgagacctgaacaaccagctgacccagaccctcaccagccgctaccgggatagccgtctgcgtgtggacttcgagcggttcgtgtcctgtgtggcccacctcacctgcatcttctgccactgcagccagcacctggtatgggggtgagggggtcatctgcctgacccacagacagtggatggaggtggccaccttctcctaggatctccggatgggcgcacctgctgctcagggcagggttgctgagcaagaccacctccctaggccttgcctggcatgggtgccactctctctggcatccacctgtctggggctagtctctggccctcactgctcacggccgggtgaccactctggcctgcgtactcctcactcagaaacaagaacagcgacagcccctctcgagcagatgacacgagctagtccacgttgacagcttaagacagtgctagctctgccctggctctcctagaaggtggaggacagacacaggagaaataaaaaaagatgatgctgcaggaatccttctttaaaaatatttacatgttttattatcctgtccccagagggtggttttatccagaaaccaagaaaagaaatcatcagaataagactcaaaaaaaacaggtacgggggagcaaaaccatcaaagcaccaggcaaa

SEQ ID NO: 45456 - DNA, 492 bp, Homo Sapiens
  misc_feature (443)..(443): n is a, c, g, or t
  misc_feature (485)..(485): n is a, c, g, or t
agtaattagctcaaacaaaacatctcaagtccccaaaacctttaattccaaaagaaatcccccctctccccgccaaaaaaggcgttcccaccgcccggatggggtagaatggaccttgtaggtggagatgaattttcaggtccgaccccatggccctctcagtttgggccaaaagggatggaggctttacggccacttcccattcggaataactgaaatcccccagcgatggggtaacaattttttaaaactctcgattgccgtttcaattgtggaccggcgccgagggggaaagggaggtgacttcgcccggtggcaatagttccgggagaattggccattggtaaaaagacttcatagggtcactggaatgctttgtgttgtttttaagtagaggtaaaattgagatggggggcgggaggtgacatcatgaagttttttgnaaatatctctttatttaaaaaattgttactccataaaaaaanaaaaaaa

SEQ ID NO: 45457 - DNA, 510 bp, Homo Sapiens
tggatccctgagctccttagaatcagcagtttctgatcaggatgaaagctatgattaccttaatgagttgggacctcgctttaaaagattagcatgcatgtttggttctgcagtgcagtcaaataattagggctttttaccatcaaaatttttaaaagtgctaatgtgtattcgaacccaatggtagtcttaaagagttttgtgccctggctctatggcggggaaagccctagtctatggagttttctgatttccctggagtaaatactccatggttattttaagctacctacatgctgtcattgaacagagatgtggggagaaatgtaaacaatcagctcacaggcatcaatacaaccagatttgaagtaaaataatttaggaagatattaaaagtagatgagaggacacaagatgtagtcgatccttatgcgattatatcattatttacttaggaaagagtaaaaataccaaacgagaaaatttaaaggagcaaaaatttgcaagtca

SEQ ID NO: 45458 - DNA, 661 bp, Homo Sapiens
ttttttttttttttttttagtagagatagggtttcactatgtttggcctcaaactcctgacctcaactgatccgcctgcctcggcctcccaaggtgctgggattacaggtgtgagccaccgtgcccagccaaaattttcattttttgagacggagtctcactctgtcacctaggcgggagtacagtggcgagctcttgggttactgcaacctccgccttcctggcttaagcaatttttgtgcctcagcctcccaagtatctgggattacaggcgtgtgccaccacacccagctattttttattttttatttttagtagagatggggtttcgccatgttggccagactggtctggaactcctggcctcgggtggtcctcccacctcggcctctcagggtgctgggattgcaggcgtgagccaccacgtttagctgagtataattttaaatagccctatgtgacaagtggctactttattggacagtgtagatctaagattaattcctcaactgttttgcactcaacaaagacatacctctgagttggcaaccagcagggtggataacgggccagtggtgataaaatcaaagaataggtaatgaaacaatcatccagttaacaatcagcaaggttcttcagagcctaattaatgtttaattct

SEQ ID NO: 45459 - DNA, 567 bp, Homo Sapiens
aagaacctgaatactgaacttgattcggcagaggaccctaacctgggggtcaggggaaggcatgggggggaccagaaaccagaagaacaatcaagactgcaatgaaaaaaatggatacattaggagcttcaaacacatataatttctcaagaaatttccagatgtctcatgctgcatagggcaggagcctgaaaagctaatttgagaagataataagtaggatttttgttttgttttgcattttgcagtacaaaggagaaatgattagaacttaggaagtgccagtgggttggtgaacatgccatcagtaaaagccctggaaacaaggtcatactagagattggttgtgccttgtcacaactgcaaacaatacctgagtggagtattcaaaaacttgcttagaaagaaaactctaggaacagatggcttcactgaagttattccaaatatttaagaaataataccaggcttttataaacttttctagaagaaaaaagatggaacttttccaattcagtttttgaggccagtacaaccttgacaacaaaacctaaaaaaaaaaaaaaa

SEQ ID NO: 45460 - DNA, 845 bp, Homo Sapiens
agcgggtacaagccctggcccctcctcgacactaagccccccacagactcagcctccaaggaaccgctgagcacccttgaagcatgtcattgtcagtgatacctttttattctatggaactctaacctattcgtgtcatattgaccttttgctgcatgagtcataaattatgaaatcagtcttacagtttttgaaatgtagccagcatttgtaaggctaaacctttttcatgaactgaatttaagtgaataaccaagccacagttcctcctcaaatggagagtgatgatcgacatttgaatctctttgccctttccaacggctatggcatcaggttctaaaataagctcgtaatttttcctgttattttaataatatggaaatattagcatagtgtttcttttgatagtgatagactataatccatatttaaattttatagagaagaaattttattgtactgtgatgtagatatttattatccaggtaaggatttgcccggtgtgtattttttacaattgagacattttactttaatctttaaaaaaaatgcattaaaaacacactcaaaaaaaaaaaaaaaaaaaaaaaaaaaacccggatgggggggaaaaaggggttggggcctttttcacaagaattttaaggcaggggaggattaaaagtgttgtgtgggaaaatgttgccaagagcggtgtggccctttcaaacgggtggtgttaccaacatttaaataaagtggcggactgtaaagaagaatttagtgtggcggtataaaaagggtgattagggaggattacaggtggcacagagtaaaaggtgagaacccccattatcggaggagac

SEQ ID NO: 45461 - DNA, 366 bp, Homo Sapiens
aataaacctggtggacactataaaataaggcagacataggcaaatacttcatgatcccacttaattgtggaatattaaaaacttaaactccgaggcagagggaggaacggtggttactagagtccagaaggtagggaaaatggagaaatgttggtcaaaggttaaaaaccaagttgtaaggtgaacacgttctggagatttaatgtacagcatgggtggtcatcaatgtgttaatttgactgtggtaaccattacagaatgtatatatatacatcaaaacataactgtacatcatgaacatatacaatctttgtgaagtattttaaaataaaaaaggaatgtttactgaaaaaaaaaaaaaaaaaa

SEQ ID NO: 45462 - DNA, 641 bp, Homo Sapiens
  misc_feature (603)..(604): n is a, c, g, or t
  misc_feature (611)..(611): n is a, c, g, or t
acctttgcagggatttttgtcctgctggccaccccacccacacctgtccctggccagcaggccgcctgcaagcgtcaggcacacagggacagacatggcgagcacagtgcaggcccggggcccacgggcaacatggaaccctgggaactgccctcccccttagctcacagtgcctgcggtagccactctaggtcgttggccttccttgaccactccatttaattctctctgctgtttgggttgggtttttccccttagttatctgtgggtttcctgtattttatgttaatatttctattaagaacatgttgggcatgtggacccaagcacctgggaaggaggtggcatctgagacagcctgatacgttcccgtctgtgcacccatggagatccaggcgtgggcccgtggctgtccctggttgtaaattcgagggtctgcatatctgatgttcaggtagacctgggcgcctgggaacgaggccatcagctgccatgcacataacaaagagacaatgcattccttcttatttttcctttttaaaaatcgatgaatcatttgtgatgcttttaacaaagattaaatgaatttgatcagcaaaaaannaaaaaanaaaaaaaaaaaaaaaaaaaaaaaaaaaagg

SEQ ID NO: 45463 - DNA, 652 bp, Homo Sapiens
  misc_feature (611)..(611): n is a, c, g, or t
  misc_feature (633)..(633): n is a, c, g, or t
gtggcgcccaccatctctgcttgctgaaaagctgcagaggccgccaggagcccacgcacctgagacttttacctttacccagaaaggaataaaagaggtcagatgatgacagctgtgtccttaacaaccaggccccaggaatcagtggcttttgaggacgtggctgtgtacttcactacgaaggaatgggccatcatggtgcctgccgagagggccttgtacagggatgtgatgctggagaactatgaggctgtggcctttgtagtgccacccacttccaaaccagctttggtctctcatctggagcaagggaaagagtcctgtttcacccagccacagggagtcctaagcaggaatgactggagagcaggctggataggatacttggaactaagaagatatacttacttagctaaagcagtgttacgtagaatagtatcaaaaatttttcgaaatcgtcaatgctgggaagacaggagaaaagcttaattcttgacatttaaataccagttttccaagtaaggagttgatgtaagagccaccttaaacgatgtcaaatacacattttctttttctgtagactggtagatttaatgtttttcattcattanaataactcattttgatgtacanaaaaaaaaaaaaaaaaaaa

SEQ ID NO: 45464 - DNA, 259 bp, Homo Sapiens
  misc_feature (68)..(68): n is a, c, g, or t
  misc_feature (76)..(76): n is a, c, g, or t
  misc_feature (78)..(78): n is a, c, g, or t
  misc_feature (81)..(81): n is a, c, g, or t
  misc_feature (94)..(94): n is a, c, g, or t
  misc_feature (154)..(154): n is a, c, g, or t
  misc_feature (194)..(194): n is a, c, g, or t
gatccgcgagacctcagcctcccaaagtgctgggattacaggcatgagctaccatgcctggccttctnatgtgccncnctnattaaggctcttnacttccaaggctgtgtggggagatggggtgggggctcttggactgatataaaactttgtnaaatgtagttctttgaatggagcttgaaacgccgcatatncttgctcccacaaggatagtgggcatcatgaattaataaaacgtcctaggattctgcaagctaaa

SEQ ID NO: 45465 - DNA, 850 bp, Homo Sapiens
  misc_feature (796)..(796): n is a, c, g, or t
taaatacctcattttcactaccatacaagaaaaaaacacctattttgattgatcagttcttttgtatgaatatccacctcctttaaatactctatttttatatatatttttatatgaagataaacatgaatttatatttaactgtcttaaattatatttacataaatgcaaatatcacttgatataaacaatacaaatctgcatcttacagatgataatttttttagaagaatgatacagaattaactttaaaaataaaacttttctaatatacacttaaatgcaaacatcatttttaaattttcagtgatttttttaatgacataaaacgttaccaatgtgtgcagcctctccatcatgttttaacatactgtatactctatagcagtattacagtcagtatttcatataattttctttagacctaactgttaccatctgactgaggttactctggtatttatctcttcgctgctgaaataataatggattttagaaacaattgtaataatatcattaataaatgtcttactagtaatagtctgtgtttgtagagtatcttttattttcttttttactgaagatgtacatctatgcaaacagtgaccacttggcagggatattatcatgtggattcaagtattatagcatggttaaacacgattaactatatagttccttctaagcctaatattctttaagtttatgatcagatgaacttcccactgtgccaatgacaaaatgtatgaagataatgtattgtagtgaccaactttttacaaataataataactangaccccttacttaaatgcctaggcaatcactttttaatttgctcccttaacctg

SEQ ID NO: 45466 - DNA, 654 bp, Homo Sapiens
gcaaaggtgtaacttgtaaacttgagttggagtactatatttacaaataaaattggcaccatgtgccatctgtacatattactgttgcatttacttttaataaagcttgtggccccttttacttttttatagcttaactaatttgaatgtggttacttcctactgtagggtagcggaaaagttgtcttaaaaggtatggtggggatatttttaaaaactccttttggtttacctggggatccaattgatgtatatgtttatatactgggttcttgttttatatacctggcttttactttattaatatgagttactgaaggtgatggaggtatttgaaaattttacttccataggacatactgcatgtaagccaagtcatggagaatctgctgcatagctctattttaaagtaaaagtctaccaccgaatccctagtccccctgttttctgtttcttcttgtgattgctgccataattctaagttatttacttttaccactatttaagttatcaactttagctagtatcttcaaactttcactttgaaaaatgagaattttatattctaaaccagttttcatttgggtttggggttggttaataaaacaattctccaatccaaaaaaaaaaaaaaaaaactcgagggggggccgg

SEQ ID NO: 45467 - DNA, 800 bp, Homo Sapiens
gtgagaaaaggggaaagaagatgagcacgtagatgcagatcagttgaggatagaagtgactgagagaatgggaccttgacttccagagactgtcagtcaagagaaatgtgggtctataaaaatctatgtgtgttcattttcattgaatttaaacactttttcaagaagtatcagggtcaatctgtttggacaatctcctatttttacccccttacaaatgtcttaagttagaaaaacctcttattttcaagtagtcatttttttttatgtgagtaccacactgctaaagactgaaatagaaaaaaaaaatgcttttctggttggtagggaaactggcttccctgaaaactactcccaatacagatgtatacatcaaatgcaactgtgattttacgggctctttatctagagataactgatgcactgtcttctttcttagatacccttctgtaattcagctgtggcatagtatgatgtctggagtcctaactgagggttcggaaacacttgtcatcaatttatgtctactctatggaaaaagcaatatacaatgtattccatattccttagctctgagtcttcgaggtcttaaaccgtatattcagatagcgtgctataagctacacattcggaggtattgcaccagaaatttacaactggtgccatttctattaacctagcagaaaaaaaagagttccacgttgggcccccagcaatcccaccctttccgaaatcttcagatgcaaagcccttcttttccgggaaacataatcattttcagcggcgtcatgggactctgt

SEQ ID NO: 45468 - DNA, 672 bp, Homo Sapiens
aacaaggcgaggaggaagtggcctctcaccatgaagcagcattccccattgcagttgtggcatccgggatctgggagctccaccccagagtgggggacctcattcttgctcatctacataagaagtgtccttactctgttcctttctatcccactttcaaggagggaatggctttggaagactatcagaggatgcttggttaccaagtaaaggattccaaagtggagcagcaagacaactttctaaaacgcatgtcagggatgatccgtctctacgctgctatcatccagctccggtggccatatggaaaccgacaggagattcaccctcatggcttaaatcatggatggcgctggttggcacagatcttaaacatggagcccttgtcagatgtgacagccaccctcctctttgacttcctggaggtgtgtgggaatgccctcatgaagcaataccaggttcagttctggaagatgctaattctcatcaaagaggactactttcccagaattgaagctatcacaagctcaggacagatgggctccttcatacgcctcaagcagttcttggagaaatgtttgcaacacaaggacattcctgtccccaagggctttctgacttcctccttctggcgctcctgatgtcactccatcacccaccatcaccgctgct

SEQ ID NO: 45469 - DNA, 718 bp, Homo Sapiens
ctttgaatggttctgctgatgcatcatggaaagacagcagggaactgtagcctgccatcaaaactgtatcaactcttttaatgagcatgtgactgtattaggtacattttgaagaatataagtactgatgataaagtctagtatgcataataggattttggaggcatttcaggaattttccttttatagtatgctttttaggcatctgtatgtgtaatatcatagtatcatttattgctgggatggatcgaaaagcactgcttttacttttctgataagtatcaaaatgattttccagtaccaacttgactggcttttaattattgtcacacacacacaaaattcaactcctcaaggtttgggaaaattgtgtatttttttgtatacaagataaaagtgtcataaaaaggaatggatgaattgttgataggaacattagcagttaatttttacctgatactgagtttactgtaaaataggaaatgcataggaaggaatacctcctaaataatatgccttatagaatgatgaaatcttaccatagttcatactgaaaatgttgtttatttaaaagtattgtggagtgttgaaaataaagatacacaataagtattttctgaagagaaaattaatgaaggtatttaatgatataggaaataagtgacaagttaaagtccattttgtttcaataaaggagttgtgcaaaaaaaaaaaaaaa

SEQ ID NO: 45470 - DNA, 508 bp, Homo Sapiens
acgaaacctagaaactgttggttccgtgtaagtagttgactacgtgttttagaactgtgctgaagacatctgtaagactattttgtgggggaaaaaagtagtttcctttaaggtaaaaagcattttatatgatccttagcacatttttaagttttatcttaagggagacgcgcacaaaagcggctgccaaaccgtttcgtcatcctcacagcaaggaccggacgcttgctagccaccccggagcactgctctccttttaatcatgtattcatctattttaaattgccggcgacgacttttgtctatttatgaagaaaccttgagaacgaagttacagcttatcctaccgtgtgtgtggtttttgggtttcgtttgggtttgggttcttgacgtcgtttgcagctgtttcctggccctggcgagtgtctgtcttggtgcccagtgcttctctcaaatctctttataataaaacttctgaaaagctgaaaaaaaaaaaaaaaaaaaggac

SEQ ID NO: 45471 - DNA, 997 bp, Homo Sapiens
cctggtaaccagcctctccccttccctcgcccataaggagcaagcggcacaaatcgggctcgatggaggaagacgtggacacgagccctggcggcgattactacacttcgcccagctcgcccacgagtagcagccgcaactggacggaggacatggaaggaggcatctcgtccccggtgaagaagacagagatggacaagtcaccattcaacagcccgtccccccaggactctccccgcctctccaacttcacccagcaccaccggcccgtcatcgccgtgcacagcgggatcgcccggagcccacacccgtcctccgctctgcatttccctacgacgtccatcctaccccagacggcctccacctacttcccccacacggccatccgctacccacctcatctcaacccccaggacccgctcaaagatcttgtctcgctggcctgcgacccagccagccagcaacctggaccgtcctggtatctgggatagcaaaggtcttcttccctcgccccttctccatcgtcccaggaatcccagggggcagcacagccggcccccggcccacgtttttggtggaaaattagagtgaacaagaacacccctgccgactcccagcccggccaaaaagacaaaacacatagacgcacacactcaggaggaaaagaaaaaacaaaggcagaagaagaagaagaagaaataaaaacccacccaagcaagaagacaaaaggtaaagacgcaacgtttccaactctcgggacgccaaggccgcagactgggagggccaggccccgccacccccacgggagacccgggacagggcgtcttcctaagttattcatctcctctccgcctgctgctcgggaaggacagacgccggccgcccgcccgcgccccggargccctggctctgtccggagaccaggtgagcacagctggragctgttcamagggccgacagggcgamaccarcaaggcmactytcccgggscccscgc

SEQ ID NO: 45472 - DNA, 757 bp, Homo Sapiens
ctaccctctggtgggaactacttctaagttccctgcagtctctgtcctgtggtagaccatctttttgtaaactgcgagcttcctcttccctgtaccctctgccccagtcgtgaccccctaaaagttaaggggtagttggcacctccttattaatatgccagcctagatcccccccggtggaggggcaaatggctgaatccttgtgtgatattttttttcttcgcttgtttatttattcatttatttaattgtatttattcatttactaactttatgtgttaccaattaattttgtttacccattcctttatccatccctcccctccttttcaggtaaggagacaggaggagtaggaggaggcagggcctctccatgccagcctctgtggtccttgcccaaacccatcagcgcaatacttgaaccttctcccaggtaggggcaggaggagccacatgagagagggagaaggaccgcgtttacctttagagttttgttttgttttttccttctgagtttgctgttggtgcaggaataagggaaaggcccaaggtatccaagcctggggaagggcaggccagccagcacctctgccttctcagggacaagagtagtcctttaccaccctcactctggctgttccctctcctactctacagcattaaagactgtgggaccaggaccctaagtctcctttccttctggtgggggagttctgggcgtcttggtggtgggggcaaagttctttcattgcaccca

SEQ ID NO: 45473 - DNA, 699 bp, Homo Sapiens
gggcttgccctacttaactctccaatgcaatccatgctgccagcttcatacagactccatccagtgcaaatggcttccttctgtgtgcagagcaaatgctccagggaagagatacagaggattccccatcatcattgttgccaagtgaccccaaatattcctatcctgtctgttgtaaaaaggaaaaatcatgtcttggaagaacagcatcgccctacagatacagactaggcactttgcacatgaaacaagagtcccagaaatttctagaagcaaatctcgcattcgtgaccgccagacctacgggatgtgtaaggcacattctcaatctcatcacttgtgagagttgcattgcctactccagcagccgtgaaggactctctgctgtttttcctctgcttcatttgacacatgagagagaagagatgaagatggaggcgggccctgccccggggacatgtatatctctctgaatgtccttgacagacagcagcagcccagcaatgcccagcccccatcctgtctgtatgcaccctggtgagcattttctacagtctcctaaacgctcccattattctgttttgcaggtgtgatgtgtggcacctcagtgttgtcatagcttctgcctcctccgtgtggagagagggcataaagacagagctgagatattatggctattccagaaaataaatatttttt

SEQ ID NO: 45474 - DNA, 534 bp, Homo Sapiens
aattattaaaaacagaagtgctacatcacctgtctttcgccctgactctccaaatgaacataaagacacaccaaaaggctggtaacagagctagctgggacaatcactgcatctatagaacagccaataccttgaaaaactaggcacaagtacatgaggaattcttatcaaagatcatgcacaatccatgccacttaaatgggttttagctgaggttttgctcatgttactctgaatttctaaggacagatcagtgaccctcttagcctgagcagaaagcatattcttcccactgcagtttcctacacaatttagtcctgattagatgaggcattatagcagcacctgaagtagagcctccagaatccactgcccttttcatcaaaggctatttggttccaccctcaggattggcatactcacgagacatttcacaatcctaatgcatactttaggttacttaattaaccaagcaatatgctctgtcaaagaacttatttcaagtcaaagcaaaaaaggccttaatgcagaaca

SEQ ID NO: 45475 - DNA, 461 bp, Homo Sapiens
  misc_feature (146)..(146): n is a, c, g, or t
ctatgaaaaaaaaaaaaaaaaaacggaagctccaacaggatggtacttaatggggcatttgagtggagaggtaggtgacgtagtgctttggagcccagggagggaaaggttctgctgaagttgaattcaagactgttctttcatcncaaacttgagtttcctggacatttgtttgcagaaacaaccgtagggttttgccttaacctcgtgggtttattattacctcatagggactttgcctcctgacagcagtttatgggtgttcattgtggcacttgagttttcttgcatgcttgttagagaaaccaagtttgtcatcaacttcttatttaaccccctggctataacttcatggattatgttataattaagccatccagagtaaaatctgtttagattatcttggagtaagggggaaaaaatctgtaattttttctcctcaactagatatatacataaaa

SEQ ID NO: 45476 - DNA, 591 bp, Homo Sapiens
ggaaaacttgtctaaggctcatcaagatggcctgacccagagtcacctaagagaactcttccaacttaaatgactagggtgtgtaatcagttgcttcttattctgtgtctcagatttcctagtccatgacatttaatagtgagtatagagtaggatattctatacattttagtatttggcccttggaaacaaagttaaataccatgtcactcagaagactctcaaagtttgtgtataaatggcgaagtatgcactatgagagattctaatccattcacatcattcttgagttgtgcaaatacacttggctttgatttcacttggtgatctaaatttgtttatttaagctgcaagaaagttacattaatttggaatgtgtcatcacttggacccagtatatcagatttttattgagtaaaatgttaaaaataataagtgtaactcagattctggatgttcgagtttacaatacattgcctgtaataaaagctgattctgaagtgcatttttcttgacttactttggcagaaatatacttatatcttaatttatagtttgtaagtttatactgttttctaaaagtaataaatc

SEQ ID NO: 45477 - DNA, 643 bp, Homo Sapiens
aaaaaaacttgactactttatattcttaaaggaatattctttatatacttcaaatttagaacttaactttaaaagtttttcttctgtaattgttgaacgggtgattattattaactctagataagcaggtactagaaaccaaaactcagaaaatgtttactgttagaattctattaaattttaagtgttgtattctttttcattgggtgatgtcagggtgataaccagacattcatggaaaggcatgcagtttgtccattgtgacagtttgtttaataaaaccacatacacactttatttaagattaaaatctaactggaaagtcagcttggaaaatggacatttccaagtatgtttggtgagtcacagatataaaaatagaaattctgatgagaggtttcagtttttaataccaagtccttaggagtcttaacattggccagcatctgtttatcaaatgacataaatacgtaaacctataagaattaagtttattaattaggcaatttatgtctgtgataattcttacgggagaaagaggatttgattggaaagcagtttgggaagaaagtgctgctgaaatttccagaatttaattgattggttacataaactttttgacttcaaaaaaaaaaaaaaaaaa

SEQ ID NO: 45478 - DNA, 582 bp, Homo Sapiens
  misc_feature (491)..(492): n is a, c, g, or t
  misc_feature (512)..(512): n is a, c, g, or t
  misc_feature (557)..(557): n is a, c, g, or t
  misc_feature (581)..(581): n is a, c, g, or t
actatattgctaattttttcttttgtgtgaattactgaatatttcagagcaaagctatcaacttggagaaacagggattaaaaataaggataaacactaataagagctctagaaaaaagggaacagaaagtctgcctgtttagtaagtggcaattccatacatattttagagttttttctatctaaaattagttaaatacttagaatgtttgtaatgagtgttcgatatttgctataggttttagggttttgtaaatcttcatagtaattataaacatttgtaaaatttgtaaaatactataagtcattttgagtgttggtgttaagcatgaaacaaacagcagctgttgtccttaaaaatgaattgacctggccgggcgcggtggctcacgcctgtaatcccagcactttgggaggccgaggcgggtggatcatgaggtcaggagatcgagaccatcctggctaacaaggtgaaaccccgtctctactannaatacaaaaaattaaccggngcgcggtggcgggcgcctgtagtcccagctacttgggaggctganggcagagaatggcgtgaacccggna

SEQ ID NO: 45479 - DNA, 580 bp, Homo Sapiens
  misc_feature (22)..(23): n is a, c, g, or t
  misc_feature (364)..(364): n is a, c, g, or t
  misc_feature (520)..(520): n is a, c, g, or t
gcaatgttcctccctccaactnngtccctggagccagaacactcacagagacacccctgagagggtggccacagcccaagatgaagtcatcaagacagaaaagcaaaaccgagaaaaacgacgggcacctggaaccagtcacggcttgggaggtgcaggtgccccgtgttaggcgcctttgtcggggacttgcaaggcctcacctgtttggccatgattgatgacgtgactgcttccattttgcagatgaggaaactaaggctcagagaggccacgccacccttgagccacccatggacccctctccatctcctgcctgcgcctttaagtccctgatttattctttccattcattccatctggngaggaacccccccaactcctgccagcttcccctagctggggtctctggtactcttcacacctgcaggggcgtctacactgttcgtctacctggtggcagggtctgagcgggaggaggagggaaagagtgtgttctgagctggacccagcctcttgnttcgagaataaaaactcttcttctcttgcaaaaaaaaaaaaaaaaaaaaaaaaaataggt

SEQ ID NO: 45480 - DNA, 575 bp, Homo Sapiens
  misc_feature (15)..(15): n is a, c, g, or t
ataatgatcactatnagggctgagtgcagaatggagtgtatgtggtcaagagtggaagctgtgaggctattgcagtaatccagaaagaaaggtgacaatggcttagacttcagtggtagtgttggaaatggacataaatagacatattcaggaaatatattgatcttagatctaataagacacgtaatagattagaagtagggaaattaatgaaaaagcagaattaaggatgacttctcactggcttgaaatgctaaatggatgacggtgctgtttagtgagttggggaagactgggcgtggtgatgggtgtagaaattgagaaaggaaaatcaagaatttccagaactttcagagcaatgttaaatactttccttgatagtgggtcagtcatcatttataagtgcatttctaaaaatattgcttaattttgtttttgagctttgtataagtggaattttgtgtgtactgattattttgctcaatactatgtctttaagattctctgtattgttgcatgtggctgagtttatttttgatgctgtgtagtgttttactaattaataaaaaaaggac

SEQ ID NO: 45481 - DNA, 757 bp, Homo Sapiens
gcagttcactgcaaatcttttacattaaggcaaagattgaaaacatgcttaaccactagcaatcaagccacaggccttatttcatatgtttcctcaactgtacaatgaactattctcatgaaaaatggctaaagaaattatattttgttctattgctagggtaaaataaatacatttgtgtccaactgaaatataattgtcattaaaataattttaaagagtgaagaaaatattgtgaaaagctcttggttgcacatgttatgaaatgttttttcttacactttgtcatggtaagttctactcattttcacttcttttccactgtatacagtgttctgctttgacaaagttagtctttattacttacatttaaatttcttattgccaaaagaacgtgttttatggggagaaacaaactctttgaagccagttatgtcatgccttgcacaaaagtgatgaaatctagaaaagattgtgtgtcacccctgtttattcttgaacagagggcaaagagggcactgggcacttctcacaaactttctagtgaacaaaaggtgcctattcttttttaaaaaacataaaataaaacataaatattactcttccatattccttctgcctatatttagtaattaatttattttatgataaagttctaatgaaatgtcaattgtttcagcaaaattctgctttttttcatccctttgtggtaacctgttaatatgagcccatcactaatatcagtgtaaagtctaac

SEQ ID NO: 45482 - DNA, 596 bp, Homo Sapiens
agaaagagaaaaaggagggcgagtggcgagcaggggcctcggccgccacccacacgccccgaagcgtgctcgtcccccgcgcggggctcccggccgccgccctcggccatcggctgctccccggtggcccaggcctcggactccgcggccggcccggcgcggcccagcgccctcagggatcatggcccaggtagcagtgtccaccctgcctgttgaagaagagtcctcctcagagaccaggatggtggtgacattcctcgtgtctgccctcgaatccatgtgtaaagaactggccaagtccaaggcagaagtggcctgcatcgcagtgtacgaaacagacgtgtttgtcgtcggaaccgagagaggatgcgcttttgttaatgccaggacggattttcagaaagattttgcaaaatactgtaggtgttttaattttatcctttgtattcccaatctcaaaaggatcgcaggcaagacttccacagtattttcttctaagctatcataagcattctcctagaaacgatcctaacacatcttcttggattcagcttaccaaataaacactgcttaacactgcaaaaaaaaaaaaaaag

SEQ ID NO: 45483 - DNA, 912 bp, Homo Sapiens
ttctttccaaagctggttattaaccacagaattatagcaggtattcataacttaagtttgaaaatcaatagcgtctgcaaatggattaacagattagagaatcaacagcatcggaaaataggttaatgcatattgcttctaacaagtgcatgaagaaatagaagaagctatgtagctttcagttctgacagaaaagggtgaaggagggtatcatttcaagaaaaaaaatagctatcacgcaatggttatctctgaaaatatttgtattaagatgtgtatacatggccaggcatggtggctcatgcctgtaatcccagcactttgggaggcaggtggatcacgaggtcaggagatcaagaccatcctggccaacatggtgaaacctcatctctactaaaaatacaaaaatgagcggggtgtggtggcccatgcctgtagtaccarctgctcgggagaatgaatctcttgagcctgggaagcagaggttgcagtaaactgagawcgcgtaaatacactacagcctggtgacagaacgagaatccatctcaaaaaaaaaaaaamagtatgcacgtamaaatttcttaacctgtaatcaatgtatgagcwacataattatctttctagttggagtttgttttaggtgtgtaccaactgacatttcagtttttctgtttgaagtccaatgwatwagtgactctrtggctgchctcttcacctgccccttgtggcctgtatamaattctaaatggattttgaactcaatgtcgtcgcttctggtttcctgcatataccaatagcattacctatgactttttttttcctgagctattttcactgagctgagctaatgaactaaaactgagtkatgtttaatatttgtatcaaatacataaaaggaatactgctttttcc

SEQ ID NO: 45484 - DNA, 541 bp, Homo Sapiens
caccatagtcattctttccttacgcaaagcccaaggaatgagctgctgctactttaaagtgtggtcattatgatgaatgtgaaaagagttttggcttgttctaaataatttttacaagttatggtacagacagttgttacatatcaaaaaaaacctgtttattgaaacaggaaataaaaaagggatcttttacattatagaattaaaactaattttttcttgtatataaactaattggtttgattttaaatatttctggcttttattaatatgtcttaattttgagtttgaaaatgttaagtgcaataaaaacatactagtacagattttgttttgttccaattggcatactctggggatgatcacttaaaaaaacagattttacataatgcctacttctggtagatgtcttatgagattgttctgctttttctaagttacttaaatgttggatatgtacatagctgtttcttgttctgtatacatttctcaaatgtacacttgtattataataacctcccagttctaagggatatttgtg

SEQ ID NO: 45485 - DNA, 550 bp, Homo Sapiens
gcgccgtgtgctggattcggaaagttagtattggatcagtgtgagtcctgaagcactttcagtgctgtgagaacgacatccactttgggtttcattcgtttgtaagcagaggagctgtcagtcactcgtgcttctcggtggcctctgagccatggtgtcgagtgaagagtagttcttgtttgttacaacctttgtgagtcagccatgcccgcaaagcgtgctgtgttttagtcctggtaggaatatttatcagagttcacactatataaaacccaacagcttcaactattgccctttcaacagttttgccactgaccggatagaaacggtttcagtctctggatggatgtgtttgtggtttgtaaccattacggtttaaaccatggtttaagaatttgcccaaataacagaaattttgttcgggaagggataaactagatatagcatacagagcctgtttttgagttttagatactttatttgtaaataacttaaaatagctttctgaaaccgtgcattctgtagtttcttcctttcagtgaaattgcta

SEQ ID NO: 45486 - DNA, 828 bp, Homo Sapiens
  misc_feature (759)..(759): n is a, c, g, or t
  misc_feature (761)..(765): n is a, c, g, or t
  misc_feature (768)..(769): n is a, c, g, or t
  misc_feature (774)..(775): n is a, c, g, or t
  misc_feature (777)..(777): n is a, c, g, or t
  misc_feature (779)..(780): n is a, c, g, or t
  misc_feature (782)..(786): n is a, c, g, or t
ggtccccttattgtgccaaatccccaccatcagccttgccattgccttaagatttgattattgcacccaattacctaaccactaaacagaaaggccaccttcactctttgaaaaaggcaagctgtgcttagaaacactgcttttaagagtagcacatttgagtgtgactttttccccccttcactatttcaaaatggttttgaaatggggtcttaaaggtaagcgccctcatacatgactgaaactttgtgagaggtcttatatttgaatggacccttaatgatttatgtgaaatagaatgaagtcctgtctctgtgagagaacgtgcctcctcactcatttgtctctgtctgttttcatagccatcaatatagtaacatatttactatattcttgaatacccttgaagaaagaaatccgttttctattgtgcattgctatacgaagtgaagccagtaaactagatactgtaaatctagatattgtacctagacaaaatatcattgggtctatctctttttgtatctgttgggccagggaagggtttataatccccttctcagtatacactcactagtgcacgtctgaaatagtatcccacgggagatgctgctccacgtctgaggtcacctgccctgtggtggggcacaccaccgtcagcaccacccgttttacagttactttggagctgctagactgggtttctgtggttggaaaaatgccctatataaatctgaaataaaaagggatctgttccgntnnnnnaannaaaannanannannnnnccctggtcggccggcctcgggcccttcaaaaaacttttttaa

SEQ ID NO: 45487 - DNA, 808 bp, Homo Sapiens
ggtagctccctgggcgcttcgaagatccagcggcttgctgtgagtccgggaggcaaaattgtacccatttcaaagatgtgatgactaaagtctcgagagggccaaggctcgcccaaggttgctctgtggtgacagctttacctccttgctatgtattctcagatattgcaaacggacgagagaaaagtggagaatgaatcctggagaaaacaaggtcgttcgacgatttcgacacgtcgcatccctgagagtctctcgtgtcctgatcaactcgagaactggaggcggtgacattttagatgctgcagtgaaagccacagagccacggaaggccgagactccaccatgtttgtgatcttcacattcagcaaactcactcgcactctgcctcatcttatctctagaatgtattttaccacactgtgtcccttctttagtgggaatgtctttggccaaaaataatgaatagttctgacctgacttgctaatacccagtgataaaaggatggaacttgttgggaataaaagaaaactaagcataaaaaaaaaaaaaaaaaaaaaaaaacttgtggggggtatgggcctgaaaaagcttttttaaaaccatctgttgtgcgccgcgggccccatgtgtatagtaccagggtgccaagcggtgtcccaagagaacacccgcggcacagacaaagggcgggaatcccacccaatataaaagcgcgcggggaacacaccgccgcgtttgaaacaactcgaagggatctcaggagcaaacgggagacttaaacagggctccacggagcccatcaaa

SEQ ID NO: 45488 - DNA, 655 bp, Homo Sapiens
atgcaaaatatccagtttcagaaaattacaggtgatgctagaattcctttgcctctcgactcctttcctgtcccagtttctactccagagggcttaggaacttccagcaacaacctaggagtcccagctactgagcagcggcaggagtcttttgaaggattcattgctagaatgtgctctccttcaccagatgcgacttctggaactggaagtcaaagaaaagaagaggagttgtccagaaatagcagatcttcttcagagaaaaagaccaaaacaggtgaatataccaaaaaacactctgataagcaacaccctggaaaggacctgcattcctgatctgactgtcctgaaaaccagaaaagcaaagaaactagggaaactagttctttggttaatgaaccaattaaaagtaggtctttgaaaaaatacgtttctgtcaagaaagaaaatagaatagtgactgtttcatccaagacaaataaaagtaaatccagtccactagaacattctgaaagtgatactcttggatgtgattttgaatttcaagaaagcatccattctctatcacacctttcatatgactaaatcttttgaaactatgtttttacctttaaattttaataaattttcttatgtttttaaaaaaaaaaaaaaa

SEQ ID NO: 45489 - DNA, 720 bp, Homo Sapiens
  misc_feature (564)..(564): n is a, c, g, or t
ttaattatagctaatgattatgtgcagtcagcctgacatctagccacagtaaactcctgttttcttgggatccaaacaccctgtgttttaccattagttttgttagtattgttaactttctttacacaagtaaaccatttccactaccaaaggtttagaaactatggatgaacaaaatgaatctccctgttcattttgagcctacatagacatagagaccaaatatgtcaaaaccttattcaaataaactctcttcagagtgaatacccagggtcaggacagactcagcaaaccttctatatcacttaattctgcccagtgaaaatcagtgaccctgaggcactgccagattctaaagtgcctttgggatcatcagagactgtctataaataatgcaaaatcttgatctggatgtcagtgtatcaaatcttatcaaatccattgacaaatcagtggtgctatactggaaatggctactcctttggatgaaggacctcatttcccagttgcttggaacaaaagagaatttacatattgctgtaagaagggagagacggcagttgntggtagacacacagataagggtgcccaagaataattctgtctggattaaaggtcccagggaagtgacggtgccatttctgtaccaagaggtgaatataatttgcatggttgagtgcagtaattaagaacaaacgactcgactccacaaattaaacc

SEQ ID NO: 45490 - DNA, 509 bp, Homo Sapiens
catgagatgagaatctcttgagcccaggaggcggaggttgcagtgagctgagattgcaccactgcactccagcttgggtgatggagtgagactcaaataaaaaaggtactagttctgcatttcagagttggcttgttgaaccaggctatatgcttccaagatttaaatgtttttctgtattatactctcaattgtgttttaaaaaaatctcttacagaaatctctacctcaggcactaagtgttatgacatgggtagcatattgatattgaaaacttagctaggacttccagccttttaagataatttaaatgtaaaattaaatggttaaccagcaatctaatgtcatgtggtgtgcagtttggatattgcatgaacagctaaggaatcacctgttctagtgccaaagatcactcattgctaattttgttctgtacagcttatgtaatattttcatggtggagacggactctgtgtgctcagggccttgtctctaggaagattttgtca

SEQ ID NO: 45491 - DNA, 545 bp, Homo Sapiens
  misc_feature (8)..(8): n is a, c, g, or t
  misc_feature (19)..(19): n is a, c, g, or t
  misc_feature (113)..(113): n is a, c, g, or t
  misc_feature (174)..(174): n is a, c, g, or t
  misc_feature (295)..(295): n is a, c, g, or t
cctccgtncgctcagtccntgaacgtctaacaaactgactgttccccgctccccgtggtggtacatcggtgcctgttgtctacacgctgtaaggtcactggaaatgtgaacancactattgtcgtgccgcggaggatgggagaggcctggcaagcacaatggaccccgaggctntctcccgacaagtaaagtgacatgatgatgatgactgccaatgtgacttagatagcgttatgaaatggattacgcctttcctagccgagcgtacagagtaagtatcacattcacggatgantagattgccaggtgttcatggatatggaaactgcagcatctcctgtcccccagccatgtcattctagctgtgaactggcacgaatgtcagcagcttttcattcagctgaatgctctttgagagattagggcagagaatggagtgttttaatgagttggaaattcatgctttgatgagatataagacctatgtgcatcttttctaatacctcctgcacccttctcctgaactctgcaaaaaaaaaaaaaaa

SEQ ID NO: 45492 - DNA, 709 bp, Homo Sapiens
caaacacaaactgagccagtggacttgtcaataaacaaagccaggacgtcccctactgccgtttcatcctccccagtttccatgacagcatctgcctcctcaccttcttcaacttcaacctcttcatcgtcttctagtcgtctagcctcatccccaactgttatcacatcagtatcttcagcgtcatcttcgtcaacagtattaactccagggccccttgtggcctctgcatctggtgttggaggccagcagtttttgcacattatccatcccgtaccgccttcaagtcccatgaatttacagtctaacaaactgagtcatgttcaccgcatccccgtggtggtacagtcggtgcctgttgtctacacagctgtaaggtcacctggaaatgtgaacaacactattgtcgtgccgcttttggaggatgggagaggccatggcaaagcacaaatggacccccgaggcctatctcccagacaaagtaaaagtgacagtgatgatgatgacctgccaaatgtgaccttagatagcgttaatgaaactggatctacggccctttccatagccagagcagtacaagaggtacatccgtccccagtatcaagggtccggggcaatcgaatgaataatcaaaagtttccttgttcaatttcaccatttagtattgagagcacaagacgccagagacggtctgaatccccagacttca

SEQ ID NO: 45493 - DNA, 814 bp, Homo Sapiens
ccgtacatgcagctgatagccctgccaaggccagttcagccagtgccccttcatccactccaacaggtaccactgtggtcaaagtgactcctgacctcaagccaacagaagcctcaagttcggcttttcgcttgatgccagctcttggcgtgagtgtggctgaccagaagggaaaaagcacagtggcctcttcagaagcaaaaccagctgccacgatccgcatcgtgcagggactgggagtgatgcctcccaaagcaggccagaccatcaccgttgcaacccacgccaagcaaggggcctcggtggccagtgggtctggaactgtccatacttcagcggtgtccttacccagtatgaatgctgctgtgtccaagactgtagctgtggcttctggggctgcaagcacccccatcagcatcagcacaggagcccccaccgtgcggcaggtccctgtcagcaccacggttgtgtccacgtcccaggctgggaagttgcctacacggatcacagttcccctctctgtgatcagccagccaatgaagggcaagagcgtggtcacagcccccatcatcaaaggcaaccttggagccaacctcagtgggttgggccgcaacatcatcctcacaactatgccagcaggcactaagctcattgctggcaataagcctgttagtttcctcactgctcagcagttgcagcagcttcagcagcaaggtcaggccacacaggtgcgcatccagactgtccctgcatcccatctccaacagggaacagcttctggctcctccaaagcagtctccactgttgttgtgac

SEQ ID NO: 45494 - DNA, 908 bp, Homo Sapiens
  misc_feature (891)..(892): n is a, c, g, or t
accccatgaagatcacagggaaccgggctgtgatggcacttgtctacatctggcttcactcgctcatcggctgcctgccacccctgtttggttggtcatccgtggagtttgacgagttcaaatggatgtgtgtggctgcttggcaccgggagcctggctacacggccttctggcagatctggtgtgccctcttcccctttctggtcatgctggtgtgctatggcttcatcttccgcgtggccagggtcaaggcacgcaaggtgcactgtggcacagtcgtcatcgtggaggaggatgctcagaggaccgggaggaagaactccagcacctccacctcctcttcaggcagcaggaggaatgcctttcagggtgtggtctactcggccaaccagtgcaaagccctcatcaccatcctggtggtcctcggtgccttcatggtcacctggggcccctacatggttgtcatcgcctctgaggccctctgggggaaaagctccgtctccccgagcctggagacttgggccacatggctgtcctttgccagcgctgtctgccaccccctgatctatggactctggaacaagacagttcgcaaagaactactgggcatgtgctttggggaccggtattatcgggaaccatttgtgcaacgacagaggacttccaggctcttcagcatttccaacaggatcacagacctgggcctgtccccacacctcactgcgctcatggcaggcggacagcccctggggcacagcagcagcacgggggacactggcttcagctgctcccaggactcagggacagatatgaggctggcttgaagactacacgtctgatgacaacccctcctctcactggacttgcccacccaaaagaaaggagctcggnngacaatttaagggata

SEQ ID NO: 45495 - DNA, 779 bp, Homo Sapiens
gctttgtttatagcttgcgcattctcatggagaagttatcagacactctggctggtttggaatgcttcttctcaggcatgaacatgtactgttctcttcttgaacactcatgctgaaagcccaagtagggggtctaaaatttttaaggactttccttcctccatctccaagaatgctgaaaccaagggggatgacatgtgactcctatgatctcaggttctccttgattgggactggggctgaaggttgaagaggtgagcacggccaacaaagctgttgatggtaggtggcacactgggtgcccaagctcagaaggctcttctgactactgggcaaagagtgtagatcagagcagcagtgaaaacaagtgctggcaccaccaggcacctcacagaaatgagatcaggctctgcctcaccttggggcttgacttttgtataggtagatgttcagattgctttgattaatccagaataactagcaccagggactatgaatgggcaaaactgaattataagaggctgataattccagtggtccatggaatgcttgaaaaatgtgcaaaacagcgtttaagactgtaatgaatctaagcagcatttctgaagtggactctttggtggctttgcattttaaaaatgaaattttccaatgtctgccacacaaacgtatgtaaatgtatatacccacacacatacacacatatgtcatatattactagcatatgagtttcatagctaagaaataaaactggtaaagtctccaaaaaaaaaaaaaaa

SEQ ID NO: 45496 - DNA, 572 bp, Homo Sapiens
  misc_feature (323)..(323): n is a, c, g, or t
ggagcggcggccgctccaccatttttttttttaaggatatttagaaattttgtgtattatatggaaaaagaaaaaaagcttaagtctgtagtctttatgatcctaaaagggaaaattgccttggtaactttcagattcctgtggaattgtgaattcatactaagctttctgtgcagtctcaccatttgcatcactgaggatgaaactgacttttgtcttttggagaaaaaaaactgtactgcttgttcaagagggctgtgattaaaatctttaagcatttgttcctgccaaggtagttttcttgcattttgctctccattcancatgtgtgtgggtgtggatgtttataaacaagactaagtctgacttcataagggctttctaaaaccatttctgtccaagagaaaatgactttttgctttgatattaaaaattcaatgagtaaaacaaaagctagtcaaatgtgttagcagcatgcagaacaaaaactttaaactttctctctcactatacagtatattgtcatgtgaaagtgtggaatggaagaaatgtcgatcctgttgtaactgatt

SEQ ID NO: 45497 - DNA, 750 bp, Homo Sapiens
  misc_feature (728)..(728): n is a, c, g, or t
aaaactgcaacttgtaaatgtggtaaagagttagtttgagttactatcatgtcaaacgtgaaaatgctgtattagtcacagagataattctagctttgagcttaagaattttgagcaggtggtatgtttgggagactgctgagtcaacccaatagttgttgattggcaggagttggaagtgtgtgatctgtgggcacattagcctatgtgcatgcagcatctaagtaatgatgtcgtttgaatcacagtatacgctccatcgctgtcatctcagctggatctccattctctcaggcttgctgccaaaagccttttgtgttttgttttgtatcattatgaagtcatgcgtttaatcacattcgagtgtttcagtgcttcgcagatgtccttgatgctcatattgttccctattttgccagtgggaactcctaaatcaagttggcttctaatcaaagcttttaaaccctattggtaaagaatggaaggtggagaagctccctgaagtaagcaaagactttcctcttagtcgagccaagttaagaatgttcttatgttgcccagtgtgtttctgatctgatgcaagcaagaaacactgggcttctagaaccaggcaacttgggaactagactcccaagctggactatggctctactttcaggccacatggctaaagaaggtttcagaaagaagtgggggacagagcagaactttcaccttcatatatttgnatgatcctaatgaatgcataaa

SEQ ID NO: 45498 - DNA, 506 bp, Homo Sapiens
ttttgggccgaaaactactaatttcatgctatttctttctctctccctttgttgttatttgatttgggggaagggagtgaggcttgtgcagatttgagctatctgaagacatgaacagaagtcaaataccagtcatatcagtagagccttccattcaaaagtgaacacacttggtagctgaaccatatctgagcagcgtgattctgttgtcttgcatatgttattctctcaggctgtggatctttgttacagctctaggaaactgtagaaatacaatgctatgtagcttttccaccccatggtctctagtgctgcctatcaacttgtccccttttttcccaataacctgtcttccaggtggtacagttagctgtcactcagctgacaccatgatgtggcagcagagagggaaacctacaagtggtttgcctcattgcctttgccacatctgaagttctcagcagcactaccttagacttcatgagctaataggaaactttttatgg

SEQ ID NO: 45499 - DNA, 788 bp, Homo Sapiens
agtggctgggattgcaggcacacgccaccacgcccggctggtttttgtgtttttggtagagacggggtttcaccgtgtcagccaggcttttcttgaacttctgatctcaggtgatcctcccgcctcggcctcccagattgctgggattacaggcgtgagccaccacgcccacctgtaaccattatttttaagattgctaccattggatagttctgtcatggtccaacttttggatatttaaaattgatccctgtgtggctaacagaattaatgtttccaaaaatgttgaaaattatatagttctcttaattccccacctctaactatatttttgggttatttctttaggaacagatgcccaggagtcatattactgagaatctagaaatcttttgcaaagttcttgttatattgccaaattgcttcccaaaagggttgttctaaaccataatttcaccagcaatgtaggggagaaccatttttatgctgcccttgtgagaattgggtatgaaaacatttttaaaatgatttttgatgaggtgaaaataatatttgaatatattttaatttgcctttcccccacttatagtgagcttaaacattttttccttttcctagctgtatttctccctttgttattcgttcttttgtccatttatctactggggagatggggggagtggtatctttttagtttatcagttatttgcattttaaatataaccatttgccatattttaacaacgatttttccattaaataattctttttataaaaaaaaaaaaaaa

SEQ ID NO: 45500 - DNA, 732 bp, Homo Sapiens
gttgccgtaccttcacttggcattcaacaatataagaccattacataatttttacttcaaagtagatgggagtttttgttgaaagtcaaaaccctgtttctcttgctcctctttgaaagtctgttaacattttgagggttttgaatggtgatttgttcccagttggtagtgtgcctccattccctgttaataaaagactgatctgttcttgagccagatattagttgggtggcgaaaagtagctatctggagtcgcgggatgtaaaaacaaatatttcatggaaacgtctaaagaaggtaggatctttattttctttgaatctgatagatatttttggctgctgacctagggaatgattctactctatcacatctgatactatgatacttactgagtagactcagattttgagtaatcataccttgactgtagttgtcatatactctgaaagaaatttatatatcaacctgaaataattggttgaaaccctttgctcaggtactttttaaacttcgtaattatggaaatttgttttaagaaatgttcagtgctgatacatcatctttctgaaaggatgtaagttctgtctgtgatcaatgtgaagtaaaagagttacagccttttttgtaccattttatccctggaatacttacctgtattttaatctgaagtatgatcatttgtgccttctaaagcagattatttaactgattaaagagtcccttgaaatt

SEQ ID NO: 45501 - DNA, 729 bp, Homo Sapiens
tcaggggagcagccacaaagaagcaagtcttgtaaaaggtcttttgcaaaggagagtgaacccagcaatgagagatccttaacagctagtgcccattagggggctaaacctaaagcctgggtggtgatggctcaaacgctaatgagtcagtgaatccttaccgaccccctggcctttataatctgaggcaactttggctgcagcccgggaatgtgcagggcactagggaatacaaggccttcttccctggttgtcttgtaataaaacagccatggggttgtccctccagtccgagagactgtgatgaggcctacatagcagcgatgtggtcaggtaaaaatcaggaacccactgaaatcttgggcaagccaccctgcctgcttgtgcctcggttctctcatatgtcatatataggaggtgaggactccagctccacctgccccaggtgggtgtggtgatgatgaggaaagacaagaggcttgcaaggaccctgaagaggtcggagcatcatacagattcctttattagcccacattctgatgttccctggtgagacttgccccaagcaattgctagtaaatgggggttaatttcttcttcaactccctactgaacaaaaaaagaattgccagacttactaggagaattcagttggtttgagtttcttttggtttgatttggtttggttggtttaaaggttcccttaaacaaccttccttaagcctttgg

SEQ ID NO: 45502 - DNA, 799 bp, Homo Sapiens
cttaggtttgtcatagtaagagtggagaagtaaattctactaaagtggcaaatctggttaaagcctatgtagacaaatacaaatattcacggaaggggagccaaaagaaaactctggaagaacctgtgtctactgaaaaaaacataggctgaaatggggaacgctgtcaaggacattatcaggatatctgcaaagtgcaatttcaacatgtaccattaactgaaaatcatacataactgtgattgaaatttggttttgataaaattatttttttaacataggatatgatgttttgttctaaataaatataggtctgcactgcaacttctgtatccttccttcccctccaccctcccccacaaaattcaagggaaagtaaagggtttaaaggaatgtgcatctttactaggactgtgttatagtgtggatactggaaaatgtatagctttttgattagggcaatggagtgcataaattagaaacttctaagtgcactggttttcaaagagatatatataatgcatttattctgtcaggttaaaatataaagtatgatctttatgattttttccctctaattatagaaagttaaataatgtattaccatgaaaaatgtttctaatattaaatagaacatatcagttgcaaagttcctaatgtgtatttttaaagcacatatctgaataaattgcctagatagaaaaaaaattatcacgagtaaaatttagtgttcaaaacattgagacactcttcacctattgtatgaccaaataaaggttatgctgcctgtttttctttt

SEQ ID NO: 45503 - DNA, 752 bp, Homo Sapiens
agagcgctcgggctgtcggtctagcaggggggactcccctgaggggccgctgcgggtcgccgtcttcggaggcaccggcgagggcagagccaacagcctcttcacggtctgtaaggtcattgtttgccagtcgtgggcagcgcggcaaacctgctgggaaaaggttttctggttggaataggatgagtaccgcaccagctttgccttccagctgagatgtaaatttcaggcctccatcctgtggaacgtgggaaaactatcttgagtgttggcatgttctaagtatgacataatagtttaatgtatgataaatcatgggtgtttagacgaaagatttacacatataaattggaggctttagcggtcttagtgtaactaacttttcgtccccttaacccttgatgcctgttctatgggtctctagagcggaaggagcattatactccggaaacatttgctggaaggggttatgagaaattcctctctgtatgctaactccgtaatacaagcgtttgtgtattttaaaatcacagctgttccaaatataatctagcctcgttttccccctccgtcggatgataggtgttcttcaggacagttttattttaagcaattcttagtctcaagtaaacaccatcattaaaagaactgagaactattatcaattcttcctttggagtccatctttcatggaaaggagaagggaaaacctttttttaaaagaagaaagaaaactgaagtttttgatttga

SEQ ID NO: 45504 - DNA, 634 bp, Homo Sapiens
ttttttttttttttttttattttagaaggtgttttttattagatgcatattttctttcaagcaatttgtaactttcacatacataagaatatgcaaatactaagatgtcagaatgtctttgacttggcccagagggtagggtcctatgctactgttgcactctccacaacttaagagcaaaaggaaagacatttcccttcgttgcttcctgctgacagccacaatgctcaccgttcatattcagaggctgagaaagtcagtagcacctcttattattctgacaccttcattccctgagtagttctcaccacttactattccctcaccttacctgtactatgatggttttagccatcccccaaattcaaaacagtctcaagtatgtgcacaatcatatgagacagaacagaaaaaaacctctctctctccccttgaaatgaacatacccaaacactaaggggtatattcatttcaaagggagggagagacgatcccttctgttgcttctggtttgtctggagaaggcatctggaataagtacccaaggcgccccccccacccccattcagtctgaaatacggaggctggtaaattgtacttttgtgggttttaaggctcaaggcagcttatttcc

SEQ ID NO: 45505 - DNA, 561 bp, Homo Sapiens
agcgggccggagtataatgctccttccgctctagagacccatagaacaggcatcaagggttaaggggacgaaaagttagttacactaagaccgctaaagcctccaatttatatgtgtaaatctttcgtctaaacacccatgatttatcatacattaaactattatgtcatacttagaacatgccaacactcaagatagttttcccacgttccacaggatggaggcctgaaatttacatctcagctggaaggcaaagctggtgcggtactcatcctattccaaccagaaaaccttttcccagcaggtttgccgcgctgcccacgactggcaaacaatgaccttacagaccgtgaagaggctgttggctctgccctcgccggtgcctccgaagacggcgacccgcagcggcccctcaggggagtcccccctgctagaccgacagcccgagcgctctgggccagagaaaactcagcaaaagccgccgctgctaccacctcagcgcctcccccaacgcgcccttccttctcgcggcgcacgtcacgtcaggaccctggcaagaca

SEQ ID NO: 45506 - DNA, 373 bp, Homo Sapiens
gaattcgtcagtcggaaggcaagatcagatcctggaggactttcctggcctgcccgccagccctgctcttgttgtggagaaggaagcagatgtgatcacatcaccccgtcattgggcaccgctgactccagcatggaggacaccagggagcagggcctgggcctgtttccccagctgtgatcttgcccagaacctctcttggcttcataaacagctgtgaaccctcccctgaaggattaacagcaatgatgggcagtcgtggagttgggggggttgggggtgggattgtgtcctctaaggggacgggttcatctgagtaaacataaaccccaacttgtgccattctttataaaatgattttaaaggcaaaaaa

SEQ ID NO: 45507 - DNA, 568 bp, Homo Sapiens
caccgcgcctggcctctcctgaatcttttatctatgccttaagccttttctgttcccttcaggacctaggcttttgaaacccaaaagccaggaaaacatgcctttgttatctgctttctgcaatcacgtctcttccatggggcactgagcagagaatggtgtggccaagtgagtagtgagaagcagtgaggaggtgtgagctaggtgtctgttcccattttagaaaatactgttcctacatcagaaataccacattaagacgtatagagccaggtcactgggatgcttgaacccaaatagctgggattctggacagagtcagcagagtacagaaggctctgaagtgggagacggagctggggtgcatccctcccagtgaggaggggtcatgaggggcgtctgggaagagggacatttgaactaggattagctgagttgccatgatgctaagataatgggagagtgttctttgtggtcaccagtgtccacatggcatcccttccctgagattttcatcactccctgtggtcttcagtcagtaaagctcttagaacacttaaaaaaaaaa

SEQ ID NO: 45508 - DNA, 1030 bp, Homo Sapiens
cttgaaagtaatcatgtctgtaatgtttttcatgcatgcaaaaagcacagacaaaaccactcatgccctattaataaacaaaatacagatcaaagttttcaaaagtaatcactctatttattctaaatgtctgtggctttaggaaaataccaccagctagtacttacctatttaaagatgtagaatttattatcctctaatattcttatcagttgtttccacaactttagtttactattggactttcaaaaatttaaagaattacaagtaaaattcattaaacacttgtgtgtgaatagtaatacacagtaattagtacagcatgttgcttcttcaacaaattgagttttcagggaaatcagcaagtaaatgaaatataaatttttggtaaaagtatcaaacattcatcttgcccatttttcctcttaaactttattatctaatcaaacatagttttccataagatgtaataaaatatagataaggttggaatatttgaggatccatttgtggaactgaatttaatgagacttcattggtgatacactcaatttttactgggtaattagctaataatgttggtcactgtctcacagttcaagtagctttaagatgatgtggcaaggaaaacacaaagcttttgggtaaccagcgttcttaaatgtatggtttttgaccaggtggacccctttagaagtgatttcctgttttaaaagtatgtacttaaaatacctttggctgggatgaatgtagatccccgcagaataccaaaatcctattttttttgactgagtatttgaaaatgcttaatgactgaaaaggattttggaagcactgatgaaagggattttttttaaggttctcaggtactggttcaattatttaaaggtaaagtttaaggatccagaaataccgtgggtttttaaaaggcccaaaaaggctgtgttatttattccgggaatatttttagttaaactttggcaaaaatcctttgggaaaatagagagggatttttgtttcctggggaaaa

SEQ ID NO: 45509 - DNA, 648 bp, Homo Sapiens
attatacttgcatcgaaaggaaaccatttcttcatggtaacgaagctgagcgtgttcttagctcggcctcacttgtctctggcatgattaaaagtctgctattgaaagaaaaagaaagcgaacagttttgttgttttttttgccgtgtgtgctccatagtggaggcgctattttccaattgatgagaatgacaaacatatataatctatctatctatctatctatctatctatctatacagggggcttgaaccttactcacccaagagcttcttacggaatgtggtagaaaaccaagttgtaacgacactgtaacctacctgatgcctgttcgcgcccgccgtgagctgcgcactggccgtggccaccattcacctctgtaatttaatccgtttctcttggattgtctggacgtgcccgatggttctttcttttgctcagtggagttggaggtttgtgttggttttctcattcttgtcttgtttgtgtgggtggattttcaccgaccaatgatatcctcttctgacggtcaccttctttccacttcactggagtccagtattctgtaccacatcacgcaacgtgttattcttgtggtgtaaataaagactgcgttacttgccacaaaaaaaaaaaaaaagaagagggg

SEQ ID NO: 45510 - DNA, 702 bp, Homo Sapiens
taagaaaataacctttatatgatatactatgactaggctgtgtatttcttttcagggatttttctaccttcagggttggatgtagtttagttactattaccatagccaacctgtagttttacatatacattttcttgtggagcaatagagttctccattttacagaagcattttaaatgtagtttgaatattttccacaagatgctgcaatgtgagttatcacttcatttatcttaaagaaagactaaactggttgtcagttacatctgacagaaaaaaaaaaaaaaatcaccgtgtaaccaggttaagtggtaaaataatccaggcgtcagtcaaaggcattttgctgactttaatattgattatatttttaacaggaatttaagaaaatattactggaattaaaaatatatatatattaaacaagaattttctttgctctgtctagcttaaactactactcaagctgcttaagttcttaagtattgtttgtaatcaccaataaataagtgcatttgtaattcatcagtcattattagcttttattaaaagaagattacgttttacatgtactataatctcttgaatttggtatctattaatgagttttaaagatgtaaaacctaaccttttttaaagctccattgtcttatgtttatagaggtttttccataaacgtatttcttacatataataaacttt

SEQ ID NO: 45511 - DNA, 614 bp, Homo Sapiens
gggttgattcattcatctgtgattactgagcatttgccatgtgccagtcaatcagtattaggcaccagagttaccacagtgagcaagagagacatggaccccttctgcaagatgcctagacaattaaatggccaatgaaactaaagtgaggtaagggttctgatgtgaaaagctgagggtgtgatgaggacaagtggcagaaagttcacctggcttggtggaagggaaggtcagagaagacctcttagaggactcagtaatgtccattgaggattttaggttgaagggaatgtttgaagtttgagggcccttttgaggaccaccaagaacttcactgtgctgtaggatattgagcaggaggtgaagctagagagatgtgtaggccacattgcagagtttgaacttggggcaatgggaagccattgaagggttttaaacaacccaagtggtgcattcttctgtaaatgttagagagatcagtggctgccctgcacatcaaaggggagaacgattggagacaggcagattagatggaaggacggagttgtactccaagccaaagatgatggagagtgaattaagttagtgcaatgggaccaagtctagagctattt

SEQ ID NO: 45512 - DNA, 642 bp, Homo Sapiens
cgcgtccgcacagcatgatgggcaagatccctgtcctcctgggccctgaggcccctgccctagtgcaacaggcattgctgaggtctgagcagggcctggcctttcctcctcttcctcaccctcatcctttgggaggctgacttggacccaaactgggcgactagggctttgagctgggcagttttccctgccacctcttcctctatcagggacagtgtgggtgccacaggtaaccccaatttctggccttcaacttctccccttgaccgggtccaactctgccactcatctgccaactttgcctggggagggctaggcttgggatgagctgggtttgtggggagttccttaatattctcaagttctgggcacacagggttaatgagtctcttggcccactggtcccacttgggggtctagaccaggattatagaggacacagcaagtgagtcctccccactctgggcttgtgcacactgacccagacccacgtcttccccacccttctctcctttcctcatcctaagtgcctggcagatgaaggagttttcaggagcttttgacactatataaaccgccctttttgtatgcaccacgggcggcttttatatgtaattgcagcgtggggtgggtgggcatggg

SEQ ID NO: 45513 - DNA, 805 bp, Homo Sapiens
agaaaacaagccagctgaagcaaagaaaactttcaacagtgttagcaaaattgacagaatgtccagaatagtttttccagttttgtttggtacctttaatttagtttactgggctacatatttaaacagagaacctgtattaggggtcagtccttgaattgagacccatgttatctttgggatgtatagcaacattaaatttggtttgttttgctatgtacagtctgactaataactgctaatttgtgatccaacatgtacagtatgtatatagtgacatagcttaccagtagacctttaatggagacatgcatttgctaactcatggaactgcagacagaaagcactccatgcgaaaacagccattgccttttttaaagatttaccctaggacctgatttaaagtgaatttcaagtgacctgattaatttcctattcttccaaatgagatgaaaatggggatcctgtacaaccctttgtggacccttttggtttagctcttaagtaggggtattttctactgttgcttaattatgatggaagataacattgtcattcctagatgaatcctttgaagtaacaaacattgtatctgacatcagctctgttcatgagtgctcagagtccctgctaatgtaattggaagcttggtacacataagaaaactagagatttgaaatcagctatgaattactctatatagtatctatagccatgtacatattacagcatgacaagctcaaataattatgagtcagcccgaaaggatgttaattatgcctacgatgtataactaattgggaat

SEQ ID NO: 45514 - DNA, 524 bp, Homo Sapiens
  misc_feature (522)..(522): n is a, c, g, or t
tgtgtgtgacagggcccctgtctttttttttttcttaaatttttttttttttttatgtgtaggtgcatgtcttggggatttaaaaatttcaaggctggtttacttatgcaaagcatgcctacgtctggaatacttagggaaagaaagcgactccatgttgtccgaattcctcaagggacagaaaaaaaattggagactgttgaaatgcagatttgaagtaatttttttaaaatattattttgggttctgcgacattgtgaaaaattaaagttgttgtgcaatacttaattcagacatgtaccacaagttaatggtagactaacactggggggtggggtctaggcatcatgcttttgtcagcatactcttgagcttttaagtctactatgtctgaactgtggtttcttgtttatccttttttccttagttggactgtaatgtatggtctgtcaacctgtgaatctttaaagtatgattcaggtattggtggattctttactgtgtaataaaaaagttgaaaanaa

SEQ ID NO: 45515 - DNA, 545 bp, Homo Sapiens
tgagaaaaaggcaacaagcaggactgttgccaaaaaactggtggtattcagacctaggctatttttattgtgctttgggataattttcttaattggttaaaacacaaaatcatgggcttagtagagtaaaaccagtaaaaccagatagtagtcactaatcccagtcagccattcaggtctttaggagttccagatgatggatcagcacaagtctgtcgtcaccgaaaattagtcctcttgttcttacaggggagtattagtttaataatcggttttttaaaaaatatttatattataaatatgttgaagatgttaaaaggtgataaattactcagattttgttggataacatatttgttgccaaattccactcttttctgagctgatcagacttctcagctacactgtttttttgaatcagcaagtcaataaacatttatcaaatttccactcttacaaaaaaaaaaaacaaacacaaaaaaaaaaaccaaaaaaaaaaaaaaacaacacaaaaaacactacaaaaaaccaaaaaacacaaaaaa

SEQ ID NO: 45516 - DNA, 582 bp, Homo Sapiens
agtatccgttccgccaggggggaaaggaggagctggagacagattgtaggaccgagcgcgggcaggcgggaggcaacggagctaccagccgctcctctctgctatatgaaatatgggagacgacagaccgtttgtgtgcaatgccccgggctgtggacagagatttacaaacgaggaccacctggcagttcataaacacaagcatgagatgacattgaaatttggcccagcccgaactgactcagtcatcattgcagatcaaacgcctactccaactagattcctgaagaactgtgaggaggtgggactcttcaatgaactagctagctcctttgaacatgaattcaagaaagctgcagatgaggatgagaaaaaggcaagaagcaggactgttgccaaaaaactggtggctgctgctgggccccttgacatgtctctgccttccacaccagacatcaaaatcaaagaagaagagccagtggaggtagacacatccccacctgatagccctgcctctagtccctgttccccaccactgaaggagaaggaggttaccccaaagcctgttctgatctctacccc

SEQ ID NO: 45517 - DNA, 848 bp, Homo Sapiens
gcatgaaggtagggcttacagcagcagagtgaccaaaaggaggcgatggagagctggacactgatgaggctgggtcacttatgggcataaaaacctgggcctctgggttaaagctgtttttgatctccttatccaactcacatccattttcattattatcatccacgtaaagcaccttcactggtcccttttcaccaatttggtaagaaacctcaaatgggtcgatccaaacactaagatcctgtggcagattgccacgaacatcatcaatgtccaaaccactctctttggatgcttgttcaatcactgggtccactttctcccctatgtgtatacatctaaaccccgatcctttgtatggcttttcaggataccagtgcccttcatatttcttcttaagaagtctttcaagttcttcaccaaaaatgttgacacgtctcctgggaagcttattgtacaaatacgaaataataaaatttagtgctacttggatttcaagctgcatagctgctacgccacaaaattaggtttcaactcccccaccaaaaaaaaaaaaaaaaaaaaaaaactttgtgggccgcttgggccctggaaaaaagagttttttaaaacccattcgtgtgggggccgcgggccccaattgtggttaagtgtgaacactggcgtcaacgaggtgcttcccaaagagaaaaaccgcggggcacagaactatggcctgggttctcccacccatttaaaaaagccgcggggcaaacgcgaggtgtttttggaacaaattccagagggaaggttcggaggcaccaacgacggcattctaacagggggatccaagcgaactcgattccatc

SEQ ID NO: 45518 - DNA, 1069 bp, Homo Sapiens
attcccgggatccgagtttcaggcagctggaataaagagagatatcgggggaaagccgcgagaaggccagcgtccctcgctgggagcagagctagccgagtagggcgcccggctgtcaaactggccggcgcagtgcacgctgggccgccccggagcgatcgcagagcccgtcgggagtcgtagtccgggacgggcccgcggcatcgtccgcgacgcagctcgggatccgggtcggggtgtcggccgggttgctgccgggcaccgtcgagcgttagccacccagcattgagctgccagcggctgttctccctaagcaccctcgctcacgtcgcctcgcctcgcctcgcctcgcctgaccggccgcagccttggataccagccttaaatcgagccgactacggcccagccccgcccgcggcgaggtgcgcggggttcggtgcgagcccctcgcccctggccgggccagcctcttgatgcaccggggacgggcgcgcccatccgactcttcgaggggcggcagggccccatctgtgtctttygytctygagcccccagctagagttggcttcagcggaatacctactgtgcgggattattcaacaagccgattgatcacattcttcagctctagcagtgcaaaggcttcactgaaaaagaacattacaacttttttgaaagaaatttgggggtaaatttaattttaaatactgatttttgataacatttgatcttatgacagcatttgtatttttaattacagataggattacactaaaagtcatttctgacctgctcccttacccttatggctaaaataaactgctaggccctgaagcaaaggcgagccatgttctagagcaatgtctttcttgtattaaaatacagccccatgctcacaaaaaaaaaaaaaaatttttggrgtgtaaacatatacatcatcttaatttgagtccttwtgtgttgacggtgtgcagggaagaatgggaaagtaactgtaagtggagcccagaaagaactaacaaattcatgaaaaagtgacattattgytggtctatttttttttwawttt

SEQ ID NO: 45519 - DNA, 594 bp, Homo Sapiens
ttttttttttggcaatagtactaacatagggttttatcttgggatacatatgtattggtctgtttgttgaccttgacatctgatcactgatgtcaatgacctactggcctcattcaggacacctgcagagagtatgcaaagtccgagagaggaaaacagaaatctgtatgtgagatggtcattgtacagaaagaagtggcccctctgcaacatgtcctcacagaaacgaaatggtgtgtagcaatcaacactagaaagtagaccttttgcaaattaatatgtccttgaccttttttgcccttttgtgggggtgaggtggggataaaaagactgtcatatcaagaactgtgacttttctttccctcaaacaataaaactcctttattatcttaatgctcccatgttaacatgtttgctgctaaattacaatgtaaaattgataatggtttatagtgaactgtgctcttccctcattaaaatcccagggtgccctgtaaagatgcagatgtttcttcctgaaaacttctttttttacaaagaaaattagatgtacatgtataattcagtgtgctttgtctttctccagattaatat

SEQ ID NO: 45520 - DNA, 692 bp, Homo Sapiens
cctcccccttcccttctccggttgccttcccgggccccttacactccacagtcccggtcccgccatgtcccagaaacaagaagaagagaaccctgcggaggagaccggcgaggagaagcaggacacgcaggagaaagaaggtattctgcctgagagagctgaagaggcaaagctaaaggccaaatacccaagcctaggacaaaagcctggaggctccgacttcctcatgaagagactccagaaagggcaaaagtactttgactcaggagactacaacatggccaaagccaagatgaagaataagcagctgccaagtgcaggaccagacaagaacctggtgactggtgatcacatccccaccccacaggatctgccccagagaaagtcctcgctcgtcaccagcaagcttgcgggtggccaagttgaatgatgctgcccggggctctgccagatcctgagacgcttcccctccctgccccacccgggtcctgtgctggctcctgccccttcctgcttttgcagccaggggtcaggaggtggctcgggtgtgggctggagaggcagaagccctttcctgttggtgtcccagcacatggagccccttgggctgagcaccaagaccttgaaccttttttgttttaccttttttccaaataacagttgggagaaatatcaatgaaattctgggggtg

SEQ ID NO: 45521 - DNA, 415 bp, Homo Sapiens
tagggtctttgaatgctggaatttttttttttttttttatctttcccatctgtggcagctaaaacaaaaatcactcaaaatattcaggtttacatgttagctctctctcatagggagctgccatacctcacagttcaaagtgtattctatagatcagtaacattatactgacatgtaattgcaatttactatgcagcaaaaatgattcaagaagaaaaataacctacagtgtctgtatacctttgtatacacaattgcttaagttactctgcttttaacatttgtacttggataaaatgcttatgtctgtataggaatgtcacagtgcaagatgctgctagcccaggcacaaagtattaaaattattttgtgaagattggtggttgtattaaaactgctgtgccattatacctcc

SEQ ID NO: 45522 - DNA, 544 bp, Homo Sapiens
aatctctttctctctttctctcctccccacctctcacccttgccctctccatctccctctcccgccctcccctcctccctctggctccccgtctcatttctgtccactccattctctctccctctctcctgcctcctgctgccccctccccagcccacttccccgagttgtgcttgccgctccttatctgttctagttccgaagcagtttcactcgaagttgtgcagtcctggttgcagctttccgcatctgccttcgtttcgtgtagattgacgcgtttctttgtaatttcagtgtttctgacaagatttaaaaaaaaaaaaaaggaaaaaaaaagaaaaaatgaatttactgctgcaggtttttttctctctccatgtgtcactaagtgaagtttgtgccttctatagcaaagagaatattttttacatcctactaacagtagatttttttgtagtgaacattttttgtatttttatttataagtctcataagaaaaatagcaatgttcagttgtataccttgaatctgcagttagaagaga

SEQ ID NO: 45523 - DNA, 654 bp, Homo Sapiens
gcattacgtcacacgtcttggtcaccgttttattaatcatatctttgagtacacaaaccctgaagacggtgtcacttaccagatcaagggaatgacggcaaaccttgcagtgttggtggcctttatcattttggaaaaaaaacccacctttgaggttcaatttaatcttaatgatgtattagcatcctctgaagagttattcctgaaggttcataaaaaagctacaagcaggttatgatttactagagcaagagacaaagaactattcacgaggattctgtgtgtgcttattcgtagaacaacaacaatgccagctgttggaatttgacaggtgtgaatattttttctgcagtatgtagttagaatccttgcctcttttccagttgccttctattgtctgaaaaagtaaaagccattcaaaaatgaaaactatgttcatagtgttgcatattttcacccacaatatgttaataatatttttcttacacatataataaagaatatctggcacatactaggcccttaataaagattttttgaatatataaaaaaaaaaaaaaaaaaaaaactcgagggggggcccggtacccaattcgccctatagtgagtcgtattacaattcactgggccgtcgtttacaacgtcgtgactggg

SEQ ID NO: 45524 - DNA, 671 bp, Homo Sapiens
  misc_feature (671)..(671): n is a, c, g, or t
gggtggaatagcaggctctatgattggtgtgataacattatacaaatcccagatgtacaagctttgtcatttactcagtgctgtggactttcaccatcctgatattaaaactgtgcaggtgtccacagtagatgcttttcagggagctgaaaaggagatcattattctgtcctgtgtaaggacaagacaagtaggattcattgattcagaaaaaagaatgaatgttgcattgactagaggaaagaggcatttgttgattgtgggaaatttagcctgtttgaggaaaaatcaactttggggacgagtgatccaacactgcgaaggaagggaagatggattgcaacatgcaaaccagtatgaaccacagctgaaccatctccttaaagattattttgaaaaacaagtggaagaaaaacagaagaaaaagagtgaaaaagagaaatctaaagataaatctcattcataaaaagacatggtgtaaatattttgtatttatgtaaattcagactcattttacatgatatattttttatatttttattactctaaaccctcttattaaaaatatgatatttaaataacatagtaaacacatgtaaaaattttgttcttcaaaaaagtgtacaaaaggtagtataaaatcctactaataaaaataagctttttttccn

SEQ ID NO: 45525 - DNA, 633 bp, Homo Sapiens
ttatgaggccagtggtttaaacaatcattattgaataccaagcccaaaagtttagttaatacaccaatgtaagttctggtctgaatttgtcaacatatttagaatgtaaatggcattattaaaaatgtatctgatttctctgtgaacagtaatatttcatatttttaagtttaaaaatgttagtgtaagccaggcacagtggcattcacctgtagtgccaaccactcaggaggctgagatgggagaccttttaagcctgagtttgagtcaggcctgggcaacatagatgtgagcacctatctctaaaaatgtaaataaataaaaatctcaaaaaaattaaaaatctcaagtgtaaaaacagttctgtagatagatggtagtgatggtagcacatcaatgtgaaggtatttaatgccactgaactgtacacttataacgaattaggataaattttatgttatgtgtatttactacaattttttaaaaatcgtatatgtagtttaacaggtgtggtcaatatcaaaacttaggtatttaatcttgttaaattatataagcagaaaatgctggaaaaagtacctgtcatagaaaaaaaataacttcctaatcaaaaaataaaactaaacaaagggg

SEQ ID NO: 45526 - DNA, 588 bp, Homo Sapiens
  misc_feature (406)..(406): n is a, c, g, or t
  misc_feature (472)..(472): n is a, c, g, or t
agactgaatcctcaacactgccccttttgagggtctgtgatcctggaacttctctgatggactgggatgcccttaactgaggtctgctgtctggaaaggacaccacaggcccagaatgaaggggcatctggaccaatgacctagattcaacacagggcttggagctggtggtacaggctggttttggcccaatgtgtgttggaggctggaagcccctgaagacctaaactgcctggatgagcttattagggtgaattaatgagtctgtaatttgggaaccttaatgtgagacaccacttaaggagaggaacttggcccagcaagtgatcactctagaagtggacagctatgcactagactgcaccagaatctgttcaacagcgacaccttgtggtaaaaactgtanacgccccatcaggctggatgggaaactagaaacagactgtctcatctttggacagatatccctcanatctcccaatctactccagggaaaagacacttcaagtgagagatattggacttcttgaaaatctaggcctatggaaaattaaagtggttaatggaaaaaaaaaaaaaaaaataggt

SEQ ID NO: 45527 - DNA, 884 bp, Homo Sapiens
gctcgagtgaaagcttgttacataatgattggactcacaattatcgcctgctttgctgtgatagtgtcagccaaaagggctgtagaacgacatgaatccttaacaagttggaacttggcaaagaaagctaagtggcgtgaagaagctgcattggctgcacaggctaaagctaaatgatattctaagtgacaaagtgttcacctgaataccatccctgtcatcagcaacagtagaagatgggaaaaatagaatatttaccaaaatatctgccatggttttattttggtaacaagaagcacaatgtcttttttatttttattttttagtaaacttttactgaagtataccatgcattcaaaaagtggacaaaactgtatacagtctgatagatatttatgtcgtgaacacctgtgtaaccactgccaaagtgaagatgtagaatattggcaacacttcacagcctcattcctgccttttctcagccattacctcccaaacatagcagtttttctgagtttcatcacctttgattcattttgcctgtttttgaactttatataaatggatttatacaaaaaagaaaacaaaacaaaaaaaaaaaaattttgtgggccgacataagggcacagagaaaggctttcataagaacactcgatggggcgcagcgggcccccaaataaggttcatggacacacatggggccaacaacgtgtggtaccaaaagagaatccccggggtacacacaaacacaggggggggatttcccccccgagataaaaaaacgccggggggaagcagcagttgtctataaccactccccaagggggcttcagggggccaacacgggggtttaacaccggggataccaagaggcaatttgattg

SEQ ID NO: 45528 - DNA, 934 bp, Homo Sapiens
tgaaggctctggaggaggggcccgtgaatcccatgacccccgtgacccccatgacctccatgacctccatgtcccccatgacacccatgaaccccgggaacgagctgccttccaggtcctacccactccggggcagccacagcctcgatgacctcctggaccggccgggcaactccatagcaccctcggagtactgggatggccagtcccgctcccgcaccccaagccgggtgccaagccgtgcccccagccctgcacctccacccttgcccagcagccgccgcagcagcatgggcagcacagcagttgccactgacgtcaaggggcacaaatccttttgccactgtcaagcttcgtcccaccatcaccaatgaccgctcagcacccctcatccgctgaggcggggtccgaggtcgtaccccacagtgcacctgcccaggggctgttcagagctggcaatggcagcgacagcagcaacagcagcagatccaagaagcgggtccctgagacggggggtggctgccctccccagaccaccccggcagctgagcagctccaaagcactggcttggggtccgagaccttcaaagtaaagcaggcggaatgggggacaggacaattctcccttcagggcttcaggactctccctgggggccaactcttggccctaaacctctttcccttttctgccccgtggaggagcctgtacctgctcgtgcccaacaatgcctctcgtcctctttgtatgttggatcagagttgcgcatgagcggcaaaaaaaaacaaagaaaaggggcgcgtagatccaggcaatacgccgtttaaggcccaagggataaaggcgaagcaaggaaacgggttgaactctgcgggaccacacgcgaaattgggctcgctagtatcatactgactcaacgcacggcgccaaaacgaa

SEQ ID NO: 45529 - DNA, 718 bp, Homo Sapiens
cgcgtccgccaagggctaggctcttgtttgagtttatggccacctggaattttcagtcatctcatgatacaggcgggaggggcagaacagatagattacgacaggtttggtttttaaattttccaaccaagtggaaaggcaagttggtcttatagaaagcactactgcacttagtagctatgtgattttgagcaaaccacataatctctctaggtccattttcctaaccacaagataaagatgttacattgtcaaagcttgccgtaggatttggggtgaatgaaaattattccttgctttcatcactacctttatagctctcatcactacctttatagctcatcactgtgcctttttttctttcctaagaaagacatcacatccctctcctctcctcctctgtgctcctgtccctccctccccctagcaaggtccaggcaaagctggagatgaggctgagatccagagtttcctagaacgcaacttaggatggctaggaaagggaagcctgactgctcggtcaggagggtgcagtatctcttgctgggaacacagccagttttcacaatgcctagactgtgtatgtctatttgcacaagattgtcttttcctattttggagtggtcagacattttatttttgttcaagattatctggcgttttagacaaatttgcaaaactgtgcttttattgactttttgaataaaactttggtatt

SEQ ID NO: 45530 - DNA, 720 bp, Homo Sapiens
cgcaccaccagccagcgcaggccctggtggagaggcctccctggctgcctctgggaggggtgctgccttgtagatggagcaagtgagcactgagggtctggtgccaatcctgtaggcacaaaaccagaagtttctacattctctatttttgttaatcatcttctctttttccagaatttggaagctagaatggtgggaatgtcagtagtgccagaaagagagaaccaagcttgtctttaaagttactgatcacaggacgttgctttttcactgtttcctattaatcttcagctgaacacaagcaaaccttctcaggaggtgtctcctaccctcttattgttcctcttacgctctgctcaatgaaaccttcctcttgagggtcattttcctttctgtattaattataccagtgttaagtgacatagataagaactttgcacacttcaaatcagagcagtgattctctcttctctccccttttccttcagagtgaatcatccagactcctcatggataggtcgggtgttaaagtcgtttgattatgtaccttttgatagatccacataaaaagaaatgtgaagttttcttttactatcttttcatttatcaagcagagacctttgttgggaggcggtttgggagaacacatttctaatttgaatgaaatgaaatctattttcagtgaacaaacagaacacataaacacgacacaagggcgcg

SEQ ID NO: 45531 - DNA, 683 bp, Homo Sapiens
ttgtagtcattttaaagtacacaaagggcacaatcaaaatgagatgcactcatttaaatctgcattcagtgaatgtatgggagaaaaataggtcttgcaggtttccttttgaattttaagtatcataaatattttttaagtaaataatacggggtgtcagtaatatctgcagaatgaatgcagtctttcatgctaatgagttagtctggaaaaataaagtcttattttctatgttttattcatagaaatggagtattaatttttaatattttcaccatatgtgataacaaaggatctttcatgaatgtccaagggtaagtcagtattaattaatgctgtattacaaggcaatgctaccttctttattccccctttgaactacctttgaagtcactatgagcacatggatagaaatttaactttttttgtaaagcaagcttaaaatgtttatgtatacatacccagcaactttttataaatgtgttaaacaattttactgatttttataataaatatttggtaagatttgaataatatgaattcaggcagatatactaaactgcttttatttaattgtttagaaaatgtatatatatgttgtgtatctaacaggtgctatgaaaatttaaaattaccttaattaaattactttgaccatctttttcactaaaaaaaaaaaacaa

SEQ ID NO: 45532 - DNA, 716 bp, Homo Sapiens
tggatatccgagacaatctgctgggaatttcttgggttgacagctcttggatccctattttgaacagtggtagtgtcctggattacttttcagaaagaagtaatcctttttatgacagaacatgtaataatgaagtggtcaaaatgcagaggctaacattagaacacttgaatcagatggttggaatcgagtacatccttttgcatgctcaagagcccattcttttcatcattcggaagcaacagcggcagtcccctgcccaagttatcccactagctgattactatatcattgctggagtgatctatcaggcaccagacttgggatcagttataaactctagagtgcttactgcagtgcatggtattcagtcagcttttgatgaagctatgtcatactgtcgatatcatccttccaaagggtattggtggcacttcaaagatcatgaagagcaagataaagtcagacctaaagccaaaaggaaagaagaaccaagctctatttttcagagacaacgtgtggatgctttacttttagacctcagacaaaaatttccacccaaatttgtgcagctaaagcctggagaaaagcttgttccagtggatcaaacaaagaaagaggcagaacctataccagaaactgtaaaacctgaggagaaggagaccacaaagaatgtacaacagacagtgagtgctaaaggcccccctgaaaaacgg

SEQ ID NO: 45533 - DNA, 582 bp, Homo Sapiens
aaaagagaggcctcagcttgacctgcggcagtgcagcccttgggacttccctcgccttccacctcctgctcgtctgcttcacaagctatcgctatggtgttcgtgcgcaggccgtggcccgccttgaccacagtgcttctggccctgctcgtctgcctaggggcgctggtcgacgcctaccccatcaaacccgaggctcccggcgaagacgcctcgccggaggagctgaaccgctactacgcctccctgcgccactacctcaacctggtcacccggcagcggtatgggaaaagagacggcccggacaggcttctttccaaaacgttcttccccgacggcgaggaccgccccgtcaggtcgcggtaaaagcgcccgttaccacacatcctgcatccgagagcgcggcctggccctaccctggcaacatcacttaacgacgtctcccaggctcgcctccccagatccaattccttccccttcgcttccgcaggtcggagggcccagacctgtggtgaggacccctgaggcctcctgggagatctgccaaccacgcccacgtcatttgcatacgcactcccgacc

SEQ ID NO: 45534 - DNA, 1096 bp, Homo Sapiens
gagatgtgtgtccgaggctacctggctgtgcggccctacatggacgcggtcgtctccctggtcactctcatgttggacacgggcctgccctgttttcgcggccagacaatcaagctcttgaagcacaggtttagccccaacatgactgagcgcgaggctgcaaatttcatcatgaaggtcatccagagctgcttcctcagcaacaggagccggacctacgacatgatccagtactatcagaatgacatcccctactgaggaggggaccttcgagggcctctgccccatgtgccctcaaagctgtcccacaatcatggagccctgcgacctccctgccctgccgccacatgcagtggaggagaggcctgtggcccaaagaacctggtagcgcctcctggggcagcacgtgggtggcgcagccttggtaacgccatggactgcagcgacaatcaatggatggtgctgtctatgcacaggtgtgagtcctctgtttgcactggacatattccctacctgtcttatttcataggtacatgaagtattgtgtataaaaaaagagataagatttaaccaacatcaacaaaataaaaaccccaactagtccctcatacctccccctacatcccccccccattttacccccccctagccccctatttttccccccctcatcgttcgtttttccccccccttcctttcccctattccccccccccgtttccccctgccattccccccttttcccccccccccccttttcccccatttctcgcccccccccacccgcctttcccccttattctccccccctcccccccccctcccccccccccccctaatccccctgttccccccgccctaatcccccctcccttattttcgccccgttttatttcgtccgacacacacgccaccaatcgacattatcgagccccgccggcgctagtccccgattttcttttccccccccccccctccaagcgaattacatacccccccccccgcacttcctattcatacgcccccctccaatgcacagagataattcgtatcgacccccccctctttactttctactcactcagaccgccgaccc

SEQ ID NO: 45535 - DNA, 437 bp, Homo Sapiens
ctacttcctggaggacgtcttccccaaccagcctggaggcaagaggctcctgcagacccctggcttcctgggacttcagagcagcaaggccccagctggcagtagcctgaccatctggacacagcagagccagggcggcccagggacggcaggagagctcgcggcaccttcctgaggccaagcaaggggagcagggttagggctgttcctgaaaggcagagagcctctgccctgagcctcacagctactcttctcagctctctgggtctggaaggagaacaggctgaggggagctgagaggagctgaggtgctacccggagccccattcacccccacctgcccacttgggaatctgaggcagaggagggtgaggcctgtgtgccaaccttgttcacataccaccttcgtccccccaggccccggccccactcctggc

SEQ ID NO: 45536 - DNA, 906 bp, Homo Sapiens
ggcttccagctgaccagcgccgtggctacaaaaatgtgtttaacgccctgattcgaatcacccgggaagagggtgtcctcacactgtggcggggctgcatccctaccatggctcgggccgtcgtcgtcaatgctgcccagctcgcctcctactcccaatccaagcagttcttactggactcaggctacttctctgacaacatcttgtgccacttctgtgccagcatgatcagcggtcttgtcaccactgctgcctccatgcctgtggacattgccaagacccgaatccagaacatgcggatgattgatgggaagccggaatacaagaacgggctggacgtgctgttcaaagttgtccgctacgagggcttcttcagcctgtggaagggcttcacgccgtactatgcccgcctgggcccccacaccgtcctcaccttcatcttcttggagcagatgaacaaggcctacaagcgtctcttcctcagtggctgaagcggccgggggctcccactcgcctgctgcgcctatagccactgcgccctgggggcctgggctctgctgccctggacccctctatttatttyccttccacagtgtggtttcttcctctgcggtaaaggacttggtctgttctaccccctgctccagcttgccctgctcgtcctgatcctgtgatttctctgtccttggctattcttgcagggagctggaaaacttcctgaggatttctggcctccccctgggttttagtttcagggcacacaggacagcagaagatcccctttgtcagtggggaaaccaaggcagagctgaggggacagggaggagcagaagccatcaagatggtcaaagggcctgcagagggagatgtggcccttcctccccctcattkaggacttaataaatt

SEQ ID NO: 45537 - DNA, 619 bp, Homo Sapiens
tttttttttttcctttttcattcagtttttgttttacagcttttgtagagaccaacccaagtagatgcaggtgggtgttagataaaaacacacatccccaggggacaagccatccagcggtgaggaatctctgccatgttctcttccctgctgcccacaaacgttacggagactcccttagcctccccctcctcttccccactgaggggcagcttgtggagatggaggactcgggcccatagatgcagaccccctaccaaatctagcaatagttctcacccttccaaagctcgagtgccattttgagatgacctaccaatgacatgcagtaaaggacataacctcacagcctttttagaagcatttcgaatatctacagttgcctcaattcacggggcatttcactcctctgatccaggttagaattttgctaaatctgtagcatcctgaatagcacactaatttttttttttagcacactaactttaactacattagttgagtgtagttgatacatctgtggcctcgtgtctataaagagcacactagattgtacccagcacttttggatatgacatgctaattagatgtatttaactattcataggaaagtgtatga

SEQ ID NO: 45538 - DNA, 553 bp, Homo Sapiens
  misc_feature (549)..(550): n is a, c, g, or t
  misc_feature (553)..(553): n is a, c, g, or t
ctgcgccttagccggccttggctctcatctccatgtggctcttgggtgccatgtgtcctactccagagaggagggggccggtcacttgagaagacagcctttatattctgtatgtggcagtgacattggtagccacacctacccagtgtctactaaccacagtgcagatagcccttgggtagacccaggaagtgtgaagacagacactgctgttgccagacaacactagcagaacgatgctggatttgacaacagtgtttgctaggacggcccagagctcatcactgcagttttattagagtgcttctttatctttaatgcagtatctttgaggcctgtaacatcctagatagttgccatcaaacaaggaccgtctcgcattgaaaacagatgtaagaatttctctttcaggcccagaatctgacagtgctttggcttgggtcatgagcagcggggagttgggaagagatttttttttttagagttttacatattggcaggttgtatttttttaatgttttaataaaagtttgacatgacattaattcnnaan

SEQ ID NO: 45539 - DNA, 523 bp, Homo Sapiens
  misc_feature (485)..(485): n is a, c, g, or t
  misc_feature (489)..(489): n is a, c, g, or t
  misc_feature (491)..(491): n is a, c, g, or t
  misc_feature (493)..(494): n is a, c, g, or t
ggtgtaaaaacaactgtgagagatgtctgggcctgcagaagtccagcattgctcaaaaaagcgtgtgttctagtgaacattttcatatatatttattggttatagcctgttaaaatattttcttttttgtattatttatccccctacattatgtatttatatgagggaaaaaaaggaaaaaattgtacttttttagtatttacctgttacaaaggacattgtgtttcctgtcatgtaaaaccagctattttagttactattgtactctagaaaagagctgtagatttatgttaaactcgtacttacgaacaattgtaattagttctaaaaggcatgaactcagctcctaatcgtcactgtatagtcctgaatttgtagaactagagttaattccctcttggaactttctttgttcttcagtagttacttttttccttacctaaaagggttgtctgtcaaacaattcttgaataaactttctgttncccncnannccaccaaccataaaaaaaaaaaacatgtc

SEQ ID NO: 45540 - DNA, 493 bp, Homo Sapiens
cattgctggaaccaccaaggagtgtggaatgtccttgagtgtattatttatgcaagtcacagtcacgttgccatcatggcagctatgtgaaacactaataaatgtgtttttactttttattcccgttaaaactgatgtaaaacaggataaaggcttgttatagtcacttataagtatctgggtctaagtaatttccttagatgtttctaaagaaacattttcagctttgctcccattatgattccaataaggaacgctttcctagtgcaattttaggagtaaagtttgaagagataaaaatagccaaagataggagacgtctgaattttgaatgataaacagtgatgttttaaaaaagctgttgttcttcaggaggcatttgcctaggatattgctggattataccccattggaggcttttaattttatttgtatgaattttccaggatttcattaaaaattattattgtattttttaccttaatgaaagatt

SEQ ID NO: 45541 - DNA, 491 bp, Homo Sapiens
acaattatattgaaggcagtgggagaggggagagggtgggttttacctgatattaaggggtggcaccccttccccaggcctgatgcaggtccatctagacagctcagattagcctaggccatgccctagggacacggcctaggggagctgggctggagggggtctgcctgggtaaggggatctggcttggccctgagctgcttagggacaggtgagtccttgggggcatggcacagagctggtcctgtattctccagggtccggagctggccaggggcggggaggaggaggatggcttctcctgggagaaggtgggctggcctttcttggcaagcggtcctctggcccctggggagtggggtgggtgaggctgtgccttgtagggggagaggggagggggctttgtgtgcaccattctgtaaaacacactcaagattctaagactattaaagaggatttataacaaaaaaaaaaaaaaaaaaagggcggcc

SEQ ID NO: 45542 - DNA, 692 bp, Homo Sapiens
  misc_feature (3)..(3): n is a, c, g, or t
  misc_feature (10)..(10): n is a, c, g, or t
  misc_feature (33)..(33): n is a, c, g, or t
  misc_feature (643)..(643): n is a, c, g, or t
cgnggccagnaattcggcacgagcggcacgagnatgtgggataagcccaggtgcaaggggaggagggcaggctgggagcagagcggagaatgcccatggccctttattccttcttccctcggtccacgaacaggaagaggctgaggccatgctgggcagggtctggatgcccactttccatgcagcagcatttcattgctcaaaaccatccttcctttcccttcgcccttgtttcccacattcccttcgtcctgcccaagggcgggactgaagagctggaagaaagcagtcagtaccctcccaacggcccccctcgaaggtctccactctcctctgggctcctccttgcctaatgcagggggtcaccgctggagaagaaccaccactgtcctcgatgtgtcccaagcctggagcgaatccgtcctcttggctctcccagccctatcacaggaatcattcctgggtttctgtccctctgaggctcaccaggtgtagttggccttgttctttgggggtattagcccttctactttctttctcacccaccctgtaccctcttctgtgtgtctttgctatccccctttcctcccaccacccatgtgcatgagcaaatgtgcaacaaaaccctgggactttgcagtcnaatgaagctgagcttcccacatcccgttcttcggtttgccatgagacga

SEQ ID NO: 45543 - DNA, 893 bp, Homo Sapiens
  misc_feature (730)..(730): n is a, c, g, or t
gcagctagaccgcggggtagtcggcgcgaggcggagcttggcagttccgtccacttcagccgcagcgtccctcgccgggtgtctcgccgcagcctccggagaggaacagaccctcactctctctgtcagaaaaatgtctgctccagctcagccacctgctgaagggacagaagggactgccccaggtgggggtccccctggccctcctcctaacatgaccagtaacagacgactacagcaaacccaggcacaagtggaggaggtggtggacatcatacgtgtgaacgtggacaaggtcctggagagggaccagaagctgtcagagctggatgaccgagctgatgccttgcaggcaggagcatcacaatttgagagcagtgctgccaagctaaagaggaagtattggtggaaaaactgcaagatgatgatcatgctgggagccatctgtgccatcatcgtggtagttattgtaaggcgggactgaagagctggaagaaagcagtcagtaccctcccaacggcccccctcgaaggtctccactctcctctgggctcctccttgcctaatgcagggggtcaccgctggagaagaaccaccactgtcctcgatgtgtcccaagcctggagcgaatccgtcctcttggctctcccagccctatcacaggaatcattccctgggtttctgtccctctgaggctcaccaaggtgtagtttggcctttgttcttttgnggggtattagcccccttctacttttcttttctcaccccaaccctgtaacccctctttctggtgtgggttctctggctaatcccccctttttccttccccaccaaccccaatggtgccatggaagcaaaatgttggcaaacaaaaaaccccctggggaaacttt

SEQ ID NO: 45544 - DNA, 924 bp, Homo Sapiens
gaaaaagcactgcagttgctcagtggtggaaaccatatgacttcaccaaaagtaaaaactattgaggtgtaccttccattttaaaatttttcttcagatcccgttcagttttatttccattgcatctaatgaagcaactgaccctcaggtcacaggcagagagaatcacagcagcagactgctctgggtcagtgacaactgtacatcaggagattgtgttgttttcttcttcacctgctcctatctatggacttcattttagtcaccatggagtaaaaacatatattcgatgatctgctcacattcctgctctctacctacttcttggtattccgaattgttcagttaatttagagaaggccttttctgaagggatatctagaaagcataggaaatccttggttcagagggaagtgggtctgcttcatggttgttaagtctactgtctggcttcttttgcatttttaaaaataagacgatttaattttaatttcataggattttatagaaaagctcttaattttctactagcagtatatagtatcacttctattcttttggttaaaggaaaaggaaatgtccccaaagtattaaagaattaaatgataaaaagagaaaaagaaagaggaaaaaatgaaatagcacaatcaaagaacaataatagaacaccgcgggaggagatcctcttaatcaggggagggacgcggaacaaaaaagcaagacgagatcacaagaacaggaggcgcccagaaacggacataccaaaggtgagctcgcgcatgacacaagcccaacgaactcgctgcatgccaccgcgaggaggggaaaccatcagcgcgaggacacccacacaagatatcagggggccggaagcaatacaatacgactgaagagacgaacgtgattacgccccgttaataaaca

SEQ ID NO: 45545 - DNA, 980 bp, Homo Sapiens
  misc_feature (682)..(682): n is a, c, g, or t
  misc_feature (745)..(745): n is a, c, g, or t
gatctccctctgtctccttttctctgtctttcttggcccctgtctctctccatgttgggggtcctaactcccccaccccatatctacgtgtcctccgggcattgccctctccatggctctggtcaccctgaccctctgccctgcccaccgcaggtcccccggggtcccggaagccccttctggctgcacctgccatgtttacagagggcccctgggctgcgcggccccagcctgggcaccctgatttttaagccatagacctggggtcagggcaggaaggaacttcactctgctgcttccgagaacctcggccgtgacattcggggccgggcgggacccgccccacagactccaacttcccctccaaaccccgaagtgaaacccgccaccgggttacccccacaagggggccgctgcgagaagttcacccacccccgaaaaaataattaaactcgcaggccaggcacggtggctcatgcctgtaatcccagcactttgggaggccaagacgggcggatcttttgaggtcgggagttggaggccagcctggccaaaatggcaaaaccccgcatctactaaaatacaaaaattagccggggcgtggtggcggccgcctgtaatcccagctacttgggaagctgaggcgtgagaatctcttgaaaccaggagatggaagttgcantgaccaaaaatcgtgccactgcactcccgcctgggtaacagagggagactccctcccgctcanaaaaataaataaataaacttgggagagctggccccaaccccctcctaagaaatcacgcctcccccgtaatggtgcccgccgcaatgggcaaatttgcggaacttgcccacgggcccctcccttttgaaggcaaattcaggggctttctcttcgaaaaaaggtgggggtctttgaattccgggttttccctggaacggcaaaaacccctctttcccctccctcttttttgggagaa

SEQ ID NO: 45546 - DNA, 585 bp, Homo Sapiens
gctggggcccaccccagaggaggaagggacttctgggctggggaacagatctttggagtgcctaagacccccacagccccaggaactgagtccagagaagttgaaaagctggggaggtagccctcttggcccctggctgtcctctggcctcaagcccctcaaatccaggggcctccaacctcagaacctttggaatcccacttatcgctcctgagccccaaggggccctgagggtaaggactgaggcactgagggtccctccctatactcctcaggctcctgggtggcctgttatgccagcggcctctgttccctgcagtctgtgctgtgtgtctgggcctgtctcggggctggcctggcagcgctgcacttgccatgctggaaaccagcccaggcctcccagggaagggcccagccacttccagcttttgatcttggggccagaggccgccttacacacaccccaggtgtccatggggagcactggattgctctcccattatgagcatccttcatctgggcagaccccccaccctgcagatgcttctaataaaaagctcttctcatcaaaaaaaaaaaaaaaag

SEQ ID NO: 45547 - DNA, 575 bp, Homo Sapiens
gccgcacctatttttttttttttttttttggctttcacgttttggtaagacttggccaaatagctgctcgagataatcaatcactggtggacaagtttctgctgagtgaggtttctgctgagtggggcgactcaaggcacggtcacgtaggcagcacctgtacaccgcatcctcatacagctgcgggaccgtgcctctgactgtgtgcgtgtgtgtttatctaagtgtgagatgcatccgggcatgtcagggtgtgtacatgttgggaagactgtgtagatttcttgtgtgccgctctctgaatggaggagaggggaagcgtcttacctcgctgaatccctttccattgctggaaagaacacctgggcaggagcggccccaagaccccgcccaggccctcggaagggagcctgaagggttaatccgtaccctgtattaaccagggtcaacccagcggctgacccgcctcttccctgctcctttgccgtttctagcacctggcttacttcctggcacacagtgagcactcaataaatgtatgctgagaatgacaaaaaaaaaaaaaaaaaataggt

SEQ ID NO: 45548 - DNA, 516 bp, Homo Sapiens
  misc_feature (25)..(25): n is a, c, g, or t
atgaaatgtttgccataaaattcanctcctttaatcgaatttgcaaatgtgtcccagggtattttattacttctcatgttaaaacaacatttgaagaatctttgtggattttctgatagtaaaattcagaagtactctccatctgaatctgcaaaagtatatgataaagcgataaaccgaaaaacaggagttcattttcatccaaaacaaacactggacttcctgcggagtgacatggctaattccaaaatcacagaagaggtgaaaaggagtatagtaaaacagtatctagatttcaaacttctcatggaacatctggaccctgatgaagaagaagaagaaggggaggtttcagctagcacaaatgctcggaacaaagcaattacctcactgcttggaggaggcagccctaaaaataatacagcagcagagacagaagatgatgaatgtgatggggaggatagaggaggaggcacttcaggggtgaggcggaggaggagtcaacgtatttcgcat

SEQ ID NO: 45549 - DNA, 472 bp, Homo Sapiens
gcacgagctgtagcacttactagcatttctgaaggttggtcttgagataagattgaaaatgacagttgttgattttctgaggtaatatacccaaataaaatatatgtatgtgtacatgaatctaaactgtcttcttctgttcctcattttgctttacttaaataatctttcatattttttaagtgttttgcccatgtgcttgggtagccttgaagtcaccagaataactaggactcaaattcagaccaaaccaggactagctttttgtgccatgagttagccatggtcctggacccagcaaaaagaatgattatgatggtcagagtaagatgagcaattgcaacataatattctctaatattgtatactgtaaatttattcagctgccctcgtttactcacagtttgcttatttgccaccataagaaatggtacaataaaaattcatgtaatcaccaaaaaaaaaaaaaaaa

SEQ ID NO: 45550 - DNA, 880 bp, Homo Sapiens
tatgtcctcttgaaagcaaatatttaggcttccgtagatgttcaacagtacgagtggtatgtctggtgaatgtctgaccgttgattttgttgtctaatactttcagaatctctttggcagtaacagtcttgatggaggaagcagccctatgatcaagcccaaaggagacaaacaggtggaatacttagatctcgacttagattctgggaaatccacaccaccacgtaagcaaaagagcagtggctcaggcagcagtgtagcagatgagagagtggattatgttgttgttgaccaacagaagaccttggctctaaagagtacccgggaagcctggacagatgggagacagtccacagaatcagaaacgccagcgaagagtgtgaaatgaaaatattgccttgccatttctgaacaaaagaaaactgaattgtaaagataaatcccttttgaagaatgacttgacacttccactctaggtagatcctcaaatgagtagagttgaagtcaaaggacctttctgacataatcaagcaatttagacttaagtggtgctttgtggtatctgaacaattcataacatgtaaataatgtgggaaaatagtattgtttagctcccagagaaacatttgttccacagttaacacactcgtagtattactgtatttatgcactttttcatctaaaacattggttctggggttttcccaatgtaccttacccataattccttttggggagttcttggtttttttgtcacacctacttttatattacaaataactaagtccaacctaaggcctacttttttaagatttgggaaaaattggctgggtttaacaaggccttaacaaaccatttgaaaaatgtggaggagggggat

SEQ ID NO: 45551 - DNA, 699 bp, Homo Sapiens
  misc_feature (643)..(643): n is a, c, g, or t
  misc_feature (664)..(664): n is a, c, g, or t
  misc_feature (671)..(671): n is a, c, g, or t
cttgcttaaaaaatcaccagaggctgccccggcagaagctcctccagcagtggctccaccaccggccccagaaataaagccagaagcagcagaagtggccacagaagaaaaagaagagaaggaggaagaaaaagaagaggaggaggaggaagaagaggatgaagaatcagattcctaaggttagaaatagggagatgaagccaagtatatcaaactcctcaagtactgagtgggaatgagatgtttggtgaagtagaaatagatagctttagtggctctgactcagatatactgatgtagaaggaaggattctttcacttttattatttattttggtaattaaatttacattaatttaatatgttaaatattttagcaccttttgctttttcacatttcatttgaaccattaacatgcatctttggacatcaatgtccttgtctttttggcccaattgttttagtcaccagaaactttttcaggacatgctatcttctatttgtttgacatgcagaatcatatgtacctgaatttattactaactctgggattttcattttaagtaacaactacctattatgtgaggacagttgtttatgtgattggttgttctaacttgccctataaatgtgcattcatcanaggagaagtttttaaatccanaaacaanataaacccgattcatattagacaactct

SEQ ID NO: 45552 - DNA, 593 bp, Homo Sapiens
gagaattcatagtggggaggaaccttatcagtgtaatgaatgtggtaaaactttcaaaaggagctcagcccttgttcagcatcagagaattcattctggggatgaagcttatatatgtaatgaatgtgggaaggctttcaggcacagatcggtccttatgcgccatcaaagagtccacactataaagtaatttgtgaatactgtgaatagtgtaaatacttcagtcagatttttaagtttgttagtcaaaagagtttactttggagcaaaactccataaaggttataaaatactaggtcttgagtctagcttgctttgtgcagcatttcccagtgctaatgtaaagtgtcccttgaaagcttttcctgtgactaatcagaacagaatacagaagaatcattacttccagctcttctcttattaggaatactcaggaaatacgaaaagtgggaatgtaacattgaaacctcattttgtatgaaagtgtcatgaatatagcaacccaggctctgtcactgcatctgattgttagtgtgccaggttatggggctggtgtggactgtgtgaggcacttcgtctcaggaactaaaaaa

SEQ ID NO: 45553 - DNA, 654 bp, Homo Sapiens
  misc_feature (166)..(166): n is a, c, g, or t
  misc_feature (552)..(552): n is a, c, g, or t
  misc_feature (613)..(613): n is a, c, g, or t
ggcccggcccccacgcgccctgctctcacggcctcggcacaggcagcggctgcacgtgttctgctgaagtgcgtctgaaggccgctgcctccgcggggaacagcatcctatcaactgaaagagcagccgccgccgcccccagccggagacccctttcgtttgagtnctgctgttggtgtcggagcacgaggggaggcacggtgcggagagcgtcgcatatgcgcgggaaatcaagaactatgatatttttctgtttaaacagctttttttaatttgctatggtgtttataacaaaaaagaaaatttgaaaaaaaaaatcccaggggagtagcaggagccctttgctgtgtgcyctgtccagtgtcatgagacgggagccctttgctgtgtgccctgtccagtgtcatgagacgggagccctttgctgtgtgccctgtccagtgtcatgagacgggagccctttgctgtgtgccctgtccagtgtcatgagacgggagccctttgctgtgtgccctgtccagtgtcatgaggcaggtgtttgcaaagccagcnctcggttccgatggggtattgctgacctacttttctaggggaaatgcycttaaacactgtnattatgcatttctaatgaaataaaatgtatttatgaccaca

SEQ ID NO: 45554 - DNA, 759 bp, Homo Sapiens
caactctcaaaccttactagacataaggtaattcatactggagagaaaccctacaaatgtggagaatgtggcaaagcctttaaccagtcctcagcccttaatacacataagataatccatactggagagaatccccacaaatgtagagaatctggcaaagttttccacctatcctcaaaacttagtacatgtaagaaaattcatactggagagaaactctacaaatgtgaagaatgtggcaaagcctttaactgatcttcaacccttattggacataagagaattcatactggagagaaaccctacaaatgtgaagaatgtggcaaagcttttaaccaatcttcaacacttactacacataagataattcatactgaagagaaacagtacaaatgtgatgaatgtggcaaagcttctacctgatcctcaaaactcattgaacacaagaaaattcatactggagagaaaccttacaagtgtgaagaatgtggcaaaacttctaaccatttctcaacctttactaaacataagatgattcatactggagagaagttacacaaatgtgatgaatgtgacaaagcttttaaccaatcttcaaccctttctacacataaaagaattcatactggagagaaaccctacaaatgtgaagaatgtggcagagcttttaattgatcatcaaaccttattaaacataagaaaattcatattggagagaaaccctacaaatgtgaagaatgtggaaagcttttaacagtt

SEQ ID NO: 45555 - DNA, 875 bp, Homo Sapiens
ggcctctttctccatcctccttttccacactattcttgccaaatatttctactgaaacccagtttcagcaaggcaaaatgatgggactctcaaacctccctcctcatcttcccttcccctctgtcttatgcctggcctggccttttttgttgttgttggcttttcataagtaagaaaaatttattgtagtatttcaagactgcagaatttcaagtgtatatctataaatctttttttaaaatcttcggctacacagtaacatcaattaaaacagaagagtgagtctaagtctgtaatatgctgtaggaccagataagattttgaatgagactaaacttgactgccatattttaagaggaaattgaaactttatggtggagaatggatgagagcaagtctatgatatatatgtagtcattgtataattagaaacaccaaatgctgaatcctatcactgtgttctttgggggccaggccttggatttggttgtcctttaactccttgaagattatatgtaattataatgagcagaaggcaaataaagtttttgaaaaaaaaccccttgttttccgtattttaaattttgggaataaattttcctttttcagttaaactatccttccccacaaaaaaatatataatttcgtttaaactatcttcccccacggaaaattattatacctaccaacaagtttttgaatggagacctgaaaaagcttgaaaaaaactggggtttttaagccagcccaaaaaaaaaaatttggggggtaaaaaaaaaagggccttttggttccccgggttggggaggccaaaatttccaccccacccacccaaagcaaatttgttccaaggaatttccttttcctgaaaacct

SEQ ID NO: 45556 - DNA, 825 bp, Homo Sapiens
  misc_feature (642)..(642): n is a, c, g, or t
  misc_feature (685)..(685): n is a, c, g, or t
  misc_feature (757)..(757): n is a, c, g, or t
  misc_feature (815)..(815): n is a, c, g, or t
  misc_feature (818)..(818): n is a, c, g, or t
ttattttagcaaatcagtatattttctgtatttaattataaaaaattaacttagtttttaaaatttatttgcaaatatactttactttttccatttggcactatggtttgttgcctacctagctgcatctataatgtcagcttatcctaaggctgtccacgtacttaatttacttaagtgttcattttaagtaacgtgctcactgtgtataggaatttgtattttggaggtgcttgatctatctacaaagaaaaattaattaggaattactttattataaaatgctcctagaagtcttaattgtgtttattttttaaaaaaacaaatgttagacttgtgtgcatggaagtaattaaggtacatcattattgtagtttgaaagttgtacatgataagacattttgtttttactgtatgtttttactgaatgatctattccccatcccaaggcaagcatgaataaaattaggttaaacgtagcatgtggcatcgcagtctcttagaatttgtttcatctattctattttattgaatactgtctgtatctttggctatcctgtttgaagaaaaaggacaaatcaaacatggccagcaagatacagctcctgattcactcttgggttaatgaaaattttctgctanaatgaaaattactaccagaatcactttgaattatggccataanttgctagtctgaaaggcttgagaaggttcaagtcttttgacttaaaccatcgcatattagaaatggaataanctttataatatcccaaaactggtaggtaaaaatgtggagctgaaactttgcaactgtncantcagaaa

SEQ ID NO: 45557 - DNA, 814 bp, Homo Sapiens
gacatgcgctccggccagtgcgtgcaggcctttgaaacacatgaatctgacatcaacagtgtccggtactaccccagtggagatgcctttgcttcagggtcagatgacgctacgtgtcgcctctatgacctgcgggcagatagggaggttgccatctattccaaagaaagcatcatatttggagcatccagcgtggacttctccctcagtggtcgcctgctgtttgctggatacaatgattacactatcaacgtctgggatgttctcaaagggtcccgggtctccatcctgtttggacatgaaaaccgcgttagcactctacgagtttcccccgatgggactgctttctgctctggatcatgggatcataccctcagagtctgggcctaatcatcttctgacagtgcactcatgtatacctgagaatttgaaatcttcacatgtaaatagatattacttctagaggagcttagagtttattgcagtgtagcttaggggagcaacccatggctcacaggtcactaagcgtctccaatatgactattaaaactgtcacctctggaaatacactagtgtgagccttcagcactgcgagaataccttcaagtacagtatttttcttttggaacactttttaaaatgtatctgttttaaggttattctaaattataagtagacctcaaatcattctgtcaccagctagaattcagcagtaaattattccatattatttcctttgcatcaattcattttccagagcactttaaagtcctgatatttctcgatgtgcctgtgatgcctggaaccttctcta

SEQ ID NO: 45558 - DNA, 1113 bp, Homo Sapiens
  misc_feature (743)..(743): n is a, c, g, or t
ggtcccatggtctcagcatctgtcaaggatcaaggtcccatggtctcagcacctgtcaaggtgtcaaggtcccatagtcccagcacctgtcaagggtgaaggtcccatagtcccagcacctgtcaaggatgaaggtcccatggtctcagcacctatcaaggatcaagatcccatggtcccagagcatccgaaggatgaaagtgccatggccacagcacccataaagaatcaaggttccatggtctctgagcctgtaaagaatcaaggtttagtggtctcagggccagtcaaggatcaagatgttgtagtcccagagcatgcaaaggttcacgattctgcagttgtggcacctgtaaagaatcaaggtcctgtggtccccgagtccgtgaagaatcaagaccccattctcccagtactagttaaggatcaaggccccacagtcctacagcctccaaagaatcaaggtcgtatagtccctgaacctctgaagaatcaagttcctatagtcccagtgcctctgaaggatcaagatcctctggtgccagtaccagcaaaggaccaaggtcctgcagtccctgaacctctgaagactcaaggtcccagggaccctcagctacctactgtctcaccttctaccccgagtcatgatcccaactgcccccatacggaatacattgagagctccccttgacactcaccccttgacacaccaatgaaggagctgacagtgagagtgctccccntccaggggcagtgaagacccatatttaatctgcgtgaaacatgtaccagtagtcttgcttggaatctagtaaaaatggtgcctcctggtcaaaaaaaacaaaaacgaaacaagaaaaaacatagacgaatgaaaaaaaaaaaaaaagaggggggggaaaaatacccggggggagccaatttatcacaccccgttgtgttaacagggcctcatgggggggcgtatataaccagacggcgcgttaaaacggagggcggaaacctagcgcggagttggagaagccactgtgggggagacgtggcacaccacagatatcccggaataacattggtttatgtgtacccactattcgccggaaggtcgcgtttgat

SEQ ID NO: 45559 - DNA, 658 bp, Homo Sapiens
ctctctagaaacagtgcactgattttacaaatgtccacatttggttttcagtttaccaagatgatgccagtatagctagtgagatgcagcaccccatcctcagccccctcgcctctggaagagacaccagactgcaaagggcaccgcgtacagaagctaacggaacttgaatgacaagacaaaaagagcagaatcagttagtgtgacacaacattctaacatgcctgattcttacatcaaatatggtaactttggggttggtagggggagacaaacaaggagaatccacttgggaacaatttgatgaagtttgcaaatcagcactttacccccaaattaacaacagcttgtatggaaaaaaaaatgctcttttaaaagtatatggtttggacaggtatatttgttttctcttgtagtttttgtaaaaaagtatcaaaaccttggctttaaatatatatatatatatatatatacacacacacacacgtggctttttaaaaattacttttttatagcacaaagtgtttgtaaatgcagagggtttctgctaattcttgactgtgcacatggtgcatagcctgaatgaacagagcttcctgatttttttttaactgaaaaattgagcagtaattctttaaccttctaaattctccatacc

SEQ ID NO: 45560 - DNA, 683 bp, Homo Sapiens
  misc_feature (647)..(647): n is a, c, g, or t
  misc_feature (652)..(652): n is a, c, g, or t
aattcatactcaggagtcttcctatgtatgtgatgagtgtggaaaagccttgactagcaaaagaaatcttcatcagcatcaaagaatccatactggagagaaaccctatgagtgtagcaagtatgagaaggcctttgggacttcttcccagctaggtcaccttgagcatgtctactctggagagaagcctgtgctggacatttgtcgttttggcctcccagaattttttacccccttttactggtaatagtacactccagtgaaatgtactgagtggattccgtcttctactcaggaatggaatgtgtgacacaggcctgactcagcctctgatccatccctcaagccacagttaatgattcagatgtcagtagatgaccaaagatggttcaattagagtcccaggattgcaagagctaataggaacaaatactctccccccgcccacccccattggttttaatgctgagaagaagaactagactcttacagaggtgagaatgaagtccacacagcaaaaatgcatctgagaattggagagcagtaaaagactgaagataatgtttgaacagccacatacaccatgcctgaagctaaaaatatatacgggtttttgaattgcagcagccaataaattccatttttgnttggntggttttggctttggcaaaaaaaaaaaaaaa

SEQ ID NO: 45561 - DNA, 705 bp, Homo Sapiens
  misc_feature (674)..(696): n is a, c, g, or t
ggctagctttttaaatgtttagttttcctcttgtcatggtcagctgctgaatttacttgaaggatgtagaatactgtttaaaaaatactaaaatttgtacaattagatcaaagaattgtgcaatcatttcctttttaatttttaaaatgttgaggctcataaatatttgagaacatcagatctaatagagcatagtgatactatttaatttaaccaaagtctctagtgaatatttcaactttgaatgtaaactaacaaataaacctgaccaccaaggagattgtttgcccagagtttcaaagcacattgtctacaaatggaaattgaaataatttataaaatattgacgttactatgttttttaaaaagttcctaattttttcactaaatggaggaaactattagttttattgttaaatatggtagatattaatattcctcttagatgaccagtgattccaattgtcccagtttgaaataagtaccctgtgagtatgagataaattagtgacaatcagaacaagtttcagtatcagatgttcaagaggaagttgctattgcattgattttaatatttgtacataaacactgatttttttgagcattattttgtatttgttgtactttaatacctggtgtacagttccagaaataaaaatctgggaatctttaannnnnnnnnnnnnnnnnnnnnnnaaacatggt

SEQ ID NO: 45562 - DNA, 709 bp, Homo Sapiens
  misc_feature (608)..(608): n is a, c, g, or t
ttttaaggactcaacaataagttaatgagacacagtgtttgctttcatggagcttacagtctggaggggacaaaggcttaaacaatactcatataattatatatgtgatcacgtacaatgaaggagctcagtggggtaaataagcaggaacctgaacttgatctgttccggagggccacagaaggcttccttgaggccttgagaaagtgatttgcatctgagttctgaaggattgtaagaggtaactagggaaaaagttgacaggaagaggaaggggatccagacaagaaacatttgcaaagatcttgaggcataaatgagcttgagacatctggagaaactgaggaaaagtgagagagtaggcagggcctggagccgcagagccattgctaaccatcctgtgtgagatatcccccattctgtagctttattctcataaccctgctcaattttctttataacacttctcacagatttatatacgtgtttgtttttgttatctgtctctcccaccagaccacagctccatgagagcaaggtctttgcttaccaatatatcactagcacttaaaactatgcctggtacacagtaggttcttaatatgtgntgaatatagccatcaaattgatattggatataattcaatctgataagatattttgagatattaaatagtttttaacttgataccataaaaaaaaaaaaaaa

SEQ ID NO: 45563 - DNA, 584 bp, Homo Sapiens
attacaggcatgagccaccatgcccagcaggtcaactgtttttgcaagcatttagccagagtcatgctgtgctgttaatcagtgtcctggagaatgggttgcttggaaatcttggcgccccctcagtagtaacagccttggtttaagggcgcagagtggagagtaaatgcaagggctataacaagggcattcatgctgtgggttaagatccacaaatcgctaggaatgtgtatactctgggtagtaagtttgtagtattagaaggtttaatgacaagtatttgaagagctgaagttaagtgttgggaggccatcccttatgaaggacaatgaatggcaagtaaaagaccaagttctgttcctgggtccattaatttagttaaaaaggcaaagttctttcagcacacatatctgcatgcagtcacgtgctgcctaaggatgcttcattcaacaatgagcctcacagccgtgctacacaataagataatactgtatttttactgtaccttttaacattgtgttacaatggcctacaagaagcttgtgtggatggctttgaatgtggcccaacacgaactaataaat

SEQ ID NO: 45564 - DNA, 687 bp, Homo Sapiens
  misc_feature (18)..(18): n is a, c, g, or t
  misc_feature (521)..(521): n is a, c, g, or t
  misc_feature (659)..(659): n is a, c, g, or t
  misc_feature (678)..(678): n is a, c, g, or t
taaaacatgaaaatattnttgagcctagttccttgttataaaatacaagaaataagacattcaggcattttccctttatgaagatgttcagtcatcctttccttgaactacaattaggaaaagtatatgtctttattccattgaagttctcgagagtgatataaatactttggggggtatctactatgtgcctaactagtcctgttctaggcttagtggaagctagtaaagaaatataattcatggatcaggctcataaagattttataatatttttagttaaacaagagttgggaaacaggtggagaataatgcaagagagtttgtaattaagtgccaattataccaattgctagacccaggatgtatctttaattcttgtcatccaggtcaacatatgatgctgctataagtctggggctcaaattgatatcccagtagcaataaacatataatataggaggagtctgaatgtagagatgaaaaatacagaatgtaatggcttctcttttctctcttgnggaattgcattcaaaccagaacagtgccttagaatggatgtgcccaactgctctgtatttatgcaatatttgaataaagcggaaatgtacgtgctcttcctgcttcacttgcactaattaattatttgaacaacttanagcttcttccctgaacagnggcaacaag

SEQ ID NO: 45565 - DNA, 676 bp, Homo Sapiens
  misc_feature (661)..(662): n is a, c, g, or t
cacgaggggatccgagggctccgtccttgtgctgtcttcgccccggctcccaggggtcaaacgagggtcgggggtggggacacgcagcctagccactgtcctgcctgggatccggtctcccccgccccccggctgcagggtggataaagaggaagatgtgaagaggaggcagacaaaagcaaaaggacatcctgtcagtaggaaacggccgaattacaattcagatgtgcaatgtttgcataagtaaactgacacgggactattatatgcagaaatccacgtgcaaaaattttcagacacacctttgtacctcttcctaatcctgccctggtaaaatggcggttatcagtgcaagtttgaggatacatacagctggaaaatggacatcaccaaactggactccagaaagttctgtctaggattttattagactgctttttttctcaatatacctgtattggaagattgagacaaaaaggcacaaactcacattaaataaacaaggtaatctaaaaaaaaaaaaaaaaaataggtgcggccgcaagcttattccctttagtgagggttaattttagcttggcactggccgtcgttttacaacgtcgtgactgggaaaacctggcgttaccaacttaatcgccttgcagcacatcccctttcnngcagctggcgtata

SEQ ID NO: 45566 - DNA, 602 bp, Homo Sapiens
aactttttttttttttttttgtaatgatttacagatgatggtttttcagtatatattatgcaatagaaccaccatgcacaaattgttaatgctgcaaaatgcacattctacatgggtgtaagtagttttataacaagtactcacatttgcaatttgtaaatattcaaaattttattaaattcttccgaattttttctttcagtgttttgtttgcaattatgaattgtcatttttaaatatttttttttagataagcttgagctgtgccttaccttttgtgtgtaataattatgtactaaataatgcattactatttgtttatcttcaaatatgagactaccatatagctatgccaatttacgtgttccttggagtggtggtggaaaaatacctcttctttcagagtttatgtggatttacatagtatgagtgttttagctatagggtgttttaaactgtgcttaaaataatttgttacatgttttgttactgtgttactttattgaggacagctagtccctttgtgttgttaaacgtttaaagacagttgagaagcttcataactctgttcattgtaaatcttagctttcttgtaatatgta

SEQ ID NO: 45567 - DNA, 652 bp, Homo Sapiens
gggatattttttaccaaagtgtcttttgacattttattttttcttgcaaatacctcctccctaatgctcacctttatcacctcattctgaaccctttcgctggctttccagcttagaatgcatctcatcaacttaaaagtcagtatcatattattatcctcctgttctgaaaccttagtttcaagagtctaaaccccagattcttcagcttgatcctggaggtcttttctagtctgagcttccttagctaggctaaaacaccttggcttgttattgcctctactttgattctgataatgctcacttggtcctacctattatccttctacttgtccagttcaaataagaaataaggacaagcctaacttcttagaaacctctctatttttaatcagttgtttaataatttacaggttcttaggctccatcctgtttgtatgaaattataatctgtggattggcctttaagcctgcattcttaacaaactcttcagttaattcttagatacactaaaaatctgagaaactctacatgtaactatttcttcagagtttgtcatatactgcttgtcatctgcatgtctactcagcatttgattaacatttgtgtaatatgaaataaaattacacagtaagtbatttaaccaattaa

SEQ ID NO: 45568 - DNA, 611 bp, Homo Sapiens
ccacgcgtcgccctcctctagccatcccttggggaagggtggggagaaatataggatagacactggacatggcccattggagcacctgggccccactggacaacactgattcctggagaggtggctgcgcccccagcttctctctccctgtcacacactggaccccactggctgagaatctgggggtgaggaggacaagaaggagaggaaaatgtttccttgtgcctgctcctgtacttgtcctcagcttgggcttcttcctcctccatcacctgaaacactggacctgggggtagccccgccccagccctcagtcacccccacttcccacttgcagtcttgtagctagaacttctctaagcctatacgtttctgtggagtaaatattgggattggggggaaagagggagcaacggcccatagccttggggttggacatctctagtgtagctgccacattgatttttctataatcacttggggtttgtacatttttggggggagagacacagatttttacactaatatatggacctagcttgaggcaattttaatcccctgcactaggcaggtaataataaaggttgagttttccaaaaaaaaacaacaag

SEQ ID NO: 45569 - DNA, 667 bp, Homo Sapiens
atgaacatccaagtctttcttcttttttaagttgtcaaagaagcttccacaaaattagaaaggacaacagttctgagctgtaatttcgccttaaactctggacactctatatgtagtgcatttttaaacttgaaatatataatattcagccagcttaaacccatacaatgtatgtacaatacaatgtacaattatgtctcttgagcatcaatcttgttactgctgattcttgtaaatcttttgcttctactttcatcttaaactaatacgtgccagatataactgtcttgtttcagtgagagacgccctatttctatgtcatttttaatgtatctatttgtacaattttaaagttcttattttagtatacgtataaatatcagtattctgacatgtaagaaaatgttacggcatcacacttatattttatgaacatgtgtactgttgctttaatatgagcttcaatataagaagcaatctttggaaaattaagaaaaaagattttctttggttttaaaaaaagaagaaagagaaaaaaaaaaggaaaagaaaaagagaagagacaggaaagaagaaaaaaacagagaaaaaaaacaaactagtggtgggggcacagcagagcccacgaaaagaagttttgtaagaccaagtggggggcgggggccaa

SEQ ID NO: 45570 - DNA, 483 bp, Homo Sapiens
aagccatgcagtttgtggtattttggtacagcagccttaagaatctgatacatgtatctcgtaaaacacctctgatacttacctgcgcttgtggctgtgttttctgatactatgagagccgtagtatctggataccggagagtctgcgaacttgagagaagggccgtgtctgattttccttcagtgtcccaaggaaggatcttgcacagtacccagatttggagaggtgccaagtgaatgcttcggtggactgaatgaatacaaatcaaaaataatgatgcagcgggaatggatgcagtaagattgctgtggcctatgcagttcacacagttcacactctgcatgttgaggagtaagtggacagatctcttaagcccaggggctagcaaaccggtctgtgggccaatttactcaccgtctgtttttgtacagcttgtgagctaaaaatggtttttaaaaaggttgaatacaatcaaaagaata

SEQ ID NO: 45571 - DNA, 498 bp, Homo Sapiens
gtataaacttaaaatatgcatccctttaacaacgctttgtgttagcatgctgcaaatcaaaatggcacttaatattaaaagctggtttagggaaattttatgaaaatcctgttcataaatgtaatgcatatgatatgtacttttaagttttagttgcttcatgtttacattcagctgttcaacataattaaaatgtaattttacttcatgctatattgtggctttgtgtttcaaataatgttcacctttctgtttttgcaccagataagaatcagttccttgagaataaattttttatctttcttaacttcagaatattaaatttggaatatctactaaaattgtgtgttatgtggctgtaaatgatgtacacactgtaaaataagatcgctactgttatgtgggattattatttctaaatgttactcattgaaatgagcatacaataaaaagcatttattacaaaaaaaaaaaaaaagtactctgcgttgttaccac

SEQ ID NO: 45572 - DNA, 702 bp, Homo Sapiens
  misc_feature (152)..(152): n is a, c, g, or t
  misc_feature (625)..(625): n is a, c, g, or t
ggcaatttgccaagcacttggggattattataacaattaactaggagatcaagagataataatctctccccaaattttccaataataattgagactttttctttgcttgtttgtgtaattcaaccaaaagaatttcaatacccattcaaatngtcctaggtctatcagaaattagggaaggtagtcctgctttataataggaaaatgtatttctgtataagagttctttgctttcattaacttggattcatttaaaaattaatcttccctgttaggctgatttcagattctctaggaaatctgtgtaagtaaccagaagacctttcagatggtttatttgctttcagcagagaatttatttcatacagttacttaagagtgtcgatgtcttgtgaacagagatataaggaaccattctccatccttccttatcatgctgggtacaatgcttctatgaatatttccatgtattttgactggggagaggcatggagaagaaactctcattcaggggctccaggatccttctccttgaggcttctaaataaatggcagaattcttgctgtattgccatgatgtcaccctggccatgtgtactgacttgaggagatcttgcaacatggncatgtgcaaggtttaaggagtgagagagatgtgtacatatcttaggagggtatctatgtatctgagtatatgtaggg

SEQ ID NO: 45573 - DNA, 565 bp, Homo Sapiens
aagaatgggaaattctgtagcccttctggcttaccctgttgattataaacctagcctcaaaagagattgacaggcatgactcaagtgagtgttcacatatacaagcctgcatgagccctctgtgggtaggtggtcacacttggcatctgcagcattgacgtggccccgctgggtgccttgagcatgccctcttcctgctctgcaatttgaatcaccaccgtgccccttccaccactgttccccatgcaaaagctctgcttccagcagcccccactgaccgctctctgtgtggagcaaagtgctgtcgtgcggtgaccaccaggtgaagagcagcttgtattcagacatctagagaaggttaaatcttagtgtccctgggccaggagcatatcccaaggctcctgcgagccagtggcgaccctgtccactgccgctcttggttcactgctgtgtcctgccccaccctcctctcctcctgcctgttggttccttgacctgcactatgggttagttgagttccttacgatactacggtgaaagccgggtgctagagcccctcttgttt

SEQ ID NO: 45574 - DNA, 852 bp, Homo Sapiens
  misc_feature (645)..(645): n is a, c, g, or t
  misc_feature (647)..(648): n is a, c, g, or t
  misc_feature (650)..(662): n is a, c, g, or t
  misc_feature (665)..(668): n is a, c, g, or t
  misc_feature (674)..(674): n is a, c, g, or t
agcactttgtggactgtttgtcgagggacggtgaatcagaagatcactattctgatttcctttgtctccgaagaggaagtccctgactagctatataactttgggcgagttacctctcacttctttgtgccccagtgttctccttgggaaactggatttaggttagatgaccttttaaggctccttgtatgatattttgtgatctgtacatggcagagtatagattaggagccaaattttccaacctagtgctatggttcagaatacatagcaccccaagcgtctggctggagccgaggatgggtcctccagtttttggcacagatgttccggagcccaggaagcatcccataaccaaccttcagccccaccgccacccccagcgtattccagagccgcttccaaaccacagcctatcctctgctccatttcactcttgccctcacagactttcagcctccatgctctgagacaactgtgggtaggtacatctctgttggtggaaatgatgcttaagaaccccaaagattaaaggaaacaatgttaagggcttttgtgaggataaaagataatgggtatatggaatagaaacatttcaaatgaagaatcaaagcatttcaatcaatccacttagttgtaaaaaanannannnnnnnnnnnnnccnnnncccaanaaacaccaaagccacttgaatagtaaatggcaccagaagatggcagtctgctccattaaccagagcagtgcagtgggaaagctggactctcatacccactcacattcatgctttatataagcctctcctccctgggtaccctaaacaggggagtgattcctctgctggggtgctgttt

SEQ ID NO: 45575 - DNA, 782 bp, Homo Sapiens
  misc_feature (657)..(657): n is a, c, g, or t
gaatttctcggtcatcctctttttttttgttcctcgtgctgttgtcctcgtctcccaacccctaaagcctagtaggtccagtgtcaatgcattaaccacttctgttctgatttccaccacccaagtggaggccttcataacctctcagacgtcacggccatgatgccagttacattacgcctagttaatcttcattcagactggaaggacctgcccccagttgtttctttctgaatagattctactctccttcaacacttccaaagtctcctgccccaaagaggcttagttagtcctgtggctggatgtgactccaacttccttttttgtaccatcacatctttcatatctttctggcatctgccatacatcataagaggctttgaccactgtcctccactgaatagcccattacagctagcacctaatagttactcaggaaataaatacatgtttaacaggccaggtcgtagagattatttttctttctctgccttttcatgtgctgctttcagaacagagggctggattggatagattagtatgatctatcctggagattcatttcttgcattaagagcttattttgtgtgatattatttataatccctgactatgtcaattataaacttttaaattatgtcttatatttgaagntcttacctacatatcagaggaaaatataatggttatttctaggtggtaaaacaatcttctggattcttttttctttacttggaaattatcatttaacaagtctatattgaatgccgataattttc

SEQ ID NO: 45576 - DNA, 791 bp, Homo Sapiens
  misc_feature (773)..(779): n is a, c, g, or t
gtgagaccagaattgtgtcatttggctccaccttcatcttgcagagccagctgatctcagattgccaagaaactagaagccacttgcacggtgtggccagagcctcagctggatgagaggctgagatgggtggccagcttgtataccagtccctgaactgagctgtttacaggactggggaggctccacccagaaggctttcatttgtactctgctgggagtgactgggaaaaactccttccctgctgctgagtggagagaggcctcatccggctttgacccaccatccgttgcagaagcctccaggagcagcaatcctaagagtgggaggcagccaagacccccttccttcaaaacctcccggaagtggtttcaggccctctagttgccatgaccaatttgtgtgtgtgtttaatttttgcttcaagctctgtagcaggacctgccccacgcacacccctacccctctgtgaggagctgtgggaagtgtgggtttgtctccagaacagaagagaatgatggatattctggctctggggccctctccaccaccactcacagtagccttgctgaagccatcacagatgggagaaggccatgccagccacgtccgccgaggggcgccagcctgaagctgccaggccctgaggttcagaccctggaccccatagctggaggcctgtggtgccagaagcccagattagggtggctgtccatccctggatagctatttgcacgaatcatggacataaatccaagttgaagaagatccnnnnnnnaaaaaaaaaaaa

SEQ ID NO: 45577 - DNA, 587 bp, Homo Sapiens
acagtatgggctggcagtttgtgtaattgcaagttcataaagagaattgagggtccagttgggagaactattagtcagttcttttatatgctgataaatgatccctcgagttcagttagtattctgtccagagtgtttagctcactttcttagcagtgtgtaagctttctccatgtcagaagcaagcctgctctttgataaatctgtcttcctgaaaatctaaatcatgcttttgtctttagatctacacagaaatgaccctccttggatcagttttctttccagtctaatcatctttggaactaaaacttgttctaactcgtctcttggcattcagctactcctagatcttttggttttatcccctggcctcagagccatttatattcccagagtaggcagtacaggatctcgtgttgatttgctgtggttacccagtgtcttctctacatggcataaagcggcaaagcccaccattaggtgaggcggtcccgagttgaggtagagtggggcagaggaagatggcagtgaatatcaaacagtagaccgccatcaacttctaacagccagtacgcacactgtttcat

SEQ ID NO: 45578 - DNA, 549 bp, Homo Sapiens
caagtctccaggaagctccaaactttccttcatcttcctgtcttcttctgagccctccaaactcttccaacctctacccgttacccagttccaaaggtgcttccacactttcaagtatctttatagcaatgccccactcctggtaccaaattcctgtattagtctgttttcacactgctatgaagacatacttgagactcggtaatttatatagaaaagaggtttaattgacaaaaaagctaacaaagtgagccctgattcaaaaatgactgtctacacttggcacatgagggactttatgatattaagagattaattaaacaacagtggatggggaggaagaacagacttttgagctcttcccaatataggaatgtgttagttctaaaaattttcttaagttgtttgcttggaactcagagtatatttttccatacgaaaaattcagaactattttatttatgatatgggctaaaaagacttctgtaatctagcttggaaacttaataatcattaaacttattttcaatgaaaaaaaaaaaaaaaaaa

SEQ ID NO: 45579 - DNA, 480 bp, Homo Sapiens
atacactgcctctaggactgggacagatagccactgagtacctgcttcaaatcaccctgcacgttttctctttggaaagataagcactggagaaccatctcgttaccttcagcagaaatggaaacaaatcaagacattaagaatgccgcagtggacagcagttatgcaaggttcagcagaggaagttttcaagatggtgtgcctcactagccagaaatcagaaaagatcgaagctagccttttcatctcagctgctccttaaatcagtgcaacccctccaaattaatgtgaattgaaacttgcattgcttttcaacttaattgaatacttactatatgtgaaccactgcacaaaataggggaagaagatgtgggagacaaagatgtggagcctgtcttcaataaatttacagttagtttcagggtacattgtttttcttctgctgttaattaggtgtatccccaagacaataaatactga

SEQ ID NO: 45580 - DNA, 454 bp, Homo Sapiens
ctcactggtttgtgttgctaagcaaacgtatacaaacagaaaaagagcttcctaaattgcacatttttgcacctcttgtgcattctgcaagaagacaatgaatccatgtatttctatataagtatcttcttcatttttaacctgttttcatttgtaatgatgctacataattttgtggctccctaatgcaataatgtacagaagataaaaaaatttataattgaacaatttgtctttctgttcgctgaatatattgcaggtcatgctcccatgcccccctttctaagccgatatcaacaagactggaatgtttgtgatatcaggggcaagagttatcatagaacaacaaaatagagtggactcttttagagcatctatatctgcaacctgtaaatggtaaaatgtctgtgtatttttttaaatgtaccttttcaataaaagtacaaaaaataaa

SEQ ID NO: 45581 - DNA, 761 bp, Homo Sapiens
  misc_feature (8)..(8): n is a, c, g, or t
  misc_feature (738)..(738): n is a, c, g, or t
aatctttngagcagtggttttcaaagtgtggccggacagcattggcagcatcttaatctcctgggactttgttaaaaatgcaaattctcagccccaccctagtcctactgaattgggaaactggcgtgggacccagcagtctttgttttaacatgttctccaagtgattctgatgcctgttcaaacttgggaaacacttttagagcacttgaggaacctaaaagatgactggttcagcattttgtgtggtagataagaaagaaattatcacaaaaaatcagaaatgaacagtgagagaaaaataggaccccagacagtttataccttccatttgctgttttaaaagtgtgagcctgccaagtcaacaagtatgcctttagcgcacatgtaaatagcctgcacttcctaaatctcgtgtggcctcccatggttacattcttcaaaggttaactgagttgagaggaagattcagcatttaaaagagaagggttgaaaaagattgtgtgtgtgtgtgtgtgtgtgtttaattggcccagggttacttaaataaatcataaccattttgccacattctgtaactgtttagctaaggtcaaattaagtttaccctatggattttgtttcatcttttgtttcgtgtatatactgtttgcctttttcataaaaatcttggatttggtatatattggtcctggtatttttgacatctttgctattgtaaataaattactattttgntttaagttaaaaaaaaaaaaaaa

SEQ ID NO: 45582 - DNA, 491 bp, Homo Sapiens
ctaacacatacatggacttttcggtctgaatttgtgttggcatccatggtacttactgttcagtaggatgttattgcaaggagcagagtgccctctgctggagtaatcgcaattattcttgcagcagattaatttgacttgggtcatgaattcaacaaccagttacttgcctttcatcatacaatttcttcggtagttgagaatttggtctacatttatcaaatgaggaaagagtgtcacaaactctaaaaagctgaaggagaccccacagatcttctcactgtcagcagcccttacttctgcaaaatgttgaaggataatgttgctctgtttgcaaagaagatgcctctggctagaatgtttgtgcagttataagcaagggactgcttgtttttgtaagttatctcaactttattcttgtgaaattgcaaaggaagatcaataaaaagacttcatatgaatgtaaaaaaaaaaaaaaaaaaaaaaaggac

SEQ ID NO: 45583 - DNA, 592 bp, Homo Sapiens
tttagaaaaagcgttcagtctttttacaattctaagtaaaacgtataggtcaacagaaattaaaggaatatttcttaaaattcatttatttttcttttttgaaagcagacagaagcaaggctagtatagtatgaatggtcaggtagtttaaatgcgttgtcccacgtggaacaggagatattaactgtttttaaagctttacattatttttttacaagaatttgttttcctgtaattttcttcacagttaaaatatcctaatttatattttaacaaaagagatgtaagatacatcaaatatagatgattcaaggtaatgttttttagacctgaaactattgattcaatttatcatcagtgtttatttctattgtatctagttatctatccaaataattgtattggcttagcggagactgtatgttaagtgtattagttttagattgtgaaattgtgcagtttaggtaaacatcaaatccctttatttttgtacagcagatttccagcattagaaccatgtagaacaaatatactagatgttaaagattacacaataaaggaacttggcaaaccaaaaaaaaaaaaaaaaaaa

SEQ ID NO: 45584 - DNA, 841 bp, Homo Sapiens
  misc_feature (677)..(677): n is a, c, g, or t
catgagaattataccggggagaaacctttcagatgtaaggaatgtggaaaagcctttagccaaagttcatctcttattccgcatcagagaattcatactggtgagaaaccctatgaatgtaaggagtgtgggaaaaccttcagacatccttcatcgcttactcaacatgttagaattcataccggggaaaagccctatgaatgtagggtatgtgagaaagccttcagccagagcattggactgatccagcatttgagaactcatgttagagagaaaccttttacatgcaaagactgtggaaaagcgtttttccagattagacaccttaggcaacatgagattattcatactggtgtgaaaccctatatttgtaatgtatgtagtaaaaccttcagccatagtacatacctaactcaacaccagagaactcatactggagaaagaccatataaatgtaaggaatgtgggaaagcctttagccagagaatacatctttctatccatcagagagtccatactggagtaaaaccttatgaatgcagtcattgtgggaaagcctttaggcatgattcatcctttgctaaacatcagagaattcatactggagaaaaaccttatgattgtaatgagtgtggaaaagccttcagctgtagttcatcccttattagacactgcanaacacatttaagaaataccttcagcaatgttgtgtgaaatttactaaacatcaaagaatctatgttggagcacaagattctaaatcagtggttccctgattccttaaaaatccatttgttttgggttttccaaaaccgaaccttaaaaaaaaatggtttggcac

SEQ ID NO: 45585 - DNA, 605 bp, Homo Sapiens
tcccatctcttccccaaccctggataccagtagcttcccacccagtccaaacctgcaccatccatcattatgtagatgaaaaagccataggtcatagcctctttgctattctattggagtagcctccctaggcagtccctctgaagccttggagtgcaggtaaatgctcattcccaagtagcaaagagaccatggagaaggtgcgtgtaaagagatatatttttgtaagaggaatatgattaatacattccgccccttggaacctggccatgcaaagcaagggcacagggattagacctgtggcacacttccccaattccctcatctgtaggatttgggctgccccaggcccacccagggggctctgaatgtattttgtaccgtgtttctttcccccaggagaatttttagtcttctttcatgaagcagtgcaggggttggcctcccttctactgggaggttgactctctctgggagactcttggtccaagacctgggtcagttctttgctggtggtcccctctgaccacaagcttctgcctgaagattcctcaggtcaacaccatcattaaatgcgagttttgttgatgaaaaaaaaaaaaaaa

SEQ ID NO: 45586 - DNA, 533 bp, Homo Sapiens
ttttgaaaaactccgcctcctctctcctttttaatatttctttcttcctttttaatcatgtttaagtgaacttactcttagttataaggaactgtcctgctttgtggggaagagggctgttgcttgtcaggcaaaaaagttttctcttcctacccaccatccctctctctgcttcccttgcatttggcaggctgtatgaagccaatgagctgcgaggtgttttgacaggggaggtctgcatgcagcctcttctttgtcctaacaattcctttgttgatcttgcctgtgatgaatcatagcgcctgcattgctctggtctaggcattatttgcaacacacagtatcgtaagcgagagattgttctgcctatattcagtgttttccatgcagcaattcttcttgttgacgttcacagtactgtaacgagtaacagacttgatcacagtctcctcgtgcctgtgcagggctgcacaggcatgatcttatcagggttccaatctgttagattgcctttaaacaaaaaaaaaaaaaaa

SEQ ID NO: 45587 - DNA, 487 bp, Homo Sapiens
cttcctcaccctggatgctgtgacttggtttccatgggggcttcctaagctcagggaccccaagcctccatcaaatctaatgacccgccctgtctctgaacacacctgtgttgtccccgagcccctcaccaaccccctctgcaacccggcccacgcatttcccatcctgaagggtccagctcataggccggcccatgtgttccctttacccctgctttgtccctacctggtggggagctgtcccttctgggccctagtgtggcacttcacacacaaatgtgtcctgtgggtggtatctgggcctccccctgcagtgaggggatgaccaatgtgcagagctcactgggcctggatatgggctcgggtggcacagaacagagagaaagtgctccgtaaaagtgagctgcgatgcggaggtgggcaagctcttccctggagggggaagagctctcaacccagagggatctgaccaggaaggttcaccccc

SEQ ID NO: 45588 - DNA, 924 bp, Homo Sapiens
gctccgtaaaagtgagctgcgatgcggaggtgggcaagctcttccctggagggggaagagctctcaacccagagggatctgaccaggaaggttcaccccccctccacccaggaagcccctgcagacagtatgtgttttaggctttgctggccaaatggtctctgccgcgactactcagctctgccattgtggctgcagagtgaccatagaccttctgaaagtgaatgagtatgactgtgttccaataaaactttattgacaaaaaaaaaaaaaaaaaaaaaaaaaaaaaaaaaaaaaaaaaaaaaaaaaaaaaaaaagaaagaaaaaaaaaaaaaaaaaaaaaaaaaaaaataaaaacaagaacaaaaagaacaaaaaaaaaaaataaaacaaaggagcgggcgcgcgcatcactacgctcacccccgagagggcacagcgcaccaagctgcacagccccattgttatatataaacagaagaggcggcacaaatgatgtaagtagaattattaataaagagtacagaagacgagcgcgcaggcagagtcagttgttttaaacatagcgaataacagatgtagcagaagaagttagctattaaggtaatagtagtttaatgtgtgcagaaacagatcgcacttatttcggggtggaggtgcagaaaagtattagtaagatgtcacaacacgaacgactaggaatagagtaaggacccaccggacggcgagacgagagacattaaacaaccctaatcgagaggagactgtgcagactcaagtggagggggagaaacaaaaagcaggagtacgagtcagctgtgtgccactcgagagaactaaaaccgagatgcacagagtataaggacacgaaagaaaaagtatcacaaacgccgaggagagtaattagacaaaaggggggggggg

SEQ ID NO: 45589 - DNA, 605 bp, Homo Sapiens
cagggtcctgccacatgggaaggagccagtaatccagatgaggaagaggaagaagaagagccttgtgtgatctgtcatgagaatctgtctccagaaaatctttcagttttgccttgcgctcacaaattccatgctcagtgcattagaccatggttgatgcaacaggggacatgtccaacgtgcagactccacgttttgctaccagaagaattccctggtcaccccagccggcagttgcccaagatctgatacaaggtacccatgaagagattatgaactacttgaaggtggagactgtacggtggtgtgttggagctggcttgtaatgtcttatgagtgacaatcgttagtttgaggaattttgtgagacagttgtcaaattgttgctagcttgaaatctgcggcaattggagtatttacaccatagaaatgctataagtgaagacctacctttcccttaagagctagttgttaaacctttaccagcataccactggaccttgtctaaatttctttgtgttcccagtgtcttgcccagtagatacaagataaatattgccagaatcagatatcaggaagtagtaagaaaaggagttaatatgcaa

SEQ ID NO: 45590 - DNA, 914 bp, Homo Sapiens
catcatcaacatgcacaacgtgaaactgttcctgttccagctgctccgtggcctggcctactgccaccggcagaaggtgctacaccgagacctcaagccccagaacctgctcatcaacgagaggggagagctcaagctggctgactttggcctggcccgagccaagtcaatcccaacaaagacatactccaatgaggtggtgacactgtggtaccggccccctgacatcctgcttgggtccacggactactccactcagattgacatgtggggtgtgggctgcatcttctatgagatggccacaggccgtcccctctttccgggctccacggtggaggaacagctacacttcatcttccgtatcttaggaaccccaactgaggagacgtggccaggcatcctgtccaacgaggagttcaagacatacaactaccccaagtaccgagccgaggcccttttgagccacgcaccccgacttgatagcgacggggccgacctcctcaccaagctgttgcagtttgagggtcgaaatcggatctccgcagaggatgccatgaaacatccattcttcctcagtctgggggagcggatccacaaacttcctgacactacttccatatttgcactaaaggagattcagctacaaaaggaggccagccttcggtcttcgtcgatgcctgactcaggcaggccagctttccgcgtggtggacaccgagttctaagccacagaccgaggccccagcaggcagcggctggagggatgccacaccctcacaggtcagccccaatacatcttcctgcttactctctgctacctgcctgagcatgtcacctgccacttgtccctgttgctgccaaaaccccaccatggctgtcaaccaccatggctgtctgtgtgtgtaacaaagtcta

SEQ ID NO: 45591 - DNA, 450 bp, Homo Sapiens
cagaactcagactaaccttgtggtttcaacgcgcactctgctctgtcctgaaatctggaactcattacctcatcaccaagaaactgcacgaaatctctcccccaccgccccaacacccactcgggaaaggaacgagcaaacatccctctaagaaagaaacctacacttgaatgatttaaattaaggtggatggaagttatttccctttctggcgcttgcagatttcaagaaaagctgaaaaatgggagcgggggagggaagcaacagacggctggagggcagcagcagaacaagcgaggggcagcaccgagttaaagtgggggccatccatttcgggcagaggagacaaatgaaagccgaccccgctgggatcacgtaggttcgtggctgcagcaaaagttgggtttcacaaagttgaaaaacagccggtttctcaaacaattgtgattt

SEQ ID NO: 45592 - DNA, 828 bp, Homo Sapiens
ctagcggaacgactctcttaatcttccaccgctacagctataaagagaatatcatgaaattatcaagaattcatcatgatcaaccggtgaagcccctggatcgagcagtcttctggattgagtttgtcatgcgccataaaggagccaagcaccttcgggtcgcagcccacaacctcacctggatccagtaccactctttggatgtgatagcattcctgctggcctgcgtggtttctatgatatttatgatcacaaaatgttgcctgttttgtttccgaaagcttgccaaaacaggaaagaagaagaaaagggattagttatatcaaaagcctgaagtggaatgaccaaaagatgggactcctcctttattccagcatggagggttttaaatggaggatttcctttttcctgcgacaaaacgtcttttcacaacttaccctgttaagtcaaaatttattttccaggaatttaatatgtactttagttggaattattctatgtcaatgatttttaagctatgaaaaataataatataaaaccttatgggcttatattgaaatttattattctaatccaaaagttaccccacacaaaagttactgagcttgcttatgtttcacacattggatttgaacacaaaacatcaacaactccacttatagtatcaacattgttttgcaaatactcagaatatttttggctccattttgagcaaaatttatgtttttattttgccattgaaaccttaaataataaattatgggaaaaagccctaacgtaatatttacgccgcgccatttgagtacatatagaaaaataaaaactgtt

SEQ ID NO: 45593 - DNA, 583 bp, Homo Sapiens
gcacgaggtttccacattgccagtcgagaaggcgaccctctgatcctccagtacctgctcactgtttgcccaggtgcctggaagacagagagcaaaattagaaggactcctctgcatactgcagcaatgcatggccatttggaggcagtcaaggtgcttcttaagaggtgccaatatgaaccagactacagagacaactgtggcgtcaccgccttgatggacgcaatccagtgtggtcacatcgacgtcgctaggctgctcctcgatgaacatggggcttgcctttcagcagaagacagcctgggtgcccaggctctgcacagggcagctgtcacagggcaggacgaagccatccgattcttggtctctgaacttggcgtcgatgtagatgtgagagccacatcaacccacctcacagcacttcattatgcagctaaggaaggacatacaagtacaattcagactctcttatccttgggagctgacatcaattctaaagatgaaaaaaatcgatcagccctgcatctggcctgtgcaagtcagcacttggcctgtgccaagtttctcctgcagtcgggactga

SEQ ID NO: 45594 - DNA, 613 bp, Homo Sapiens
gactagaagtgagccgcccgggtcccaaacgccagccagccagtcagtgggtcccgcagtcgcccgcaaccggggcgaatcatggcggccgccaaggtggctttaaccaagagagcagatccagctgagcttagaacaatatttttgaagtatgcaagcattgagaaaaacggtgaatttttcatgtcccccaatgactttgtcactcgatacttgaacatttttggagaaagccagcctaatccaaagactgtggaacttttaagtggagtggtggatcagaccaaagatggattaatatcttttcaagaatttgttgcctttgaatctgtcctgtgtgcccctgatgctttgtttatggtagcctttcagctgtttgacaaagctggcaaaggagaagtaacttttgaggatgttaagcaagtttttggacagaccacaattcatcaacatattccatttaactgggattcagaatttgtgcaactacattttggaaaagaaagaaaaagacacctgacatatgcggaatttactcagtttttattggaaatacaactggagcacgcaaagcaagcctttgtgcaacgggacaatgctaggactgggagag

SEQ ID NO: 45595 - DNA, 579 bp, Homo Sapiens
  misc_feature (26)..(26): n is a, c, g, or t
cttcaaacagagtccagcacagtgtnggcacccacccaaggtttccatgcagtttgcatcaacactgaagacagccagatggagttcctggagattggtggcagtaaaccttttcggtcctactgggaaatgtacctatccaagggattgctgctgatctttgtgttggattcagcagatcacagccgattacctgaagccaagaaataccttcatcagctaattgcagcaaacccagtacttcctctggttgtgtttgcaaacaaacaggatcttgaagcagcctatcacattacagatatccatgaagctttggcattatctgaagtgggaaatgacaggaagatgttcttgtttggaacctacctgactaagaatggctcagagataccctccaccatgcaagatgccaaagacttgattgcacagctggctgcagatgtgcagtgaccaggactcagcccactgtgcggctcacgactgagatgtcatcagtgttgaatggcaggcttgaagccaaaggtttccacctcaaataaaaattaagccatttcctaaaaaaaaaaaaaaaaaataggt

SEQ ID NO: 45596 - DNA, 496 bp, Homo Sapiens
tgtagaaaagtctcataactgagaaggctctgttttgggccgggtgggtctgctggcctccactcactgtgctgtttcctttgagtggcacacttgggaagctccggggcatgtgaaggagctgcaaacatgagaactaatgaaccaaggcggctgccaccaggaaggaacagaacgcaggcattcaaccatgacgtctgcacagtgttagtaacatgtcattgtggtttcgttctcactgtggtaaaatttatttctgagcacttaaactgtgttgcatacccctaattttttttttttctgtatcttccttgccctcaaataccctgaggtgataaactgttccagttgtagccaactaccactgctaggcctcaatgtaaattcagttgaaatttgcaattctatcagcaatttaatgtattgaattcagatcatcattgtgtcattttaaccgacaaccacccaataaatttactctgcagttctgaaaaaa

SEQ ID NO: 45597 - DNA, 571 bp, Homo Sapiens
ggcacgaggtacagagtagtcttaggtagtagcaaaagagccaaagaagagatttgtattgctgagctcaaagccaagcagaggccggcagtggaggctgagcagggactctccaggcttctctgcccataaacacccgggtcccaggccctccttcctttccctttggtgctccctcctccccatgtaccattgcgcgtgcagctggagcagaataccctcatttttaggaatctagtgatgcctcttgcctcagggaaacgtttctttgatggggagtttgagatttcttttccttgtttatgctttatttgtggtaatgaaagagcgaatgactgaacagccatggcaaggcagacctacaggcgaggccgcagcagagggtggggcagagcagcctcggggtctgggggctgcaggggtttccctggcgcagcgaaagtctctgagcacttaccgggcgtgaccgtttcttaggtgtgagaggggctgtggcttttgtgcagcgactatgttggtgttaggggtggtgtggagattgttaatcttgtataaagcaattcaataaatt

SEQ ID NO: 45598 - DNA, 725 bp, Homo Sapiens
ccagcatctcacaccagcaagtagtagggccaggtcaatcccaggcagtctgaccccagagtggcccagctcatcccctactctattctgttatttgcttgttaatgattctctagattttctaaaataatgtttcttagcattgtgatgataaagctcatgatgaactttatcactagttatgccaccttaactagtcagatttcctagaattaggaaatggtgactcttgtctaaatttggttaagtgatgaatttgggttaccttctcatgtgaacctggagattcaccagtcttaacttttgggtcattgtgttttctctacattcatgcattggatgttttgctaaataactcctgtggatttaggaatgtgtgctaatagcaatcttcctaattttcatgtttatatggaactatgcagttgagtattgaaagctttaaactgagtttatttacaaggactgagtctagcctacagagaacatacagcagccttctttggaccacagtcttatccgaggggtctgtggttgtatcagaagagccactaaaccaatccccctttccaaaattgaacctcacagacgttcctgttttttgtgattgagaaactggtcaatgaacaggaagacttagagatgtttcacaagcctttgatttttgtttcatttatttgtaataaacctcttccacgtgaaaaaaaaaaaaaaaaaaaaaaaaa

SEQ ID NO: 45599 - DNA, 774 bp, Homo Sapiens
gcaacttacgatcttagtttaattgatcaattaggagacctctgaataaagactaactccccaatacatccataagaatttttctatgagcctgtcatttagatgtgataagcaatcaatttcatgaagactgtttcagtcttgtagaaattgagttgccatcacatagaggatttcttgtcctctgcattgtttaaaggacaactacaaatcatgctggataagagtactcattcaatcttttaggattcaatgaagtagcattttaaatatgtaagttattttatatattgtctgtcttttaaaattggactttgcttcttgaaaaaagtttgtcaaatcaccaaaccatatgactgtccattcattgtagcctatgttttctattattaagaaataattcatactgagagtaaaagaaaaagaatgtattttgtgtgcaaaggatgaatgtattaaaaactttttatttgtaacaattttttaaaaaaactaaatggaaattgctttcccatgtacttgtatataaataaacatttcctgttgcccaaaaaacaaaaagaaaagaagatgaaaaagcatcacatgaagtagtgacagagagcatgcaggcaagacaacaaaaaagagagtgggggcgcaaaaaaacccaggagaggggaccgaaaagagaggcgcgaagtttagagaaagaggcccacagagagcgaataacagaagagggggcagagataacgatgagagaaaacgagagaggatatgaggaggacttac

SEQ ID NO: 45600 - DNA, 465 bp, Homo Sapiens
  misc_feature (433)..(437): n is a, c, g, or t
agcaaggaaagaaaatggccagcttcctgtcttaggaagacaatttactttttggcatctgtttggttgaaagtttgcctttgatccagattctttcggatgtcagggatattcacattgacatgtctttttagtgttccaggagattttagtttgaatagtacaattttttcttcttacaacaaaacttagaacggcttctaacttatttcttcatggccaagaaactaccctaacttatctcgataaatatttagttctgtcttatttctaatgtgtaaaacaggttttaaaaataatatatagattttgcatttataaaaaaagatttaatttatagaaccaaacttgaacatatgtttaatttagcctaatcagaaggttacagaaaaagttgctgtaaagatagaataaaagtattgtactggtcaannnnnaaaaaaaaaaaaaaaaaaaaaaaaggac

SEQ ID NO: 45601 - DNA, 760 bp, Homo Sapiens
  misc_feature (646)..(646): n is a, c, g, or t
ttttttttttttttttttcagttggaatcatttttaatatttaaatacaaaaagtgagcactgacttctctttttttaaacacacacacaggtctaacagccaaaatgtgcagaggaaatgagctcctgctgtcttccatagtccccattctgtggctgaagctgcagcctgcctccctcctctcatacatagggattcatagtggccactttacactacaggtgtaatgcattttgtctgtttcacattgtgtgcatgtcccgccccaacaactccattctttaaaaaaaaaaaaaaaaacagtcgttaatggtcaggggcacatccctcccactggcatcggttcctaccccacaaggggaaagtgagatcttccagttaggagcaatttggtgaaaggagtcgggtgaccagagctggaataaccgtctgcatggctgcactctggtatcagagtggagacagaagtaaggatagtgtggagggcacagttgcaagttgagtctttccatgagacaatgtggggataattctccccaccgggtttagatagatcaatgtgccaaagttaaaaaaaaaaaaaaatccaaattatcagcagttcaaacacttgaatttcaaacttatcccactgagacagctcanacagcaataacaatctagatctttccaggaagtgagggtagacccctggcatcctcctgagagcctgtgttaggtcctaaagtatctgccgctgctgcattgctgctgttgccc

SEQ ID NO: 45602 - DNA, 1007 bp, Homo Sapiens
  misc_feature (14)..(14): n is a, c, g, or t
  misc_feature (111)..(111): n is a, c, g, or t
  misc_feature (122)..(122): n is a, c, g, or t
  misc_feature (126)..(126): n is a, c, g, or t
  misc_feature (135)..(135): n is a, c, g, or t
  misc_feature (1007)..(1007): n is a, c, g, or t
ggggggggacaaanggaaagagaccaaccgttcccaaaacaggcctggtaccggaccggaatttttgggaatcgacgaccaacgcgaccgcttacgcgaccgcggacgcgnggggagaaccncaancgcgcaagncggccgacggaggtcagaaaaagagacagaacccaaacaaatacatccctaatggaagaccatggcatagagaaggagaggctggaatgacacttacttacgacccaactacagctgctatacagaacggattttatccttcaccatacagtattgctacaaaccgaatgatcactcaaacttctattacaccctatattgcatctcctgtatctgcctaccaggtggcaaaggaaaccagagaaaacaagtatcggggctctgctatcaaggtgcaaagtccttcgtggatgcaacctcaaccatatattctacagcaccctggtgccgtgttaactccctcaatggagcacaccatgtcactacagcccgcatcaatgatcagccctctggcccagcagatgagtcatctgtcactaggcagcaccggaacatacatgcctgcaacgtcagctatgcaaggagcctacttgccacagtatgcacatatgcagacgacagcggttcctgttgaggaggcaagtggtcaacagcaggtggctgtcgagacgtctaatgaccattctccatatacctttcaacctaataagtaactgtgagatgtacagaaaggtgttcttacatgaagaaaggtgtgaaggctgaacaatcatggatttttctgatcaattgtgcttttagaaattattgacagtttttgcacagggttcttgaaaaacgtttatttataatgaaaatcaccctaaaactagtttttgctattaagttcctaaggtggcataaaaaccccttaaaattcatcctagtaacctgtttccccccgaaacagggtttaattttaaataaaaaaaaaaaaaaaaaaagggcgggcn

SEQ ID NO: 45603 - DNA, 589 bp, Homo Sapiens
gtctttatttcatcccctccccacttccaaagatgcaaaaggcctaattgaatcaagtctcctttccatctggcaggagacattttaataaggactttttaatttcctacatttcttggccaagtgtcataggaatgtggcctcttttgaaatttaaaaatgaagaagaaaaaaagagcaacactaagttaatataatggagcagatacttttaatgttcttaccattgaatatgccatttaagtttgttatacttgaaattatatgatttttgtccagctctctaaattgtcatctccaatagatttagatgcttcaaatagtaaccacattactggtaagtaaacggtggggttattgggtttagcaagtggggaagtaaggggtgaacaaaacacgagagatggtggctacacccctactaagactgccttaccagataaatgaaatcctttttgtattaggcacaacatggtaaattaagtcttgctctaaaaaaaaagaaaaagaaaaaagagaaaagccctgatctaagagtttttagatgctagcaaccttgtttagatgtagatcttgtttagatgtagca

SEQ ID NO: 45604 - DNA, 610 bp, Homo Sapiens
catcatcatcatcatgctgatactactcactataaggggctcgttgccctatagacgccctccttccattacttcacaaacaagccttcagaatcagatgaatggaggacctttttatagccagaatccagtttcagatacaccacctccaccgccacctgtggaagaaccagtctttgatgagtctcccccacctcctcctcctccagaagattacgaagaggaggaagctgctgtggttgagtatagtgatccttatgctgaagaggacccaccgtgggctccacgttcttacttggaaaaggttgtggcaatttatgactatacaaaagacaaggaagatgagctgtcctttcaggaaggagccattatttatgtcatcaagaagaatgacgatggttggtatgagggagttatgaatggagtgactgggctttttcctgggaattacgttgagtctatcatgcattattctgaggaaagctcagcagggctgtgcttgcctcacaggaatagtcaggtcttcccagattatctgaagggcctggggattccactccagtaaagtagaatgaaggatacaaatgataacaattacactttttttttt

SEQ ID NO: 45605 - DNA, 536 bp, Homo Sapiens
cctcttgtgtggtaggtacttccatagaaaatttccatcagttcattcatgaaagaacaaagaacctggcaaaacttaaaaaaacgtttccaagaatcagataaaagaggacaaaccgttagggagaagaaggcagctgctcatttccagcaggggaagtagctgcatagagtacaaggactggtaggcctgttggctgttcctgtttaaggagacaagatgggcatggaacagggaccaccccctcctctgggagaagctgttacccccttcacttttcctcctctgtcattacccacaatcactctccttctttgcgctatggtaggtgttacccatcataggaatgggcatttgaactttgaaactgaatgtggtgattacacttcatgctgaagcttttcacatgagtgctttcataagcattaagtaaaattttataatgactgcagtccaaggacattttccctggtttttggccagtctaaatatggtaagagagagagaagaaaagtgtacggaatataattgtctcc

SEQ ID NO: 45606 - DNA, 678 bp, Homo Sapiens
ttcagaacccagcaacctggagtccaattttcagtattttaactacctcaataatgctatgaatgtaagatattgggatagagatcccaacttgaaacaacagccagtgcctgtggtaacttaatgtcttgtcaaatacttttattgattggtttatatgccattcttgttatagaagaatatgccttttaaaaaagcttattaataacactttcccaatttatattttaaaaagctaaagaacactggattaataatcttttgggagggtagaataaaataattgattactattgctgcatacccggggtgggatggggtggttggagaaccagaactatttttaaaacattaggtttcaatataaatacaactcacaactgctagctttggggggtgggggaacattgtttgggttttgttttgtttaatttattgattagtctttaaagtaggctttttttttttttgagaatactggaccatcattaaatgtgtactgtgaagagattaatatgtatgaagggctttaccaaagtccactaaataaacactactcaagtacagactgcaaaccaaaatgtatctgtgttacgacattaattgcaaatagcaagtatggtgctaaagtctacaccaatggaattagatgagtgctatgccttaaattttaaaata

SEQ ID NO: 45607 - DNA, 721 bp, Homo Sapiens
gtcgacccacgcgtccgaaattatacatattgctttagagagcaggtaggtggccatgtgttcagcagtgtgtccttaagaaaataccatctttctaagccactggaatttttactttactatttttaacattaatggatgtcaggtcatcaacctcaagtctttacatatccatgtatattccatatatattgtttatataggcccaagtttctccttaattgggatctatatactaccagcacaacatcaaaaacatgtaattgaatacatcagagctatatatgtaaggaaatgactggtgaccccattatcatcattgttgaattcatgttaagtagaccctctaggggaccataaggcaattgagcacataacgaaaaatgatgcaataagaatgtatgcactctctttgccaaatgcatgtgcttttgtgtaacgtggatgtaaacagaattgcagtgctgccgaaattcttgatcttggctaagagagtatttttccccttgtaattatgactctgagataaaattgccattttgaaatttccaaagtaacaactttttttattttatgaataaacttgggattgcaatttctctgatctgacaatcaataactttaacaaagatctaaataagtgtttcaaggaaagttttcctaagcaaatgtaatattacctcatttgggcatcattactctgttaattctatatcaaagg

SEQ ID NO: 45608 - DNA, 436 bp, Homo Sapiens
ttgtcctcctaacagctttatggagtacagtcacttaccatacaatccacaattgaccctgcacaatttgatgccggtttagtatagtcacagttcagcagccatcagcacagtcagtcttagagtttactacccccaaaagaaatccagccccccttagtcaccaccccaactccccatccctaggcacccctaggctactttgatctctgtagacttgcctcttctggacatgacatagagaaaggagtcataaattctccaaggtgtctgtttcttctttaatgtcattccctgtttctcctcacattccctccccatttcctgggcccagtctcacactggtccttgcttaccctaaatgctattaattccatcactctgagtatggtgttgctgtccgctgaatgccaagagcttcaagagtgtgtgtaaa

SEQ ID NO: 45609 - DNA, 604 bp, Homo Sapiens
gtcgtccaggagcccgccttcacttctaaatctgctggccacaagccctgctaaagatacacatctcaccccctccgccaagtctgaaatgcccctccccatctcaccttagactgaaaagttttaaatcatgtcaactggataatacttgctttatgtgagaatacttcagcagaatggatacgaattttcaaaacaatcttttcatatctatgtattctatattaaaagtgataaagtcatgtttctggggcgtattcaagtagctgacaagtaattatttaataatagtacatgagtgcattgtaatgattctcgccgtagtcaggtaatagtatccaaccgaaatttcctaccaacctgctgtatccaaagttttgtaaaaagttgtagaagttgttgatctttttgattttatattcaaaaagtctctttttataaatattatttattatacaatgtatatacctttgagttaactaagattatatattatataaatatatatatatttggagaaaatatatttcatcatgcagttttttatctgttaagtcattaacagagaaggtaaacaaacctaaaatggcaaacaaaacaaaag

SEQ ID NO: 45610 - DNA, 894 bp, Homo Sapiens
  misc_feature (14)..(14): n is a, c, g, or t
  misc_feature (16)..(17): n is a, c, g, or t
  misc_feature (39)..(40): n is a, c, g, or t
  misc_feature (678)..(678): n is a, c, g, or t
ctttgccccccatnanngggatggggaatggggacactnnggaggctttacaaaaggcagatgcccacctcagtgacttctaaggactgactctgccagcctggccttgactccggttacacagacatgggggtgaactttcactccacctccttccttcaagtacatactgaaaattcagtcaggctgaatttattcagaatgctttaccgagctctttcattatttgcacaggaacaaaagagaacacggactcccgctccctacccagaataaaaggacacccagaagaaactcactcagggaggtggggggttgggggcgagggctggaagaacaatgcaggagggggtggcatctccttcagcttcagcagtgtgccgagaagagggctaatttgaggaacaggatggtggtgcggagccctggcctgagggccgaggcagaacttccccttttcttgggccttggcccgttacaaagaggggtgttgcagcagctgatgcaaactgagttcagtttccctggggagcagaaggactggtacccggcagaggcgatgagacaggccgctgatgatgcacaggacttgcggtacatgatcccggcactttgctccatcacttctttctgacacatgtcttgaacgttcaccgtgcaattcacaatgaactcggnggaggagcagtcgttgttcagctggaattcttcacactggtagcactggatttgcagcgcaaagcctggaaagcagaacaatccgcaaaaagttgccgcgatgcctaggacccacattctccccgaagtccccggggcccggagagggccagcgcatcagaagagcgacagcagcgggagcttgccccgcttgcacggctgtggctgcccaggctg

SEQ ID NO: 45611 - DNA, 651 bp, Homo Sapiens
gctggaagaacaatgcaggagggggtggcatctccttcagcttcagcagtgtgccgagaagagggctaatttgaggaacaggatggtggtgcggagccctggcctgagggccgaggcagaacttccccttttcttgggccttggcccgttacaaagaggggtgttgcagcagctgatgcaaactgagttcagtttccctggggagcagaaggactggtacccggcagaggcgatgagacaggccgctgatgatgcacaggacttgcggtacatgatccctgtaacacagacccaaaggagctgagttaacgtgcaccggcaaaagaatagctgtccctctcagcccaaatccaaacggacagctcttccttactcctcccacagcccagagactaggtgaggtcagggaagtgcttcggattgtctcattgatattcaagatagatggtgaaagagacaggcactatttcattagttttaacaaaactgttccaaaagcgatttgagatgccaatacctgtgaatacctgttaataaagagctgttaaatagacgtgccaattcgccctatagtgagtcgtattacaattcactgcccgtcgttttacacgtcgggactgggaaaccctggcgtacccacctaatcgcctg

SEQ ID NO: 45612 - DNA, 500 bp, Homo Sapiens
agaacatactatttggaaataataacagcctaagagccaagtgctgaagttacatttctgcctaccacagctaaagctctcctcactgtctcctacccagtcctcctttccatcaattaccagtctcttgtataaatgtatccattaccaggctcacagactgggagtgatttttctcctttggagctcgtccagaatccatcagcctcacacacatatttacctgcaaatcattggaaaagcaaaaatgtttaactgcatgtataagatggttgtcatttgcttgaatacccccttgaaaaatgttgattcttgagcatcagtgggacatagaggtgtctgaagaaccattttacatgatttcataaataggaggtctctgcattaccatgtttgcttgcaaagtggaaaccttttagatgtgtaacttgaatatgtatcaagatctcaagtgcttaatgataaggtgttgacttgttaaattaaaccatttggaatac

SEQ ID NO: 45613 - DNA, 590 bp, Homo Sapiens
tgagcgggagcggctctgggccgagctactgcgcacggtgagcccggagctgatcctggatcacgaggtgccttcactgcccgccttcccaggacaggagcccaggtgcggcccggagcccactgaagtcttcactgtcggacccaagaccttttcctggacaccctttccgccggacctgtggggcccgggccgttcctaccggctgcttcacggggcaggagggcacctggaatcccccgccaggtccctgccccagcgcccggcacctgatccctgcagggcccccagggtggagcagcagccgtctgtggagggtgccgcggccctgcgcagctgccccatgtgccagaaggagttcgcccccaggctgacccagctggatgttgacagccacctggcccagtgcttggccgaaagcacagaagacgtgacgtggtgagcgccatccaagagccctgcgcagagtgcggcgcccggacacgctctcccccgccagcagccccgcctctcggctcccccgccagcagccccgcctctcggctcccccgcatgcgcattaaagcagggcgggctcctgtctgtctctg

SEQ ID NO: 45614 - DNA, 866 bp, Homo Sapiens
cattctatggtaacaactactgtcaataacatctgatgttacatgcacatttatatatatataattttaaaaactgaactatgagaagccatggtataaatgaatattgtggacatcatggacttgatatgatagaaatcaattgtcagcttgagaaagttgtttttaatctgtctaaatagttcatgcattactacagttaaaaatagtttcatttgtcttctatagacttaattttattccggttcagtataatctctgttaacagagtttcagcaaactgattggtcaaggtattaacatagcttctacttcctttacttaaaaagatgtggttttatgtaagttcttgattactgatgatcatcccaaattttgacaacaaaatcatatgtataaatttatttctcccctcttgttcatcatcttttgtaaaggtcccattgtagatcttttctgctaccaaataaaacttttcaaacaatttggtttcaagaccttaaatagacaagttggatactaagattgtgaactgataaggacatataaatttatatttccagcccttccttagagtctttatctgcatcaaaaacccaattctgccattaactgtgcttcccagtcccacctctatatgtcactcattttctgcaacaaagatctcactaaatcatgttgaaacacaagtcatgatcctctctaagtaaatagaaaaagctcccctggaaaaactctgttgccacatgcacgtgcccctgttactcctccaaccagccagtgctgccagcattttatttgtgtaaaagtccaaataaaataagggccctgccatgccaacctttttatctttcagaaaactaaga

SEQ ID NO: 45615 - DNA, 759 bp, Homo Sapiens
  misc_feature (46)..(46): n is a, c, g, or t
caggggccttggtacaggtccgcgattcccgcggatgccaagttantcggaccaagttacagtgtttgaaacaagtcagcagaattccatgcctgccctgatcatcatcagtaatgtgtgacaacttggaaatttgtactgaaatccacaataatcagtttttgctggatgggttttacagcagtatttgatatacctaacttgttatggaggttgattgatatctgatccctgcaaaatactttgacttgtcattttgttgatgatgcaaagcacgttggactgagaatacttaacattctttttctgtatttctttaaaccctgagaataatttacatgctcataatacaggatatcagcatatttgtgcaccttattaagccccatcttaagaaaacacaaagtctaagtctgctgttacaacttgtcaatggtatacgaatattaggagatgattctgagaaaggaaaggccttgttggcagtactcctgttaagccattagtctctaaattccagctttactgtgaagttctatagagtgttaaatacaaattttcctgtcttgcttcacacagttccttaaaatcagttttgaactttggtcatagagtcttcatatttcagtatttggtggtccctatgacttatacataactttgtaaaaagaaaaaaaaatttttttctgatgctttgaatatagtttttgaaggagttttgacttttttcccctcattctctcagtatagagtgcgcta

SEQ ID NO: 45616 - DNA, 582 bp, Homo Sapiens
tagattgatcatgatttgtgatttctatgcaggccttggtatgattgccttttaattgctgtacaatttcttttttttttttaacttctctggtataaaatattctaaatttgaatgacagcttttgtcaaccttcttatccaatattcttccaccaacgctatgaaacaggaagagaaaatggagtttggtaatttcatcaaatatattcattattgggggcaggagtaacatttaaatcctcctctttattgctggccgtaaaaatatgtcttttggagagcagaacatgccagaatgtataaggtgcaactgtttgatatgaaaaccataggataggaaactatgcctatgacactaaaactccaaaaagtagaagaccacattgatgatgtcactgcattttaaaatggaaagaacaagtgttcaagaacaggaatttgtgtgaattgcatttattcctataataatatgaactcaatgagatgatgacatagacacaataacaaaaggagaaaaacaatgtggctttttttagccttcataacctaatcaaataaatatctttgtgtgttttaaaaa

SEQ ID NO: 45617 - DNA, 530 bp, Homo Sapiens
cgtagaatcactgtatcattaacagtttggggtagtactgctttgcatccgtttatttgaaaacttaggtctagctgtgttttgcatcaaaatttttgagctattcaaaaagtaataggatctgtgtaaaatatttcactcaaaactactaaaaaaaagtctgggatggcagctcattatcaaatatactcctatttttgtggtgatttatgaacatccccactaagtataactaaagatcataaagagcctcagatcaagtttggtcaggttttgtcaccaagctttgtaaataaactggttttcatagctttttggagatgagaattgaggataagaaattgtgtctctgtcctttttttttttttttgttaagtcttacatgtattttactgtaacatcttttgaattggatatttaactaattcaacatatttttcctctttgcagaatgggcagttcatgttaaaatcacttttcatggagagagctctatgtaacagcataataaaactgcctacctagcagca

SEQ ID NO: 45618 - DNA, 865 bp, Homo Sapiens
  misc_feature (656)..(657): n is a, c, g, or t
  misc_feature (662)..(664): n is a, c, g, or t
  misc_feature (770)..(770): n is a, c, g, or t
agtagatattttaagtcataaggtccctgttaacactacttgactctgccattgtagcacaaaggcagccacagacaaaacaagcaagtagtcatgtctgtgttccaataagactttatttacaaaaacagcaggcacagacaagatttggcccacaggcatagattcccaactcatggtggtgaagtacagaaaaaaacacctgtctacaagcttttgtaagaaatcaggctaaatgttacctatgttttggttggaagatttctttggtttgaggaatgctttcctcttgcattggcatgccaagaggatagatgactctgaaagacgcctcttcagacatacctgtcatcacacaagatcaacttcttcagtttaaatgacacaaatccatattgtggaaggaaaatatgtagtgccttagcttcactaatagttgtaaaacttctttttaagacatcaaaggctagaggattcattttatgcagtgcgaacatctaataacactctctgtgtcaaatatatattgtacattaccttaaactattgtaatagctaggtaaaaatccttgtataaaagaatgttttcccccacacaaagggcagagtattgagcactaatttcctattaaaagtatatatatgtatctgtgaannaactnnnctggaacccttcccccctgaacatgccgaacccccttcccacctcccggaataagagaatctccaacctggcaaaaaaaaagcagagaacacaaaaaacccttttnaagggggggggccccctctaaaaagaatcccccctcagggggccccaggggggggcggggacccccaacaaaatacttccccaccgggggggccc

SEQ ID NO: 45619 - DNA, 433 bp, Homo Sapiens
  misc_feature (122)..(122): n is a, c, g, or t
ccttgaaatgtgtacaggtgtcaccatcatttctagtatattaggaaactgggatgggaggttgatttgctctctaaacttccctctagttggcaagtctcacatattcatcagcaggagtngagggtgggggaaaactagaaagatgaaaacttttacatttttctgatgggttcatgtctctgattgggtcagctggcttcctagcctaagctgggatctgaataccccttctctgtagctgctagtgagccttcccatttagattaaagattgctttatccagcagtcaattaactctccagttatcagtactcccacaattggccagggcaacaataattggagttcatactgatgccctgaggcactggaaaaaaaaaaaaatcccaaagtgccttctgagctgtctaaaagttacattgtgcttggt

SEQ ID NO: 45620 - DNA, 876 bp, Homo Sapiens
ttttatttttttggttagggccttaaaatttcaggactgtgattattagtatgtgtgcctaaggaactttttgagtcactcttaagaaagtgaaactgaagagtctaagtgataactataggattaagtcagaattgtttttcctgtcatttgttggaagcttcttgagttctgttattagcattcagggaattgatacccatcaacttgaatggaaaatcgtttgtaggtattacttaagtgaatgttaagagttccaccctgagtggtaatctaaggctgtgcagtcagttacttcagactgctcagaatagttcattagaaaggtaacaaatgagaaatgtattattatacagttctatagtagtgaagtgatggaatacctttcttacttttgtggagttacatctgatgctaagaatttgacctccaactaagcaaacattttaatgagcaaaagttagtgttattaaagttttttatgatagatccaaattgaggacctgtgtcctgtttttataagattgcaacccagctatgctcatttgtttatgttttgtatatggctgcttttgtgttacagtggtagagtttagtagttaggacagagacctgcaaagcaaaataatttacagtctggcccctttacagaaaagtttgctgactcatgggccaaataaatgaaaatttttttgtgttagggttgcttaagctaggggttcttttttgggtatccatatgccctaatttttatggaaaaatctctccaataaaaaaaatttatttttcttcgggcgcaaaccaattccccctttttcccctttcccctttcccatcttcctttccctttcccgtcccttcttacacaagcactct

SEQ ID NO: 45621 - DNA, 718 bp, Homo Sapiens
tagcacatcaactggcagaggcagaggcagagggttaccatactgagtatctgtttttcctcaggcacatcatttttatctggaaagacttttctagctgcaatttaaggcagcaatccaagagacttgaataataataattcaacaacagctttatttttatgtggagaagggtcttgcatacaatagtttaaaaaagacaaaaaaaacctttgcttaaattcatgctgttctaaaaactagatcgattgtacatcttcacaaattctagttaacaattttattttgtattcttgcagttttaagtggatgctaattttaggggcataagccttttatggccctcttgcagatcttctgaactatgcacatttgtgctttttttgtaagtttggaccaacttttatgtaacaaacagcccctccccacctccagttttacaacaatcagaaagggcactgatttatttggtatttttctttttacaaagctacctttagtcaaaggtcactgtcagtctttgcacctgctttcagtgttattgtgaaaggtgtactttgtgctcatttcagaaaataaaacacaacctttctcttgatgcaacagttttataaaaaaaaaaaatggtcaacgttatttttgttttgttttgcagattatcaaagcctagcaaaatgcatttaaatgaaatagtgggttttatatgaaaactatgggt

SEQ ID NO: 45622 - DNA, 851 bp, Homo Sapiens
  misc_feature (663)..(663): n is a, c, g, or t
  misc_feature (787)..(788): n is a, c, g, or t
  misc_feature (824)..(824): n is a, c, g, or t
ataaaacttgcagactttggacttgctcgattgtatagctcagaagaaagtcggccgtatactaacaaggtaattactttatggtaccgtccacctgaactgctactgggagaagaacgatacacaccagccattgatgtatggagctgtggctgtatccttggcgaactcttcactaaaaaacctatatttcaagcaaatcaggaacttgcacaactagaattaataagccgaatatgtgggagtccatgtcctgcagtgtggcctgatgtaatcaaactaccatatttcaacaccatgaaaccaaagaagcaatatcgtcgaaagttaagagaagaatttgtttttattcctgcagctgcgctagacttatttgattacatgcttgccttggatcctagtaagcgctgcactgctgaacaggctcttcagtgcgagttcctccgagatgtggaaccctcaaaaatgcctccaccagatctccctttatggcaagattgtcatgagttatggagtaaaaagcgaagaagacagaagcagatgggcatgactgatgatgtttccacaattaaagcccccaggaaggacttgtctctgggcttggatgacagcagaaccaacacaccccagggtgtgctgccatcttcacagctgaaatctcanggcagctcaaatgtggcacctgtaaaaacaggccctggacagcacttaaaccacagtgaattggcaattctactaaacctactacaatctaaaacaagtgttaatatggctgattttgtccaanngttgaacattaaggtaaactctgagacttaacagcngcttaattaaaatgacctttctggtgg

SEQ ID NO: 45623 - DNA, 524 bp, Homo Sapiens
acgggtgtatatttacacaaaattgaaggtcatacatagatacaggttggtatcctaactttaccctctcactgattaacatggggtcacgagtaacttcctatgtttttaaatctttgaaaatagatttctagtggttctaccttatccatccccacactgttgaaaattttggttgtttcagatacttttattatcaatgatgatgtgataaagcttcttgtatatatctctttggctctatctttgggaatttcttaagaatggaatcttagaattggactgtgaagagggggattcacattgctggggctaagtacaaattgacatcaccttttaggaatgaaatgcttctctttgaccctttagctccagtgtcccagcatagtcgctgggcttcataggagtagcagtgagaggacagtgtcacagcaagggcctctctgcatgctccctgatcattgtgtttgcagggtcagcatttcttcttgagtccttcccttcttccacccttatgcctgaaa

SEQ ID NO: 45624 - DNA, 731 bp, Homo Sapiens
  misc_feature (705)..(705): n is a, c, g, or t
ctaagttatggcgtgattagccaaatttgatttccaacagtcatttatggccctaactattgcatagagtgcaggatgccagcaaagatgagggtgggggcagatactggctcagtgatttaactcacattatagatgaccccttcctcaacagaaatgctactgagagaaccagagaggcctgggccaggcaggtcttatttgagaggagattatttgataattgctttggttagaaggactttacatttcctgatttcaagtccagcaccaatttagaaagttcagagatgaaaccacctgtctttacctgacagagtcataacggtttgtgtaaaaatgtggtcagggaccttttttgttctttctgattagttaatactgtacattgtaaccaggaggggcagttttgccaaccagcctctgctcatggtcaccatatgtgtatgacaaggcctgagtgagttcctgcataaactgggtagtgggctattttgacacatttgcaagcatgtaaatgaatgaatgacactaccagcaaccatctgtacaggtccatttacttacattcataaggtttatgctatgaaacttcttctcattgtgatgtcagtaacagagttagtgtctctgatggaatagtgtacctgtcacccaagttattttgttcctttttgggtcctccagtataatccccccctcatnccaattaactgtaaaatggtttacac

SEQ ID NO: 45625 - DNA, 673 bp, Homo Sapiens
aatttttgtatttttagcagaaacagggtttcaccatgttagccaggatggtctcgatctcctgaccttgcgatctgcccgcctttggccttccaaagtgctgggattataggcgtgagccaccacccccggtccaagatggctatctcttaacacacttgtaacccatttgtgcacacaggtgtgccgtgactcactggtggatccaaaaaaagctgaagcctacatttcccagagcccctttcagcttgaattccaaatgtgacttagcttcctctatgcagatgtacctacttgaaactgggaaggccaaatgagatagaggtaatgtttctgccaacaaacagccacagagcattttatttttctagaagagcaataacagagaccccagggtgtggtgtggcaggacgaggagcatccattttgctggtggggattgtggctaaaataatgtggctctggagccagcaatgggcagcatcttcatgactttccagcttccaggctgtaagcagagatagcatctcttctggacagccagttatgtgatagtgttctgagagtcattcctggaagtcagactaaaggctgctccttcagcctttccattcatcttgtaagcaggaggccttctgtgcatggccagaaactaacaaaagcacattgtgtc

SEQ ID NO: 45626 - DNA, 824 bp, Homo Sapiens
  misc_feature (665)..(665): n is a, c, g, or t
catttccaaaatcagccttctggcagacttggaagtactcttgagaaaagaagactcgtgaccaaattctcccacagatttgtaataatgtacatattgaaaggactgaaggctctcagactgggaaagaaacttacccattttaaaattcagcattgctcaacttacctgactgccggaccccttcacccatgattctatgcactgtattgttggaacatacattgtgaaaacactgccctgcctaggcataccccctttccagaattaactttccatttaattctatagtttttcactgatgtaactttctagactggacaacaaagatgactaatagtaatcactccaagttgatgttgactgttgggttgtggtgaaatcattttgcattaaaggaaggtaaaatactaataaattgcatattccttgaccagagcacagattacttatgcttcttaattttttaaaatcttaaatcctctgtccaactggagtatctggctatgggccatgggtactcatataccctttgtcttaaactgatctgttacattttatgttcttgtggctagaagtagcctgagtttgctgttaatgtttaacacattttcttgagtaacagttctgttaatattgtacaagatggtacttgaattctttgnttgccttttttcttcctgtattagaaaatcttggtgctttttataagttttgtataaaagaattttttttaagatttggtcataaaatggtctgatccaggaaaaataaaatgggaacatggacaccatttctgaccttcaaataaaaaaaaaaaaaaa

SEQ ID NO: 45627 - DNA, 881 bp, Homo Sapiens
caggatcccttggactccgtcccccaacttgtcacagcagcctgagcctacccaccccaggagacaagagctggcaggaacatctgcctatatggggggtggcgttggccccaaagaggcttcaccagcaaaggaactgtgtgtattttaatgccagggacggaggatgtgtgagctgttcagcaaggtctgcccaaggcctaaaactcaatttccttattcttttgcttctgctcgtccttaacaactaacagctcaacccacacctctagacaacagtagtcgtgctttctgctaacggtgacattttcagctcttaaaaagaagcaaggagattttcaaatgctagagtatctctatcagaaggcataggacattgtgtccaaagtctcaagaacaaacaacactttccttctgacctggtccaaaagtcagcaaaccagcaagcaggcagaggccctcataaggacttttctgtcctcctttgaccaaactgtttaaccgagcctaggggtgatggggagcgacccaagctggcatctttctctacggagacagattttagaaaatacttttcttgcccatgaatttcttttctggttgatttttatcattttccctttacttacaagaaaataagattgcaaccactcctgctaatgatttagtagttccttttcatttcagtttatgtaaattaggagataattctaagagttactaaaggatgatttatttacgagaactacgtcaaatagcgaatgagttatgggtaacattagacgagaataacctttcccgtgggaaaggtttctcgaagggcctggatgccaatatacaaatatccaaaaaatctaaataaagcttattttaccatatta

SEQ ID NO: 45628 - DNA, 479 bp, Homo Sapiens
tgagtggagatcgtgcctgtgtgctccagcctgagcaacaagagcgaaactgtctcaaaaaaaagaagaaaataaataaataaaaatcagagcacaagaagtaccagtccaccaactcacattttctatattaataattcttaactaaaagaagttccatattcgacagcattttagttttttaatagtacttattagcatcaaccatcttgataatcaccaagggaaaaattaaaaatacctagactgcaataaacctttaaattggattttcagtgagaatttagaagcaatcactacctttctcgtttcatttgtgtaaccatgcagcataggcactgtgttacatcatctttacgctttggtatttgaacttattacagaattttttctctaaattggatgtttctttatatgaccttggaaactgaagtgatcttagcattaaacaaaaatgctttttgaagcacctttctcat

SEQ ID NO: 45629 - DNA, 834 bp, Homo Sapiens
  misc_feature (573)..(573): n is a, c, g, or t
ttttgtgtattttatacctttgtacccagttctaaagaaatggtggcacttagtgataacataccagccggtgtgacccataaaaaccaggatattgaagagaagatcatagaagaacagagcttgctgtctacctatgaactcccatcttgttacccaacaaaagacctaactagcatttatgacataaagccatttccaaaaatcacagatactaaaaagacagaagatttatactggagacagcagtcactaaaaacccaacccacaccttactgtaaaccagaccactggattcactatgaaaatcttaaatctcccctacgtgatcagtataatatgtgtccagaccctgttagccttagtaaacctagtgttttacaaaataaacaagacacggaagctttcactttagaacattttttaagtaagccagaagaagagttgttcttgaatatggaaaacaatgaagaaacaagacctgttcttggttggattcctagagctggagtgaccaaacctcagaccaacctgctggagcttaagaactctttttcaaaaactggtgcacanaagcgttttcataaatcaattctagaagaccataaaagacctcagggataatgagcattcggggatgaagcaccaattctatggccataaatcctataatttctataattgaggaacctcattctttcccttaaaaaacccagcctctttgcaggaggcttaaaaatttaacaagaatttcctttcgtatttgctgggattctgggttttttaagatataaaccccaaggaccccttggtttagtgggaggtttacatttt

SEQ ID NO: 45630 - DNA, 515 bp, Homo Sapiens
ccaagctgcctaaaaaggtataaatgtgtaaaaatctcattattgccaaaattggataaatgcccatcttagctaaaacctcaaattgctagaaaattcacagggaagaaaacatttcaagggctatacctcagcatctaggctttttggactaaggagctttcctttttgaagttatatgataatgtacaggtcacagatcccctttcccaacactttgaagatgaatctggagtctgcttacttggaaggcaaagagtgacttgtgtctattgaaagtatatccgttttccccccacatggggattcatacttgagaaatagtgcaaagatgcttatctggaactgtgttctggtgaaagaaccaaattactggcttgttagccaacagcttctgatagcaattcatataaccctctaagaatacctgtttaagtcttgagtgttgaaaggaattgtttactttggaatataggaaaacagttgaatgtcagactctcatttgtatgtgatct

SEQ ID NO: 45631 - DNA, 382 bp, Homo Sapiens
caagccatgctgtcaagcatctcaggatgataaccccagaggcagtctttagggactggggtgggctcaggaagctgtattatttcaaaggtacgcagtgtttccacagctcagcccagagctgactggagttcacacggcccaccagaacctgctgacttcaaaatcatcaccaccaaggggccaggaggtggcgctgtggggcaacagaaaacagaaaacagctgctccttgaacttggattcccagcagctcccccaagcgcccacaggggctgcattcctccctgctggacacctgtaactacaacattaaaacagggagcaacaaggaacacaaacactgggaaagctgtgcctttaaaaaaaagtcgacgcggccg

SEQ ID NO: 45632 - DNA, 467 bp, Homo Sapiens
cataacagcgtcagagagaaagaactgactgaaacgtttgagatgaagaaagttctcctcctgatcacagccatcttggcagtggctgttggtttcccagtctctcaagaccaggaacgagaaaaaagaagtatcagtgacagcgatgaattagcttcagggttttttgtgttcccttacccatatccatttcgcccacttccaccaattccatttccaagatttccatggtttagacgtaattttcctattccaatacctgaatctgcccctacaactccccttcctagcgaaaagtaaacaagaaggaaaagtcacgataaacctggtcacctgaaattgaaattgagccacttccttgaagaatcaaaattcctgttaataaaagaaaaacaaatgtaattgaaatagcacacagcattctctagtcaatatctttagtgatcttctttaataaacatgaaagc

SEQ ID NO: 45633 - DNA, 765 bp, Homo Sapiens
ggccatcccagcccagtgtggatgaactactcctacagcagcctgtgtttgagcagcgaggagtcagaaagcagtggggaagatgaggagttctgggctgagctgcagagtcttcggcagaagcacttgtcagaggtggaaacactacagacactacagaaaaaagaaattgaagatttgtacagccggctggggaagcagcccccaccgggtattgtggccccagctgctatgctgtccagccgccagcgccgcctctccaagggcagcttccccacctcccgccgcaacagcctacagcgctctgagcccccaggccctggcatcatgcgaaggaactctctgagtggcagcagcaccggctcccaggagcagcgggcaagcaagggggtgacattcgccggggatgttggcaggatgtgaattcagaacagaagccatgtatctcccccacaccagggcccaccatggagcttgtgttctcagaatctgatgctttctgatcaacaaaactgagcaaggaagatcccaacactgaaggggtagaaggccaggggggcatggagagtgcagctccattatagtgaagagccaaacatatgtgaactgtttgctgtgtggaggtgttagttctgctgcctaccatcttcatctctagcacctccccctgccaaagagtccaaccactaagcaatcccacccaagcctggatgctttctagaggggcccactcccagctggggagagtgtaggggatatgctcac

SEQ ID NO: 45634 - DNA, 713 bp, Homo Sapiens
  misc_feature (687)..(697): n is a, c, g, or t
  misc_feature (699)..(706): n is a, c, g, or t
ggggctgcggcgctgcggccgacgccgggtccgcaccaactgtctccccctcccagcttcttacctcggcttcctactccttcccccgcccgcccagcaccgccagcccgggagagctgccgggagttccccgggagcctcaggtggtgactatcctgttgagaagcaaaagatactttgcaagtaaaaaatatgcctcccaagtttaagcgccacctcaatgatgatgatgtcacaggttctgtgaaaagtgaaaggagaaatcttttggaagatgattcagatgaagaagaggacttttttctaaggggaccatctggaccaagatttggacctagaaatgataaaattaagcatgttcagaatcaagtggatgaagttattgatgtcatgcaagaaaatattacaaaggtaattgagagaggggagagactagatgaactacaggacaaatcagaaagcttatcggataatgcaacagcttttagcaacagatccaaacaacttcgaaggcaaatgtggtggcgtggatgcaaaataaaagccatcatggctttggttgctgctatccttttgctagtgattatcattcttatagtcatgaaataccgtacttgatttgatgacagagatcttcattaagcaagatctgggacagtaataaaagattgctgcataatcaaaaannnnnnnnnnnannnnnnnnaacatgt

SEQ ID NO: 45635 - DNA, 886 bp, Homo Sapiens
  misc_feature (714)..(714): n is a, c, g, or t
  misc_feature (730)..(730): n is a, c, g, or t
gctgctcctcttccccttcccaccccctgcagtatcacagccactgcagccagcattggggcagctggcatcccccaggccggcctcgtcaccatggtcatcgtgctcacctccgtgggactgcccaccgatgacatcaccctcatcattgccgttgactgggctctggaccgtttccgcaccatgattaacgtgctgggtgatgcgctggcagcggggatcatggcccatatatgtcggaaggattttgcccgggacacaggcaccgagaaactgctgccctgcgagaccaagccagtgagcctccaggagatcgtggcagcccagcagaatggctgtgtgaagagtgtagccgaggcctccgagctcaccctgggccccacctgcccccaccacgtccccgttcaagtggagcgggatgaggagctgcccgctgcgagtctgaaccactgcaccatccagatcagcgagctggagaccaatgtctgagcctgcggagctgcaggggcaggcgaggcctccaggggcagggtcctgaggcaggaactcgactctccaaccctcctgagcagccggcaggggccaggatcacacattcttctcacccttgagaggctggaattaaccccgcttgacggaaaatgtatctcagagaagggaaaggctgcatgggggagccccatccagggagtgatgggcccggcattgcctgangccccgctgtgacagnttccccggtgtgaaccccggtgagggcggcaggcaggggttatccggccccactttctggatgacagacttggagctctgagagctgaaaacacttgttccaggtctcccgttaaaggtcaagacactaactcaaatcttttcaggccccccttct

SEQ ID NO: 45636 - DNA, 735 bp, Homo Sapiens
  misc_feature (666)..(731): n is a, c, g, or t
tcactttctagttgtcccatgcaggggttgaaatttgattccaagcggaaagtatattatgttttttcaggccttcacatctagagagatggataacttccaatttgatttttcaggtaatagagaaagctgctagtaattttaacccctgcctaaagaagacatatacttcatttgggagcaaatacttattgccttgaaaagtagcactgtaatagcctatgataattagttgtagaataacctttatccctttcaaactatgcaaattattaaataagtgtaaattaggattcaattaaagatagttgattatattgcaatcagatggcattcacaaacttaactggagcatatacaaatatattagtctaagttttgtatgctaacagaaagatataatttagctacctattctaaaaatggtgaatattattaatattgtataataggagtgggaagactgcctcctttttttgaagagagagattaaggatttttataattgtttttcatcaaattttaatatttttgtcaaatttttaggtatttaatttgtaaaacagtttgctttgtactggcatacagaaaatagggtattgattttaaactttttgaagccaagtgatcaagtacatttgtaataaaagtcaatggatctataannnnnnnnnnnnnnnnnnnnnnnnnnnnnnnnnnnnnnnnnnnnnnnnnnnnnnnnnnnnnnnnnnaaag

SEQ ID NO: 45637 - DNA, 847 bp, Homo Sapiens
tcaggcctattcgctgcacttcctgccaaactttgcgccccacaagcctggtcatcagccaggcagccctcccagtgcccaagggccaccaaccccagggaaacagggccagcacagaggggccttcctcccccacagagctcccatgacatagtctgctctgggcggaagagctttgctgccagccagggatgtccagaggtcggtgcagcccctatccctgctcaggagtgggctcagagtctagcaaatgctaaggcccctcaggctgggctctgaacgaggacctggactcagagccagacagggcagcctcagacccttctctggggctcctggaccttgggccataatttctgagcctcggtttccccatctaaggaacagatgtggtcgttccgccctctcagctggatgagactgtcctggaggatccaccccggaacagacagaatggtgtctctcaggatggtgctctgagagagggcagagtggatgccccactgccctagaccctcggtagacgtggggtctctggggcggggtctgtggctgtgactgaagtcggctttcccgttgatgtcttgatgctcctatctgtgcacttaccgtaggtagggacacgtgtccatgcaccacagacacacccacgaacctgatctcgtatcactagcttgcggcaggtcatgatgtggcccggaagctggcctgcgtgccatgagtgcgtcggtcatggagttcggagccctgagccggccctggttaaggacaggccttaaagtaaaagccaccccatccacattggggggaaaaaacccgtgttttccaaaagggcccagggaaaaaa

SEQ ID NO: 45638 - DNA, 581 bp, Homo Sapiens
  misc_feature (553)..(554): n is a, c, g, or t
gttactgtaatacaatataaaggaaatatgctgttgaaattttaaaggtatgcccagttcctaacttttaaacgaattaccgttcttcctcttggctgatcttggcagagatgacaaaaaaaaccccaaaacaacccatgcatgtataatgtgtgtatacacatatacataagtatacatatactcccacattataacttagaatatttagttttttacctgttactaggtttgagttacatggttgagttgccaaattatttacatgctttgtttaaattcttcatcacctagcaactgtttgctgatcatggatttacttagttactttaatttataaaattaccatttggaaaagaactcaattgggaaatgtgatgacgtattgtacatgttactttttcctttgctataatcatctagggagactgataagaattttggaaatgggagcctggaaactcatctttgtttttttaatgctatgcctcttacgaggaatacgaattggtatgtcctaaaataagaacttaataaaggagggaaatcccannaaaaaaaaaaaaaaaaaaaaaaaggac

SEQ ID NO: 45639 - DNA, 877 bp, Homo Sapiens
ggacgcgtgggcgagccatggccgctgccaacccgtgggacccggcgtccgcgcctaacggcgctgggctagtgctaggccacttcatagcttcggggatggtcaatcaggagatgttaaacatgtctaagaaaacagtttcttgttttgtgaacttcaccagactacagcagatcacaaatattcaagctgaaatctaccagaaaaacctggaaattgaactcctgaaactagaaaaagatacagcagatgttgttcatcctttctttttggatatatggtacatttgctggagttggctgtgactttcattgagagattagaaacccaccttgaaacaattagaaatattcctcatttagctgcaaatctaaagaaaatgaaccaggctttagcaaagatggatatattggtgactgagacagaagaactggcagagaatatactcaagtggcgtaaacaacaaaacgaagtttcgtcttgtatccccaaaatattagctgaagaaagttatctttataaacatgatattataatgcctcctttaccttttacttctaaagttcatgtccaaactattaatgccaagtagtcatcaactttatttttgcttaattatgtgtagtcatatgaagtctatttctagttgactgtaacatgggtattaatagtctttgctgctggtaatactgaaagaacctgctttatattggagtatcaagatctcaggttcattaagaccaaactgacttttcctttggtttttcatatatttttattctaccctttccgtaaaactagagaagctaaaaaagaaccatgacaatttattaatataagggaattaaccattttctccggtgggggaaattctctt

SEQ ID NO: 45640 - DNA, 632 bp, Homo Sapiens
actctatccccaagtttgtcgaagacattgcactttgcgaatggaacttcttggctgtgaactgtcgggttgttctgagcctctgggtatgaaatcaggacatatacaagactatcagatcactgcctccagcatcttcagaacgctcaacatggacatgttcacttgggaaccaaggaaagctcggctggacaagcaaggcaaagtgaatgcctggacctctggccacaatgaccagtcacaatggttacaggtggatcttcttgttccaaccaaagtgactggcatcattacacaaggagctaaagattttggtcatgtacagtttgttggctcctacaaactggcttacagcaatgatggagaacactggactgtataccaggatgaaaagcaaagaaaagataaggttttccagggaaattttgacaatgacactcacagaaaaaatgtcatcgaccctcccatctatgcacgacacataagaatccttccttggtcctggtacgggaggatcacattgcggtcagagctgctgggctgcacagaggaggaatgaggggaggctacatttcacaaccctcttccctatttccctaaaagtatctccatggaatgaactgtgcaaaatc

SEQ ID NO: 45641 - DNA, 611 bp, Homo Sapiens
  misc_feature (499)..(499): n is a, c, g, or t
ctgagctgatcgaggcccatacctgtgagcgcatcatgtgctgtgtggcccagcaggccagtgagaagattgaccgtttccgtgctcacgccgccagcgtgttcctgacgctcctgcactttgacagccctcccatcccccacgtgccccaccgaggagaactggaaaagctgtttcccaggtccgatgtggcctccgtgaactggagtgcaccttcccaggccttcccacgcatcacccagctccttgggctgcccacctaccgctaccacgtcctgctggggctagtcgtgtccctgggcggcttgacggagtcgacggtgaggaggcgtcgggctggctggggcaggaggtggctccaggagtgcctggtgcttccctgtctcttgggagcatgtatggagctgggccttttcttccattgctttctatctctctcgggcatatttggttagggggtcaggggcccagtggcttcctcatgacccaagaagcttanggccttggggatggttgagtctgatgaagtgggacagggccaacgccactttttttctgcgggcgaagccttggaggcttccaaggtcccctcggggttaaatcttcaagga

SEQ ID NO: 45642 - DNA, 723 bp, Homo Sapiens
cgtccgggagagacggcttgaaggccattgcgaggatttgccagactgttggtgtgaaagcaggagccccagacgaagctgtgtgcggagagaatgtttcccagatttactgtgcgctgctgggctgcatggacgactacaccacggacagcagaggggacgtgggcacctgggtccgcaaggccgccatgaccagtctgatggatctgacacttctgctggctcggagccagcctgagctgatcgaggcccatacctgtgagcgcatcatgtgctgtgtggcccagcaggccagtgagaagattgaccgtttccgtgctcacgccgccagcgtgttcctgacgctcctgcactttgacagccctcccatcccccacgtgccccaccgaggagaactggaaaagctgtttcccaggtccgatgtggcctccgtgaactggagtgcaccttcccaggccttcccacgcatcacccagctccttgggctgcccacctaccgctaccacgtcctgctggggctagtcgtgtccctgggcggcttgacggagtcgacgatccggcactccacccagagcctctttgagtacatgaagggcattcagagcgacccgcaggccctgggcagcttcagcgggacccttctgcagatctttgaggacaaccttctgaatgagagggtgtccgtgccgctgctgaagacgctggaccacgtgctcacccacg

SEQ ID NO: 45643 - DNA, 511 bp, Homo Sapiens
ggacttaaagtgatagtttttaaaccatattctgtccctaagtaataaaaaatctaggaagttactaaaataccagatttgttctgctctgcctcatctagaatcaacgtctaactaacttaaatgaagtataataaatgagttcatatgaaaaggcttcctctatggacacttagatatattgtaactattgaagttacctgggatgtgggggcggtgggaggaggacctgcctccccaggacatctatgactaaggcctggctttagttatggagagagacgtagaagttgaattttacacccaaaattgatgtgactgaagaggaactgattgttgctaaccagctcacaagaatccagtattgagaccagttcactagaagaaacaaacatttctgccatgcagacccaaaaagttattagttggtgaatatgtattttctctttggaaggtctttaaggggagcaaaccagttttaatcaatcagattgcttggtaagtttggaat

SEQ ID NO: 45644 - DNA, 900 bp, Homo Sapiens
gtttatttggttgacaggtgtggaggctaggcagtccaagaacatggtgccagcatctagtgagggtcttgccatggcagaaggcaccacatggcaagtgagcatgagaaagatatatgggtctaaacttagccttttatcatgagcccactcccaagatagcagcactaattcattaatgagggcaaagccctccttacctaattactttttaaaggtctcataacacttttacaatgtcaattaaatttccaacacttgaactttgggggacatatttaaaccttaacaggagggctccactcactgaaaagagtcgttcatggtagctaacctgtggtttgtgctgaaaacctgctttcttcctgggagtctagaattttggtacatggtaggtagaaggtacctacgtgaccagcccccagtaaaaaccctgggcactgtatctctaacaagtttccctggtaaacaacatttctcacatgttgtcacaattcagttgctggtggaatgaaacaacagatatgtgtgactccactgttagaggactctggaagcttatacctggtttcccccagactttgcctctgtaccttttctctttgctgttttgcttcatatgcttttgctgtaataaatcatagctgtgtgatgatatgctgagtcttgtgaattctcctagcaaatcatggaacctggacggtagtcttggagaccctggcatacaaaagcagttcctaaggtggtttactgggtagctgtagagaataggcaaaagaagaaaccagcaaggaaaaagggcacacctgtggtataacttttggaaagtgtaacttgtgaaatgctcagaatattttaactataagaaggtattgggagtattataagaagatgataaac

SEQ ID NO: 45645 - DNA, 642 bp, Homo Sapiens
  misc_feature (479)..(479): n is a, c, g, or t
  misc_feature (509)..(509): n is a, c, g, or t
cacttcggcaacggctactacagctgccgtatgtcgcacggcgtgggcttacagcagaatgcgctcaagtcatcgccgcacgcctcgctgggaggctttcccgtggagaagtacatggacgtgtcaggcctggcgagcagcagcgtaccggccaacgaggtgccagcgcgagccaaggaggtatccttctaccagggctatacgagcccttaccagcacgtgcccggctatatcgacatggtgtccactttcggctccggggagcctcggcacgaggcctacatctccatggaggggtaccagtcctggacgctggctaacgggtggaacagccaggtgtactgcaccaaggaccagccacaggggtcccacttttggaaatcttcctttccaggggatgtggctctaaatcagccggacatgtgcgtctaccgaagagggaggaagaagagagtgccttacaccaaactgcagcttanagaactggagaacgagtatgccattaacanattcattaacaaggacaagcggcggcgtatctcggctgctacgaacctatctgagagacaagtgaccattttgtttcagaaccgaagagtgaacgacaagagtattgtctccaagctcatagatactgtctcc

SEQ ID NO: 45646 - DNA, 590 bp, Homo Sapiens
  misc_feature (487)..(487): n is a, c, g, or t
ccgccgtttgcaccgcgtacctcatgcggcaccgcggcctgagcctggcgaaggccttccagatggtgaagagcgctcgcccggtagcagaaccgaacccgggcttctggtctcagctccagaagtatgaggaggccctccaggcccagtcctgcctgcagggagagcccccagccttagggttgggccctgaggcttgaagcttgaaggcctgctgcctggaggaaggatgtccctgcactgatacagaagctgtttctggcaaagcctgccgtgtcttacatttgtctctctatccggattagatgttgctatatgaacacatcgggactgtgtctgcaggaaggagctccccattcgaggccttcacagtgtcacccacattcacctctttccacttaaacgtgtcccatgaatcttgtcataacagttttgtgttccttaactattttgtctgccatgtcatttatgatgtatataacctctntaatgcctgaaatcataagaataatcatcaaaggcaagagggttgtatattttcccgttggagacacatctggaatttgctgcaataaaataattataagaaa

SEQ ID NO: 45647 - DNA, 453 bp, Homo Sapiens
cttcagcagagttaatatgcttttctgatgaattacacaacagtttgttaattcttcattcttgtagtatttcatcacaagaaacctactcttctgtcatcttgaagtaaatagaagatcaagccttcaaatctcttaattttttcggtatttattaaatctgtgagtggtttaaggagcggtcagtgtgtataaagtgtgtttgaacattatgccaaatatcaagatgtgaaggactaattcaggatgcaaaaacgttattggggggttgtaaatatcaactattcaacagtttaggatgcaattacgagtgtaaactgtgtgccttatttacactttattgtctcccgcttctcagatagttttgatgtgttgtacagtggaatatcttagatactttttggaaagtatttacataagttatatcacaattaaaatgttgaatttaaaaaa

SEQ ID NO: 45648 - DNA, 728 bp, Homo Sapiens
agagtatatgtatgacttaaattattagctatggtttgcatttagtacatggcagattgcctgtaagtctgttcattttaacaacatacggggctgggcacggtggctcacgcctgtaatcccagcactttgggaggttgcgggtggatcacttgaggtcaggagttcgagaccagcctggccaacatggcaaaaccccgtctctatgaaaaatataaaaattagctgggcatggtggcaggcacctgtaatcccagctactcgggaggctgaggcaggagaatcgcttgaacctgggaggtggatgttgcagtgagcagagatcgtgccattgcactccagcctgggaacaagagtgaaactctcaaaagcagaaacaaaaacccaacatatatgggctgttagatagtaattgtaatttcgtataaatagtaaatgagtacatcttgattaaaagctatgaattcagaattgcttttaaatatatagggggttttttgaaatttattacagtgcaattgaaaatacacttaaaatactgcaggatgcttagtgctcagtgttatgtatgaacttgtggactttacaatgcaggttgagaactgctaaatgtatagaatgactaaacagctgtctttcagtgtatcctcatttttacaggtataaggaacaaactttaatgttttgaatgcctaataacattactttctcattttcgcacaacacac

SEQ ID NO: 45649 - DNA, 554 bp, Homo Sapiens
ggcagagcaatggattctgtgattgtctatgtggtgtagttgttgctaagaggatgctattgtaatcttttctacctatacttcttcattggctcagaatgaagcaaggcatgtgctgctttcttatatgtcatttatgccataaatcccattgttagaaggtaatgcttctaacggattccattcatgcttttgagataaatggcattgactttcatattgatcacatggaaagctgttacctgattcctttcctgagatcacttccagcctaatgtgcatttggctggaatatggttgtctcagaataacatcatgcactcgggcttttatacttctgcctttaggggactgtggcagcatggcatgggtcaagaagtacttctccttcatcttcctttgatgtcggtaactcatcctttctgcactgcgggagttgttaatgcttttgtgtcctccagttcacatgctgattgctaagaagaaaatgagcatgagtgaacccaaagctgctgaaacattctgcgtttatgcaacttccttgccctctatac

SEQ ID NO: 45650 - DNA, 1204 bp, Homo Sapiens
  misc_feature (703)..(706): n is a, c, g, or t
  misc_feature (712)..(712): n is a, c, g, or t
  misc_feature (717)..(717): n is a, c, g, or t
  misc_feature (746)..(746): n is a, c, g, or t
  misc_feature (1022)..(1022): n is a, c, g, or t
ggtccggaattcccgggatggtgattttgaagtgaacttaagccactaggtttgagggacaaaggacagtagaaaatggtgaagactgcagatcacctgctatacctcaaggagcagcggacccagcagaatatggcccaaaaaggaggcaggtctcctgttgcaagagcctctgtttttttaaagagaaaacaaagaatcctggtttttatgtgaaatctctaattttaaaataataactcattaaaaatattgtaatgtccaaaagtatctttccatttaacttctaaaaatctcttaaatgttttttttaaataattgtaaagtgagtttttgttaagcttataggaatgggccagttaactaaggtagacagatgtaggaaattaaatatttgatttacttagggatctatatgacatcagttatcaaagaatacattttaacccaaaagtataccatgctcattgtatctttgatcgttcttcaagtatttctcaatcttttaatctatcaggaacattactatcaagagcagattgttgtaacataatactcaggatacatgaaatgtatgtgagagataaatagataatagaaagtttattgttataaaaatgacctacaacttatataaaaaaattctgaaaatgttgactttttttggactgaagactgcaaaataaatggcttctcaaagtannnncacaanaaacncaaacccaacacaaaagacacacaccaancccccccccacttctccaaaatccccctcatggacttcttattaccccgtctgggtcctttttgggcctcacgaggccccactctaatacgcttcttctctgcctttcgccctcttttttacatcttactatccttcattctaccctttataacccaccacacctccggcctttttttatcctttccccatacctgtcgacatttctgtacccacccatccccgcgcgacacttaccattccttctgcggtctttttccgcaccacaaccacaccntccatcccggacgctatatatttttcgcccaccgccgaacaatcatattgttttctcacccctttctttctctgccacacacagattactccccacctccatacctcattgcgcaaccctcgcgctctccttcttttcttcccgtccgaacgccaacttctcttcccttcatcctcggcctc

SEQ ID NO: 45651 - DNA, 767 bp, Homo Sapiens
caggtcagccttcgtctcagttacaacctattacatatggtccttcacattcagggtctgctacaacagcttccccagcagcttctcatcccttggctagttcaccgctttctgggccaccatctcctcagcttcagcctatgccttaccaatctcctagctcaggaactgcctcatcaccgtctccagccaccagaatgcattctggacagcactcaactcaagcacaaagtacgggccaggggggtctttctgcaccttcatccttaatatgtcacagtttgtgtgatccagcgtcatttccacctgatggggcaactgtgagcattaaacctgaaccagaagatcgagagcctaactttgcaaccattggtctgcaggacatcactttagatgatgtgaacgagataattgggagagacatgtcccagatttctgtttcccaaggagcaggggtgagcaggcaggctcccctcccgagtcctgagtccctggatttaggaagatctgatgggctctaacagtgcttactgcagccttgtgtccaccaccaacttctcagcatgtttctctccttggaccttgggtttccaactctgcagccttcaggtctggggccaggagtgggacccaccatttgtggggaaagtagcattcctccacctcaggccttgggtagatttggcaaaagaacaggagcagcataggctgtttgagctttggggaaatgaactttgctttttatatttaactaggatacttttata

SEQ ID NO: 45652 - DNA, 653 bp, Homo Sapiens
atgcaggccatcaagtgtgtggtggtgggagatggggccgtgggcaagacctgccttctcatcagctacaccaccaacgcgtttcccggagagtacatccccaccgtgtttgacaactattcagccaatgtgatggtggacagcaagccagtgaacctggggctgtgggacactgctgggcaggaggactacgaccgtctccggccgctctcctatccacagacggacgtcttcctcatctgcttctccctcgtcagcccagcctcttatgagaacgtccgcgccaagtggttcccagaagtgcggcaccactgccccagcacacccatcatcctggtgggcaccaagctggacctgcgggacgacaaggacaccatcgagaaactgaaggagaagaagctggctcccatcacctacccgcagggcctggcactggccaaggagattgactcggtgaaatacctggagtgctcagctctcacccagagaggcctgaaaaccgtgttcgacgaggccatccgggccgtgctgtgccctcagcccacgcggcagcagaagcgcgcctgcagcctcctctacccaactttcttgtacaaagttggcattataagaaagcattgcttatcaatttgtttgcacgaacaggtcactat

SEQ ID NO: 45653 - DNA, 728 bp, Homo Sapiens
agggcttcaccccgaccccaaggccctcaagggcttccaccccgaccccaaggccctcaagggtttccacactgaccccgaggccctcaagggcttccaccccgaccccaaggccctcaagggcttccaccccgaccccgaggccctcaagggcttccaccccgaccccgaggccctcaagggcttccaccccgaccccgaggccctcaagggcttccacactgaccccaatgccgaggaggcccctgagaacttaccctacctctcggacaaagatggcagctccagccacaggcagcccacgtcgaaagccgagtgccccaatctctgttttgaaggaaaccttaccccaaagcttctacactctgacttagctcctactctgctggagtgaaaatctacccacgacgctcacaaacttataattcctcctcaccacaagtttatgtgttaaaaaccatcatcataaaaggaaatgagacccgtatctgaaggaaacagatgttcggtacacggacgacgccgactctcccatcaccaagctgccctcggttgcccaggagagccacagtgccttgagaacataagcaatttagtgaacagagttcttttcagaatttcctttttcttaagtaagcatctctgttacttaatttctcaccacagctagatgtctataatctgccccaaaaagaaaagaaagcgtgtagatgaaaaaaaaaaaaaaa

SEQ ID NO: 45654 - DNA, 576 bp, Homo Sapiens
ttcactccttgtgctcctctgcagatgtttttcccagtgttctaggttaatgttttatttggttgcctgcataatccctgttctgtttcactgatggtgtttgcagcaccactgttcatggtggtccactgttatcctatgccagggtgctaagaattgcatgatattcatcttccctgctctatttaaatttacatctataagagtcatcttgacattaacactgaaatgtgatctaggtccttaaccaaaattgctgggcaacttgtaataaatttagacagaaattttatgagtaccacaaagcttggtgttaccacatcaccagaaggatttcttaggaaatgtcttgccgagagagctggctctctgcatatagatgtctttgtcagaaaaccaacccttgctctcacttacacagtagtaagcactgaaagtggttcagttcatgagaggacagagaattattttgagattatatttgaatgtaatcttgcagagccaaatatggtatgtcattaagttggaaccttgtaaatagctgttccatgttataaaatgagaaactttgtaact

SEQ ID NO: 45655 - DNA, 593 bp, Homo Sapiens
gctgagccagcacccgcacctgtggctgtgcaggtgacgtccgggctgccgtcccagcaggggcggcaggagagagaggctggcctacacaggtgcccgtcatggaagaggcggccatgctgtggccagccaggcaggaagagacctttcctctgacggaccactaagctggggacaggaaccaagtcctttgcgtgtggcccaacaaccatctacagaacagctgctggtgcttcagggaggcgccgtgccctccgctttcttttatagctgcttcagtgagaattccctcgtcgactccacagggacctttcagacaaaaatgcaagaagcagcggcctcccctgtcccctgcagcttccgtggtgcctttgctgccggcagcccttggggaccacaggcctgaccagggcctgcacaggttaaccgtcagacttccggggcattcaggtggggatgctggtggtttgacatggagagaaccttgactgtgttttattatttcatggcttgtatgagtgtgactgggtgtgtttctttagggttctgattgccagttattttcatcaataaaaaaaaaaaaaaaaaaggac

SEQ ID NO: 45656 - DNA, 685 bp, Homo Sapiens
  misc_feature (618)..(618): n is a, c, g, or t
  misc_feature (626)..(626): n is a, c, g, or t
  misc_feature (629)..(630): n is a, c, g, or t
  misc_feature (636)..(636): n is a, c, g, or t
  misc_feature (638)..(638): n is a, c, g, or t
  misc_feature (641)..(642): n is a, c, g, or t
cgtggcctcctgtctctcctccggcttcgcaggtgtctactttgagaagatcctcaaaggcagctcaggctccgtgtggctgcgcaacctgcaactgggcctcttcggcacagcactgggcctggtggggctctggtgggctgagggtaccgccgtggccacccgtggtttcttttttgggtacacacctgctgtctggggcgtggtgctcaaccaggccttcggcgggctactggtggctgtggttgtcaagtacgctgacaatatcctcaagggctttgccacctccctgtccattgtgctgtccactgttgcctccattcgcctctttggcttccacgtggacccattatttgcccttggcgctggactcgtcattggtgctgtctacctctacagccttccccgaggtgcagccaaagccatagcctctgcctctgcctccgcctccgggccctgcgttcaccagcagcctcccgggcagccaccaccaccgcagctgtcttcccaccgtggagacctcatcacggagccctttctgccaaagtcagtgctggtgaagtgagggctggcagcaatggggggacacaagggagggggactggggtggagggtgtngggcatcngcnngaccangncgnncccctccgggggctggctcctctgggttggggagatggtcttt

SEQ ID NO: 45657 - DNA, 466 bp, Homo Sapiens
cagtgagccaagatcatgccacatcactccaacctgggcaacagaacaagaacccatctcaaacaaacaaacaaacaaacaaaaaaaaactcttgtctccttaggatatgttacctgctccactgcagactagagaaataaatgtgtattgaaccttttactgcaaacttgaaaatgctagaaaaccaagcatgaagaataaatacatggcgggaaacacacaggcatgtgcatatgcatatacattgtaagttagtaagttagaaagctagctttgttgtatctgaacacatgaatcttttttggtcagtgtaggaagcacagccagatcctataggaatgaatacctcaaatctgttgtctgagattctagagattaaaccactgtgccatttttaacccaggctgtactgttgtttcttaccaacagcataggttttcatcactggaaggagcctgtgttcat

SEQ ID NO: 45658 - DNA, 787 bp, Homo Sapiens
ggtataatggttttgcctgcactttctctatgtatatacaaatgtacatgtataaatataaaaattaagtgatcatggttcttggtaacctgtcccaagtgctgtgattcacacgcctgacactaaaaggttcttcctggtccagtcagccagctgtgaccaccagcagcacagctgagtgctgagaatctggctggaaagagaaacgtggctcaagtgctggctcaccttctagctgtgtggccctgggcaggttactgaggctcttccaacctcacttttcacatgtaaaatggcatttctaaaagtacctaccctacctcaaaggaattctgaaaaaagtaagtgaatttgtataaagcaaagcactcacaatatgcctgacacacaaactgcttaataaatgttagtaatttttaaaacctcctcataagcggcttagaaattattcatgtttggtacatatttattgcaagtcaagcagatccaacttttttgaaagctggtggtctaggagtatagttttaattatatttgtaaatactcaaaagtattagatgccagtctaatttaaatgcagtctgactgtagcgagtaactgacctgggcaatgaaaaaacagttgtatttttcctgtgggtttttcaaagaaaatatccctttttataccggattttagaaaaggaaaaaatcaattggcctaatattcggaaaatttgaatttggtgaaacctaattttggttttaattaccccgaaaaaaacaaacccctttataccaccagaaa

SEQ ID NO: 45659 - DNA, 411 bp, Homo Sapiens
cgcaatcttggctcactgcatcctctgcctcctgggttcaggtgatcctcatacctcagcctcctgagtagctggaactacaagtgtgtgccaccatgtctggctaattttttttttttttttgtattttttagtagagacagggttttactatgttgaccagattggtcttaaactcctggcctcaagtgatctgcctgcttcggcctcccaaagttctagggttacaggtgttagccactgtacctggcctctaaggtgattctgatgtgtgtattttggaaccactgtctcctagacagaaagcttctgtctcaaagatgatcacattggtgtaaagagcaaaacttgttaagtccaaaataaattcttactgtttatatcctaaaaaaaaaaaaaaaaaaaaaaaaa

SEQ ID NO: 45660 - DNA, 312 bp, Homo Sapiens
gcggccgccccaccctccccacccggggaagccatcacagctcatctgcccgcggctgcgtgaggacagcaggggtttttcttcagagtctattttttcagcccaccagggtccagggagatgttcgttctcgctttaagtcaggagtcacaaatgactttttttttttcaattaaggaaaaagctccatctctacctttaacatcacccagacccccgcccctgcccgtgccccacgctgctgctaacgacagtatgatgcttactctgctactcggaaactatttttatgtaattaatgtatgctttctt

SEQ ID NO: 45661 - DNA, 459 bp, Homo Sapiens
tgctttttaaaagcttatagtttaagtaaaagtaaaatgtaaaaactgattaaacctatacaagtctggcaatgagctctgcatgaggaaatggaaggaggaatattgaaaatgattctaggaaagtgaacgtaagaaaggaaaatgggttttccttttctgatcatgggctctggaaagtattcatggcctttaccagcattcagtataaaccagagataaggacatatgtacttacgtgtgtctgtgagtgtgtgtgtgtctgagtgttattctgaacagcttgtaaatattgtagttgtttaaaatggaaaataaaagctgagttcttttggcaaatatattgcatcaaaaatacagtattgacagtggataaaacactgaggaaataaattttttttcattttgaaaaaaaaaaaaaaaaaaaaaaaaaaaaaaaaaaaaaaaaaaaaaaaaaaa

SEQ ID NO: 45662 - DNA, 543 bp, Homo Sapiens
gagcaccagcactggcactggcactggcacacgctatggcaaatgaagtgcaagacctgctctcccctcggaaagggggacatcctcctgcagtaaaagctggaggaatgagaatttccaaaaaacaagaaattggcaccttggaaagacataccaaaaaaacaggatttgagaaaacaagtgccattgcaaatgttgccaaaatacagacactggatgccctgaatgacgcactggagaagctcaactataaatttccagcaacagtgcacatggcgcatcaaaaacccacacctgctctggaaaaggttgttccactgaaaaggatctacattattcagcagcctcgaaaatgttaagcctggatttaaaacacagccgtctggccagctgcctcgaatatctgacagcttagcaaaaagggccaaagctttccataggcgtgctgcacttgcttggtaaattaaacagcttttgtatcttcccctttgactttaggtaataaagcatccaaacttgtaaaaaaaaaaaaaaaaaaaaaag

SEQ ID NO: 45663 - DNA, 773 bp, Homo Sapiens
  misc_feature (6)..(6): n is a, c, g, or t
  misc_feature (9)..(9): n is a, c, g, or t
  misc_feature (13)..(13): n is a, c, g, or t
  misc_feature (36)..(36): n is a, c, g, or t
  misc_feature (51)..(51): n is a, c, g, or t
cccaanganatgnactgggttttggttcaacagtgnaattcaccatccagnagagactgtggtatatattttaaacctgttgggccaatgagaaaagaaccacactggagatcatgatgaacttttggctgaacctcatcactcgaactccagcttcaagaatgtgttttcatgcccggcctttgttcctccataaatgtgtcctttagtttcaaacagatctttatagttcgtgcttcataagccaattcttattattatttttgggggactcttcttcaaagagcttgccaatgaagatttaaagacagagcaggagcttcttccaggagttctgagccttggttgtggacaaaacaatcttaagttgggcagctttcctcaacacaaaaaaagttattaatggtcattgaaccataactaggactttatcagaaactcaaagcttgggggataaaaaggagcaagagaatactgtaacaaacttcgtacagagttcggtctattaattgtttcatgttagatattctatgtgtttacctcaattgaaaaaaaaaagaatgtttttgctagtatcagatctgctgtggaattggtattgtatgtccatgaattcttcttttctcagcacgtgttcctcactagaagaaaatgctgttacctttaagctttgtcaaatttacattaaaatacttgtatgaggactgtgacgttatgttaaaaaaaaaaggtgttaagtcacaaaaagcggtaataaatattttcatttttga

SEQ ID NO: 45664 - DNA, 506 bp, Homo Sapiens
gcgatctgccatgagagcagtagcagcactactaaccattccagaagcagagaagagtccactgatgagtgaattccagtcacagatcagttctaaccctgagctggcggctatctttgaaagtatccagaaagattcatcatctactaacttggaatcaatggacactagttagatgtttgttcaccatggggaccattacatatgaccatacaatgcactgaattgacaggttaatcataagacatggaaagagaagtgtctaaaagcttcaaaatgttccacttttttttccttcatggagactgtttgtttggctttcttccattgttgtttttgtagcatttatttcagaaatgtgtatttccataatccagaggttgtaaaaccactagtgttttagtggttacagcaacatttgaaatggaaactaaaagttaggattttatggagtatggagatagggtccagtatctatttaccctgtaatgtttaggattaaaatg

SEQ ID NO: 45665 - DNA, 1050 bp, Homo Sapiens
  misc_feature (50)..(50): n is a, c, g, or t
gaattcctgggatcttcacgttgatgtgaagggttacaaggatggagggnatccatctggagtgcaggtccactggctggtacccccaaccccaaatacagtggagcaacaacaagggagagaacatcccgactgtggaagcacctgtggttgcagacggagtgggcctgtatgcagtagcagcatctgtgatcatgagaggcagctctggggagggtgtatcctgtaccatcagaagttccctcctcggcctggaaaagacagccagcatttccatcgcagaccccttcttcaggagcgcccagaggtggatcgccgccctggcagggaccctgcctgtcttgctgctgcttcttgggggagccggttacttcctgtggcaacagcaggaggaaaaaaagactcagttcagaaagaaaaagagagagcaagagttgagagaaatggcatggagcacaatgaagcaagaacaaagcacaagagtgaagctcctggaggaactcagatggagaagtatccagtatgcatctcggggagagagacattcagcctataatgaatggaaaaaggccctcttcaagcctgcggatgtgattctggatccaaaaacagcaaaccccatcctccttgtttctgaggaccagaggagtgtgcagcgtgccaaggagccccaggatctgccagacaaccctgagagatttaattggcattattgtgttctcggctgtgagagcttcatatcagggagacattactgggaggtgggaggtaggggacaggaaagagtggcattataggggtgtgcagtaagaatgtgccaaagaaaaggcttgggtcaaaatgacacctgagaaatggattctgggactatgggggctgactgatgggaaataagtaatcggaacttctacctggacccccgaaaccaacccggaaaacttcctaaagcccccttaaaaaaagtggggggtccttccctggacctatggaaactgggggaattcttcctttcctaaaatggccgggggcatggaatccccttttttccta

SEQ ID NO: 45666 - DNA, 484 bp, Homo Sapiens
accaagattttgaaaaaattttcaagacagagaattttgataaatcctgacattgacctaattgacataggtaaatatgtttgtatatgtgctaataattttctaatttcggaacacgatgatgttatgactattgatttaaaaatttcaaataataatttttgaaattatagatgaatgctttcatttgagtttcattctgtaattcagcagttctgggtgaaatacagatagcaaaacaaatcatgatgctgttacaaatgtattagttatccaataagtgttttaagtcaatttttttaaaatgatatgagtcttacaggtttcttccatctttaaaatgctcaaacatggattcagggactaaaaggatgaactgattagacattttctattaggagtttggtaaaatattgtaaaaatatcttcacctgtgttaggagtattatcagaaagaatggattctttaataaatatgtaaaac

SEQ ID NO: 45667 - DNA, 570 bp, Homo Sapiens
aagactactgtggattcaagtgctttaatgactatttatgcgttgactgtgagaatagggagcagtgccatgggacatttctaggtgtagagaaagaagaaactgcaatggaaaaatttgtatgatttccatttatttcagaaagtttgtatgtaacaattacccgagagtcatttctacttgcaaaaggattcgtaacaaagcgagtataattttcttgtcattgtatcatgcttgttaaattttaatgcagcatcttcagaacttgtcctgatggtgtcttattgtgtcagcaccaaatatttgtgcattatttgtggacgttccttgtcacaggaagattcttcttctgttgccttattgtttttttttttttaagtctcttctctgtctttgtactggaatcgaaatcataagataaacagatcaaacgtgcttaagagctaactcgtgacactatgcagtattgtttgaagacctgttgttcaacctctgtctctttatgttaactggatttctgcattaaatgactgcccccttgttaaaaaaaaaaaaaaaaaaaaaaaggac

SEQ ID NO: 45668 - DNA, 1823 bp, Homo Sapiens
gagatctctggtaagtgtaacatgtgagcattactaggcatttcatcctgtgggtctgcagtctttgctcttcagactgttgctccgttggaatgcttctgtgggactgatactgaggttctatagatattttttaaggacctactcatttggggatgtcagtggtgttttgcaagatcatctgaggaacaggaaagcatttgaaatctgaaaaggataactgtggcggttttcacagtggaaggaaactatattggcaaagaggcagatgactgaataaagtagttggctcaaagaagatgcacagtctgctatttttttctctgaatgaagactgtttaatggaagctgtattcatgtggagatcaaaggaaacactggaatgatacactactatgtttttcccccccctttttttttttaaagaaaacaaaaagcctgaagcagtaatttgagctcaaatgccttctaattccttcacagcctgcttgttctactagggattctcactaacaccatttctgcctgggtgcctgtgcccttttgctggagcagccacagacaactgcctgatgggagaaagaatgaacgcttggccttgcttaatgctaatcgaatggggaattaaagcttaactgtgttcttctatatatggaactggatatcagctgatctagacagagtcgatgctcatgagctgactcatacatgtaactactgcacttgctatagcacatggttttttgttttgcccttccaacactgaagaatgtaaccttgagcttcaattcaggaattggctgagcttagaactttttctggaatagtatctgcattaaaccagtgatgaagaaatgaagacaaattagaagtggaaacagaatagtgagattttattttttattttcaattataagcaaaacagctactggtaactatatgaccttgcaggccaagagtgggtatcgctgtgatcatctctgtcacagcagttgtttctcatttcattctatattgtgtggtgttgtgtcaccaaaaacaatgattgttttgtgcaagtaaatttcagagatagagcaataagactattttggtagaggaaaaatatttttaaatgagcttggactcagttttagttattgacatgttggtgtgaaatttcttcttaagtattgcagtaatccaacagaaataatagaatttcgttatatttaggaagttacaaattatgtagtcataattttaaacttgtttttccagtagtacttattaactttaaaaaaaaaaaaacccagctgtgctgttcagagaatgtttgtaagtgttgtacagaagaggaggaaaaactacttgtgctcttccaactgtgacttttatcacatagctggaatttagtgttttaaaagatcgaatgagtcgagtgtgtattgttgtttggaggaggtagaagatgaatctccgcatctttctaaattgccacggaaataaatcctacattctccacttctggaatgtattgccatcatggtgcagctatatttaacggagatcctgatgaagttcgagcactaatatttaagaaagaagatgttaactttcggcagtacttctggaatagaaattctaaacattagcctgccgaacaactggattgcatttgatgattacaattgtccagtcacagatggcatccacctctactttttattattaatattagttttaattgccaaatcataattgtatatatttgtagagtacaatgtaatattttggtatatgtatacaatgtgggatgattaaatcaagctaatatatccagc

SEQ ID NO: 45669 - DNA, 691 bp, Homo Sapiens
tatggccggggtttaagaaatgttaagctcttcttggaacaagccccaccttgctttccttgtgtagggcaaacccgctgtcccccgcgcgcctgggtggtcaggctgagggatttctacctcacactgtgcatttgcacagcagatagaaagacttgtttatattaaacagcttatttatgtatcaatattagttggaaggaccaggcgcagagcctctctctgtgacatgtgactctgtcaattgaagacaggacattaaaagagagcgagagagagaaacagttcagattactgcacatgtggataaaaacaaaaacaaaaaaaaggagtggttcaaaatgccatttttgcacagtgttaggaattacaaaatccacagaagatgttacttgcacaaaaagaaattaaatattttttaaagggagaggggctgggcagatcttaaataaaattcaaactctacttctgttgtctagtatgttattgagctaatgattcattgggaaaatacctttttatactcctttatcatggtactgtaactgtatccatattataaatataattatcttaaggattttttatttttttttatgtccaagtgcccacgtgaatttgctggtgaaagttagcacttgtgtgtaaattctacttcctcttgtgtgttttaccaagtatttatactctg

SEQ ID NO: 45670 - DNA, 493 bp, Homo Sapiens
ggagaatgctgccgccactgcgctgttgagttgaagttggtaccaaatacacatttaccacttttatatctgggaagtcaacttgccatcgtttcatgataacaaccatttataagagaaaaagacaggacacgctttccatcgttcagtatttgatgacacaaaattccagttctaatgttgggcatcaacttctagcactacgagtgtggctcccacttggacaagataccgagcttcgttatgcagtttttaatattatttattattttaaaaagtaataagcacaaaactacatacattgtatgtcatttaaagtatttatgtcaaacagggtgcaagtgtgaacccaaggactggagcacaaattcctaactgcctggggcagggctaatgttagcattggtgtgcgtctgcctccaaaggaggttctagttgtcagcgagactcaacacagatgacattgaaattcgtttctctcctcatctatcac

SEQ ID NO: 45671 - DNA, 554 bp, Homo Sapiens
ccgtatgtgtcaaaataaaacttagattccaaagtggttttgtagtgttgggtgctatgagtaggtatggatctctgttgattgactccagttgaaggtgagaaatctgtaccaatcattcaaaaagggaatctattgttttgaaagaaactctctcatatttcctttaaattgttaatagttgttatgcaactaaagaatgttatgaagaaaaatagcattgcaaaaagtaccattggccaggcttacaagtcagccacaatgagtcggtataactactgtgttattctttttctagacaaattttgactcttctacttttatgtgtaataattccagtattctatttatttcagcattatgtgaaaaatgataagaatgttaaaaagaaaataatagtgtggtttaattggtatgagatacctgcttcctcctcctcaaaggtttgactgggtgtatctctcctatgtgtgacattatgtctcctggtgttaacacaggaaatgagtgctcctttttaaaatttctttcttccaagtttttttttccaggaa

SEQ ID NO: 45672 - DNA, 496 bp, Homo Sapiens
caatggtgaattttggagagctccccagctctcagcaacttcatataagcatggtggtatcttaaaatggtggtttgcagaaaccatggtagccaacagaacctcctgactttcacctgcttttaacctgaaaatatattaatacgcctctgacatgagtccagggagaggcaagattgagcaatagtcagtggcaccatttcctaaagtaactgaatcaatcaatccagtcaggtaattattttctattggggaacttagaaaaaaaagtaaagcaagaaatattttctctcctttatgatcagtgataccttagagacttttcgaaagtccttgttaaagatagttacaatgtgtggttaaatgatgctaaaatattttcacaaccagagtagaaaacgtgctggaacaaaattgcgaaggcttttgcctcccagtaaatagaaaggaaaatatattctagtaggtaagactgctgactctttgaaaatctgag

SEQ ID NO: 45673 - DNA, 612 bp, Homo Sapiens
  misc_feature (607)..(607): n is a, c, g, or t
ttttcttgtggttgcccttgtgtttgcagtatagatttacaaataatgcaacccctctttcaaataataatatactgcttcttgggcagtgtaccttatagtaacaaaataatcctaatttctctttcctatcccatgtatcattgctgtcattccacttatatataagcacccctaagtatgacgactatacacacacacacacacacacacacacaaaaatatatgtgtacaaaatcaaatacattgttgccattattttgaatgaactgttaactgttagattaagaattggtaccatatggaacaggttagtggaacttactataaaaggcttttctttgggggaaatttttaattactgaaactatttaggagctgtgggattacatgtctatcttcaattagtttgagtaaaatactcgtagtaatttgtgtattttgtcagttttcaaatgaattggtcataatatcctcacattttcaaatttcaactgcgtttataaaattttcatttttccattctctatttgtgtcttcttgctcgatcttaccaaaatattttggttagtgctttttcaataaacaagttctggcttaaaaaaanaggaa

SEQ ID NO: 45674 - DNA, 523 bp, Homo Sapiens
cagatgcacttctgaggcatggatgagctgagcgtatggctagaaattggaagtttacagctattaccagggggctaactcccggggcatcgcagtagcttctggcacccgtggcttcatgtctttagcaaagtcttgatgtcatggaaagagaaaaagtgtatgcagttagttacctgattttgtaaacaaacagtggctgacctgggcccttaaatcaccttcacaccttttagaaccacaagtggttctttttgactccaacaaaggaaacgaagttgaaaaagtcaagcccctgtgtactggggccggacttcccatcatttgagtgcagcactttagttcagaatctctgtgccatgtggttttttaaacaggaagattgttggttccttagtattaagatagatagtccctattttgagtggaatttttcatttgtaaggggtatgttccttctctgattcttgctttcctcaaacaggatactgcctgctgtaagaccatcctctatggttgtact

SEQ ID NO: 45675 - DNA, 564 bp, Homo Sapiens
  misc_feature (528)..(528): n is a, c, g, or t
ttttttttttttttttttaaaatggctgaggtgaagtctctgggacattttagccataccaagaatcattagaagatgcaagctggaaaaaagaaggtcccagttttggttttgaacccttcatgttgcagcaaatgtgaatctcctacagatgggtttggggacttacctgttcaaatagcagcccggtgtcctctgtgggtggggggaggtttgtctgtcctttcattctagtaaatccaccatcctctgcacgagagccaggagaatccacatcacttcaaaagagcccccaaatccttactacgtactacagcctcctttcgaatgttcctggttgagagggagatcaattgcattatttacaagtcaaaaaattttgtatcaaacttcctatgagcttgggcactcatggcctatggaggcccacccagacgcagccccgccatcatgctttttcgttgttttgtggatgtacccagggctatttacacactctttcattaaaaggcttatttttatatttanaaaaaaaaaaaaaaaaaaataggtgcgcctcgtgcc

SEQ ID NO: 45676 - DNA, 309 bp, Homo Sapiens
acctaggcagattacttcagagtcagcgtctgccttactatcctgtttcctgagcaggaatttccccttgtgtcaggcaacactaggtgttaggagtggaggtgtgcagatgttgccttacattctgttttcctgatgtggtgtgcttcctaagagtacaaacctgagcatatgtccaggcttgcaaagtctcaggcaaagctgggactaaggcttgtgtttcctgccttgggtaggattttcttctatgcatgttgggtgcttctcacttaacctaatagtatgccttgtctgttttccccccttccc

SEQ ID NO: 45677 - DNA, 500 bp, Homo Sapiens
tatacagtttttgtcattgtttaagaaagccagttgtttggcatgtgagttaaaggcagttccaatgcctgatggttcccagatctatgaaatgagtggaccattaaccttacatgtaaagattatgttagtaattaagaaacctaacaaaggtgttaccaaggaacctttgggagtgccttttttgtttttcaagatggacccaaaaaaagtggaggaagatattgttcttttgtgccctcctacctgtgagagatatttgtagtcctatgtgaatgagcttatccctccacaaccaggtgcatatgaaagtgtacatattatgactgccaagtattggaaatgaaaagacctggagtctatgctaggaagctgagatattttggtattgcattggtttttatggtaactaggttttgcatgcaattaaaaatccttatttcttgttctagggcttcccttagttaatggttattataaacctattaattcatctgttt

SEQ ID NO: 45678 - DNA, 930 bp, Homo Sapiens
  misc_feature (14)..(14): n is a, c, g, or t
  misc_feature (728)..(728): n is a, c, g, or t
  misc_feature (814)..(814): n is a, c, g, or t
  misc_feature (817)..(817): n is a, c, g, or t
ctggctaccggggnaccccttcctacccggcttcaggcccgtgtcctctgcgcctggccccgggtgggtcagccgcgtggaccacctgaccttggcctgcacccccggcagctcccccacacttttgcgctggttccacgactgcctgggcttttgccacttgccgctgagcccaggtgaggatcccgagctgggcctcgaaatgacagcagggtttgggcttgggggactgaggcttacagccctgcaggcccagccgggcagcattgtccccactcttgttctggctgagtcccttccgggggcgacgacacgacaggaccaggtggagcagttcctggcccggcacaaggggccaggcctgcagcacgtggggctgtatacgcctaacattgtggaggccactgagggggtggcaactgctggaggccagttcctggctccccctggggcatactaccagcagccaggaaaggagaggcagatccgagctgcagggcacgagcctcatctgcttgctcgacaggggatcctgctagatggtgataaaggcaagtttctgcttcaggtcttcaccaagtccctttttactgaggacactttcttcctggagctgattcagaggcagggggccactggctttggtcagggcaacatcagagctctgtggcagtccgtacaggagcaatctgccaggagccaggaagcctaaggatgcccagggctgngtgcagccagctgtcctgcagctctggggagaccagcacagaactgaggaacatctgcaggaggcccaaactagtgaagggcttgnctncggggggcaggtgtgacttccatttatcagtgcctgccagaagctgtgtctctcattggggctcaaagaggtggggattttttaaaactaaaaacatttcttatatacaggct

SEQ ID NO: 45679 - DNA, 841 bp, Homo Sapiens
gaacgacgcaccagccctgaagaaagcagagatcggcatcgccatgggctcaggcacggccgtggccaagtcggcggcagagatggtgctgtcagatgacaactttgcctccatcgtggctgcggtggaggagggccgggccatctacagcaacatgaagcaattcatccgctacctcatctcctccaatgttggcgaggtcgtctgcatcttcctcacggcaattctgggcctgcccgaagccctgatccctgtgcagctgctctgggtgaacctggtgacagacggcctacctgccacggctctgggcttcaacccgccagacctggacatcatggagaagctgccccggagcccccgagaagccctcatcagtggctggctcttcttccgatacctggctatcggagtgtacgtaggcctggccacagtggctgccgccacctggtggtttgtgtatgacgccgagggacctcacatcaacttctaccagctgaggaacttcctgaagtgctccgaagacaacccgctctttgccggcatcgactgtgaggtgttcgagtcacgcttccccaccaccatggccttgtccgtgctcgtgaccattgaaatgtgcaatgccctcaacagcgtctcggagaaccagtcgctgctgcggatgccgccctggatgaacccctggctgctggtggctgtggccatgtccatggccctgcacttcctcatcctgctcgtgccgcccctgcctctcattttccaggtgaccccactgagcgggcgccagtgggtggtggtgctccagatatctctgcctgtcatcctgctggatgaggcctcaagt

SEQ ID NO: 45680 - DNA, 556 bp, Homo Sapiens
ccgatcgacgggtctgcatccatggcttcaaccaactgccaagtcaaaaatattcagaaaaagaaaaattccacaaagttccaaaaaagcaaaacttgaatttactgaacaccaagcactatgttgaatccatgcaaatgaagtgatgtgtaggtattttattaggtataagtaatcatcttcagatgatttaaagtacacaggaggatgtatgtaggttatatgcaaataccatataacccattctctataatgggacttgagcacccatggattctgatatcaagttgggttcctggaaccaatcccccatggataccaagggatgactgtattgcccttttcaagaaagcatctatcagctctcattcgtgactcactcagaataaggaattccttattcaaaaaacaatgtaagtattccgagctaactgttctcagccatgaacaaattaaacttggccaggtgtggtggctcatgcctgtaatctcggcactgtggaagtcacggtgggaggactgcttaagcccaggagtttgagaccaggctgagcaa

SEQ ID NO: 45681 - DNA, 557 bp, Homo Sapiens
cgcgctgtctgcacagctgggggcctctgagcctggtgggcttcctggactcttggccgcactccttgccccctccccacgacacccatgagccgaaaggatgtcactaaggatggctgattccccaagggcacccgctctccctccctccctgctggaggaacacgtcatatcagatgagaggaagatggcctctgatggacagaatttttctcttaactcagcttttgctactttggcaaaaactagcgaggggtagcagaaacctgcaccaaggattgtccctatgtcttggcccctcctagagcgtgtgcagactgatgattttatatgtaaatcaagactcacatccctttcctagtcccccacatccaaagcccctcagcctgccttgcagaccaatgggctccatgttctgtagccccctcccctacgcctcacccctcctccctctcacaggttctgggcggccagtgagagaaacgcagtgggggaggcagggagtctggtgcctgcagagattctctgcttttttcctggggggaggtggggaggtc

SEQ ID NO: 45682 - DNA, 881 bp, Homo Sapiens
gaactttgcctggggctcattctttggttaagctgaagctgccgtgggtggccaaaccgcagattctttgcaaattctgagctggcagagctcgcagccgggagccggccggggaagaggagacttgcgcgccgcaagccgcctgcctccaccctgctctccatctcccgctctagaagggctgggaagctcgcggccggggttccacctggaagctgcttgcatggctgaacccagcttaggtccctgacggggctgctggtggaattctcccccttcgaagctggggaggtttaggagggggaaggcttctgtgaagctctcaaaccactaatagagccccctccccaacagtgacggcgcagatgctcccccttttcttagttgacaccaccaggcagcttcctggccgttggtaggttcctgcagctggctgagggaacagggaccggcaggggactttgttaggggagggttgggatgggcagtgggcccctgaaagttaatatattggaacctagctcgagtgtcgttctttccaattccgaaagtagaaagagtaaaaataggggtgattggggtggggttagtagaatgcctctctcagggcgctcccccctcccccaccgttttagagagctaggcctcagccagtcttgccactcccatctcagtgcttcctgaagaggctgttttgagtgttgatgaaaagcaatgcaattatgccaaacagtattgagcagaataatttatttctttttttttcctttgctttaaatcatgaatcccgccaagtacgggggcctcacaccttgtcctcccagcaactttgggagggccagggcgggcgggattactttaaaacttaaagggcagggagt

SEQ ID NO: 45683 - DNA, 895 bp, Homo Sapiens
  misc_feature (656)..(656): n is a, c, g, or t
  misc_feature (737)..(737): n is a, c, g, or t
  misc_feature (830)..(830): n is a, c, g, or t
tctttccatgaagtctcagtttacccaaagaaggagcttcccttctttattctctttactgctggattatgttccttcacagccatgctggccctcctgacacatcagttcccggaacttatgggggtcttcgcaaaagctatgattgacattttctgctcggcagagttcagggactggaattgcaagagtattttcatgcgtgttgaagatgaactggaaatccctccggcacctcaatctcaacatttccaaaactgaactcatcacccctcttcccccaccaccaaaactgctcctcctcctgtattcctgacctccgccatccaccccgttgctcaagccggaaactcggcagcccttccaaactcttccctctctcactccccacatcccatcgtctcggccttcacaatctgtcagttctaacctcctaagcaactaggccttcagtaaatgtgattcacctcttctttccctccttttcccaaagcatccctcttagtctaggtccttgttgtttcttgcctgaactcctgccatagtcttaactggtctccttgcttcctgtcttatcctccaccgtctttcttttatactgacacaagaatggtctttctgaattgcacatgtgagcatgtcacttccctgcttanatttctccagtggattcccagggacttcaggatcaagtcctagttgttcagcatggcatccaagactctttatgatctggnccttgcttacctctcagccttagctctcccaactcttgcacagtcactgctctccagccatagtggatcactcaccattcccagatgtaccangctctcgcacacctctgcacctttggcacgtgctggtttgcttgtgccgtggaatgccccttcat

SEQ ID NO: 45684 - DNA, 619 bp, Homo Sapiens
  misc_feature (480)..(480): n is a, c, g, or t
ctgcccccgcccccttctcagagcctcctagacaataggccctttggaccgagtttctcagggatgcccaggccacccctcagctcttcttagcgctggtctccagtcctgccctgggagctggagcctgggtatttggggacatcttgcctcagttgtatggttctttcctgtgggctcaattttgccctacatagttggataaaactctgtgctgtcctggagagtaaagctgttcacccacacagctgggcccggcttgtgccccgtggagcctggcacattccaggctcctaggaggaggcatcagagaaagacaccctgagttttactggcctgacacccttctccagagaagacctgtgaacctgagcccaagggcaagtgtacacttgtttactgtgtaagcaagagtagaagaatgtctaatgtacagtggaaccttgtacagaataaataatagctttgagaaatcaaaanataaataaataaaaaatatttttataatattttttattaattaatttaattatattattaaaaaaaaaacctcgagggggggcccggccccaaattgggcctattggagagtggttttaacaattactggccgtcgttt

SEQ ID NO: 45685 - DNA, 558 bp, Homo Sapiens
tgacgtcaggacccgagcctccagcctgagcctagctcagcagcccaaggacgatggtgaggggaggtggggccaggccccctgccccgctccaatcggtaccatcccctccctggttcccagtctggccggggtccccggcccccctgtgccctgttccccacctacctcagctgggtcaggcacagggaggggagggatcagccaaattgggcggccacccccgcctccaccactttccaccatcagctgccaaactggtccctctgtctccctggggccttgggttctgtttgggggtcatgaccttcctagtttcctgacgcagggaatacaggggagagggttgtccttccccccagcaaatgcaataatgccctcacccctcctgagaggagccccctccctgtggagcctgttacctccgcatttgacacgagtctgctgtgaaccccgcaacctcctccccacctcccatctctccttccaggcccatccctggcccagagcaggagggagggagggacgatggcggtgggtttttgtatctgaatttgc

SEQ ID NO: 45686 - DNA, 939 bp, Homo Sapiens
  misc_feature (17)..(17): n is a, c, g, or t
  misc_feature (27)..(27): n is a, c, g, or t
  misc_feature (744)..(744): n is a, c, g, or t
  misc_feature (788)..(788): n is a, c, g, or t
  misc_feature (816)..(816): n is a, c, g, or t
  misc_feature (854)..(854): n is a, c, g, or t
ttttttatccaatgtgnaaatccctgnacttgcgatcaagctcattacagctgtgggcataactgtagtgatggtcctaaatagcatgagtgtcagctggagcgcccggatccagattttcttaaccttttgcaagctcacagcaattctgataattatagtccctggagttatgcagctaattaaaggtcaaacgcagaactttaaagacgcgttttcaggaagagattcaagtattacgcggttgccactggctttttattatggaatgtatgcatatgctggctggttttacctcaactttgttactgaagaagtagaaaaccctgaaaaaaccattccccttgcaatatgtatatccatggccattgtcaccattggctatgtgctgacaaatgtggcctactttacgaccattaatgctgaggagctgctgctttcaaatgcagtggcagtgaccttttctgagcggctactgggaaatttctcattagcagttccaatctttgttgccctctcctgctttggctccatgaacggtggtgtgtttgctgtctccaggttattctatgttgcgtctcgagagggtcaccttccagaaatcctctccatgattcatgtccgcaagcacactcctctaccagctgttattgttttgcaccctttgacaatgataatgctcttctctggagacctcgacagtcttttgaatttcctcagttttgccaggtggctttttattgngctggcagttgctgggctgatttatcttcgatacaaatgcccantatgcatcgtcctttcaagtgccactgntcatcccagctttggttccttcacatgcctctcatggntgcccttttcctttattcggacccattagtacagggattggcttcggcacacctctgactgaagccctgcgtattatctcttaat

SEQ ID NO: 45687 - DNA, 651 bp, Homo Sapiens
aaaaaaaatctcattaaatagacctgagtaaacttcaaattttgatgatctggccatgtcggagctgaagcttaccagctctctaaagcatttgctagggaatcatgcagatggtccaaaatattttttagaaaagcattcatctgtcccgggatagaagtagaggaagctggtaggcaggcgctagaccctaaagaaggactgctgagccagttcttaagcctgtggtcctgtcggtgaggaaagtgagagcagtccagagcaggtgaaaagagcagagctcattcctccagtggctcttttgcctaaagcagcattcctcaaacttctcactcgaagcattaagttacggtgagatgctaacacacgctttagacttaagtcaaaatttactgtgaagccacagcaaaccatggcttcacagatgaattagttgctacacaaataagttcgatacataagtacagtaattgcttttaaaccttataataagcagtaaattagaagttaaaccatgtttttcttttacgaactgaaagaagagaatgcttttgatactgagaatcgcacactgtgtccaggaagattgttcttgcataaccagacccacaataaatatctacaacttttcttacatgtttataaaataaa

SEQ ID NO: 45688 - DNA, 934 bp, Homo Sapiens
aggagcgaggcctgggtggcgttctcggacgagggacgcgtccgcaccctgcggccagagcggctttgagctcggctgcgtccgcgctaggcgctttttcccagaagcaatccaggcgcgcccgctggttcttgagcgccaggaaaagcccggagctaacgaccggccgctcggccactgcacggggccccaagccgcagaaggacgacgggagggtaatgaagctgagcccaggtctcctaggaaggagagagtgcgccggagcagcgtgggaaagaagggaagagtgtcgttaagtttacggccaacggtggattatccgggccgctgcgcgtctgggggctgcggaatgcgcgaggagaacaagggcatgcccagtgggggcggcagcgatgagggtctggccagcgccgcggcgcggggactagtggagaaggtgcgacagctcctggaagccggcgcggatcccaacggagtcaaccgtttcgggaggcgcgcgatccaggtcatgatgatgggcagcgcccgcgtggcggagctgctgctgctccacggcgcggagcccaactgcgcagaccctgccactctcacccgaccggtgcatgatgctgcccgggagggcttcctggacacgctggtggtgctgcaccgggccggggcgcggctggacgtgcgcgatgcctggggtcgtctgcccgtggacttggccgaggagcggggccaccgcgacgttgcagggtacctgcgcaccagccacgggggactgacgccaggttcccccgccgcccacaacgactttattttcttacccaatttccacccccacccacttaattcgatgaaggctgccaacgggggagcggcggaaagccctgtaagcctgccagcctgtcctgagactcccgggaaagaggagcccgaccggggaataacc

SEQ ID NO: 45689 - DNA, 901 bp, Homo Sapiens
  misc_feature (493)..(493): n is a, c, g, or t
  misc_feature (622)..(622): n is a, c, g, or t
  misc_feature (634)..(634): n is a, c, g, or t
  misc_feature (789)..(789): n is a, c, g, or t
  misc_feature (853)..(853): n is a, c, g, or t
gtgatggctccttctccctgcccctgaagccgtcatctcccagcccatccatgacagcaaatctccgggggcatcaaacctgaagatttctcgaatggacaagacagcaggctctgtgcggggtggagatgaagtttatctgctttgtgacaaggtgcagaaagatgacattgaggttcggttctatgaggatgatgagaatggatggcaggcctttggggacttctctcccacagatgtgcataaacagtatgccattgtgttccggacacccccctatcacaagatgaagattgagcggcctgtaacagtgtttctgcaactgaaacgcaagcgaggaggggacgtgtctgattccaaacagttcacctattaccctctggtggaagacaaggaagaggtgcagcggaagcggaggaaggccttgcccaccttctcccagcccttcgggggtggctcccacatgggtggaggctctgggggtgcagccggnggctacggaggagctggaggagccctgcctgtatccacaggtggcagcctcggtttcttcccctccttcctggcctacagcccctaccagtccggcgcgggccccatggggctgctccccgggagcggnggcggggcgcanatggccgccacggtgcccagcagggacttccgggaggaaagccgcgagcccggcggcccccttcaggaccccccagtgcgagcccgcagcccccggagatgctgcagcgagcctcgaaagtacaaacgcgccccttgtttcggcctggcgccaangcaaggccccggacccttactcgattacggggttaccccgggacaccgcgcccgcctttttggngggacaaagccacccttttgtacgggccaggacgagaacagggaacac

SEQ ID NO: 45690 - DNA, 498 bp, Homo Sapiens
aaagaaaattgcaaaagttcctctaaagttaaatcaaaggtggtttgtctagcagagagccagaatcttctaatagtgggcagagcccagagacaaggggaagaaagatgaccttctccccagtccttcccagcaccatttttgtttcacaccaggcttgtggcattttggtgctcacaggggttttgccttctgacctctccttggagtaggccattctcatgcagggctcaccctgaggcaggaggaccaagggctccctgcgtccacggaccacgtatgccttggtggtcactcccatcggggctatcagttctgcactgtgccctggtgcggattttaatgcatatttttatatataaatgttcccaaaggccaaatttgttgccaggttttatacgcaggtcaccataatttgtattatgttccctgagtcaatgaaggttttctttagacttcttaattaaaaagagaagaaagaaaaaaaaaaaaaaaaag

SEQ ID NO: 45691 - DNA, 810 bp, Homo Sapiens
tgatgacatttgaaaaaaattttagatattaattcacaagtgcaacaggcacttcttagtgacaccagcaacccagcatatagagaagatattgaagcctctaaagatcacctaaaacgaagccttgctctagcagcagcagcagaacataaattaaaaacaatgtataagtcccagttattgccagtaggacgaacaagtaataaaattgatgacatcgaaactgttattaacatgctgtgtaattctagatctaaatctatgaatatttagatattaaatgtgttccaccagagatgagagaaaaagctgtacagtattcaatacattaaaaaatatgtgtagatcaaggagagtcacagccttattaaaagtttattaaacaataatataaaaattttaaacctacttgatattccataacaaagctgatttaagcaaactgcattttttcacaggagaaataatcatattcgtaatttcaaaagttgtataaaaatattttctattgtagttcaaatgtgccaacatctttatgtgtcatgtgttatgaacaattttcatatgcactaaaaagctaattttacaaatcacaaattgtgcttcagggacagaagaaataaagaaaagacacataaagaattaaacttaagcatactgatagaagaagcaagattaaagacattaagaaaaacatgtgaaggacggcaagtggataaaaaaacatatacaggggggggtcggtcgacgaataagaatgattgaaaacaagagagtgtgaggggacgcaggaacaattataggatagtg

SEQ ID NO: 45692 - DNA, 633 bp, Homo Sapiens
caggcagcgaagttcgatccatcaaccaaaatctatgaaatcagcaaccgttggaagctggcccaggtacaagtacaaaaagactctaaagaagctgtcaagaagaaggcagctgagcaaacagctgcccgggaacaggcaaaggaggcgtgcaaagctgcagcagaacaggccatctccgtccgacagcaggtcgtgctagaaaatgctgcaaagaagagagagcgagcaacaagcgacccaaggaccacagaacagaaacaagagaagaaacgactcaaaatttccaagaagccaaaggacccagagccaccagaaaaagagtttacgccttacgactacagccagtcagacttcaaggcttttgctggaaacagcaaatccaaagtttcttctcagtttgatccaaataaacagaccccgtctggcaagaaatgcattgcagccaaaaaaattaaacagtcggtgggaaacaaaagcatgtcctttccaactggaaagtcagacagaggcttcaggtacaactggccacagagatagtcctggaagacacgtggcgcctgtggaccggaagcaccaaatgctggtgctgcttttgtacatacatatttttaaaccattaaaattcttcct

SEQ ID NO: 45693 - DNA, 919 bp, Homo Sapiens
acatttttgaatgtatggacactggacatgagatatgtacaatgaaatcttaaaagaatctaagaatttgccctctttgccccactccacccagtaatttgacattactagtgccatgtataggacccaactgagtattagaatcagttttgactatgtctttgtatttcctaaatcttttaatgcataaaccgaattagggtccagttggcctgttaatggtaaatttacattttaaatgactcagtttgtttttcctgggcgagtttgcaatgtgataatcagattttttaaaactgattaatttgctttcttgtgtgggtgtactcacattttaaagtatgaaccacagttaactagtggtctcaggggtagtgaaacactcacttttttttggttggtttttattggttggttgaaatggcttagttgaagtatacttaaggtactgatcatgctgtgttagtaattggggcggggaggggggtaactcagccatgtttggtgttggcataacaaaactgttaatgatggtggattacacttttaagtgaattggtcttttatgaggaacccagtgcaagtcactaaatatggtctaatagtgacatctgcataagacttgtaatagctgaagttaattgagcttaaggaattgttaccattaaagtcgggcttaaagacagaaaaacaaaaaaacaaaaagacaaaacacaaaaacacaaaacaaaagagggaagcagaaaaaaactcccgcggggggggcccaaaattaaaccggcacacgatgtgatgcgaaaaagggggccccacacagaaggacgaacaaaaagagacagcacggggccgcagtaaaaacgcacagatgaggaaaacagcacaacgagcacctgtgagaacaccaagacgcggggggaaa

SEQ ID NO: 45694 - DNA, 2618 bp, Homo Sapiens
gccagcaggctgagggtaggaagtagccgctccgagtggaggcgactgggggctgaagagcgcgccgccctctcgtcccactttccaggtgtgtgatcctgtaaaattaaatcttccaagatgatctggtatatattaattataggaattctgcttccccagtctttggctcatccaggcttttttacttcaattgatgggcagagaagttagatcggctaactagtacagcgacaaaagatccagaaggatttgttgggcatccagtaaatgcattcaaattaatgaaacgtctgaatactgagtggagtgagttggagaatctggtccttaaggatatgtcagatggctttatctctaacctaaccattcagagacagtactttcctaatgatgaagatcaggttggggcagccaaagctctgttacgtctccaggatacctacaatttggatacagataccatctcaaagggtaatcttccaggagtgaaacacaaatcttttctaacggctgaggactgctttgagttgggcaaagtggcctatacagaagcagattattaccatacggaactgtggatggaacaagccctaaggcaactggatgaaggcgagatttctaccatagataaagtctctgttctagattatttgagctatgcggtatatcagcagggagacctggataaggcacttttgctcacaaagaagcttcttgaactagatcctgaacatcagagagctaatggtaacttaaaatattttgagtatataatggctaaagaaaaagatgtcaataagtctgcttcagatgaccaatctgatcagaaaactacaccaaagaaaaaaggggttgctgtggattacctgccagagagacagaagtacgaaatgctgtgccgtggggagggtatcaaaatgacccctcggagacagaaaaaactcttttgccgctaccatgatggaaaccgtaatcctaaatttattctggctccagctaaacaggaggatgaatgggacaagcctcgtattattcgcttccatgatattatttctgatgcagaaattgaaatcgtcaaagacctagcaaaaccaaggctgaggcgagccaccatttcaaacccaataacaggagacttggagacggtacattacagaattagcaaaagtgcctggctctctggctatgaaaatcctgtggtgtctcgaattaatatgagaatacaagatctaacaggactagatgtttccacagcagaggaattacaggtagcaaattatggagttggaggacagtatgaaccccattttgactttgcacggaaagatgagccagatgctttcaaagagctggggacaggaaatagaattgctacatggctgttttatatgagtgatgtgtctgcaggaggagccactgtttttcctgaagttggagctagtgtttggcccaaaaaaggaactgctgttttctggtataatctgtttgccagtggagaaggagattatagtacacggcatgcagcctgtccagtgctagttggcaacaaatgggtatccaataaatggctccatgaacgtggacaagaatttcgaagaccttgtacgttgtcagaattggaatgacaaacaggcttccctttttctcctattgttgtactcttatgtgtctgatatacacatttcctagtcttaactttcaggagtttacaattgactaacactccatgattgattcagtcatgaacctcatcccatgtttcatctgtggacaattgcttactttgtgggttcttttaaaagtaacacgaaatcatcatattgcataaaaccttaaagttctgttggtatcacagaagacaaggcagagtttaaagtgaggaattttatatttaaagaactttttggttggataaaaacataatttgagcatccagttttagtatttcactacatctcagttggtgggtgttaagctagaatgggctgtgtgataggaaacaaatgccttacagatgtgcctaggtgttctgtttacctagtgtcttactctgttttctggatctgaagactagtaataaactaggacactaactgggttccatgtgattgccctttcatatgatcttctaagttgatttttttcctcccaagtcttttttaaagaaagtatactgtattttaccaaccccctctcttttcttttagctcctctgtggtgaattaaacgtacttgagttaaaatatttcgattttttttttttttttaatggaaagtcctgcataacaacactgggccttcttaactaaaatgctcaccacttagcctgtttttttatcccttttttaaaatgacagatgattttgttcaggaattttgctgtttttcttagtgctaataccttgcctcttattcctgctacagcagggtggtaatattggcattctgattaaatactgtgccttaggagactggaagtttaaaaatgtacaagtcctttcagtgatgagggaattgattttttttaaaagtctttttcttagaaagccaaaatgtttgtttttttaagattctgaaatgtgttgtgacaacaatgacctatttatgatcttaat

SEQ ID NO: 45695 - DNA, 615 bp, Homo Sapiens
acttccccaaagaagcagccctcgggtccatgtgttgttcagacatgtgaagagaagcaagacagagggtctcagatggacgagggctctccaagggaatgcctggggattcacccagtggtccccagaggtgctccatggaggcaacaagtcattccatgaagccccagaggtagaagggacctcaagcaccacgccctccagggcagccgtgcagacgaccttggttcacttttcaggggtcgtcccaactctgtatctccagccactccaactgtggaggctgtaaatccagattttcactgttccagtctcctttgcagcttaggatggctatgtgatcaggtgtggccaatgaaattgaagaggaagtctacctgggcttctgggaaagcttttccaataaaagacacaggcatggctaacacctccctgggcctcttcttcctaccttgattgagggtgtgatgcctggagccacagcagccactttgctaccatgacaaaaaggccaagagaatcacagagtcattgaccctatcattatttcaccaagccaataccagccgccatccttctccagaattcttgtaaataaaataaatccctctttgt

SEQ ID NO: 45696 - DNA, 729 bp, Homo Sapiens
  misc_feature (16)..(16): n is a, c, g, or t
cctatagacacagggncattgggcaggagctagaacagccctccctagagcactacataaagcagccaatattttgcaaagcatagggaagagtgaaagtcatccggggcatttgcagacacagcactaagaacttggtgacaacagccctgaagcaaaacagcagcatgtactgggcagggcttgggagataagacaggacatctgaagctaaacatggatcccctctgaaagctacaatcaaagtgtcatccacaaaatcttatctcaagccttgactagagaaggacccacttccaagaccacagagttgaatgaattcagtccttgcagcccgttgaactgagggcctccccaacatgctcacctgcttcatcaaagcctgcgagagagagagtccactagcaagaggacattgcagtcttatctaatgcaatcactgaagtgacatcctgtcaccttggtcaccttttctattctattcattataaatgagtcccaagtcctgccacactcaagtggaggggattacacagggctggagtaccagcggtggggataatttggggtcatcttagagttcttccatcacacgggaattctcagctcaccaaatctgggattccgcatctggccattccttaagctgaaggcctggcatatttttgagtgtccatttggatcagctaataaacccagggtttgtctactggctggaggagtaagaac

SEQ ID NO: 45697 - DNA, 779 bp, Homo Sapiens
  misc_feature (731)..(731): n is a, c, g, or t
gtcggcttatgtcgctgcctgtgaggcacattacagcaccaagaacccccgggcaatttattaaaatgttgttggttctgtaagagcaactgctctgtctagtttggcgctctgggttccaggtgaataactaacaaggtggtgggtctttacccacagcgcaaacacagtgcccaccttggggctctgttgtttgagttgcccacatactgcagttattctgttaggaatgattccctgggtgcctgaaagtgctctgacacgacacttgttactttgcaggccatctgtgatggcaaggaaaaagcaactatgttcacagtgaaatattcgtggaataggttaggccatttcagtagacattgcagttagttagcaagaaccacattgtctctttatttgttagcattaaacaaatttttttttgcaaattggttttatttttttgatgaagccgagcaactctgtccaaaaaggtttagtttgtactcggaaaccacaaagtagtctcaaagtattttagagggaatcgatattgatggcaaaagaaaatttgcagctatgcatttgcttctaacggttccctctctgtgaaacattattttggtgatctaaagaaagcattgcctttcttatttgagattttacagctatactttgttgtgtaatgttatggttccctttctgtaaaatgtcattttaggggtgatctaaattaaacgccttgatcntggatctgaaccagaaaaaaacacagaaaacacataacacaaaaacag

SEQ ID NO: 45698 - DNA, 482 bp, Homo Sapiens
  misc_feature (6)..(6): n is a, c, g, or t
  misc_feature (9)..(9): n is a, c, g, or t
  misc_feature (59)..(59): n is a, c, g, or t
  misc_feature (135)..(135): n is a, c, g, or t
  misc_feature (247)..(247): n is a, c, g, or t
  misc_feature (337)..(337): n is a, c, g, or t
  misc_feature (372)..(373): n is a, c, g, or t
  misc_feature (463)..(464): n is a, c, g, or t
  misc_feature (466)..(466): n is a, c, g, or t
ttcggnacnaggtcctgtgtggtcattttggggcagttgattattttgcagaaagcagnttccttaccttcttgatttacaactgatggatttgtcataaaatgattttcaaacactgttatatcagagcatcantatgtgttcagaagcatgtcctactttggccctatatggcaaaactgatgactgaaatgtaatttctgaagcatctatgttagggcctaattgaagacagtctaatatatanattgtcaacaagaattagggggaaaagaatttctcagttgttttactttaccatgctcattacctgtgaataatccctgacatgcattgngtgctctgagtacccaatctggaagatggccttanncaaaagtgagctaattccctatatttcatttgctaaatgtttgtaactttaaggtactggatgaaagtttatggaaaacagaaatacagnncntcatttattaaatttc

SEQ ID NO: 45699 - DNA, 860 bp, Homo Sapiens
ccacgcccccccagagatccttgatgcggtggaggaaaacggggagacctgtttgcaccaagcagcggccctgggccagcgcaccatctgccactacatcgtggaggccggggcctcgctcatgaagacagaccagcagggcgacactccccggcagcgggctgagaaggctcaggacaccgagctggccgcctacctggagaaccggcagcactaccagatgatccagcgggaggaccaggagacggctgtgtagcgggccgcccacgggcagcaggagggacaatgcggccaggggacgagcgccttccttgcccacctcactgccacattccagtgggacggccacggggggacctaggccccagggaaagagccccatgccgccccctaaggagccgcccagacctagggctggactcaggagctgggggggcctcacctgttcccctgaggaccccgccggacccggaggctcacagggaacaagacacggctgggttggatatgcctttgccggggttctggggcagggcgctccctggccgcagcagatgccctcccaggagtggaggggctggagagggggaggccttcgggaagaggcttcctgggccccctggtcttcggccgggtccccagcccccgctcctgccccaccccacctcctccgggcttcctcccggaaactcagcgcctgctgcacttgcctgccctgccttgcttggcacccgctccggcgaccctccccgctcccctgtyatttcatcgcggactgtgcggcctgggggtggggggcgggactctcacggtgacatgtttacagctgggtgtgactcagttaagtggatttttttttc

SEQ ID NO: 45700 - DNA, 605 bp, Homo Sapiens
gggaattatgctagaaggtcgtgggccctaaagaaagggagagaaagagaagctatatagagaaaaggaaaccactgaatcaaagagagagctcctttgatttcaaagggatgtcctcagtgtctgacatctttcactacaagtatttctaacagttgcaaggacacatacacaaacaaatgtttgactggatatgacattttaacattactataagcttgttattttttaagtttagcattgttaacatttaaatgactgaaaggatgtatatatatcgaaatgtcaaattaattttataaaagcagttgttagtaatatcacaacagtgtttttaaaggttaggctttaaaataaagcatgttatacagaagcgattaggatttttcgcttgcgagcaagggagtgtatatactaaatgccacactgtatgtttctaacatattattattattataaaaaatgtgtgaatatcagttttagaatagtttctctggtggatgcaatgatgtttctgaaactgctatgtacaacctaccctgtgtataacatttcgtacaatattattgttttacttttcagcaaatatgaaacaaatgtgtttt

SEQ ID NO: 45701 - DNA, 500 bp, Homo Sapiens
tgtatcgattcagagagaggaaaactgcattcccatagacagggagacttggtgcattaatatccaaagcttagtttaagctggtgatgattagaaaagtggctttcatttgtgttctctggaagattctcagtagtcctgtgggcatgtgaacaagagcatgtgtaatcttcataatgtatgtcttgttagcagaaatgtctgaggcattgctgagatgtaggatgagctgaggtactggttttgtctttcatggttccctattatgttttttgagaaactgagcttttcctgacagtgtttagtttttcttggctatttactaatgctattaatagtaacagtttccattatggagcctcagtaggttcttgacatacattaacccattgctattatgtaattttctaataaaatgatgtgataaaacatattttctgtaatataccccatagaatatgtgattataagtaaataaatagatgtggggtagtcctcca

SEQ ID NO: 45702 - DNA, 803 bp, Homo Sapiens
gggaccatttacataaaacacagagcttagacactcttcccctcctatgaaataattggttgttggcaccatctcaccaccgcatatccctcaccccctcggcaagcaccaatccttggtgctgccgtttttaaaatcttccaaatgcctttttttcctcagaggcagagaatgactaagtacggggagcagactcctgttgtgcagactcctgtccccttggtttctgtgtttgtctctctgccatcttaggttgccatgagccatggtgtcaacatgcttagccccctctgtaactgcctccctttagttcaatggacagacctcccaaggcaaaaactaccttctgacttgggttgaggctgggttcccctctattgttcccctatcataagagctaggccaagcctatgggaccttgagtcatgcaggatgggatctgtggtcaaaggacaggcgaggagctgtgggcgcagggcctgccgccactgcctacatcttctctcttccccatcttgcattggaggtcccagaaaacaattagcttctggcaaagggggtacccacttctttccctgttgactttgctgtttcccaggctcctttttgtgtttttataactgtcaccagttagccactgtttaaattgtatatattgttctgaggcgcctggcctgtcccttcagtgagccatgcccacccttgtgttgtagtgagaagctgttgtcacgactaaccttctgtctctgaaattgtttgtttcaaataaagagttaaaattgtcaaaaaaaaaaaaaaagggc

SEQ ID NO: 45703 - DNA, 639 bp, Homo Sapiens
aactacttttactgaaggataccaacttctacgaacctatatattctttcttacaatagtggttgacagttggctcgcaatatgggtcgacgttttgtctaaagtcttgctcttttatctacagggagtagattctgctatcttggcctcacagcccttcctgttgattacaaagcccgtggaagaaaacagaacacaccctcctcagttccgtctaaatgtgtttcttctgcttcaattacaccagttctggggcaaagacactgatgaaacaacacccatacctgaaaagaataaatgtgtgactttcaaatcccctttcgcagtgaaagaaacagcaaacacttaagattcagcatctgttctccagttgcactgaggaatgcactgtctcgcagcaccagctctgcagagcccttgccccagactctttgcggttttatttatatgtatttccatatttcattcctgtgtgtcactgctgcattggtgtggcagcaagtgaccgaatgctacaggtcttactatggacaccaggtcaggtgcaaccacacaaaacaaagccagttccatgagctggctatgatatgcattggggaagtcaattttacccagggtgtgccattgcagtgatgagac

SEQ ID NO: 45704 - DNA, 910 bp, Homo Sapiens
  misc_feature (877)..(877): n is a, c, g, or t
  misc_feature (892)..(893): n is a, c, g, or t
  misc_feature (902)..(902): n is a, c, g, or t
aagagccatcgtatactgtaactttaatacgttgtataaaattgacccttctactttgcagatgtgggcaaacattctgaagcgtgttcccaatagtgtactctggctgttgcgttttccagcagtaggagaacctaatattcaacagtatgcacaaaacatgggcctgccccagaaccgtatcattttttcacctgttgctcctaaagaggaacacgtcaggagaggccagctggctgatgtctgcttggacactccactctgtaatgggcacaccacagggatggatgtcctctgggcagggacccccatggtgactatgccaggagagactcttgcttctcgagttgcagcatcccagctcacttgcttaggttgtcttgagcttattgctaaaaacagacaagaatatgaagacatagctgtgaagctgggaactgatctagaatacctgaagaaagttcgtggcaaagtctggaagcaaagaatatctagccctctgttcaacaccaaacaatacacaatggaactagagcggctctatctacagatgtgggagcattatgcagctggcaacaaacctgaccacatgattaagcctgttgaagtcactgagtcagcataaataaagactgcacaggagaattacccctatacctgagcctcaaccttctgggggaaagggaactagataacatacttcttacttgtctgtacagtaccttgttgcagatgggtgatatataatggtaatagaatagcacagccagacttgcttcctgcatggtagggagagacacaaaagatgggaaactgcttttccacaagaatctccgtagaatttgcggcgaccagatggtgcataggtctgggaggnctgatctcccttggnncttcatggnatgggtag

SEQ ID NO: 45705 - DNA, 620 bp, Homo Sapiens
gcagatggccttttcttccaccgtttgattcatttaacatttctgagcagcaaagctgcagtcctaggccccagggcaggagtgagatggtgacaatctgtgggtcaccccagaagcccttggatgtggactgctcctccctcacctcacacgaggcctgtctgtctgcctgccagtctgggagagctaacgtagaaatgggttgttgggtttgtttttaaactaactgtttgccttccagaaaatattttcagaacctggaagcttatccatggccaccgtcgccaagctccgcgagagctgcagggcccggctgctggcacaggggtgagcgtgcctgtcccctgcgttgctcgtctctacactgacgatgcccctttccagagttgacactggaccaactttcactgctttcctttttagtgttgtaaatacttgacatcactacactttagttgtgaattttttaaaagagcagtttaaaatcaggtcattctaccagcttttgatgattagctatgaagtcatactttttaaaaaaaacttatttttacctgagagatcaataatatataaaatgtgagtgtgggtttgtatctaataaagtatgccaacacctg

SEQ ID NO: 45706 - DNA, 807 bp, Homo Sapiens
tggagttggtgttctagtctggagaagaaggccccgagagcaaaatggagccatctaccttccacaccagatcgatgattgcagatccctcttttcagttctccttcctctaggagccatgttatcctctgtcccccatagagtcaagcctagtgcttgaaggtcctgacgacacccacaacatacatgagagtaatgggattgagcatttatggcagcaacagaggagccacaaaatgttctttgttctttggctccaaaaagactgtcagctttcagtctcttttgatggactgttttatcagagttgactttaaatacagcttgtctcatgacacaacgcttccctacattctatttgtcaatgatgatttgcaactagttggagattctcagagcaggaaggaatcttttcaaccagagcaggaactgtcttctgcaatgccttggacttgagccttcagccttcacttgaacaccatgtgaagggaaccttagtactttataaaatggcctttctcattcatctttcatgggaacattcattgtacaagcgctttgaatatcatgggcaccatgactgtgaccctacaggtaggattggatcacttcatgagagtagtcggtaggttcttacatggccctggtaatggactgattattttgatccatctttctggcctgagagaaagccaagtcccctgcttgttacagtacccctgtcttggagcttgtgaatcttgttaaatctgcccgcttggcatctatttaggtgagttctcaatccttttcgagttctgttcggaa

SEQ ID NO: 45707 - DNA, 920 bp, Homo Sapiens
  misc_feature (861)..(861): n is a, c, g, or t
cacgaggcctgatcttcataaagacaccctctcctggctggctgtagataatgtggctcacaccatcaagcaggcatgggaggccaatcagcatgagttgctgtatcaaaagaattggctggaagaagaatgtattgcctggctaaagagattcctggagtatgggaaagacaccctacaaagaacagagcccccactggtcagagtaaatcgcaaagaaacttttccaggggttacagctctcttctgcaaagctcatggcttttaccccccagaaatttacatgacatggatgaaaaacggggaagaaattgtccaagaaattgattatggagacattcttcccagtggggatggaacctatcaggcgtgggcatcaattgagcttgatcctcagagcagcaacctttactcctgtcatgtggagcactgcggtgtccacatggttcttcaggtcccccaggaatcagaaactatccctcttgtgatgaaagctgtctctgggtccattgtccttgtcattgtgctggctggagttggtgttctagtctggagaagaaggccccgagagcaaaatggagccatctaccttccaacaccagatcgatgattgcagatccctcttttccagttctccttcctctaggagccatgttatcctctgtcccccatagagtcaagcctagtgcttgaaggtcctgacgacacccacaacatacatgagagtaatgggattgagcatttatggcagcaacagaggagccacaaaatgttctttgtttctttggctccaaaaagactgtcagctttcagtctctttttgatggactggttttatcagaagttgactttaaaatacangcttgtctcatgaacacaacgcttcccctaacattctattttgtccaatgaatgaattt

SEQ ID NO: 45708 - DNA, 504 bp, Homo Sapiens
gatcgggcctgtcagagtggctgggaaacaagctgaccccactgcagagtgtgccagctccagccattgccatcatcctctccctcctggtggccaccttcaccgagtgcactagcaacgtggccaccactacgatcttcctgcccatcctagcctccatggcccaggccatctgcctccaccctctctacgtcatgctcccctgcactctggccacctccctggccttcatgttgcctgtggccaccccgcccaatgccatcgtcttctctttcggggacctcaaagtgttggatatggcccgggcaggattcctcctcaacatcattggagtcctgatcatcgcactggccatcaacagctggggcatccccctcttcagcctgcactctttcccctcctgggcacagtccaacaccacagcccagtgcctgccaagcctggccaacaccaccacaccaagcccctaggctggggcacagcctggccatgcccaggaagacc

SEQ ID NO: 45709 - DNA, 571 bp, Homo Sapiens
ttggcaggaaaattagctcattagaacatgacaccattaagggacattataagggtcctggggctgaggtgggaagatttttctatctgccccatatagtttacccttccttgccttgaaaatgaatattatagaacagagtacagctcttaaaagttattagtatcattattattatagttgttatataatactttaattaagaaagatgaaaaccttttttctttcctaagtcagcccaatggtgctattttacatatcaacacagttgaaaggaagtactgttattttgggctgcagtgtttcctccacatctaaagaaagcccattttgaaactggatactgcattaaaacaaagaaggaaaaattattttaactgtgtgcagtttttgaaattaggcatttgtactattttggttttacataattctcttgcattaacaatttactgttttgtgaatcatgtgtactaaagcaaattaagaaaaagaaaataattatctgtgaaagactttgtatattaaacaagtgacgcaaaccttagtaaataaaaaaaataaaaaaaaggac

SEQ ID NO: 45710 - DNA, 696 bp, Homo Sapiens
  misc_feature (11)..(11): n is a, c, g, or t
atttgtccagnacctccctggcctgagataaacataagttgcaaaagtggcttcctgcagcccattttccaggttgggaaactgaggcatgggcctaaggtcccacagccacaccgaggaaagcagcccccactgaatgtcaccatgcaccaaagtgcatggtcctcgtgacacaaagaggggagatgacagtggctggagttgtcagagctgctttgaggaagctccaggcctgataggcttgacagggccaaggggaactattgtggaatgtcttggccttgaatgacaggctgctgattttggatctggagaaagctcacactgactcttcctgctcccccagtctgtttttctcctgctactccatccatgtatccctgagtttgggccacagtccctccacttggtttgcatgtcccaccttctttgtttggcaagctcctattcatccttcaaagccctagcttcaatacctgctacttcatgcagccattgcttatccttcaaggagagcctacttccctcaaggaccctgctgcttccagtctcaccttctgactcactcgggatccactgaactgggaggtctgtgtctcctcccagcagagtcatcactacctttggggccgcaggatcacccagcttggaactagatacagaaatgctgttttgagagtgtactgaataaaagat

SEQ ID NO: 45711 - DNA, 597 bp, Homo Sapiens
ttgtgacccagtttctcgtcaaccagtaaaacatccagtaacacagccaatggaaataaatgaatgggtctctgtttatagtgaagattctttcgttctccagctccaggcttcatacggtaaaactctctgggaaggaaaggaactcagagtcccatgcagaaaattgttcagctggaggggtatcagaaagatggatttccaaagccaactgtttcctgtagtgtgtggatctctgcaagcagagcctcatctttcaatttcagctacatgaaagaggaagaaagggaaagatatatgtcatacgtgatatactttatgtggctttgaagacccctcttttgtggggctacggctaaagaacatagttccctgggatggaattggctcttcctatttccctacttcatgaaaactccagtagaagaccttagaaccttgtcctggttacatggatatgtttactttgtgaaaattcatcaagcactatgcacggtcatgatttgtacatttttttggtagataacttcattaaaatttactttttttatttttaaaaaaaaaaaaaacttgtgccgaattcttgggctcgagggc

SEQ ID NO: 45712 - DNA, 548 bp, Homo Sapiens
ccgatcgagctcggtaccgattacgctcctagacggctgaaagagactgtgatagcccaggaaatacacatccagtcacagaatggcaagtcacctgcccaacagaaatgcgggcataggtacggactcatttgagaacctttccctagagctgctgttgtaggtccaatttaatatttgtttgagaggtgattctcaaacatctgacccccacaccacccccagcctctgggctgtgagctccccaagccctgggatgtcttcgtttgcctccgaggcaaacctatatccttagggcctgtgtccacagtccattccatactaatgactatttgtagactaagcgatgaatgaggtgggctgttcttcctgtcttcctgtgactgccccccagtcgttctcacacatgctggaaatgcaggggcacctctgactcttcccagccctccatcctgagctggtcacaagctcatgttgactctatctccaaatccatcaatgtctctctgtttcttacaccatatctgacatagtacaagtaactttca

SEQ ID NO: 45713 - DNA, 589 bp, Homo Sapiens
gcacgagaaagaatcatgttccctgtgtacatttaagaaaaaaacaaaaaaacggaaatgtcagaattgtatggaaataaaacttgtttgaaaatttggaatagtgctgctgccagcttatttttctggtacttgtattttcacatgttaaatgatctttatatatgttgaattaacaaatattttgagtttctgagaaaaaacaaaacatattaatggtattgaaatgtgttagtagtctggctgtgtgcccaaaattctgtttcgcagcaaaagtgaagacctgtatgtaaagaaagtataacaattatttctttgtattttaggggctttaaccggaacatcgtctagctggtgttaggaatgtttgcttaatttccagacttttttttaaaaacacatcgtgggttttttgaggctccaacctgattagtgcatggtcagccctcaatgaaggctgaggcatctctgactgaggtgtttttgtttggttttgttttttaaaatcatgtatttgctacaaagtattgtacttgtctcaatgggaatggtgtaaaaaacaaaaggccttatgtgatctgtatcatag

SEQ ID NO: 45714 - DNA, 597 bp, Homo Sapiens
  misc_feature (561)..(562): n is a, c, g, or t
  misc_feature (586)..(586): n is a, c, g, or t
gcacggcacggctggggagcccggacgaggagttcttccacaaggtccggacaattcggcagactattgtcaaactggggaataaagtccaggagttggagaaacagcaggtcaccatcctggccacgccccttcccgaggagagcatgaagcaggagctgcagaacctgcgcgatgagatcaaacagctggggagggagatccgcctgcagctgaagggtgagctcctgggacctcagacagatccttccctctgatcctgccctgttgttggtatatctggggagtgtgtggcccagagaagccagtgatatatccaggtcacacagcaggcctgggtctagcatctgtctcctggcctccaggccattgtactctccacagcacaagtccgcctctcaggttcttttatttacaatgaaaccatttacttacacagttatcgctgcccactgggcattctttgggcagggagatggagttttgttaggtggcctctgcatacctatgggaactcagtgatgtaatgcaaagaaaaataaacttactttctcctcttannaaaaaaaaaaaaaaaaaaaaaaanaaaaaaaaagg

SEQ ID NO: 45715 - DNA, 688 bp, Homo Sapiens
  misc_feature (677)..(677): n is a, c, g, or t
gttttttacaagattcatttattaactatgatacagatcacataaggccttttgttttttacaccattcccattgagacaagtacaatactttgtagcaaatacatgattttaaaaaacaaaaccaaacaaaaacacctcagtcagagatgcctcagccttcattgagggctgaccatgcactaatcaggttggagcctcaaaaaacccacgatgtgtttttaaaaaaaagtctggaaattaagcaaacattcctaacaccagctagacgatgttccggttaaagcccctaaaatacaaagaaataattgttatactttctttacatacaggtcttcacttttgctgcgaaacagaattttgggcacacagccagactactaacacatttcaataccattaatatgttttgttttttctcagaaactcaaaatatttgttaattcaacatatataaagatcatttaacatgtgaaaatacaagtaccagaaaaataagctggcagcagcactattccaaattttcaaacaagttttatttccatacaattctgacatttccgtttttttgtttttttcttaaatgtacacagggaacatgattctttttatgcaaacaataacttaggcctgtagcatcgctgccggctccgccacgggagggctggggggaggccnagccaggtcag

SEQ ID NO: 45716 - DNA, 701 bp, Homo Sapiens
  misc_feature (663)..(663): n is a, c, g, or t
cccgctatggaaaagttggcccctgagccagagctccagcagccttgttagggcgtggcctgaggcttggataagtgggatgtaaaacgaagatcaggagcagatttgaagaattacaaagtgaattggtgccagtcagcatgtcagagacagaccacatagcctctacttcctctgataaaaatgttgggaaaacacctgaattaaaggaagactcatgcaacttgttttctggcaatgaaagcagcaaattagaaaatgagtccaaactattgtcattaaacactgataaaactttatgtcaacctaatgagcataataatcgaattgaagcccaggaaaattatattccagatcatggtggaggtgaggattcttgtgccaaaacagacacaggctcagaaaattctgaacaaatagctaattttcctagtggaaattttgctaaacatatttcaaaaacaaatgaaacagaacagaaagtaacacaaatattggtggaattaaggtcatctacatttccagaatcagctaatgaaaagacttattcagaaagcccctatgatacagactgcaccaagaaatttatttcaaaaataaagagcgtttcagcatcagaggatttgttggaagaaatagaatctgagctcttatctacggagnttgcagaacatcgagtaccaaatggaatgaataaggga

SEQ ID NO: 45717 - DNA, 708 bp, Homo Sapiens
aggctgtccgtcgcgcgtgcggcgcaagtggaattgggatgcattcgagtctgtaacttctgaaacctgaacaacctcaggaggcccccacctctgccctccaccagcgtcgagagaagggacagcagtgacatcggacagaagacccgggctcccgtcctcccccaggacggtccccacataggaagggcactcccagccctcttgctggtgacattgtcatggtcatcttgtttctgtttggatttttcttctgggtcttatgtttggggggaggtttattctttctgaaaatgtctagattcaggaacacatttatgaggatttggattttgaatttgtatttccctctaagtgccttttttaatgtctatttttttaataaaacagaaatgcattcttgtacaattctgttgaaactggaccaaggctctcagaagaggacccccgagttccttcccctcccccgagcctctgcatgattgtttcaagtcagcctggaattcttactttcacgccgctattcttttcctttctccgtgattgcttggctagccatttaaaaaaaaatattctctgttcagtgtatatgttgcttgtttgttttatttattgagatatttttacaagctaagtgactgcagtgtggctgtgtatcctgctccccacccaggaaaaataaagacgtccgcgccaaaaaaaaaaaaa

SEQ ID NO: 45718 - DNA, 916 bp, Homo Sapiens
cgacagctgtgcctacgactatctggaggtgcgcgacgggcacagtgagagcagcaccctcatcgggcgctactgtggctatgagaagcctgatgacatcaagagcacgtccagccgcctctggctcaagttcgtctctgacgggtccattaacaaagcgggctttgccgtcaactttttcaaagaggtggacgagtgctctcggcccaaccgcgggggctgtgagcagcggtgcctcaacaccctgggcagctacaagtgcagctgtgaccccgggtacgagctggccccagacaagcgccgctgtgaggctgcttgtggcggattcctcaccaagctcaacggctccatcaccagcccgggctggcccaaggagtacccccccaacaagaactgcatctggcagctggtggcccccacccagtaccgcatctccctgcagtttgacttctttgagacagagggcaatgatgtgtgcaagtacgacttcgtggaggtgcgcagtggactcacagctgactccaagctgcatggcaagttctgtggttctgagaagcccgaggtcatcacctcccagtacaacaacatgcgcgtggagttcaagtccgacaacaccgtgtccaaaaagggcttcaaggcccacttcttctcagacaaggacgagtgctccaaggataacggcggctgccagcaggactgcgtcaacacgttcggcagttatgagtgccaatgccgcagtggcttcgtcctccatgacaacaagcacgactgcaaagaagccggctgtgaccaccaggtgaacatccaccagtgggtaccatcaccaggccccaactggcctgacaagttatccccagcagaaggaagtgcccgtgggggcatctccagcaaccccgggcaccggggtcaagctgac

SEQ ID NO: 45719 - DNA, 685 bp, Homo Sapiens
tccagcatctatacgtaatttaaacaaatttagaagaaaaaaccaccccattaaaaagtgggcaaaggacatgaacagacacttttcaaaagaagacatctgtggccaacaatcctatggaaaaaagcccagcatcactgatcattagagaaatgcaaatcgaaacaacaacgagataccatctcacaccagtccaaatggctattataaaaatgtcagaaaataacagatgctggtgaggttgtggagaaaaagatatgcttatacactgttggtggaaatgtaaattaaattagttcagccattgtggaagacagtgtggggataaagacagagataccattcaacccagcaatctcattactgggtatatacccaaaggaatagaaatcattgttataaagacacatgcacgcgtatgttcgttgcagcactgcccatcagtgacagactggattaaaaaaatgtggtacatacacaccagggaatactatacagccataaaaaggaacaagactgactgggcgtggtggctcatgcctgtgatcctagcactttgcgaggccgaggtgggtggattgcccgcgctcaggaggtcaagaccagcctgggcaacacggtgaaaccccatctctattaaaatacaaaaaatttacctgggcatggtggtgcgtgcctgtggtgc

SEQ ID NO: 45720 - DNA, 704 bp, Homo Sapiens
  misc_feature (329)..(329): n is a, c, g, or t
  misc_feature (469)..(469): n is a, c, g, or t
ggctatagacacgtgtgaaaaagcaggctggtccggtccggaattcccgggatatcgggaaaatattcattcatgagctcttttggcaatccgtcatcagtatattctgaaaaccaataagatgttgccaagttgggggcgagagctatgtaatgcaaggcatatgcctgatgaagtatacaaatacacctgaccagaaacttgtctcccacataagtctcttctaggcactgtcggggtacatactgagctgctgcttggctgtattttctgtgcctcagaataaccatgtcctggtgttcatatccttagagttcagtacaaaatgntggatatccatttaataggttccaggttatcttagttggagtatggggtatttgaaaacgtcatgccttcaggctatcatttccctcagaaagctaagtaaatttactgcattcatttctcaaagagtaaaagtgcaggntgtatgtgtctatgaacatttaaacatgttaaaatgttaaatttaacattttaaatttaaacatttaaatatgtctgtaacttgaacagtgtagtttcagaaaggaccactgggctagtgtaatgcagaaaatgctgggtctaggattaggagaaaatgtgtttagtgtgtatcaataaacagcccgtggacccaaaaaaaaaaaaaaaaaaaaaaaaaaaaaaaaaaagggggg

SEQ ID NO: 45721 - DNA, 411 bp, Homo Sapiens
gaaaaagaaagaagatgacaaaaagaaaaaagagaaagaggaagctgaacggatgcttcaagacgatgatgatactgtgcaccttccatttgaagggggaagtctcttgcaaattccagtcaaggccctaaaatatagtgttgatccctcaattgttaacatatcagatgaaatggccaaaactgcacagtggaaggcactttccatgaatactgagaatgccaaagtaaccagatctaacatgagtcctgataaacctgtgagtgtgaaaataagttttgaagatgaaccaagaaagaaatacgtggatgctgaaacttcattatagaattgaaccaagaggcattatacatatagatatatacatatgtaatgtgtgcgtatcatgtcactatatataagaatattgta

SEQ ID NO: 45722 - DNA, 712 bp, Homo Sapiens
ctcttactatacataaaagaattcatactggagagaaaccttacaaatgtgaggaatgtggcaaaacttacagtcgatgctgaaaacttactacacataagaaaattcatacaggagagaaaccttacaaatgtgaaaaatgtgctaaagcttttagccagtcttcagccctttctacatataagataattcacactggagagaaatgctacaaatgtgaagaatgtggcaaagtttttaaccgatcttcaaaccttacagaccataaaaaaattcatacaggagagaaatcctacaaatgtgaagaatgtgacaaggcctttaacctgtcctcaacgcttactaaacataaggtaattcatactggagagaaactgtacaaatgtaaagaatgtggtaaagcttttaaacagttctcacaccttgctatacataatataattcatactggagagaaactctacaaatgtgaagaatgtggcaaagcttttaactcatcctcaaaccttactgcacataagaaaaatcgtactggagagaaaccctacaaatgtgaagaatgtggcaaagctaacctatcatcaacccttactccacataagacaattcatatttgagagaaaccctgcaaatgtgaagaatgtggcaatgcttgtaactaaatctcaaactttactaaacataagaaaattaatactggaaactttacaaa

SEQ ID NO: 45723 - DNA, 428 bp, Homo Sapiens
tcctccccaatacctctccctgaaaggtgagctgctattttaggaaactggaccagacaccaacttgggggctttaagtcaaacaacctcaaacccatctcttcctgtgtaggggtgcaagcctctgaagctctcactcccacccttagtctgcatggaaaatgtactgtgatccccctgcccccaactgccctcgcctttggtgtgagatgttccttctttcggagttcagcctgagtccctctcccctctgccagccaacccccagccagcaataagggtccaagccagggcctcctctccacactccctgtctccatcctacactaccctagggaatacctggattccccattctatccacatactgtagcattcattctccatctctctcacctcacctgtggtggtttatgggtgtgatgggg

SEQ ID NO: 45724 - DNA, 537 bp, Homo Sapiens
tggccgggtgagccacggtgcccggcccacaattaattttagaacattttcatcacccctaaaagaaaccctgcacccattagcagtccctccacattcccccctagcctgcctcccctgcctcaccagccctggcaactgctaatctactttctgtgtctatggatttgccttctctaaacatttcatataaatggaattacacaatgagtggtcttttgtgactggcttctttcacttagcacaatgttttcaaggcttatgtgtgttgtggtgtgcgtcagtaagctcttggtgcttgagtcctgagactgggtctaggtctgtgctctcttaagtcgttgataggcacctccttcactcctctcctctcctttcatgttgtttgacccaagttttttaacaattgaagggaacaaggagaaagggatccagtctcaggggccaaacccagttgggtggatggggatccctcctgtcccattctcaaaaggcagaacacgtgacttctcacaaggccttgatttcttcattcac

SEQ ID NO: 45725 - DNA, 613 bp, Homo Sapiens
  misc_feature (11)..(11): n is a, c, g, or t
tcaacttattnaaaatgtcttcaaccctgctggtcgagacaagaaatctttatggggtagttggagctgaaagcaggttaggcacctattaaaacatcacagaacaggttatattgtggtttgaagaactggatattccccaatgttttaactgagtttatgtgcctaagtcttcaaaatggggtttatagtatcaagtgaggctgtttggttcttctgaaaacacactcattttctgacacatggctagactttatgccaggtacatgctatttttgaaaagctcttttttaagaggtaactgtttattaaaacaatctgtttcaccaaatatgttagccctgtaaaattgacatttacaaaagtttgaagaaaacaaatttgggaaagttaataattcgcctttctatcttcaaggattcaaattgaccgttttttctcctttttttgtctttcaacttactgtaattatgccccaatagttcgggtgcagtggctcacgcctataatcccagcactttgagaggctgaggtgggaggattgtttgagtccaggagtttgagaccagcctgggcctcatagcaagacccctgtcttaaaaaaaaaaaaaaa

SEQ ID NO: 45726 - DNA, 753 bp, Homo Sapiens
gggttttcttgtgtgtgtcattgggggtaactccattgacctcagcatttctatctcaagagatggctctggaacacagaaccagaggcaacaggtactaatggttgataaaattaacagcgactgcataaccattttccacatggcagggctgtgcttaagccccacacctccaataatcaatttctatgacggtactaataaccttaactatatgcaaattcttcaccacttatgatatggtacaaactggagtttacagatggccttggccttgcctagcccatttgttcatcctaacttcttcatcacttcctgatgcacttggggaagcatgttgacacaacgttaccaatatttgattacctatggttatctgcaattacctacgcttatcttatcagaccctagatgccatttgagccccttacttctttgggcagtgggtgaaatgggagaacatagagaaatgttcactttgacctaagaaacgcataaaagggaatgccatgcacaatgtaagataaaatgtttggggacaggggatcatcgtgaaatttatttctgctattctgccctattgaggtcattaattataatggatttaaagatttttttttaaactctacaaacactaagccaaggaattcaggttatctgctatgttaacctaataaagcaaaggaaaatatgttgctttaatccttgcttggtaacctaataaagcaaagggaaaataaaaaaaaaaaaaaa

SEQ ID NO: 45727 - DNA, 656 bp, Homo Sapiens
  misc_feature (490)..(490): n is a, c, g, or t
caggggagttgtgaaccagacatccagacctcctgaagggctcgtgcagacgtacaggcgggatcttctggaagtgagaattgtttttgtttgtttatctattgtagcagaatggggaaatggagagagaacctgaaagagccccaaactcgaggacctattgctccccaagaataacatcttccagaactagacagaaaactaggcgtctgggaaccctgaaatccttggaggagtagatcatcatgaccctctgtgttccttttggcaaatgacttgcttccattgtttgtttgttcaattgtctgtttgttaaataaataaaaccctttttatgtatctttaaaaaaaaaaaaaaaaaactcgagggggggcccggtacccaattcgccctatagtgagtcgtattacaattcactggccgtcgttttacaacgtcgtgactgggaaaaccctggcgttacccaacttaatcgccttgcagcacatncccctttcgccagctggcgtaatagcgaagaggcccgcaccgatcggcctttccaacaagtgcgcagcctgaatggcgaatggcaacatgtaagcgttaataatttggtaaaattcgcgttaaatttttgtaaatcagtcattttttaacaataggccgaaatcgg

SEQ ID NO: 45728 - DNA, 574 bp, Homo Sapiens
ctggctgatatccgggactcctatgagttggtcaaccacgccaagggactgccagactcctttcacaagccagcttctgacccaggcagctgaccctcaccatggacactacaggccctggaatggccagggtggaccaaaagccatgccagctgggcatgaccccaggcagccagccacaggctgaagggggcttgttggctgagtgatctgcagaggagaaagcagccccagctctgcccagaggaggcgctgaagtgggacaagcacaggaaagaaggggaccagtctaggaccccaacttgactcactctaaagctacaaccaaatggccttcgattttcaacctggggattaggggaggggagggtgccttccagggctctactcaggactaaccctaagggtgagctagtttctgtgcctctgtgctatgttttgaggctcccttacccaaaataatacccctgcctgcgtgatattctaccattcattttaattcctttgggtcttgcagtttttcaggaggccttgattaaaatgcaaatacttgtctgagaaaaaaaaaaaaaaa

SEQ ID NO: 45729 - DNA, 561 bp, Homo Sapiens
gtctgtctccccatttagtcttatgagcaagatagatgaagccatgagaaaatatactcaaaaagcaaccaacagacaatgtcatggaatgaatctcctacagatttttccttacacttttgaaaagtaacatgattttaaaacgttggaaaattcatcaaggtacaaatcattttctgacttcagcattgatacctaaattgatttccagtacacagttttatagaattgtgaatatgtagtaatctcagttaaccagaaccttaaccttcaggttaaggaaaatacctattccttaacctctaggtaaatgggagtttaccttacaaagctgattgagagcttatttaaaacgtaaacatacaagatgtcattgcttccttgtagtgaagtgaaaaggaggtattggattaagcatttaaagttaattaaagtagtggctcgtgcctgtaatcactggctactcagaagtcttgaggtatgaggatcatttcatgccaggatttctagaccagctaggcaacataatatgacccctgtttctttaaaaaaaaaaaaaaa

SEQ ID NO: 45730 - DNA, 683 bp, Homo Sapiens
  misc_feature (612)..(612): n is a, c, g, or t
tggctctggtagggcccaatggagcagggaagtcaactcttctgaagctgctaactggagagctactacccacagatggcatgatccgaaaacactctcatgtcaagatagggcgttaccatcagcatttacaagagcagctggacttagatctctcacctttggagtacatgatgaagtgctacccagagatcaaggagaaggaagaaatgaggaagatcattgggcgatacggtctcactgggaaacaacaggtgagcccaatccggaacttgtcagacgggcagaagtgccgagtgtgtctggcctggctggcctggcagaacccccacatgctcttcctggatgaacccaccaatcacctggatatcgagaccatcgacgccctggcagatgccatcaatgagtttgagggtggtatgatgctggtcagccatgacttcagactcattcagcaggttgcacaggaaatttgggtctgtgagaagcagacaatcaccaagtggcctggagacatcctggcttacaaggagcacctcaagtccaagctggtggatgaggagccccagctcaccaagaggacccacaaccgtgtgagccctctacctgggntcgggtcaggagctccatctgggaactaacagctgctaacctgaccagccgctcaaggacaggacccctgg

SEQ ID NO: 45731 - DNA, 715 bp, Homo Sapiens
  misc_feature (397)..(397): n is a, c, g, or t
  misc_feature (668)..(668): n is a, c, g, or t
  misc_feature (701)..(701): n is a, c, g, or t
ccctgcccagtattgcggtgggggctgtgccagcggctccgcagatggccagctgtcgagagcagccctgcccagattgcggtgggggctgtgccagcggctccgcagggcccttccaactctggagtgtctgtagttcttgtgaaaccaaaacgttgactacctgcctctttcctcgggcatcgacgtgctcatttccaaagatgatggtgcaggtgaccttttccatcgtgagctaagagaaggttaggaggcctgaggggcgggccttgtgtcccctcctccccctccacagcccctgaggtggagcttccctcacagaccccatctggtcgagcctacggctgcccagtgtacactcagtgatgcttataccaaatagggcatgtgcgctgcngtctgttggggacagccccatccctaccttggagtcggcagagaagcagcaataagcattaggcgaatgattgaaagggctgctgcgccaagaggccttcagtccccttaacgtggctttccaacttcctgacgaggctacaaaggctccgctcacaaaagaaagccaataatgtaaataaatagaaaacgaagcctccacgcgtggtttttaaagggggatgatgaatgtgacaccacccacagaatgcattagaatctggtttttctgngctttggcattttactctgataggaatttttgntacctaactctggg

SEQ ID NO: 45732 - DNA, 961 bp, Homo Sapiens
gcggctgtataagccagcatcatagccacacttgagcacacagttcaggctccttttcacccagatgtactgatcagaattggttcccacagagtgacactcttccccaggctggatgggggttttgtgaggtaagggcacctcttcatcacctggcccttccatgcacatgtggttgtggtcgttctgtggtgggaatttgctgcagttcagactctctggccaggcaaatccaaattccttcaggacgggttcacagcgtctcttgactgaaagacacatgccgccgcatgggccaatggggatgttgatcttctctgtgcacattggcacataaacagaacaaaggaagaactggaaaagtaacaaaatgaacacacacaaaaaaaacaatgacttggaagtttgaccaaatgctcccacaaagctgagttgaatgcttccaggcaatctaggtatctacttttaaaccaacctatcgggagtctgtctgtttactctgacctcaaacaagggcgcctgataatccatcacttacatacttttcttagtttggctttagtaatcctttccagaagaatgtacctaaataaataaataaaataaataagggtctgaaagaattgcataagcccctctttgcacaaaaccttgaaaataaatccttaaaaaactgggctgttcaatctcctttccatttttaaaaacctattttgaaaaaagctaaaaaaaaactattatggcctccctttagggggggtttatttttaatcccccgctttttttattcactttttaaaaattaaaaagttaaaaaaaaaaatggaagcacccctggctaaaaaatttcccctttcccccctcaaatttattccccctttaaaaaaaatttgtgttaaaaaactaagtcccacctaattcggaaaacaaaaaaaaattggggcccccaaaatggaaaaaa

SEQ ID NO: 45733 - DNA, 640 bp, Homo Sapiens
cgaaactttgaggaccgagagaggcaggaactggggagccccgaagagcggctgcaagacagcagtgaccctgacactggcagcgaggaggaaggtagcagccgtctgtctccgccccacagtccacgagactttaccagaatgcaggacatcccggaggagacggagagccgcgacggggaggctgtagcctccgagagctaagggggcccctcccccctgccccgtgccccactgaagaacattactgagggggctaaccttggggactccaatttgccaatgatgagggaacatttgaaagaactgcaaattgtccttgccagctcttgggatccttggatacctggggccatttaagaagctaggggaattaggccacaacaccccctgggacatccgaaagctacaccacagatgccagtggttcatgccttcttcccgcaactttaggaaaatttatttatttattgtttattagttatggggggagaggggagatttaaaggaccagggacatgggaaccaagccatagggatcagagggccttgtccttgaacactactggggtatattcaggctcatccacgcagctgctgggttcttgccctaacggccctcccctgcaacatccgtctt

SEQ ID NO: 45734 - DNA, 966 bp, Homo Sapiens
tgttattacattatatgtagttataccaaaatattgcctgaagataaatcatgacaaggtcccctgtttattcctgtgttacagacgcatggaattgctcctgtagatttgaatttttgtttcatttttttctgtcccacccttcactctctctgtttcagaacatttttggtagaagtgctatccagaagtgaacttgtcaaaaggcaagtagcatgaaagaagacagaagaagcaaaaggctaatacagtggataatttctgagcacttgaagtttcttcaaatgtgcaagactgtgtgtcttcctattagatgtataaattggatatttcatgcctaattaaatgttgcgttggattgcagtgcctatcatacagtgattggagtaaattgaggcctaatcctgaacacatatagagcatattgttagatatttttcctgtgacatttgaagttattattctcccatttcctttttctttttttgtttataatcatatgtccctaagattgttttccttttttggaccaaaaaaaagagaaaaaaaatcktagcttttcatcctcccagtgtattctgcattgtccttaccctagatcagccccttctgtgttamagtttttctcacaatgtagcaacttttatccacccttcaggaccttcactgggactagttcattcattttcaaatagctatttcaacctttaacatctactgtcttagtcttttacacagaagccagagtgactggtcttggcaagactctgttgtgtatcaccactctaaccttactgatttgtttcagcaaatttgctttagttaaattgctttactcagattcccccaaactttataakgtgtawtgtcatctttgtgcatatkatttctcatgcatgaatactcaattttatttttttatctaagcttatcttacattyyttaaagmcyggcaagtttttattt

SEQ ID NO: 45735 - DNA, 1053 bp, Homo Sapiens
tgcttgaagagggaaacacgtcatgaaactgtaatgcatgaacagaactcaggagttgtctggccagcttagtggtaagatcgagcctcctactgaggccgtccctgcatgcgcctgctgccactggtgacatgccaacttaccagatccgagctcctactgctgctttgccacagggagtggtgatggctgcatcgcccggaagtttgcacagtccccagcagctggcagaagaagcaacacgcaaacgagagctgaggctaatgaaaaacagggaagctgcccgggagtgtcgcaggaagaagaaagaatatgtcaaatgtcttgaaaatcgtgtggctgtgcttgaaaaccaaaacaagactctcattgaggaactcaaggccctcaaagatctttattgccataaagtagagtaactgtctttgacttggaccttgtttactctaatcaaggcaggagatgcagcagtcctacttattgccatgtggacttgtgggaaggacacgtgtgacccttaagaatccagtttggattagtgtttgaaattgaattgggaatgttgttccaggatgtggaatgcagccgtgatcacacttaccgagcttactttgatctgtttgtcaatagcatgcaaaaaatgctttgtttgccctttgcttctgctttttttcagggaagctgccaaagaatgtcgacgtcgaaagaaagaatatgtaaaatgtctggagagccgagttgcagtgctggaagtccagaacaagaagcttatagaggaacttgaaaccttgaaagacatttgttctcccaaaacagattactagaaatatttaactatgaactgaaggsagcatgtatagttgcttttgaaggaatacaatatatagctggcmagaattggtggcttcttttctttgtatcattcatcttcttctttaatcacttaacattcctaaaatgctcmctgtacgtaktaagtcgtrgyawaacttcaaatttttaaaragrmaamtgtwaaaaagkgggwttytaaaagcaaatttkaaggtgttc

SEQ ID NO: 45736 - DNA, 400 bp, Homo Sapiens
ggcacgaggaaactcgtgacgtccccgcgtgacctcaccgctgcggggcgatggagcgaaaagtgaggaaactgaagtcccgggagagacagtggcaaggtcaagtagcaaagtgcactcagccctcccagcaaggagtctgccactcgcgcttgaaggacgtgtttgaagagctgctttcccagtgggatgctgccttaaagtcttgattccctggcactctttcctattactacattttatcggtgctgtttgtgttatgcaacggtagcatcgtgtctccggaagataaaaaaggtctcgatacaaacatccataaccttccacccactccgtcaggaacaacccaatcaaaataaagtcatgagaatttaaaaaaaaaaaaaaaaaaaaaaagaat

SEQ ID NO: 45737 - DNA, 613 bp, Homo Sapiens
  misc_feature (591)..(591): n is a, c, g, or t
  misc_feature (601)..(602): n is a, c, g, or t
  misc_feature (604)..(604): n is a, c, g, or t
  misc_feature (606)..(607): n is a, c, g, or t
  misc_feature (611)..(612): n is a, c, g, or t
aggttttagaaacatgcagtaatgattaacttgtgtcaatgatggtaatgagaccaaacttgtacatttaattaagggtaccagttctttttatgttactagactataccttggcctttaaaaatgaatctcactgattaaagagaacaggcattattaggatagcattccaccacaattagaaacattcaaataatgtgtcttaattgtaatctgtatataggaaaatttttcctatggatatttttggtgttttaccacagtgaactgatttgtagcacttatgaagtgcagaaggtaatattcttgaaaatagaaaaaggttgggtgagcaggctttaatgcctttcccccaagaatatacatcgaatttttcttaatcttttggggttggccagcttccagatttcattaataatgagctctgcctttaataaaagtacatgatcatagctacactgtatgtttaggtggtgtgaaatgatttataatcacagcttgaactgtgtttgcttggtactgtcatagtgattacaaatttcatggaatgcgaagagcaacaataaataaaaaataccactcaccctaaanaaaaaaaaannanannaaanna

SEQ ID NO: 45738 - DNA, 517 bp, Homo Sapiens
acctgttttatttcagggttacatccattgacccatcaggcagctccccatcttcctcttctgctcctctggcaagtttttccggcataccaggaacaagggttttcctgcaagggccagctcctgttgggactcctagtttcaacagacaacatttttctccccatccttggacaagcgcctcaaactcatgtaggaatcctggaggaactcttcccaaagagttttgaataagttattaaatcatttatttcagttacaacaccatgttgtaactttagtaaactaagtggtatacagatgcccaaggtttgttctgtggtcatgtgaaaaaattgtcagtcatttttagcatagaaaacttgagaattattctttcaagccaaaaatgttttacagtagaacttggatcaagaaaagaggtactaggctgggtgcagtggctgacacctgtaatcccgcactttggagggctaggcagaagatcgcttgagccagcagttggagaccacctggg

SEQ ID NO: 45739 - DNA, 909 bp, Homo Sapiens
  misc_feature (828)..(828): n is a, c, g, or t
  misc_feature (843)..(843): n is a, c, g, or t
ccgcgggggccaagcccctggcttcttactgcggcttcatactgagggccgagccgaggcggcgcgggtgcaggagcaggacttacggcagtgggggctgacagattcccttggagtgttcttgttgtggatgaagctcacaggttgaaaaaccaaagctccctgctgcataagaccttgtcagagttctcagtagtcttcagtctcctgttgaccggaactcccatccagaacagcctccaagagctctactccctcctcagttttgtggagcctgatctcttttccaaggaagaggtgggagattttattcaacgctaccaggatattgagaaagaatctgagtcagcaagtgaactgcacaaactcttgcagccatttctgctgaggcgagtgaaagctgaggtagctacagagcttcccaagaagacagaagtagtgatataccatggcatgtcagcattgcagaagaaatactacaaggccattttgatgaaagacctagatgcatttgaaaatgagacggcaaagaaagttaaactacagaacattttgtcccagcttcgaaagtgtgtggatcacccatatttgtttgatggtgtggagccggagccttttgaagttggagaccacctgactgaggctagtgggaagcttcacctgctggataagctactagcattcctgtattctgggggccatcgggttttacttttctcccaaatgacccagatgttggatattctccaagactatatggattacagaggctacagctatgaaccgtgtggatgggttctgtgagaaggagaaaaagagacacttggnccatttaagaacttnttggacagcagcccatttttcgttttttcctcctgaaaaacctaaggggccaagggtggaagttta

SEQ ID NO: 45740 - DNA, 679 bp, Homo Sapiens
  misc_feature (676)..(676): n is a, c, g, or t
cacgcctgtgtccccgcgttctgagaagtcctctgtcttcgtgtcactaggtccagaaagtcgcgccgggcagaggcgcaggcggggccggcagggccgaggaataagcgacaattctggtttttctcccctggccgtcgttcgccagcctccttcattttcctgagttcccgctgaagtatatactacctatgagtccaattaacatgagtattatgctagttctatcctactaaaaaaaacgtaaaaaaataactatatagaagctgttccagcaaccatagactgaagatacgaaagaaaatccatttatttaagacctgttccggtatccatgaggacataatttacctttcagtcaccacaaatttataggcatttgtatcctggactaaaagaaggggctgaggttgggtttgtcatcacagagggggtgggcctggaaagggtccttcccaagctgccccggctccggcggcccgggccggcagcctctgccagccagcgtcctcacggcctccccctcgcctgtttcttttgaaagcaagtgtagacaccttcgagggcagagatcgggagatttaagatgttacagcatatttttttttcttgttttacagtattcaattttgtgttgattcagctaaattatgaaaaataaagaaaactcctttgnaaa

SEQ ID NO: 45741 - DNA, 400 bp, Homo Sapiens
tccggaggaaatgggctttacagatgtgggcccagaaaacaagccagtcagtgttcaagagacctatgaagccaaaagacatgagttccatggtgaacgtcagaggaaggaagaatcagagtattagggtagttaacttacacatttgcattcttagtttaactgcaagtggtgtaactatgtttttcaatgatcgcatttgaaacataagtcctattataccattaagttcctattatgcagcaattatataataaaaagtactgcccaagttatagtaatgtgggtgtttttgagacactaaaagatttgagagggagaatttcaaacttaaagccacttttggggggtttataacttaactgaaaaattaatgcttcatcataacatttaagctata

SEQ ID NO: 45742 - DNA, 356 bp, Homo Sapiens
  misc_feature (2)..(2): n is a, c, g, or t
  misc_feature (24)..(24): n is a, c, g, or t
tnattatgagctgtgtaaccttgngatacagtttcctcatctataaagttgtggtgggagaatggctgagaacagtgatctctcagctctccagctgtaaagatgttaattatgattttaactctcaagatcaggccacataaggaacaggggaattccaggggtgggacacagctgggggagtccagaccagggcagggaaaggagactcacaagccaaacagagctgctttggggaaagttcttatcagctggtgctgcttcctgagccatatgcccattcctcaagctgtacccctttcttggctatgtaggatgagttcctcctaggcccttgttaggagtggctattggat

SEQ ID NO: 45743 - DNA, 739 bp, Homo Sapiens
agccaatgagatttgtaacaaatcggaaaagaagaccatctcaccagagcatgtcatacaagcactagaaagtttgggatttggctcttacatcagtgaagtaaaagaagtcttgcaagagtgtaaaacagtagcattaaaaagaagaaaggccagttctcgtttggaaaaccttggcattcctgaagaagagttattgagacagcaacaagaattatttgcaaaagctagacagcaacaagcagaattggcccaacaggaatggcttcaaatgcagcaagctgcccaacaagcccagcttgctgctgcctcagccagtgcatctaatcaggcgggatcttctcaggatgaagaagatgatgatgatatctgaaattcaccagctgagtttctatttcttctataaatgtttttccctgcacaacaaaaacagtgaaagaaatgcttatctgtaattttgtatgcatcttggtggacttgtcattggtattctagggatgtctgctattaagtttcatctattgtgtgctatacatgtaaaaactgtctctttgaactattgaaaatttaaggttcagtataatatcaattttgaatttttaatggtgtttatgaaattttagatagcagcgagtccttcgtttgatcaataaacagtgttacagataacttcaagtttataaaaatacagtgaaatttctacaaagctctaaaaaaaaaaacgacagaaaaaaggggc

SEQ ID NO: 45744 - DNA, 648 bp, Homo Sapiens
gggccccctttccacccacgcgtccgtaacaattggtcgtcttggttacgtttgtcctcaagaggtggcccccatgctacagcagtttataagaccctggtgcacctctctgagaaacataagagacaatgaggaaaaggattcagcattccgtggaatttgtaccatgatcagtgtgaatcccagtggcgtaatccaagattttatatttttttgtgatgccgttgcatcatggattaacccaaaagatgatctcagagacatgttctgtaagatccttcatggatttaaaaatcaagttggcgatgaaaattggaggcgtttctctgaccagtttcctcttcccttaaaagagcgtcttgcagctttttatggtgtttaatctaatacacttaagctgcagtcccaaaattaggggtccttcagtcttggagactataagggagcctctgcacccagggaaaatgttaccctttacaggggggaagggtaaaccagtagggaatacagtacaatcccaaccctactgggaggggcgggagggaggtgttgccgtcactgtattaagtcgatgttgggaaacgttttaacatctggagcctttgtgggtggaaatatgtctccagttacaactccgcagtggatgtg

SEQ ID NO: 45745 - DNA, 228 bp, Homo Sapiens
gcggccgcctactactactatacggctgcgagaagacgacagaaggggatatatattatgaaatggtcatttttctgaagagaatattttgcttgaaatgcaaaggactgaaagagatttgtaggttgttgattttgttagttcatactggaacttttaaaaagatttcatcaaataaagttttgtttccaaaaaaaaaaaaaaaaaaaaaaaaaaaagtcgtatcga

SEQ ID NO: 45746 - DNA, 641 bp, Homo Sapiens
atcaaaggttcacttaaaaaattaactattaggtaaagttaagggggcagtgaaaaatctatttatgatttcgggagtaacctaaccatgaataatattagcataatgagaacatttactttttaaataaataactaaattttgtttacaatatgagtttttccagaatacaaggtttcaataatcacatgaggagtttaaagttttaaatatatactcagacattcatgtaacacagagtgtatgtaaaatcatttcccccactcactggagggagtatttattgcagacttttgttcagcaacatttagtgtttcagtgaaagtggacagttggggcttaaaacatttatttgtaaaatgagctatgttcaaatgtaaatatttgtaatttaatgtatttaccacattgactgtactaattatttagtagtcatactgtaatttttatgttaataataactggagttcaaagtctagctattggtataatcatctaatattatatatatctccagtgcccctgaattttatgtttgatgactatatatttgggcatatatcttgttggattagaataaataaaacactttatattttcatgaactctaaaaaaaaaaaaaaaaaaaaaaaaaaaaaaag

SEQ ID NO: 45747 - DNA, 779 bp, Homo Sapiens
ttttcatggtgagaaataataatgatgactaataataataaaaaaaactggaaaatgtaagcaaggtggacgcattgcttctcggtactcagaaaggttatctgaatttgcgtggtaagcgctggcctgaagatgtacacaagttaaagccatattttatctggtgagccccttaactgtttctgaaggaatgaacggtcagccgggaaggtgtccggcttagaccttgacaacagacactacccatctgtcagccatgtgcagtggttagaactcttcttgaaagtccaaagagcctttaaaatgtgtataatttgtgttttgttgcttctatttctattgattagatgaaaagacattctggccctctgatcctctttcttctccacaaaagttttacaaataaaagatgttcccctaaatacagaatatggctttaagaagaaaatgaaatgaagaattaaattaagatttcagtgttgggggaaaaaatacagcttctggatgactggattgcataacattgccctggcctcacattgtactaggatgcagcttaaatgaagtcatctctaaatctactaacctttcaccttcttatcaaaactttttgaatagacacacactgtacagttcaattgttagagaacctaactactgtagagattgttaaattttttttttttttttgcaaaaattcaagctgtaaaaacttttcaactttcacaatatttaattaaagttacttcctgtctgtgatggcaaaaaaaaaaaaaaag

SEQ ID NO: 45748 - DNA, 991 bp, Homo Sapiens
  misc_feature (12)..(13): n is a, c, g, or t
  misc_feature (20)..(20): n is a, c, g, or t
  misc_feature (23)..(23): n is a, c, g, or t
  misc_feature (32)..(32): n is a, c, g, or t
ttttacccagtnncgccctnagnactacatancaggtggccccaggcactccgccggctccgcccgcgcacccgtgaagtcaatagcgtgtccccacagggcaacagcgttgaccgcatggcagctccgagagcagaggctctatttgacttcactggaaacagcaaactggagctgaatttcaaagctggagatgtgatcttcctcctcagtcggatcaacaaagactggctggagggcactgtccggggagccacgggcatcttccctctctccttcgtgaagatcctcaaagacttccctgaggaggacgaccccaccaactggctgcgttgctactactacgaagacaccatcagcaccatcaagtctgtggcctgggagggaggggcctgtccagccttcctgccatccctacgaccaccgcccctcacatcaccttctcatgggtccctctcccactccaaagcccccagtggctcccagatgagccacaatgctgtaacaagccatcaacgtccagggtggcctggccgccctcattcccctttcccccaccccacaccccacttccagcctgatgcctccttactccagcctgtcacccccttagggacatcgcggtggaggaagatctcagcagcactcccctattgaaagacctgctggagctcacaaggcgggagttccagagagaggacatagctctgaattaccgggacgctgagggaggatctgtttcagctgctgtcggatgaagacgtagcgctcatggtgcggcaggctcgtggcctcccctccagaaacgcctcttcccctggagctgcacatacgcagaaggcactacagggtctcacacgatgcatgactgaacgggtccctaagcagtgagggacacagcaaaacctcaccctaaaggaatgggacagaaacctggagatggcaccttcttttggagctatgcaccgggcctgtatcgtcttttcatatt

SEQ ID NO: 45749 - DNA, 709 bp, Homo Sapiens
  misc_feature (18)..(18): n is a, c, g, or t
  misc_feature (345)..(345): n is a, c, g, or t
  misc_feature (664)..(664): n is a, c, g, or t
tttttttttttttttttntgggagtaacagctgcttttattaacatcagaagggcaacagtacaggaagttgggtagatgtggggacaacagagagactgtggcagaggcaggactgcagatctatggaaattgcctggaagagtcagctgtaagggatgagaatcctgagggtaaaagagaaaagggaaagactcctctttgatcttatgaagctgaaataacaagatcttaaacatgagtgagaatctgttgccccaacctaaggtgactttaaatccaaggtaaaaaacacggcatgggtattagtttgaatagggaaaatgagaactctctttgagctcanaaaaaaaaaaaaaaaaaaaaaatgaaagcgttaaaaccctgattaagtctgcacaatgatccagagtgtaaggatgggagaaagaataaataccctagtgacccacatattaaacagaccacagacaagagaacaagacttgaagctaatggaaggtcatcttgcccatgccgccatggggggcaacagtgccacaatgccacatgggcactaacacacactgcatccccccagtccctgcccaggttggagggtgtgcagatcacagcagcagagctgcctagactcaggaagggcaggaacaccactgctgatgcantgggaggtagggatggggagcctggccctggctttgtgggagtgc

SEQ ID NO: 45750 - DNA, 539 bp, Homo Sapiens
  misc_feature (466)..(466): n is a, c, g, or t
ggaaagaccagcttcagtatcctcttcagctaggattgccctaacttttaactttcacagtttcctgattcatatttgcccaggctctgatgccttgaattggttttggctctcttttttggatctgtttttgttgttaaacatcataatgcagtctctcattaatttttaccatcatttaccctgataatctgcctcttctccatttctccttcccttactacctttctttgaattactgtaactgattggtcccaccaaaattttaaagtacatgaagtatcttcattggttcatcctcttgccccctccagatgtcaaaaaactttatcctgccccctagctgaccacccaggttcctttatttcagtggcccatgtgagtctaccttcccctaaggagtgccctaatccagccctttttttgtttcttatgacccatatctttaggctcttcccatttctangtgggagataggtaagtttcaaatctatgccagtcttatgaatattacattagggtaatgtgctataatgaag

SEQ ID NO: 45751 - DNA, 736 bp, Homo Sapiens
tccttggttaccttccaatctgggtcctgctgtgtaagtatccctaagtggggatgcatatttgtttgtgcgtttttatttccatatatgtgagcatttctctgagtgtattaccagacggatagcacatttatatgtcagacatcttaacatctgtgttatctgtagcaggtgtgtagctcagcagatacgtgtcattgtgtatatagctgagtgtgtgagggtgtctgtgtttctgcagtcccctgtgtttgagagatgacttaataaccctgtgttttgagaggtcgctctaaaccagtgacttttccctcccctgctttattcctttccctcactgacactggcttctcccgctagagtaaatggctttagcacagcactgtcttctggggagcctgctgtcctgcaggcaagtccattaaactctttcttgctttaggactctgaaaacagcaagaaacaaacaaacaaaggtcaagctctaagaaaattactgctcaaacttcactaccctggaagccttactagatatttcttaaggtaacttaaaaattgggctttatttttaaaaagtgataggttacttacagtagcacagaaatgttagcatatttatttaaatagtcctgcagcagagaccctgcgattgtaaagtgatttaagtatttctgggtagtgtttgtgatttacggatttgttactgaaaaacaaaaaatcactactgtgaatttac

SEQ ID NO: 45752 - DNA, 596 bp, Homo Sapiens
aagacagtaaaaagatcagtgatttccaggagctgcaagggcagtgagaggaagggagggatgaggaggtggagtgcaggggatgttagggcagtgaaaggttctgtatgacactgtgatggtgggtacatgacattgggcattggtcaaaacccatagcatgtacagcacaaagcgtttgctctaatgtgagctatggactttagttaatagtaacgtgtcaatattggttcatcagttgtatcaaatgtaccacactgatgccagatgttaataatcggggaaactgtgtgtgctgaagagtacgtgggagctctctgtgctatctgctcaatttttctctaaacctaaaactgttctaaaatagaaagtctgtgaaaaaaaacaaaagtaaagttataaaaggaaaagaaaacagaggctttaaattaaatcatctattccttgggaaaggtattttgtaccatatgggactgaaatcatttctctggatgaattttataaaatgaattttgtaatttttttctgagaaaaaaaagttcttaaatacaataaaattgaaatgttgaaatatatctctcaaaaaaaaaaaaaaa

SEQ ID NO: 45753 - DNA, 609 bp, Homo Sapiens
  misc_feature (595)..(595): n is a, c, g, or t
tttgaagtttatgcattttattagaagaacaaaaaataaacatagaagtagcatactaaaatgagctgcataatgtgcacttttaaacataaacaagcactacagcactataacttgaaaaaaaatcaaagcgtctgcagttgagggaatgagctattgcattttggaggaaaattactatgggaagagttggtactcatgaaatattctggtcattatttaaatatgttacacatggctaataattttcttatatatatttttaatcgccattttccacccaaattatgtgcctccatttttcacattattccaaattgttgttatatgaatgcacaaagttagtcctttaaaaaagaatatatttaggaaaatccttcaaaagttttttaatttaaatcattgtaatttgggagcatggggacaaatggctcattttctgttaaagcagcaacaataatattaaaatattattaatattataatattaaaataatattaaaatattaataaataagtttattttgaaaagggcattcattcccataatccagtgatatgatggtcatatcattctctcaactgctagacacanaagacatagcaaca

SEQ ID NO: 45754 - DNA, 747 bp, Homo Sapiens
tgaagtgcccttccctggctggaaaacccaaagtgttttttattcaggcttgtcaggggggataactaccagaaaggtatacctgttgagactgattcagaggagcaaccctatttagaaatggatttatcatcacctcaaacgagatatatcccggatgaggctgactttctgctggggatggccactgtgaataactgtgtttcctaccgaaaccctgcagagggaacctggtacatccagtcactttgccagagcctgagagagcgatgtcctcgaggcgatgatattctcaccatcctgactgaagtgaactatgaagtaagcaacaaggatgacaagaaaaacatggggaaacagatgcctcagcctactttcacactaagaaaaaaacttgtcttcccttctgattgatggtgctatttgttgtttgtttgtttgtttttttgagacagaatctcgctctgtcgcccaggctggagtgcagtggcgtgatctcggctcaccgcaagctccgcctcccgggttcaggccattctcctgcctcagcctcccgagtagctgggactacaggggcccgcaccacacctggctaattttttaaaaatatttttagtagagacaggttcactgtgttagcagggtggtcttgatctcctgactcgtgatcaaccacctcggctccaaagtgctggattacaggcgtgagccaccggcctggcggatgtactaatttgatttactatg

SEQ ID NO: 45755 - DNA, 407 bp, Homo Sapiens
ttttttttttttttttttgaaaagttaaaaattccttaattttttattcctggtaccactaccacaatttacagggcaatatacctgatgtaatgaaaagaaaaagaaaaagacaaagctacaacagataaaagacctcaggaatgtacatctaattgacactacattgcattaatcaatagctgcactttttgcaaactgtggctatgacagtcctgaacaagaagggtttcctgtttaagctgcagtaacttttctgactatggatcatcgttccttctgtggcagatttttacagttcctctaatgcatttgggacgactgtctcaaagtaacctgcagctttcctgacaactcctcgctctctctcctgctaagaactgtagcccttttctgctcctcttgcc

SEQ ID NO: 45756 - DNA, 581 bp, Homo Sapiens
tgaagtttttaaacttgacatcagagaaagtctctcaggaaaggtgactgagatgatgaaaaagttctgtgctcagccttgggaggagataaaaacatcttacgctggagtaaaggagaagtacctgagtgaatactgcttttctggtacctacattctctccctccttctgcaaggctatcatttcacagctgattcctgggagcacatccatttcattggcaagatccagggcagcgacgccggctggactttgggctacatgctgaacctgaccaacatgatcccagctgagcaaccattgtccacacctctctcccactccacctatgtcttcctcatggttctattctccctggtccttttcacagtggccatcataggcttgcttatctttcacaagccttcatatttctggaaagatatggtatagcaaaagcagctgaaatatgctggctggagtgaggaaaaaaatcgtccagggagcattttcctccatcgcagtgttcaaggccatccttccctgtctgccagggccagtcttgacgagtgtgaagcttccttggcttttactgaagcct

SEQ ID NO: 45757 - DNA, 568 bp, Homo Sapiens
cattagtctgtttctctgaaaacaaaatgcattgatgaggtgaaagcttgttccacatggcacctacctaatgaacaggacttactcagtttttaactgttaagaatgtcacatgtactattgtcactccttaggttttcagctataaaacatgtaagtctctcatcatacagatgaattcatttgctaacaaaatatttaaaacccgcagtagactctgaaatatccagtcatcaaactcctggctaactggatgatttggctataataatctttattattattattttcatctgtctctcgaaatatctacagtaggatgttagtaaatggtcttttaaaagcaaaaaattggggataaaaggaaaactgaattccttctatatttttattactaataaataatgcttttgtaaatttgaatggaaaaccacttgtatgtattgctatttggttgcagttacactctggagcttaatttaaaacactactctaaaaatttcatgaaggatgaattccaataatcagaaaataaatgcatttcaaagctaaaaataaagcaaaaaaa

SEQ ID NO: 45758 - DNA, 514 bp, Homo Sapiens
  misc_feature (509)..(509): n is a, c, g, or t
caggcactggttaggcacagcgggaaggttatcgaagacaaaacacatttctacccaagtttaaatgacctgctatgcccacagagcttgatccagaagtgcacaggtaagtatttagcaggctggccgatgttgatttgaacaatctcaagaatgtgctctttagtgcattaaacatatgtgacgagagctgagcacgtttaaaatctcagtaactttggggtttgtaagtgttgtagctcatagtgtcggttaaggttagacatctcagtcacatgctgtcttggcaccagctgtggactgtgctgtgaaagagatctgtgaccttgcaccctgagatctcaggctcaattaagagacaaaacaggcaatgcagtatcagtgcagatgggaaagagaaagcagaaagtatgaagagggaaaggaggagcacaaaggagttagcattagtctctactgagcaattcctattccaaccacgccctaaatgatgagttggatcctagcanaaagg

SEQ ID NO: 45759 - DNA, 568 bp, Homo Sapiens
caaaggtaagctcttttattttctgattaaagagaaaaatagtcaattaagacaacatgcatatatgacaatcatatatgatgtatttgatctcttagggcatatgtcatcgcattacctttaaaaattgtatgggctaaatgtaaaatagttatttttcaacatttgttttaatacccttgtaactgctttttactcaagacagacatttcacttacactaaatgtgtgtgtgtgtgtgtgtgtaaaaacttaggatataacacgtatgtaaattacacacacatacctgtttaaatgtaagaattcagtgataggaacagttcatctaagaagattttaatgacagggcactcttttggccaaagcagtggaatttcctacgcagcaaggttggtaatagtgctggtaggatctgtatgtgtaagctgttacacaagctgaggatcaaagtgccaatttctcaaggagaaaaacttctccgagaaatgaaagtctctgatctgtgttgtatgccctaatacaacaacagcaagaagccatagaaaaaaagcaatagaaaatgaaaa

SEQ ID NO: 45760 - DNA, 680 bp, Homo Sapiens
tgatgacgaacagagtgattggttctatgaaggagaatgtgtcccaggattcactgtccctaatcttctgcccaagtgggctcctgatcattgttctgaagtagaaagaatggattctggattggataaattttcagattccacattccttttaccttctcggccagctcaaagagggtaccatactcgcttgaatcgtctacctggagctgcagctcgatgcctcagaaaggggcgaagaaggctggttgggaaggtgatacctctcacagttagcttggctcagtggggagataatattccctatgggagttgtgtatcctattaacaatcagaggtgctacagaactccctgaagttaatggagccaactggaatgtgttgggagtttacaagagtgaacattatgtagaatgtgaatggatatacaaataaaagatgaaacataattcatatagaagtactgacaaaaaaaaaaacactgtcattacagtgtctattgcctgtaaacctacaagcctgagctgtgtcttctgtaacttttgattaatgttatgttattattgggtaagttaaaatactcttggcttctttatgactcctcttgaattcatgaatgcatctttgttctttcctaattttggtctttcatcctagaattcattaaaaaaaaaaaaaaa

SEQ ID NO: 45761 - DNA, 755 bp, Homo Sapiens
  misc_feature (7)..(7): n is a, c, g, or t
ctttagnagggctattgctactggactttctgcaatgtctttgggtgtgccctcagagcctgcaacaagtgtatttggatatactctatttgtaaagtttaggcctctaagaaggccacaatgaagcaactaaaaatctgatgattaagggagtcaatcaagctgatgccatttttagtttaaaaatgaagcagagctctaaactcatagatgggttttcttactgggaagaagattggctctctgaagacagcttccaatgaggaatgtattgaacaatggcagcactgtctggccacccacaaactgttacagatgatccagttacactgttgcataggaacccaagtggaaagaagacagagtccatgtctgtccatggctccagctacagaaaggatagtatgggaacattacaagggggatacattactgtggaaagttctgctagagttagtcttgagagtatctgtaaaatacaaatagatgagcaatccctgtggaatgctgcctggatattttcagaaaagctctgaacttgatgtcataataccaacaccgtgaatatcgtgtgtggccttaaccaaggaacagaagccctttagaacttagcttcctcacttgggagctgggactgactgcatttgccctttgtataaacccacccaccccatagggttcactgggagcataaagcaagatgtggtgaaagtacttctaatataaattgcaacatcagtaaaaaaaaaaaaaaa

SEQ ID NO: 45762 - DNA, 679 bp, Homo Sapiens
ctaaacgatggcattctatgtaatgcctttcctggacttttttggccactgccctggactagtgaaagaatggactctatctttatctgcaagaggaactaaggccttctatcagactgcctggccagcctggggcactgaaaatacggctcatgttaatgagttacattatcagccagcccagccttgcccaccatttaagaaatatcacagagccactagatctcatatgatcttcttcaagccattattttaactcaagaaaactctagagaagaaaagtgaagaagtcatgttgaagaagatgtaagaatgtgtcaagaccatccagaaatgatatgagaaatactgatattttaaatagtgacatcatccagcgaaatgaatctacattaaatgttgttttaactgcgctatgattaaaaccattcatatagagttagtctttacaactactattctgttattttttttttttaatctgacaacattggtcctaagtaagataagcaaaaaaattcttcaactcctttgggcaagaaaactgtcacagaaaataaatttggaatgtgtacttaagtctttattatattggaaacaatttttttcaattttaaaagctgattgaagacaacttaggttgctaacctagttcaaaatgaaattatttagataccaa

SEQ ID NO: 45763 - DNA, 692 bp, Homo Sapiens
tgtgcacatatgtaccaggagacattaaaaacatgttcttagcaacatttttcataattgtccccaactggaaacagtccaaatgtccaccgacagtaaaaggataatttcttgtaaagtcgtagaatggaaagctgtaacacaatactgagaatgatgaactgatgccgcatgcaaccaggttgaatctcagaagcataattgtaagggcaatgagctggatatagaaggatatatgcattatagttctatttatataaagctccagaaacagtagtgtttgggcatctatatttgagtggtaaagctataaaggaaagtaagaaagcaacagctaaaactgtcatgagagtgttttgttttgttttggagagaggaaagaggttgtgattgggcaaggacttatgggaatttctggagttctgatctgttctgtttcttgatctttatggtgatttgctttataataatttgttaagctgtaaatttatattttatgcactttcctctgctccccccgccccccgcttaaagagtgttttagaatgtggaaattttaagataagatctatctcagggcttgttgtaagaatgaaatgaagtataaagccatgtagagcttgtagaatatgcctggcactttgtaagaccttaataaatgttaactatctaaacacaaaaaaaaaaaaaaa

SEQ ID NO: 45764 - DNA, 694 bp, Homo Sapiens
  misc_feature (646)..(646): n is a, c, g, or t
gtttatggggaggcagtcatacctgttcagagaaccaggaagactcaatatctatctcagaggaaatatggttacccaggaaagaaatggtctgctagagtgataagactcagaacaggaagcctgcatgtgactgagcaagtcacctacataaccctgcctgtactaaggtgtacacctgtctattgtaagtttgcctaggctgttggtgtacagagaccagaggagagagacacactaggactaacaatgtcctaacaaaatggtacttagtttgttggtctttaggagaaagcattagtaatgaaagaagaaagaattttcacttggttggacattggggctgcttaagaaagttgacatttgtcgtggaatgactttggaaagacttctaaaagaatctttttcaaatccctgaaaatcaggatagcacattttgctactgactgtgacagtgttttattcttttgagagaaatgacatagttttccctttatttcccaaattcctttcatgttcttaactgctacccagaaattgagcttcagaagattgaggatagcctttgattggtatttaaaataatttctaagctgtgaagcttatagcatttttaaagtatggctattaaaaacactaagttganaaaaaaaaaaaaaaaaaaaaatcttgattctgcggccgcaagcttatt

SEQ ID NO: 45765 - DNA, 600 bp, Homo Sapiens
  misc_feature (546)..(546): n is a, c, g, or t
catcaactataagcacagtagcattccaccattgggctatgacctgaggagaatcaaggtagctttctcaggcctcgtggacatcgtggatataaggaatgctctcgtaggagggtacaagaaccccagcatgattccaatagagaaggcccaggggcccatcctgctcattgttggtcaggatgaccataactggagaagtgagttgtatgcccaaacagtctctgaacggttacaggcccatggaaaggaaaaaccccagatcatctgttaccctgggactgggcattacatcgagcctccttacttccccctgtgcccagcttcccttcacagattactgaacaaacatgttatatggggtggggagcccagggctcattctaaggcccaggaagatgcctggaagcaaattctagccttcttctgcaaacacctgggaggtacccagaaaacagctgtccctaaattgtaatgcatttgtctgttgttgacatgagagattcaagatcagattctagtgttcagtaaccctatgtgaatcanatgtctcctggataacattaaagccatgtctttgtcattaaaaaaaaaaaaaaa

SEQ ID NO: 45766 - DNA, 581 bp, Homo Sapiens
  misc_feature (438)..(438): n is a, c, g, or t
gcacgaggtttatcaggacacgggccccacctgtcacgtgcccgaggccacccaagcccagcctgcggggcgttcccactgcctggatgccggcttgagttctgcgcacgcaggattcagtgtggggacggcccctgccggataggcctagccctggcccaggtggtgagcggtttgcagtgtccgttctcatccacctgatgggcccagataaaggcccccgctgtccagcctccctggacggccctcgcggtccctgcagcccaagatgggactcagaccctgtgccccagagctcccctgccgcagaatggggccccagccggccccgaccgggtccaggagcactgctcgcctgtacatactgttgccctagcccacctggtgccgtgggagccacccccaggtgctgggggcacagcccctccccactccggncacgcccccacccaccccgcgtgtttctgccctgtgactcctggaacctgcgtcctccccaaagccatgggaggggtgtcctcctcagaccatgcccccagatgatttttttaaataaagaaacaaatgcaaaaaaaaaaaaa

SEQ ID NO: 45767 - DNA, 726 bp, Homo Sapiens
  misc_feature (688)..(688): n is a, c, g, or t
ctggacagtgccacctgtgcctgcctccctcggagccctgggaccagaccctgggagtggtcaacttccccagaaaggccagccgcaagccccccagggaggagagctctgccacctgtgttctggaacagcctggggcccttggggcccaaattctgctggtgcagaggcccaactcaggtctgctggcaggactgtgggagttcccgtccgtgacctgggagccctcagagcagcttcagcgcaaggccctgctgcaggaactacagcgttgggctgggcccctcccagccacgcacctccggcaccttggggaggttgtccacaccttctctcacatcaagctgacatatcaagtatatgggctggccttggaagggcagaccccagtgaccaccgtaccaccaggtgctcgctggctgacgcaggaggaatttcacaccgcagctgtttccaccgccatgaaaaaggttttccgtgtgtatcagggccaacagccagggacctgtatgggttccaaaaggtcccaggtgtcctctccgtgcagtcggaaaaagccccgcatgggccagcaagtcctggataatttctttcggtctcacatctccactgatgcacacagcctcaacagtgcagcccagtgacacctctgaaagcccccattccctgagaatcctgttgttagtanagtgcttatttttgtagttaaaaaaaaaaaaaaaaaaa

SEQ ID NO: 45768 - DNA, 394 bp, Homo Sapiens
tgagttatcttcttattaactcttgtctgagggttacttggtaaaattttcttatcctattaatacaaactgtataaaacttagtttctaaacttctttctttattaggccactccatgtccaaaagaaccaaataaagagatgataaatgatggcgcttcctggacaatcattagcacagataaggcagagtatacattttatgagggaatgggccctgtccttgccccagtcactcctgtgcctgtggtagagagccttcaggtgagaacgcctagtccaagttggccttcagctctttgcagctactctcagctgtgacctggcatcatttcatttcatgggagttttgatttttctccaatcgtctgattaggggatttttatatacacc

SEQ ID NO: 45769 - DNA, 648 bp, Homo Sapiens
  misc_feature (647)..(647): n is a, c, g, or t
atttggccctcgaggccaagaattcggcacgaggctttcagagatgagtcaaccactggccctgcaagatcacaagacagtagcttatcactttcaatttataagtggaatggagaacagcctttccaaacataacctgtgagaggagtttctgtaatcagaaaactgacttgttggcttgtatccgagaagcctttcctatcaccttagtatgatagttctctggagagctgtgaggaaatctttcttttaaagtggcggtcatctttgaaaccaagcatgcataaggaagtagagcacagtacaggaaaagaaaggccctctgctctgatcacacaccaccacaacatcctgacagatgacctggccatgcacagctgcctctccaggaaaatcttccactctcatcagggaacactggactggataactcaggtattcctaggtgaagtaagtcagacaatatggaaatgaagaaataaaaagagggctttcagggcacacagctcagtttgccaaattcaacatggctacaactgatccccaaatcctgagtaaacacccttgctttttaatagcacaagccaaaaaaaaaaaaaaaaaaaaaaagagcgggcgcagctattcccttagtggggttaatttanc

SEQ ID NO: 45770 - DNA, 649 bp, Homo Sapiens
agcggatttcagagtcatattcaggtttaaattctgtcattcagcccaaactcattactttatgttacttatgggaacctcatctaaaaagcaaggatcctgatacctgcctcatattgtggcaaggatcaaatgagtcaaataagatgcttgtgaaagtgaggacaggatctatcctcaacacctagtgcaattctttttacacattaggtacttagtaatttgggttgaattgtgttgaactaacctggcggtataggcaaaatttggaagtttggttttcagaaagtcttgacttcctcttatctctaagtaattggcatgtcctctaattcatattttcccccctcatctgttgggtgaaatactgtttatcctttagtactaacaattaaaagttacctcattcttctagctagctgatttttttttcaatctaggctaaatcatgaatacatttacatttaaataaaatattacagttgaaagtaaagggtcctttcattatctccacttccaattccagtaccctgtgtaaaggaaaacatatacatcttgcagacattttttaatgtgttgtaatataggtacataaaaatatatgtgcttgttttaagcaaaaaaaaaaaaaaaattcctcaagagcgga

SEQ ID NO: 45771 - DNA, 583 bp, Homo Sapiens
  misc_feature (461)..(461): n is a, c, g, or t
atgactgtttatagcagcttcattcataattaccaaaaactagaaataacccagatatccttcaacaggtgattggataagctgttgatatccattccttgagtttatccatactcaacagtaaaaaatgaactcttggttcacacagtaatatagacatatcttaaatccattttgctaagtgaaagaagctaggcctaaaagtctacatgttgggcgattctatttatatgacattctggaaaaggcaaaactatagggatgaagaacagatcagttgttgtcaggtttgagaaaaggagggaagtttgctacaaaggggctgcaaagggaataggctgatggagctgttctgtatggtactgtgtggtggatacatgacaatatccatttgcaaacacaagaactatacacatggccaggcgcggtggctcacacccgtaatcccagcactttgcggngccgaggcaggggaacacaaggtcaggagatcaagactgtcctggacaacatggtgaaaccctgtctctactgtctctaacatttgtaaacctgtctctaatttgtaatttgtaaaccctgt

SEQ ID NO: 45772 - DNA, 723 bp, Homo Sapiens
cagcgccaggtgtcctcgtggctcaggccaccaccacctccctggccaggagccccttgccgcagctccagacgttccagccgcatggcctccttctgccagttggaggaaaattcagcagcaagagcttccagacgccgctccagagagtgtacccgggacataacacgctgctcagcctggaagggcagagagagagccacggagtgagggacccttggatgatagtgcttcccaaagaccaccccgacacagccaacacagaaagaaagggaaaagattccagagacgttccagcataaggccatgcagggccgtctggagctcgtgggcaggggctgccgacctctgagctgggtgtgctgggagccagggatcactgggtgccggccacagaggaaggtccctgaggacacagtaccgaagtctgatcccagaggaggaaggaaggtgggccggggagaaggtctgagtgcagggatggtccaggaggaggactggaagctgcaggatggctgcagggggccgtggaccctcctggcctgaagctcactccttccccgcctcctgcaggggcaggggagccagggctgcgagttctgtctgtggactctcaatggctttcactccttccctaggtaactatggctaagagacagaataatttgaaaatacgttctttttcctctttagctggatgtcccacagagaaacatggaataa

SEQ ID NO: 45773 - DNA, 881 bp, Homo Sapiens
  misc_feature (838)..(838): n is a, c, g, or t
agtagaaacttctgttttctgggagctgcatgtgtcggattcatctgtcatggccttcccacacaccatcttcatgatgcaagcttggaactggagagaaaggtacaattggagataaccttggcagatgaggaagtatgggaaaaaagaccttattctctgtatcaccaaagccttgcacaatgctttgtacccagaatgcccttaggtggttttgaatctatcttccccatcctgaaaactatctagattccagtctagaactactcctgggtctacggtaatcctaaactggtcaagtctgagacctcactgttggtaaattcacaaaccatcctgcttcataaaagcactgtcagcagaggcccctccattactagcaggtgctcccagctggaaaggactgccaattctcttctatccagggaggtttcaaattagttttgagtctacctctgggattgaggaaacaataccatctgaaagtagggtttttgccacttagggtttggtgtgtattagctcggatttcagatgggataggaaatcccccagtaccttcagatgataagatattttagagatttttgcatgtggtatgatttctgggcttcacacgtgctcgtgcaggctaaaagttggaagggaaatgattaagaaattatttaatgcaaggactgaaaattgagaggaatctgagtttttatttttatttttttaattttatttaagttcccggatacatgtgcaggatgggcaggtttggtacataagtaaacgtgggccatggggggttggctgcacaaaatttttcaataaaaaggcctttcatttcaanaagaaaaagaaaacacaaagaaaatctccgacagacgcgagat

SEQ ID NO: 45774 - DNA, 706 bp, Homo Sapiens
gtgtatgatgaggacatactttaaaaatgtaattcctctgtacagtaaattacaaatctttagggatttttttgtaataagagaatttatatttgtaatggtctaagaatttttttgtaatgtggtatatagaattttaatttggagcacttataagctggtaagagagactatagcatctgaattatcttggtttatgtttcagcatttcctctagaatttttgctctcaaatatgtgatttaatgaactaaaaacaacactcatcagtcttgggaaatttgaactttgatcaacttaactaaagaaggaagggtagtaagaatttttcaaatacaaatatttgccaattcacagatgataacatttaaggccttcaaaagtaagggtttttccttgtttctccagtcagcttttgtcaactctaatagttttttcataaacattttttatttgtataattgcaacagtttaagaaattatcacaactatttagaaacatttaaaatgttctttttgatataagctatatacttggaaaaatacattggtatctaaaatttgaggtgtgttaagactgctttttgttttaaaaaatggtttacattcaaatttttgaagtgttttatgcttcatatggctaagttgtagtttggcagagttaacagcataagaataaacatgctgtaatttaaaagatgctttga

SEQ ID NO: 45775 - DNA, 1112 bp, Homo Sapiens
  misc_feature (674)..(675): n is a, c, g, or t
ttcttgtgaaatttctgtactttgtatataaaatacataaaacaatagattagaaatcaaaagatatctctggcctgcaatattttactgatgtgaacataggattttccactaaataatttgtctacttctagcattcacttacaaagagttcttaaaaacacctataataggtacttagatttcacaacttacttagatatttgtcattattcccattcctggtgtttttactggttcatatacaatggtattctattagataagaagctgctatgtgatctcagcactcactccttggttgtcaagaaatggtggataactcacaggattaaaaatgaatgaatataaaattttctgaaatagatatttaaaaaatcattttagcttgaagccaatatgtctggatcataggttttgagttcataatccagtaataacagctttcagctttctatgagtatatacaattctatacaatgataaatactctgcatataatttataaaaataacttctgttttacctagttaacaataaaacctatgtgtggagccaaatgttatgcagacaaaggtctgctcatcccataccagtgtatatatagtcaaatatgtgtctagtacaaataaaatgtatctctaaggcataaaatgttttaacacaccccttcnnccctcccccctttttccccctcttttttcttcccccttttcccctctccctttccccctctttttcccattcatccctcccccttatcccctttcccttcctccccaccctcccccccttcttccccctatcacaatttatttccccttttccgggggggggggccccccaaaaaaacccctccgcggggggccccgatttttgcgcacccccttctttttttcaaaaagggggccccccaagagggggccccaatttaaaaactgcggcggggggcgctttcttaataaatttgcgcggcggggaaaaagtggtggccggggggttttttggcgggaggaccaccctcttgtgggggcggggacctatttcggggaaaatcccctttcaggcagcctattaccccctcccggggataaacaacaatcattctctcg

SEQ ID NO: 45776 - DNA, 612 bp, Homo Sapiens
aattcggcagaggcagtggagcgcaacttggtgcgggttgccgaggtctggctggatgagtataaggagctgttctatggccatggagaccacctcatcgaccaagggctagatgttggcaacctcacccagcaaagggagctgcgaaagaaactgaagtgcaaaagtttcaaatggtacttggagaatgtctttcctgacttaagggctcccattgtgagagctagtggtgtgcttattaatgtggctttgggtaaatgcatttccattgaaaacactacagtcattctggaagactgcgatgggagcaaagagcttcaacaatttaattacacctggttaagacttattaaatgtggagaatggtgtatagcccccatccctgataaaggagccgtactggcacccttgtgataacagaaacaaagggctaaaatggctgcataaatcaacatgagtctttcatccagaactggtgaatcacattgtttttgaaaacaatcagcaattattatgcttggaaggaaatttttctcaaaagatcctgaaagtagctgcctgtgacccagtgaagccatatcaaaagtggaaatttgaaaaatattatgaagc

SEQ ID NO: 45777 - DNA, 743 bp, Homo Sapiens
  misc_feature (672)..(672): n is a, c, g, or t
  misc_feature (698)..(698): n is a, c, g, or t
  misc_feature (733)..(733): n is a, c, g, or t
  misc_feature (743)..(743): n is a, c, g, or t
catgaccaggcccggtcaaggctgtttttgagtatgagtgcagtcgtgtccatcctccatggcacagccctcctgctgccaggacctgcttgaactaccagggccacaggagggggataatcagagcttgaggctggcactctgactgctggcttttcccaaacagcccaagggccggaacagcaggtggcttctcagttcctctgggcctggagtgacacaggaaggatctgcacttcctctgtgctgcttgccagccttgcagttggagttttaagcagaggtgacatctggttgacgcctcaggtgaaaatctggttttaaaatgtaacttctgcacaggctccttcctgctttgtaggctgggaagatgcccctggggtaggggtgctgattacctcagccatgtggaggaaggctggagcttgttcctgccccaggaataggccaggagggaaggccgcagcaggactgccgtggggagcacccctgctgcccccctctcactgaccaggggtggacaatgcccaagcagagggagcccccttgccctgtttggccaccctctggccagccaaaagcactctgaaaccaagaccttcccatttcctcctccccacatggtgctgaggctccctgctgcaatgcaattaaagcaattgattttctagngctggtatttggtgactaccatgcanaagggctatctttctattcacgtcaaacttttggntggggggggn

SEQ ID NO: 45778 - DNA, 923 bp, Homo Sapiens
  misc_feature (825)..(825): n is a, c, g, or t
ttcagcttttcgaagattatgaaacagatgaacctgcctctccctctgaatttggaaacaaaagcaataaaatattaagtgcaagccttccagagaaatgtggaaagcttcaatcagtggatgaagaatagctgccggtgtctacaatgaaacgaagatgtgtattttaaatgtttctttcttgtgaagagatgttctcgtttgcatactgctttttaaagactttgatttctccaagtgtgtatcatctgcactaggaactttgtttttaagcaataggtctggatacacatttaacttaggaggctcctccaatttgcctcaaacctcttacggagcttctcctcagaagtggtaccatcgccttccaaagtcagcactctacactcttgaatgtaccaaggatctcttggcgacagtaccaagcacggttctctacacaggtgactgaagttgcctctgtgttggctggcatccctgagtcccctccgggctcctacggagcctagaagaaccttaacttgcagaaaacttgagtcagaaaattctggaacttgaaaaagtactaagggcctccaactcgacttacccctcgctctaaaacactgccaaacctctcagagacttcttttatgcctactggagttcaaacacccttactttacctggctttatgcactttccaatttcctccccacctaccatccctttacctcctcaggttttggagccctgtccctcccactctgtggaaaccctcgcccctcccctgctgtcatttatcctacatccacgatacataacactctctacagatctacaacntccttccccccgcaaccgcctttaccctgttccttcttcatcgcctcctcctagtctctcttcgccaatcttctcactatctcaccctctcccacccc

SEQ ID NO: 45779 - DNA, 661 bp, Homo Sapiens
gaagcccatgcggatccaggtgcttctctcctataccaaaaagatgatgcgtttttggcctcagagtctctgatcaagcagattccacgaatcctcggcccaggtttaaataaggcaggaaagttcccttccctgctcacacacaacgaaaacatggtggccaaagtggatgaggtgaagtccacaatcaagttccaaatgaagaaggtgagtgggtctggcgggttgctatgggtgaaggtgttggcagggtctaaatcttatccaagtctctaaatatgccagtaagagcacccttcatgattgaaacttttggagtaaccctggtcttggcccgggtccaagtacctgctcaccaggccactgggggaggaaggacaggccatctgctattcgtccaccaacctgacttgatcctctcttccctcctcccaggtgttatgtctggctgtagctgttggtcacgtgaagatgacagacgatgagcttgtgtataacattcacctggctgtcaacttcttggtgtcattgctcaagaaaaactggcagaatgtccgggccttatatatcaagagcaccatgggcaagccccaccgcctatattaagggacattttgaataaattctatctacagttaaaaaaaaacaaaaaaaaactcca

SEQ ID NO: 45780 - DNA, 385 bp, Homo Sapiens
aaaaagttggccaagaagtatgatgcgtttttggcctcagagtctctgatcaagcagattccacgaatcctcggcccaggtttaaataaggcaggaaagttcccttccctggtcacacacaacgaaaacatggtggccaaagtggattaggtgaagtccacaatcaagttccaaatgaagaaggtgttatgtctggctgtagctgttggtcacgtgaagatgacagacgatgagcttgtgtataacattcacctggctgtcaacttcttggtgtcattgctcaagaaaaactggcagaatgtccgggccttatatatcaagagcaccatgggcaagccccagcgcctatattaaggcacatttgaataaattctattaccagttc

SEQ ID NO: 45781 - DNA, 589 bp, Homo Sapiens
gtccggaaaagatagccattatctttgaggaaatgtgtaccaaggcacaatcattaaaaggagttggaggcatcatttggttgacactgttgtcattcttgttctgatcattttggaccttgaagaaattggtgattctctcctagaattagacaaacaaagtgtgtttggaaataatgattgttttcctgccttaaaaaatatattaacagaaagcttttataacaggctgtttccctctggacaggtattaattctgagtaagaattttcagtgactacataaggatttgtgtaacttatgaaggaagagtccatttctaatcaaataattcacctgttttactagcttatagtgatctgatttcagaattttcctgtatcttttttacatacatcagaaaaagaaatgtttactatatttttggttccatttatgattgtattaagcatttgactataaggaaaactaacaattaaatcaattagaaaagcaacataaaattaaatgatatttaggaaatcagttatatgtgagcttgggtattcaaatgtcacaaataaaaagcatataaccattaaaaaaaaaa

SEQ ID NO: 45782 - DNA, 657 bp, Homo Sapiens
attttgccttacaagtatgtaggtcattctgtggtgggatttcccatcacatctagtaaaaaacaaccttttcatttccctcctttctaatccaagatcatatttttaaaaagtaggtttctgatgtgccatgaaatatttctgtgaatctgtgtttttgaccaaggaaacagctgagatattaaaccatgtggttgttccacggttcatctggctaccgttctgggtcccctctgaccacctcaaaaagaaaatgaaattgggagattaaatcaagcttgacctcctcttttaatgaggaactttcacgttgacttcctatctcaggatattcttcagtttcatactgctgaggagaaaggaacaagctgcagacactgtaactggtctccagatgtgtgtatatgcgtgtaaaacttcacaccgtgtgtgttgtgttcaatgttgtgtcaatctacaaactgactcaaacaacagtttaacgatagagaagacagtgataatggcaaaaaaaacacccaaccacctttttccgtcaaagtgcttgctatggctttcatagctgggacaagtaacattaagtattcaggagcaaagtgttcttgaaagaaaatggtgtgttgatctcataagaaaatgtacaaccaataaaagaca

SEQ ID NO: 45783 - DNA, 615 bp, Homo Sapiens
gtggcgtcttagcctggcccctgggttgtgccccacggacgcagtcgacccctctgagcgcctcgggagccccgaatagcagctgggagaaggggcgaggactgagcctcgctgcccgctgccggccgggctagagatacgggcgtgccccccattgtgcgcctcccgccccccggtcccctcaccctgcggccacctggggcgtggggcggtgctcctgcccgtgcacgtagccgctgcgagcggaggcctgctcacctggtgcctgctactcactcccccgggccggtgggcgaaggacacccgcaggaactcggcagaggagaaattcagacggctcccgagggtaggaaaagaccccggcccaccgtggaatctgaaacacccgaccactctgccatcccatgtttcaccagtcagacccccagggcagggcaggggaagcagaatgcaaactggggcaccgtttccctgaagcgtgttggccgcgtttgtcgtagtgctagaggtgcatacccttggaccccgaaaacccattcctgggaatttgctccaaggaagtaaagatgttacaaagatggacccacgaagtatggtcgttggttatgggtgggg

SEQ ID NO: 45784 - DNA, 486 bp, Homo Sapiens
agacgttttagagcctgatacattttggaaaagaaaaacaacttctacacctattctacagtccgcatttaaaacaataaattcctctattaaaaacgtaaagccgggtttgcttgcgtgccacagggaatatatccaggaaggttattatgaagctgtcaaatcaagatgatgggaataaggcagtttgaacgaacagtcttcccacagtcaggccatttttgctgatttggtttagaattttcagaaatacttagtacactccacctgttctttgatgggaatatctaagaaggctaggtaggttcttagggttagcctgagtcatctaggggctcaactccttgtgaggggaaatgacagtgaacaagttagtactttgctccacaaatgcatgaaaggacaaatttgcatcttctatcagtatttaacttccttttgctaatgacaaataaatatatctatatttttaaaaaaaaaaaaaaa

SEQ ID NO: 45785 - DNA, 633 bp, Homo Sapiens
acctcctaaattgttgggattacaggtgtgagacagtgcacctggccgaaatagctcaagtttctgaaaaacaaatctgaatctatttgttattcttagcgtcactggtctggctttcagaattaacatacaaggttgccacacctagttctgcccagctttatgtcttttattccagtattccaccaaagtttgttttcctgcattccagttctcaagtcttaagataaagattgtacttgacagtttagtatatccataaaactatttgaggtggttaaggttcttgggttcattttccttaatactttgctgaatattgtagattgtaggcaatgaaaaagtctactaaattaggaaaaccttgaataattaggtatcctaggtaagagcccctaaacatcaagcaatctgtgagtctgtaaagaaataaatattttttggattattcttatctaattccacccctgttggaagatgatttctttgttctttgcaactatggaagctgtgaaaatcatcacaagtgcctctgaaagcgagtgttaggttggttagagggtttaatattttctgcaatggtttgtaggaattttaataaatgtagtatattttctgagatgattttgtaaa

SEQ ID NO: 45786 - DNA, 436 bp, Homo Sapiens
cttttttttttttgattggaatttttttttacaaagtttggagcatggaaacaaatgaaaattgaacctgcttattttttaggatggtgtattgatggccccaacagaactttctaaaatcatgcgataaacatatatgatagtagttgtaaaatgcttcttgttttgaaaatgttgagtaattatcgatagaaattttgctgtccattcatacattccttcaattaactttcattgttaaaaaattgggggattgatgtttggtttggtttgtggggagtgaagaggactactggagggaccttgtttgcttgctttttttctttttttaatttatcatcaagtctaggaaaggagtaagttgccgacaattgtcacttttccctcctaagaaagtaacatgttaagattcccacctaccagcctgggtgacagt

SEQ ID NO: 45787 - DNA, 796 bp, Homo Sapiens
  misc_feature (733)..(733): n is a, c, g, or t
atgcactctgaagcattcttgaggttttccctttggttcatttgtcccatactctctccgttataccagtcttctcagatcttcacaacacaagtaaatctgttggaagcaaggtcttgtagatgtagacatatgggaaagatagagcctgctctcctgatggatgctgttgttgagataggttgggttggcctaggtaagaggaggaccagaagagatttatgatttcttggaaggctatgagttgctgctggccccatcataatcttttttgtttagcagaagtcaggaaacgaatactggtacacttacatttcttggaagagcagcagaaaccttgggatatccttgtgggtcaaggaggcaactctcctcacggattccctgatttgataacaacatactcatggaaacaccaatccaagttttcacaagtttctcttaaagttaacttaagacttcctagaccacgaattcctaccacgcaaggcctgtgaaaatattgtaaacttaatatccgacagggagatattcaaagatgccaaagtacctgtttttataaatattaccacatggtttaagatttgacttctcacataaaatgagtaaaaataacaatgatttttctgcagtaccttaatgatgctgtaattatgaagcagggttttaaaattctgccatgtagtgccttatttttatagtaatggtttctatgaaccttctaatttaatgngtattaagagatttaaagagtatgtaattaaaaaatatcttttccaacaaaaaaaaaaaaaaa

SEQ ID NO: 45788 - DNA, 575 bp, Homo Sapiens
gggcccctggacggcaaagtcgccgccctggccgccagcccggcctcggtggcagtggactcgggctctgaactcaacagccgctcctccacgctctcctccagctccatgtccttgtcgcccaaactctgcgcggagaaagaggcggccaccagcgaactgcagagcatccagcggttggttagcggcttggaagccaagccggacaggtcccgcagcgcgtccccgtagacccgtcccagacacgtcttttcattccagtccagttcaggctgccgtgcactttgtcggatataaaataaaccacgggcccgccatggcgttagcccttccttttgcagttgcgtctgggaaggggccccggactccctcgagagaatgtgctagagacagcccctgtcttcttggcgtggtttatatgtccgggatctggatcagattctgggggctcagaaacgtcggttgcattgagctactgggggtaggagttccaacatttatgtccagagcaacttccagcaaggctggtctgggtctctgcccaccaggcggggaggtgttcaaagacatctccc

SEQ ID NO: 45789 - DNA, 559 bp, Homo Sapiens
  misc_feature (534)..(534): n is a, c, g, or t
agcaggaggggttttggaggggacctgcttgcgacctgctgagggcttgtctgctcccacagcaccatctaagacccctcctctagaagtggggaaggccagatgtgtagcttcgggtatcagaggaggctgacctggcccccatcccaagttacaagaacttcagtgagactaagggacccccatcctagggatcttgtcagggttccttactgaccagaggagcccgcagcaatctccacagcctcctgggtctcacccctttcatgggctcttcatcaggacacttccctctcttttgggagcttctctgggcagaattgggctgggacctctctccccaactgccctgctctcctcatactcaccggtttgaccagaaattctccaaatccagccatagatggctgctgggtgtgcagcaggagaaggaggatggtcagccttggagcatctctcaattacgggacagtccctctttggaagcaggctcctgtgctttcctgtgttaataaacagtaataatcctttcanaaaaaaaaaaaaaaaaaaaaaggac

SEQ ID NO: 45790 - DNA, 535 bp, Homo Sapiens
ggcacgaggaaatcctcgcttctgaaagggcattgccgtggcaactgaacgatcctaactacttcagtattgatgctcctccatcctttaagccagctaagaagtattctgatgtttcaggtctgcttgccaactacacagacccccagagcaaactgcggttcagcaccattgaagagttttcctacattcggaggctgccctctgacgtcgtcaccggctacctggccctgaggaaggccacgagcatcgttccctgagccccagaaagggagatgaaatggaaagctgtttcaaaaacagactctggactcatgattttgtttcacggaaacaaactcgttctgctgtcaatctgaaaatgccagtgctgtgccttggaaagaatgtttggctttaatttaagggttttttttttttttagtgtgtgttttccctccaagtgtgatatttcctgctgaattaaattatacttcagttgttgcctcaagtaaaggtgtttgacaagaagatacaataaaaccatacttttcat

SEQ ID NO: 45791 - DNA, 704 bp, Homo Sapiens
ccgactacgtagtcggggctctaagaaatcatgttactaaaaaatcagtgtaaagtctgtttaaaataaaaaagaatgttttctatgtctgtatatcttttgtgaatatttattaggatttcttattaaaaaagtgcaatattaataattgtacattgtcatccagaaacaaaactattggggggactttattaactaacttcctgcagttgtgttcctgtaaactcagtagtgattattatatttttcctatttttaatagaacctggtgtttaactctggatccattcactgtacaggatgtgttgtaaaaactaacatgggatgctgaggcagtaagagggaattcatttgtggcataatagttatgcatggaatgataaagacagacaaattccatactactactaatgtggttaattatttctagttcgatagtgattgaaaatcagtggtcactatttacatttcctaaagagcaagcatcctccagctccatgttgggttggagcagttggcagtgggtctcagtgagctggcagaacctaggtttgggtgggaagcagaatgctcgttgcatgaaatgaatgtacatttaatgtttgttctgtgaattgcaactcagcagcaccacaagacaatgaaggctgctggctaatggtggaaggaggcactttctcctctaaaacacaaaactgtatttg

SEQ ID NO: 45792 - DNA, 976 bp, Homo Sapiens
  misc_feature (382)..(382): n is a, c, g, or t
tttaggtctttcatagcttttttatttaaaggtatatgattaagataaaggaaaagtaaaatgaaatgtttatgtaattttatattctcaaaattttctttaaatttgctctgttttctgacagtgctcaaagtgggaatttttttagaagtacggttatcaaaaaaacacatttcctatgggacacacatttcaaagatgtttagtacgataaaatttttagtaaaagggtagcacttttaagtcatttgaatagaatatttgtgtaatatttagtctagtgttagtccttaaatctgccaacaaaaccagatagatgtcttaaagtaggcacatttattccattgtgactgttaagaaataataaaagattaaattaccnaaaaaaaaaaaaaaaaaaaaaaaggaaaaacaaaaaaaaacaatcaagcggagaaaactaaacctaaacgaagctcacttgtacagggcggcgcggtatcctgaaccgagtcgtaattctaagctctgcgacggcccgttctaataccccggactggacaaagcagccctgctggctagcgaatcgaacggagacgaaccttcagtggggggggcagtaactggaactgggccaccttacccaacatgtaatggcccgcgtgtaaaggataaaagtgcaaaaagtgaatgagagtgttggggctaaactggactggggctaggctggcgggagaggaaaaactttcctgggctggagaatgatggccataaataatattttgaggagcggaggggagatgcaatctgaggtggggggagggaaaaaaaataaagggagcgcggaggctagttttcagggtgccgggcaggtctataacatgccgggggccgtggattgaggagacggagccaggcccaacactcgcggtgtgggggcggggcctttccttttggcaaaaaagttttcctatgtgcggatccctttagaagctgt

SEQ ID NO: 45793 - DNA, 606 bp, Homo Sapiens
tttttttttttttttgaagtcttgtataactaacagcatccccaaaacaaaaagtctttggggtctacactgcaatcatatgtgatctgtcttgtaatattttgtattattgctgttgcttgaatagcaatagcatggatagagtattgagatactttttcttttgtaagtgctacataaattggcctggtatggctgcagtcctccggttgcatactggactcttcaaaaactgttttgggtagctgccacttgaacaaaatctgttgccacccaggtgatgttagtgttttaagaaatgtagttgatgtatccaacaagccagaatcagcacagataaaaagtggaatttcttgtttctccagatttttaatacgttaatacgcaggcatctgatttgcatattcattcatggaccactgtttcttgcttgtacctctggctgactaaatttggggacagattcagtcttgccttacacaaaggggatcataaagttagaatctattttctatgtactagtactgtgtactgtatagacagtttgtaaatgttatttctgcaaacaaacaccttcttattatatataatatatatatatatatc

SEQ ID NO: 45794 - DNA, 579 bp, Homo Sapiens
aatcgctagaacctgggaggcggaggttgcagtcagccaagatagcaccactgcactccaggctgggtgacagagcgagactccatgtcaaaaaaaaaagaatgtgggaactcaaattttcatttttaatgtaatccccaagattttctccaagaaataaattgttgttttgtattttgtaacttaaaagcagctattggtaaatttctgagatatagcaggagaccaaaacatgtttggaaagagaataaatatatgaagagagactggttgttttattttcaatgtattgaatatattagactactatttattttctgagtggatgtgattaaatattcagacgtttagtgtatgattaagagtgagatagagatttctttggagtaattaaatccatcctgtcttttacacaatggacaaatcaagttaaaaaaatttttagatagcttagcttgttttctggtgctgttgacctgcaagagaatatacttttgcatatacaggtgaaagttttgcaatttatgtatacaagaaattgtaggcattaaaaatattttattgaaaaaaaaaaaaaaa

SEQ ID NO: 45795 - DNA, 836 bp, Homo Sapiens
tcaaaggagagtatccaaaaattccaagtataatgcagaaagcacagaaagggagtcacaagacactgttgcagagaatgatgatggcgggttcagtgaggaatgggaagcccagagggacagtcatctagggcctcatcgctctacacctgagtcacgagctgctgtccaggaactttccagcagtatcctcgctggtgaagacccagaggaaaggggagtaaaacttggattgggagatttcattttctacagtgttctggttggtaaagcctcagcaacagccagtggagactggaacacaaccatagcctgtttcgtagccatattaattggtttgtgccttacattattactccttgccattttcaagaaagcattgccagctcttccaatctccatcacctttgggcttgttttctactttgccacagattatcttgtacagccttttatggaccaattagcattccatcaattttatatctagcatatttgcggttagaatcccatggatgtttcttctttgactataacaaaatctggggaggacaaaggtgattttcctgtgtccacatctaacaaagtcaagattcccggctggacttttgcagcttccttccaagtcttcctgaccaccttgcactattggactttggaaggaggtgcctatagaaaacgattttgaacatacttcatcgcagtggactgtgtccctcggtgcagaaactaccagatttgagggacgaggtcaaggagatatgataggccccggagttgctgtgccccatcagcagcttggacgcgtgggtcacaggacgattttccctgacacc

SEQ ID NO: 45796 - DNA, 700 bp, Homo Sapiens
ttttgatgatcagaggcttgaggcttgactcttgacatatacactgaaaaaaatgggggttgtatgtatgtgtgtcctacccaaacctgtggccgccacttttgaattctcagattgccctgaattttgccacttttaaataatgtgctgaataagctcagcaactaaaaaccattacccaagaacgtttcttgtgagtgagctgatttattctgattcattatattccttttggtagattttataccccttggggaaataatacaacaaaaacatctcttaaaaatgctgggatggggccatatctactagcagaggccagatggtcagatatgatttctgcaaacccatcttgaccttgagtatgtgaaggggtactgtactttattcctgatacattttggtttccatgtaggtgttgagctcctggttttctgtgtttggatgatgaagatttggacccttccattcataatccctttctaagtgaagggagaggctggcttggctgttccttgttattccgaaagccctggtttggggcccatgttcacactggctctcagtctagtcaggtgcaatgttcttgagaggtggggacctaattattaccagagtagcagcaagagaggaaacgttgtgaattaagtattcaattaaaaggaaacatggatttctacctggaaaaaaaaaaaaaaag

SEQ ID NO: 45797 - DNA, 845 bp, Homo Sapiens
ttcactagtatactatctaaatttgctgctcactttctttaaactgtggcaattaaaggcatgtttatacatgacttaatcgtgaaatgtttgtcactcttactgcacagacttatctgcaatcataactggttagtttttttgttttgttttgttttattgtttttaatgaaactggtaccatctgtgctttcacaaaaaacttccaatgccatttttgagaactaacctaactagtcatgctaaccagaaaatccactggggaggaggttccttttgaaacaaaatgctgttcagttagtaaccaagttactttgattgcaaaagcagctgtgtttctgataagtactgaacaaatgtgtgtaattttctgtgccagacttatgactttgttttcaagcactgtaatgtgggatggatggttagaaacaataatatattagggtttctgtttaaccctttcaggactgaactgtatctccttttgttaattttcccctgtgttgtgataaatgtttgccagcattcagtactgtgttggtccagatgtaggtttatatgctcatttttagcttatttcttgtaccttgcagcatgctctacgcattcagtccttaaggggtttattttacaaactgtgcgcctgtaaggtttattagcaataagatagaaaattgagcaagtttataccataattttgtagaaaaaaagaatctgctcagttccatatttcatccgtgaaaaacttgcaatacgagcagtttcaaggaataaataaaaagaaatgtaaaaccccccaccacacaccaacctcaacacctacccctcctccaaaaataacaaag

SEQ ID NO: 45798 - DNA, 746 bp, Homo Sapiens
  misc_feature (682)..(688): n is a, c, g, or t
  misc_feature (696)..(696): n is a, c, g, or t
  misc_feature (704)..(704): n is a, c, g, or t
  misc_feature (708)..(708): n is a, c, g, or t
  misc_feature (710)..(710): n is a, c, g, or t
  misc_feature (712)..(712): n is a, c, g, or t
  misc_feature (715)..(716): n is a, c, g, or t
  misc_feature (738)..(738): n is a, c, g, or t
  misc_feature (741)..(743): n is a, c, g, or t
cccaccagcaccgagggccatggggccctctccatttctcctctcagcagaagtccaggttcccatgcagactttctgctgacccctctgtcacccactgccagtcagggcagtccctcattctgcgttgggagtctggaagaagactctcccttcccttcctttgcccagatgctgagggttggaaaagcaaaagcagatgtgtggcccaaaactgctccaaagaaagatgagaacagcttagttcctcctgcccctgtggacagcgacggggagagtgataattcagaccgtgttcctgtgcccagttttcaaaattccttcagccaagctattgaagcagccttcatgaaactggacacaccagctacttcagatcccctctctgaagagaaaggaggaaagaaaagaaaaaaacagaaacagaagctcctgttcagcacctcagtcgtccacaccaagtgacactactggcccaggctaccttctccatctggtttttgtttttgtttttttttcccccatgcttttgtttggctgctgtaatttttaagtatttgagtttgaacagattagctctggggggagggggtttccacaatgtgagggggaaccaagaaaattttaaatacagtgtattttccagcttcctgtctttacaccaaaataaagtattgacacnnnnnnnaaaaaaanaaaaaaanaaanananaannaaaaaaaaaaaaaaaaaaaaanaannnggg

SEQ ID NO: 45799 - DNA, 749 bp, Homo Sapiens
  misc_feature (588)..(588): n is a, c, g, or t
atcaaaatttggttcaagtaggctattctattttctttccttatgtcatctgataaaatggtgagctgtgagcttctaagtaaatgtctccctcaagttcctctggttcataatattccttgcagatgttgaacgatgggctggattgttttggaaccttgttccagcagagcccatgtgttcatgaagaaaacatttgcttacagcttatgactaccattgcctctctttcagtgttttttgttgttgttgttgttttggtttttgttttgttttgttttgtttgagaaggagtctcactctgtcacccaggcggaggttgcagtgagctgagatcctgcaactgcactctggctgggcaagagcgagactccatctctaaaataaaattaaagtaatataaaaaactgcttctcatgaaagctttggtataatcttacgaggtaacatcattgttttgcaactacggtatgtgttcaaaatgttcttctttgaccccacatttcattagatatatttttaagccattttaaaattgtttttctctgaaatttattgtgtttagtttacattgaggactgcatgctntctagtctgtatcatacattggaaacattttctagtacctgataaatgattttaggctgtttcgatgtgtacttgataaagatatcaaggaactttttctttatgctaacattaaaatttagttgaagtaacaaaacacccctatccacaatcctccacat

SEQ ID NO: 45800 - DNA, 526 bp, Homo Sapiens
tgggagtaatcttgcggccgccaactttttttttttttttttggatcctgcccctttcaccctttcatccgtcttttttttttaggaaaataacccttcttgcttcagcacttctccctggtccttgctgaaagacagagataaaaatccattctctgagccttgcttggttgtcagaggccatgagaggtgccagttataggtggatgtgccaagatgctggtgaacttggtcttcagctatacccaggctcagaaagggcaagagccatgctgcagcgtaggtgactttggaggtgcacttggggcccagggctttgagtgttgcgggtgtgcctgtccctccagatagtgctctgtttctctctgttgtccccctgcctggtcctctggggccactgtgctttctgctgtgtgcatttataaatgatgtgtattttatatagacctgcttgcattggctgatgctcctctaattccctgagtttgattcaaccacccttgggttgttttgctatggccttagc

SEQ ID NO: 45801 - DNA, 606 bp, Homo Sapiens
ttgattatccccataaattggcatttcggttaaataaaaagaatgaccaatttgtatatcctgtacaattctaacctaattcttttgcaaatgaataaccatatcttctaattaattttaatctaaataataattttaaggctacatacctgaatttctgaactgtaaagtgagttaatcatttaaagcatgatctgcacaaatctacttttgattctatgaacaaataaaacatttatattttgagggaatctcaattcatgcattatgccattataaacattcttagttggtgctttgttttttttgactctccggagtctggtgagccctacttggtcttacactaaatttttaaaaattcacatttcattcttttaggcctttaaacttctaatttttaggataacctaaaagtataaccctttgatagtcacataaaaccatgtatactaggtaaaatgtaggcaagaagaacattttaaccccaccatttctgacaatgccacatgttctaatactttcattgtgctgaaattttcattgcattagatacatttttaaataaatgggctactggccaaggcttggaaaaaaaaaaaaaaa

SEQ ID NO: 45802 - DNA, 708 bp, Homo Sapiens
ctgggtggcggtggtctattaaatatgaattgaatggagggtcctaatgccttatttcaaacaattcctcagggggaccagctttggcttcatctttctcttgtgtggcttcacatttaaaccagtatctttattgaattagaaaacaagtgggacatattttcctgagagcagcacaggaatcttcttcttggcagctgcagtctgtcaggatgagatatcagattaggttggataggtggggaaatctgaagtgggtacattttttaaattttgctgtgtgggtcacacaaggtctacattacaaaagacagaattcagggatggaaaggagaatgaacaaatgtgggagttcatagttttccttgaatccaacttttaattaccagagtaagttgccaaaatgtgattgttgaagtacaaaaggaactatgaaaaccagaacaaattttaacaaaaggacaaccacagagggatatagtgaatatcgtatcattgtaatcaaagaagtaaggaggtaagattgccacgtgcctgctggtactgtgatgcatttcaagtggcagttttatcacgtttgaatctaccattcatagccagatgtgtatcagatgtttcactgacagtttttaacaataaattcttttcactgtattttatatcacttataataaatcggtgtataattttaaaaaaaaaaaaaaaaaa

SEQ ID NO: 45803 - DNA, 642 bp, Homo Sapiens
catgatcctcagcctcaagaccatggatcgctttgatgaccacaagggccccactatttctttgacccagattgtgtgaccctgtgccagtgggggggttgagggtgggacggtgtccgtgttgttgctttcccaccctgcagcgcactggactgaagagcttccctcttcctactgcagcatgaactgcaagctcccctcagcccatcttgctccctcttcagcccgctgaggagctttcttgggctgcccccatctctcccaacaaggtgtacatattctgcgtagatgctagaccaaccagcttcccagggttcgtcgctgtgaggcgtaagggacatgaattctagggtctcctttctccttatttattcttgtggctacatcatccctggctgtggatagtgcttttgtgtagcaaatgctccctccttaaggttatagggctccctgagtttgggagtgtggaagtactacttaactgtctgtcctgcttggctgtcgttatcgttttctggtgatgttgtgctaacaataagaagtacacgggtttatttctgtggcctgagaaggaaaggacctccacgacaggtgggctgggtgcgatcgccggctgtttggcatgttcccaccgggagtgcc

SEQ ID NO: 45804 - DNA, 823 bp, Homo Sapiens
tgaccaggctctcacagagacggaaaaaaagaagaaaggtgagaagaaagtggaaattatgcaagatagaaagaaatctataaattttaaataaatttggcctggccctcatgggatgttaaactagagcaagaatggcaaagatgcttcttagctcctcaagcatatctgactggcatgatcctgcattgtggttacctggaagggaaaaacaacccctgggaattttatccaggaagttggaacaatcacaaacaaaagtgggaggcagaaggaagaggcacattaatcctagagaagattatctttttctcctcagaggcacaagtgaaagcagaagctgaaaaggctgaagcgcaaaggttggcggcgattcaaaggcagaacgagcaaatgatgcaggagagggagagactccatcaggaacaagtgagacaaatggagatagccaaacaaaattggctggcagagcaacagaaaatgcaggaacaacagatgcaggaacaggctgcacagctcagcaacaacattccaagctcaaaatagaagccttctcagtgagctccagcacgccccagaggactgttaataacgatgatccatgtgttttactctaaaagtgctaaatattgggagtttcctttttttactctttgtcactgattgacaccaacagaaaagaaactgtaggaccttgggaacaatcaacatttaaaataaactttataattattttttcaaactctaaaaaaaaaaacaataaaaaaaactttgtggcgcctcgggcccgaaaattttttaaaccccttgttgggccgggccc

SEQ ID NO: 45805 - DNA, 585 bp, Homo Sapiens
tacaggtgtcatagccacaaccatgactgacagcttcctcaccggccagatgctgctgcaggacctgaaggctgggttgctcccctctggccccaggcctggctacgcagccatccaggccctgctcagcagccgaggggtccggccagtctctttctcagactgggagaagctggatgccgaggaggtggcccggggccagggcacggggaagcccagggagaagctggtggatcctcaggagatgctgcgcctcctgggccactgagcccagccccagccccggcccccagcagggaagggatgagtgttgggaggggaagggctgggtccgtctgagtgggactttgcacctctgctgatcccggccggccctggcttggaggcttggctgctcttccagcgtctctcctccctcctggggaaggtcgcccttgcgcgcaaggttttagctttcagcaactgaggtaaccttagggacaggtggaggtgtgggccgatctaaccccttacccatctctctactgctggactgtggagggtcaccaggttgggaacatgctggaaataaaacagctgcaacca

SEQ ID NO: 45806 - DNA, 468 bp, Homo Sapiens
  misc_feature (6)..(6): n is a, c, g, or t
  misc_feature (152)..(152): n is a, c, g, or t
  misc_feature (161)..(161): n is a, c, g, or t
  misc_feature (204)..(204): n is a, c, g, or t
  misc_feature (228)..(228): n is a, c, g, or t
  misc_feature (235)..(235): n is a, c, g, or t
  misc_feature (277)..(277): n is a, c, g, or t
  misc_feature (284)..(284): n is a, c, g, or t
  misc_feature (443)..(443): n is a, c, g, or t
atccancggaaaagtctaaactagtagcttactaatttaggaggactggtgcagctacgatccagacagcagcctgttctctgagcttctccattccatggcttatccaggacttctcatttatcactctctgggttctatgaaattgtggngcaaagagnaaacaccctcaaccatagtaatgtatacttcaagataaataantccacatttcctatataaagttgntgaattntgattcaaaaatgcgtaagtattccaataagaaaaactttgnatgtagngatttctatgtaaaaatattgttattattattatattcaaatggtttatatgttttcattgtcactcagttaagcagccaattctggtagctggtaattccacaaagagaagccatctgccccaggagcaacagaccaagctgccttggtctgagaggntgcatctgtggaactcttgcgcaac

SEQ ID NO: 45807 - DNA, 546 bp, Homo Sapiens
tttgcttcaatacttctgccgctttggaaattgtaacagttaattactttgaatgttgctaaaaggacattttgtgtagggtcaagttatttttatatgagttaatgtgaaattgtaaatggaaatttttccttaaaatacaacacaatgatgtctgtataaatctgtctgtttagaatctgtgctgtgtaagggcattcgtactcatgctgttactgtacttatgcaccattcagacttgttagagtagatgtgggtttatgactgccaagtttgcccagtacagtagttttttatcactaaaagttggactcattgatggagtcctgtagtagtttcagtgttagatacagttttttccaccatacatctgtgcattttctctttaggtgactgtttaagaaatttgtgtgcatagttactcagtttttatgaactgttgtatcctgttaatgcatattgctctgtgactccagtatatcttacctgtactgaccaaacctaaataaagatttttattgtaactccttaaaaaacctcgtgccg

SEQ ID NO: 45808 - DNA, 762 bp, Homo Sapiens
  misc_feature (742)..(742): n is a, c, g, or t
cacagaagctattgaactctgacctgggtgagctcatcaacaagatgaaactggcccagcagtatgtcatgaccagcctccagcaagagtacaaaaagcaaatgctgactgctgctcacgccctggctgtggatgccaaaaacttactcgatgtcattgaccaagcaagactgaaaatgcttgggcagacgagaccacactgagcctcccctaggagcacgtcttgctaccctcttttgaagatgttctctagccttccaccagcagcgaggaattaaccctgtgtcctcagtcgccagcacttacagctccaacttttttgaatgaccatctggttgaaaaatctttctcatataagtttaaccacactttgatttgggttcattttttgttttgtttttttcaatcatgatattcagaaaaatccaggatccaaaatgtggcgtttttctaagaatgaaaattatatgtaagcttttaagcatcatgaagaacaatttatgttcacattaagatacgttctaaagggggatggccaaggggtgacatcttaattcctaaactaccttagctgcatagtggaagaggagagcatgaagcaaagaattccaggaaacccaagaggctgagaattcttttgtctaccatagaattattatccagactggaatttttgtttgttagaacacccttcagttgcaatatgctaatcccactttacaaagaatataaaagctatatnttgaagacttgagttatttc

SEQ ID NO: 45809 - DNA, 909 bp, Homo Sapiens
  misc_feature (40)..(40): n is a, c, g, or t
  misc_feature (76)..(76): n is a, c, g, or t
  misc_feature (82)..(83): n is a, c, g, or t
  misc_feature (862)..(862): n is a, c, g, or t
tgctgcaattctcggcatcatgtgcatgttaatgtcaggnaggaagaaaggaagagggagcactgggatgttacanttcatnntttgtcaggaaaagcaaagcctttccagacagctccgaaacttgcttacctctcattggccagcaccatcacttgaccacttgtccactcctagctgcaaggaaagtggcaaagtagaaggtatttgagaatgtctgctgggttagccaaaacaatagtgacttctacacccaattttctgggcactgcagaagtatccttgagtcctatgtgatcagagggagagcaaacctcaataatgaaacagattcaatttccatcacccagtgagacaccatgggattagaataaatttttaaaaaaacaaattgaaaaaaatgcatttttaaaacaacaaaatcagaaaggatgaaaggtgatatttctagcatatcagtttgtggtggtaaattaattaccttatacaaaggcctcagtgactttcttctccttacctaacgaatcatctttaaaataagtaaaataaagaaacaagagcagcagcagatgcttcctaaaaagaagttaccaaatctgttcaccacaaacctgagaattcaactgtggacatttggacaccagcaatgaacatgaaactcagcttatgaggcatatttggctaaaggtcaaggtgacttaaagttcatcataggacatctacaatttgcaaagcaggtgactggatatggactccttccagtctcatttaattggatatgccctacgtttaagtatcaaagtgagtctttctctataaatgaaagtcagtccactaaaactaaatctgtttggcagcactncatgttccttaattttaattcatgctgatattctttagacttgattt

SEQ ID NO: 45810 - DNA, 540 bp, Homo Sapiens
  misc_feature (298)..(298): n is a, c, g, or t
ttttttttttttttttatagtcaaagtggcagcagctcatttatttagccaaaaatagatactttctcgtacaatttggttcacacatatgtacatttctctgtatatatacacacacacaaaggcagacacgtttattctcactgaaactccaccccccaaaatcaaccggacaaacaaacctcacagcgaatgcggggtgccacagaagcgacttggggagggctgaggaggactagttttatttctttttcttactttctttgtttagttttgcttttaggtatttatacacggncatgcttacaagttgtaactatacagagcgattttttttatacaattattacaacgattaaaaaaagttttttttgtttttttgttttttttaaagaactaggatgaggagagagccgataagaccagggcggcgtccaaatggttctggggccgcctgggcacgggctggaaagctgtcttgagtaactttttctccacttccaaggcactacagcgctctgtatagttacaacttgtaag

SEQ ID NO: 45811 - DNA, 681 bp, Homo Sapiens
acatcccgacaggaaagactagcccatatatcctgcgaagaacaaccatggcaactcggaccagcccccgcctggctgcacagaagttagcgctatccccactgagtctcggcaaagaaaatcttgcagagtcctccaaaccaacagctggtggcagcagatcacaaaaggtcaaagttgctcagcggagcccagtgagattcaggcaccatcctccgagaacccaccacgaaatccgtcccagtcaataatcttcctgagagaagtccgactgacagccccagagagggcctgagggtcaagcgaggccgacttgtccccagccccaaagctggactggagtccaagggcagtgagaactgtaaggtccagtgaaggcactttgtgtgtcagtacccctgggaggtgccagtcattgaatagataaggctgtgcctacaggacttctctttagtcagggcatgctttattagtgaggagaaaacaattccttagaagtcttaaatatattgtactctttagatctcccatgtgtaggtattgaaaaagtttggaagcactgatcacctgttagcattgccattcctctactgcaatgtaaatagtataaagctatgtatataaagcttttgggtaatatgttacaacttaaaatgacaagcactaaaaaaaaaaaaaaag

SEQ ID NO: 45812 - DNA, 1043 bp, Homo Sapiens
aagacgtccacgtccggatctgtaaccaagagattgtcaaatttgacctggaggtgaaggcgcttattcaggatatccgtgattgttcaggacccttaagtgctcttactgaactgaatactaaagtaaaagagaaatttcaacagttgcgtcacagaatacaggacctggagcagttggctaaagagcaagacaaagaatcagagaaacaacttctactccaggaagtggagaatcacaaaaagcagatgctcagcaatcaggcctcatggaggaaagctaatctcacctgcaaaattgcaatcgacaatctagagaaagcagaacttcttcagggaggagatctcttaaggcaaaggaaaaccaccaaagagagcctggcccagacatccagtaccatcactgagagcctcatggggatcagcaggatgatggcccagcaggtccagcagagcgaggaggccatgcagtctctagtcacttcttcacgaacgatcctggatgcaaatgaagaatttaagtccatgtcgggcaccatccagctgggccggaagcttatcacaaaatacaatcgccgggagctgacggacaagcttctcatcttccttgcgctaccctgtttcttgctacggtcctctatattgtgaaaaagcggctctttccatttttgtgagatcccaaaggtgccagttctggccctttcagctcctgtttcaggatctgtcctggttcctgagctctaggctgctaagctgagccacacacccctccgtttgcaccagttgcctgcaggttggatggaacacagtgccccacttttctgcaagtagctggcttgtaaagggtgaacagagccatgggaggaaggtctggcattgggatgccgccctggggacatacgamcgcctccttccacattgtgcmyatgggaggcgctgctgstggagacttaagtcagcctcmrgacsgatgccctctgtytccgctccmtcgtgccttaatgcaractggtggrggagraragaggargaggaagdgagaaa

SEQ ID NO: 45813 - DNA, 649 bp, Homo Sapiens
aaattttttaagtgctatgaacactgatcaagtagttgtggagagatgagaagaatatatgcagcaaaggtgctgtgagcccagttccaacggctgtgttctggtaatcgtgcagaacagcatgtgggctctgggccttggcaggtgcacagacgggcgggcgtcacgtgtgttcagagcttgtctccacctcacggctctgtgctcttctgtgtgctgcgttgtggccgtgaagtgggagctctcctttccaaaggcagagcttactgtcatggctcagatgttcactcgcatcttcaccccaaacttccctgaattgcagtgatttctgttataaggcacatagcaagcctgtaccactctacagtaaaatctctacactaacagtttaaagcccgaaagctgaagcattcagcctctgcaagtgtagactactggactgtagtagaggcatttggaatacttacaaagtcaagtgctgtggcttcagttcccccggctccccacccctgacatccatacttatgttgtctggaagagccatggacacatcattattttcagcaaccagctgcagtgaaactccatttacagcaaccccatagtataaaaccacaatgcctcaattgtatgggatattgaagttcat

SEQ ID NO: 45814 - DNA, 861 bp, Homo Sapiens
catcctgctgttcgggacgttgctgatgaatgccggggcggtgctgaactttaagctgaaaaagaaggacacgcagggctttggggaggagtccagggagcccagcacaggtgacaacatccgggaattcttgctgagcctcagatactttcgaatcttcatcgccctgtggaacatcttcatgatgttctgcatgattgtgctgttcggctcttgaatcccagcgatgaaaccaggaactcactttcccgggatgccgagtctccattcctccattcctgatgacttcaagaatgtttttgaccagaaaaccgacaaccttcccagaaagtccaagctcgtggtgggtggaaaagtgttcgccgaggggcttgcttctgacatgtctgatgagcgcattcctgctgttgctcctggctattacaaggtgtcgctgtggaagactattcctgtacagctgtgtgaacctgcctcgtcacggcttcctctgcagtgctcttgaatatcccggttcctgcttaggccacagcagtgagtccagggagaagcatccttctactccctcactgtccaggttggctgaagatgctctgcacttgacctcctgacactaacttccttgccttttcccatggcaagagcaagtcatggactctgaactacttcctctccctttcttctatttattttattttattttatatttgtgatggagtctcgctctgtcacccaggctggagtgtggtggtgtgatcttggctcactgcaacctctgcctcccaggttcatgcaattctcctgcctctacctcccaagtagctgggaatacaggtgcccaccaccatgcccggctaatttttg

SEQ ID NO: 45815 - DNA, 911 bp, Homo Sapiens
ggaagggactaaggacagccatgaccccctgccatcctgggcagagctgttgaggcccaagtaccgggcaccccagggctgctcaggtgtggacgagtgtgcccggcaggagggcctgactttctttggcacagagctagccccagtgcggcaacaggagctggcctctctgctaagaacatacttggcacggctgccctgggctgggcagctgaccaaggagctacccctctcacctgctttctttggtgaggatggcatcttccgtcatgaccgcctccgcttccgggattttgtggatgccctggaggacagcttggaggaggtggctgtgcaacagacaggtgatgatgatgaagtagatgactttgaggacttcatcttcagccacttctttggagacaaagcactgaagaagaggtcagggaagaaggacaagcactcacagagcccaagagctgcggggcccagggaggggcacagccatagccaccaccaccaccaccggggctgacaccctgccccacagggaatggccttggcctggcccagcccaagatcccagcgttatctaactcctggagggtggactctgtcctggcttgtttggtgtcctcagatatctttcacacagtagagcaaaatcaccagccctgcactgatgtcactttatgtagaaaaaagccttaactggacctgtgttgccgtctatgcaaatgcatgcaaatactcccggcccctgggatgtgggccttgtggttttgtcactgttgaaagggggagatggggaaaaggagccctgttttgggggtggggggtctgggggaaaggcattctcgatttctgaaagcctaaaaaagcctttcccttccctcttggaatggaattggtcccccataagtgggggccca

SEQ ID NO: 45816 - DNA, 639 bp, Homo Sapiens
cgaattctatttttgtccttgcagacagaatataaaaactcctgggcttaaggcctaaggaagccagtcaccttctgggcaagggctcctatctttcctccctatccatggcactaaaccacttctctgctgcctctgtggaagagattcctattactgcagtacatacgtctgccaggggtaacctggccactgtccctgtccttctacagaacctgagggcaaagatggtggctgtgtctctccccggtaatgtcactgtttttattccttccatctagcagctggcctaatcactctgagtcacaggtgtgggatggagagtggggagaggcacttaatctgtaacccccaaggaggaaataactaagagattcttctaggggtagctggtggttgtgccttttgtaggctgttccctttgccttaaacctgaagatgtctcctcaagcctgtgggcagcatgcccagattcccagaccttaagacactgtgagagttgtctctgttggtccactgtgtttagttgcaaggatttttccatgtgtggtggtgttttttgttactgttttaaagggtgcccatttgtgatcagcattgtgacttggagataataaaatttagactataaaaaaaaaa

SEQ ID NO: 45817 - DNA, 600 bp, Homo Sapiens
  misc_feature (577)..(577): n is a, c, g, or t
gtaaaacgctgtttgtggctttctgttgcacagttaaagctgacccaccctatgcacaagacaatcaaatataaatctgtcctcctcaggatgcagataatactcatgtaaattatggagcacaatgtaagacaaaaggagacactttacatatgtattgttgatacagaaattatcagggcatgaatgagctgatgtgacattatgccacttctttcttttggttctcccttattaacttggcatttttaatttgaccatagagccaaattagttctccatgctttcttcgtagaaaatccttttttttccataatgttttcatgccctgagaatcagaaaaatactacagaatagaaaaagatttacagtcattggaagatttgtgttttgcaaacagtgttaagtgatattgctagatggtgatatttttttcagcctaaaactctgttgaaatctgtgatcaaaatgttttaaactatccaaaaaaaatttgtatatttgggaaaaatggatttttacatagcttttgtatgcagatataaaactgtaattatgaatatagtgggcgtagatnaactcataagcttaaattctaaa

SEQ ID NO: 45818 - DNA, 562 bp, Homo Sapiens
gtccgccccgcgtccggtatttatgcagactacaaatctgatgaaagctatactccaagcaagatctcagtcagagtaggaaataattttcacaaccttcaagaaattcggcaacttgagttggtggaaccaagtggctggattcatgttcccttaactgacaatcataagaagccaactcgtacattcatgatacagattgctgttctagccaatcaccagaatggaagagacacccatatgagacaaattaaaatatacacaccagtagaagagagctccattggtaaatttcctagatgtacaactatagatttcatgatgtatcgttcaataaggtgactttaaaatgagacgaaaatcattaaacgtatctttgttttatcctgtatttaaataatatatcatgtacctttattgaacaaggcatccgttatatctaattttgtatatgtttaaaaatattttattgtaactttgacaaataaatttggggtcatattatctttattttctttaacatgtaataaagctcacatattttacattactaaaaaaaaaa

SEQ ID NO: 45819 - DNA, 715 bp, Homo Sapiens
tacggtccggattcccgggatcatgacaccgggcacccagtctcctttcttcctgctgctgctcctcacagtgcttacagttgttacaggttctggtcatgcaagctctaccccaggtggagaaaaggagacttcggctacccagagaagttcagtgcccagctctactgagaagaatgcttttaattcctctctggaagatcccagcaccgactactaccaagagctgcagagagacatttctgaaatgtttttgcagatttataaacaagggggttttctgggcctctccaatattaagttcaggccaggatctgtggtggtacaattgactctggccttccgagaaggtaccatcaatgtccacgacgtggagacacagttcaatcagtataaaacggaagcagcctctcgatataacctgacgatctcagacgtcagcgtgagtgatgtgccatttcctttctctgcccagtctggggctggggtgccaggctggggcatcgcgctgctggtgctggtctgtgttctggttgcgctggccattgtctatctcattgccttggctgtctgtcagtgccgccgaaagaactacgggcagctggacatctttccagcccgggatacctaccatcctatgagcgagtaccccacctaccacacccatgggcgctatgtgccccctagcagtaccgatcgtagcccctatgagaag

SEQ ID NO: 45820 - DNA, 580 bp, Homo Sapiens
  misc_feature (560)..(560): n is a, c, g, or t
  misc_feature (575)..(575): n is a, c, g, or t
  misc_feature (577)..(577): n is a, c, g, or t
agcagcctttctagggacagctggaaaggacttaatgtgtttgactatttcttacgagggttctacttatttatgtatttatttttgaaagcttgtattttaatattttacatgctgttatttaaagatgtgagtgtgtttcatcaaacatagctcagtcctgattatttaattggaatatgatgggttttaaatgtgtcattaaactaatatttagtgggagaccataatgtgtcagccaccttgataaatgacagggtggggaactggagggtggggggattgaaatgcaagcaattagtggatcactgttagggtaagggaatgtatgtacacatctattttttatactttttttttaaaaaaagaatgtcagttgttatttattcaaattatctcacattatgtgttcaacatttttatgctgaagtttcccttagacattttatgtcttgcttgtagggcataatgccttgtttaatgtccattctgcagcgtttctctttcccttggaaagagatttatcattactgttacatttgtacaaatgacatgataantaaagttttatgaananaaa

SEQ ID NO: 45821 - DNA, 463 bp, Homo Sapiens
  misc_feature (44)..(44): n is a, c, g, or t
gataaaatagcaggcctgctgataaaagtttatctgaatgcatntgagaggaaaagtccagacctaggactagttatggcagttggagagaaagaacatcgggatgtttgaaaatatgccattgactatcttaactactgtaattttatcatttccaacgtcatctaactggggactagaacaaactgtgaattcactttcagcaaccagagggcgctaatccacacccacatcgctctgccctgttccacccagcaggggcaacaaggatataacttggggttctcggtattcttcctttagtcctgacacaggcagccttgcactttgtagcagcaggagggcacttgctttaagcatatctttcgaaaggcatccattgagagaataatgcattctccccttgctgtgtatgacatggaacagtatgaccattgcactaaaaaaaaaaaaaaaaaaggac

SEQ ID NO: 45822 - DNA, 814 bp, Homo Sapiens
agaggtaatccggtggcgattggtgttggcggtctggctcagctgggcagggggtaactttactgatttgggggtggtttttagtttaatttttcttttctagcttcccatcgacggtcagtgcgcacgttgtaatcagctgaggccatgtcaggagacggagccacggagcaggcagctgagtatgtcccagagaaggtgaagaaagcggaaaagaaattagaagagaatccatatgaccttgatgcttggagcattctcattcgagaggcacaggtttagtgatataggattacatttccttctctatgggtccaatcacactacttggttctgcagtgaataatattttcataatcctaacattgtaaatgctgtttattggttttcaattttagaatcaacctatagacaaagcacggaagacttatgaacgccttgttgcccagttccccagttctggcagattctggaaactgtacattgaagcagaggttactattttattttattttttcttatatcagtattgcagcattcactgtagtgatagaaaacaagttaggaacatagccaattaggacaaggaggatttaaatgtgtcttacctttattttgtaaaataggtataaaggagtaattaaaatgaatttttgaaatttgggtcttttacaagctgatgattgttgcattttggagtttgcacaacatttaaacagtttcaatggtattggagtggcttagccctttattacttgtcatgtggtcattaatgggctctgtgccattaattagactcatttttctttatcta

SEQ ID NO: 45823 - DNA, 361 bp, Homo Sapiens
gacagcctcaagtctccttcgagctttatatccatttggggatgaagtctactttgacagctagcaaggcgacatgcaactgttgttgaatgatgacagcaattcaggaaagacttaaatatgaaagcaaattgaacacatcgggtgtttgttatcagaaaagagatgagatgagataagacttgtttattgactagccaatatgtcattaaaattaaggtttatattgtgaagcttttttgaaattttacttttttttgagagttttgctctgtcacccaggctggagtgagccgagattgtgccaccgcacaccagcgtgggtgacagggcgagactccgtctcaggaaaaaaaaaaaa

SEQ ID NO: 45824 - DNA, 652 bp, Homo Sapiens
ttttaggagttgtatgccggaagggagttgaagaccaactatatatttcacaatatcacagctgcccagagtgagatcggcagcctttaaggtattcatccagctgaatgttcccacatgccctcaagtacttaccacccaactctgtagcagtgcacagtggacataaggtggtgttggcagtctcagtcctatttaatgatggccagagatacctcctggtcagccaaagccctggctgactgccaggcagttgcgcagtagctcttcctgtagtgaaactgttcttcttatcattgttgactaaactctgttggaagttgtctcactagccatatgagccacagctgtctctatcctgaatagcttaatgagccataggttgctgactcctggactgcaggaaccttttagttgcctctcgccacagttgaatttccttctggacctccatctctcttcatcacagttgtcaacacttgagccttctcccatgttacttcttatgcagtgtcccttctacttaactgtaagttttataaaagcagaaaaccgtcttattcagttttttgcttatgcagtaaacattgaataattgtcaaatgaataaataattgtcaaataaatgaatatattgaaaaaaaaaaaaaaa

SEQ ID NO: 45825 - DNA, 491 bp, Homo Sapiens
ctcgagcggcccgagggctgcgaggccagggaagccctgagtttctggcggggctgagcagtgggggagcattgtgttgtgggtgtctgtgtgtgaggtcaccctcaaactgcaccgccggccagataccctcctgaccccgaggacttggtctggtctctctggtggctacaaccccagagttttaaggacttggaaaggaaagcacaatcagagaagaaaacagcccccgaaccagcaggagtggcctggcacatggaccggcctgagcgatgtgcactccacccaagccaggctcccagggggcctgatttctctctcactgtctctttttttaaaatggttgcacggctctgccccatggggggccttttttacacactgcgaggcccagctttctaggggacttttgcacatgtcatgcagctcagctgggagctgcttaggtggaaaactccaaataaagtgcggctgtcgcaaaaaaaaaaaaa

SEQ ID NO: 45826 - DNA, 570 bp, Homo Sapiens
aaaaatggtaccaaaccaccactggatgcagatgtaaatttggaagcaattgctggtgaccttcgctgtgattgctatacgggcgcagatctctctgctttggtacgagaagcttctatctgtgccctgagacaggaaatggcaagacagaagagtggaaatgaaaaaggtgaactcaaggttagtcataagcattttgaagaagctttcaagaaagtaagatcatctatatcaaaaaaggatcaaatcatgtatgaacgtttgcaggagtccctcagccggtgatgtctccagcagccggcttagaggagctagcccatcaagccggcagagaatcccccacacgctctgaaggacccactttcagctggacacaggcgcggcctcatgtaaacattttattttcaaatgaatgaggccaagctgaagctgaagctgaagattcttcccatctggccagccttgtgtgaaaatgccttcttcctctttaagaaaaaggacaatttttaaactgctgaaataaaatgactgttacatttttcaaataaaacttttactttgaaaaaaaaa

SEQ ID NO: 45827 - DNA, 868 bp, Homo Sapiens
  misc_feature (631)..(631): n is a, c, g, or t
aaaaatgcaccccatgataatcagtttcttacaacatactgtaatagtaccggcttcgttgtttttagctggaatcattagcttccatttttagaataacagctattggctaaattaggctacagtaggccattaagatggatgttggaattaaaaacatttttggaaaaaagcctgctttgagcctttgttataagcccttgggtagagatctgggtcctgtttctgatttcttgtgagccttcactctgacagttttgtttccagaaacacactcttagcctgctcctgaaatgggaacagacaggccaacttcccctctccagtctcccctgcgggtcaaagctttactttcctgtcatgttaagaaagaatagatttaaccttgataatccatgtagtattctgtatttttaccttttccttatctgaaaaaaagtgtatatatggcatggaattgattgcacaggcacatggcatgttggcttgtgaaccaattgttagaatttcaagttaatcattagaatgatatctttcaaattaagttatattaaaaccaaggtagcatctaaatcattacttctaattattcgcgttgttttgtcgtgatattagcgtaagaagtatgganaacgtataccagtcatagtgtcggagcgatccagggattccacctgacctgatgctcatattgacatatacttcaggggttgtcagatgtcatcagcagagacaagcgagggcacctgaatccaaggggggaaaggggggaagagaacagctgggtggggttttgttcgccccgtgtataaaaatcggccggcttgcggcggggcatcccccgggccttgggggggcctccccgacg

SEQ ID NO: 45828 - DNA, 569 bp, Homo Sapiens
aagaagtccctgcctccagaccctgtcatccaacagccaccagacccttttggagaagggtgtgtggctcctgtgctgcccgcctaccccgtggcccctctgcttttagcctagtctgataacctaatgcccacttgggagagggatagaatgacttgagggcagccagtgcttaagccttctcccttatgcaaacagccactttgtccatgggctgttagcctcaaaggggtggggaaaagcccatacctcctgggccagtcctagccctctaggcctctggctacaggcccagcctctgcagtcacatgaggtctccactgaactctggctgctgaggcttgcgggaagattcgtgagcatggagctgcctggggtctgtgtgggaggcaaacctaagaatctttgaagtcaaagcaaagaaaacgaattagaggtcaaggggttgaagaccacctttgagatccgagatctggtcacacctaaagtcattaaaatcactgaaatgtttagatacacagcccaataaattctctttataaaacacaagcagtaaaaaaaaaaaaaaa

SEQ ID NO: 45829 - DNA, 690 bp, Homo Sapiens
  misc_feature (674)..(674): n is a, c, g, or t
gcggccgcggctgtaggctttttttttagtgatgactattatcatcatcctggttgttcttagtagtccctaatgtaaaatagtattatttctaattctgtgaacccagggcatgagtctagacaagttgatttatgagctgaatgatttgtgaactaaattacatagacaaaacattcggaagtattgtctaacaaatgtttagggccgggtgcggtggctcatgcctgtaatctcagcttcccaaagtgccgggattacaagcttgagctaccgcgcccagccaacacatcacttttatcttgcagctcccgagattctcttttctgtgacttttaaaattgtgcttacatatgtgtttgatataaatatctttgtattctagtttgtttgttcagcttcttcatttttacatcacttttttaaaagatttctgttattttttatattttttacctccataatttctgtttttccaatattttaaatatttctgttcttatttccagttttctgattttctgtagttctctgtgttcatattttactcattgagtattcaatttattttgtttttaaaattaatgtatacattttttatttctttctgaaaaatttataataattttgttggtactacattgccctgttttgtatatattctaatcttttanttaaatttgcacatta

SEQ ID NO: 45830 - DNA, 880 bp, Homo Sapiens
tcggatggccctcactgcaggacaggtttagctcactgaaaggggtcccaacagaggtgaagatccaagaaatgacgaagctgggccacgagctgatgctgtgtgcgccagatgaccaggagctcctcaagggctgtgcctgcgcccagaagcagctacacttcatggaccagttgctcgataccatccggagcctgaccatttgggtgctccagttgctcgagcctgatggagcacttcgaggacaccagggagaagaacgaggccttgctgggggagctcttctctagcccccacctgcagatgctcctgaatccagagtgcgacccgtggcccctggacatgcagcccctcctcaacaagcagagtgatgactggcagtgggccagtgcctctgccaagtccgaggaggaggagaagctggcggagcttgccaggcagctgcaggagagtgctgccaagttgcacgcgcttagaacggagtactttgcacagcatgagcaaggggctgctgcgggcgcagccgacatcagcaccctagaccagaagctgcgtctggtcacttccgacttccaccagctaatcttggcttttctccaagtctacgacgacgagctgggcgagtgctgccagcgcccaggccctgacctccacccgtgcggccccatcatccaggccacgcaccagaatctgacttcctacagccaaattcccagaggccaacctaaaaaggcggctttagtttccgatgactacagttccccacgtgcgccaactctgccccttgggttcaaggaattcccgggaggtttcatttttgggtttttccaaagccgaagaagggctcccgaagcccttttccaaaccctcctggaactgg

SEQ ID NO: 45831 - DNA, 711 bp, Homo Sapiens
ggtttctgattggttgcatcatgtatgacgtttgcaaggtgcatgtggaaggctggtcgccccaccctaatcttatgcaaatgggctttccagttgattgggtccatcttgtgtaacacgtggctggcagagaagggaagatgaagccaccatcttgaaaatgtctagtccttagtttctgctggcattcacccatgcaagctgccagcttgtctatgtctgcagctcaactttacaggctgctctttgttagcaaatgatttggagcttcttttcattaaagaaaaaagccttaccgaggactcccatacccttgctttctgcttaagtgatttcttcttaactcctatgtcaattttatacagcatgaaataatgatgtatctataaatgagcctttgcaagattaccatttatcaaagaaaaccagtgatgtttagttaactgtttgtaaaaataaatggttagtagaatgtctaattcaataaatgtttcataaatgagtaaatgaatgttttaatttcaataagattgattcttgatcaaatgttcccttttaaatctaattttaaaaatctgagtttgatttttttaaaaaaggttaatataacgtagcatacaatactgcaatttcactccaggttatctaccaagagaaatgaaaatatgcccacatgaagagttgcacacaaatgttctaagcgtgattcat

SEQ ID NO: 45832 - DNA, 647 bp, Homo Sapiens
gccgctcaccaggccctggcgacctgagcatctacgacaactggatccggtacttcaaccgcagcagcccggtgtacggcctggtccccagagcaagacttcagccaggatctaccccacctaccacacagcctttgacacctttgactatgtggacaagtttttggacccgggcttcagcagccatcaggctgtggcccggacagcggggagtgtgattctccggctcagtgacagcttcttcctgcccctcaaagtcagtgactacagtgagacactccgcagcttcctgcaggcagcccagcaagatcttggggccctgctggagcagcacagcatcagcctggggcctctggtgactgcagtggagaagtttgaggcagaagctgcagccttgggccaacgcatatcaacactgcagaagggcagccctgaccccctgcaggtccggatgctcaatgaccagttgatgctcttggaacggacctttctgaaccctagagccttcccagaggaacgctactacagccatgtgctctgggcacctcgcacgggctccgtagtcacattcccgggcctatccaatgcctgctccagggccagggacacagcttctggatctgaagcttgggctgaggtccagagac

SEQ ID NO: 45833 - DNA, 733 bp, Homo Sapiens
cacagtatttgggaaaagaggcaaggtttatacaagtagcagttttaaaaatgtaactttgttctactatcaattacacattaacatacacacactaattgaaaatatgctacaaccatgtctggaaaagcagtttaacattttctaaatggattttatcccacatttactgtataatgtagctgttaatactgcacaagtacacttagcgataatgtttactttactttaaaacaaagggattttctccctcaaaacaagttttcaacatcaaacctatgcttataaaaatttaaaactttcagcagtctatttcaaatgaaaaccattacaaacttctcaagtgttctctatattccaggtatgtcaacctagttatctagtgtagaatccttcagagatatttcagtctctctctcttcactggatggcctgaagaaaagggggaaaggtacaactggaattaggattttctcctgatgaaggaaaaaaagacattaagtctgcattatatttttaaacccatgaaaagactgaaaccaaccaaacaaaagaaaaacttgacttgttattagaacagtcattattattttttttcttcttcaaaactgttattttaccatgttgtatcttcttcccaaagtaatatgcagatgaagcaaaataactcagcaaagtgtcatggaccaagccctttccatcatttctagcattaaagtgaattctctttaag

SEQ ID NO: 45834 - DNA, 894 bp, Homo Sapiens
  misc_feature (690)..(690): n is a, c, g, or t
  misc_feature (692)..(692): n is a, c, g, or t
  misc_feature (721)..(721): n is a, c, g, or t
  misc_feature (742)..(742): n is a, c, g, or t
  misc_feature (845)..(846): n is a, c, g, or t
  misc_feature (851)..(856): n is a, c, g, or t
  misc_feature (858)..(858): n is a, c, g, or t
ggagatctctggatccatgaccatccttttccttttattgtgaaagactgtctaccatgtactttgactaaaacactcacgtaaaaacatggctgcaggatacgtctcaaaatatgacaaacgttatttcacctatactgtgactttacatgtaaacttcaaaaatcacatgctgtacatcaaatttttagattcaaaagatatccctgttttcctaataatgtaaacagtaaaactgagggtttcagttaaagggataattcgtaacaaaatcccattgttgaaacaatggtcaaacataaacatcttataattcagatctgcattcggtaacaggagaattgagagttttgatgctttgctggttttcccacagtgggagatgtagataccattgccccaaactatgcacttttcaggtaagctttacttttattttgtagcattaattcctatattgcaacgtaagggtgaacaatgaagctccaggcaagaaaagagaagtaagcagttttcctggacatattggccgaggtgaaaaatgtatagagaatcactggggcatcagctgcttgttgcgggaggggtgggggctctggacacagggggtcctgacaaggctggggccagaaccctgaaccagtacacacggagacgccagcattcttccgtccagtgctgggggctcangntatcagtgttagggagagtgtctgcgtgncggggtaaaaatggaacattncgctgtagggttttttccttggaatcatcatcattattataataatcattattattatcttccttattctgaatactgtctcacattctttcactcccaaaannaaaannnnnnanaaaaaaaaaaaaaaaggggcggccggctctaaaaaa

SEQ ID NO: 45835 - DNA, 637 bp, Homo Sapiens
cctgaggtcatcttagtcttccctcatcccccctgcctttccttcacagtcagcctgcatggtggtctgaggccttcccccctacagcctctcccctttatctttcacggtaatcacccctcattactcgtacttctaactccatcttgaaagctgcttcctggaagatccaaacggacacaaggagggactgaaggattagaatgagggaagtaacccatgcactgcttatttgagatggggaaccgaaggactttggcagttcctacacagagacagatggcagagatgacaaggtttctcagagaatgcgtgagtaactggaatggcttttcctgatgacccagacagcctgctcaagagcacactgttgcagctgccctccttggatggaactatggaatgatttttattcttctacttcccaggtgaatgggaaaccaaggacacagtcagcatttaacaaaaaggaatctgcatctcagtcagaactgtattgcatttgcttctctctggattaccttgaagttactccccttccctcaataataatggcattatgaaaaaatttggaattgatcaaatgaagtaaagagtaaacagaggaaagactaaaaaaaaaaaaaaaaaaaaacgc

SEQ ID NO: 45836 - DNA, 765 bp, Homo Sapiens
  misc_feature (47)..(47): n is a, c, g, or t
  misc_feature (693)..(693): n is a, c, g, or t
  misc_feature (736)..(736): n is a, c, g, or t
  misc_feature (740)..(740): n is a, c, g, or t
agcctgcgctggcagtcatctgtcaggaggggctctttgtagcccanagtgctgtcaggttggaacctaaaaccaaaggagggcatcggcggttaggtgaagaaaagaagtcttttggccttttttcctcttcaagtcagcttttgataagatctagtaataataaggggatgggtgtggctgcaggtgggacatgtcggttctctgtcctgtcacagctaagaactaagaactttagagtctttcagccatagagggtcctgtcatccattgaagggatcagtccattgggattttgccagttttagcattgatgctgtgtcctgggaaacccctgaatacttatcatagcagaagttcagccactgtagccctacctcaggaccgcttttatgggaaagaataattcctttaactgcttgagccatttgagttgtggctgcttttggtacttgtaataaattgaaagcatcttgaatgttctgggacagtaaaagaatgtgcctttgtttctgacagcaattataaaatcaattatatgtttatattctaaaaaatgttttgagtaatgctgacatcattggaaaagtgcatcacttagaaaatgtatctgtgtgtcaattttgtttgttcaaaatcagtttcattaattttgtgggaagatacaccttgtacattttacctaattaaaanaaatattgccagttgagtatacttgtgatatattcaaagatanatanactttttcaatcttagatattcata

SEQ ID NO: 45837 - DNA, 654 bp, Homo Sapiens
  misc_feature (595)..(595): n is a, c, g, or t
  misc_feature (654)..(654): n is a, c, g, or t
gggtacctggatttgtgcaatatgtaaaaatgtatcaaatgtattatagataaggtgttaggtgcaaaggatgtctaataatccctgcacacgttttgaacttgcagtgaagtacactgctgttccttgcttcctggggcacttttctcttggttagtgtttaaaaattatcttcgcttttttaatgtggcctcaaatgtcatgccaattttcacatcttccacaaactccatttagggagaaatgtttaaatctctggtataagtttactccataccagagtaaactatatattactctatataagcagtcttgcaataactaatcaccaccatagaagaaagaaacagactgcaaggaacagagttgagtgtctggagtcatcaaaggcattaaaaactccagtaaaagctggggccgtagcaaaaatcatgaaaaacacttcaacgtgtcctttcaatcatccaattaaatgtgggtagattaatgaaaatgtattacatcaatattaactcatctatagcactttgagtatctttgtagttcatgatatcctatcctataatgtggaggtaaatgattttatatgcattgngggtcatatataaaaacttcaatgtaatttcactacaataaattgccttccttattcgn

SEQ ID NO: 45838 - DNA, 575 bp, Homo Sapiens
tggtaaactataaattggctgtatttccttgccggttttaattttaaggaagcatttacatgaaaagaaaaaaggatcctagtagtctgaatttcctctcaagtatgctagaaaatactttctatgaatttacaattaactgcaataagaagtgggttagcattcaagtaaggtcaataccccaaatgagaaactcttcagttagaacacattagtggttgtaacacagaggcagtagataaatatttgaaatgtgagcatttctaaacttggaaccaaatggaaagggtttcatgaggtgacagtggcttttaaacattcatttgaccgattattctaattttccttgttaaatcattgcaacagttgcatgggggagaatggatattttttgaagaattgcttactccactttcaatttttaaaaatcgaggggattaaaatattactttttaaatatgcataaaagtatcttaactgtaattacattttcagttgctttgttatagtagcatgcatattaaatataaaatgcatttatgaaaatttttgtaaaaaataaaagattttttcat

SEQ ID NO: 45839 - DNA, 729 bp, Homo Sapiens
gtaagcagtgttctaaagcctttcctttttacagttcctatctaagacatgaaaaaactcacactggagagaagctgtatgaatgtaaggaatgtgggaaagcattgagttctctccgttccttgcatagacataaaaggactcactggaaagatactctctaaatgtatggaatgtgggaaaacattcagtactttaatttcagaaacttgaaagaactcactttggagatagaccctatgaatgtaaacatgggataaagccttaagtagtttcaatttttttaaatacagttatcccccaatatattgcaggggattggttccagcaccctctaaatccacagatgccaagtcctttgttatatggcatatttgcatgtaacctatgcatatcctccagtatactgtgtaaatcatctctagatgacttttaatacctcatgcattgtaaaagctatgtaaactagtgtttgattgtattgtttagagaatcatgacaagaaaaatagtctctacatgttcgatgcagacacaaccattgcaggcccacctacgtggtatatgtcacccagaacattaagaattgttttaacattcaagaagagcaaaaaaagagagacgaagaaaaagaagggagagagggaaagagagagaaaagaaagaaggcaggagaaaggacaagagggaaggcacagaagagaagagagagagagagagagcgcggagg

SEQ ID NO: 45840 - DNA, 425 bp, Homo Sapiens
tgagtactgtgagtatagcactacagatgcctcaggctttaaacggcacgttatttccattcacacgaaagactatcctcaccggtgtgagtactgcaagaaaggcttccgaagaccttcagaaaagaaccagcacataatgcgacatcataaagaagttggcctgccctaacaatacttctacagaacgtttgtagagatattggccttgaagcagaaaattcattttaaagccaatcagtctcattcacatacaatactggatattgatttatgctgtgtacaaatagaattattacttctagctgacttttttttaaatatacattttgctcagtagtgtgttctgaattctattcagtttgtttaataaatagggaaaactggcaacatgctagttacttttaataaagtaatccctgatt

SEQ ID NO: 45841 - DNA, 692 bp, Homo Sapiens
ttttttttttttttttttagagctatatatgtatattttatatatatagaattcattcgtgcacaattcattaaatgaacgtctcaaaaattaaaaaaattataagatacgtatttctttaggcctttgtgtttttaaaattaaaaccaacaaaaagaagtctccctctccactccacccagcagcaagggcagccggaacgcttcgctccagctacctggcctcccgcaagagggttcccccatgagaccgttagtctctctttgcctggctgactacctgcatacagtaggcactcactgctggagtgaggcactgactcctccaaagattgcagggggcggaggagggaaccacgaaggcctgggagggggcatctttggcccccactaaccatctccctatttctgcatcctggtgaccgtcagcaagagatgagtcggggagaccctctcctggagttctagcccctaattctgggctttctatatgagaggacatgcagatagggaagaaactaaaacctttcaatgtcttccttttttctttaaaagtgtttcctcaaaccatccccgtcccaaagaggccgccttgggcaagtgcatgggagcccggaagtggaactgaccaggtggggctccactgtcctgtgtgggcgaagtgcaaaaaaaaaaaaaaaaaaaaaaaagcct

SEQ ID NO: 45842 - DNA, 750 bp, Homo Sapiens
ttttttttttttttttttaaataagacatgccataagtcgtgaagttaacaaaatataagcatccgcacagaatatattctaaggtgacttcatttacaccgcttctcagagaaacacacaagtaaccttttgtctgcctatcagccagtgttgaaacagctttggaattcacatggaaggctgccgggctggttccccaacactagcctgatggagtcctgtatccgcaccgtgccgtcaaactggctggtttccactagaaaagcaatggagagtcagctctcccttctttacccagcgttcaactccacactgcaaaaactgcataacctgaaccctgctgtgatggcaactgaagtttaaacccaagtttggtgaccttgctttaggtacctgggctgctcaaaaggagaccgaggtgtgatatttaacattgcttgcaacattcaagagggcttggggacgtcagagccatgagtaacaataacgaaccagggctatgagtggaatcctgatgtaccccttccccatcttaacagccagtgctgcgtatggccatcagcagacagtccatttataccactggacaaagattgggaggaaccagcccaagacagatgatggctccacacccactgtgcttcctgactactcaagtgacctacgtgtggcttccagtcaggaaactaccatttaactttctgctcagccctttcatggctcaggttggtgggatgatgcactgctcc

SEQ ID NO: 45843 - DNA, 629 bp, Homo Sapiens
ctactgttctgctgttgctgctgatagcctgcagctgctgctgcactcactgctgctgccctgagcggagaggcaggaaggtccaggtgcagccgacaccaccatgacggacgggcgatggctgaggagaagctggagaggagatggccaatgccatgacacaggccatcagcctggccctgcagcccttacccctcaagaccaggctcccctggccccagctctggcccagcccaggtacctggacactgacaacttgagccctaccaaggaaacaagggctggtataggtgcaaacctctcatctgccagtggacactgggtgctggggagtcagctgtttcaaagactgggtcaactgcctgggcttcttcgcctacctgcactttttaacaaaacaaggaagtaggggtccccataccttgatggagaacagtccccacctgtgggcaattggcccttggggctctgctgatacatgccaaagaggagcaaggcaatcagaggggctttgtgcaatagcttctgcatccgagctcccgccagagcgtgagcatgtcagtattctagtccagtatttgccagtttccaagtaaaagcttttgtgttacgtgaaaaaaaaaaaaaaa

SEQ ID NO: 45844 - DNA, 637 bp, Homo Sapiens
cgcgacacctccgaggacctgggactccagtgtgacgccgtgaacctggccttcgggtgccgctgtgaggaactggaggacgtgcggcacaagctgcagcaccacctgcacaagatgctgcgggaaatcacagatcaggaacacaacgtggtggcactgaaggaggccatcaaggacaaggaggaacctctgcacatagcccagacccggctgtacctgccctcacaccagcccaacatgcagctgtgccgcgaagcagcccagttcagccccagctcacaccccccaacacccccaagctggtgagtgaggtggaggagctgtacaagtccatcacagtgccgcgggagaagcttctacaagcagagcagtccctgtgcaacctcgaggacatccacatgagcctggagaaggacatcaccgccatgaccaacagtctcttcatcgaccgccagaagtgcatggcccatcgtacttgctacccccaccatcctgcagctggctggctaccagtgagcagcggcacggtgcttccccccaatcccccaaataaacagtgcgttagcttacaaaaaaaaaaaaaaaaaaaaaaaaattttttggggggttgggcctcgaaagaggtttttaaaaccct

SEQ ID NO: 45845 - DNA, 502 bp, Homo Sapiens
tgaaagtccgcattacgtaactaaagtaagtaaaatgatgtgtatcaacttgatggtaaaatatgtagttatttaaaaaagcaatgaacaatttagtttcatgagaaaatgttgccccctaaaagtagaacacatatgttacaactgcaataatactctgaattcatctttcacaaataagagacatgttagcatagtgattaaaagcacagatattggagacaaactaacccagtttgaaccctggcactgccacgtatagcactgcagccttgggaaagttatttaaactcatgggcttcagtttcaacatctgtaaaatgggcatgttaacattgcctacctcataggattactgtgagaattttctaagttaatatatgtaaagcaactttaaaaagtgcctggcacttagttattgttaagtaagtgtctgcagatgcaagtttggaagagaaaagcaaataaatgaaaatcccttcctgttaaaaaaaaaaaaaaa

SEQ ID NO: 45846 - DNA, 808 bp, Homo Sapiens
  misc_feature (797)..(797): n is a, c, g, or t
cggaaggcagcactggattcctggtcgggtggcttccagtggtcttcagtctgtcgtgcaccgatgagaactctccttattgctgtgaagggcagacaatgcatggctgatctactctgttaccaatggctttactagtgacacgtcccccggtctaggatcgaaatgttaacaccgggagctctccaggccactcacccagcgacgctcgtgggggaaacatactaaacggacagactccaagagctgccaccgctggggctgcactgcggccccccacgtgaactcggttgtaacggggctgggaagaaaagcagagagagaattgcagagaatcagactccttttccagggcctcagctccctccagtggtggccgccctgtactccctgacgattccactgtaactaccaatcttctacttggttaagacagttttgtatcattttgctaaaaattattggcttaaatctgtgtaaagaaaatctgtctttttattgtttcttgtctgtttttgcagtcttacaaaaaaaatgttgactaaggaattctgagacaggctggcttggagttagtgtatgaggtggagtcgggcagggagaaggtgcaggtggatctcaagggtgtgtgctgtgtttgttttgcagtgttttattgtccgctttggagaggagatttctcatcaaaagtccgtggtgtgtgtgtgtgcccgtgtgtggtgggacctcttcaacctgattttggcgtctcaccctccctcctcccgtaattgacatgcctgctgtcaggaactctngaggccctcgg

SEQ ID NO: 45847 - DNA, 855 bp, Homo Sapiens
  misc_feature (654)..(654): n is a, c, g, or t
gggcccggcatgtgagtgagggccccggatgtgagtgacggccccggatgaggaactcggaggaggagctgggcccgcgcgtccatgattcgaaggctcgttttcgcagcttttccacgtctttttccggtcccactgccctccatgctaactcactgggcgtctctagccgttataccaacaatgactgcgaccagtgttgggaaagcgccccctgggcccctccctgacgccagcccatccttgagactccctgcaaggaggcggcccgacccagtgggtgcgtgtcgtggggtgaggaggaatggccgacctaatggtcccgcttccgtgagtagcacaggggtgcctgctcagagtgtagtacaacgctgacaagtagaaggcgaggattgcggggcctgggtgagatgggacccactaagttgtgggatcgaaatctcagtaggtccttggggaaagcggggacgggaggggagatgagcagattggaatagaaccgagagagacggaggaaactgacagttgcgtccctggtgggaagactaaaatctatgcagaaacagggataggcaaaagcattgtgcacaagcgggacaggcagagcgccgggacagaaacccttaggacattctgacaccttgctgtaccttnatccttacagaatatgtcttgtaggtgaagctagatctgcaggcataggcaagccccttagagattagtaaagtgatttggaaggaactttacgtgtgactactttgttgaagccaatcaaatgctgggctttaaggttgcctggaccgttgaaattaaacccaagaaaacctgggttgaagaatcgcaactatttgttca

SEQ ID NO: 45848 - DNA, 620 bp, Homo Sapiens
ggccgggcacagaggtgaaaaaaaaaaagatttgcaccatcatatccgagtctttactaataaaatgaggctgcttaagtacccaagtggagcaagggaagagttactacagttactgtaagtctgagttagaaaaaatacagagcatctagttattgagcaaagcccccttttacctgttcgcttattcaaagagaaacaatagaatttgcttctcagtacatgtttttaaaattgagaatctctgatgtgacaaaatcaatttttacaaaagttgaattaaaaacttttaaaaattgcttgtctttgggggtatgtctacatattcgtttaaatttagaaattcccacatgtttaagatatatgcccatcccctttttagagtaatcaaaatttctatcacagttcacatactggaatacatagtaaaattgagatgtgtccaaaagattttcaatgttaattagctcattctaaatagccaatataaggtaacttctgtttaaaaaaaaaaaaaactagggaaaagttttaaatgtattagtatcaggctctgaggaaatttaatgcacattgactttttaaactatggattgaactcctcagtttaatacaatttg

SEQ ID NO: 45849 - DNA, 663 bp, Homo Sapiens
gggttgtttttggtccttggaaagtgaatctgaaagagttacgtctcaacacagatagatgaaaaattatgctgagaaagttggtgaagctacatacaaggtacccttagtgtaaagttaagcatactgtgtacctgtgggcacgttacttcaacttgtttttcactttttctgtaaaatgggatagtagtggcaatctcacagggtgattgtgggtgggggggtggtcaatgaagtaatgcatgtaaaatgcttagaatagtgtctagcatgtaagccttgtggacatatagaaagtgttattgttttgcacagtaatctattttctgtggattcaaataatatgaaatgagtataaaatcatgtattggaacgatgtgtgcaagtcaccattctgccttcctaaggcaggagacctgatggatttggggagggtacatggggccttcagttgtgttttctttgtttttttctaaaaattgatgcagaggcatcacaatgttaagattttaacagggtagtgtggtgggtactttttaactgtttgcttaaagtgtttcaaagtaaaaatatttcttaagcatagtctctgacatcttatgactttatagaaatccctgccaggtacatgatgttacttagagtgagccacctaatctttca

SEQ ID NO: 45850 - DNA, 738 bp, Homo Sapiens
atgtttctgatttctgaagtgcttgtatagcttttatctgcggctttaaactgacagtacccgactgtttattggatctattgatttgaaaagaatttgttaggatagatcttaagcagtaatctgtcagtgtttgtatttgtattctctgcaattttactgtgaaaaaaaatttgttttcaacaattggtgtcattttcttgatgtcactatttgttggagagttaaatggtctcttccctttgtgtatcttacctagtgtttactcctgggcacccttaatcttcagaggtgctaaattgtctgccattacaccacaaggatgcctctgataggaggacaaccatgcaaattgtgaaatagtcctgaagttcttggattactttacacctcagtattgatttgtcccagaattttctggcctttcatggcaatgaaaattttaagaagaaagatttaaagtattttaattttaaagagtgtgttataaaataatgtactgaattctttatcccattttatcatcctttcagattttattaatctactgtatcaataaaattctgtaatttgaatgagaaaaaaaaaaacctcgtgccgaattcttggcctcgagggccaaattccctatagtgagtcgtattaaattcgtaatcatgtcatagctgtttcctgtgtgaaattgtatccgctcacaattccacacaacatacgagcccggaagcctaaagtgtaaaa

SEQ ID NO: 45851 - DNA, 1155 bp, Homo Sapiens
  misc_feature (676)..(778): n is a, c, g, or t
  misc_feature (780)..(789): n is a, c, g, or t
  misc_feature (791)..(794): n is a, c, g, or t
  misc_feature (796)..(813): n is a, c, g, or t
  misc_feature (815)..(816): n is a, c, g, or t
  misc_feature (818)..(819): n is a, c, g, or t
  misc_feature (821)..(822): n is a, c, g, or t
  misc_feature (824)..(824): n is a, c, g, or t
  misc_feature (831)..(831): n is a, c, g, or t
ctggaccggtccggattcccgggatcgagagacagagagacacctccaacttcgacaaagagttcaccagacagcctgtggaactgacccccactgataaactcttcatcatgaacttggaccaaaatgaatttgctggcttctcttatactaacccagagtttgtcattaatgtgtaggtgaatgcaaactccatcgttgagcctggggtgtaagacttcaagccaagcgtatgtatcaattctagtcttccaggattcacggtgcacatgctggcattcaacatgtggaaagcttgtcttagagggcttttctttgtatgtgtagcttgctagtttgttttctacatttgaaaatgtttagtttagaataagcgcattatccaattatagaggtacaattttccaaacttccagaaactcatcaaatgaacagacaatgtcaaaactactgtgtctgataccaaaatgcttcagtatttgtaatttttcaagtcagaagctgatgttcctggtaaaagtttttacagttattctataatatcttctttgaatgctaagcatgagcgatatttttaaaaattgtgagtaagctttgcagttactgtgaactattgtctcttggaggaagttttttgtttaagaattgatatgattaaactgaattaatatatgcnnnnnnnnnnnnnnnnnnnnnnnnnnnnnnnnnnnnnnnnnnnnnnnnnnnnnnnnnnnnnnnnnnnnnnnnnnnnnnnnnnnnnnnnnnnnnnnnnnnnnnncnnnnnnnnnntnnnnannnnnnnnnnnnnnnnnngnngnncnncnttaaatnttccccccccggggcgccccttttatttcccccccccactttttttaaaaaagaaagccgcgcccattatttggggggagaaaatctaaaaaaatgggggggggggggcggtttttttttcaaaggcccccctgtaggagaaaaaagaggcttctcttgggtcttcctttaaaaacacttacacccccttttttggggggggagggaacatctgtcacaacacccctccccccatcaaaaaagacttgccctcccccgacggaaaaaaaatatttttataatagataaagaaagggggggaacaaaaggatgccctcattttgt

SEQ ID NO: 45852 - DNA, 634 bp, Homo Sapiens
ttttctggttcttgagtcagatttcctctattaaagttttgcttctaatgattaggattacccatgatttaggccactaccaaattaaggaatcaattgccagtctagtcgtctcaaatcctatttggaacaaggtgggatataaaattttaaatgctaccatatctggtatcttctttccttaaataagggtttcccctctacatatgttataaactattctataattcctgttacatcatgtgttaacttgctgtgatttcatgttgaattaatacaaaactaactaatattaatttttcatgggaggtaagttttgtcagcttactgtttattattgtgtctgactcttaagtttagatctttatgagaattatgaacatgattaaatgttaaaaaattaagtatttgatttctaccctttgtttcctgccctccttttttcttcttttcttagtttgactatccaaagcatacacacactcacattcactctttattattagttaatagttatttggtcccttttctccttgatgtgaaatagtcacagctaatatttagttttatttttgctatttttaattcagttaaaactaatattgatgcaaccaaaactaaaaaaaaaaaaaaa

SEQ ID NO: 45853 - DNA, 572 bp, Homo Sapiens
  misc_feature (505)..(505): n is a, c, g, or t
gcgtcctttttttttttttttttttctttctttgagagagttctcttgaagttctggataaccccttctttttcctgcttttcaggtccattactttgagccttcttaggaggaatggcgtcattctcattcttaagaacaaatctgccttcccgatcatctttgttccaattcagttgtacaactagaggtttctcatctatatccaatcttctttctccgctgacatgcacttcatagagtgaatacttgggagaggacagcattcgcatatcaggtcgaaatttctccgcgagcgtttcgattacatcttgagtggtggcagtactagagacccgaatacattttgttgcaaagtttccagcagctttatcttgaaaataaaatctcatcactccatggaactccaaatcctcggtcggctggctgatctcgaacaggtccagccggttggcgttccagtggtggatgatgtcggccagcttccgccgctcctcgtcacggncgcccgccgacatggtcctggccgcgcctcctcagccgcgcggggccggggccggaggacgggccga

SEQ ID NO: 45854 - DNA, 794 bp, Homo Sapiens
  misc_feature (5)..(5): n is a, c, g, or t
  misc_feature (10)..(10): n is a, c, g, or t
  misc_feature (789)..(789): n is a, c, g, or t
  misc_feature (791)..(791): n is a, c, g, or t
gaggnccagnaattcggcacgaggcggcacgaggtcagcatcagagccgacaggattcagaataaggagagaatgacatcgtgcggcagggtcctggaggccactcgcgcggctgggccacagagtctactttgaaggcacctcatggttttcaggatgctgacagctgcaagcaacaggcactgccaaattcagggaacagtggtggccagcttggaggatggacatttctggatacacatacacatacaaaacagaaaacattttttaaaagaagtttcctaaaataaaaaaaataaaaaaaaaaaaaatggcggcgggcgcacaagtcggaggggtggaagcaccactcctctctctgactttcgcaatatgggtcactgtgtagacgactcacccagtctgcatgtggttcaaggccccagagttctctcagtgatgctaatgggtgatccgtgctggagtttgtaattggcacctctcaccagctccatttccatgttcaagactgagggcctgagggggagccaggtggggggccagcacctcccagtggcgggcatccaccttcccccagccccacagagtgacctcaggaagcagtaggcctcgcctggctatgactgacccggctcagagctggtgagacccaacgcagtccaagtcatttgcttacatttgccaaaaacattttgccatttttaaaagaaaaaaatacaatccatatgaattttaaactggtgtatgtataatcctctaatactatttttaactacttctaaaatctgngntaa

SEQ ID NO: 45855 - DNA, 553 bp, Homo Sapiens
ccggattgagatgtggagttacgcagcaaaggtggccccagcagatggcttctctgatcttgccatgcaagtaatgacgtctccatctaagaactacattctctctgtgatcagtgggagcatctgtatattgttcctgattggcctgatgtgtggacggatcaccaagcgagtgacacgagagctcaaggacaggtagagccaccttgaccaccaaaggaactacctatccagtgcccagtttgtacagccctcttgtatagcatccccactcacctcgctcttctcagaagtgacaccaaccccgtgttagagcattagcagatgtccactgcgttgtcccatccagcctccactcgtgtccatggtgtcctcctcctcctcaccgtgcagcagcagcagctggtcgctggggttactgcctttgtttggcaaacttgggtttacctgcctgtagacaagtctctctcataccaacagaacttccggtacttccagaaccaactcacctgacctgcaactcaaaggcttttttaagaaaaccaccaaaaaa

SEQ ID NO: 45856 - DNA, 688 bp, Homo Sapiens
cttagcttcatttccctcattaatacggtgggacataacagctactcttgcattgaaaattaagttagattacctgtctagcatacccatcatcatacacttactatggtcacattttgtatttaaaataaactaatacgaaaaatatttctttttttttacacagaattatgattctcacagggtatataaattactgattagaattatttatatgtggccaattcttaatgtcattgggaatgctgtttcatttcaatcctcaaagttactgtagcacagaaaatatcacaatttcctgcagggacattatcagtaagttctgcagggaacaaacaattgacattaaaaatcagtactctgcaattgtcactgttatcatctgctagaaactctgcataatgcattttaaaccaccaaggctggctgccacatccatgtgaaatgcttgaattttatggtgcttaaatatttaatgattcatgggaaaaatgtgaaatgtgtctaataaattgcatccctttctctaacctctggttgtaaagttaaagactttcagcatgtaacttttgcaagatgcctggtctgccattggcacttaaatatttgttgtattacgatttataatatggttcattatatataaaattctgtgatgacttccaaaaaaaaaaaaaaaaaaaaggac

SEQ ID NO: 45857 - DNA, 932 bp, Homo Sapiens
gataaataactcccagtcggctcagtcattggctaccccagtggtttccgtagcaactcctactttaccaggacaaggaatgggaggatatccatcagccatttcaacaacatatggtaccgagtactctctgagtagtgcagacctgtcatctctgtctgggtttaacaccgccagcgctcttcaccttggttcagtaactggctggctaacagcaacacctacataacatgccaccatctgccctcagtcagttgggagcttgcactagcactcatttatctcagagttcaaatctctccctgccttctactcaaagcctcaacatcaagtcagaacctgtttctcctcctagagaccgtaccaccaccccttcgagatacccacaaacacgcgccacgaggcggggagatctcctgttgacagcttgagcagctgtagcagttcgtacgacgggagcgaccgagaggatcaccggaacgaattccactcccccattggactcaccagaccttcgccggacgaaagggaaagtccctcagtcaagcgcatgcgactttctgaaggatgggcaacatgatcagattattacttactagttttttattttccttgccgtgtgtgtgtgtgctataccttaatggggaagggggtcgactctgcattatatgtgccgtgtgtggacaacacacagtcagggtcccggtttgaaaggacttcaaatggcccggaattccgttacagttaccgaatgctgggatagcttaacatggattgtacacgaccttgtccacaagatttagggtacttcttcacgggtgcccttgcacgcttccacgaaggttcggtgcggccacgatacgttagtgcacgcacttgcaacggctctacggaaggaggttgactaaagtttctgcgacgcgcgcataata

SEQ ID NO: 45858 - DNA, 1023 bp, Homo Sapiens
ttcccaggaaaggaggagaacagggaaaagaatcactggtgcaatgtgtgaagacattttgctgtcagctggaagagctgatctgctggctgtataatgttgcagatgttactgaccacgggactgcagccaggtccaatcttacaagtctcaagtcttctctgcagctttaccggcaatttaagaaagatatagatgaacatcagtctctgacggagagtgtcttacagaagggggagattcttcttcagtgcctgttggagaacaccccagttttagaggatgtccttgggaggatcgcaaagcagtctggtgagctggagagccacgcagatcgcctgtatgactctatcttggcctctctggacatgctggctggctgcacccttatccctgacaaaaagcccatggcggcaatggagcacccatgtgaaggggtttaacctggcatcttctcaggcagaggtgcaacctgtcggccaaacactggctagtgagaaaaaaaaccttcaagaagtccttgcaagagccattcaacactgaagtcaagggggaaaccttcaatatactagctttaaaatgcctttctcctccctgaatggagggctgagttactatttttatttacaatgaatccttccaaactaaggttttccttttggtgcttctccacaaagagcgtgtagctttgcaatttttgataaagtaaaacgtgttggcttccccctctatcccatttaaaaagaacagataaagctcaaactattccacctggtagggtcatttaccaaggggctgggaaggagatttccaaatactccatattcctaaggcatgcaaaaaggacctaaaaaactggaaaaaagggaattgtttgggcccgaaaaccttgggggcctttttcataaaaagggaaatttggggcctgggcccatcccccccttttaaaagaatataaggggaacaaacacgcacaaaaattttttttaaaccccccttttgtcttctggccaaaaaaaaaaa

SEQ ID NO: 45859 - DNA, 521 bp, Homo Sapiens
gaaagatggaggattacctacaaatcagacatggcaaaacaataatggctgtttgcttccataaacaagtgcaattttttaaagtgctgtcttactaagtcttgtttattaactctcctttattctatatggaaataaaaaggaggcagtcatgttagcaaatgacacgttaatatccctagcagaggctgtgttcaccttccctgtcgatcccttctgaggtatggcccatccaagacttttaggccattcttgatggaaccagatccctgccctgactgtccagctatcctgaaagtggatcagattataaactggattacatgtaactgttttggttgtgttctatcaaccccaccagagttccctaaacttgcttcagttatagtaactgactggtatattcattcagaagcgccataagtcagttgagtatttgatccctagataagaacatgcaaatcagcaggaactggtcatacagggtaagcaccagggacaataaggatttttatagatat

SEQ ID NO: 45860 - DNA, 608 bp, Homo Sapiens
tgaagctttcctcaaatctacttgtgattcctgatagctcactggcaactgtaccaaggtggccactgtatcatctactgatccttctgcacctagcactcttggctccagataacgcacagaaacctattttctcaccagctgtcatttcttctagggcatgcatttctatgttcacagttcatgtgtaaaaataaaaccaaattcctggattatcaatatcagttctttacctgtgcataaaagaatatcatgaagtaattgaacttatctgttgatataaaaacacagatccaattcgtgtctgtggatgctgcaaggactggctcattggagccaaaccatgtggcggaaactcctgaaattggtggaaaaagtggaatatggcagattgggtaggtaggagaacaattttggagattttgtttcttatgttaaagtgtctgcattttatttgctgtaccctgcctactctggttttaaggattttttgacttcttcgaaaagcactgaataatctcttttccgggtctagattttttgatgagtactgtgtaaaattgtcaatattcaatggattatttaataataaattaagaattacactc

SEQ ID NO: 45861 - DNA, 532 bp, Homo Sapiens
gaaattttcatgcattgcttgtaggattgtaaaacggtctgtccactatgcacaaaagtttggcagcttcttatactattaaccatacatttatcatatgactcagcaactccacacttaggtatttaccctagatgaaagaaaaattctgtttacatgaaaacctatactcagatgttcacagcaattgtataattgcccaaattaggaagtaacacaaatgtacatcagtggatgagtgattaaacaaattgtgtacaccaatactatggagggctgctcagacataaagaaatgatttattgacacttactacaacatggatgaatctcaaaagtgctgttgtattttaggtaaaccatgtgataacttgaattacatttgataaaagatttataagtgtaaaaactagatttatatattttaattttatatgtgcctgtcattacatactatagaaaattgtgtctacagtatgttatatagcatattgtaatatttattactgtatattccttgtgacaataaaata

SEQ ID NO: 45862 - DNA, 704 bp, Homo Sapiens
ccgaagagaggatgtgtggcttccactgatgtcttaccgaaattctttgctagctggtggtgatgatgacaccatgtcagtcattagtggaatcagcagccgggggtcaacagtacggagtaaaaaatcaaaaccatctacaggaaaacggaaagtggttgagggcatgcagctttcactcactgaagaaagtagtagtagtgacagtatgtggttaagcagagaacaaacactgcacacccctgttatgatgcagacaccacaactcacctccactattatgagagagcccaaaagattacggcctgaggatagcttcatgagtgtttatccaatgcagactgaacatcatcaaacacctcttgattataatcggcgtggcacaagcctaatggaagatgatgaagagccaattgtggaagatgttatgatgtcctcagaagggaggattgaggatcttaatgagggaatggattttgacaccatggatatagatttgccaccatcaaagaacagacgagagagaacagaactgaagcctgatttctttgatccagcttcaattatgggatgaatcagttcttggagtgtcaatgttttaataccagtacacaattaaatctgtggtgaagtcattttctaagtgggaagaggcacatttcaacgtgtggtaataccgtggacttctgtccgattttctcaag

SEQ ID NO: 45863 - DNA, 570 bp, Homo Sapiens
gtccgcccttgtatcttgcatgttaaaagttggattattgggcatgtgtggcagcctgccctgctacatgctagacaagtgtgctttagtacatagccacaagttcttcattctttaaaatgttttgacagatcatctcataataaaaataattcaggaaaactatggggaaatagttacatttcacaaaagatattttaaactctttgtaaaacttagataatagagcctagcagttactttgtatctaattgatacattttatgttaatttaccaccatacattttattaatcaaaattgtatagcatgtgactcttttggctttcagagttctcaaaaatattattttgttgcatgtactgtatgtttagaggcaaccaattatatactcaatatggttttactgtgccttacacaaagagaaactctatacagaatgtatgtcatggggtggggtaacagagtctttactgcactgttaggtgatggcacacagagcatgtcccagaacatttctgtgcttaattacccaaccaaagagatctgaagtatgtatgtcgtactgtaa

SEQ ID NO: 45864 - DNA, 540 bp, Homo Sapiens
acgagtgcaccagaataagagcgcaccagaataagagcgcaccagctaacaatgtgatacggccatatgtcacttaaggatggagatatgttctgagaaatgtgtcattaggcgattttgtcattaaacatcatagcatgtacttccacaaacctagatggtatagcctactacacacctaggctatttggtatagcctgttggtcctggggtacaaatctgtacaacatgttactgtattgaatacagtaggcaattgtaacacaatggtaagtatctaaacatagaaaagggacagtaaaaatatggttttataatcttctgggaccaccattggtatatgcggtacatcattgaccaaaacatccgttatccagcatatgactgtatttgggttatgaaagccaactgttacttgattctgcttttagttcttaagaggatcaggcttttaaatactcatttacaagttttccatcctccttcagtggttaaagtagaaagtaaaaagagtatccttatacatgcatggaatttaag

SEQ ID NO: 45865 - DNA, 758 bp, Homo Sapiens
gcacgagggccgtctcttctggcgccgctgctcccggaggagctcccggcacggcgatgggttctcgggcctccacgttactgcgggacgaagagctcgaggagatcaagaaggagaccggcttttcccacagtcaaatcactcgcctctacagccggttcaccagcctggacaaaggagagaatgggactctcagccgggaagatttccagaggattccagaacttgccatcaacccactgggggaccggatcatcaatgccttctttccagagggagaggaccaggtaaacttccgtggattcatgcgaactttggctcatttccgccccattgaggataatgaaaagagcaaagatgtgaatggacccgaaccactcaacagccgaagcaacaaactgcactttgcttttcgactatatgatttggataaagatgaaaagatctcccgtgatgagctgttacaggtgctacgcatgatggtcggagtaaatatctcagatgagcagctgggcagcatcgcagacaggaccattcaggaggctgatcaggatggggacagtgccatatctttcacagaatttgttaaggttttggagaaggtggatgtagaacagaaaatgagcatccgatttcttcactaaaggagaccaaactgttccttgcggtctagtatttaagaactggaacttgaaagtcctccttctaccaactccacctccaccccctcattccccttctcccaaagtactactgct

SEQ ID NO: 45866 - DNA, 658 bp, Homo Sapiens
  misc_feature (614)..(614): n is a, c, g, or t
  misc_feature (619)..(619): n is a, c, g, or t
tttttttttttttttgttggtggtatttttttttttaattttggatcaacaaaaaaagaacatagcaggctctcaggtatacaaaacaggtaatattaagtaaacatacaaacttcacctatacaaaaaaacaaaccacacacacacatttctgttaatacaggtaaagcacaatatcttaccaaaaataaagaatttgggttctgtccaaacactggcagcagagggagtgaccgccaccacggcaccagggcacaccaacaacacagacagaagcggcaatgcatctcacgtgccgcgtgggaacacagcattctaggtgtgcactgcggggaacaagttgtcactcagccacaaacgggctctggggcaggtgccgcagggacggcgtacgattggttgacgcatagttctttcaaaatggcttaaattaacaaataaagcagggtaagggagaaacacaaagccagaaacatttaggaaatgatgcataggtaggtataccatgtttattttaatacatctcattagtttgcatcttgctaggaaaaataccgtcgcactgtcctgacagttacagcagcctgtgtgttatcggtgtaaatgtcatccangagantattaaaaaaaaaaaaaaaaaaaagctagccaaagagta

SEQ ID NO: 45867 - DNA, 737 bp, Homo Sapiens
ctgactttggcctggcccgggtcattgaggacaacgagtacacggctcgggaaggggccaagttccccatcaagtggacagctcctgaagccatcaactttggctccttcaccatcaagtcagacgtctggtcctttggtatcctgctgatggagatcgtcacctacggccggatcccttacccagggatgtcaaaccctgaagtgatccgagctctggagcgtggataccggatgcctcgcccagagaactgcccagaggagctctacaacatcatgatgcgctgctggaaaaaccgtccggaggagcggccgaccttcgaatacatccagagtgtgctggatgacttctacacggccacagagagccagtaccaacagcagccatgatagggaggaccagggcagggccagggggtgcccaggtggtggctgcaaggtggctccagcaccatccgccagggcccacacccccttcctactcccagacacccaccctcgcttcagccacagtttcctcatctgtccagtgggtaggttggactggaaaatctctttttgactcttgcaatccacaatctgacattctcaggaagcccccaagttgatatttctatttcctggaatggttggattttagttacagctgtgatttggaagggaaactttcaaaatagtgaaatgaatatttaaataaaagatataaatgccaaagtctttaccaaaaaaaaaaaaaaa

SEQ ID NO: 45868 - DNA, 494 bp, Homo Sapiens
  misc_feature (1)..(1): n is a, c, g, or t
  misc_feature (487)..(487): n is a, c, g, or t
ngtatttctaggtcagtataacacacctgccccagggacttacaggtgtggcagaagcttggacttctggcttttctctctcttgcacccaggcacgatgcagctaccatttcctcccttcactacgttttagattctttccttttcattcctgtcattaccatgctaacgtacatctctatccaccttgctgttgggcaggtatgagcggcttgctggctgttcttccttgccttttggtctgtttctacttagctgactcctcaattgggtagaaacattcttcatcaatactatactgttataggctgtcccttgtgatttcaaactctagtaccagatactgttctctggttggttcttatgggcatcacttgtttttctggctaaatactagatctaaggtaggaatatggcttttgttttactaagcagtggttcaagccctactgtgagcgcactgctagactggcagatctctgagaanttcagag

SEQ ID NO: 45869 - DNA, 656 bp, Homo Sapiens
tcctgttgtgtgaaacataacattggcagtcgaggagtcagaactcggattcccagcctcactccctctgtgtgtgttgaccacgtctctgctgtgaataggatttcatgcagtggtctgttatggggctttgcagcgtggggggctgcagaagattctcagacattcttatccttctggagtctcaacccatcaggttcagaccagtaggaaccaggctgggtcaggctcttaatttcactacggtgggggacaaaatgaacactggcttttgttcactttgcccctgagagatctagtcctgtcctgtgatggcttccacaaaccctgttggaagtttgggttattcctataactgtatgtgttgagtggccgtgaggctatggacctagcctggaatttagatgtctagctattttttaatcttgttggtaaatgctcagaggtctgtgctacctctgtgaggtatatactaaaatgaatgtaaaataaggatcgtattccctgctttaaggaactggtagtcttgtttgggtgatgagacaaagttcttgagacatttaaactgtatttaccagtgtgaaaaatgtcatttatggagattaattcattatggaaataaaacattgcctaagcccttaaaaaaaaaaaaaaag

SEQ ID NO: 45870 - DNA, 1049 bp, Homo Sapiens
  misc_feature (612)..(708): n is a, c, g, or t
aaataagcaaataaacagtggctcataaaaataaaagtcgcattccatatctttggatgggccttttagaaacctcattggccagctcataaaatggaagcaattgctcatgttggccaaacatggtgcaccgagtgatttccatctctggtaaagttacacttttatttcctgtatgttgtacaatcaaaacacactactacctcttaagtcccagtatacctcatttttcatactgaaaaaaaaagcttgtggccaatggaacagtaagaacatcataaaatttttatatatatagtttatttttgtgggagataaattttataggactgttctttgctgttgttggtcgcagctaaataagactggacatttaacttttctaccatttctgcaagttaggtatgtttgcaggagaaaagtatcaagacgtttaactgcagttgactttctccctgttcctttgagtgtcttctaactttattctttgttctttatgtagaattgctgtctatgattgtactttgaatcgcttgcttgttgaaaatatttctctagtgtattatcactgtctgttctgcacaataaacataacagcctctgtgatccccnnnnnnnnnnnnnnnnnnnnnnnnnnnnnnnnnnnnnnnnnnnnnnnnnnnnnnnnnnnnnnnnnnnnnnnnnnnnnnnnnnnnnnnnnnnnnnnnnaagggggcggccccctcttaaaaataccccccaaggggccccaattttaccgggcaccccccttttttttggaaaaaaagggcccccctaaaagggggcgccattttaaaaataagggcctcgttgccctcccttttttaaacaacccccggaactgggaaaaaaacggcccacttctggggaaacctttttgggaggggaaccccttcctctttggtggggggggccaaaaattgggggaaaaaatattcccttaaagaaattttttacaccctctcagggggaaaatataaaaaatttttttaaagggggaataaaggggggtaaaaaacaaccccccc

SEQ ID NO: 45871 - DNA, 613 bp, Homo Sapiens
acgagtcatcagggacccagaacccttctcttttgctgtccctttgtcctagtgcatggtttccacactgtggtgcaagatgtctcctcaagctctaggcattacatctgctatcctgctgtcagaaagaaggaaggggaaaagaagatcatttccttctctttaaggacatttcccagaagtcacacagaacatttccatttatattactttggccagaacttggtcatatggccacatttagttccagaatgattaggaaatgcagtcttttattgatccctgtgcccaggaaaatattggaggcctttttcaaggaaaaaggggaaaacagatattggttgacaaatagcagtctctgccatactgtccctggatacatgtctttgagtgaatgtcccttatttaccattctgattacttgttggatattttcaatatgtgttacaatatggttccaaaattgtatgtgatattccaacagcaagttggatgcaatgtgtcataaaaatgacctcagtgtcaaccagcatttgaataccgtgtctcaatgctgtgcaccaataaagaacacagaaagtcagagttttccataaaaaaaaaaaaaaaaaat

SEQ ID NO: 45872 - DNA, 654 bp, Homo Sapiens
  misc_feature (34)..(34): n is a, c, g, or t
  misc_feature (50)..(50): n is a, c, g, or t
  misc_feature (603)..(603): n is a, c, g, or t
  misc_feature (606)..(607): n is a, c, g, or t
  misc_feature (609)..(609): n is a, c, g, or t
  misc_feature (618)..(618): n is a, c, g, or t
  misc_feature (621)..(621): n is a, c, g, or t
  misc_feature (623)..(623): n is a, c, g, or t
  misc_feature (625)..(625): n is a, c, g, or t
tccaggtataggaacagcaacactcctggctgancaactaagccatatgngccctaggtcattcttgcttccaatatgcttgccactccttaaatgtcctaatgatgagaaactctctttctgaccaattgctatgtttacataacacgcatgtactcatgcatcccttgccagagcccatatatgtatgcatatataaacatagcactttttactacatagctcagcacattgcaaggtttgcatttaagttaaaaaaaaaaaaaaaaaaaaactaaaggtgaaagatgccacattgaacaaactaaattcccaacccggttctggcaaagaatccagttatcccttccatgaagacgcacataactctcttacttggtctttccattagggacaacataagtcttgttttacatcaaataaaaacaatgttaaaaagtgtgtgaaccttaaaaatggaagtctactagtttacatacctacttcagaggacatggaaatgaccatgggcctgcatttcagggaccaaagcaaattaggcctggcctaaaatacatcagaccttttgtaagagagaatttcaataaagcaaaaaacatgtanaannanaaaaaaaanaanananaaaaaaaaaaaaaaaaaaaaaaaaaaaaa

SEQ ID NO: 45873 - DNA, 500 bp, Homo Sapiens
gcaggaaccggagggtgacccatttcaggaggtgccggtaccagcctgactaggtacaggcaagcttgtgtgggcccaacaggcccttggtagagctggtgccagatgtgggctcagatcctgggcatgatgggccgagccacctcggatcccactgattggccagccgagcgagaaccaggctgctgcatggcactgaccgccgcttccagcttcctctgagccgcagggcctgctacgcgggcaagcgtgctgcctctcttctgtgtcgttttgttgccaaggcagaatgaaaagtccttaaccgtggactcttcctttatcccctcctttaccccacatatgcaatgacttttaattttcacttttgtagtttaatcctttgtattacaacatgaaatatagttgcatatatggacaccgacttgggaggacaggtcctgaatgtcctttctccagtgtaacatgttttactcacaaataaaattctttcagcaaaa

SEQ ID NO: 45874 - DNA, 1031 bp, Homo Sapiens
cggcggcggtggcagtggcggcggcggcggcggcggcggcggcggcggcggctcgtaccactgcctggcgtgcgagagcgcgctctgtggggaggaagctctgagtcaacatctcgagtcggccttgcacaaacacagaacaatcacgagagcagcaagaaacgccaaagagcaccctagtttattacctcactctgcctgcttccccgatcctagcaccgcatctacctcgcagtctgccgctcactcaaacgacagcccccctcccccgtcggccgccgccccctcctccgcttccccccacgcctccaggaagtcttggccgcaagtggtctcccgggcttcggcagcgaagcccccttcttttcctcctctctcctcatcttcaacggttacctcaagttcatgcagcacctcaggggttcagccctcgatgccaacaaacgactattcggaggaggctggacccgatctcagcccaaagtccgacggagcggcgagcccgggggaaggggccaaggaccgcgggtgccccaaggatagtaggtgcccaccccggatgaaccggcacgcctccattgcaaaccttcggcacccgcccccggctaccgaggggcttaactcgtgtggttgggaggctaggcggttgccgagagtcgagcaaactgcggaggcgagaggtgtagtagtcgtggaccgtaaggttaagcggacgagcgaccggggcgccctgcgctcttatgggacgcacaacccctcgtgtatgccgcccgcgccggcttgctcagagcaaggcatgggtgcgccaccgatgctgcggtgagcaagcgcccgggatcacgccctgcttgatctccgattaaccacacggcggcgtcatcggcgtaaggcgtccgcctattattcgtagcgttgacgcgggtgattcgcacgactcgagctgaactcccgacccagccgaggcgaacagaaataaatggtgacggccagacggaaagcacgctctaccccgcgtcttgcatgagcgaggc

SEQ ID NO: 45875 - DNA, 1107 bp, Homo Sapiens
ctcgtgacacaatatgaagaggagaaaatagccttttacggaaataggcccacagaaaggagggccttctatggacaatccaactatcattctagctcatattcgacagtcacatgtgaccagtgatgacacgggaatgtgtgagatggttctccattgatcatgatgttgacctagagaagattcatcctccttcaatgcctggagacagtgggtcagaaattcagggaagcaatggtgagactcagggctatgtatatgcccagtcagtcgatattacctcaagttgggacttatggtattagaagacgctggattccaatgagcccattcataagtttggcttcagtactttggccctggttgaaaagtactcatctcctggtctgacatccaaagagtcactctttgttcgaataaatgctgctcatggattctcccttattcaggtggacaacacaaaggttaccatgaaggacatcttactgacaggcagtgaagcgaagacacggatccagaaagtttcaggccctcagtaccgactggagaagcagagcagagcccaatgtcgcacgtagactggacagcacctcgggcgagccagagcgcatgggagtaactgcctggatccgcgagaccagatcaagggcacaacggggctaacggaggaggattcgcacagtggacatagccaagacacggatatgctaagcagccacaatacaaagtccatcgacagcaggcatgcaccaaaaactgcgccaccacaacgacagctaacagcatacgggaactccagaggaagaacaacggtacaagcatatagcccggacagcaaacagaacagcacgccaagcaaagctagcgacataaacacagacaccccaaaatcaacaagacagagcgaaaccgaagcacggataccggatcgtaacccagtgcggcacaaagcaaacgccccgagcgacgcaccaacataaaacgaccaacatatatacgcaaaacaagcacatagaaaccatgaacatgggcaaacgaccgaaataccgacgacaacaacgcccacagacaaaccatcaccgggaaagaagagaaggccccgagcga

SEQ ID NO: 45876 - DNA, 534 bp, Homo Sapiens
ggcaccactgcactctagcctgggcaacagagcgagaccctaactcaaaaaaaaaaaaggacagaggggaggaaggagcagaaaccaaaaatggcagttagggagaaatctcaggaatgtggcatcccatctccccttgagacctatcactgaattcacaacccttcgagctcatgctggtgcactgagtcccttgggcgctgtaaaggtttaaccccttgactgtaaactcagacttagagacatctgagtcacacagtccccgccattgtcacatattctcactgacactgcagtctgtgactcctccaatgtttcacgtgtattttatatttattgatgtctccttccgcagattcatttctttgtacttaataaactttagtaagtggaaaaaaaaaaaaaaaaaactcgagggggggcccggtacccaattcgccctatagtgagtcgtattacgcgcgctcactggccgtcgttttacaacgtcgtgactgggaaaaccctggcgttacccaacttaatcgccttgca

SEQ ID NO: 45877 - DNA, 612 bp, Homo Sapiens
ctggatctgttaaaccatatattattgatcattgcaagtgaaattttgagagattgtttctagtatttaggtgatgaaaacatttggtaatattgctttggttcaaagaattttatgtctttatctttctagaagaaagcaattatatatatatttttgctaaattacataaacatttaattacatcaggttctaatttaaacatgtattactcacttgaggccacttttaaatattcatactctttgacataagatgctttgtatatttctcatttcttttagttcttagtaagtcagctttaaaaagtacctgccaaccagaaccttccatattctggactaaatcttgctcttcggattatacttcagtgcagtaactgtggatttgcaattttgaaggggagatagtagctattatattttacacttgcttgatgtgataactctaaagactttttaactgataaaagcgcacatggctattttgatacacaaagttgtgtttgctactttagaagcttttgtggcagaattgtaatctaattttcataccttgtatttctgaatcacaacaaaaaaataaatggggaacaagaaaaaaaaaaaaaaa

SEQ ID NO: 45878 - DNA, 461 bp, Homo Sapiens
aggcaggaagcacactggagcccaggagtttgagaccagcttgggcaacatagcaagaccctgtctatttttttaaaaaagtaaaaaatagaaattatctcactacttaaatcccatttttttcacttcatatgaaagaacatattgatagtatattctatattatttcatagatctgtctgaaagagattgggaacaaaaatatctaattgagatattctttaattttttacatagcagctttattttttttattctgtagtatcagcgaaatcagtcatgtttataccttgaatataaatatcaggaatcatgcaattatttctactatgtatttagtagtatcttatatttgtataacattattacattttgcaaattagtatcacaactgctaagtagatgtttctgagtattagaaaaatcagtgttattacctgcaggatattaaaaaacatttg

SEQ ID NO: 45879 - DNA, 638 bp, Homo Sapiens
  misc_feature (35)..(35): n is a, c, g, or t
  misc_feature (588)..(588): n is a, c, g, or t
  misc_feature (607)..(607): n is a, c, g, or t
gcgggcgcggctgtaggcttttttttggccatcantgaggatctaacaacagagtagaaggaaggatgccctaggtcagcatgcagggtggtgggagggctttcatcttccttacccaagcctctcttttcacttttctagaagtccagaagttgttatatgatgaaatagcctcctttaacgtttatttctgggtgccaagggaggcccattcctctaacattctcataatttttctcaaaggcctatgatctaaacatttcaccacggcatccactcagctgtgaggctgcgtacacagtctccacctctgaaatctgaacttcgtttaccagtggtgctgtttgaacttcataatgtcagcacttcctgaacacttactgtgtgcttggcttgtgctcctgagtgccttatatcataaggaaacggcaaaatcaggggactggtataaatggtgagctgagcttgaatctaagctttgtcttcagagccagtacccctaatctctctttctgtaaaatattacttttcaaagaatgaagttgtagccaaatcttgaaatttttcatttaccctaagtgaggacanataaagctttcaacaacanaaaaaaaaaaaaaaaaaaaaaacctcgtgcc

SEQ ID NO: 45880 - DNA, 674 bp, Homo Sapiens
aaactcctaagctcatgcttcagtatgagaatttctccgaagtccaccctcctctccaacaggaatgtcttcttgtaaaggccgccttagaaatggtccagaaagcagtgcagttacgattcagaaagaccaaaggaaagtgtcggctcactcatcccccaaacgggtggttgaacagcttctcccttggaaagacttgcaaaatggaattgcgttgtggtctgttgtcccacgttccaaatggaaaataaaagccctcatttttgtaaagtctctccccgtgcccgaaagccggtcccgtatttgacatgcttatcgtgggagtagctcagtttttgcgggagttttgcttctacttgcccaaactggacactcacagacatctcggctatgaactgctcacagccttccttggtgacttgcttgcagtacctcaggtcaatatgacagatgtttccacagcgtttgaagaaggacaggcactgatcagtgaccttattgcagtctgcagagaagaaatagtaatgtgaggtgtgaaggccaggagccagaagcccccccgcgccagaccaggcactcagcagtggggacaggtcagagctctacatattccagtcctgctgtgctgcactaaataaaagtggtgaatttgcttttaaacaaagaaaaaaaca

SEQ ID NO: 45881 - DNA, 373 bp, Homo Sapiens
tccgccttactcctctcctccatgtacttgaaccctccaggtggtgccgggctggggctggggctggttagaccacttctgagaactggactatttcctgcgtaaaccgggcgctcaggcgcttggacccggcccaagatttgactccggttctcaccccgccctctcctggggtggtggtgggggctggggggccgcttgcctgccccagggtcaggctgggcaaggtccctagctctctacccaagctgttactccctcgtggggcgcctaaggagactcaagtggacccatcatatatgggggctgggcctcgggactctcgctctaataaaggactgtaggccatggggcctaaaccggaaaaaaaaaa

SEQ ID NO: 45882 - DNA, 923 bp, Homo Sapiens
tggtacggtccggatttcgggattcgtcgaccccgcgtccggatctccagacttgtttcctgtgcccatcatctctgcctttgagtggtgggactccaggccagctccttttctgtgaagccctttgcctgtaaagccagccttggttggacctattgccaggaatgtttcagctgcagttgaagagcctgacaagtgaagttgtaaacacagtgtggttatggggagagggcatataaattccccatatttgtgttcagttccagcttttgtagatggcactttagtgattgcttttattacattagttaagatgtctgagagaccatctcctatcttttatttcattcatatcctccgccccttttgtcctagagtgagagtttggaaggtgtccaaatttaatgtagacattatcttttggctctgaagaagcaaacatgactagagacgcaccttgctgcagtgtccagaagcggcctgtgcgttcccttcagtactgcagcgccacccagtggaaggacactcttggctcgtttgggctcaaggcaccgcagcctgtcagccaacattgccttgcatttgtaccttattgatctttgcccatggaagtctcaaagatctttcgttggttgtttctctgagctttgttactgaaatgagcctcgtggggagcatcagagaaggccaggaagaatggtgtgtttccctagactctgtaaccacctctctgtctttttccttcctgagaaacgtccatctctctcccttactattcccactttcattcaatcaacctgcacttcatatctagatttctagaaaagcttcctagcttatctccctgcttcatatctctccccttcttaccttcatttcatccggttggctgctgccaccaaatctgtctagaatcctgcctc

SEQ ID NO: 45883 - DNA, 735 bp, Homo Sapiens
  misc_feature (733)..(733): n is a, c, g, or t
tgttttgctctcagcctccgtcgtctctgcagcactccgggttctcctccagagcgctagtcccaggagctcggaatgttcgtggaacttaataacctgcttaacaccacccccgacagggcggagcaggggaaactgactctactctgtgatgccaagacagatgggagtttccttgtacaccactttctctccttctatctcaaagctaattgtaaagtctgctttgtggcactcatccagtccttcagccactacagtatcgtgggacagaagctgggtgtcagcctgaccatggcgcgggagcgtgggcagcttgtgttccttgagggactcaagtctgcagtggacgtcgtcttccaggctcaaaaggagccacaccccctgcagtttctcagggaggctaatgctgggaacttgaaaccattgtttgagtttgtacgggaggccctgaagccagtagacagtggagaggctcggtggacgtacccggtgctgttggtggacgacctcagtgtgctcctgagcctgggcatgggggcggtggctgtgctagacttcattcactactgcagagccaccgtgtgctgggaactaaagggaaacatggtggtccttgtgcacgacagtggagatgcggaggatgaggagaatgaatcctgctgaatggctcagtcttagagcatctgatactgcgggtgaggcctggcactggctctgcgggatgtcacgnca

SEQ ID NO: 45884 - DNA, 322 bp, Homo Sapiens
ggctgggcatgggggcggtggctgtgctagacttcattcactactgcagagccaccgtgtgctgggaactaaaggtactcatggaactgccttctctgcgcccacctgtgacctccaagaactcagacaggtccagacctcacttgcttgctgtgatctttttatttgcttggggttttggctttactctggcaggcccagaaagcttttgcagccaccctgttttcccttacctgccattgctgaaaagtaaagccccccaaaataaagggatgatcaacattgccaaaaaaaaaaaaaaaaaaaaaaaaaaaaaacatgt

SEQ ID NO: 45885 - DNA, 562 bp, Homo Sapiens
  misc_feature (243)..(243): n is a, c, g, or t
  misc_feature (487)..(487): n is a, c, g, or t
  misc_feature (507)..(507): n is a, c, g, or t
cttcagagaggctgcaccccctcagaagaacagtgagaaatctctccatcacacgctccctggtccttatgtccctgaggccacccttccccaccccccagtgcctggagaagcgtgagactctggaggggcgccaggaggcaggggtcctcagggctaggctggagctcggcccaagagctgcttttgcgaagctgtcttgaatccggattcaccagagaacaagagcctcccagcctttgngtcttctgggcctgtaaagatgtgtgtacctcccaggccactctgatgcaagggcagggaccaatgccaaggcctgggttgggaatggctctgtgactccagaagctccgtctaaaactccaaagatgcccaaaaggctgtgctgctatgtggaatgtgtattatttgtgaacacgatgcggcttcttcctcattttgcagagaacctaagcgggcagatgtacaaaccgtgtgtttcgaaaanccctgagttcatgtgtgtgnaaaatgcaggttttctcttagaaataaaattggtgacttgtgctgtaaaaaaaaa

SEQ ID NO: 45886 - DNA, 582 bp, Homo Sapiens
  misc_feature (566)..(566): n is a, c, g, or t
agtacaagaattgatagacataagaaatgattatatcaactgggtccaacagcaggcctatggaatgttggcagatatccctgttacaatctgtacatatccatttgtatttgatgcccaagcaaaaactactctgttacagaccgatgcagtcttacagatgcagatggctattgatcaggcccacaggcagaatgtctcctctctttttctcccagtgattgaatctgtgaatccctgcttaattctagtggtgcgtagagaaaatattgtaggagatgcaatggaagtccttaggaaaacaaagaacatagattacaagaagccactcaaggttatatttgttggagaagatgctgtggatgcaggaggggtgcgcaaagaatttttcttgctcatcatgagggaattattggatcctaaatacggcatgtttaggtattatgaagattccaggctcatttggttttctgataagacatttgaagacagtgatttgttccatttgattggtgttatctgtggcttagcaatttataattgtaccattgtggacctccattttncttttggctttttatt

SEQ ID NO: 45887 - DNA, 463 bp, Homo Sapiens
caaccaaaccccgctctgccgccgctgctggaacccaggaggcgtgcttgcaggcttcgggcactacgcggggctggaaataccacgcactgccccttcgcctagacccccgctcgggccactcgggttctgccttcaaagctagtagctgccccagacttgggggtggggggaggggaaggggcgaggctggcgccccctcccgcttttggctcccgcgttcgttgcagcagctgtcgccaaatgaaccccggaatgcggacgtgcaaaccctccaccccacccccagccacacacgtcgcggtcggagaactgagaagggggcgctgggtccgaggttctggaaaagcaagaactcacctgcaaacaggcagtcctcagctctggacttctggatcacgacgtcgatatccttctgaattcggtcttgccttgaacacatccccattaaataaatccttgg

SEQ ID NO: 45888 - DNA, 488 bp, Homo Sapiens
actgaactaactcccttccctctactcccagagcccgcccggcaggaccaccgagcaaggccttggaaaaccagagagattagagcgcagaatggggaaatggagagagaacctgaaagagccccaaactcgaggacctattgctccccaagaataacatcttccagaagaactagacagaaaactaggcgtctgggaactctgaaatccttggaggagtagcatcatcatgaccctctgtgttccttttggcaaaggacttgctcccattgtttgcttgttccattgtctgtctgttaaataaataaaacccttttcataaaaaaaaaaaaaaaaaactcgagggggggcccggtacccaattcgccctatagtgagtcgtattacaattcactggccgccgtttacaacgtcgtgactgggaaaaccctggcgttacccaacttaatcgccttgcagcacatccccctttcgccagctggcgtaat

SEQ ID NO: 45889 - DNA, 499 bp, Homo Sapiens
tcttatgaatataatgaataagtaagcatatagtagggtgatagaatacagatagtagaaacaaagagaggacagcaaaccttttcagcacttctctcagagcaaatggaaacacacagtaagtagctttctgactacattattttctggtcacttttaaagaaagtttacaacctgttctgaaactatttgtcttttcactggttgtaaggtgtaccccaatctcagggagtatatctgtagtgccacaggcaaaagatccactccttcccacactcatttgcctgaacttactcgaagggctgcatttctctgagtttacgaaattgtgtcattatggtccccatacaggtggtatttaacttttaaagcaacttttaagaaaactcgacttgttttttgttcattttaagtgtgtggtactaaaaagacatgttagactttttttaaaaaagcacttatgttttgaaaatagaataaataataagaatttccaatt

SEQ ID NO: 45890 - DNA, 763 bp, Homo Sapiens
gcagcagtgaataaagtaagctaatcctgggcttgggtatttgtgtcactcatatttgctatgagtggttgatttaaagtgctgatttcatttgcatttcatagcttcatctaattttaattaaaattggaggggcaattatatagtgattaaatgcaaatgttttataatttccaaatttatctgattaacctaaagaactaaaaccaaggtatgttttaagggaattaatgtgttttccaaatcatgttgtggccattgctgtggactggcagtatctattcaccatacataatgactggaaggcggctgtggacaccctgttcctcttggcagcacaggaatggaagtgggtcccagtcctgatgattaacactgaaaagggagactgctggtagcttctggaaaaaatttcctcaagcctaagaaagaagcagagcaagagatgctccttttgcttctggacatcgccttgtctgaaaaagaagcttgcagctggggagctctgattgccagcctgagggtgaagcttgacctgcggatgcagtcagccgcctccgcacttcttgtttagttagatgataaatttccttcctacccaaccattataagctggcagtttggtaactgcagccccaggaacatcgaaaccgacacatctcatgtcataacctaattttgaatatttatttcattgctacttcattgccacttgtacctcataataaatccatttttgaaaacctttaaaaaaaaaaaaaaa

SEQ ID NO: 45891 - DNA, 917 bp, Homo Sapiens
ggaacctgtcccgcagtccctgcatgaccattggccctgctggcctggcggtgtgggcatcctggggttcttagggtcccagaacaagccccaggcaagctggaacttgggtggggaggggacatgaggaggataaacagctgactgtggcttcaaggacatcagggccaccccaagtcctcagtgtcctactcctggcaaggagttgggtttggatcaaaagtgtttaaaattaatatgttgtcagtgattagaacaacactgtttacataaaaaccatttttctaattctaacaagttagaatgtgaggaaggaatgaacatgagtgtttaggaacctgccctttggtgctgggctggcgtcccgcactggggtgtcctcgctgtctgggggctgctctgctgccccggcccaggtccccttgtggtgttgccagacgggcctcatggtctgctgtgcagagagaggcaggaaggatccctgaagagtcttggagaaaaggttctgtgccctcaggtggggcttaccccctcgtatttataatcttaatttatatagtgaccaccgtggaaacaaacgcctcttgtattgtcatgtacatagtccatacctgagtgctgtacataagttgttctgtgtataaataaaacaagcctgttcttgatcttccaaaaaaaaaaaaaaaaaactccgaggcatctaatgtcgggtggcggagaaaagagtaaatgaaatgcgccatggccctagctggtttcctgaacccggcctttcttgggaaaagtggggagaatccgccggggcccccttaacgagaaggcggtgttaaattcccggaaaacccagggggaggccgaacattaaagggaaatacgggttgccaaataccccgagggaaattactaaggccgggggc

SEQ ID NO: 45892 - DNA, 411 bp, Homo Sapiens
gtagagggcaccgcagagtcccgagagatatgtgggcagtgggcagagagagcctggcgcctctgtttgccaccacttccccaggaaggcgggacagcatttctctggctggttccactaaatgtgccagcccaatatgcagggcatgggctctggttctgccaggagcctgtgacacccccaggaagggggtggaactgaggaagagcgaggatatgcaggcactcatgcttaccgggactggggcagctcactaggattctatcctttccaatcggcatcagccagctcttgtcccctgataagtgaggacagcctgaccctggcctcaaatgcagccatccctgagttcatgcgatgctgacgggaccccagcacacttcccggcctccttggagatctgcgagccct

SEQ ID NO: 45893 - DNA, 517 bp, Homo Sapiens
  misc_feature (450)..(450): n is a, c, g, or t
gcacgaggccgccccagctctgacaaaaccccgcctccaggtcggcaggctccgccttcttttcttctccgcggggtgattcagtccagtgattgggtttgtggctccaggcctcgcccacagacggacagacccctccctttcttccggcaaaaggaccgagccctggggtagtaaggcccccacactcctgttttttgcaagtacatttttgtccctcctccacccaggtatctgcctattttcttgctaatcccagaacctttccttttgctttttttaaggacatttgggaagttcctggtgtaggacccttctccctgggataagaaacctgcctgtaaacgctctgtaaatactcccttccacccatcccagcccctgggcagccgggcagaagggaatccaggctatggacctcccaagtccccgctccccgctcccctcggngggcccgccttgttctgatctgtgtgtgagtgtgtgtgaacttctgaaagacaatattaaagagact

SEQ ID NO: 45894 - DNA, 537 bp, Homo Sapiens
ggtaccaaggcttacatgcttcagaatagatcaatggttattgtataagtaattttatcctaaaacattatgacattttttgtttcttattgagggtagataatgttaatattaaactactaataggaggcccttatcacttctcttttcattttttccatgcagtgataggtattattagaaaaaagttatttcttgagttacacctaagaggaagaagtaacatgatggaaagtggttggagatagcacccaattaacatcgacagccaagtcttctatttcagaatattgatttatttcgctttggcttttgatgccatcatgagatttaagtctgcagtttcaaaagctcatgctacttagaagagatgatttttgcagcttaaaaaattgcttgtgactgcagtatgtacacagttaaaaagctgttcactgcccctttcaaccttttcattttgagctttactaagagaatgcttttaggaacagaattcctaaagtgtaattttttatgtataaataaagttttatctat

SEQ ID NO: 45895 - DNA, 714 bp, Homo Sapiens
  misc_feature (689)..(689): n is a, c, g, or t
ggaaaaccatcattcacagcatcaatgaaaaagattgtccgaagcctccaaacattcccatgatcatgttaggggtttccctggctattcttctcatcggggttgtcctactgtgcatctggaagctactggtgtcatttcatgatcgtaaagaagttgccaaatttgaagcagaacgatcaaaagccaagtggcaaacgggaaccaatccactctacagaggatccacaagtacttttaaaaatgtaacttataaacacagggaaaaacaaaaggttggtttaagataataataggacatctgcagataagtcatcctctacatgaaggtgacagactgttggcagtttcaaaataatcaagaagagaaatatccttagcaaagagatgactttggggatcatttgaggaatactaactctgttgcattaatgcttcaaaaaatcatcaaatgattcatgggggcctgatttgcatttgaaaaatgtttgaaattagagtctcatttgtttcaggaatgcagctacctgagttttttgtctcggcaaagtcacaaagcccatatactcacattgtgtgtctatatttgccaattaattctaaacttctaggaaatatgcccttctcttaaaggagaattttttttaaatctctgagaaatgagattctgagtttatttcagctaaaangttgcaattcttctgaagatatctc

SEQ ID NO: 45896 - DNA, 2440 bp, Homo Sapiens
ggtagcctctgttttcatttcagtcttaatgaaaactttctaacttatatctcaagtttcttttcaaagcagtgtaagtagtatttaaaatgttatacttcaagaaagaaagactttaacgatattcagcgttggtcttgtaacgctgaaggtaattcattttttaatcggtctgcacagcaagaactgaaacgaatggggattgaactgctttgcctgttctttctatttctaggaaggaatgatcacgtacaaggtggctgtgccctgggaggtgcagaaacctgtgaagactgcctgcttattggacctcagtgtgcctggtgtgctcaggagaattttactcatccatctggagttggcgaaaggtggtgcgcagactctgcaggtgcatgtccgccagactgaggactacccggtggatttgtattacctcatggacctctccgcctccatggatgacgacctcaacacaataaaggagctgggctccggcctttccaaagagatgtctaaattaaccagcaactttagactgggcttcggatcttttgtggaaaaacctgtatccccttttgtgaaaacaacaccagaagaaattgccaacccttgcagtagtattccatacttctgtttacctacatttggattcaagcacattttgccattgacaaatgatgctgaaagactcaatgaaattgtgaagaatcagaaaatttctgctaatattgacacacccgaaggtggatttgatgcaattatgcaagctgctgtgtgtaaggaaaaaattggctggcggaatgactccctccacctcctggtctttgtgagtgatgctgattctcattttggaatggacagcaaactagcaggcatcgtcattcctaatgacgggctctgtcacttggacagcaagaatgaatactccatgtcaactgtcttggaatatccaacaattggacaactcattgataaactggtacaaaacaacgtgttattgatcttcgctgtaacccaagaacaagttcatttatatgagaattacgcaaaacttattcctggagctacagtaggtctacttcagaaggactccggaaacattctccagctgatcatctcagcttatgaagaactgcggtctgaggtggaactggaagtattaggagacactgaaggactcaacttgtcatttacagccatctgtaacaacggtaccctcttccaacaccaaaagaaatgctctcacatgaaagtgggagacacagcttccttcagcgtgactgtgaatatcccacactgcgagagaagaagcaggcacattatcataaagcctgtggggctgggggatgccctggaattacttgtcagcccagaatgcaactgcgactgtcagaaagaagtggaagtgaacagctccaaatgtcaccacgggaacggctctttccagtgtggggtgtgtgcctgccaccctggccacatggggcctcgctgtgagtgtggcgaggacatgctgagcacagattcctgcaaggaggccccagatcatccctcctgcagcggaaggggtgactgctactgtgggcagtgtatctgccacttgtctccctatggaaacatttatgggccttattgccagtgtgacaatttctcctgcgtgagacacaaagggctgctctgcggaggtaacggcgactgtgactgtggtgaatgtgtgtgcaggagcggctggactggcgagtactgcaactgcaccaccagcacggactcctgcgtctctgaagatggagtgctctgcagcgggcgcggggactgtgtttgtggcaagtgtgtttgcacaaaccctggagcctcaggaccaacctgtgaacgatgtcctacctgtggtgacccctgtaactctaaacggagctgcattgagtgccacctgtcagcagctggccaagcccgagaagaatgtgtggacaagtgcaaactagctggtgcgaccatcagtgaagaagaagatttctcaaaggatggttctgtttcctgctctctgcaaggagaaaatgaatgtcttattacattcctaataactacagataacgaggggaaaaccatcattcacagcatcaatgaaaaagattgtccgaagcctccaaacattcccatgatcatgttaggggtttccctggctactcttctcatcggggttgtcctactgtgcatctggaagctactggtgtcatttcatgatcgtaaagaagttgccaaatttgaagcagaacgatcaaaagccaagtggcaaacgggaaccaatccactctacagaggatccacaagtacttttaaaaatgtaacttataaacacagggaaaaacaaaaggtagacctttccacagattgctagaactactttatgcataaaaaaagtctgtttcactgatatgaaatgttaatg

SEQ ID NO: 45897 - DNA, 666 bp, Homo Sapiens
atttcttcataaaaagagtaaggccagggagaagtgactgagtagacacctgtagctaaacagaggtggtgatgagtttatggtgcctccagcttctcatggccccacttgggaaattcctccagtaacattacactcactcactccttgaccatctacctttactcctctcctcatttccctgttaccaaaactatgtgccctacccagggacttctgggcagctcttttctcagatcatttctcaccctctctcctctactaacttagcctttcatactgaatcacattttccttaaaaaacagctgctgacagaagatgctacattttgtttcagggcctggtaaccatcaaggatgtgtcactgtgcttctctcaggaggagtggcggagcctggacccctctcagacagacttttatggagaatatgtcatgcaggaaaactgtgggatagtagtctctctgagtaagcatgaccttctccagccactagaagattggactctgggaggacggagccatctgcttcagggctattggatagtgtctgtctaggactctttatgtggcagggaatctgtctatgcttccgctggagaaagacactagggccaatcccaagagaatgagagtaaatatcattaaaaaaaaaaaaaaaaaggac

SEQ ID NO: 45898 - DNA, 687 bp, Homo Sapiens
  misc_feature (426)..(426): n is a, c, g, or t
  misc_feature (510)..(510): n is a, c, g, or t
  misc_feature (543)..(543): n is a, c, g, or t
  misc_feature (570)..(570): n is a, c, g, or t
  misc_feature (589)..(589): n is a, c, g, or t
  misc_feature (638)..(638): n is a, c, g, or t
  misc_feature (683)..(683): n is a, c, g, or t
cacaaaggccgcctggaagccaggatgcaaatcctggaaagaccacaataaacagctggagtcacagttacacaggctaaggcagctgctggagcaaccccaggcagaggccaaagtgaatggcacaacggtgtcctctccttctacctctctacagaggtccgacagcagtcagcctatgctgctccgagtggttggcagtcaaacttcggactccatgggtgaggaagatcttctcagtcctccccaggacacaagcacagggttagaggaggtgatggagcaactcaacaactccttccctagttcaagaggacacaatgtaggaagtctttttccacatgggcagatgatttgggcagagcgatggaagtccttaagtatcagtcatgacagatgaagaaggagcagaataaatgttttacnactcctgattcccgcatggtttttataatattcatacaacaaagaggattagacagtaagagtttaccagaaataaatctatanttttgtgaagggtagtggtattatactgtaganttcagtagtttctaagtctgttaatgntttggtaacaatggcaggntttacacgtctatgcaattgtacaaaaaagttataagaaactacatgtnaatcctgatagctaatacttgccattccttatatggacgcatttngggt

SEQ ID NO: 45899 - DNA, 651 bp, Homo Sapiens
tggaatatgatcatggaaaactcaacctctatttagattctgtaaatgaaacccagttttgtgttaatattcctgctgtgagaaactttaaagtttcaaatacccaagatgcttcagtgtccatagtggattactatgagccaaggagacaggcggtgagaagttacaactctgaagtgaagctgtcctcctgtgacctttgcagtgatgtccagggctgccgtccttgtgaggatggagcttcaggctcccatcatcactcttcagtcatttttattttctgtttcaagcttctgtactttatggaactttggctgtgatttatttttaaaggactctgtgtaacactaacatttccagtagtcacatgtgattgttttgttttcgtagaagaatactgcttctattttgaaaaaagagttttttttctttctatggggttgcagggatggtgtacaacaggtcctagcatgtatagctgcatagatttcttcacctgatctttgtgtggaagatcagaatgaatgcagttgtgtgtctatattttcccctctcaaaatcttttagaatttttttggaggtgtttgttttctccagaataaaggtattactttagaataggtattctcctcattttgtgaaagaaatgaa

SEQ ID NO: 45900 - DNA, 507 bp, Homo Sapiens
ctagaagggaattggaaaagggcagaatttctagagaagaaatggaaacactttcagttttcagaagttatgaaccgggtgaaccaaactgtagaatttatgtaaagaatttagctaaacatgttcaagaaaaggaccttaaatatatttttggaagatatgttgacttttcatcagaaacacagcggatcatgtttgatatacgtttgatgaaagaaggtcgtatgaaaggacaagctttcattggacttcctaatgaaaaagcagcagcaaaagccttaaaggaagctaatggatatgtgctttttggaaaacccatggtggttcagtttgctcgatctgctagaccaaaacaagatcctaaggaaggaaaaagaaagtgttaaaaattaataaaggtttttttgaatcccgtgtccttcaagtgctttctaactttgagaggaagaaattgaccacctggactatggaactgtgcgtaacagctttgaaagtgtatttaaaaat

SEQ ID NO: 45901 - DNA, 642 bp, Homo Sapiens
gacacttgggaacaaaacagacaccctgggaatgcagttgcaagcacagatgctgccaccagtgtctctgaccaccctggtgtgactgctgactgccagcgtggtacctcccatgctgcaggcctccatctaaatgagacaacaaagcacaatgttcactgtttacaaccaagacaactgcgtgggtccaaacactcctcttcctccaggtcatttgttttgcatttttaatgtctttattttttgtaatgaaaaagcacactaagctgcccctggaatcgggtgcagctgaataggcacccaaaagtccgtgactaaatttcgtttgtctttttgatagcaaattatgttaagagacagtgatggctagggctcaacaattttgtattcccatgtttgtgtgagacagagtttgttttcccttgaacttggttagaattgtgctactgtgaacgctgatcctgcatatggaagtcccacttcggtgacatttcctggccattcttgtttccattgtgtggatggtgggttgtgcccacttcctggagtgagacagctcctggtgtgtagaattcccggagcgtccgtggttcagagtaaacttgaagcagatctgtgcatgcttttcctctgcaacaatgg

SEQ ID NO: 45902 - DNA, 843 bp, Homo Sapiens
  misc_feature (798)..(801): n is a, c, g, or t
  misc_feature (807)..(807): n is a, c, g, or t
  misc_feature (810)..(810): n is a, c, g, or t
  misc_feature (813)..(813): n is a, c, g, or t
  misc_feature (816)..(816): n is a, c, g, or t
  misc_feature (818)..(818): n is a, c, g, or t
  misc_feature (837)..(839): n is a, c, g, or t
gaattcccgggatgtgttttaggacattgcaaatcttctagaagttctcccccaaatcaggtcaatgtgtgccctcctgagctcccacccaggcatctccagtgctcatgatcatgtgtcccccaactccacccctcacagtttgggcctgtttctggcaaagagtcaggaaggttactgaattagggaacattttctgcaccttctgattttacttaagcagctaccattccatggacttgcctcccagagcagcacaatgcccgtctgagccccacgtggcaggagcctctgggacggggcacacacaggcccagcctctgtgctgtctcctcctctgtgcgcctcagactcggggtgagggaggcgggcagcctctcgccagccttcccgtccttcagttcaacgacatctttggagtgtttttgttttctcttccaagggccgtcccgttgtgttaggaagggtgagtggctggttccagggtgggccggtgccagctccggggtggactgaacagcggcggctgtccctgtgcatcctttgattactctcatgctgcatttactgtttacatttgttttattgtacataggtttgtaaacattattgcctgagatatttgtatataacttgggctttgtagcttttatttattcagaacgcatacggcatgttaatgactctgatggtgtcctcctctgggcagctgtataggatcatcatgtggttacaaaaaatacttccctcaaaaaaattcttttaatgtggaaaccataaatttcacagaaaaaaaannnnaggaanaanaanaananaaaaaaaaaaaaaaaaaannnaaag

SEQ ID NO: 45903 - DNA, 573 bp, Homo Sapiens
  misc_feature (512)..(512): n is a, c, g, or t
ctccaaatcaagctgctgcccctggagaaaaattggcggaagtcacagagcagtccccaccaaaagtgtttaccaagtggagtctttcctgctggcgtttcctcagggtcaggaagcaactttcccaggacaggggcaccctgaggtccgggtccactgagctatgggggcggcgtgggcctgggctgggttcttgccatcctgggcagcttcccggcgtgggtgactgagcccgggtcctggagtccgcggtcccagcgtctccacttctcagctgattcctagaagctgagtcccgtcccttctccgagcgtggtttcctctcccgccttgcctgcgtcgcaagcagttgtgggagcagaagtgtgtctgtgcatctgtgtctctgtgcaggtattttagaattgttaggatcattatcaccagctttacttttcccaaccatttttttcctcctttttttctcttccttcttctgccacagcaagacccccccgccccaagcacagtanctttctcagcgtcgaatccctccgtgggaccatgttgcaatgaaatttcaacatgcaaatg

SEQ ID NO: 45904 - DNA, 366 bp, Homo Sapiens
gccgactggcccctggagaaggatggtggggcataggctagggctgcagttggccagtggggctgccagtttctttctgggaccactctcgtcctcgggcattgcactggaaggctggaaccagcccaaactgcccacctgcttcacttccaatgactaggagccagcccagcctcctgccctgcccacacccctgcgccctgggccagtgccttgcgtttgatgttacctccacaccatctgccttaagaggaagggccgggcaaggcccctactccctagagaaatgtcttgggtaggagagggtgtgggatggtgggaggggaagcattaaatacagcaacttcttagaaaaaaaaaaaaaaa

SEQ ID NO: 45905 - DNA, 648 bp, Homo Sapiens
ggacttcataaactttataagtgataaagagtggaagagtattgagcccgtttcatcatggtttggtccaggttctgttctgatgagtagtatgtcagcactctttcagctatctatgtggatcaggacgtgccataactactttattgaagaccttggattgccagtgtggggatcatatactgtttttgctttagcaactctgttttccggactgttattaggactctgtatgatatttgtggcagattgcctttgtccttcaaaaaggcgcagaccacagccatacccatacccttcaaaaaaattattatcagaatctgcacaacctttgaaaaaagtggaggaggaacaagaggcggatgaagaagatgtttcagaagaagaagctgaaagtaaagaaggaacaaacaaagactttccacagaatgccataagacaacgctctctgggtccatcattggccacagataaatcctagttaaattttatagttatcttaatattatgattttgataaaaacagaagattgatcattttgtttggtttgaagtgaactgtgacttttttgaatattgcagggttcagtctagattgtcattaaattgaagagtctacattcagaacataaaagcactaggtataca

SEQ ID NO: 45906 - DNA, 535 bp, Homo Sapiens
gaaaagagaaaactgcagttgggaaaagcagctgtgcatttaagggtagggctttctgaaggatttctgatacagtccagaaaagggaaaatgatgacacagcagttgccatcttgaaaaatgccctttcctgcggaaagggtgttttgaagtctaatacaactatcatcacaaggtccctggactaaggctggatcgtgtaatttagaatctcaaattgtattttaattaatatgctggcaacagaatcattgaaacaggcatctcattttgtcaagttcttagccgttcagtttgtcaggggctttaatattttagatatcaactaatacatagtttcaacttttaaaaatgtttgaagattgtatgtaatataggtgcctatctatagtgccttagtaatttaaatcagaaatattttataaaacttctggttgttttgcagtagccaatataggcttcatgccctcctgaagatagtttcctctgaaatgtaactttaaataaacattattccaagaaaaaaaaaaaaaaa

SEQ ID NO: 45907 - DNA, 571 bp, Homo Sapiens
cggcggaagccctgagatgaggtttagggtggggagtgcctgctgggcacctgaaggatgacatggccctgcctgagcccgggccggcctcgggccacccacgagggcctcccggcctagggcccgaccgcgccggacgcggtgtccggggcagggcagggctggggcctgggcctcaggagcctaggctaggggcacctccgagagcccctttttgtgataatgttttgcactttttcgtacagggtgggcgggggcgggaggggctagcgcccctgaacttttgatgctttttttttgtgtgggagaggcctgatgccgtttctgctttctgctgagaccacccccaccctgacaccatcagtccccctctgtcctggggcctggcttggacagagaccaggatttggggctgagctggtttcccctccttcctccccaagggcttactctttctcttgctggaggtggaggaagggcgtccatgccaaggccccatacctgggccgggggcagcacggcctggctttcccccgcttcagtgggccttgccctttgtacagcctccacc

SEQ ID NO: 45908 - DNA, 574 bp, Homo Sapiens
ggattatagtagtactataccacctgtcagccaatgtgtgagaatggtggtttcatacattttctccaattctttcttgttacaggagcctccattacttttcaaacagtaatgcagttgcagttgcctctccttttcttcattatgtgtttatctctggcagtttgagccaagagagggcacggagaagtacaatgactagagagcacttctgttgaggctcattcattgacccctaccccagtgctttatgaatgtgtgctgcagatgtcatacagcatcacagcttcttctctaatttatgagccataatttttttttttgtatttttattgtattacctgcttggttgcaagaggatgatgaggaggactactataggataaatttgtttttatagagcaatttctcatgggtcacgagggatagtactccattttcctcactgatatcggcttgatcatctgagtcagtgggctcattgtggaaacatatggaatcctttatgctttttctcaggctgcttctgttacatgaaataaagccagagttgattgtgaaaaaaaaaaaaaaa

SEQ ID NO: 45909 - DNA, 1022 bp, Homo Sapiens
  misc_feature (628)..(628): n is a, c, g, or t
  misc_feature (634)..(635): n is a, c, g, or t
aggttgagcaataagaaaccagaaccttgcggcccagtggcccgggccagttcaggccgcctccccctcctctgcctggggccaggggaaaacccagccccttctgtaatcccccttcatttcctaccttccttcctcctctgtttagcaaaggagggcagctcacttggatgtccttacaacgcccctggccccaggttgagcaataagaaaccagaaccttgcggcccagtggcccgggccagttcaggccgcctccccctcctctgcctggggccattgagcccagcctccagggcccgggtgcgtttgcaggccagtggccactgtccgggctgtgatggcaccaaggcaggtggagcaccaggtaccacacagctgggcttcccaccaggctttcccgcgggggtctcagggagcttctccccagcgctgctcggagtctgcaggaactggccttgttctccttagcccgtcactccatacagtattaggtgaggatggatgcgggcgctgtccttgccgggaagtcactgttgaagttgcagtggcttgttcacacctgtgggaaaaagagtgaaaactttctccttgcattaaaaagtctgaactgtggaaaaaaaaaaanacaaannaaaaccccccaccccccaacccaaacaacaccccaccaaaccaagggggccggcccgctctaaaaatatcccccccgagggggccccaaaagttttacgccgtacccccagttttttttgtgtaaaaaaagggggcccccctaaaaagggggaggccggtataatataaaactttaagggcccctggggcccgcccgctttttttacacacccccccttggaactggggggaaaaaaaccgggcccaacccctttggggaaaaacctctttggggggaaaagaggaacacttctattttcttctgcgggggggggggcggggacacataaatgttgggggagagcaaaaaatctccttctctctacccgagagaagcttttttctta

SEQ ID NO: 45910 - DNA, 539 bp, Homo Sapiens
ccgtaaaatattaacacaaaagtaatttctatttataaaatttaaaatggcaggttttctgtgtgacgtttgagtttgagatgatttgactggcatgaggcccatcattgggaggtaaaaattacagcacaaagaaaactaagcaggtgcatatgaggtattgtctctttatgctcatcaaaaaataatctccaaaagaaaagttaaaaaaattattgttataaattgcatgaaatacatagtgggctcgattcatagcccccgtccgtatctatatctctatatctatagagacataacttctttcttcgtaagttatgtatgtctacttctacctgtgttatcataataaaggtgtcatgatgatacaggtggaggtagaaatatataacttatctcttcataagggctaaaatgagaactaaaagtaatgagaattcagttgaatatgattaattatcaggatatgttaattagttctcttgatgcttactgtgatgcaaagtatgtgacgtattttaagcattttataataattg

SEQ ID NO: 45911 - DNA, 1107 bp, Homo Sapiens
ggatggctgactgcccggagaatgccaccatgtctctgaagcatctcaccaagaagctgctaaaccgggatatccaggttgggaagagcggacattcctctgtggaagatgcccaggccaccatggagctatataagttggttgaagtcgagtgggaagagcacctagcccggaatccccctacagactagtggcagtggggacgctggtgatatgaggaggcagaggcagcacccaggagaaacagggcagtggaccaatggacagctccaccagctccacatctttggaagctagatttggggagagagaagctctaccccagacttaatacccattgaaatttcacctcaggtgttgtgtcctgtgtctggttaagtgtcccatggaaggggaaagccttcacgtcagaacccaaccctataccttttacttcttaaatggtgctaaccacaggtgtcccagggtgctctgtgccagttaagatttttaactttcaaggggcagggcatactgggaaatgtagtttcccaaactgccttatcacttgggtggacatatgtctccttttatgccttttggtcttgagtaattaacagcatcctcttccacgctcagaagtgttctggttggggccaggcatggtggctcacgcctgtagtcccaacacttagggaggccgaggcgggcggatcacctgagatcaggagttcaagaccagcctggccaacatggcgaattcccgttctctactaaaaatacaaaaaatgtgtggggtgtggtggcaggagcctgtaatcctagctactcaggaggctgaggcaggagaatcgcttgagcccaggaggsggagattgcagtgagccgagatcgtgtcamtgcactcmavctgggtgacaaragtgagactccgtctccaaaaaaaaaaaaaaaaaawttattwaccygggtgggtaawaawtgkgkgggcccygscgggggtggtggctcacgctgttaayccarmactttgggrggcgrggsgggcaawhacragkyagrrawtgaaacawcytgbtaaaagkgaaaccctttytawaaaaaaaaaaaawwaacmrggkggggggg

SEQ ID NO: 45912 - DNA, 571 bp, Homo Sapiens
atcaggcacatgatgaactttgtttattaggtctgtgattaagttcttaaattgttttgcagtcttttatgtttattatcataggtataggtggacctaaattccttatcatatcctttattaattcagccagtgtatccaccagttttttgtttatgtttttaagtaacctattatctctggatttcatgaaggtgtaatatcgtttttgttaaactgaatagaattgtatagcgatgacctcttaattataatttgatttgactgcaaaactctttcctcctctaagaggagatgatgtctgctttaagctgtaatgttttgccatgttgcaaaaagccataataataagtataaaaaagctttttcctttacaatttcatgttaatctggtttgtctgtccaccagagacagatcttctgtgacagcctccttatgcaggtctatcattatttgatagaatgtcctctaaaatacttcactcacattgtaattcaaattagaaagtcattccaaaaggatcatgtcatgttgacctcatttcatcggaactgcagtatatttttgttg

SEQ ID NO: 45913 - DNA, 832 bp, Homo Sapiens
gaagcatatgctgaggactcagccatgtggcctctggggaatcagtggatgaagacatccctcctccatcagtgtcatcaccaaagctggctgcgcttctccgggtatttagtactgtgctgaggagcattggggaacgcttcagcccaattcgggtcctccaattactgaggcatacgtaacagttgttctgtacagagtaatgagatgtgtgacggctgcaaaccaggtgtttttttctgaggctgtgttgacagctgctaatgagtgtgttggtgttttgctcggcagcttggatcctagcatgactatacattgtgacatggtcattacatatggattagaccaactggagaattgccagacttgtggtaccgattatatcatctcagtcttgaatttactcacgctgattgttgaacagataaatacgaaactgccatcatcatttgtagaaaaactgtttataccatcatctaaactactattcttgcgttatcataaagaaaaagaggttgttgctgtagcccatgctgtttatcaagcaatgctcagcttgaagaatattcctgttttggagactgcctataaagttaatattgggagaaatgacttgtgccctaaacaacctccttgcacagtctgcaacttcctgaggcctgttctgaaataaacattgaggcttttaagaatcatgtgttcaatgtagacaatgcaaaatttgtagttaaatttgacctcagtgccctgactacaactgggaaatgccaaaaactcgaggtctttaattgtatgactttgttttatccacagttaagccttttctcattaa

SEQ ID NO: 45914 - DNA, 684 bp, Homo Sapiens
ccggatctcatggttgctaggtcaacccccaatcctgctctattcttttagtgtcccagagagtttgttcccaggcctgagggacattctaaacacctgggagaaggacctcagaacccgatttaggactcagaatgactttgctgatctcagcatctcctctgagatagtcacactgccggctgtggccctctgactttaactctcctcccatatagaaggtactcagtaaatgatcatctctaggttggggatggcaaataatcatctcaactgccaattccaagtgtcttgaatacactaaggcacaatgctgtagatcagttggccacaaatgcaaagggcatgtaaataggtaatggtggtgctagtagcaaattggtagatagtacatacttgccatttctatactaggaagtcctcttagtggagatgttttcattttcactggataaaagatagaaggaaggagatgatagaggaaaagcagggtgatggaagacaagccaaacactcttgcatggtaaccttgtaaatatacctgctctatgtgggtgctgcatgctaggaaagtagggctgggggcttttctgcatgtttatatgcctccaactgaatttgaggagagtagaccaccagtatgcttaaatatgtgatacttggtaatgtaatacaccattcagg

SEQ ID NO: 45915 - DNA, 492 bp, Homo Sapiens
gcacgaggacctccagatccttactggtccagtcctcattccctccaccccatctccacttctgattcatgctgcccctccttggtggccacaatttagccatgtcatctggtggtgaccagctccaccaagcccctttctgagcccttcctcttgactaccaggatcaccagaatctaataagttagccattctctattgcattccagattagggttagggtagggaggactgggtgttctgaggcagcctagaaagtcattctcctttgtgaagaaggctcctgccccctcgtctcctcctctgagtggaggatggaaaactactgcctgcactgccctgtccccggatcctgccgaacatctgggcatcaggagctggagcctgtgggccttgctttattcctattattgtcctaaagtctctctgggctcttggatcatgattaaacctttgacttaaaaaaaaaaaaaaaaaaaactcgaggggggg

SEQ ID NO: 45916 - DNA, 494 bp, Homo Sapiens
  misc_feature (30)..(30): n is a, c, g, or t
atctctcaaattaaaaaaaaaaaaaaaaangaaagaaaaagagaaaaaagaaatttagaagaataacaagttattccaaatgaaggcgtaagaaagggaataataacaataataagaggagttgttcatgaggaaaaaccaaagcttgaaaattcaacaaagccagtgaagctcattcttgaaaacatgaatcacactcatgaattctaactacaatgaaaaagagaaagaaagagcaggcatgcatttccatatgggagtgagccagcagacagccctacagatcgtacacacgttttccaaaactaacaatggaacaggcggcaaacctatgccaatatactagaaattgcagattaaatagatgaaatattctaaactggagtttacataatgaacataagagtaatcagagaatctgactcattttagatgtgtgtgtgtgtgtatatatatgtgtgtgtgtgtgaaaaacattgactataataaaaata

SEQ ID NO: 45917 - DNA, 791 bp, Homo Sapiens
  misc_feature (571)..(571): n is a, c, g, or t
  misc_feature (768)..(768): n is a, c, g, or t
  misc_feature (791)..(791): n is a, c, g, or t
gggactgctaatgtatgtttctgcttgctgtgccttgttatggctgctttttttgtgctaataaagtatgtttggtgttctccttgtatatctgctgttttatacatttgcaacaatttctcttgtaaatggaatggtttggggtttttaaataagcattaactaacaacctttctatagttaatgcagagttaatgaacagtctaatattgacttatcagaataagctaactctaaatttaatgctctacatcttatcagtcataattatatatactgtggaacagtatctgtagttactgcaaattactgtacagtttaggttataacagaaaactgacagagaagtaataaacctattgatttctctgcttataaatgaaagattgaaactatccaatgacatattatagtaaatgagtatctgtaacctcccactgcatcagaagcaggttaaatgaagtcttgtgaatttgtaatagatcagtaccatttattggtttggggaccatcttaattaaaaataaatgcccaaaatgtagaactttaaccaaagacttgtcccttttanagcaaaatggggattgaagggacttataatttctgttgtttctaattaaagtccctgaagatcatataccaaagtgtttgagaacttcatccaaacctactttaaagcattattgtgcaattaaagttgttatgacataattatattgccctaaatgggtggggccttttttcttggaagcttataatgtacctggnaaaaataaacctcttggagaaan

SEQ ID NO: 45918 - DNA, 724 bp, Homo Sapiens
  misc_feature (448)..(448): n is a, c, g, or t
  misc_feature (662)..(662): n is a, c, g, or t
cacgaggactaatgctgttctgtctgctcacaagagataaagataccctctcatggaataaacaccttgcttagaattcatataacaaagaagtaaccttataactgctctctagtctgccttatttgtgtcatagagtaagatattccttgaaagcccattaagtggaatagactttctgaaaataagagttctttacctcagtcctcctctaatttggttgagaggaggtaatgaaaatggggacaggataaaaggtggcaactaaatttaaagcacagaagaaatgatttccttctagctatgagaatagtcaaattgagcttgccaggctgtctcattcctaacatgtaattcatgatttagccactaaatttctaaggagatcataagaaattaagaaaaacgtttaagtctagcctctgcgtggtagacaggtatggggagnggagaatgcttttcccctcccagtaataaaaaaaaatatatatatatatatatatatatatatatatagttttactaggttttcatggataagtttttaaatgtaagacaggaaagggatctatttgatgtctatcttcagatatattggcagttttccttaagctatttagttcctcatctgttgctttttcattttgtatactgcaagttcncaggcaactcgaatttgcaaacacagccatggatacactatttaccttacagtagtttcctg

SEQ ID NO: 45919 - DNA, 784 bp, Homo Sapiens
  misc_feature (763)..(763): n is a, c, g, or t
cttctgcattcacagcgcctcctggacctgaaggcatctgagtgtgagaccctgttctaactcttagaagtgacattgtaagaggtggtggggaccagctaattggtccaacccagcctgagtgcaccaccctttgaacaaatgtatcagtgatgaaaatttgcctttgccccggcttgccttggcctcccaaagtgctaggattacaggcatgagccaccatgcccggcctaaactttgtttttaaaatgaactttttttccccccaattgctgccaatagtggataacatgtatcactcactgccaaaaatagaaagtgaccatgaaaaataaatttgctggggaagggggctccatgctggtgtggccaaggctgagagctctctcttctctgttacaaaacgagataagcaagtgttagaattgccttaaggccacactggcatctccctgaccttctccagggacagaagcaggagtaagtttctcatcccatgggcgaccagggccatctcctcccaccagtggcccccactcacagggagctggcaatgccctacctgcctgttctccagatggagaaacaggctctgagatttcacaggtcttgcccaaagtcattgattttgatgattaaaaagaataaacacagtgtttcctgagtagcagtgattgttatgccttgctattttaataaagattctattttcgtataacattgtcaagtggaaacatgctgaaatctattaaaccatctttgnttgtggaaaaaaaaaaaaaaa

SEQ ID NO: 45920 - DNA, 581 bp, Homo Sapiens
cagtagcacctgggaaaatgttggaaatgcaaattcttgggctacaccccagatcaggcttaatcggactctctgggagtagggcccatcaatctgtgtttaacaagtcctccaggtgattccgatcctaatcaagtgtgagcccactgtctaatgcggtgcataccaaagcaggtgcacgggtcttaatcatcacctcagtcctctgaaacaggcaagtgtgtccattttacagaagaaggaactaaggcctggaaggcaagtccttgcctgagactaaacagaatcccagcaacataggacgaggctggaattcccacacctggactaatgcacagccagtgtttcaacgtcgccaacccagaaatgttttctctccctgtcatgctaattttcagccctttctgggtgacttgttcatcatccaaatatattatttttgttttgtttgactaaaggcaattatatttacattttctctaagtactggaatgtaatggttgaaattcctattcagtgatctggaagaactctaatgttctaaagtgattctttgataattaaagaaagatgaattatga

SEQ ID NO: 45921 - DNA, 554 bp, Homo Sapiens
  misc_feature (545)..(546): n is a, c, g, or t
  misc_feature (549)..(552): n is a, c, g, or t
ccagctacttgggaggctgaggcaggagaatcgcttgaacctaggaggcagaggttgcagtgagctgagatcgcaccactgcaccccagcctgggcaataagagtgaaactccatctcaaaaaaaaaaaaaaaaaggtacatgaaacatatgaagcaaaaagtgaaagtccccattcttttcctttttccagaggtgatttttgtggccaatctggtttcattccctcccagacacttttctaggcatctatgtgcctctattcacatataaacaaaataggagttttcctgtgcttcccttaaatggcatatgtatctttcactcttttttttcacctagtggatctttaataccttaaaagctcaacctgggcttggtgcggtggctcatacgtgtaatcccaggcctttgggaggccaaggtgggaggatcacttgagctcaggagttccagaccattccaaagcaaaaacaaaaggattttgagatcagtgtggacaacttagcaaaacaccatctctaaaaaaaaaaaaaaaaaaaaaannaannnngg

SEQ ID NO: 45922 - DNA, 479 bp, Homo Sapiens
accttattaaaggggagaggagtctggagggaatgccacttggcttcactaccaaaggttttatgacttagcattttaaaaggttttccttttaccaagaaatgcagaaaccaagagcaaaccccacgtaccagatcactgattcctactgaagcagctagcccgagaaaggactctctcatactggtcttgggaaatgacttggcagcctgagccatcccagcagtggacaaggatggttaattcttattctgtagacgtccacaggaacagactaggatggaaaacacagttaagcacagccatgcaccctgtggctgtagaaatgcccctgtgtgaaagaaaaataaattcaagactggagttttggaggaaaaaaaatacaagtagcatttacaacagctctttgctctttaaatttcttaccattcaataaagtgatccagtcactcacatttgaactgaaaaaaaaaaaaaaa

SEQ ID NO: 45923 - DNA, 477 bp, Homo Sapiens
ggatacggaccaatggaagactgagaactacattaatgagagcacagaagcccagagtgaacagaaagagaagtcgcttgagttcacaaaagaacttccaggatatggctataccaaaaaactcatcttggcgttaattgtgactggaatactaacgattttgattatacttctctgcctcattgagatctgttgtcaccgaaggtcattacaagaagatgaagaaggattctcaagggacagcgaagccccaacggaggaggagagtgaagccctgccataggaggagaacccagcccacctcaggcctcctgcaaaaatacatagcgtaaacaacggccatcaaaaaagcaggactgaagccagcggcccacacatccacagaggcagcgggcagagcaagcacagggccatcgttcctgcccttgtttcccagtctaattagtcacccagacctgaaaacatatgctcaggggg

SEQ ID NO: 45924 - DNA, 554 bp, Homo Sapiens
gttgtggagaaggccccagtgcagaatgaagcccccgctttaggaggtggtgaataccaggagcctggaggaaatgttaaaggggtttgggctccacctgccccgggttttggagaggatgtgcccaataggcttgtcgataacattgatatgatagatggagatggagatgatatggaacggttcatggaggagatgagagagctaaggaggaaaattagggaacttcagttgaggtacagtctgcgcattcttataggggaccctcctcaccatgatcatcatgatgagttttgccttatgccttgaatcttgaggttaataatcataaaatccctgctttctaaattcgcatttttcctggtgtacctttaatgtgaaccttttggcattcttctgcaattttctgattggagattgcattttgacctagtctgtaagtttttctgtcagaagaggactttcatcaactttcatggaaagatgtttattgcatactgtaaagttaataaagcaatttaaaagcagtctaaaaaaaaaaaaaaaaaacgcgg

SEQ ID NO: 45925 - DNA, 637 bp, Homo Sapiens
  misc_feature (401)..(401): n is a, c, g, or t
agcacaagcaggccaatacacctatggtcaaggcacctatggggcagctgcttatggcaccagtagctatacagctcaagaatatggtgctggcacttatggagctagtagcaccacctcaactgggagaagttcacagagctctagccagcagtttagtgggataggccggtctgggcagcagccacagccactgatgtcacaacagtttgcacagcctccgggagctaccaatatgataggttacatggggcagactgcctaccaataccctcctcctcctccccctcctcctccttcacgtaaatgaaaccactcaagtggtagtgactccagcagacttaattacattttaaggaacactgtctttccttttttttttcctcttcgccttttctttnttttttccttttttcttttttttttttttaatttttccccccaaccatcgggatttgtcttttcatgcagattagttagaattcactgccaggtttcttctgcccaccaaaatgatccagtctggaataacattttgtaaaaaaaaaatatatatatatatatatatagctgactgtaagagattatttcttcccccaacttttgcatgttgaagaatttgggctatttttcatct

SEQ ID NO: 45926 - DNA, 668 bp, Homo Sapiens
atgggattttgcccgttgtccagcctggtctcgaactcctggcctcaagtgatcagccctcctcagcctcccaaagtgctggcattacaggcatgagtcactgcgcccagcctgttgggtttttttggaaaaaaaccaaaaacaacaaatcatcatcctttcctttaaaatgttttttttttttaagaaacaattttcccacaaacggtctgatttaactccatgaaatcctctatttagactgccttaaagtgaaataactgttggtgaaccataacgacattttaccagctgtgtagtgattagtccaaatatgtctcaagaagttagcaccaagcattctcatccatttaaacttgatgctagggctattttgcaaaacttaaaaagatgcgatcttgtacatatttctgtaacctgagctgaaaacccaaataacaatcattgacatactttagggctattgtttcaggtgggggtgtatacatcccaggggcgtggagatgatcaatccattgaggaagtattaagatgattatttgtatttaatctcatccttttaaatttctatttttgtgtgttttataatgtacataatatattgtacaattgtacacttctattatttataaataaacatttattggtgcattaaaaaaaaaaaaaaa

SEQ ID NO: 45927 - DNA, 945 bp, Homo Sapiens
atggttgtcacaatacgtatatatgataaatggtgtacatatacagatgtttatggtgtataaatttttctatacccaattagaattatcttcctgattctttattcaataacatgctaattcctcttctatgttctatagtgacagaatgctaacttttcttataccctggcagaggacagaggagtctggtctaggatggggaactgaatttttgaacgaaaaggaaagagaaaggatgaaaaaacaaacaaacaaaaaaacacacgataatgtttcttagtcattttgattggccatttgaacagtctacaagtttaacgttatttccagtgaagtaggatggctgacctagcaatacatgtttcttcaaaagggkaaacatgctttagtgacctaaagctaaattttgtacatttgacatcagggatgttataagtactgcacttaatacaaagctatttctcaattgtgttatttttgagacaaatttttcttcaccattaacttcttgttggtagctttttgttttgtaaaarttgagagatggcaatgcttatctcaaccagattatccatctgcagaattaaggtatgcaactggtaaatraragacaaatgctccagtttgtctttctcaacctttgagttcttaacctttgagttaaaacctagtctaaatagtgggaatgtcttggtttacagtaaggttttcttgggaaggatcttggttttgtgatctatttgtgaattaaggagtagatgttaaccattattttatagataagtgatttgtacatggktagttataaatraaactggkactagaamccaggtttctgactttctaattcaatggktctgctaaatgtwcaaaattyttgctgtgmgtkaamtagcagtgttgaawawcttcatgamaagaacctttcyaagttttcaatta

SEQ ID NO: 45928 - DNA, 631 bp, Homo Sapiens
ggcttttattcatactaatcctcccaatgttaccccttccatcttccaagaagaaaaaaaatgcctgaatattcagaatagatatttctgatttgaaaattctaaagaattaaactggaaaagtatttcatttacttagtgctctgaatttacttttacagttttctgcagtcagtatcattaaaatggttaagtttacatttgaactgaaaatatgtataaaatctagcaattcacaaaaatgccctagaaatatagattttaatcaccattacataatgacaaaccttgttaaatgcttccacttccagtggcaaatgccactagggaaagtaagttgcactcatgtaagtatcaaactatataaaaggaggccttgtgcatttcaagtttgcaaagtacctgtgtacttaaaatatgtgtggagacctactgtacagtagttttgcccctttaattgggacacattcatcttaaatcttatagtatttatccacccaaaccccagactgagatactgctcccaggggcctaggtagctgccagtccgtgattttaattgctgtcttgaagttaacaagtgttataatgaaataatctacctgatgctaaataaaggctttagaatgtt

SEQ ID NO: 45929 - DNA, 522 bp, Homo Sapiens
ttttccacaggggacacatttcaattggtgtgtagtcaagtatagcaagtacttaataatgactgaatttcatgttcctacagtcatacatattcattagaagttttatgttgttggtctgatctgattcttctttgtttgtgggtggaacggcactgagagaagtatagttttttaaacttgaacatgttcagtagttacattgccttagaaaacccagacacatagcagtggaaatgaaagaaatggcatcagaagtgacttaatttagcaattgtgattcctcttgtaaaacaaaacaaaaaaacaatgccatattttttggagaaaagttggcaatataggggtttcgttgtctgtttcacaagaagactcatttgttcttttgggggaaccagtgccttacagattttgtatatactgtaattattcaggactagggaacaaacaattgtattgtatttgttacagattgtatatggctttgttttaacattcccctaaataaaatggcttcattct

SEQ ID NO: 45930 - DNA, 489 bp, Homo Sapiens
tacggcaggaactgagtcttccatacttgccttcaggcaccccagagcttgaagttccaaaaccaggtcagccctctgaacctgagcatggccccagccctggacaagacacgttctgccagggcaaagctgatgggctctatcccaatcctcgggaacggtccagcttctacagctgtgcagcggggcggctgttccagcaaagctgcccgacaggcctggtgttcagcaactcctgcaaatgctgcacctggaattgagtcgctaaagcccctccagtcccagctttgaggctgggcccaggatcactctacagcctgcctcctgggttttccctgggggccggcaatctggctcctgcaggcctttctgtggtcttcctttatccaggctttctgctctcagccttgccttccttttttctgggtctcctgggctgcccctttcacttgcaaaataaatctttggtttgtgcccctcttcccaaaa

SEQ ID NO: 45931 - DNA, 927 bp, Homo Sapiens
ggttagtcagtcccaaaattacggtttagtacagccacataatgtgccatctatgtgcattgcacaggtttataggtccagcaaggtgtgagaaattgccagccttgtataaaacattgactttatctgggtcatctcagactataactcctgtaaaatcagacgcttggaattattcagtctgaatcagcaagaggtcatgtcttcagttacaaatgagaagttaccctgctcaaagcaagagatctgtcttcagtaagtcaggtctcaaaggttactcatctggtcactctcagggtttatcaccagttagccagacacaggttagctattcatctcaatcacaagtttgtcaggtgtcaggtcttgtcagaaagctatgcttcaggggagtccctaacattaacagccccgttctcatttctgtagttcttctgcctcgtcgggcgtcagaagtttgccagagtctagcccgacccagaattatatttctatgcattcttcccaaaatgttcagactcaagagtcatcatctccccagtcccagaagttttgcctgctgtccagtcatcatcttttgcatcctctactcattgtcagacattacaaagtaacataacttccccttgacccaaagtcttatgctgaaagaaaagcttgactcagatgtgtatccatcgttcaaagcaagaagatggttttccaatgcaagagttacaggtgttgcagccacaagcatctcttgagtcatcaaccaaaggtatctgatggagaaattaatgctcaagaatcagttataacggtgtcacaggcagatgacagatattctcagagtgtatcagaagtaatcccgtcttgaagatcacgtatgggggtggtctggaaggcatcgaagaaagaaaaaaaactggggcataagcgggggcg

SEQ ID NO: 45932 - DNA, 912 bp, Homo Sapiens
  misc_feature (468)..(468): n is a, c, g, or t
  misc_feature (555)..(555): n is a, c, g, or t
  misc_feature (655)..(655): n is a, c, g, or t
ccacgcgtccgttttaatgcaaatggcactaggaagggtggcacctttaatttgcaccaaaatggaaataatttctcagatccacttttctccccagagggactcagagacgtgaaaccatgggatgtgtctctgtagagaggaagagagagtgaacccaagggagggggaatggaggaaaaggccatcatggtgttggggttgggggggcaattcagatgaaactgtaaggttgggaaagcttgtctggcagtctacctcgcccttcaaggggaatgagaaaaacatagccctaataagtcattaaggctatagtctgaattgtaagtcataacactatagcatgaatgcctctcccaggagcatttacttttgaaagagcttgacattgggtggacagatcaaaggaatgcatttttagtagcaaaatgttggagtccttggtaattatttggggaaataattggngtgtgatgtccttccagtccttcagataacgcacccggtgagtgaccgtgaggctcacgtaggcggccctcagtgcctgcactttangcgggagctccgccccaggaagcttgtgatttcaggcagaaggaacaaccccaaccctgggaagaggcctgtcagtactaagatctggtatcccttctangctgtgtgcagatttccacctttgagctaagataggatgaagcataagagtcctgcagatgggcctctttttgagggcaatgaaggggcaaagaagaagctggtaaaaaaaaaaaatgaagctgtgattaccagtggctttagactaaggaagctcttcccatggcctgttcttgggaaaaatggttccaaccacttgcaagcttgaaatttttctttggggggttctggcttgcaaaaaagctttcaaacagaact

SEQ ID NO: 45933 - DNA, 636 bp, Homo Sapiens
ctttcaggtggaagcaagaagcaagttttctcaggtatttgccacaggagcctggtggagctccaggaggtttgatctctcttgtgaactctggaactgtattcccaattgtcaattggacatccctacgtatgggacctcagatatttcaaacatgatgtgtccaagtctgtatcacttctggccatcatattgttcttttatttttccaaatttcacatcaccagtaacaaactagctgtgatcatggcagatagcctggaaataaaactcccctttttaccctttgcacagcaaattgacatcaaatcctgtttctactttttttttttttaactattgcttccctattctgtattctcactgctccatctcctgatgtaggaggtcatctgttttcctcttttcctctcctctgactcttaagccctttcccattctctttctcaggaatggctgttaaaatgccaatatggtcttgtaactttcctgtacttagtgaacctccttatttacaccctgtttgtgaagtggctgtgttcaccctgggtggacacggaatgtttttgtcatgtacaaagagaattttatgctgcctgtgtacagttattaatttgtaagtacactcagcttttt

SEQ ID NO: 45934 - DNA, 503 bp, Homo Sapiens
cagctgcagtgtgaattctgccccgtgacccggtggaaaatggcgatttgtggtttatttgaaatacaacaatgtccaagaggaaagcactgcaactttcttcatgtgttcagaaatcccccaatgaattctgggaagctaatagagacatctacttgtctccagatcggactggctcctcctttgggaagaactccgaaaggagggagaggatgggccaccacgacgactactacagcaggctgcggggaaggagaaaccctagtccagaccactcctacaaaagaaatggggaatccgagaggaaaagtagtcgtcacagggggaagaaatctcacaaacgcacatcaaagagtcgggagaggcacaattcacgaagcagaggaagaaatagggaccgcagcagggaccgcagccggggccggggcagccggagccggagccggagccggagccgcaagagccgccgcagccggagccaaagttcctctaggtcccgaagt

SEQ ID NO: 45935 - DNA, 898 bp, Homo Sapiens
ctgttcagctcaacacgacctactacatccaccagttactggggaaccctgaattcgcagcccctgaaatcatcctcgggaaccctgtctccctgacctcggatacgtggagtgttggagtgctcacatacgtacttcttagtggcgtgtcccccttcctggatgacagtgtggaagagacctgcctgaacatttgccgcttagactttagcttcccagatgactactttaaaggagtgagccagaaggccaaggagttcgtgtgcttcctcctgcaggaggaccccgccaagcgtccctcggctgcgctggccctccaggagcagtggctgcaggccggcaacggcagaagcacgggcgtcctcgacacgtccagactgacttccttcattgagcggcgcaaacaccagaatgatgttcgacctatccgtagcattaaaaactttctgcagagcaggcttctgcctagagtttgacctatccagaagttctttctcattctctttcacctgccaatcagctgttaatctgaattttcaagagaaaacaagcaaacataactgatcagctgccggtatgttcatcgtgtgaaattgcattccaagtgagctgtgctcagcagtgcttggacacagagctgcaagctgcgctggggtggaggaccgtcacttacactctgcccaaggcagaggtcgcattgctgtatcacagtattttattcaggtttctgcaaaaaaataaaaagataactttttttaaaacaacatgaatagaattttgcaaatttaacgtttttcaagatttatttcaaggaaaacaaaatgccttatgttcaacccactggttgtttaatgaacaaaagataccggtggcggtcttctggggggaaggacacccc

SEQ ID NO: 45936 - DNA, 755 bp, Homo Sapiens
  misc_feature (696)..(696): n is a, c, g, or t
  misc_feature (708)..(708): n is a, c, g, or t
agaaacactgggccaattgagataacacttggctcttctggttgacacagtgggatgtagaccatgctctgtttgataacacaccccagacgcaaacactaagacagatgtggtacatgaggatgaatatatctcatctttcattcgagaaatgaggagctctctctccaatgactgcagtatcagtttaaaatgcagaaaattcagcatgggctgtgagacactttaccctcagtcactctggtcctctgagatcagctagaagctctcactgggcatcctcgtgatttagtcaaaatacattatctaattaaagtgcttttcaaaagcagctccattataagagtcccccaaaggtctagtaaagatatctagaactggaaaaagcttgggaattctgttagcatttcaaagaaaagcattagaccaaagcaaggtggaaactgcttaaaaactagaaaagttaaatttaaaagccaagttccagaagtttatccaggtagaaaataagttaaaagcataaattggagaggagaaagaggaaggaactactcacctctccccaacattcctgtctttactaaccaaccctgcttcccagagccttaaaacccagactggtcctaatgcgaaaggtagccagggcttcctagggaagtaggaacaatgatagcaagacagaagataaaaagttgntttaaaagctgnttttaagttaagtgaaccttataaagacataagaaaaaatggactct

SEQ ID NO: 45937 - DNA, 845 bp, Homo Sapiens
  misc_feature (813)..(813): n is a, c, g, or t
gagggatcataaccccttctgtgccttgggatgccggagctgggggacctggaggcccatcagccggagccacgtgaaaggtactgaagaaagctgagacccggctgtgaggagcgcctcagcggtgaggtggtttagggataaatgtttctggaaccctgtggtcccccataatgttgatagaatatcatatgcactgggagttaaatatatttaatttaatgatcattatatatgtgggggttaatatgttgtttttctgtccctttaaagtctttacatgtaattgtagctgtataatcgttatttttcttttgcatcttaagtcttagaaattaagatattccatcgtgaggatgagagaggtcctcagtgtgtttttggtctggttgtagggaaggactcaagtcctggaatgtcctccactggtctactgagttgcagtcacactgttccaatggattatttgctttcggttgtaaatttaattgtacatatggttgatttattatttttaaaaatacagactaactgatgtaatgtttatgtataagttgcaccaaaaatcaaggacaaaaataagtgtgtttgtttttacaggtgtgaaagtcacagcttgtaaataagtgttgtatgtattaaaccttttccagttctccaaagcgatgtatttttgtacacttgaaatagagtactcttaatttactgggcaaatgtgcttggaattgaacttgacaagattagctcaagcagaatagagtcgggtcccagcagtgggtgggccctcgtgtgaatccccccgtgaatgtgcanagtttgtgggagaagaagggagcacccggggc

SEQ ID NO: 45938 - DNA, 524 bp, Homo Sapiens
tggcacccgacagcatgctcaagagcctgccacctgtgcacatcgtggcgtgcgcgctggaccccatgctggacgactcggtcatgctcgcgcggcgactgcgcaacctgggccagccggtgacgctgcgcgtggtggaggacctgccgcacggcttcctgaccctagcggcgctgtgccgcgagacgcgccaggccgcagagctgtgcgtggagcgcatccgcctcgtcctcactcctcccgccggagccgggccgagcggggagacgggggctgcgggggtagacgggggctgcggggggcgacactaaaagcctgttgttcccatctgcgccggcctccgtcatgaatgccttccgggccgggcggaaggggacgcgggctgtgccttacttaagtcgggggtggcaagggggcggggcgggggcccgaaagctgagaccctcgccacggggagggggacgcgcacacacaccggtcaccgagacggctggacctgcacgccaccgctgccttttgctgct

SEQ ID NO: 45939 - DNA, 493 bp, Homo Sapiens
aaacagtctaattccagagaatgagacttccagtttgaatgcaaagtgtgtggtcccaaagttgaattcttttgaacccaagtacatgcctgcggttgggaggaacacttaaagatgaagcaagttcggaggaaagtgttaactgaactacagagatggtcactgataaaacaagttcttagaagttctcagacacacccagaggtgaagggcagccaaaactatcaacacaatggaaaaatgagctcacccaactgcacacacagagcttctagaagggttaacagctcttgccataggttcctggttgtagtttacaatatctgcctttaccaccctctgtgactgttctatttctgctttgtttaatttgattccaaggatttcagcaacaactttttgaaaacacaggaagacagagtctcttgccttggctgaaacaaagtggctattaaaaccattttcctggcaaaaccgtaaaaaaaaaaaaaaa

SEQ ID NO: 45940 - DNA, 563 bp, Homo Sapiens
cggtataacccacagagagaaaaccgtgtctagggaaggcgatgcctggggctggaaaaaggaagcactctgcttgcccagaggctggaaggagctgctctgttccctccattcacccctgcctggctaagacctgcggtattcgggagcgtctgcacgcaagtgttcagtgtgcatatatggggagtcttcagttccgaagtcagccccgtaggtcattcccctaccatgctgggagcacgtgtcgtccacacagagcgtgcgtgtcaaaggatcaatcaccatcacagttgtgtgctgattgacaacaacaagactgagaaagaaatactcgacgcttttgacaaaatgtgctcgaagctgccgaagtccctgtcggaagagtgccaggaggtggtggacacgtacggcagctccatcctgtccatcctgctggaggaggtcagccctgagctggtgtgcagcatgctgcacctctgctctggcacgcggctgcctgcactgaccgttcacgtgactcagccaaaggacggtggcttctgcgaagtgtgcaagaagctggt

SEQ ID NO: 45941 - DNA, 730 bp, Homo Sapiens
cccgccaggagcaggcaggcgggggctggcgggccaggcggcccgggcccgctccgtggacgccctggacgacctcaccccgccgagcaccgccgagtcagggagcaggtctcccacgagtaatggtgggagaagccgggcctacatgcccccgcggagccgcagccgggacgacctctatgaccaagacgactcgagggacttcccacgctcccgggacccccactacgacgacttcaggtctcgggagcgccctcctgccgaccccaggtcccaccaccaccgtacccgggaccctcgggacaacggctccaggtccggggacctcccctatgatgggcggctactggaggaggctgtgaggaagaaggggtcggaggagaggaggagaccccacaaggaggaggaggaagaggcctactacccgcccgcgccgcccccgtactcggagaccgactcgcaggcgtcccgagagcgcaggctcaagaagaacttggccctgagtcgggaaagtttagtcgtctgatctgacgttttctacgtagcttttgtattttttttttaattggaaggaacacgtgagttgaagccctggccgattaccccttcccggagtctaataaaagggtattaatcacaagaaaaagaaaagagcgaaaagagacggagaacatgcgagaaaggacgacaggaaaaggaaacaagaggggggcggggcagtaaaattccc

SEQ ID NO: 45942 - DNA, 695 bp, Homo Sapiens
gggtcgcaggagctaaggggtggtacccaaatgttaggaacagtgttaggaaagggcaagggaaaagaagtgactggatgtcttatgagaaaccggtaaatgactaaaaaaaaaagcaaatgactaaaaacatgactaaaaaattatatatatatataatatatatattatatatgtgtgtatatatatacacataatatctgcaaattctaatttatctatgtgtgtgtatatacacacacacacatgcacatacacacatacgtccagacatctccctcataaaataaccatcagtttctatgaaaaccttaagtggaagccaatttcccatagtaaataatttaggagaaaattataatgcttaaaatgttgctcaaacccctgacctattactaaactataattggaacagtaaaatgcatatatgtaactatcatatcatgatttaaaattgcttaaaccattgctgcttaatactaatcaaacttaacggctgctaacaaaagttgtgaattattacacggcctctttgtaacgtgctgcatgttttttaaaacatctctgtgtttctgtttgttccactgctggtatttggaatgtaatttaacagttctcacacatggtttggttataaattctgtattgccttttaaggatataaatatacattttttttctatgtaaaaaaaaaa

SEQ ID NO: 45943 - DNA, 906 bp, Homo Sapiens
  misc_feature (13)..(14): n is a, c, g, or t
cggcttggtaccnnggtccggaattcctgcggataacaaggcaaatatttattgacatataagacattctgctaggcattgtaaaaaaaaaaaaaaaaagtaatggcttttgtatacataggtacttaagacagacatccaaaagaagaaaaaaatgcttaatgagtgaagatagcactgaaacatgttgacttttactctaggtttgtttttagatggggttagtattttcccctacgtaatgtacatgtctttaggccacagtattaggagtttgatttttccctgccccaccctcaggtaggtggcagtggtcattgtagcttaatcagacccctgttaagttcctgggcatttcaaggtaaattcacgtcttccttctcacagaaattgaatagacctctcacacacttatttacctcccccaacaacctgtatccttggccctttctgattttctctgcttggtctctttctactcttgacagctattcttacctacttcccactaaacatgcccaattttttaattaaaaaaaaaagaattcctatatttccttccctattagaatcaaagtgtcactcactcagagtgtgaacatcctgatttacaccaaatccactggtcaaagaaatgaataaagggaaaaggaaaaatgtggaaggcatgcaggaaaaaaaaaaaaaaaaaagcccttttctgtaaaaatgtccatgcctacacttgctttagaccatcccatatcctcctgcctccatctcgagtctttgttcacattccacaccacaagacagtgagggaggactgtacttttcagtaccatacaaaagggagaagcctgttctaaaagctggacgtggggtctccaattagtaccatgagaaagcaccaatttccccaaaggg

SEQ ID NO: 45944 - DNA, 615 bp, Homo Sapiens
gcttcgtacacaacttccaggagagcaactccttgcgccccggtcgcctgccgccactgcaaagccctgatcctgggcatctacaagcagggcctcaaatgccgagcctgtggagtgaactgccacaagcagtgcaaggatcgcctgtcagttgagtgtcggcgcagggcccagagtgtgagcctggaggggtctgcaccctcaccctcacccatgcacagccaccatcaccgcgccttcagcttctctctgccccgccctggcaggcgaggctccaggcctccagagatccgtgaggaggaggtacagacggtggaggatggggtgtttgacatccacttgtaatagatgctgtggttggatcaaggactcattcctgccttggagaaaatacttcaaccagagcagggagcctgggggtgtcggggcaggaggctggggatgggggtgggatatgagggtggcatgcagctgagggcagggccagggctggtgtccctaaggttgtacagactcttgtgaatatttgtattttccagatggaataaaaaggcccgtgtaattaaccttcaaaaaaaaaaaacaaccaccaccccccaaccataatcaccaagg

SEQ ID NO: 45945 - DNA, 585 bp, Homo Sapiens
gggccactctgcctcatttatgcaaatggagaaaggcgccctccctggggtcccttgagctgctgtaaggctgggctgctgcgacacaggcagcgctttgtaaactgtgaagccatatacgtgaaactgaagagtgcattgggcagtggaagctattttttgccttccctgtgtaacagtaaaatcatctctagtgactgagcactcagtacatttttgtttaatgttgggcctgaggttaactgtgaccatggtccagcttgagtggcttctggagcagccacattttcaaggactgtccaagagccagccagttcagggctcaggcctcacccattgcccactcctggggagaccatcacctggctcatcgtttccaccaagagtgccccacaggagtgccccacagacccgctggaccagcctgctgcgggtcctggccaggggtctggctaacggtgagggctgactctgaactgtctctcagtctccagaaagtgttcaagcctgttgtgttcccaaatctgattcctcctattgtcttgtaaatcaaactctaagtgaaaacttcccatttgtcccttc

SEQ ID NO: 45946 - DNA, 613 bp, Homo Sapiens
  misc_feature (8)..(8): n is a, c, g, or t
  misc_feature (553)..(553): n is a, c, g, or t
ctgaactnagaaatcctcctgccttagcctcttgaatagccgggactacaggtgtgcatgtccatgcccagccaactttatttctattttttgtagagacaggctcttgccatgttgcccgggctggtcctgaactgctgaattcaagtgatcctcccaccttggcctccagaagtgctgggattatgggtgtgagccaccatgcctagccaaaatgtttcttaaggtatacattttgggtcttagaagacttatacatttgtaatatttattactaaatatctcaaagtattacaataaatgttaccatgtgagctactttgaatcaggcttcttgcacaccaatttaaaaatgttaactcttgatatatacactagttataccactcatgtcagtcaataaattttaaggtttaagtgcaggcctttgtttacagaaatcctaattttttgaaaccataactctgacctgacactaaattcctgtagacatgctaaggaaaatctgcttagtatcgagatcaagaacttccattcaaaaagattattcagntatggtatttgcatattaccattggttaaaaataaaaaaatttttaaaaaaaaaaaaaaa

SEQ ID NO: 45947 - DNA, 592 bp, Homo Sapiens
tggaaaagtatcagcatatgtgtaaagatttatacagttgaaaacttgtaatcttccccaggaggagaagaaggtttctggagcagtggactgccacaagccaccatgtaacccctctcacctgccgtgcgtactggctgtggaccagtaggactcaaggtggacgtgcgttctgccttccttgttaattttgtaataattggagaagatttatgtcagcacacacttacagagcacaaatgcagtatataggtgctggatgtatgtaaatatattcaaattatgtataaatatatattatatatttacaaggagttattttttgtattgattttaaatggatgtcccaatgcacctagaaaattggtctctctttttttaatagctatttgctaaatgctgttcttacacataatttcttaattttcaccgagcagaggtggaaaaatacttttgctttcagggaaaatggtataacgttaatttattaataaattggtaatatacaaaacaattaatcatttatagttttttttgtaatttaagtggcatttctatgcaggcagcacagcagactagttaatctattgct

SEQ ID NO: 45948 - DNA, 764 bp, Homo Sapiens
aaacccatgataatgtatgtggaatatcctgccattggggttttacattaaaaccccagaatggctgcagaggggtgaacaggccccaatatttggggtgctgtgatacccctcttctacccacaaggagccctcttgatgatttctgtgaaatcgaggccccttgattgtttctgtgaaacaccctgcacccctagtcctttccccactgagatctttcgggttctctcccctaactcagctcttcgttcccagaaacccagatgtaatccccctacgtggtgcttggggcatcccgataccatctcagtaaatctcctacaatggcctcctcaccctccccgggacccacacccttcaggtcctcaccctgagacaggagggaccctctgagatcagggacccttaggtctcactgctctctgattcagagctcagctgggcccccagttccagaccccagcattcccggtcactccctccctaatctgagcatcactcaagctctttattaaactcaatttgggccagaaaaaaaaaaaaaaaaaacaaagagaaaaaaaaacaagaaaaaaaaaaaagaaaaaaaaagacaaaagaccgaagaggaccgagagacaagaacacgaatgccacgcaaagcgccgcgcggcgggggcgagagacccccaacaaggcacacaaggacgcagcacaggaacaacagcacacgcaggagcgcgggacaggacgggacgcggagacagagagcacgagagcgcgca

SEQ ID NO: 45949 - DNA, 916 bp, Homo Sapiens
  misc_feature (489)..(489): n is a, c, g, or t
  misc_feature (580)..(580): n is a, c, g, or t
  misc_feature (620)..(620): n is a, c, g, or t
  misc_feature (626)..(626): n is a, c, g, or t
  misc_feature (638)..(638): n is a, c, g, or t
  misc_feature (641)..(641): n is a, c, g, or t
  misc_feature (651)..(651): n is a, c, g, or t
  misc_feature (666)..(666): n is a, c, g, or t
  misc_feature (668)..(668): n is a, c, g, or t
  misc_feature (677)..(677): n is a, c, g, or t
  misc_feature (681)..(681): n is a, c, g, or t
  misc_feature (686)..(686): n is a, c, g, or t
  misc_feature (690)..(690): n is a, c, g, or t
  misc_feature (699)..(699): n is a, c, g, or t
  misc_feature (706)..(707): n is a, c, g, or t
  misc_feature (709)..(709): n is a, c, g, or t
  misc_feature (723)..(723): n is a, c, g, or t
  misc_feature (726)..(726): n is a, c, g, or t
  misc_feature (728)..(728): n is a, c, g, or t
  misc_feature (756)..(756): n is a, c, g, or t
  misc_feature (765)..(765): n is a, c, g, or t
  misc_feature (775)..(775): n is a, c, g, or t
  misc_feature (783)..(783): n is a, c, g, or t
  misc_feature (801)..(801): n is a, c, g, or t
  misc_feature (811)..(811): n is a, c, g, or t
  misc_feature (815)..(815): n is a, c, g, or t
  misc_feature (830)..(830): n is a, c, g, or t
  misc_feature (845)..(845): n is a, c, g, or t
  misc_feature (859)..(859): n is a, c, g, or t
  misc_feature (871)..(871): n is a, c, g, or t
  misc_feature (876)..(876): n is a, c, g, or t
  misc_feature (880)..(881): n is a, c, g, or t
  misc_feature (892)..(892): n is a, c, g, or t
  misc_feature (894)..(894): n is a, c, g, or t
  misc_feature (900)..(900): n is a, c, g, or t
  misc_feature (910)..(910): n is a, c, g, or t
gtaaagtgctcagcaaatgttaattgttgctagatctattgtgggcaatgatatttacacttcttggacaaaattggtttgatggtgccttagaggttaggatgtttctagatcaacgctggaagaaccaggatcaaagtgtggtctgggagtcaaagtcatgaatgaaaatgaagcaagccagaacctcatcagtggtgtccatgaatctgaaggtacagatgagggttggacctggagtctcaaaagagaagggtcagaaaactgaaactcaacatgtgtccagcactattcagttttatctcatagtcaagcctccaaaatccaaacacattgtcagcatctgctttgaaggtaagcattgcaggtaggatgaggcaacccaaagatggcattgagaaagaggcagagcccttggacactgtgcctggtgagtgtgggttggtgggggaaaggcaggtgatcattctgatacagggccttggggtnactagttttagttgtcctgtgacacttttgggaaatctccaacctttgtgagattaaattccttatcaataaaatgtggggaataaaaatngcaccccatagggtttttgtaaagatcaaagtgaactagnctttgnaaacctatccanctntccataaaanttttaaaagggtccntnatttaaagnaggnaaganatanaaaaaaaanacccccnnangggggggggccccnggnanccccaaattcccgccccaaaaaaggggngggcccggntttaccaaantccccctngggcccggccgggttttnccaaacgggncggngcccttgggggaaanccccctgggggggtnccccaacctttaancccccgctttgnagggnaaannccccccctttntncccaancctggggggnaaattt

SEQ ID NO: 45950 - DNA, 565 bp, Homo Sapiens
cacgcgtccgttgcagtgagccgagatcatgccactgcactccagcctgggtgacagagtgagactgtgtctcaaaaaaaaaaaaaaaaaaaaatgcctcagttttgttaagaggaaaaagcaaatcctaagttacagtggaacttatgaacaccctagcctagagatttaatttagtgatgaaaaggtacagagagagtctttcaagaaaggacctagtctgctcgcgttctctctctctctctctctatatatatatgtatatgtgtgtgtacatatggaccacttcaagctacacacacacacacacacacatatacacgtgtatgaatatatatatatggctataagtggtgcgacttgcaggtactccctttgttcacctttgtaaagatgttattgccagttcagtgtgtatttctatagtatatatgtaaacaatttgtcatccttttgttgctgcttttgaaactagttcatggcttcagtgggggagagatttaaataatatgggtttataatttctgcattattaaatgcagataacttgtgattaaagagtatg

SEQ ID NO: 45951 - DNA, 456 bp, Homo Sapiens
cgagggctggctccttctttctccctaatcagtgtccttatttcagtgtgctcacatgctcgcctaggactgctttagagtacaactctggacccgccctcatcacagtccaatctaccaaactgagtgaccctaaaggacatcatagacaacatttgaaagcaagaaatgcaaaatgttcccatagcatcaggtgagcagggagaggatgcccactgtagaccacatggaaatggcagtccctccacggagagggaatcacaggaacacatttaccaaagccttcccttccattcctggccattccagtagcatcttcctcatccagaagggcttccaatactctctggaggatcctgactcgtttggagtattatccttgtaaaagatgctggcacattgtaggtgctcaataaatgtgttcaattgaaaaaaaaaaaaaaaaaaaaaaaggac

SEQ ID NO: 45952 - DNA, 740 bp, Homo Sapiens
cagccagacaacatcaaggctctcttccgcaaggcaaggtgctggcccagcagggggagtacagtgaggccatccccatcctgagggcagccctgaagctggaaccttccaacaagacgatccacgcagagctctcaaagctggtgaagaagcatgcggcgcasggagcacggagaccgccttgtaccggaaaatgctgggcaaccccagccggctgcctgctaagtgccctggcaagggtgcctggtccatcccatggaagtggctgtttggggcgactgctgttgccttggggggtgtggcactctctgtggtcatcgctgccaggaactgaccacctaggtggctgccaccccctctgcacaccatggaccctgccctgcgctccccaactcccccaggctccctgtccactgccctccctggtctggccccctcctccgggttaggggagcaaggattgggggtcgtgcagcccagccagcaggagggactgaggccctctaggaggaaagcccagagggagggggccctcattccttcagacccagttttcccccaccctccttaccccgctgggctaggtctccgccagggctggcctcagtttctcctcaacaggcctgggggcagcccttcccctgcctagtccccgcctgagtgccagcsccccaccccgcctgccgccccctgttcaggttccctccccgccacagtgaaataaagcatcccaccctgca

SEQ ID NO: 45953 - DNA, 718 bp, Homo Sapiens
tgtgtgtgaaaggttataaaaggaatggccgggtgcggtggctcacccctgtaatcccagcactttgggaggccgaggcgggtggatcacctgaggtcaggagtttgagaccagcctggccaacatggagaaaccccgcctctactaaaaatacagaaaattagccaggcatggaggcacatgcctgtgatcccagctactcgggaggctgaggtaggagaatcgcttggatccgggagctggaggttgcagtgggccaagatcgcaccattgcactccagcctgggcaacaagagcgaaactccatctcaaaaaaaaaaaagagattataaaagggatgatgaacatggagctgcatctttttaaacgttgttttttgatgcttcagactcttaatgcttttatataaagctatcaactgtttgttgatcacagtttataagaaagaacaaatcaagattggcaatccttgccgatcttttagaaataccttttctggagaaaaaaaaatccacatgaagtgcaataagcttataaagctaagtagttattaatatttctattacatgaatcaaaggatgatgattgtaagtgtttactggactggcagtttttatttcagtatttagcacagggtcttgccagttgttgggggccatgtattattttccggccaactgggtgaaatgttacattaatcgaatgggaaaaaaaaaag

SEQ ID NO: 45954 - DNA, 595 bp, Homo Sapiens
ccaagtatctcaaatgcccggaatgcagagctccggctgcgatggggccaaatcgtccttaagaacgaccaccaggaagatttctggaaagtgaaggagttcctgcataaccaggggaagcagaagtatacacttccgctgtaccacgcaatgatgggtggcagtgaggtggcccagaccctcgccaaggagacttttgcatccaccgcctcccagctccacagcaatgttgtcaactatgtccagcagatcgtggcacccaagggcagttagaggctcgtgtgcatggcccctgcctcttcaggctctccaggctttcagaataattgtttgttcccaaattcctgttccctgatcaacttcctggagtttatatcccctcaggataatctattctctagcttaggtatctgtgactcttgggcctctgctctggtgggaacttacttctctatagcccactgagccccgagacagagaacctgcccacagctctccccgctacaggctgcaggcactgcagggcagcgggtattctcctccccacctaagtctctgggaagaagtggagaggactgatgctcttcttttttct

SEQ ID NO: 45955 - DNA, 632 bp, Homo Sapiens
atttaaaatgagccggcagtctctagacacacaccgatcctcaggctagtccgagccctgaggtcaagaatgaaatgcacttcccttctcattttctcaaatagatcttttccagccgtctcacagttgaccccaactttggaactcagatcataggatctcccagaggtttcaggtgttcctaagaagcttctaaaggaagttttggaagaaagactaataggtgtaaacatataaacatatatattatatatagctatatatatttaaagagatctctacatatatatatatataaatacaactactgtactctctgcatctgtacaaagtatgagttaaactgcccaggtagtgtgagatacgtaatgcatgaatgtgaatatcctgaaatctgccttcttagcaacgtgccgcgtgtactggagagaggacagttgctcctgggagttctctcaatgggcaaatgtacaagttgatgccgtcttatccaccaacaagccattaaggttggtttcctgctgagacttttgtaccggaagcgagaccggcagcactgggggtgtccatatgccacttatgaggaagaaagcaccatgacttttttattttcaataaaaatatagagatgt

SEQ ID NO: 45956 - DNA, 596 bp, Homo Sapiens
ccccaaaatacccaaattcttcatggttctgcccttctctgtcctttctgctccccttgctcgcctgggaaatggaggaaaggccttccctctcacactgtcttgggatcttgctgagaattcagactgctcgaaacagtgacaaaccccagccatccagtcattcgtggagcacaatttggatgtggccccaggggcatctgtcccattcagagaaccttggcagtgcgatggccactgttcccaggcttcaacctcagtgaccccccccaacaactccccatggagagtccctgcccaaaaaagctgtaggatccaaggggtgtcaatagctcgttcccggcatcacctacacaccacaagcaggttttaatggaagcaagttgctccaccaaatccacaaaagggtaaagtttgtgatttttctttatcattgcgatcaccatctgaacgtaaggagtgcacttgtttggaagttctgacttctctgatctgtcttggtcgtttgtgttataaaaccaaagttctctacagactttatttttgtacaatatcattttgtaactttttacaaataaaaactcatttctattaaa

SEQ ID NO: 45957 - DNA, 774 bp, Homo Sapiens
  misc_feature (712)..(712): n is a, c, g, or t
  misc_feature (736)..(736): n is a, c, g, or t
ttcagatgagtgctgtgtccgccaccattaccatcaacctctactttggctccaaggtccgctccccggtcagcgggatcctgttcaataatgaaatggacgacttcagctctcccagcatcaccaacgagtttggggtacccccctcacctgccaatttcatccagccagggaagcagccgctctcgtccatgtgcccgacgatcatggtgggccaggacggccaggtccggatggtggtgggagctgctgggggcacacagatcaccacggccactgcactggccatcatctacaacctctggttcggctatgacgtgaagcgggccgtggaggagccccggctgcacaaccagcttctgcccaacgtcacgacagtggagagaaacattgaccaggcagtgactgcagccctggagacccggcaccatcacacccagatcgcgtccaccttcatcgctgtggtgcaagccatcgtccgcacggctggtggctgggcagctgcctcggactccaggaaaggcggggagcctgccggctactgagtgctccaggaggacaaggctgacaagcaatccagggacaagatactcaccaggaccaggaaggggactctgggggaccggcttcccctgtgagcagcagagcagcacaataaatgaggccactgtgccaggctccaggtggcctccctggcctgtctcccccctanaagaagaaaaacccaccacccacnaatcccaaaacacacaccacaccccacaacaagcgggg

SEQ ID NO: 45958 - DNA, 580 bp, Homo Sapiens
  misc_feature (515)..(515): n is a, c, g, or t
  misc_feature (561)..(561): n is a, c, g, or t
cacgaggtgaatttttaaatttagatctttaaatcaaattatttttatgcatattttcatttaatatagagtataccaatcgattgaagcctttcacaagtagtgcgctgagcttttcttattgaagagagtgaattagtttctgagaagtcaatctattgtgaaaagtttcagatgagattattttcttttagtctttttaaatatcactatatgtatttaaatagaagcaataaactagagagagtgtttcttgaaaagacaatgttttatttgccaccaggcagaacagaatgagcattggtagagaaggctccctcttggtatgttactgataaacttgtacttcctcatacttgtttgtggttctactgacttatttccaaacttaagagtaatgtacttcgaaaacaacttggttattctttaaatttcaggtaaaaccccttttcctaacactcatcttatttccactgtcttatttcctctcagatgttcatatttcacatgttcanaatgaagcgtactatttcccctccaataaacgaagtctcctgccanaaaaaaaaaaaaaaaaagt

SEQ ID NO: 45959 - DNA, 580 bp, Homo Sapiens
  misc_feature (492)..(499): n is a, c, g, or t
  misc_feature (501)..(505): n is a, c, g, or t
ccacgcgtccgcccacgcgtccgggttttggtctctcttgctccactgcaaaaaaaaaaaaaaaaaaaaaaaaagcctgaagagatgagataggaggaaagacctcacagccagatctgctgggttttgaggagtgattttctttcttccccttgaaggggaaaaagctattttcattggtacatttaaagtcccccaactatggggaggtaccaattctggacaagtgccactacaacaacactaaacctgaacttttcaactccgttggtggtgggaggcagcgggcagaaatttactgttggccactgccaggtctatttcatatttcaaaggaatattgggtgctgcatataggaactgaaggggtcaatgtattaaacctgtgattggttgttttcctgtcattttgagagactaaatgtggggggcagatgtcaaaatacctgtacaattttaaaatgtcacaattaaacatgagctggtttcccnnnnnnnnannnnnaaaataaaaaaacaccaaacacccccccccaaaaaaccccaaacaacaaacaacaaacaaaaaaaaaaaaagggg

SEQ ID NO: 45960 - DNA, 886 bp, Homo Sapiens
tttttttttttttttttttttttggtaaacgaaaagcaaacttctttattgtacacagtacagaatataacgcagcttggcaggatgcatacggccctgcgcaggggaaagtatttcaaatcagctggcaggttcaagcctttctgcactgtagactttccacactctggaaaagaagcaaacaaacaaaccccaaagaacccccgaaaaaaacaaaaaccatccgggaggtgcatgagtccaatgggaatgcaaccgtgatgccgctgtcctatgcccagtgacagcacaggtcacgtaagttacagcaggggaggggtagctcaagctacagaggattattgtcatattgctaagacagcataaatccattcaaaaaaaaaaaaaaaaaatccaaaccagggtaagtaaagaaaggaaaaccaaatctatacagcatttacaacaaataaatctctagccagctgggggtaaaatatgcatctatgtatagactatgtgtaggttaagaaagctataaatatggtttagaaagagtcctttgattagagtacaatgctaattaaggcccaatctacaggtttaccacctttgtgggctaattagcttccaataaaggagaatctcatgtttccatagctataaagtgcaccccttatccctgcgaacctctttccaaatgtgctgttggtcataaggggaaaagtttgagactatggaatgctcccaggaataaaaaagcagtttcaaagcacgggtcccccactcaccggaaccagccccggcccccccttcccttacaaaggaaaaggggaattcatttctttaaggtaataaaggtttcccggggaaaacaaaaaaaatttcttcccaccaaaaaacagga

SEQ ID NO: 45961 - DNA, 583 bp, Homo Sapiens
ttttttttttttttttttccatgttttaacacctttatttgtcactttaccaacttgacacacaatgttaacgacagcagacacaggagcagtgtgcacacagacacgagctgtttcactacaggtttgcaagccaggctcaacagcaagtccaacaggcaacaccacacctctcacctgcaggaggaacagcagggccaccccaccccgcggacgtccgcggtgagtgcggtttagacatcagcagaagtggctttcagagtcagaacagccatgacgtggacatcacccgtcacactgataaagtgatgcactcagtactccctaatgttaatcacacagtgtaaaaatatattgcacatatatatatatatatatatataaatttgtttccctttcttgaaaaaaacttagtacaaactagtagttacacgatccctttcaagtttctcttaagttgtgcagatttcctttgtggtttggcttggtttagttttttaagaggtcgaaagaaagaagtaaagcatctcgatgtgcccaggactccccatcacatgcccagggacaaacgctgcaccctgga

SEQ ID NO: 45962 - DNA, 616 bp, Homo Sapiens
  misc_feature (453)..(453): n is a, c, g, or t
ctggctccaatcaaggtggagccggactcgccttctcgcccaggagcagttgggcagcaggaaggaagccatgggctgccccagtccacgttgcccagtccagcagagcagcacggtgcccaggacacagagctcagtgcaggcactggcaacttctatttggtatgaagcactctattcagtcaccaccatataggtcacttctctcatactcggtcttgaggatattctggattaatcctttctatgcagacgtgtctggtttacaaaaggacgcagccctggactacaagtctggaactgacaagttcttatgaccttgacaaatcaccttaacccatctgagccttaaattctcatttatttcctgcataaggagattcggctaaatgctttctgaggtcctttggagtcctgtggctccatggtaatgtgctcctttccttgaagatngggggtttcgtaatgttgagatactttgcctctatgcttgtcagctcatgaccagtcctagaagaggagtcgagacataagccaccttcagaggttcaatggaaactttaaaaccataccaaactcttttttaaacattagaattaacaaaaaaaaaaaaaag

SEQ ID NO: 45963 - DNA, 623 bp, Homo Sapiens
  misc_feature (11)..(11): n is a, c, g, or t
tttagaagtcntagaaagaatttttaaataggccaataagtcttaaacttgagtacttggcttagaagaaagtcaaaactccttcctttttgactaagtggtttgtttctggggagctcttaatttctatttttataatcattagcctataaggaaattgtgtcttccttgttctcagggtgatctgctgaccttgttcactcatgaagcatttgggtatcatacttatagtgtctgaaacataaactgtattgagctagacaaggtatagcctcctcttcaagtagcaaatactatcaaaagctataatgcagtaggagcaaggtggtccttgttccagtttttgtctcagttctgctgctgatgtaccatgatcttgggaaggtggtgtctcagtgtggagatctgacacattgttaccgtgcctcctggctggagggacttggagaacaatgcagttaagtagaatggttttaacaatacagagaaatttattcatttagataaaaatctgatttttagaactttaaaagctttgtacagtgtaaatagatttaatgtatttaacatgctttatcagcacaaataaaggattttaaaattttgtcaaaaaaaaaaaaaaa

SEQ ID NO: 45964 - DNA, 520 bp, Homo Sapiens
  misc_feature (482)..(482): n is a, c, g, or t
aaaaagagagagggtcttgctctgtttcccaggctggaggacagtggtataatcctacctcattatagcctccaactccagggctcagtcgatcctcctgcctcagctacttgggaagctgaagtgggaggatcacctgagctctggaggtggaggctgccatgagccatgatcgtgccactacactccagcctgggtgacagagtgagatcctgtctcaaaaaaaaaaaaaaaatcacccttaaatcaacaaaaagacctcatgctcatgcagtggacatttcttggcctgttttcctgtgggttttcttcagcatgatatgaagcaactgttggcatagccagtgggataaataagaaatggaatcatttggctgcctcgtcacttgtgctaatggtcagttgtacacacatgacatgtggaagtgacctgtagcagcggtcactcattttaacaattgaactctgctgggttgggtatntacctttgtctagaaaagaaatatgatatattttctct

SEQ ID NO: 45965 - DNA, 567 bp, Homo Sapiens
ggtacaattattactaccattccacagactagcaaactcagagacgtgacatggtggctctcccaggtcacacagccagtaagtggcctctgaccccagtaccccccacttaatcaccatgctatgctgctaccagtggtacacactcagcccctctccactgtcagatcctttgccagtcaaatcccagatccccgggggggcactgtggcaccctctttgagcgtggcctccctggagctgctgtcagagccatgggctgtgggagtgagtgtgcacactccttctcctgaagtgtctgccccagcctgagctatgcagaccggagctctcaaccagggtatggggctgtctggcagggtttcccagaaccctgtttcctgtggtcataaatatgggttttcctgacaatgttgggaggtcagggactgatacagctggggttccaaccgccgtgggtcagacctggctcctccggaccccactgctgtgaccaaggaaatctcaccagctgtgtccaagatcaaccctgaccctgttactccaatgcctttgtaggagtatttt

SEQ ID NO: 45966 - DNA, 737 bp, Homo Sapiens
  misc_feature (716)..(730): n is a, c, g, or t
acctgaagaaactggcagctacttggtatcaaaggatcttcccaagcattgcctctataccagactcagttcactgcaaaaattaaaggaacatctagtcttcacagtatgtttatcatatcagtactcaggattggaagatactgtagaggacaagcaggaagtgaatgttgggaaacctctcattgctaaattagacatgcatcgaggtttgggaaggaagacttgctttcaaacttgtcttatgtctaatggtccttaccagagttctgcagccacctcaggaggagcagggcattatcactcattgcaagacccattccatggtgtttaccattcacatcctggtaatccaagtaatgttacaccagcagatagctgtcattgcagccggactccagatgcatttatttcaagtttcgctcaccatgcttcatgtcattttagtagaagtaatgtgccagtagagacaactgatgaaataccatttagtttctctgacaggctcagaatttctgaaaaatgacctccttgtttttgaaagttagcataattttagatgcctgtgaaatagtactgcacttacataaagtgagacattgtgaaaaggcaaatttgtatatgtagagaaagaatagtagtaactgtttcatagcaaacttcaggactttgagatgttgaaattacattatttaattacagacttcctctttctnnnnnnnnnnnnnnnaaaaaag

SEQ ID NO: 45967 - DNA, 686 bp, Homo Sapiens
tttcctttcttcagactccgtccaaggagatgctctccccggtcttctgctgcaatttagattcctttcccttctctccagttctccttcccttaccaaggagaggggagcaaatggttttgggcaagggctttggccattcatgtcaagctggttgtgggtttttcaaggtgccatagccacccccaaatatgtttgtttaaagcgtggggttttttaatctctgccacccttgtcaagggagtcttgtaaagttgccgagggtaggttcatctccaggtttcgggattcccatccgtcctggcgatcctgccagcagtgggtgggcagcctgagctccctcgggctcgcctgccagcctggagttcttcctgtgctccttgatcacctgagctgcctcagattccatttggtcctctccttcctggaaggcttccttttatgttttgttttaatcccaaatgtctgaatgttttgcagtgtgtaggggtttgagccccttgttcattctccttcctttttcctcccgcttccctctccatgaagtgattctgttgacaataatgtatactgcgcgttctcttcactggtttatctgcagaaatttctctgggcttttttcggtgttagattcaacactgcgctaaagcggggatgttccattgaataaaagagcagtgtggttt

SEQ ID NO: 45968 - DNA, 624 bp, Homo Sapiens
gacatccacctccagagcaacactggccccacagtaaaagaggaagtcttgtacctcaggcaggcccatctagagctattgctccttcccacagcaaaggtattgtggatgacccttagaatccattctctggtcttctgaaataccaagggcagatgtcacctccttcctcagcaggactgactctgggctctacaaccagctccttcacataaagggtttagagactccccttggctcccagtcaccatatccagtgttgtgtaaagagactggccaacaggaccaaccaagcaccttacctctcccatacaagatgaccctctgagcttttcatttattcaagctctgtggtacagcctttttttaaaataaattaatctatattggttgacaaacaagccaccaaccactgactgcaaaactgcctgatgcagttgggttcctcctggttttcttttgttacaaccacccttgcctgtttacattaattgcaaggagcataacgtacaggctgtatgtacaatcctgggcattgactctgtgacatttctagcatatccaaggcaccaccagtgatttctcctgtttcttggtgggggtgggggggaaggtacgtattct

SEQ ID NO: 45969 - DNA, 660 bp, Homo Sapiens
aatgaagtaaatatctgtttaatttacaaacatcagcagtgtaaccgatattaatctggagaaagacaaagcacactgaattatacatgtacatctaattttctttgtaaaaaaagaagttttcaggaagaaacatctgcatctttacagggcaccctgggattttaatgagggaagagcacagttcactataaaccattatcaattctacattgtaatttagcagcaaacatgttaacatgggagcattaagataaataagggagttttattgtttgagggaaagaaaagtcacagttcttgatatgacagtctttttatccccacctcacccccagaaaagggcaaaaaaggtcaaggacatattaatttgcaaaaggtctactttctagtgttgattgctacacaccatttcgtttctgtgaggacatgttgcagaggggccacttctttctgtacaatgaccatctcacatacagatttctgttttcctttctcggactttgcatactctctgcagtgtcctgaatgaggccagtaggtcattgacatcagtgatcatctggcccttctggtccccctggttcttgctggaaagaagggcttcgtgttcctcgtgtgaccaaggtcagttggccgaacttgagaagaaggtgcagt

SEQ ID NO: 45970 - DNA, 622 bp, Homo Sapiens
gcttgaataaacttcatcgaaaagcttgtccttttgaccagactgccatcaacacagatattgatgtacttcctgtcaacttcgcacttctccagttagttggagcccaggtaccagatcatcagtcaattaagttaagtaatctaggtgagaataaacactatgaggttgcaaagaaatgcgttgaggatttggcactctacttaaaaccactaagtggaggtaaaggtgtagctagcttgaaccagagtgcactgagccgtccaatgcaaaggaaactggtgacacttgtaaactgtcaactggtggaggaagaaggtcgtgtaagagccatgcgagcagctcgttcccttggagaaagaactgtaacagaactgatattacagcaccagaaccctcagcagttgtctgccaatctatgggccgctgtcagggctcgaggatgccagtttttagggccaggtaagataggttactatcttaccttttttattagctattggggcttgaggatgccaatttctggagctcggtgaatcctgagactcaacccgtctttatatgtacaaatcttgatattattaaagataattgtttcttgtcaaacaaaaaaaaaaaaaaa

SEQ ID NO: 45971 - DNA, 955 bp, Homo Sapiens
  misc_feature (794)..(794): n is a, c, g, or t
  misc_feature (955)..(955): n is a, c, g, or t
gatattgatgtacttcctgtcaacttcgcacttctccagttagttggagcccaggtaccagatcatcagtcaattaagttaagtaatctaggtgagaataaacactatgaggttgcaaagaaatgcgttgaggatttggcactctacttaaaaccactaagtggaggtaaaggtgtagctagcttgaaccagagtgcactgagccgtccaatgcaaaggaaactggtgacacttgtaaactgtcaactggtggaggaagaaggtcgtgtaagagccatgcgagcagctcgttcccttggagaaagaactgtaacagaactgatattacagcaccagaaccctcagcagttgtctgccaatctatgggccgctgtcagggctcgaggatgccagtttttagggccagctatgcaagaagaggccttgaagctggtgttactggcattagaagatggttctgccctctcaaggaaagttctggtactttttgttgtgcagagactagaaccaagatttcctcaggcatcaaaaacaagtattggtcatgttgtgcaactactgtatcgagcttcttgttttaaggttaccaaaagagatgaagactcttccctaatgcagctgaaagaagaatttcggagttatgaagccttacgcccaaaacttatgccccaattgttcatattgccctggaagcaggaatccctatttcccctggagcgggatacccctccgtcgcaatcgaggatttgcctcataaaacaccctgtgaggtgctaccacttgccacagtgccnggccgccgcaattaaattggcgacggaccgcaccaggaaattgagacttcgtttttgatgcgcgcacctgacgacccggacggcagggaaagtgccacagggggcgataataatccagagtcttcctttcgagcaacacgaacgaggcatattacgcgagn

SEQ ID NO: 45972 - DNA, 671 bp, Homo Sapiens
ggatccatttattaattcaacaaatatttattaaagtgcctaccatgattatgtgctgtagaaaagacaaggacatttactaggggggattgtgggcccaatcggcatcataagcatgtctgaagcaaaagacaataatcacatccaacggcaccagttcagctcaactttagaattcagcagtaacagtacagatggcctaaagtacatctgtgtgtatctgtacgtgtgcacacacccatgtatatatatttatctatctgtacaaacactacatatgtatacacactatctatgtaaaatataatatatgtataatgcatataaattctaacaagtgtatttgtgttatctttaaaatagaacaattgtatcttgaagtggtaaatgcagagaattggttttattgttgatctgtggatttaatgatttctaggtgaaaaggacgtttaagtgtacaatttcttttcttaatttaatatatttatgtaaatgcatgcctgacatttggttagattggctgtgttttgtgtcttttaacatgatcaaatgattaaactttatcttatgacttgatgtacatgtgctatttttaaattcttttttattttaaatttaaacttttttcaaataaacagactgataaataaacaccaattttaaataaaaaa

SEQ ID NO: 45973 - DNA, 585 bp, Homo Sapiens
  misc_feature (555)..(555): n is a, c, g, or t
tcggaccctatgcgtgtacacagacagtaagtggagcaggaagatctagcacagtccttgagcctggtgaaggatgtgattggagctgtagacagcaaagtggcaagttatgaaaagaaagtgcgtctcaatgagatttatacaaagacagatagcaagtcaatcatgaggatgaagagtggtcagatgtttgccaaggaagatttgaaacggaagaagcttgtacgtgatgggagtgtgtttctgaagaatgcagcaggaaggttgaaagaggttcaagcagttcttctcactgacattttagttttccttcaagaaaaagaccagaagtacatctttgcatcattggaccagaagtcaacagtgatctctttaaagaagctgattgtgagagaagtggcacatgaggagaaaggtttattcctgatcagcatggggatgacagatccagagatggtagaagtccatgccagctccaaagaggaacgaaacagctggattcagatcattcaggacacaatcaacaccctgaacagagatgaagatgaaggaatncctagtgagaatgaggaagaaaagaaaatg

SEQ ID NO: 45974 - DNA, 553 bp, Homo Sapiens
ttttccaacctggcatgggtgtctgttgcaaaggggtgcatgggaaagggctgttgatattaaaaacaaacaaaacaaaaaagccccacacataactgttttgcacgtgcaaaaatgtattgggtcaagaagtgatctttagctaataaagaaagagaatagaaaacacgcatgagatattcagaaaatactagcctagaaatatagagcattaacaaagtaaaattaatatattaagttataattggaatatgtcagaagtttctttttacattcatatcttaaaaattaaagaaactgattttagctcatgtatattttatatgaaagaaaacacccttatgaattgatgactatatataaaattatattcactacttttgaacacattctgctatgaattatttatataagccaaagctatatgttgtaacttttttttagagaatagctttatcttggtttaactctttagttttattttaagaggggaaaacaaaaatatcttgcaagcagaaccttggaaaaaaaaagccatgaacacttattctaa

SEQ ID NO: 45975 - DNA, 703 bp, Homo Sapiens
ggttaattcactctttggatgacaatagctctcagctgtcctttttacaggaggttgcatcctgcagccttgcctgtgttaaagggagtctgtctcagtccatcaaacagtatagaactataaatgggcatctggatcattaaagtatgtccttgtttagaaactttggcagtcctagtatttaaactgttttgaggatcaaatttttggttgcccttaagatactttgtcacagtttttatgtttgctatactgccgaatgaatttatatctcccaaagttgagatgcaacaactaagtaaagcaactatgtatgctttgtctgtgaattgttccacagactgatagattttgtaaataattcttccaaaatcatgtatttaaagcagttttgcatatacattatgtaaaaaggtgattttataaaagcagtttttaaattcatgtttgtacattgaaaggggttttttttttaaacctccttttctgtgtttaatatgctgtagaataataacctagatgctctagactgtatatcaggatctgatttacaagaaaaagtcagagctaaacactagtgatggcatagcattactgaaatcattgtttcttaatttcattttactacattgtgaacttgtgattcagattccattttctcagaaaattaaaaaacaaaaaaagtactcttgtaaaaaaaaaa

SEQ ID NO: 45976 - DNA, 498 bp, Homo Sapiens
ggaattataggcgtaagccaccacacccagccagaaagtggttctcatgatgcttctcagaccggcaacatcagcatcactggaacttgttaaaaatggacactctcagaacccacaccagacccaccaaatcagtttgagaactgccattcagtagagaattatttgcctactgtaaattttctaaggatttatgatgggctatttttgacccataggctcagagaatcctgcaaaatccttttttattgtttattctgcagacaaaaatgtgacaatatgctttgaaaacatagatatacttgagtaacatttatttacataaatcccaaattctacctctgaaggtatatgaaatttaactatgtatgtattatgcattttgtctggctttctatcataattttaatttgtaaagaatgtgcttacttgggaaagcaaattaaagtgactactgtttgctatcgttaaaaaaaaaaaaaaaaaaaaaaaaaggac

SEQ ID NO: 45977 - DNA, 553 bp, Homo Sapiens
gccgtagtgtgctcggattcccggctcgagccgggatttatttttggttttgggtgaggaaagtcatgttttctaagtcctctcccctaataaaacctacccaacaatagtgctttgaaaagtggtagttatcttgaagatactcttgccaaatgcaaagataaacattctttttgtctgctttataaatatgaaatatgccagatctatagtattttaatgtgcatctactttaaatgagtcatcttggggtttttataattcccttatgttcttgcccctctacacttgaaataacaaaatgccttaattttatggattagttctcttatagtagacaggcagctatatgcagcaaaaccaataaagttatttttcaactttcatagttgtaaaatatcttataacagaatacaaaacagctaagaaaacatgccacattttattttagcattttcaaataatttgtttttggtgtaagcacaggataaaaaaggagagcgtcaaagaaaagagacataacacctaacattcataaaaattaacaaagtat

SEQ ID NO: 45978 - DNA, 680 bp, Homo Sapiens
  misc_feature (680)..(680): n is a, c, g, or t
ggcatacaagattcttcctttgacagtgttcgtgaaggtttagtacctttgagcgtttcttctggtaaaaatgtgataataaaagaaaattttgccttggagtgctccccagcctttcaagtaagtgatgatgagcatgagaagatgaacaagatgaaatttaaagtcaaccggagaacccaaaaatcaggaataggtgatagaccattacaggacttgtcaaataccagttttgtttcaaataacactgctgaatctgaaaataagtcagaagatctatcttcagaacggacaagcagaagaagaaggtgtactcctttctattttaaagagccaagcctcagagacaagatgagaagatgaagtgaatttatggattctggtttttctgaattttcaaagcataaggaatcaaaacagaaatatagtatcaagaagatgaaatgcttaatgaaaaggtttttttttttgtttctttggcctttcatggagtgttgatttgtccattcttaatgtttattaataggtatatgtgcataaaatagctattttgtaacattaaactttttgagtcattttggtcatcatataacttaccttcctgtttattttagcttctttttacctagtagcctttaaccaaacaataacctttttaacaaataaaatgtgtttaatcn

SEQ ID NO: 45979 - DNA, 596 bp, Homo Sapiens
cacccttattaaaacaggaggagggagggatttgtggtgacctaccgctgccctccctttctaagagaagaggaggccatggggtatgataactaaatgaacatctctggaagttcctccgtctgatatgtgtattctgacataacagaatttcccaagacttctttgaggaaggctgtccacgcttcaggcaaagtttacccattattattatgattttgaatattccttgttcattacagtccagaaaatctgcagaagttctccatgttcagtggttgaccagaatctgattgttgcgctcaattaaagtgctttattatttagctaaaacaacttatatggaagttaattatttcaggaaatacataataagaccaaaaaaatcactggataatatgtagatatattttagttccattactattaatagcaattagataactctccctccccccattgaggtgagaatgggctcctagatacttggtggtcaatagaactgatttgattaactttcatttaactgtggttattgttacatctactgattttttcaaataaaaatttctagaaggctcaaaaaaaaaaaacag

SEQ ID NO: 45980 - DNA, 759 bp, Homo Sapiens
agatgggtaaatggtgctaatgaacatggctttgtcttggtgtcttttggagctggtgtcaagtatctgtcagaagacattgctaacaaactggcaggagctctggggagattgcctcaaaaagtgatttggaggttttctggacccaaaccaaagaatctaggaaacaacactaaactcatagaatggttaccacaaaatgacctgcttgggcattcaaagattaaagccttcctgagccatggtggtttgaacagtatttttgaaactatgtatcatggtgtgcctgtagtgggaattccactctttggagaccattatgatactatgaccagagtacaggcaaaaggcatggggatattgctagaatggaagacagttactgaaaaagagctctatgaagcactagtgaaggttatcaataatcccagctaccgtcagagggctcagaagctttcggaaattcacaaggatcaacctggtcaccctgtcaatcgaactatctattggatagattatattattcgtcacaatggagcccatcacctacgtgccgctgtccatcagatctccttttgtcagtattttttactggatattgcctttgtgcttttgcttggtgctgccttgttatactttctcttgtcttgggtgacaaaatttatctacagaaaaaatcaaaagtctgtggtctagaaataagcatagcacagttaatggacattaccacaatggaatcctcaatggcaagtacaaaag

SEQ ID NO: 45981 - DNA, 504 bp, Homo Sapiens
  misc_feature (329)..(329): n is a, c, g, or t
  misc_feature (363)..(363): n is a, c, g, or t
  misc_feature (487)..(487): n is a, c, g, or t
  misc_feature (491)..(491): n is a, c, g, or t
ctgctccgcccctctctgggcctttggaagataaggaacctgccatttctcagagggtctgccctgttgctgggattcctcaccagagttcttgcctcctcttcgggcagtggcctgcagcagcccctcccagagcagaaatcctagggttttaggaagcagaggtggggaacagggttggactgcctgggcctcaggtctctggagggaccagggtctctggccttcaaccccctgttaggagctgctacccctccctgtgccctgtgctcaccctctcttctcccccaggggcagctggactctctgtgacatctaaagttatcggnggctttgctgggacagctcttggggcctggctgngttcacccccttccagctgaacaccacactgaggcagggagttggctctcttggtggagatgactttcctgggcctctggatgacaatcttccaaaggacaagtctcctactcccaaaactatntaanggagcatgaaaaa

SEQ ID NO: 45982 - DNA, 664 bp, Homo Sapiens
gcaatggcttgatgcttagtgtggcaatcaaaagcttgcctgggcagatgtaggcaggggctagacaatagtcatggagttgtcaccaggtcactgtctctctccttccccttccagatctctactgtcccctgcagccaccacaagggctaagctgttgaatgagccccttggtttttccttataaacgcaatgacttacttgtgattcttggtctaatcccaggctaagaaacaaaacaaaagcttgtgatctgacccattcctttgctgccttccttctctttcaggcacctggacgtatttagtattctgccctgtgccttgcccaggggagggagaagtttctagcaaatgtggctttctgtctgctgcctggtgcttttatagtacttcatctgctttttattgttgttgttgtgttttttaaccaaaatggcatttgtttggctgtcattgtcgagtatatatttattgtgttttacaaacatgagtatatatgtatgtatatgtataaaaccaaacttatatatataagaagtcaaggcatgtatactagatattttaaagagttatttatcaagggaaaaagatgtgtgttataaagtaaacagagtctatattttctatataatgtagatagtcaaacatagcttataaattat

SEQ ID NO: 45983 - DNA, 797 bp, Homo Sapiens
  misc_feature (549)..(549): n is a, c, g, or t
ggccaggccagtacggaagaatgtgagaaaaataagcaggacacaattacaactaaaaaatatatctaagcatttgcaaaggcgacaataaattattgacgcttaacctttccagtttataagactggaatataatttcaaaccacacattagtacttatgttgcacaatgagaaaagaaattagtttcaaatttacctcagcgtttgtgtatcgggcaaaaatcgttttgcccgattccgtattggtatacttttgcttcagttgcatatcttaaaactaaatgtaatttattaactaatcaagaaaaacatctttggctgagctcggtggctcatgcctgtaatcccaacactttgagaagctgaggtgggaggagtgcttgaggccaggagttcaagaccagcctgggcaacatagggagacccccatctttacgaagaaaaaaaaaggggaaaagaaaatcttttaaatctttggatttgatcactacaagtattattttacaagtgaaataaacataccattttcttttagattgtgtcattanatggaatgaggtctcttagtacagttattttgatgcagataattccttttagtttagctactattttaggggattttttttagaggtaactcactatgaaatagttctccttaatgcaaatatgttggttctgctatagttccatcctggtcaaaagtcaggatgaatatgaagagtggtggtttccttttgagcaatccttcatccctaagtcggcatggtttataagaaaaattagaaccctccag

SEQ ID NO: 45984 - DNA, 664 bp, Homo Sapiens
ataataggtatcttgtgctttaatactttatggcaggattgtactataagcaaatgaattaaacagctatgtaaatcataaagaaaaactaaaaatgaaccaaagtgaaaggataacttccaggcagtatctttctattgtaacctgttatttaaggaaatactagtgatttcttctaaataggatgtaaaacttctttcaaattactcttcctcagtcctgcctgccaagaactcaagtgtaactgtgataaaataacctttcccaggtatattggcaggtatgtgtgtaatctcagaatacacaggtgacatagatatgatatgacaactggtaatggtggattcatttacattgtttacacttctatgaccaggccttaagggaaggtcagttttttaaaaaaccaagtagtgtcttcctacctatctccagatacatgtcaaaaaaagaaaggtgtttgtgcttccgtttgtttctgctcagtaatatagtcaagcaagtttgttccaagtgacccattgagctgtgtatgcattttgtttatttcaataaaatatatttgtattatttgtccttcatactatccatccataccacactatcttctgtatcaggtagtctaaatagaaatatacctgttttgttctaaaaaaaaaaaaaa

SEQ ID NO: 45985 - DNA, 845 bp, Homo Sapiens
gtttcggtccggaattccgggaaaccctatgaatgtaaggaatgtggccaagcctttgctcagtactcgggcctttctatacacatacgaagtcacagtggaaagaaaccctatcagtgtaaggaatgtgggaaagccttcactacatccacaagtcttattcagcatacaagaattcacacaggagagaagccttatgaatgtgttgaatgtgggaagaccttcattacttcttcccgtcgtagtaaacatttgaaaactcatagtggagaaaagccctttgtatgcaagatatgtgggaaagcatttctatattcctcacgccttaatgttcacctgcgaactcataccggagagaaacccttcgtatgtaaagaatgtgggaaagcatttgctgtttcctcacgcctaagtagacatgaaagaattcacactggggagaaaccctatgaatgcaaggatatgagtgttaccatttagcccatcggttgccatctttaattattggcaatgacaccaaagattatcagatttgtcctaaatgccttttggaggttgtaatgactcatggattggccttagataccatcctgagggtctgaaattaaacctacaggttctgaatacaacatcatggttgcctgagtctgggcatctgtgaagaagggtcatggatggtgaggtcagtactgcaggctgcctcaccttggtgattagattcctaagatcatagcattaacaagttgtgtatgagataaatcatgcagattgaccccagcccctgttggttagtggctgccagtgtggcacatttatgtcaaaatttaccagaagccaagatgatg

SEQ ID NO: 45986 - DNA, 1026 bp, Homo Sapiens
  misc_feature (696)..(696): n is a, c, g, or t
  misc_feature (916)..(917): n is a, c, g, or t
  misc_feature (933)..(933): n is a, c, g, or t
  misc_feature (977)..(978): n is a, c, g, or t
  misc_feature (985)..(985): n is a, c, g, or t
  misc_feature (1000)..(1002): n is a, c, g, or t
  misc_feature (1008)..(1009): n is a, c, g, or t
ggtgatgctgaagggagacacagccttggatatgcgaggacgatgcagtgctggacaaaaggtattagcctcactcatcattcgcctggccctggctgaaacgttctgcctcaactgtggcatcattgccttggatgagccaacaacaaatcttgaccgagaaaacattgaatctcttgcacatgctctggttgagataataaaaagtcgctcacagcagcgtaacttccagcttctggtaatcactcatgatgaagattttgtggagcttttaggacgttctgaatatgtggagaaattctacaggattaaaaagaacatcgatcagtgctcagagattgtgaaatgcagtgttagctccctgggattcaatgttcattaaaaatatccaagatttaaatgccatagaaatgtaggtcctcagaaagtgtataataagaaacttatttctcatatcaacttagtcaataagaaaatatattctttcaaaggaacattgtgtctaggattttggatgttgagaggttctaaaatcatgaaacttgtttcactgaaaattggacagattgcctgtttctgatttgctgctcttcatcccattccaggcagcctctgtcaggccttcagggttcagcagtacagccgagactcgactctgtgcctccctccccagtgcaaatgcatgcttcttctcanagcactgttgagaaggagataattactggccttgaaatttatggttttttgggaatttttttaaaatcatagttaaaatggtaccctccggaaaattaacaccttctcccttggcacggggggtttgaaaaaaaccggggattttaaaatttctggggagagcgaccaacacaaaagggggagaaaagaagggggggggcccccccccccctctttattnntaaaaaaaaaaaaacncccccccccctcccctcttcgggggggggggggccccccctccnntaaacanaaaaaaaaaaaaaannnaatagnngagtggggcccgggccc

SEQ ID NO: 45987 - DNA, 568 bp, Homo Sapiens
ccaatcaatgggggggaaaagctatgtcttcagggacagtagagtgatgagaattttttagaaaacactattatccatcaaacttaaaagcatttggacctgatatttaaagataatgaagttttccacatattgaagtattcaagacatcttccatccacaaaaatttatctttaagttttgtaaatatcaagtaagtatagatgatatttattttatatattcctatggaaaaaatactactttaatgttctgacatttgtgattatttgccagtctttactttttaacttattaaaaagttaaatacttattaaggtttctctatgtaaaacaatttaaattgtcttttgatttttagggaaatatctaaacgtgggaaatttccaacgcaaccttaatattaggttgtgttatttatagagctaaagttaatgcatttttgaatttctcaggagcactgcaaggcaaaaaaatactccaaataaaaatgatatatgtaagttggcaatgtcttcagtcacaataaaaaaaatttttagcagaaaaaaaaaaaaaaaaaacgcgg

SEQ ID NO: 45988 - DNA, 693 bp, Homo Sapiens
gcacgaggacaacttatactgtctgacagttcaaaatctctttcagctgcgctcttcccaccgagccgagcttactgtgagtgtggagatgttatcccaccatgtaaagtcgcctgcgcaggggagggctgcccatctccccaacccagtcacagagagataggaaacggcatttgagtgggtgtccagggccccgtagagagacatttaagatggtgtatgacagagcattggccttgaccaaatgttaaatcctctgtgtgtatttcataagttattacaggtataaaagtgatgacctatcatgaggaaatgaaagtggctgatttgctggtaggattttgtacagtttagagaagcgattatttattgtgaaactgttctccactccaactcctttatgtggatctgttcaaagtagtcactgtatatacgtatagagaggtagataggtaggtagattttaaattgcattctgaatacaaactcatactccttagagcttgaattacatttttaaaatgcatatgtgctgtttggcaccgtggcaagatggtatcagagagaaaccatcaattgctcaaatactcagaaagtactgtcaaaagcctaataaaaaacctaaagtttgctctgaaaaaaaaaaaaaaaaaaaaaaaaaaaacacttaatgggcggccgcagcttattcct

SEQ ID NO: 45989 - DNA, 713 bp, Homo Sapiens
agtctggagacatttttggttgtcagaactgcgggagggggtgctagtgacatctatgggtagaggccagggatgctgctcaacttcctaccatgcgtggggcagcgccctcccacccccaaacaaagaataatccagctcaaaatgttattagtgccaggttgagaaactctggattaagtaaatagggcatatattgatttttggctctgagcttgccatgtctgtggtgttaagatcaagtccctgtagtgtggaggaaaaagtgttgagaataacaagactgggggctctagttctggatccagcatgtgattttgggcaaatgatctaacctctgcaagcctcagtttcttcatttgttaaaaatgggcgtgggttgggtgcagtggctcacacctgtaattccaacattttgggaggtcgaggtgggtggatcgcttaagcccaggagttggagaccagcctggacaatatggcaaaaatgcatctctacaaaaaaaaattaaaaaattagctgggattacaggcctgagccaccgcgcctggtcaaaaagggggtggttctaactttcatcttagggtagctgtgaaaatgaaaggagatgatacatccacagcacttggcacagggcttggcatacagtacatgctcaataaagggagctgttgccacctcttgtggtccctgctagggagggtgaggccttggc

SEQ ID NO: 45990 - DNA, 896 bp, Homo Sapiens
gcctacagagcagtaggaaacctcacacctagccagtgccctgctctgagacactcagactaccaccctttccccaagtataacgtcaggcccaagtgtggacacactgccgcccatcccatcaggtcatgaggaagggttcttttaacactcggcacttctgtgggagctattcatacacagtgacttgatgttcttggaggatcaacaaaactgccctgggaaagcatccagtggatgaagaagtcaccttcaccaaggaactctattggaagggaaggtctcctgcccctagctcaggtggctggggagaactaaaacaccttcactggtggttgggggtaaggagcggggcacgggggaggaggaggtagggggcagtaaaaaacttactctcttttttcctctctgtaattggttatcaggaagaatttgcttaatgactaacaccctaagcatcagacctggaatttggagttgcaaagtgactatcttcccatttcccatctcattttcaataacttcagcctcccattctttcctttggaatgagagtttctttttacagaagtaggacaggcttctcagaaaacaaaaaaaaaaggtataggcggaatttagctcagggcttgaacaggggacagcatctgactacttatatacgcatttgtccacacttagacccattcggtcgtgtacacacaccaaaattgcctgtgccacagaagcaaagaaacctttcaagaggttgtgctccggggtgtgtacctcggggataaataaggatcgcttgcccaaggcaacccaaaggattttcaccagtggggggcatcaccaggccacctgtccatgaagttgtccacctggcttgcacaacttgttgcaaaccccgaaaa

SEQ ID NO: 45991 - DNA, 768 bp, Homo Sapiens
  misc_feature (686)..(686): n is a, c, g, or t
  misc_feature (757)..(757): n is a, c, g, or t
gtggagagcgacgaagagcaccgaggtttcaatctgcggctgacaaacgggctcatcataatgcactggaacgaaaacgtagggaccacatcaaagacagctttcacagtttgcgggactcagtcccatcactccaaggagagaaggcatcccgggcccaaatcctagacaaagccacagaatatatccagtatatgcgaaggaaaaaccacacacaccagcaagatattgacgacctcaagcggcagaatgctcttctggagcagcaaggggaaagcgagagctgatcaagttctttgttcctggggaattcacttctcttcctccctcatggaagatgcaagtaaaaggaaatgcaagtaaccacctggtccgtgcactggagaaggcgaggtcaagtgcccaactgcagaccaactacccctcctcagacaacagcctctacaccaacgccaagggcagcaccatctctgccttcgatgggggctcggactccagctcggagtctgagcctgaagagccccaaagcaggaagaagctccggatggaggccagctaagccactcggggcaggccagcaataaaaactgtctgtctccatcgtctcatcctcctttcagttcgttggtagaccctcagaacatttaagagatctttatttttctctttctcgcttttttttttanatttttatttttacgtagaagtcttggacaacagtctcgttctccttcccatttccactgtatatttttantgtattccttc

SEQ ID NO: 45992 - DNA, 488 bp, Homo Sapiens
gcactcctagccctacctccggcccttgcgaccacacccattctcactgtgaatctccccgctggggtcggagcgtcgggcagagttggggagtggggaggggactgagccggccggagggccccccgcacccccgctcccacccaccccgggactgataatgtgaagttcctcattttgcacaagtggcactagccccagggccaacccttccttcctcagtcaccaagggcggggagttctggagtcggaaggcgaagagcctaccaccaggtctcccactcccgcggtgccctcccttcccttccctgcggccccggaccatatttattgcatgcgccccggcggccccccatcccgagcccaggctgggctgggctggaacgcggtctctttagctccctcctcttcgtttgtatatttcctaccttgtacacaggctcttccagagccgcttccattttctatactcgaaccaaacagcaata

SEQ ID NO: 45993 - DNA, 643 bp, Homo Sapiens
ggattgcccagagtaaggatcaacatacatgtaataggttctcaaaagccctacatcatctgggtacaagctccccctccaaccccactctgtactatctccccctacccccaaccccagctgggcactccagctctactggctgtatgtctctctcctaatttttctacttaccacagggcctttgcacacgctgttccctctgcctggtagacttatccatgctccttagggaagcctttcgtggctcctcctcccccaggttaggccccctggttatttacacttgggcatcatgtgccttccctttgctgcatcatttgacattcatttgtgtgattattcatgtctttcccttcccttcccttccccttactcggctggagtcctactggggcagcgacagtgtctcttcttccttgctgttggatctcaggattaagcacagtgcctggcatacagcaggtgctcaataaatacttatcaaattggaaaaggaagggttttttttctttttttttttttttcctgagacagagttttgcccttttagcccaggctggagtacaatggtgcggtctccgcacactgcaacctctgcctcctgggtcaagctattctcctgcctcagcctcccgagtaa

SEQ ID NO: 45994 - DNA, 884 bp, Homo Sapiens
accaggatatatttgagctcagccccaactctttatcaagcaacattcttgttaactatatgtgaaacattttttcttctgaagattcttaaaaatgaatgtggctgaagttgaacatgggagcttatgctaatttagagataggaaactgaagcataaagaattaatgacttactttaattactggaattcttctgcaacatttgacaaaactaaccttgaataaggcccactgtaatacgtagctctcttaaatataacacttaggactagaagattagaaactaccaatcccaactacgtaataggaaaatgtaggatcaaaaggcccatgtatataagtactgaccactgggccataatgtgcttctcaggctatatgcagtcctttagtcagaagtcaataggcctatttattaatattttacagaccatattacctggattaccagggactatcttgctgcagagatcaagggttaagatctatgggaagatacttatttttctgaggtccttatgtcctgtcatataattaaagactcaagagaatctatgtgaaatgctttctgtatgccaaatcttcagttcaacattatataggtgtccaggaaaaagaaataagacaaacgaaacaactttttggcggccgggcccggaaacttctaacaccaccgttggcgcggcggcacatgtaatggactgggcaagagggccagaacccggcagaacggctgggtccaccaaaacccggcaagcggttgaaaacaaggtggggcaggcacaaggacaggcgataacgccggcgaaagcgagacaagagcagacgacagacacaaacacgaaacaacgcagggaagaacagcacgggcaccacgcgtccg

SEQ ID NO: 45995 - DNA, 500 bp, Homo Sapiens
tgagacgttctctttggtggtcaacccggatgggtgacaggctggatggccttgtgaacttgagctcagtgtatgctaggcaacaattctcccgctccagaccctcaccgaccacctgtcctgggaccaggctgggaggggagtgtggcagggaggaggaagaggaaggtgagaatgagtagaacagttttgtattctactccctacaagccattttgaacttctgccctcaccggactctgggctgtgactggggcaccaaactcagcacatgagtctcccctagctctcgtggggagagggatgctatttattcagtttggggcaggagggagaggagggaaagtatttctgaccctgatgccaacagccgggtggctgtccaagcaggattgcaggggacacagggaagcactgcccagcccctgcctggctgccctttcccccctgctgctgccaccgcttcctgcctgtcatttgaataaacagtgtttctattg

SEQ ID NO: 45996 - DNA, 582 bp, Homo Sapiens
ttttttttttttttttttcgcagagggtaaaatatattgatggctgtaaaggggatattttaggtctgctgaaatgatgcacagcatacatacatgctctagtttttggaaccatgtcattaagttttcaaatacatctgttttgaacatggtattttgtttttctcattagcacgaattactactctacagtttcttctaaagtaaataaatataatggttgtttgcagagcgactacagacttacttaaatgtttaacaaggtgaacgatttcacaattagatcaaccattgagttaacagcaaggggtttttcacctgttttgtttacggctaaaggggggacaggtaacttctccaatttattctttgttgacatctttagttaccaacagactcccaaaagtaatgaaaagtcgattaaaaagaaaattgtaattatgccatgggttttcccaagatccttaaagtcagctcatttaaatttacaagagaaaaataacaggcatcatggaaaactaagtaacaaaaagctattgaaaaatacatctgtggaacacagtggtcagttgtaaacagctc

SEQ ID NO: 45997 - DNA, 756 bp, Homo Sapiens
  misc_feature (756)..(756): n is a, c, g, or t
gctccaccccgacgcacacgccgcaggactccctcacaggagtagggggagatgtacaagaggcatttgcacaaagttcaagaagaaacttaaggaatgacttgctagtggctgcagattccatcactaacactatgtcctctcttgtgaaagagctgaattctgaggttgggagtgaaacagagagtaatgtggattctgaatttgcacggactcagtttgaggatcttgttccctcaccaacctctgaaaaggcttttctagcgcaaatccatgcccgaaaacctgggtacattcacagtggagctaccacaagtaccatgcgtggcgacatggttacggagtatgcagatccctatgtgcagcctgaagatgaaaactatgaaaatgactctgtccggcagctggagaatgagctccagatggaggaatacctgaaacagaagctgcaagatgaagcttatcaggtcagcttgcaaggttgaatgcaatatccttttatcacactcctctcaactccacgtcagcactgagaccagactcgagcacccctgtcctgtaagcgagacaaaatggcgtgtgttattaggggtaagtgtataggtgggtttctttccttggctctccagatttacttttggggcctgttctaagtgcaaacccagcaagtttcacttgtcctgtccattagatacaactacatcttgcggggggtgttctttcttgttccacaatgaattgcacatccatctccan

SEQ ID NO: 45998 - DNA, 805 bp, Homo Sapiens
  misc_feature (9)..(9): n is a, c, g, or t
  misc_feature (646)..(646): n is a, c, g, or t
  misc_feature (711)..(711): n is a, c, g, or t
  misc_feature (790)..(790): n is a, c, g, or t
  misc_feature (797)..(797): n is a, c, g, or t
tattttttnaaggttcatgtttttctgagtaaatgtggtttattagcatgaaatattatgccttttacttaaattattttatgtaaaatagggcactgtttaattatgaaagggggaaaatcattccaaataagagtttaatttttattaattataaaaaactctgtattagtttcctagatgtgctagaacaaattaccacaaactgggtggctttaaacaacagaaatttattctcttaacagttccagagactaaatgtccagactcacaatgtcccagtgccatgcttcctccttaggccctaggaaagaatacttcctagcctcttcctggcttttggtggttgccagcaatccctgctgttccttagcctatagtggcttgactccaatctcagttttgttgtcaagtggtcttctaccctgtcttctatgtttgtatccgtgtccaaactctttttctagggagaccagcactggattagagttcaccatgatccaatatgacctcatcttgactacatccgcaaagaccctgtctccaaataaggtcacatttacagggtaccatgtgttaggatttgacatatcttttgggggacacaattctacccactacaggcccatatccttatctaggatgntggtggcaagaaggtgaagattactacctcttttgatataactagcttctgaggtatttaaaaanttggttttaaaaatattaagctttttgctcatttgcatgtatacttttctctcaacattggttttggtttatttagggntctttgntaaaaact

SEQ ID NO: 45999 - DNA, 577 bp, Homo Sapiens
cattatttttaatatttgatttatttttccaactggacttcttcccggggctctttctgggcccagctgcctttgtgatcccgcgccccggtcctcggcctctcacctccagcgccggggcgccccctgctgtcggaagcggctgtgaccgggcagaggtgctatctgggactctgggttctcagcccggggacagcgaaccgaggggcagatgatccatcagaaaagagccggcactgcccagccccgcgcccctgcccctgcctttttccgggagcgcgccgcgccgcacccgctacggccgcttgaccccatctttgagcccggccccaagctctgggaccgtcgtgcccctcatcaaggaagagccaaggaccccaaggagaagagaaaggagttcatgaaggcagaaatgcctggggcccacgaacatcccagtgtggccctggacgggacatcatgctgggcaacacagctaaaatgcgggtgaagaccagatttcttgcacatggcggtgacgggatgctccctagagagcttcaagtggattctttgctttttattttctccctcgtgc

SEQ ID NO: 46000 - DNA, 756 bp, Homo Sapiens
gtgtggagtgtgaacatccacacccatactgtaatgtatttatacacactagtttctgtctcattttcagtggtctccattcctagaaaagtcacaattatccattcctacttgatttcccattaaaagaatattatggtagcagattgtgcccctcattaaaaggcttaatgccaacattttcatagaaatgactacaaacatcatatatagtaaatttaaaaacaatagcaaaaacaaaaacagtggtcttcagtaaaattttcaaaacttcttttagtacatcaatgaagtcaaaatgtcaagtaatcacccaaagttgcatttaataacaaaaggcactacatactgtaccaagtttatcttcaatatttgtgccttacttactttgactataacaaattccaatgagtcagaaagtatttccttcatcaaggtccagttccgacagcattcctgggaaaaatttgaaaggagtttgtacggaatcttcatagatacctgagaagatgagctggagatgtttgcctttttcacactacaaatttttctgtaataaacttgggaattagaggtcaagtttgttgatggcatagcttcctttgcataaagagtacatttcttttcaaagtatatatttttgtaacctaccataaagtccgtaagtgaatacaacgaatgtaattgacataataattgaaaatcattgactatacctaaaatagttctttataattaaataactctacacccaaa

SEQ ID NO: 46001 - DNA, 600 bp, Homo Sapiens
tggccaccagtccttgccaatccccagagctgttcttccaaagcccccaggctggcttagaaccccatagagtcctagcatcaccgaggacgtggctgctctgacaccacctagggcaacctacttgttttacagatggggcaaaaggaggcccagagctgatctctcatccgctctggccccaagcactatttcttccttttccacttaggcccctacatgcctgtagcctttctcactccatccccacccaaagtgctcagaccttgtctagttatttataaaactgtatgtacctccctcacttctctcctatcactgctttcctactctccttttatctcactctagtccaggtgccaagaatttcccttctaccctctattctcttgtgtctgtaagttacaaagtcaggaaaagtcttggctggacccctttcctgctgggtggatgcagtggtccaggactggggtctgggcccaggtttgagggagaaggttgcagagcacttcccacctctctgaatagtgtgtatgtgttggtttattgattctgtaaataagtaaaatgacaatatgaatcctcaaaaaaaaaaaaaaa

SEQ ID NO: 46002 - DNA, 890 bp, Homo Sapiens
tgacaactccctccatcacttacatactataccccaggaaggcagggcatgtatgttttgaaagagttcccagttggttacatacttggacttggtgatagacatgtacagaatatcttgataaatgagcagtcagcagaacttgtacatatagatctaggtgttgcttttgaacagggcaaaatccttcctactcctgagacagttccttttagactcaccagagatattgtggatggcatgggcattacgggtgttgaaggtgtcttcagaagatgctgtgagaaaaccatggaagtgatgagaaactctcaggaaactctgttaaccattgtagaggtccttctatatgatccactctttgactggaccatgaatcctttgaaagctttgtatttacagcagaggccggaagatgaaactgagcttcaccctactctgaatgcagatgaccaagaatgcaaacgaaatctcagtgatattgaccagagtttcaacaaagtagctgaacgtgtcttaatgagactacaagagaaactgaaaggagtggaagaaggcactgtgctcagtgttggtggacaagtgaatttgctcatacagcaggccatagaccccaaaaatctcagccgacttttcccaggatggaaagcttgggtgtgatcttcagtatatgaattaccctttcattcagcctttagaaattatattttagcctttatttttaacctgcccacatactttaagtagggattaatatttaagtgaactattgtgggttttttttgaatggtgggtctaatacctggatttaatccccactccaaaatggtttggatgggtcttaaggaacatctccggctttccctccttaaaaataaaggggcatttcg

SEQ ID NO: 46003 - DNA, 692 bp, Homo Sapiens
gaatgttagagtgttttattaatttctttgtcagacaagtgtttaggaaactctcactccaggcctaatgctgtgctaggctctgcaaatgctaagagggggaagttactgtccctgcttccaaggagatcatggtctagtgggaaacccgacacgttcaggtaccttcagatgggcactcagaagagtaagcccttagttaatgtttaaagatgtttaaagatgtctgagactcataggtcaaagtcagatttcagttccaccttattagacctgcactgctaaggagctgctttaggtaaggctgtgttcctagtcaccagggtgttcaaacacagtgctgggggcaatgtgggaatagccttcttttatttaggaagtaatgtgaagtcagtttcatgaatagatcttactttaagcattcattgaggtttttggcaagaatagagtacggtatatgaaggtgtttcctaatctccctgacaccaggaataatctagggctcattagagatgtcaaagatctgttctagtttcttaacctaaaacaagagtgttttagttccattttataggcggggagtctgagccaaacatgttatgtcactttccaagtctccatagcacagaagtcttctgtctccccatcctgactttcccagctcatagggactgtcaaaggcagcagctctg

SEQ ID NO: 46004 - DNA, 599 bp, Homo Sapiens
gcagagaagctctgagagccccttcccccacaacaaatctagctctagttgttatatttaggcaaaactttgtagtcttctttcccttttatgatggattttgataaaagtacaaaacagggtttttcttttttatcacctttgaatttggaaattttgagcacccaagctcttctgtacctatttaaagtccaccaaggggactgcagctcctagaacatgagaatcaagcctcttaattttaaactgcggaatgtggcctctgcttcctccgtcctcctgcccaaggacgacgaggattgctccagggctgctgggtagtttaccgtcccttctataggcatggagttggcactgacatcacagcttcataaccccaccaccgccagcttcccctgcctcctacatccagtctgttcttgttcatagtgagaatcctgtgttcccacttcagtgacacctgaattgtttgttgttgtttttttttttttattgtcttcaaagaggaagggccccattaaagggtgaacttgtaataaattggaatttcaaataaacctcatgtacttgtgtttataaagaagaaaaaaaaaaaaaaa

SEQ ID NO: 46005 - DNA, 581 bp, Homo Sapiens
gagatgcaggcggggagccacaaggtagaaggggcaaagtcctcacctaggaccttgagggagttaatgtgtaatattctaggatataagcttgaccacgagttgagaccctgagcacaggcctccaggagccgctgggagctgccgccaggagctgtcaccatgacgggggaacttgaggttaagaacatggacatgaagccggggtcaaccctgaagatcacaggcagcatcgccgatggcactgatggctttgtaattaatctgggccaggggacagacaagctgaacctgcatttcaaccctcgcttcagcgaatccaccattgtctgcaactcattggacggcagcaactgggggcaagaacaacgggaagatcacctgtgcttcagcccagggtcagaggtcaagttcacagtgacctttgagagtgacaaattcaaggtgaagctgccagatgggcacgagctgacttttcccaacaggctgggtcacagccacctgagctacctgagcgtaaggggcgggttcaacatgtcctctttcaagttaaaagaataaaagacttccagccgaaaaaa

SEQ ID NO: 46006 - DNA, 876 bp, Homo Sapiens
  misc_feature (706)..(706): n is a, c, g, or t
  misc_feature (817)..(817): n is a, c, g, or t
  misc_feature (821)..(821): n is a, c, g, or t
  misc_feature (826)..(828): n is a, c, g, or t
tgtattttgactcggtccccacctcccgggagtgcgtgggctttgaggctgtgcaggaagtgccggtggggctggtgcagccggccagcgcaaccctgtacgactactacaaccccgagcgcagatgttctgtgttttacggggcaccaagtaagagcagactcttggccaccttgtgttctgctgaagtctgccagtgtgctgaggggaagtgccctcgccagcgtcgcgccctggagcggggtctgcaggacgaggatggctacaggatgaagtttgcctgctactacccccgtgtggagtacggcttccaggttaaggttctccgagaagacagcagagctgctttccgcctctttgagaccaagatcacccaagtcctgcacttcaccaaggatgtcaaggccgctgctaatcagatgcgcaacttcctggttcgagcctcctgccgccttcgcttggaacctgggaaagaatatttgatcatgggtctggatggggccacctatgacctcgagggacacccccagtacctgctggactcgaatagctggatcgaggagatgccctctgaacgcctgtgccggagcacccgccagcgggcagcctgtgcccagctcaacgacttcctccaggagtatggcactcaggggtgccaggtgtgagggctgccctcccacctccgctgggaggaacctgaacctgngaaccatgaagctggaagcactgctgtgtccgctttcatgaacacagcctgggaaccagggcatattaaaggcttttgggcagcaaagtgtcaaaaaaaaaaaaaaaaacntaancatannnaaaaaaggggcgggcggctctagagaattccctcgaggggcccccagc

SEQ ID NO: 46007 - DNA, 937 bp, Homo Sapiens
gacatctggacagctgggatgttgggcagggtgccatggatgatggcggtggagcctttatatcatgggaagcactctcacttattaaagatcttgggctgcgtccaaagaggactctgcggctggtgctctggactgcagaagaacaaggtggagttggtgccttccagtattatcagttacacaaggtaaatatttccaactacagtctggtgatggagtctgacgcaggaaccttcttacccactgggctgcaattcactggcagtgaaaaggccagggccatcatggaggaggttatgagcctgctgcagcccctcaatatcactcaggtcctgagccatggagaagggacagacatcaacttttggatccaagctggagtgcctggagccagtctacttgatgacttatacaagtatttcttcttccatcactcccacggagacaccatgactgtcatggatccaaagcagatgaatgttgctgctgctgtttgggctgttgtttcttatgttgttgcagacatggaagaaatgctgcctaggtcctagaaacagtaagaaagaaacgttttcatgcttctggccaggaatcctgggtctgcaactttggaaaactcctcttcacataacaatttcatcccattcctccttcaaagcacaactctatttcatggctttctgttaataatcttttcttgaatacttttcccaaatttcttctggatttcttagaaaaaaggggaatttattttctccccctttccccttcccacgccacctttaggaaattcaaacccttatttgggtaagggggattttaacaaggtgggggggggggccaatttttccctttttagaaaaatcaccccctctccttttaataaaaaaacacattgtggggttttctccccccctctttttttaaaaaaaat

SEQ ID NO: 46008 - DNA, 720 bp, Homo Sapiens
taataacagtaataacagactgaaggaccaaaggaaaatagggaagacgttgattatggacttggatcagattctagctacatgatttgaaaatgacactgcctctcctattttgccacaagcctgtcatttggagaactggcagatcatttatgttcagatttaattttctgttttagaatcccatggagtacatgtgaacataggaaaatcacactcagcagccaagctatccttttgcgataatgaaatcactttaaaacctataacttgatcttaggttggcaaatcttaaacttaacgatccttgaaatttcctgcctgctgtgactgtgatgcagttggattcaactggtttacactgctcttgggtcggcaagaccaaaaaaggttggactgcactgtagcatgcttatgggttgaggcagtggcagaggcagaggacttggccgtcagccagccagcacaggcgtaagaaaatagcatgagaagtttcacgagcctgaaaccattgagacagtgattacaacctccatattaatcagatgagggtttgtaggtgacatagcattttacccaagtaattctgaacagactgtggcttatgataatacattttaactagcaagtgtgtggactataaaacaaatatctagagttatatatggatgtactatcatttggtgataaaagcatagaaaaagcaaaaaaaaaaaaaaa

SEQ ID NO: 46009 - DNA, 739 bp, Homo Sapiens
ggatgtgtgcagcagacttccttgtcctcataagatagactgctttatttctagacccactgaaaagaccatcttccttctgataatgtatggtgttacaggcctttgcctcttgcttaacatttgggagatgcttcatttagggtttgggaccattcgagactcactaaacagtaaaaggagggaacttgaggatccgggtgcttataattatcctttcacttggaatacaccatctgctccccctggctataacattgctgtcaaaccagatcaaatccagtacaccgaactgtccaatgctaagatcgcctacaagcaaaacaaggccaacacagcccaggaacagcagtatggcagccatgaggagaacctcccagctgacctggaggctctgcagcgggagatcaggatggctcaggaacgcttggatctggcagttcaggcctacagtcaccaaaacaaccctcatggtccccgggagaagaaggccaaagtggggtccaaagctgggtccaacaaaagcactgccagtagcaaatcaggggatgggaagacctccgtctggatttaatcctggcgggcttaaaacctgtgcttttcatagtttatggtaagcagcagctcactgaataatgacttccattgagtaaacatttggctctggttatcttcaggggatgctggtggctcatgatccaagctcaggggactctggaggcggggctgggctgaggga

SEQ ID NO: 46010 - DNA, 781 bp, Homo Sapiens
  misc_feature (631)..(631): n is a, c, g, or t
ccagcccagggaaaaagaagataaagtaggagagggatcagtttcacattcagtcctaagcagcaacacggttgagatgtaatcataaaagcgaatatttcacccaggacatggagaagcggcggatcaccagaaagcagagagtcaaacgctgcaagcagaagcagtaagaagacgccacgtttggagcaaggtcttatttacacctgccatggtcatcggctcgctcttttaggtctccccaacccggcccccaaaaagaggttatatgcagaggtaatataatatatgtacttttgaaaataacaaagtcaccgtggagataatttcaaaacaatttattttcattttcagatacattggactatttcactgatgttaaaaagagtatgacttgtttaaattttttgttgtttcttttttgcagcctaatgttctgtaatagtaacttgcttccaagtaaagtatgaaaagttagtggaggggccatggctgtggtctctgataggtcaaactatactattttggaatgcgtggagttagaacaaagtttttattttgttattaattagtaaagcaataaataaattgtcttactaataaaaaaaaacacgaaacgaaaaaaccccancaaaacaaaacaccggactatcaccaaatccacaatcccctgctcccgtcgcgcctctcccgccccacgctcccccaccgcacctcttggcctcctgcccctccctcccctccggcggggcgtctccccgcctttcttttcttcggaggg

SEQ ID NO: 46011 - DNA, 645 bp, Homo Sapiens
  misc_feature (630)..(630): n is a, c, g, or t
ggtctcttgacttctcatggaaaaattattttttctattatggtgtgaaatattgtgtgaatatctaggcaaaacataacaatttggctcaattttcttctttagaggattcgtgctgtttttgttcataaagggtagtgaaatcattgaactgtattttagaatgaaaatttttgattttattaaaatgattttttcaaggcagaaagtaaaaggaaagattgatagcggagtgcatatagagctagagcatatcatccttgaactctgcaaatcctttcttccattttaatatagcaagaacaattttgtctttactacatcttaaagaattagaacttgggttggtgtaagtgacttacttccagggaatcatgccctatttctaccagcaggtcatacccaaatgtcacactatctattgttaaccatgaatgatattcagatctattacttttcgtgaaaagtggaacatgttacttccaaccatggcctgtcaccgtgagtgtgatcagctttctccaaaaccacatgggtcgcaggagctaaggggtggtacccaaatgttaggaacagtgttaggaaagggcaagggaaaagaagtgactggatgtcttatgagaaaccggnaatgactaaaaaaaa

SEQ ID NO: 46012 - DNA, 596 bp, Homo Sapiens
tcaacttccaatgtgcctacccactggacatgaaagtcagcctccaagctgccttgcagcccattgtaagttccctgaacgtcagtgtggacgggaatggagagttcattgtcaggatggccctcttccaagaccagaactacacgaatccttacgaaggggatgcagttgaactgtctgttgagtccgtgctgtatgtgggtgccatcttggaacaaggggacacctcccggtttaacctggtgttgaggaactgctatgccacccccactgaagacaaggctgaccttgtgaagtatttcatcatcagaaacagctgctcaaatcagcgtgattccaccatccacgtggaggagaatgggcagtcctcggaaagccggttctcagttcagatgttcatgtttgctggacattatgacctagttttcctgcattgtgagattcatctctgtgattctcttaatgaacagtgccagccttcttgctcaagaagtcaagtccgcagtgaagtaccggccatcgacctaacccggggtctagatttggggcccatcactcggagaggtgcacagtctcccggtgtcatgaatggaacc

SEQ ID NO: 46013 - DNA, 855 bp, Homo Sapiens
  misc_feature (739)..(739): n is a, c, g, or t
ctgggtggcgactaaataattataaccacagtgtttgttgagagctgtgtgccaggcagataaggaggaagaggggaggacaggggagttgggaggggaggaacacccttcccacactttctctcctttgacccgaaccaacccctgggtggtgagtggcatctaccctgttttgtggctgggaataataaagctcaatgagattaagtcacttttcctaaatcaggacattctcttaagcacaaagcagtgcagcctacagaatcggaggcttagaacatcctcaattgatgcagctcttgagctgcctctgctcttcgcagagagtttcggtgattaatgatgaggccaagggatgcaaacaaaaatgctgcacattagtcagggagataagtccctttgcggaatgtcaagacggtgagcaggcgcgggcgagggatgactgtcctttccgcaaggtgagcgtcacttctttgacctgcttccctttccattccagtccaaaatccatgcagcacgcagcctgagtgagatcgccatcgacctgaccgagacggggacgctgaagacctcgaagctggccaacatgggtagcaaggggaagatcatcagcggcagcagcggcagcctgctgtcttcaggtaggcagaggccagctggagggacgccccctgagcatggctgggaccccagaggggacccaggaaggtggggagagctgcagctggggagactgcanggcaagctgctccaaagctggctttgcttttcagaccaaggttgggatcaaaatgcgaatctgagaaaactgctcccaggaatcaaatagtggaagggaaaaaaaaaaaaaaaaaa

SEQ ID NO: 46014 - DNA, 544 bp, Homo Sapiens
cacgagggcggtgcaggagggatctcggaagagacgaggcaggaagaactcctggtcctttcgcttttaaggaacgtgccacctagacaagtgttccagcctccggtgaaccagtcttcctagtgagagcacgagaagcccgttgtccttcattcctcagctatggatttccctgaaagttgagaactgaccatattctcgatgcctcctccgacctgtgatttcatgactcacatcgcttccccagaacctgcttaacagacgggattcctgagaatggagcagagtttgaattcagagtcctggctttgccataccagcagttataattgtccttctgttgtttgatgacctccctgccctgcttcaaaaggaagagaaatcaaagagttgacgaccctgagcgcaaggcctgggacgttcttccccaaactcgctttaatatcaccttctcaaaagaactcttccctgaacaccttgtctcaagatgttctctaggttgtcttcttaaaaaaaaaaaaaaaaaaaataggtgggggcgcaa

SEQ ID NO: 46015 - DNA, 569 bp, Homo Sapiens
ccccggtggcgcccgctctagaactagtggatcccccgggctgcaggaattcggcacgagctgttgagttgttttttcttttcagacagtaagacaatagaccattcatctttgtgtcacccaaacaaagaaatattcctttataaccccctttcctccccccacctaatcacatgctactggaactgactgtcttgtgatctactcccatagttggcatagatttaaaaataatcttttttaaattaatctgatagtagttatggaaaggaacaaattgttcaccaattttcatcagctttatcttttcagtccagtaactgagaacttaaaaagactattctagtgattttactatcctgctcagatggcattcaaaaacatttttcacttctcacgtcttggaaaaatttgtaaattcgttaagtctttttgtttgaaagttaatgtgactggaaatattttaatgtaaatatcgggttgggtgcattgtatcattttgctctacaatgactatatcctcatttgggtttatggccagtttataattaaaagtaatctttacttgc

SEQ ID NO: 46016 - DNA, 424 bp, Homo Sapiens
cgcgtccggacacaggttctgaggactgctggacagcctttcctgtttttaaagaaaagctctcttatcatgagagaagagtcatgaaaaccaaaaggtttctgcatttaattcgttatttagagggctgaatttatgctttgacttactctttgattacaagcactggtggttatattttatctattttgtggaaatgagttagcacatgtagaaaactgccctgaaaggggctgaaatgaagccattaagaccgaagtgtactttttaaaactccaaacgtcatgatttatttcttgatcttggtgatacttatatgggtgtgttcactttgtaaacattcatcaaactctatacttaccacttgtgtacttttctgtatgtgtgttatacttcaattaaaaagtttacttgaaagaaaaaa

SEQ ID NO: 46017 - DNA, 571 bp, Homo Sapiens
gggtgacacatttctctttggcagagaacaggggccacatctgcgagctgtcagcaatcagccttcctagtagctgagtggccaaatcaatgaaggtccctgtatatgagaccccagctggatggagattcttctcaaatctgatggactcaggacgttgcaatctgtgtggggaagagagctttggcactggctctgaccacctccgagagaaggatggcctgtgggctgtcttggtctggctctccattattgctgcccggaagcagagtgtggaggaaattgtccgagatcactgggccaaatttggccgccactactattgcaggtttgactatgaggggttggatcccaagacgacatattatatcatgagggacctggaggccctggtcacagacaaatccttcattggccagcagtttgctgtggggagccatgtctacagcgtggcgaagacggatagttttgaatacgtggaccctgtggatggcactgtgaccaagaaacagggcctaaggatcattttctcggatgcatcacggctcatcttccggctcagttcctccag

SEQ ID NO: 46018 - DNA, 578 bp, Homo Sapiens
cgtccgcgatccggctcttcctggccgggtatgagctcacgcccaccatgcgggacatcaacaagaagttctctgtgcgctattacctcaacctggtgctgatagacgaggaggagcggcgctacttcaagcagcaggaagtggtgttgtggcggaagggtgacatcgtacggaagagcatgtcccaccaggcggccatcgcctcacagcgctttgagggcaccacctccctgggtgaggtgcggacccccagccagctgtctgacaacaactgcaggcagtaggcccccagggccgagaagatgctgggcacccacccagcacccccatctaccaacaccagcggctgggggcgggggcggaccttgtgaggctcagttgacccgttacttgcaacctgaaaacaaatcatgtttttgacttaaattcttttctctggagaacccaaggggcttggggtgggaagcagtctctccttgggattctgcggccgatgtgggatagaagaggtagcatcctggaagccagcctctctggggaacatgagcccccttcctcggggggctgccttgcgtctt

SEQ ID NO: 46019 - DNA, 610 bp, Homo Sapiens
  misc_feature (9)..(9): n is a, c, g, or t
atcgccgtngtggaccaacctcaccgagccgcgcgtgcgggtctggttcaagaaccggcgagccaagtggcgtaagcgcgagcgtaaccagcagctggacctgtgcaagggtggctacgtgccgcagttcagcggcctagtgcagccctacgaggacgtgtacgccgccggctactcctacaacaactgggccgccaagagcctggcgccagcgccgctctccaccaagagcttcaccttcttcaactccatgagcccgctgtcgtcgcagtccatgttctcagcacccagctccatctcctccatgaccatgccgtccagcatgggcccaggcgccgtgcctggcatgcccaactcgggcctcaacaacatcaacaacctcaccggctcctcgctcaactcggccatgtcgccgggcgcttgcccgtacggcactcccgcctcgccctacagcgtctaccgggacacgtgcaactcgagcctagccagcctgcggctcaagtccaaacagcactcgtcgtttggctacggcggcctgcagggcccggcctcgggcctcaacgcgtgccagtacaacagctgaccgccccgccgcaccacgcgggccggc

SEQ ID NO: 46020 - DNA, 613 bp, Homo Sapiens
  misc_feature (539)..(539): n is a, c, g, or t
ttgcagaactcataatagggctgggaaaatgcctgtagacacatacatactatgaatgtgctaatgttttttgtattttcatagcccatcaaagctcctgagtcagtttccactataatcactgcagaatcaatcttctacatggatacattaccaaattggtgatgttgtttctgtgattgatgaacaagatggaaagccctactatgctcaaatcagaggttttatccaggaccagtattgcgagaagagtgcagcactgacgtggctcattcctaccctctctagccccagagaccaatttgatcccgcctcctatatcatagggccagaggaagatcttccaaggaagatggaatacttggaatttgtttgtcatgcaccttctgagtatttcaagtcacggtcatcaccatttcccacagttcccaccagaccagagaagggctacatatggactcatgttgggcctactcctgcataacaattaaggaatcagttgccaaccatttgtagttcacaaattaaaactgggtttncaggcctggtgtggtggctcacgcctgtagccccagctattgcaccactgctctccaagctgggcaatggagtc

SEQ ID NO: 46021 - DNA, 588 bp, Homo Sapiens
ctcatatgaaagcaccaccttgtgttcagtaagcttcaggatagctctgttgacagcagggcatttagagagtcccaagtatagtcatgtatcactggggagggaagaatctttgaggacatctagtttactatctttattatttttcaggtgtagaaaagagattaaagatcatagaagtcagaataaatttgtaaaagttctcatagtcaaaacagctaagtaatggcattgcccagactccaaaatcctgaccagaatataaatcaccaattgttggtttaaaggggttatttgtgaatcattttccaaaaaaagaagtacactttttgtgttacttaccatttcaaagaaacttattcttcaagaccatttcagatttccttaggaatgtatgtgttacccataattgaccacttcaaacttgtaagaaaaaaaaatgttatggtcattttgttatttttagagacaaagtatttctaatctaggtttgcatacaaccttgaggctgtgagatcattagtcaattgctttaattataagccctgttttttttttaaatctaaaaactaataaacatctataaga

SEQ ID NO: 46022 - DNA, 782 bp, Homo Sapiens
gacccacgcgtccgggaatggaatgttgctgtactgttagttttggctcatgaaatgtgtctttacttaatatcccaaataatagcaaaaacaaggtcaaaacacattttaaaaactgctgtaaagagaaaatgcagagaaatgtgcaactgtataattagaattataagagataattcattcataatcaggtggcattttctagagagattttcctgcctgtgtaccggactccatctttgtgtcagagtaacaagccaactgaaagtcgagatgaaagaaaacaaggacagagtgcgtaggagttcccgtcacacacgtttaaggcttttttccccttccaggttcagggttctttcttgggtatatgacaatgagattgtcaatgctttttagggcacactgcctcctcctaacagaaatatcaccttaccctttgtgattaatggtacaatcataatagatatgatgaatccaaatgtggtgagggggaggtctttatatctttttcatatcttttttgttttcttgttgcttatgatctgatgtgtgtcttgtcatatacagaaaaaaaatatttgggtggtattttcaaaaatttgtttagattttgcatgattctaatgaaaatatttgttttatatttaatgtcagtaattgtagtttctattaaagaatatcaatttaaacaagtaattccatcaatatatacttagaaaatagcttaaaaagcagtgacctgaatacatatatccattcacttatcagcaaaccaaaaaaaa

SEQ ID NO: 46023 - DNA, 739 bp, Homo Sapiens
  misc_feature (11)..(11): n is a, c, g, or t
  misc_feature (28)..(28): n is a, c, g, or t
  misc_feature (78)..(78): n is a, c, g, or t
  misc_feature (142)..(142): n is a, c, g, or t
  misc_feature (223)..(223): n is a, c, g, or t
  misc_feature (234)..(234): n is a, c, g, or t
  misc_feature (246)..(246): n is a, c, g, or t
  misc_feature (303)..(303): n is a, c, g, or t
  misc_feature (309)..(309): n is a, c, g, or t
  misc_feature (321)..(321): n is a, c, g, or t
  misc_feature (375)..(375): n is a, c, g, or t
  misc_feature (385)..(385): n is a, c, g, or t
  misc_feature (400)..(400): n is a, c, g, or t
  misc_feature (462)..(462): n is a, c, g, or t
  misc_feature (478)..(478): n is a, c, g, or t
  misc_feature (506)..(506): n is a, c, g, or t
  misc_feature (530)..(530): n is a, c, g, or t
  misc_feature (533)..(534): n is a, c, g, or t
  misc_feature (568)..(568): n is a, c, g, or t
  misc_feature (582)..(582): n is a, c, g, or t
  misc_feature (585)..(585): n is a, c, g, or t
  misc_feature (597)..(597): n is a, c, g, or t
  misc_feature (692)..(692): n is a, c, g, or t
  misc_feature (726)..(726): n is a, c, g, or t
  misc_feature (732)..(733): n is a, c, g, or t
ctcaaaagtangtacgctaatgaggttntactatgaactgttacagcattctttaaaacgacaatgacaataacattntcatcataagacaaatttttgcagatgagttgaatatatcaatgaaagaaaaaaatctactctntcttgtttcctttcacaggcaatgataccggctttatccaagtctactctgccccatggcccaagttagtatatttgggtnaagactcatanttcttgctttgnctttaaaaatcaaaccaagcgtaacctttcctgctaaaactccacttgggtctggcngcatcnggtaccttgctngcaacatcctagaagtgaggccttcacttgtgctatctttagatcataaggganttgcttaaanttatatatttctcangctttttataaaaccttgtttctctcttaaaagaacatattaaataagcggcttccacattnaaccatttcttttttncaactatagagttctaagtatattttantgctcaactttgaaaaaaaaaaanaannggcaagagcatgcatgcgcatatgggaatgctgncagctacatgcagnttntaaatcacaaantatacttagcctgatggcaggatagatgatagacaactgcttttgactttagaagaactttcttataattggaattattcaaagtatagcctaantactgataaacaaaataaagctccattttaattntaaggnnaactaa

SEQ ID NO: 46024 - DNA, 1081 bp, Homo Sapiens
  misc_feature (750)..(750): n is a, c, g, or t
  misc_feature (801)..(801): n is a, c, g, or t
  misc_feature (962)..(962): n is a, c, g, or t
cttcgcgaagacgcccagctccaagaaaagcgccctcatcaagttagccaacatccgggcagcggaaaaggttgaggaaaagagctttggcggctcgcacgtcatgcaggtcatctacacggacgacgccggcaggccccagactgcctacctgcagtgcaagtgtgtgaatgagcttaaccagtggctgtctgcgctgcggaaggtgagcatcaacaacaccggactgctgggctcctaccaccctggcgtcttccgtggggacaagtggagctgctgccaccaaaaagagaagacaggtcagggctgcgataagacccggtcacgggtgaccctgcaggagtggaatgaccctcttgaccatgaccttgaggcccagctcatctaccggcacctgctgggcgtggaggccatgctgtgggagaggcaccgggagctgagcgggggcgcagaggcaggcacggtgcccacgagccctggcaaagtccccgaggactcattggcccggctgctccgggtgctgcaggacctccgcgaggcccatagctccagcccggccggctccccaccctcagagcccaactgcctcctggagctgcagacgtgaggcccgccctacgctccccttgctgagtcccctgccaagcgctcggagcccccccaggacactctgcaccccctcaccccggtcctcctcattagggtgcagggcctaggtctcttccaggtgggggaagggggggagagtcnaggaataagggggatccccagaagtgcagaagctgaagcaggcttgggccntgtcatggcctggccgggaagtgtcccccagctccctacagacgctgtagccatcactgcctctccaggggaccctcctctcctgcccagggacagacccaggcagacccaactgcctaggatggccccccaacccaaggggtctggcctccagggacctnaaaaaaatgggggaaaggaaaaacgggggcccccaggaagacccgggccggccaccccacccgggttacccctggggggccccccagggcctgtgcttgtttgcccaaaagttaaaccc

SEQ ID NO: 46025 - DNA, 378 bp, Homo Sapiens
  misc_feature (22)..(22): n is a, c, g, or t
  misc_feature (107)..(107): n is a, c, g, or t
  misc_feature (308)..(308): n is a, c, g, or t
  misc_feature (355)..(355): n is a, c, g, or t
ccttttcctatactttgctcancggcctggaagattgacctcaaaagcaaaatcacctggatttccttgccatttggctttcaaatgtgctcagccaatgacaggcnggaaagaaattgacagctgggaaaagaggaagacttgtgtacaagatcccttccactcccatctcattacctgccatggtcctagcagtggctgttcttattatggccacaactactcttggacaggccaacatccacaactccatccttcaactaggcttcattaacactgtcccttcacccttatctctttctgggtangggtgataaaggtttcctgacatcagagttcctgagtgcctcatatntgcttgttggtccctgaaccttg

SEQ ID NO: 46026 - DNA, 796 bp, Homo Sapiens
agtgtttaatcgcagtgggtaatcttatctgattgtctttaaaagtgaaaaggattaagattttattctttcttgtaaacattacttgattttttaaagaagttttgggctcactgctaaaatagagtatacaactgaatgtttttaagtcaagatactgttttaggagtttaccctctcatttataaccaaagttgctctaaaacactttccaaatatctgcacttctgatgtcagaatcaaaccagataattctctaattcttctttaatctaaagtagatagcttcccactggaaagtaaacaaaaccatccctcccaacctcaaagctaggccacactctatttcaaggcattttctttcagctgataaggtgtcctcctgaagccaagtaggtggttctggtctccaagtatcgttaagcacaggtgctatgacagaaaaagttctggggtggaagttttaagatgaggagttctgatcttaggcatcttaacagtcacaaggtgaaaagtcaaatgaaacagtacaattcttgatgagtgaggtgtcatcttccaaccacacagaggacgttttggctatgatcatctgatggcaagtgaaggagaaatgagtgatagggctttgcgttttcatccagatgctgtggccctgtgtttcacagcattaagagccataatttccaacctgcacagatcctgaacaacaaatgaataacgatgaatgtctttttggttgtaatttaacaagtcaaataaaataatcattgctgagcacaaaaaaaaaaaaaaa

SEQ ID NO: 46027 - DNA, 895 bp, Homo Sapiens
ccgcctactggccttcctgctgcccaggctggacaccagcaatgagaggacccgcgtgggcaccctgcaggtggtcagacatgtcatcaactcagctggcagcactaacaccagaataacactgatgttgccatcagcagtcacacgactgaaacatgaggactgccctgcacgtgctgctccgcagcctgctgatctaacggccgcgcccgcgtctgttgcttgagtcaccacggctgttacatcccgtgctctcccttctctgccttcttggtgttggttctgcgggcgactgcccatgtggccctcagccccatcctctgttcatggctctctgccactcttgttgtccaaagctctttctctgtaggttccatgggaagagctcatgggaacatgatcttcgacctcatgcttgctgatcatagtttattgtgccttttatcgttgatggttttgctaggttacaggattcttggctgacatttccttgagtgtcttaagttattccatattcttctggacagagagttgccagatttagcaaagacaaataacaggatgcccgagaacaaaaaaacaaaaaggcaaaaacagaacacaaaaaaacaacacaaaaaacagaagagaaacaaaaagaggaaaaaaaaaaaaaaagaaatagaaaacgacagaagaaagaagaacaaggacaaataaaaagagcgcaacaacaaggagaaaagaacggaaacacggaacaacagaggcacacacaaaagagagcagagagaacaacagagcagaggcaccagaagagagaagagacagaccgaccacgagggaacgggaggcgcagcaagaagagagcagaagacaacacaaacggaggacacagaagaaggacaaggacaca

SEQ ID NO: 46028 - DNA, 402 bp, Homo Sapiens
  misc_feature (398)..(398): n is a, c, g, or t
  misc_feature (402)..(402): n is a, c, g, or t
ggggaattgagtcatctttgatagccatggaattaagcgatgttaattaaagtgcaaaagataacctttctgttcttactagaatagagtaataaaaagaacctaggttttcttttgtttgctggaagaaaaatcaaaattctttagttctgtcaaaccagaactcttgaaagcactttgaacaatgcctggaaaataacaggtactctgtaaatgtttaccttctctgcaagtgcctgccacgtgcccgaagaaaagacacattaaaaagttaagtgacaccagtcctgattttatatattttatatacctaacaacgtatatgttagtatgtagaaattatatccttgacctttttccctacctattacgaactgtacttttattaaaagctgccncttn

SEQ ID NO: 46029 - DNA, 336 bp, Homo Sapiens
gggtgagactcctcttgctcgtcatgtctggccgcggcaaaggcgggaagggtcttggcaaaggcggcgctaagcgccaccgtaaagtactgcgcgacaatatccagggcatcaccaagccggccatccggcgccttgctcgccgcggcggcgtgaagcgcatctccggcctcatctacgaggagactcgcggggtgctgaaggtgttcctggagaacgtgatccgggacgccgtgacctatacagagcacgccaagcgcaagacggtcaccgccatggatgtggtctacgcgctcaagcgccagggccgcaccctctacggtttcggtggttgag

SEQ ID NO: 46030 - DNA, 437 bp, Homo Sapiens
ggcatctactacttatcgaagtttcagtcgacatgtctgggcgtggtaagcagggaggcaaagctcgcgccaaggccaagacccgctcttctcgggccgggcttcagtttcccgtaggccgagtgcatcgcctgctccgcaaaggcaactatgcggagcgggtcggtgctggagcgccggtgtacctggcggcggtgctggagtacctgaccgccgagatcctggagctggctggcaacgcggcccgcgacaacaagaagactcgcatcatcccgcgtcacctccagctggccatccgcaacgatgaggagctcaacaagcttctgggcaaagtcaccatcgcacagggtggcgtcctgcccaacatccaggccgtgctgctgccaaagaaaactgagagccaccacaagactaagtaaagaccgagttgaaaagcg

SEQ ID NO: 46031 - DNA, 517 bp, Homo Sapiens
ggcgaggtggcagcacaccctgggccccccactccccgccgcaagtcctgaggatggccagcagagaaacaagaaaatggactccctggctgctggagagttgaatgccagccaccagccatgggtgccagagtttgtagcctattggaggaaaacacaccaagatcacctctgcagcctgcacagccgggcctttggactcctggatgctagagtgacctgggcgctgaggagggcccccgagccagtaccaggaaaggatagactcctgcttgcagcattcccagcagaggcatcgcctgtggacaccgcgtctgtgtctgtatatggcagagctcccagatatatgcacaagggagtgaaaaaatgtgtttgcaccccagtctctaaaaattcaacagcctggttacttctgggtggtatatcgtaggtggctttaatacgtgttatttgctcatctgtatttcttactctttgcacaattaaaccatgttccttttacttatgtacattttta

SEQ ID NO: 46032 - DNA, 1007 bp, Homo Sapiens
gaacatacacatacatacaaattagtgcatttgtaatttgttaaatttgaaatgaactattaccttgaaatatagtctttaaaaatttttaatggttaaagattaaattgaatgaaactgtagtctaatggtaactgatgatctgaatccgtctctctgataacctcctttccattttgaaaatgtgtcttattatacatggaagctagtaactacgtgaatgctgttggcaggatgagggtctgggtacctcagtctcttgtcctgtttccttcccccaaatccaccattgtgaagttgccaaccccctgccgccttcccctgccaagtacatgttgtcagagtcagccctataatgttcatttcccctcttgtttgtgggattatggatctctgcagaaatctgcatgccaattaacccatttctaaagcagaatccattttgcatgtcacaatcaagatgtacttggcaatctaagacacactgggagactgtaagaggaattaatatagaaaagctcttaattataataacatttggaagaaattttttcctttgtttttgtaaaatggctaaaggtttgtaagaagagggtcggtaatttatttacctttttaaaatgaaactgcaaaaatttgccccttaaaaaaatttttggttttaaaaagggcctaaccaacggtgaagcaacccctctggaggggatggattcctttatgaccttaattaaaaggaatttacccaaaaaagaaaaactttctcttggtccctgggttaagggtccaacccgttaatgcaattttaactgggcttctttaaatttaacttttaaacccacatttttttaaggaaaatttggaaccaactttttttataaaaaaaaaaatattttttcttcccccaaccccctgttcctaaaaagagaaacagaggggccctcgtttgtggtgaaggggtcgggggtttttattagtggggggaagaaaattttatacgaggggggaac

SEQ ID NO: 46033 - DNA, 572 bp, Homo Sapiens
cttgacagtataaggtacatgtaccctcaattttcttcatccagtaagacaagtatgcatcttaaagggaaagcttttagttcataacaatatgtttggttgcttttctctgctttcggaacatttactgtttttcctttattggctttagtgtttgctgccaaccagataacatgttaacatataatttacaactctctctaggtaggtgattacatagaaaactaatgccagctaagatttatggattcaaaagataactgacacaagttcttgtcctctacacttgagagaactagctgtttaacgcataaatatattgatagtaactacaagttaaataacattcagtgtcactatataacatgctgtcttacttgattctgtttttcagacttcattctagtttctctttgttggaagagtctcagagataatgtgtgctttaattttaaacactcattaccaatatgatttttgcccaaatgtttgttaatgtaagttaaaaaattatatttggtttggattcaagtatttatagatttacacaatacctatttcatcaaaatata

SEQ ID NO: 46034 - DNA, 498 bp, Homo Sapiens
tcggcagcactcccgtgcccaagcgcacccctctggacttgccagcgcaggccccttcgctcccagggccatgctttgcctgtcctctgtcgtgatgtttcttccgcagccaggtgcagcctcagatcccctgttcatctgggaagcctcctgccacagcttaggacagaactgggcccagggcaaaggcctctccccagaggatggactagaaggcctgggccacactcgggcatggacctttggggctggggagcaggggctgctgcctgttgaatgtaagaggactgctgaccagagggccttcaagagggtctctctgtcctttgctgtggtcagatcaggctctgcacttatcagccggtcctttgtggcaacgcacgccctgttctgtttttgcttttcctcttcttgaccaaagcatgtgccactagctgtccttgaggacctcgtctttatgaaacacacacctggaataaaaccacttcttacatgtaa

SEQ ID NO: 46035 - DNA, 215 bp, Homo Sapiens
cgcgtccggggccttcaagagggtctctctgtcctttgctgtggtcagatcaggctctgcacttatcagccggtcctttgtggcaacgcagccctgttctgtttttgcttttcctcttcttgaccaaagcatgtgccactagctgtccttgaggacctcgtctttatgaaacacacacctggaataaaaccacttcttacatgtcaaaaaaaaaa

SEQ ID NO: 46036 - DNA, 527 bp, Homo Sapiens
gtatcggccattatggccggggaaagaccttttaatctatgacagcatgccacggaggaaggaagcctggttcagcccagttcacacataccctcttcttgccaccaggctggtccattcaggtccaggaaagggatcaccccaggctggtgtggatctgtcctttgcaacgcgaactggtaccaggcaagggattgaaacacatctcttcagagcagagaccagcagggacctctcccactggacaaggagcatagtacagggttgacacaattctgctgaactcattgctgaaatcagcactgcttgcacctacaaaaaccaggagtgccgttagaccatacattatgagaatggattttctattaccactgaaccacaggagggtgcctttcccaagaccatcatacagtctccttatgaaaagctcaaaatgtcttcagatgatggaatcaggatgctgtatttagatttcggaggcaaagatggagagattcaactggaccttcattcctgccccaagccaa

SEQ ID NO: 46037 - DNA, 522 bp, Homo Sapiens
agaatttttaagattgcagggttagtatttgattgtctagtgatgtacgataacagccaccagctttcctgagcatcactgggaagcctgctgtttatgtacaagtacagccataaaatccagacacagataaatctaggaatctattttttgaaactattatgcaagccagtggtactagaaagaatgttttagaaaagaaatatgtacaggtgacccatagctacctcactgtcactaaaatgttttttaataatcttaaagcagattctgcacttcatggtaaagactttgaattgtttctctgctttctaagccattcacctgagaagaaaatcactccataaactatgcagacgtactgtctttgcgttttcttcctgactacttgttccaaactctgagtcagatctaaagtcactttaagtcacagaacgcatggtatttcacttgtttttctcattaaaagtgattacctttgctgtattaaattgataagtaaaggtcattcagacaaccaaa

SEQ ID NO: 46038 - DNA, 908 bp, Homo Sapiens
tccacacccctggtggacagaaccaggagatcctgctcccaggagggatcacatctcaccagctccttggcctctttccctccacctcctacaatgcacggctccaggccatgtggggccagagcctcctgccgcccgtgtccacctctttcaccacgggtgggctgcggatccccttccccagggactgcggggaggagatgcagaacggagccggtgcctccaggaccagcaccatcttcctcaacggcaaccgcgagcggcccctgaacgtgttttgcgacatggagactgatgggggcggctggctggtgttccagcgccgcatggatggacagacagacttctggagggactgggaggactatgcccatggttttgggaacatctctggagagttctggctgggcaatgaggccctgcacagcctgacacaggcaggtgactactccatgcgcgtggacctgcgggctggggacgaggctgtgttcgcccagtacgactccttccacgtagactcggctgcggagtactaccgcctccacttggagggctaccacggcaccgcaggggactccatgagctaccacagcggcagtgtcttctctgcccgtgatcggggaccccaacaagcttgctcatctcctgcgctgtctcctaccgaggggcctggtggtacaggaactgccactacgccaaactcaacgggctctacggggagcacagttggaccatccaggagtgagctggttaccactggcaagggcttcgagtttctcggtgcccttcacggaaatgaagctgagaccagaaactttcgctccccaacggggggaaggctgacctgctgcccaacctcttctcgcacccagtatgactgccgaccactgagggtccgccccgagaga

SEQ ID NO: 46039 - DNA, 682 bp, Homo Sapiens
gggtcttaagacccacaattagaaaggcaagggaagattagagtcctgcttggggtagatgaaaggaaaggagagagattctgtttcctgaggcttaatacacccaacattataacaaaggactgtagcaagggctatgggagttctgaagcagaaaccatgggctaaaaccaacatacatcttaataccagataccctaatcccagtcctaacttcatttaaccttggtcacattgagtcattccaggatgagtggctcaagtatttcctcagggaaaatacttctgtgccccctgatttgagggtaagaagtagataatgaggccactgtgggtgttatttattcatgtctggacctcagactatatcctgagactaagtggaagtgggaaaagagtacaagagaagagacaaagtggggatattggtaaggcttagatgagatagtgtaaaatagaaaaaaatttatcttaacattaagtaaaatgtaatgccataggcttacatggggcatactcgttacacagtcagaatgtttgaaaggtatctatctctccttaatatggtaagagttactcacaatggttataaatcatgaatgaatgtagaaatacaatacaatgcagagacagtacatatcaaactgatcatatgaagagactccttcgatagatatctcaa

SEQ ID NO: 46040 - DNA, 700 bp, Homo Sapiens
acgcgtccgagcgaggaggcgtcggcgtcggctgaggcgggcggaccggcgaggcgaggcggcggccccaggcccgagggactcgggagctcgagcagcggcggcggcaagacctctccccctcggaggcggcgggcggaggcggcgggagcggtggtgccccccccgggcacggggccatgtacaacgggatcgggctgccgacgccccggggcagcggcaccaacggctacgtccagcgcaacctgtccctggtgcggggccgccggggtgagcggcctgactacaagggagaggaggaactgcggcgcctggaggctgccctggtgaagcggcctaatcctgacatcctggaccacgagcgcaagcggcgcgtcgagctgcgatgcctcgagctggaggagatgatggaagagcaggggtacgaggaacagcaaattcaggaaaaagtggcgacctttcgactcatgttgctggagaaggatgtgaaccctgggggcaaggaggagaccccagggcagaggccagcggtcacggagactcaccagttggcagaattaaatgagaagaagaatgaaagactccgtgctgcctttggcatcagtgattcttacgtagatggcagctcttttgatcctcagcgtcgtgcccgagaagctaaacaaccagcttcctgagcctcccaaaccttacagccttg

SEQ ID NO: 46041 - DNA, 556 bp, Homo Sapiens
tgtccctaggaaatccaaaggggctggaatatggtgttggtttggctttctggttggcccaatcggcctattggctcaatgggaagagaggagagggagaaaaataaaatgaaaggaaaaaaaaaagtttgcaaattcagacaggaaacaggtgagtggtttgaattggatgcagtgtgggccatcctggaatgatactgactgattaattattcctgataacatctcaagaaaaggagaaggaaagtgtttctggagaatgttctttcacatcactggaatctgcaattcaagaagtgacaagggagaattcttgctttacctatggactggcttaagccgtgtggcatccgaggaatgtttcaaatgtgtctgtgtttctctttacattccttgttgtacctcattgttcaattcacttttgtaaattccacctaacatttaattattttaaatttctccttttaccttaatctccttgctaattttatctgtctaattaaaaagagcaaaagcatgtctgggtttacgtaaaaaaaaaaaaaaaaaaacgcgg

SEQ ID NO: 46042 - DNA, 583 bp, Homo Sapiens
ttttattaacaccacccgagcaggtccagggacattatccgtcaccatcgaaggcccatccaaggttaaaatggattgccaggaaacacctgaagggtacaaagtcatgtacacccccatggctcctggtaactacctgatcagcgtcaaatacggtgggcccaaccacatcgtgggcagtcccttcaaggccaaggtgacaggccagcgtctagttagccctggctcagccaacgagacctcatccatcctggtggagtcagtgaccaggtcgtctacagagacctgctatagcgccattcccaaggcatcctcggacgccagcaaggtgacctctaagggggcagggctctcaaaggcctttgtgggccagaagagttccttcctggtggactgcagcaaagctggctccaacatgctgctgatcggggtccatgggcccaccaccccctgcgaggaggtctccatgaagcatgtaggcaaccagcaatacaacgtcacatacgtcgtcaaggagaggggcgattatgtgctggctgtgaagtggggggaggaacacatccctggcagcccttttcatgtc

SEQ ID NO: 46043 - DNA, 793 bp, Homo Sapiens
agttcaggggtcaaccagagttgggcagaaggaagtctgccccttctgtgcctcctgtttttgggggtttccccttttatgttccagctgttgtggttgccccatattctgccctctgatccttaaccaataaaacttggctttgtttccccctcaagtgagaacccgttaaaaatgagacattgagccagtgctgttcactttttaagtgccaacttccctctactttccacttgtttatagttgtttccagtgcctttagttttttctaaaatatatttgttcagagttgcagttgctatcagcaggagggttggtctgatatctgtgtgctactttgccattattggaagtgaactctgcatctttttaaaaatttgaaatcccggtatcatgtgaagtgctgtttatgtaaatctcaacatatcccttactcagggaaaaaaaagtttttagttagggaatagtgaaatataatttaatatggaattctagctgtagagttaaatccatctttaagtgtctacattcagtatgagaatgcaatttatctgtctggggaataaagtcctagggaattacaacaacgtttcaggtgtacagaaaaaaacgagacaaccacaacagttttgtgggcgcgcgggcccgaaaaatttttacccctcgttggggcccgggcccgaggatttactggcccgcggtcccagaaacccggccacacagcgggtctcccaaaaaagcggggccgggttgaacaccagggtcgggcatcggctacaaggcaggcgtaccg

SEQ ID NO: 46044 - DNA, 500 bp, Homo Sapiens
ccatttgatgatggagctccaccccctaatcagatagtagatgattggttaaacctgttaaaaaccaaatttcgtgaagagccaggttgctgtgttgcagtgcattgtgttgcaggattgggaagggcacctgtgctggttgcacttgctttgattgaatgtggaatgaagtacgaagatgcagttcagtttataagacaaaaaagaaggggagcgttcaattccaaacagctgctttatttggagaaataccgacctaagatgcgattacgcttcagagataccaatgggcattgctgtgttcagtagaaggaaatgtaaacgaaggctgacttgattgtgccatttagagggaactcttggtacctggaaatgtgaatctggaatattacctgtgtcatcaaagtagtgatggattcagtactcctcaaccactctcctaatgattggaacaaaagcaaacaaaaaagaaatctctctataaaatgaataaaatgttt

SEQ ID NO: 46045 - DNA, 335 bp, Homo Sapiens
tctctgcccctaaggcagcccaggaaataggaactgagactctggtacccacaggagcctgggtgggcaaagagcgctcaatccagctccttgaacccctccagcccgcttcagcctgggcatcactgcaggccccgtgctcctcctcctcctcctcagggctgggtctccagagagtggggccttggtcctgagaatcagcccttagaggctccttctgtgtagtctgggtctgtactggggagggtcacagcccacgggctggcagccagcccagcacctacttgtaaaaattttgtaacaaaaagtttttcctagagacgtgaaaaaaaaaa

SEQ ID NO: 46046 - DNA, 764 bp, Homo Sapiens
gccactgcagacgacctcatcaaggttgtggaggagctaactcggatccattagccaagggcagggggcccctttgctgaccctccccaaaggctttgccctgctgccctccccctcctctccaccatcgtcttcttggccatgggaggcctttccctaagccagctgcccccagagccacagttcccctatgtggaagtggggcgggcttcatagagacttgggaatgagctgaaggtgaaacattttctccctggatttttaccagtctcacatgattccagccatcaccttagaccaccaagccttgattggtgttgccagttgtcctccttccggggaaggattttgcagttctttggctgaaaggaagctgtgcgtgtgtgtgtgtgtatgtgtgtgtgtgtatgtgtatctcacactcatgcattgtcctctttttatttagattggcagtgtagggagttgtgggtagtggggaagagggttaggagggtttcattgtctgtgaagtgagaccttccttttacttttcttctattgcctctgagagcatcaggcctagaggcctgactgccaagccatgggtagcctgggtgtaaaacctggagatggtggatgatccccacgccacagccctttttgtctctgcaaactgccttcttcggaaagaagaaggcgggaggatgtgaattgttagtttctgagttttaccaaataaggtagaatttacgaggaccatccctccgccccgccttccaatg

SEQ ID NO: 46047 - DNA, 863 bp, Homo Sapiens
caggtgctagagatgacactgcagagtagagacaaaggaatcttagtaattgttcaatccaatctccacactttaaagatgaagaaactggtattgagaaaaatacacagcttatccaaggttgcactgctggttggtagctgagatgaatttagaacccacatctgatgactacaccatattgctcccagttttcctgtctgttccacatgtaaaagtctgactcttcacttctcctttgagtatatagacttttaacatttttgtatgtcaagatggacttttcctcatacccagcccctgccttttctcctcccttcataccttgcaggatctttaacagaatttaaaaggagttttttgttttgttttgatgtatctaataaaagtcaagggagggagagggccagtataagcaagagtacagtttcctagtttgtagatgcggtagtctgaggaatcagaaacacccaaaggtttggagtactggtacatgctcccaagtgggaagccaggactcttggtaggatcttgaggactaggcaaaggacaataagaaagcgaggggatcctagaggtggtatcaggaagagaacttgagagagaaaacgaactggctatcctccatgatggctctgggtggactgatgggtggcttgcatcatctttagtagacttatgtggctgactattggccatgaaggacttctttttaggtacaaactttgtgcggcagctttggccctaattcatcgtgaagggtactctgagcatggaataacaagaaaattgcgcttcctgcctcataagtgtacttctagccttacttcgtcggggtaattcgatctcgctcttgctggctg

SEQ ID NO: 46048 - DNA, 598 bp, Homo Sapiens
cgcgtccgccccatgccacccatgacctggagggaccacctctagatgcctactcgattcaaggacaacacaccatttctccgctcgatctggccaagctgaaccaggtggcaagacaacagtctcactttgccatgatgcacggcgggaccggattcgccggaattgactccagctctccagaggtgaaaggctattgggcaagtttggatgcatctactcaaaccacccatgaactcaccattccaaataacttaattggctgcataatcgggcgccaaggcgccaacattaatgagatccgccagatgtccggggcccagatcaaaattgccaacccagtggaaggctcctctggtaggcaggttactatcactggctctgctgccagtattagtctggcccagtatctaatcaatgccaggctttcctctgagaagggcatggggtgcagctagaacagtgtaggttccctcaataacccctttctgctgttctcccatgatccaactgtgtaatttctggtcagtgattccaggttttaaataatttgtaagtgttcagtttctacacaactttatcatccgctaagaattta

SEQ ID NO: 46049 - DNA, 850 bp, Homo Sapiens
cgcaagggcggcggggagcacacggagcactgcaggcgccgggttgggacagcgtcttcgctgctgctggatagtcgtgttttcggggatcgaggatactcaccagaaaccgaaaatgccgaaaccaatcaatgtccgagttaccaccatggatgcagagctggagtttgcaatccagccaaatacaactggaaaacagctttttgatcaggtggtaaagactatcggcctccgggaagtgtggtactttggcctccactatgtggataataaaggatttcctacctggctgaagctggataagaaggtgtctgcccaggaggtcaggaaggagaatcccctccagttcaagttccgggccaagttctaccctgaagatgtggctgaggagctcatccaggacatcacccagaaacttttcttcctccaagtgaaggaaggaatccttagcgatgagatctactgcccccctgagactgccgtgctcttggggtcctacgctgtgcaggccaagtttggggactacaacaaagaagtgcacaagtctgggtacctcagctctgagcggctgatccctcaaagagtgatggaccagcacaaacttaccagggaccagtgggaggaccggatccaggtgtggcatgcggaacaccgtgggatgctcaaagataatgctatgttggaatacctgaagattgctcaggacctggaaatgtatggaatcaactatttcgagataaaaaacaagaaaggaacagacctttggcttggagttgatgcccttggactgaatatttatgagaaagatgataagttaaccccaaagattggctttccttggagtgaaatc

SEQ ID NO: 46050 - DNA, 807 bp, Homo Sapiens
  misc_feature (777)..(778): n is a, c, g, or t
  misc_feature (782)..(785): n is a, c, g, or t
  misc_feature (787)..(789): n is a, c, g, or t
  misc_feature (791)..(799): n is a, c, g, or t
ccaaagaagcccaggatgacctggtgaagaccaaggaggagctgcacctggtgatgacagcacccccgcccccaccaccccccgtgtacgagccggtgagctaccatgtccaggagagcttgcaggatgagggcgcagagcccacgggctacagcgcggagctgtctagtgagggcatccgggatgaccgcaatgaggagaagcgcatcactgaggcagagaagaacgagcgtgtgcagcggcagctgctgacgctgagcagcgagctgtcccaggcccgagatgagaataagaggacccacaatgacatcatccacaacgagaacatgaggcaaggccgggacaagtacaagacgctgcggcagatccggcagggcaacaccaagcagcgcatcgacgagttcgaggccctgtaacagccaggccaggaccaagggcagaggggtgctcatagcgggcgctgccagccccgccacgcttgtgtctttagtgctccaagtctaggaactccctcagatcccagttcctttagaaagcagttacccaacagaaacattctgggctgggaaccagggaggcgccctggtttgttttccccagttgtaatagtgccaagcaggcctgattctcgcgattattctcgaatcacctcctgtgttgtgctgggagcaggactgattgaattacggaaaatgcctgtaaagtctgagtaagaaacttcatgctggcctgtgtgatacaagagtcagcatcattaaaggaaacgtggcaggaaannaaannnncnnncnnnnnnnnnaaaaactc

SEQ ID NO: 46051 - DNA, 615 bp, Homo Sapiens
  misc_feature (13)..(13): n is a, c, g, or t
  misc_feature (29)..(30): n is a, c, g, or t
  misc_feature (47)..(47): n is a, c, g, or t
  misc_feature (51)..(52): n is a, c, g, or t
tttctcgaggttnaagagtgccaagatgnnaattttaatggactgtnagtnntttgatttgaaacccttggcaaaagctccttatcttttggaatcccaggaagaagaaaaaacagttatttacaaaaacaaagggtcatcctttctagaaagagaaccgctgtgctatcaggagggaaataatccaagtgccaaagaggccatctctgaagggtatttttcttccttgagcctcagccaggaacgggaggaagaccaggatgggtctccctccccgcgtttgggactgctgaagctggagctataagaaagaagagggaggtttcagcaaccaaggagcacacaccctgatccttgattggtgaaaggatacacaaaatcaggctgcttcagaggaagtcatctgctcacaggaatcagggtgaaggccaaggacggcactcaagaattgtcctgtctctaaaaaaaaagcatctgcaacgaacttcctttaatttttgagttcagtgtctgtgataattaagaaatggcaataccatgtattttccccagaagttaagaaatattgctgaacgaaccaataaaaataattacagctccccaaaaaaaaaaaaa

SEQ ID NO: 46052 - DNA, 646 bp, Homo Sapiens
ggaaaggaaacgtggcaggacttccatctgtgccatacttgttctgtattcgaaatgagctcaaattgattttttaatttctatgaaggatccatctttgtatatttacatgcttagaggggtgaaaattattttggaaattgagtctgaagcactctcgcacacacagtgattccctcctcccgtcactccacgcagctggcagagagcacagtgatcaccagcgtgagtggtggaggaggacacttggatttttttttttgttttttttttttttgcttaacagttttagaatacattgtacttatacaccttattaatgatcagctatatactatttatatacaagtgataatacagatttgtaacattagttttaaaaagggaaagttttgttctgtatattttgttaccttttacagaataaaagaattacatatgaaaaaccctctaaaccatggcacttgatgtgatgtggcaggagggcagtggtggagctggacctgcctgctgcagtcacgtgtaaacaggattattattagtgttttatgcatgtaatggactatgcacacttttaattttgtcagattcacacatgccactatgagctttcagactccagctgtgaagagactctgtttgcttg

SEQ ID NO: 46053 - DNA, 620 bp, Homo Sapiens
tcgcgcagggtgcgctccatcctgaataaactgacaccccagatgttccagcagctgatgaagcaagtgacgcagctggccatcgacaccgaggaacgcctcaaaggggtcattgacctcatttttgagaaggccatttcagagcccaacttctctgtggcctatgccaacatgtgccgctgcctcatggcgctgaaagtgcccactacggaaaagccaacagtgactgtgaacttccgaaagctgttgttgaatcgatgtcagaaggagtttgagaaagacaaagatgatgatgaggtttttgagaagaagcaaaaagagatggatgaagctgctacggcagaggaacgaggacgcctgaaggaagagctggaagaggctcgggacatagcccggcggcgctctttagggaatatcaagtttattggagagttgttcaaactgaagatgttaacagaggcaataatgcatgactgtgtggtcaaactgcttaagaaccatgatgaagagtcccttgagtgcctttgtcgtctgctcaccaccattggcaaagacctggactttgaaaaagccaagccccgaatggatcagtatttcaaccagatggaaaaaatcattaa

SEQ ID NO: 46054 - DNA, 602 bp, Homo Sapiens
ccccgcgtccgggcagccccaagcctcctggggaggcagggcaaaaacaggtgccctcatcgtggtctgtgccatgtcccgtctctatggtggttgaggagaaaggcggggaagcttcctcagccttgcagatatgtgtggcatttactagccagagctctgaaaggcagtgctgtctgtttcttgtactgggaccaaagtaaaaatccaagcacattccccttgcagttaggggaggccctactgccttctcaaagcagagaggcagcttatcaaactcagcccaaaactctgtttacatgggtggggagatggagcagggaagtacagagtgggatggtcaggacctgggccattgcaaccaaaatggggacttcctgggtagggaggtcactccctctactcactgagctaggattagggagggttattgccccaaccattgcaatgggaggtggagggacaggctcagcctcctcattgtctaaatgaggcctaaatgtgtgaagtgcgatttctgcttttgtgtaccccaccaccccattaccacagctgcctttgtgtgtttgtgtcaataaaaagccaaaccctgaaaaaaaaaa

SEQ ID NO: 46055 - DNA, 1090 bp, Homo Sapiens
tccactgctgtcctcttcagctcaagatggtggcctgccgggcgattggcatcctcagccgcttttctgccttcaggatcctccgctcccgaggttatatatgccgcaattttacagggtcttctgctttgctgaccagaacccatattaactatggagtcaaaggggatgtggcagttgttcgaattaactctcccaattcaaaggtaaatacactgagtaaagagctacattcagagttctcagaagttatgaatgaaatctgggctagtgatcaaaccagaagtgccgtccttatctcatcaaagccaggctgctttattgcaggtgctgatatcaacatgttagccgcttgcaagacccttcaagaagtaacacagctatcacaagaagcacagagaatagttgagaaacttgaaaagtccacaaagcctattgtggctgccatcaatggatcctgcctgggaggaggacttgaggttgccatttcatgccaatacagaatagcaacaaaagacagaaaaacagtattaggtacccctgaagttttgctgggggccttaccaggagcaggaggcacacaaaggctgcccaaaatggtgggtgtgcctgctgctttggacatgatgctgactggtagaagcattcgtgcagacagggcaaagaaaatgggactggttgaccaactggtggaacccctgggaccaggactaaaacctccagaggaacggacaatagaatacctagaagaagttgcaattacttttgccaaaggactagctgataagaagatctctccaaagagagacaagggattggtggaaaaattgacagcgtatgccatgactattccatttgtcaggcaacaggtttacaaaaaagtggaaagaaaaagtgcgaaagmrgactaaaggcctttatcctgcmcctctgaaaataatttgatgtggtaaagactggaattgarscarggrgtgatgcsggttatctctgtgaatctcagaaatttggggrgcttgtaatgacmaagaatcaargccttgatgggmyctacmwgggcmggtcygtgsaraagawaawttggggcccc

SEQ ID NO: 46056 - DNA, 911 bp, Homo Sapiens
gcgcagccatggaggagatctcccatgggtctgcgcttagtgcccgccgcgagtcacacgcgccaggacctagaggagcctttggcatttgggggctgtggggaacatgaagtgagcgcgactcacggcctggagtgcaggaaaggcttctcctgcaaggcggtggcttcaaaaaccagaagtctggtagcaccacgtgcggcgtctctaaactcttggtcgtctctgacttttaaacatctagggaaagttctaaaacgtgtgtcctggcgtagtagttttggttggcacttggtgaggagggaagaatttgtaaagcactgtaacttctatagttaatccttccagtggcagcttggatcccggcggtagcactccccacaaacctcctcccatgcattttgaagcttagtacgtggctgagcctagaacttgaagcttccaaactcagtgctcgctttaacgcagctccctgaaacgttttggaatcggatggtctcaggttgaactttgcagttttcctcaactgtaaaatggggatgacagtgcatgagggtgtcgtgaggatcaactgaaataaagcatggtaaacatctagtacctgatgcttggctacagaactgaggcatgatgtgaatccaaaggcctatccccttgccgatgcccagcatcagcaagaagctactggacctcgttcagcagtcatgtaactataagcagcttcggaaaggagcaaatgaagacaacaaaacccgtcaaacaggggcatctcatgagtacatcgaagatggcagcagacgccgagccaatggcagatcatccggcacctgccgctgctgtgtgaggaccagaactgtgcctaacgtgtaggcgcgcaccaagcagggcctgggaaaagccagggggcacca

SEQ ID NO: 46057 - DNA, 743 bp, Homo Sapiens
  misc_feature (609)..(609): n is a, c, g, or t
cccagaactgctgacacagatggtgtccaagggcttcctaggtcgtaaatctgggaagggcttttacatctatcaggagggtgtgaagaggaaggatttgaattctgacatggatagtattttagcgagtctgaagctgcctcctaagtctgaagtctcatcagacgaagacatccagttccgcctggtgacaagatttgtgaatgaggcagtcatgtgcctgcaagaggggatcttggccacacctgcagagggagacatcggagccgtctttgggcttggcttcccgccttgtctgggagggcctttccgctttgtggatctgtatggcgcccagaagatagtggaccggctcaagaaatatgaagctgcctatggaaaacagttcaccccatgccagctgctagctgaccatgctaacagccctaacaagaagttctaccagtgagcaggcctcatgcctcgctcagtcagtgcactaaccccagctgccggcagtgctggttctccaacagagtggtgtctagatttatcagagtaacgagaagacaaactccggcactgggtttgctccctgattaaagtggcttcagccaagactatctctcnctcctggtgaagtgtgacttcgaattagtttgcacttcctgttggaaggtacagcccactgctcattgtataagccccgaggcctagagtggcagccaagagccatctgaagcacctctctgcctgttcctcca

SEQ ID NO: 46058 - DNA, 830 bp, Homo Sapiens
  misc_feature (712)..(712): n is a, c, g, or t
ctggtccgtattctgcgcagcaccgtgatggttcgcgttggtggaggatggatggccttggatgaatttttagtgaaaaatgatccctgccgagcacgaggtagaactaacattgaacttagagagaaattcatcctaccagagggagcatcccagggaatgacccccttccgctcacggggtcgaaggtccaaaccatcttcccgggcagcttcccctactcgttccagctccagtgctagtcagagtaaccacagctgtacatccatgccatcttctccagccaccccagccagtggaaccaaggttatcccatcatcaggtagcaagttgaaacgaccaacaccaacttttcattctagtcggacatcccttgctggtgataccagcaatagttcttccccggcctccacaggtgccaaaactaatcgggcagaccctaaaaagtctgccagtcgccctgggagtcgggctgggagtcgagccgggagtcgagccagcagccggcgaggaagtgacgcttctgactttgacctcttagagacgcagtctgcttgttccgacacttcagaaagcagcgctgcagggggccaaggcaactccaggagagggctaaacaaaccttccaaaatcccaaccatgtctaagaagaccaccactgcctcccccaggactccaggtcccaagcgataacactgtctaagcacccccnagccactatccactttgaatcctgctccatacattgggtgtatatttattctgaacgggagaagttatattgttaaaagtgtaaaagaataattgtgttatgaagctgccttattttt

SEQ ID NO: 46059 - DNA, 534 bp, Homo Sapiens
gtcagaacatttggggttttaaactgatttgttgctccctatccagcctagacaccagtaactcttgtgttcaccaggacccagacccttggcaagggataggctcgttggtgacattgtgaatttcagatttgttttatccactttttttgctatttatttaaatggtcgatcaacttcccacaaactgaggaatgaattccacgagcctgttctgaaaatgtggacgtaagacaaacacgtgctcgtcctttaatggagttcaccagcacacttgttaaccagtcctgtttgctttcgtctttttttgtgcgtaataaagtcaactgaccaagtgaccatgaaaaggggctgtctggggctcctgttttttagctgctgttcttcagctccgaccatgttgctgtgtgattatctcaattggttttaattgaggcagaaactgaagctctaccaatgaactgtttagaaacaagacacacttttgtattaaaattgcttgcagtaacaaaaaaaaaaaaaaaaaggccacat

SEQ ID NO: 46060 - DNA, 413 bp, Homo Sapiens
  misc_feature (385)..(385): n is a, c, g, or t
  misc_feature (390)..(392): n is a, c, g, or t
  misc_feature (394)..(394): n is a, c, g, or t
gggacactcgagatccggaagtggcgctccggggagaaggtggctgcggctgctggggccgctgcgccggcggcggttcccgatgtggaggtccgtcttgggtggggaggcacccaggtcgctggttcgatgcagaggaagaaaccacacctagcacgtaaagccctgaaaaaatagaggtgtacagtagagttttccagaggctacatgacatgcagtatcacaacggaagcaaatataagaacccacctgtctcctgttaaaatgcaaaatgtaaaacaataccactttgctaactgtttttgtttggggaaatatagttcataaaaatatttatgttaacatgtaatttaggttaaaataaattaataaatattcgaaaaanccccnnnanaaaaaaaaaaaaaccttgt

SEQ ID NO: 46061 - DNA, 723 bp, Homo Sapiens
cccgggatgccaagggcatcagccaggagcagatgaatgagttccgggcctccttcaaccactttgaccgggatcactccggcacactgggtcccgaggagttcaaagcctgcctcatcagcttgggttatgatattggcaacgacccccagggagaagcagaatttgcccgcatcatgagcattgtggaccccaaccgcctgggggtagtgacattccaggccttcattgacttcatgtcccgcgagacagccgacacagatacagcagaccaagtcatggcttccttcaagatcctggctggggacaagaactacattaccatggacgagctgcgccgcgagctgccacccgaccaggctgagtactgcatcgcgcggatggccccctacaccggccccgactccgtgccaggtgctctggactacatgtccttctccacggcgctgtacggcgagagtgacctctaatccaccccgcccggccgccctcgtcttgtgcgccgtgccctgccttgcacctccgccgtcgcccatctcctgcctgggttcggtttcagctcccagcctccacccgggtgagctggggcccacgtggcatcgatcctccctgcccgcgaagtgacagtttacaaaattattttctgcaaaaaagaaaaaaaagttacgttaaaaaccaaaaaactacatattttattatagaaaaagtattttttctccacca

SEQ ID NO: 46062 - DNA, 703 bp, Homo Sapiens
  misc_feature (566)..(566): n is a, c, g, or t
ggctgctgcttgaatgttcttggaggctgtttcttatgtatgggttttttttaatgtgatcccttcatttgaatattaatggctttttccattaaagaataaaatattttggacaatgccgataaatgtatgaagttagtatccacatcataaattcagagtgatgtttagcagtaaatcaatattttgaagtgatacacagatgtctttcctccccacaaacttttttaaacaaaaaacaagacctcttttctttagatggtgccacctatgcccaccacaacagagattttacatggaaaccgggctcagtgagaactgatttcctgcccaatatttgtctttgggctgtctctagtgactaattattaaggaatctagctggttatacagttcaaggctttctatgttgttaatgaacctcaaaatagccgttaagacatgaaatacagcagcaggttaccaatgcgaacaggtagttcgcatttatgtaaaacattcagaaaatgaagttttgaatttgttggaacattcaaaggacttgagagcattttattgtaacttanaaaaataatacaactgtcactgaaaaaaaaaaaaaaaaaaaaaaaaactgtcggccgcctcgcctcgagagcttctagacattctttgcgccgggcagtagtagtgactgtctactgttcagaactgtctgattgcg

SEQ ID NO: 46063 - DNA, 889 bp, Homo Sapiens
ctctgtgttgtggctgtgctgccccatatccttgatactggagctgcaggcagaaattcttatctggaagttcttctgaagttggcagacaaatacaaaaagaaaatgtgggggtggctgtggacagaagctggagcccagtctgaacttgagaccgcgttggggattggagggtttgggtaccccgccatggccgccatcaatgcacgcaagatgaaatttgctctgctaaaaggctccttcagtgagcaaggcatcaacgagtttctcagggagctctcttttgggcgtggctccacggcacctgtaggaggcggggctttccctaccatcgttgagagagagccttgggacggcagggatggcgagcttcccgtggaggatgacattgacctcagtgatgtggagcttgatgacttagggaaagatgagttgtgagagccacaacagaggcttcagaccattttcttttcttgggagccagtggatttttccagcagtgaagggacattctctacactcagatgactctaccagtggccttttaaccaagaagtagtacttgattggtcatttgaaaacactgcaacagtgaacttttgcatctcaagaaaacattgaaaaattctatgaattgttgtagccggtgaattgagtcgtattctgtcacataatattttgaagaaaacttggctgtcgaaacatttttctctctgactgctgcttgaatgttcttggaggctgtttcttatgtatgggttttttttaatgtgatcccttcatttgaatattaatggctttttccattaaagaataaaatattttggacaatgccgataaatgtatgaagttagtatccacatcataaattcagagtgatgtttagcag

SEQ ID NO: 46064 - DNA, 494 bp, Homo Sapiens
taaattaattatccttaaccaatggtaggctgagaacaaccctcaaaatagatattttttatgttaaatggggagaaatatctatactttatgttatactggataaaaatgtgttttaagtctaaaaaaaaaccagacgagctaaactttgcctagtgtgtctacaaccattttttaggagacgcaggaataccagggcataataagatcagattggtgtaattttgtatgtttttgaaatccttcattaattgtagaaccttgatatgattagaaacaaactgtatttcaacaaacaggtttcagtatttgcacactgaaaaagtgttttgtattttaactataaatatttcacgtatctgtatagaccatctagaaatgtagaggtcttacagcattagaacgaaggaagtttacatgtgctctatctatttttctgagcctcttttaataaaggttgcaagaaggcataaaacaagaaaaaaaaaaaaaaa

SEQ ID NO: 46065 - DNA, 618 bp, Homo Sapiens
ttgggaccgggatttcatctggtgtgaatgacaccctctctactatataacgagtacattgtctatgatattgctcaggtaaatctgaagtatctgctgaaactgaaattcaattttaagacctccctgtggtaattgggagaggtagccgagtcacacccggtggctctggtatgaattcacccgaagcgcttctgcaccaactcacctggccgctaagttgctgatgggtagtacctgtactaaaccacctcagaaaggattttacagaaacgtgttaaaggttttctctaacttctcaagtcccttgttttgtgttgtgtctgtggggaggggttgttttggggttgtttttgttttttcttgccaggtagataaaactgacatagagaaaaggctggagagagattctgttgcatagactagtcctatggaaaaaaccaagcttcgttagaatgtctgccttactggtttccccagggaaggaaaaatacacttccacccttttttctaagtgttcgtctttagttttgattttggaaagatgttaagcatttatttttagttaaaaataaaaactaatttcctaccttgggggaaaacgctttcaaaaaaagg

SEQ ID NO: 46066 - DNA, 392 bp, Homo Sapiens
cgaggaggcattcttccaaatgtgaaatcctggaagtaagattgcaccttcttcctctcctgatcaacatcggtatgatgtctcctgttgcctcaccctttgtctgcagtatcactggataggactggtggaaagggagcagcctgacagagctccaaatgtggagaatatggcatccctccacctatatttgatgtggacggtaaggctaggcctgcaggatcccttatcctgaccaaagactgtgttggggtgccatttgaaaatcgcagggttgcaaaagaatacaatcttacttgcaggtggatattctctatactctcttttaatgcatctaaaaatcccaaacatcccctggttggtgatcacttacagttgtgtccacctttatt

SEQ ID NO: 46067 - DNA, 661 bp, Homo Sapiens
ggctaacctgcgcaagtccccagttgccaaggatgtggacttggagttcctggctaaaatgactaatggcttctctggagctgacctgacagagatttgccagcgtgcttgcaagctggccatccgtgaatccatcgagagtgagattaggcgagaacgagagaggcagacaaacccatcagccatggaggtagaagaggatgatccagtgcctgagatccgtcgagatcactttgaagaagccatgcgctttgcgcgccgttctgtcagtgacaatgacattcggaagtatgagatgtttgcccagacccttcagcagagtcggggctttggcagcttcagattcccttcagggaaccagggtggagctggccccagtcagggcagtggaggcggcacaggtggcagtgtatacacagaagacaatgatgatgacctgtatggctaagtggtggtggccagcgtgcagtgagctggcctgcctggaccttgttccctgggggtgggggcgcttgcccaggagagggaccaggggtgcgcccacagcctgctccattctccagtctgaacagttcagctacagtctgactctggacagggggtttctgttgcaaaaatacaaaacaaaagcgataaaataaaagcgattttcatttggtag

SEQ ID NO: 46068 - DNA, 434 bp, Homo Sapiens
ttttttaatttaaggtttaaaattccttttccaatcatgttgattttgctctttgctttttcgttgtctgagaaattgttggcgtagatttggcttctggtatgtgtttctgattgcttcctgttgagcacaaagtgagagctgccactgagcagccctgccaggggtgctgtttcaggctgggcatcgccaggcggcctccctgcaaaccaagggctgggggcaaaggggcatgatccagggtcccccagggtgggctcagctccagggagaggccacccacgtggcagccccacctcttgagagcccccagtgccggagcagaaaggaccctggacccagaggcagatactgcggggtggtagaaaaggtagagtaggctgtggcaatggaataaaacacgattaaaaacgttaaaaaaaaaaaaaaaaaaa

SEQ ID NO: 46069 - DNA, 857 bp, Homo Sapiens
  misc_feature (610)..(610): n is a, c, g, or t
ccacgcgtccgggctgctagaagaacacagagacaagttcccagcattgcatagtgctttagatgaattctttgatataatggacagccgctgtactgtgttaaggaaacaagatagtggtgaagcaccgtttagttcaaccaaggtgaaaaacaaaagcaagaaaaagaagccaaaggattcaaagcctatgttagttgggtctggaacaacttcagtaacttcaaataatgagatcatcacttcaagtgaagaccatagcaatcgaaattcagattctgcaggcccatttgcagtgcctgaccatcttcggcaagatgtagaagaattcgaagctctctatgaccaacacagtaacgaatatgttgtccgcaataagaagctatgggacatgaacccaaaacaaaaatgttcaactctatatgattacttctctcagtttttggaggaacatggtcccttggacatgagtaacaagatgttctctgcagaatatgagtttttcccagaagaaactcgacagatactagaaaaagcaggaggtttaaaaccttttctcttgggatgccctcgttttgttgtgattgacaactgtattgcactgaagaangttgcatcacggctcaagaaaaaaaggaagaagaaaaacattaaaacaaaagtagaagaaatttcaaaagcaggggagtatgtacgagttaaactacaactgaatccagctgctagggaatttaaaccagatgtaaagtctaaaccagtgtcagattcatcttcagcaccaggcttttgaaaatgtgaaaccccaaacttgtgtctgcaaatttctccccaagccagctttggtgaagatgttgaaa

SEQ ID NO: 46070 - DNA, 570 bp, Homo Sapiens
acgtgttaccaggtttgccccagtacaccagcatatatacacccttggccagcctttctcctgaatatcagctaccaagatcagtaccagtggtgccgtcttttgtagccaatgacagagcagataaaaatgctgctgcctattttgagggtcatcatttgaatgctgagaatgttgctggtcaccagattgcctctgaaacacagatccttgagggctctttgggaatatctgtaaagtcacactgcagcacaggtgatgctcatacagtcctgagtgagtctaacagaaatgatgagcactgtggaaattctaacaacaaatgtgaagtaattccagaaagcaccagtgcagtaacaaacattccacacgtgcagatggttgccatacaggtatcttggaacataatacaccaagaagtcaatactgagccatataatccttttgaggaacgacaaggggaaatttcacggattgaaaaggagcaccaagtattacaagaccaaccttaaagaagtgtatgaaaattatgagcagataaaacttaagggcttagaaagagaccaggga

SEQ ID NO: 46071 - DNA, 704 bp, Homo Sapiens
gggaagagagtcatcagagagctgtggctgcagaggtatccgtacttgaaaactggaaggagagtgaagtgtataagctacagatcatggagtcacaagcagaagcctttctgaagaagctggggctgattagccgtgatcctgcagcatatcctgacatggagtctgatatacgttcatgggaattgtttctttctaatgttacaaaagaaattgagaaagcaaagtctcagtttgaagaacaaattaaggcaattaaaaatggttctcggctcagtgaactttctaaagtgcagatttctgagctttcatttcctgcctgtaacacggttcatcccgagttactccctgagtcttcaggcgacgatggccaagggcttgtgacttctgcaagcgacgtgactggaaaccacgcagcacttcacagggatcctagtgtgttctctgctggtgattccccaggggaggctccttctgcgctgttgccagggccaccccctggtcagcctgaagccactcagctgacagggccaaaacgggctggccaggcagctctgtcagaacgaagccctgtggctgatcggaagcagcctgttcctccaggacgtgctgcgcgttcaagccagtctccaaaaaagccgttcaatagtattattgagcacctgtcagtggtattcccatgttacaacagcactgagcttgct

SEQ ID NO: 46072 - DNA, 860 bp, Homo Sapiens
  misc_feature (656)..(656): n is a, c, g, or t
  misc_feature (845)..(845): n is a, c, g, or t
  misc_feature (849)..(849): n is a, c, g, or t
caaatataaaactgggcaaaatatttgcagttcatatcaaaaaaagggctaatattcttgtcccagaattcctacagttttttaaggccagtaatttgatacattagtgtgtaaaggatatgaccagacagctcacacacagacacacaaatgtgaaaagatgcttgatctcactgataaagcataaattaaaacgatgtcatttttaaaaatcagattcgcaaattttaaaagttgctaacactggaatggccagagtaagaggaaacgtgacacaggcacagattgctggtagacatataagttggtacagccctctctatgtaattttgtgtttgtcaaaattacaaatatgcatacccttaacccaggaattccactcctcattatatatcctacaaataaactggtctcgttatgaaacaatgtaatgaatacatagataagtactgaaatacttggttatcatagcgtaaagatggtaatcaacccaaatgactattaccagaatagaaattaaacaaagtatgatatatccataaaacacaatactatgcagctgttaagcagaatgagacagtcctctatatatcaatatggataaagagtaagtgaaaaaagccaggagagaatgttgtctataatatgctggttgntgtgtacgggaaaataaataatataaatacctagaatatttgtgaaggtacagccaagaaactactatcactgattgtcttaaggtactagatggggcacaggacaggacgaaagatttacttcttattggttcttctggataacttttgaattttatgctggtaatggaatttttcaaaaaatttttnaaantttaaaacctg

SEQ ID NO: 46073 - DNA, 784 bp, Homo Sapiens
ggggagtctgcaggtttcaaacctaaacagcgctcttcatcctggacgtgcgatgggggaggagtcggcctgctcagtccccacgacatagcaggactaggttgacaaacaaccgagatgggacacatcttgagaccctcacagtccttggaggaaggcagacgagaaaaagacaagaaaagtgttgattggctgcccttcttattaaacatcgacgcgttcactgacgaggacgtaaacaccgatctggcgtaccacgagcgtgtgtattttcgtttcacaaatactgcttcattttgagcatcaattctgaggtgggacgttatcaccactttttccactgagaggtgacaggttcagaggttgtttgtccacgtttgcacagcgtgtgaaggggaactgaaattgggatctactttccatacctttattctaagcaattatcaaatgcaaaaaagggaggagaggaggagaaacagaaaaaaatgaagataaacctcatcccctcctcaaggttatatataattcccccctttgaagataaaaaaagcaattttgttaacattcgcgcaaacacagagaataagaaggaaaagaaaaaccctggttgggcccggcccttcggggcccctcgaaagaaaaaccttttcttaaagaaacaattttccttttttgggcgcccccgcgggggccccccccaggttaagggttaaaaagtggtaaaaaaatcgggggcccccaagaaaccgcgggtggtgtttcccgcccaaggagaggaaaaaaa

SEQ ID NO: 46074 - DNA, 616 bp, Homo Sapiens
  misc_feature (601)..(601): n is a, c, g, or t
  misc_feature (611)..(611): n is a, c, g, or t
cacggaattcaagaccagcctgggcaacatggtgaaacctgtttctataaaaaataatctgggctttgtagcatatgcctgtggtcccagctactgaggaggctgaggtgggaggattgcttgagcccaggaggcagaggttgcagtgagccaaggtcacgtcactgcactctagcctgggcaacagagtaagacaaaaaaatatatatatattgaaaatcaaaggaggcaaaattttgacagggaaggaagtaactgcaaaacactaggctttagtacggtacttatataaaatctagtccagttctctcatttaaaaaaatgaagacactgaagtacagacttaaatagctcagatagctaattaggaaatttcaagttggccaataatagcattctctctgacatttaaaaataatttctattcaaaatacatgcataattgattttacacctcattactggtggataatttatgtgatgtggattgctggtgtccagcatgacccataaacagggtcagaagaatgatggaatgttttagaataaactcctgcttatagtatactacacagttcaaaagatgtttaaaatgctttgnatttactgcntggta

SEQ ID NO: 46075 - DNA, 746 bp, Homo Sapiens
tacaaacgagacccctctaaacagtatggactgaaaatgaaaacttcacgtgccttcttcagtgaggtggaaaggcgttttgatgccatgccgtttactttaagagcatttgaagatgagaagaaggctcggatgggtgtggtggagtgcgccaaacatgaactgctgcaaccatttaatgttctctatgagaaggagggtgaatttgttgcccagtttaaatttacagttctgctcatgcccaatggccccatgcggataaccagtggtcccttcgagcctgacctctacaagtctgagatggaggtccaggatgcagagctaaaggccctcctccagagttctgcaagtcgaaaaacccagaaaaagaaaaaaaagaaggcctccaagactgcagagaatgccaccagtggggaaacattagaagaaaatgaagctggggactgaggtgggtcccatctccccagcttgctgctcctgcctcatccccttcccaccaaaccccagactctgtgaagtgcagttcttctccacctaggaccgccagcagagcggggggatctccctgcccccaccccagttccccaacccactcccttccaacaacaaccagctccaactgactctggtcttgggaggtgaggcttcccaaccacggaagactacttttaatgaaaaaagaaattgaataataaatcaggagtcaaaatcatcgtcttcagccctctttctagcttttctactac

SEQ ID NO: 46076 - DNA, 743 bp, Homo Sapiens
  misc_feature (738)..(738): n is a, c, g, or t
acctcaggtgctgtttggctcctgcagccaaatacactgatgatttaattaaaatgtttatctcccccaaattttaagaactttatttgggttatttggaataatgtataaaatatctatatagattattatataattcagggggaagcaaattatcagaacaatttcatgttatacaaataacatcagaaaaatatcttaaattatatggcatattctattgattcatccacaaatttataagtccttaccacctttcattatattggtactaggcattatagtagtgctaggcactatagtaatgctggggtataaacaagaataaaacaaaataagttccttatttcaggtaacttacagtataggtcagtggttcttagcttgctttttaattatgaattcctttgaaagtctagtaaaataatccaacaccattattccccattgcacatacccccagatgttttagacatattttcaattgctccatggaccttaagaaaacttggttggtgtgcagtttggtgtattatgggtaagactggacctggtgttagaaaatctgcatttgaggctttgttctgacagtgtctagtgtaaacatgggcagaccacttaaacctctctttagtcttctctgtagaatgatgataataccatctaattagcaggattgttgttttattcagtgagacagcatatgtaaataacttagtaaaataaaaagcaacgtgntttaa

SEQ ID NO: 46077 - DNA, 964 bp, Homo Sapiens
  misc_feature (857)..(857): n is a, c, g, or t
  misc_feature (909)..(909): n is a, c, g, or t
  misc_feature (918)..(918): n is a, c, g, or t
  misc_feature (924)..(924): n is a, c, g, or t
  misc_feature (939)..(939): n is a, c, g, or t
  misc_feature (955)..(955): n is a, c, g, or t
aagacttgcctgactctcagcaacaacaccagagctctaagaaaggaaagctttcagaacagttaaaacattgcaatggcattttgaaggagttactctctaagaagcatgctgcctatgcttggcctttctataaaccagtggatgcttctgcacttggcctgcatgactaccatgacatcattaagcaccccatggacctcagcactgtcaagcggaagatggagaaccgtgattaccgggatgcacaggagtttgctgctgatgtacggcttatgttctccaactgctataagtacaatcccccagatcacgatgttgtggcaatggcacgaaagctacaggatgtatttgagttccgttatgccaagatgccagatgaaccactagaaccagggcctttaccagtctctactgccatgccccctggcttggccaaatcgtcttcagagtcctccagtgaggaaagtagcagtgagagctcctctgaggaagaggaggaggaagatgaggaggacgaggaggaagaagagagtgaaagctcagactcagaggaagaaagggctcatcgcttagcagaactacaggaacagcttcgggcagtacatgaacaactggctgctctgtcccagggtccaatatccaagcccaagaggaaaagagagaaaaaagagaaaaagaagaaacggaaggcagagaagcatcgagggcgagctggggccgatgaaaatgacaaggggcctagggcaccccgcccaccctcacctaagaagtcaagaaagcaagtggcagtggggggtggcaatgctgctttaagcccctctgggctttggactttctgggaggaagtggcaccnagctcccccaaaagggcacaaagacagccccacctgccctgcctacagggtntggattccnaaggangagggaaaagagccngggcccatgaatttanaatggaaat

SEQ ID NO: 46078 - DNA, 681 bp, Homo Sapiens
  misc_feature (627)..(627): n is a, c, g, or t
cgacgaggggacactgacgagctggacagcaacgtggacgactgggaagaggagaccattgagttcttcgtcactgaagaaatcattcccctcgggaatcaggagtgacctggagcactgtggggacggactccgcctgctgttcccgcgctgagctacaggactcccgagtgtgagccgcggttcctctgttgcagcgcagccgtgtgtgctgtggagccgaggccgtcctgcaggaagccgcgtgactcccgcctcctccctgtgctctctggctctggactgtgactgcgcctggattctgccattgcgacacatttttgtgcctttcagcccctggtgtctgcagtgggggatttaaggcacccgcttccacttctttcttgtttggagttttctgttggaaccgccggcgttggctccgaagacttagcgacgccactggcggcaccttctcctgcgcccagtgatgtttccacggtgcctgtacacagccgagcagcatttccgttgaaggacttgcatccccattgcgggcagtgctggacgtgtcccggagacccaccgggagggcgccgccatgccttgtacccccaccgtgcaggttgtggccggttttctccgcangttgaacatggaaataaaagcaaacttgtatgaaaaaaaaaaaaaaaaaaaaaa

SEQ ID NO: 46079 - DNA, 449 bp, Homo Sapiens
gggttcatcgtataacacaatatgaatacagggcatgcattttgcagcagtgagtctcttcagaaaacccttttctacagttagggttgagttacttcctatcaagccagtacgtgctaacaggctcaatattcctgaatgaaatatcagactagtgacaagctcctggtcttgagatgtcttctcgttaaggagatgggccttttggaggtaaaggataaaatgaatgagttctgtcatgattcactattctagaacttgcatgacctttactgtgttagctctttgaatgttcttgaaattttagactttctttgtaaacaaataatatgtccttatcattgtataaaagctgttatgtgcaacagtgtggagattccttgtctgatttaataaaatacttaaacacctaaaaaaaaacaaaaaaaaaaaaaaaaaaaccttgtcgg

SEQ ID NO: 46080 - DNA, 541 bp, Homo Sapiens
  misc_feature (534)..(537): n is a, c, g, or t
ctgcatttgatattttaggatatttttctaggttttttcctttcattttattctcttctagttttgacattttatgatagatttgctctctagaaggaaacgtctttatttaggagggcaaaaattttggtcatagcattcacttttgctattccaatctacaactggaagatacataaaagtgctttgcattgaatttgggataacttcaaaaatcccatggttgttgttagggatagtactaagcatttcagttccaggagaataaaagaaattcctatttgaaatgaattcctcatttggaggaaaaaaagcatgcattctagcacaacaagatgaaattatggaatacaaaagtggctccttcccatgtgcagtccctgtccccccccgccagtcctccacacccaaactgtttctgattggcttttagctttttgttgtttttttttttccttctaacacttgtatttggaggctcttctgtgattttgagaagtatactcttgagtgtttaataaagtttttttcccnnnnaaaa

SEQ ID NO: 46081 - DNA, 603 bp, Homo Sapiens
  misc_feature (40)..(40): n is a, c, g, or t
  misc_feature (594)..(594): n is a, c, g, or t
ttttttaaattaatcagaaaccccacttccattgtattgntctgacacatgcctctcaatatataataaatgggaaatgtcgattttcaataatagacttatatgcaggctgtcgttccggttatgttgtgtaagtcaactcttcagcctcattcactgtcctggcttttatttaaagaaaaaaaaggcagtattccctttttaaatgagctttcaggaagttgctgagaaatggggtggaatagggaactgtaatggccactgaagcacgtgagagaccctcgcaaaatgatgtgaaaggaccagtttcttgaagtccagtgtttccacggctggatacctgtgtgtctccataaaagtcctgtcaccaaggacgttaaaggcattttattccagcgtcttctagagagcttagtgtatacagatgagggtgtccgctgctgctttccttcggaatccagtgcttccacagagattagcctgtagcttatatttgacattcttcactgtctgttgtttacctaccgtagctttttaccgttcacttccccttccaactatgtccagatgtgcaggctcctcctctctggactntctccaaag

SEQ ID NO: 46082 - DNA, 600 bp, Homo Sapiens
cacgatacaaacattcttggatagtcaaaacaaaaggcagtcagtgtttttgcacaaaagatgtgcagaagtgtgttacccatggagaattgtcaccgaagagaatcctgacaccattagtctctttgataaagttactatcaccagcaatgttatatattgacatatgcctcctgtaggtacactgagaaaggcatagcatcacttctgtggtatttttgctgggatggagtccacagtgatgctaatctgggaaccacacttgagaaccactgctttattcctagagttagccagtgtgtgttgtaaggtaagaataaaagcaaatgaactattccttcattgtatctcttatctgtccctgacaggcagcatggtgattcatttgatgcttccagaaaccagagaaatctatgaattagagaaattatggaccctacgttcttatgatgaccagttagctcagatagcacctgagacagtacctgaagacttcattcttggaatagaagatgatacttcatctgtgactccagtggagttaaaatgtgaataaaatattttatgcactgcgttagtcatttcaaaaaaaaaaaaaaa

SEQ ID NO: 46083 - DNA, 582 bp, Homo Sapiens
  misc_feature (565)..(565): n is a, c, g, or t
cactgtctgttgtttacctaccgtagctttttaccgttcacttccccttccaactatgtccagatgtgcaggctcctcctctctggactttctccaaaggcactgaccctcggcctctactttgtcccctcacctccaccccctcctgtcaccggccttgtgacattcactcagagaagaccacaccaaggaggcggccgctggcccaggagagaacacggggaggtttgtttgtgtgaaaggaaagtagtccaggctgtccctgaaactgagtctgtggacactgtggaaagctttgaacaattgtgttttcgtcacaggagtctttgtaatgcttgtacagttgatgtcgatgctcactgcttctgctttttctttctttttattttaaatctgaaggttctggtaacctgtggtgtatttttattttcctgtgactgtttttgttttgtttttttcctttttcctcccctttgaccctattcatgtctctacccactatgcacagattaaacttcacctacaaactccttaatatgatctgtggagaatgtacacagtttanacacatcaataaatact

SEQ ID NO: 46084 - DNA, 827 bp, Homo Sapiens
ggaattccgggatgtttatgtctttatttgacgaaaacgagctgttgcgcagccattggtacctgtattggggaaacatagcatacaagcaagaagcttacagcctcagtggcgaaaattttttcatgtcagagaccgagaactcttgcagtcgtttatgtcatcccttcttctccagacagaagataccaaaaagttgcaatcaaagatctcttcatcttattgataaagccactaataagccaaaatgtctgtcaatgtcaaccgcagcgtgtcagaccagttctatcgctacaagatgccccgtctgattgccaaggttgagggcaaaggcaatggaatcaagacagttatagtcaacatggttgacgttgcaaaggcgcttaatcggcctccaacgtatcccaccaaatattttggttgtgagctgggagcacagacccagtttgatgttaagaatgaccgttacattgtcaatggatctcatgaggcgaataagctgcaagacatgttggatggattcattaaaaaatttgttctctgtcctgaatgtgagaatcctgaaacagatttgcatgtcaatccaaagaagcaaacaataggtaattcttgtaaagcctgtggctatcgaggcatgcttgacacacatcataaactctgcacattcattctcaaaaacccacctgagaatagtgacagtggtacaggaaagaaagaaaaagaaaagaaaaacagaaagggcaaagacaaggaaaatggctccgtatccagcagtgagacaccaccaccaccaccaccaccaaatgaaattaatcctcctccacata

SEQ ID NO: 46085 - DNA, 589 bp, Homo Sapiens
  misc_feature (118)..(118): n is a, c, g, or t
  misc_feature (333)..(333): n is a, c, g, or t
  misc_feature (501)..(501): n is a, c, g, or t
tcgacccacgcgtccgattattaattagatggcaccagtttagctctgtgtaaacttcaatctactcccaagtgcatgtaattcttccaaaaatatgggggaaaaataccttacctgnagcttctgtgggatttacccacttgcttcttgtcttgttcacctgacatttggtttctgcttgttacagaaaagaagaggaaaggctcaaccaagagaaaaaggtctctgtttatttagaagacacagactaacaattttagatggtaaggttcacaaataggttgatttcttcttcagctttctgacatgtccagcccatctctaatgaggacncccagatcatcactttatggctgttaggtgtttcccatatgaaattagaggagctgggtcagggagacaaaagtctctattagtcttatggatagctcctccttgagtgtattttgtgcaaaagattaagaagctggactctactgccattaaagctgagagaatccnaaggttatttgtggctcggggttatatttattactactaccaactaataaatattcaacagtaaataaatctttttaaatccaaaaaa

SEQ ID NO: 46086 - DNA, 498 bp, Homo Sapiens
tggagagacaagaattggtctccagctgcctttgatcaagattcgggtgcaagtggagcaggagccatatacctggagggaatgtgctttgtcacaccaaagaggatttttttttcttcaaacttgtatgttgcctaggtttcaaattctttgccgcaaggctgatctgctttcattaactggaattctgtaggagatactggtgacctaagctaagttgcactcagcatactcagtgtcaagctaatgaggttctattataaaggttctacttttaatctgagggaaaacatgttcagggcttctagaacactaaaaaatttggcttaaaccagtgttcagtctggtgccaaacttcgaatggaatacaaattcacataatctgaactttgttcacaggttatcctaatagagtaattcttcactttgctctattgaactgtcttaaggatttgtttaaacagctaagttacttgattaaaataatgataaaattgt

SEQ ID NO: 46087 - DNA, 749 bp, Homo Sapiens
  misc_feature (681)..(681): n is a, c, g, or t
cagagtttcaccatgttggccaggttggtctcaaactcctgacttcgtgatccacccaccttggcctcccaaagcactgggattacaggcatgagccaccattcccagccaataaaactttatttacaagaacagctggtgggccagatttggcccaagggtcatagtttattatcccttgagctaggctgctgcctgaggttgattcaacatcccagctccagtcaacaacaaaaattctaagtctcccgcctaatgctgctgtggtgtgtcatgccaaaaaagtgggctactcaggttagaccaatgacttcagaaccacagggctcagaacaggaaggagcttctttctgcagagctgattcctggaaagccaccagcactccaccttctgcccagaaatgtgattcagtcaatagctgatgaggaaaagcaacctgcaaacattaggaagaaggagaaaaataattcagaggtgattgataccacctccaatgaacagggaagcaagttcatcagtaacaaaagtcagtgaggcaaaaaaaaaagaaacaaaaaaaaaaaacaaaggggcgtagtgggccagaagggagagggcccctctgatgtgtgcccccaaaagtagagggctcctgtaatcccgaggggtgccccaagttgcctcgcgaaaaggaaggtgcnttgaaagtaacacgtctgggggaacccggcccttattaagagccaattcttaccaaagtggagggcac

SEQ ID NO: 46088 - DNA, 703 bp, Homo Sapiens
gatatacgcttatggagctgcttgtgatgcacatggaagaaccttgttttgacttccttcgaaccaagcagacccttgggtaccatgtctaccctacctgtaggaacacatccgggattctaggattttctgtcactgtggggactcaggcaaccaaatacaattctgaagttgttgataagaagatagaagagtttctttctagctttgaggagaagattgagaacctcactgaagaggcattcaacacccaggtcacagctctcatcaagctgaaggagtgtgaggatacccaccttggggaggaggtggataggaactggaatgaagtggttacacagcagtacctctttgaccgccttgcccacgagattgaagcactgaagtcattctcaaaatcagacctggtcaactggttcaaggcccatagagggccaggaagtaaaatgctcagcgttcatgttgttggatatgggaagtatgaactggaagaggatggtaccccttctagtgaggattcaaattcttcttgtgaagtgatgcagctgacctacctgccaacctctcctctgctggcagattgtatcatccccattactgatatcagggctttcacaacaacactcaaccttctcccctaccataaaatagtcaaataaataaactgcagtcacgttggcctgaaaaaaaaaaaaaaaaaaaa

SEQ ID NO: 46089 - DNA, 489 bp, Homo Sapiens
tacatcaagagctcgccatcgccacagaagcggtaccaggacaccccgggcgtggagcacattcccgtggtgcagattgacctctccgtccccttgaaggttccagggctgcctatgtcagatcagtatgtgaagctggaggaggagcggcggcaccggcagaagctggagaaggacaagaggaggaaaaagaggaaggagaaggagaagaagggcaagcgccgccacagctcgctgcccacggagagcgacgaggacatcgcccctgcccagcaggtggacatcgtcacagaggagatgcctgagaatgctctgcccagcgacgaggatgacaaagaccccaacgacccctacagggctctggatattgacctggataagcccttagccgacagcgagaaactgcctattcagaaacacagaaacaccgagacctcaaaatcccctgagaaggacgttcccatggtagaaaagaagagcaagaaaccc

SEQ ID NO: 46090 - DNA, 846 bp, Homo Sapiens
  misc_feature (640)..(640): n is a, c, g, or t
  misc_feature (766)..(766): n is a, c, g, or t
  misc_feature (819)..(821): n is a, c, g, or t
  misc_feature (825)..(825): n is a, c, g, or t
  misc_feature (827)..(846): n is a, c, g, or t
tcttctcttccctgcgcctgtgatgctgggcacttcatctgatcgggggcgtagcatcatagtagtttttacagctgtgttattctttgcgtgtagctatggaagttgcataattattattattattattataacaagtgtgtcttacgtgccaccacggcgttgtacctgtaggactctcattcgggatgattggaatagcttctggaatttgttcaagttttgggtatgtttaatctgttatgtactagtgttctgtttgttattgttttgttaattacaccataatgctaatttaaagagactccaaatctcaatgaagccagctcacagtgctgtgtgccccggtcatctagcaagctgccgaaccaaaagaatttgcaccccgctgcgggcccacgtggttggggccctgccctggcagggtcatcctgtgctcggaggccatctcgggcacaggcccaccccgccccacccctccagaacacggctcacgcttacctcaaccatcctggctgcggcgtctgtctgaaccacgcgggggccttgagggacgctttgtctgtcgtgatggggcaagggcacaagtcctggatgttgtgtgtatcgagaggccaaaggctggtggcaagtgcacggngcacagcggagtctgtcctgtgacgcgcaagtctgagggtctgggcggcgggcggctgggtctgtgcatttctggttgcaccgcggcgcttcccagcaccaacatgtaaccggcatgtttccagcngaagacaaaaagacaaacttgaaagtctagaaataaaactggtaaaacccccnnnaaanannnnnnnnnnnnnnnnnnnn

SEQ ID NO: 46091 - DNA, 472 bp, Homo Sapiens
gggtatatctctggattccaggattgctagttagcacctcacatttgagggtctgtgctattcagtctagaatcagagttggatgagaaatcaactttgaacaccacctttggggtggctgcattggctcacacctgtagtctcagcactttgggaggctgaggcgggaggatagcttgaggccaggagttcgagactaaccggagcaacatagtaaggccacatctgtacaaaaaaaagaaagaaaaaattacccaggtttggtggcatgcacttgtagtcccagttgtgggctgaggattatgcaggtgacaaggcaagagactgaaggcacaaactgtttcagtataataaagaaaatagaataataatagtcataattatatatagagatgatcatgaacaattatcaatcattataataaacattattaatcgggggaagaaacaaaaaaaaaaaaatgaaccgtgt

SEQ ID NO: 46092 - DNA, 565 bp, Homo Sapiens
acgcgtccgacagactgttccttcattttcctgtatattctctgtactatgtcgattcgacagaacattcagaagattctcggccttgccccttcacgagccgccaccaagcaggcaggtggatttcttggcccaccacctccttctgggaagttctcttgaactcaagaactctttattttctatcattctttctagacacacacacatcagactggcaactgttttgtagcaagagccataggtagccttactacttgggcctctttctagttttgaattatttctaagccttttgggtatgattagagtgaaaatggcagccagcaaacttgatagtgcttttggtcctagatgatttttatcaaataagtggattgattagttaagttcaggtaatgtttatgtaatgaaaaacaaatagcatccttcttgtttcatttacataagtattttctgtgggaccgactctcaaggcactgtgtatgccctgcaagttggctgtctatgagcatttaagagatttagaagaaaaatttagtttgtttaacccttgtaactgttt

SEQ ID NO: 46093 - DNA, 708 bp, Homo Sapiens
cccatctacatattaccactggcagtcactgctacaatgtgggctgttcttgagctaggtgctgagacaggtgtgcaaagttctgaccttcagtggatgagaaatgtcatcagaatgatgcccctgataaccttgcccataaccatgcatttccccacggcagtgtttatgtactggctctcctccaatttgttttccctggtccaagtatcctgtctccggattccagcagtacgcactgtacttaaaatcccccagcgtgttgtacatgacctggacaaattacctccacgggaaggcttcctagagagcttcaaaaaaggctggaaaaatgctgaaatgacgcgtcagctgcgagagcgtgaacaacgcatgcggaatcagttggagctagcagccaggggtcctttacgacagacctttacccacaaccctctcctacaacctggaaaggataaccctcccaatatccctagcagcagcagcaaaccaaagtcaaagtatccctggcacgacacacttggctgacttatgttctgtgcgcattctggcaggaattctgtctcttcagagactcatcctcaaaacaagacttgacactgtgtccttgccccagtcctaggaactgtggcacacaggagatgttcattttaaaaacggatttcatgaaacactcttgtacttatgtttataagagagcactggggt

SEQ ID NO: 46094 - DNA, 630 bp, Homo Sapiens
  misc_feature (592)..(618): n is a, c, g, or t
ggcagctcttgaaagcatctgtttgagggaaaggtctctgggcaagcaagtggttatttggattgcttgcttccctttttccacctgggacattgtaatcataaaataacagtaaattccaaacctcaaaaactattatggcctgagcacagctgaaatctagcagagtttaactcttctgcctccatgtctgtcacttataattcaggttctgctgttggcttcagaacatgagcagaagaatcgttttatgctagttattgcattcatggttgaaactcaacttagggaaagggttccaatgtattaagcaatgggctgcttctccccaatcctccctaacaattcgttgtgtggacttctcatctaaaaggttagtggcttttgcttgggatcagtgctctctattgatgttcttgctggtctccagacacattcctgttgcattaagacttgaaagacttgtagatgtgtgatgttcaggcacaggatgctgaaagctatgttactattcttagtttgtaaattgtccttttgataccatcatcttgttttctttttgtaggtataaataaaaacactgttgacaatnnnnnnnnnnnnnnnnnnnnnnnnnnnaacatgtcggcc

SEQ ID NO: 46095 - DNA, 659 bp, Homo Sapiens
gacgcgatgtgatttctgcccagtgctctgaatgtcaaagcaagaacatcccagagattgtggcagtatactccagaatagaacagctgttgacgtctgactgggctgttcacatccccgaggaagatcagcgagatgggtgtgaatgtgaaatgggaacttacctgagtgagagccaagtcaatgaaatagaaatgcagttactaaaggagaaacttcaagagatatatcttcaagcagaagaacaagaggtgttgcctgaagagctctcaaatcgactggaagtggtgaaggaatttctgagaaacaatgaggatcttagaaatggccttacagaagatatgcagaagctagacagcctctgtctacatcaaaaactggattcacaggaacctgggagacaaacacctgacaggaaggcctgaggttgcccgtcaacaaaaatcaggcatgttctgtgaaagtcagcatggcttccatctcagacatccttttctgtgcaaaaggaaaaagttaccagagtattgtacccaaacaaaaaggaattttgttgtttgtcctggactttcctctaactctttggaactattttaatatttataaacttggggttgtataatctattgcataaaaaatattagatactctaaaaaaaaaaa

SEQ ID NO: 46096 - DNA, 782 bp, Homo Sapiens
  misc_feature (110)..(110): n is a, c, g, or t
caaaccatttgcatctatgaaagcagaactctattttttccctttggtttagcttgtgagttctctgtgggaggaagatctgatatggccggctctctttcaaccctagnttccagcagagagagagagagaatgttctgggtgacgggccctcccagcaaaggggcttgctttatttgcttctctccccaaccctccactcttagcctttgtcttttgaataatccttcctcattccacttttgtggtgggggataattagtcacaactcagtagtaagccgtgcctgctgtagagaggaagcattcagggggttggaagtgtggagaccccagtctgattgctggaatcagtgctcctcggttcagtgttttgagaccaggtctttagcttctagctgggcatatttttctgctttgtaatttaacctgtatcttttttttcccatgttcctgcctcatcagggaattgtaagatttagggggaggtgtgggaaatcttactctttgccctaaagtattcagcgatcagaattctggataccctgaaaacactccaactccctgcttttgaaccctgtgtttaacaatgagaagcttgtttatttgaaggctgggttctcatgtggcccacaggggtaggtgtcattgtgtgtgttctaaaaaaatgtgcctttggcattccccaaatagcatgacaactggaatagtaatttgaccaaaaaaaaaaaaaaaaaaaaaaaaatttttgtggggcgctggggctaaaaaaagttttaaacc

SEQ ID NO: 46097 - DNA, 780 bp, Homo Sapiens
  misc_feature (738)..(738): n is a, c, g, or t
ttcaccctgcagacggtgaactccaatgggaccagcgaccgcacaacctcccctgaagaagtccatgcccagccgtacattgctatcgactgggagccagagatgaagaagcgttactatgacgaggtagaggctgagggctacgtgaagcatgactgcgtcgggtacgtgatgaagaaggctcccgtgcggctgcaggagtgcattgagctcttcaccactgtggagaccctggagaaggaaaacccctggtactgcccttcctgcaagcagcaccagctggcaaccaagaagctggacctgtggatgctgccggagattctcatcatccacctgaaacgcttttcctacaccaagttctcccgagagaagctggacaccctcgtggagtttcctatccgggacctggacttctctgagtttgtcatccagccacagaatgagtcgaatccggagctgtacaaatatgacctcatcgcggtttccaaccattatgggggcatgcgtgatggacactacacaacatttgcctgcaacaaggacagcggccagtggcactactttgatgacaacagcgtctcccctgtcaatgagaatcagatcgagtccaaggcagcctatgtcctcttctaccaacgccaggacgtggcgcgacgcctgctgtccccggccggctcatctggcgccccagcctcccctgcctgcagctccccacccagctctgagttcatggatgtntattgagagccctgggtcctgccacaaaaaaaaaaaaaaaaa

SEQ ID NO: 46098 - DNA, 769 bp, Homo Sapiens
aggtaccctccttcctcgttggccactaagaggtcttagaaacatagcctgtaaatgtgtcttgtaactggcacactaaaaaagatcctagttgagcatctctcttggtgaggaagcgatgtgtgtgcggttcaggaaactcctccaagaggaggaggagtccaaacagggatgccagaggaagctttccgttttcctagccaacttgtgttctgggtttgaaaaagacccaccacaaatgctttttctattttctgatttaaaagtcgcttttgaatatgaccatgagaaaccaagaaatgctgcttgtgtggtgctctgcttcctgaggatttggctggaaggggattctccgctggcacatgggagaaggccatcttctgtgtcggtgctgtgatctgccttgttctcacttgctgaggataagggcatacacgctgctcctcgctttcttgttgcccgacttcgtactaagcagctcaggagcagtcactcagacccaaatgtcttgactgtgttgtttttaatcactgtgacccttaaagtacaggccaagtgttgtcaaacaccttagctaaaacagtggagggtgatgggtaaagcagtagagggcctcaacccaacactggctgaaatgccacaactgcagatgaaccaactgctgtttatgccccatttccttttttgtatctacaccacacgattcccatgttgggtattctactgataaagcaggatcagcgctcttaagtcttacacaaacaacagg

SEQ ID NO: 46099 - DNA, 802 bp, Homo Sapiens
  misc_feature (678)..(678): n is a, c, g, or t
gggttatctggatattgccttgactccatttcattttggctatgtagatacaacttagtctttgtgattgtgatatatttgctaagttttaaataaaacttcttttggatagaaatcattagaaaccaagcatactgcactctaatattttactgtaaaggcttatgatttttatttctactgccattaattttttagatggatttgtttcctcttacacaactagaattaatgtatttttcaccagttttccatataccttaggtcttgatcgtttgtccttaaaaaggggatcagcatgagtatagacagtagaaatgtatgggtagtctaaccacttttatcagagacagagcagggctgtggtctcactctagctgagcagagtattaacttggtagcaagagttcctgatacaaatagatgcaatgactgtaaatggtgtcagcagtacacatggataatcagtatttgactgtaatagtatagtagttaaatacagcacttaaaaataccacagacacagttaaagcaaaaggaaacaataaaaaggaatgtctgccatgctattttaatctcccattctttatctgtcttaaagtgggaaatccatttgcctataaatacctggaaaccgactttaaaaaaataaatggattatttgcctttgtgaccaantaaaaaccgccccgaaatataacatctacaatcgctttccccttgttcgggcccggcccttccggccccctccgaagaaagacttttttcctaaagaaccacattttccgtgtttggggcggga

SEQ ID NO: 46100 - DNA, 612 bp, Homo Sapiens
  misc_feature (506)..(529): n is a, c, g, or t
cggggaaatttcattgaaagaatcaggcgatgaagtctgattctgttggagggggggctgagactgtccatcaggagcctggccctggttgtcattccctccgaccggagagccacgagtcgtggctgtcatactcgacacagggcagatctttgcaatttgtctgcttatgtagttgtcttgagaaaagaaattatagtccacttatagaagatgaagtaccagcatttgtcagtcttaaaaaggtccaattcaagaataaaccatcttgcagagaccattgcataaccgcacgacacagacgtcttctcacaaccagggcacacggaggcgggaggcaccaggcgacggtggggctcggtcccgggacgagacctaccctgggtgcatcccaggcccgggggtgaccggcaacaaagtgtatcgaaaggctgcggcggccgggctcggggctgcgggcgtctcaaccaaaaggctgcacaccggcgccggaactcgctcctcgnnnnnnnnnnnnnnnnnnnnnnnntggccggcgacggccctcttccccttctcccctcaggctggggctctcgctgagctcagacgggctctttccagcacactggc

SEQ ID NO: 46101 - DNA, 878 bp, Homo Sapiens
  misc_feature (861)..(862): n is a, c, g, or t
agagctacctgccgccaacttgttgagatgtgtgtttgactgtgagagagtgtgtgtttgtgtgtgtgttttgccatgaactgtggccccagtgtatagtgtttcagtgggggagaagctgaaagaccaagactcttcccaagttagcttgtctcctctcctgtcaccctaagagccactgagttgtgtagggatgaagactattgaagactccattgccaaaccatggcctttcctcagtgttgtaaggcctatgccaaggataaaggaagggtatgcctttgggtactccaggcacacacctttctgaaatccttctccagccagctgctgcagacaaaagatcacatttctgggaagatgagaacttgtttccagaccagcatccagtggccatcaggtcttgtggcccaaaggctatgcttgcctccggctgagtgcctgggataggccttttctatgtctccccaaggctggggtgctgagcctgccttcctcaccacctagccatagtctcaaacctgtggggaaggaggttttctccctgcccgggaagaggacagataactgatttccgttcttttgactgtgttttaaaattctctttctaaacacagagtgttgggcctggtttgtttctgacaaagttacagtcctgggcctgtaatgaatgtcggcggcgctggggttgcagggaaaagacaaatcctcaaagcgtggacgtgtgtccccatggcttgtggatcagctaagctcgggatcatttccataagtctgctttttcagggattctctgcctggtgctggtgccagggacttcctgttccaaaaggctgggaaaaaactaaagctggtcccagnnccccttcccatttctc

SEQ ID NO: 46102 - DNA, 500 bp, Homo Sapiens
gttaaccattatagaaaagcaaagcttgagtttcctaaatgtaagcttttaaagtaatgaacattaaaaaaaaccattatttcactgtcatttaagatatgtgttcattggggatctcttgatttgcctgacattgacttcagcaaaagcacggggctgtaaattaccatttactagattagccaaatagtctgaatttccagaaaacaaggcagaatgatcattcccagaaacatttcccagaaaatgtttcccagaaaactagacagcatgatcattcaatggatcacagtgaagcaaaggacacaactttttattgtaccccttaattgtcaacaggagttaactgatttgttgtggtgctcagacttttttatacaggtgctagtgttttatcctatgtattttaactcattagtgcataaaggcaagccccatataatgaagtctcagggtatatgaaagtagctggcttcaaaataaaatttttgagtgcataa

SEQ ID NO: 46103 - DNA, 626 bp, Homo Sapiens
tgagctcaagtggcagcagaggcagtttggaataagctgcggcaagttgaagaagctgtgttggacgagattgccccgccttgatcagggtaccatgacataaaaggttaaagaacaggcaacacaatgagcacttaagtttttaacatgtggggaatagggcattttaaaggctggaaccagttcagaggaaacaagggtttgggtagaggtagaaaggtttaattaaccctggagatctgcaaatggagggaggggtgaaggaggaatcttaagaccgagggagaagagccaaggacaaggtcaggttgaatgagtaggaggtgttcacacatcctcttgtgtgctaggtagtggcgtgcatctgatctgagaggcagtaaagcagtgatgaagacagtgcagcagaacattgaagtcctgattgcagcagtgactctgcaaccttggataaattatttcaatctttattttgtaaaacggagataacggcctataggattgttaagactgaatattttaaaagagcttagaatggtgcctgacaaatgagaaacaataaatactgattattggccataaagtggtattaaaactggatctcttttcttccatggcactactct

SEQ ID NO: 46104 - DNA, 852 bp, Homo Sapiens
tggagctaccgccaccgccgccgccgattccggagccggggtagtcgccgccgccgccgccgccgctgcagccactgcaggcaccgctgccgccgcctgagtagtgggcttaggaaggaagaggtcatctcgctcggagcttcgctcggaagggtctttgttccctgcagccctcccacgggaatgacaatggataaaagtgagctggtacagaaagccaaactcgctgagcaggctgagcgctatgatgatatggctgcagccatgaaggcagtcacagaacaggggcatgaactctccaacgaagagagaaatctgctctctgttgcctacaagaatgtggtaggcgcccgccgctcttcctggcgtgtcatctccagcattgagcagaaaacagagaggaatgagaagaagcagcagatgggcaaagagtaccgtgagaagatagaggcagaactgcaggacatctgcaatgatgttctggagctgttggacaaatatcttattcccaatgctacacaaccagaaagtaaggtgttctacttgaaaatgaaaggagattattttaggtatctttctgaagtggcatctggagacaacaaacaaaccactgtgtcgaactcccagcaggcttaccaggaagcatttgaaattagtaagaaagaaatgcagcctacacacccaattcgtcttggtctggcactaaatttctcagtcttttactatgagattctaaactctcctgaaaaggcctgtagcctggcaaaaacggcatttgatgaagcaattgctgaattggatacgctgaatgaagagtcttataaagacagcactctgatcatgcagttactt

SEQ ID NO: 46105 - DNA, 548 bp, Homo Sapiens
atagcccggcaattggaaaggatatatgtggcaatattaacctggtacatgaatatatggggataacattttaatttgaaggtttggaatatatatatttaagctttatttccagaacagtgagggttaggtcttgggaaaactataacttgccaaagtagaagaaatagtagtaccatatgccaaagtgatagagatgaatcatgtcagtagttagaataacatttcaactgttttctttgctaaaatcacagaaagaccctattgacaacatctatgtctgtaaaaatgttagagtacttgtcatcttgaatatagcctccccaagagagaacagggtggtattctaagtatgtttctttgtaacatctttagcagtaggacagagccatacatgtgaaatctgatttttatgtgtgttattcgtttgtctggttttactacctttgcaaaaacaaaataccccaaagatatttaaacaaggttataatttagcatcttccctggatctaaatagtatattatatcctgaaataaatgaaatgatt

SEQ ID NO: 46106 - DNA, 738 bp, Homo Sapiens
cacgagggaaacccacagcagatgcagaggcctatgttttcactcctaacatgatctgtgctggaggagagaagggcatggatagctgtaaaggggacagtggtggggcctttgctgtacaggatcccaatgacaagaccaaattctacgcagctggcctggtgtcctgggggccccagtgtgggacctatgggctctacacacgggtaaagaactatgttgactggataatgaagactatgcaggaaaatagcaccccccgtgaggactaatccagatacatcccaccagcctctccaagggtggtgaccaatgcattaccttctgttccttattatattctcattatttcatcatgactgaaagaagacacgagcgaatgatttaaatagaacttgattgttgagacgccttgctagaggtagagtttgatcatagaattgtgctggtcatacatttgtggtctgactccttggggtcctttccccggagtacctattgtagataacactatgggtggggcactcctttcttgcactattccacagggataccttaattctttgtttcctctttacctgttcaaaatccatttacttgatcattctcagtatccactgtctatgtacaataaaggatgtttataagcaaaaaaaaaaaaaaaatggccttatcgcgccgctcgctacttaggaccgtaatattaggcccttagtgaggttaattaatatgaaaaga

SEQ ID NO: 46107 - DNA, 573 bp, Homo Sapiens
  misc_feature (456)..(456): n is a, c, g, or t
tttgtaattttttccttgaataaccttagtattctttcagctggttgttgaatagggttaagtccgcttggattagctgtgcctttcattactttgttacagaaatgcagtgacttatactaagacaatttattgtttaaaaaaaaaattggcaagacaactatatggttaagaatttccagtatgaccacacccaataactgttattagagtgttaatggattattgtgttttaggtgacatagttaactgtaaagtaacctgactcagtatagttactggtaccacagtgaggtgaataaaacgggattttcagaagttagcctgaatttaactgtatttttaaatttaacctccattaactaagcatcttttctttgtggtagggtctaccttctgcttccctggaaaggatgaatttacatcattcgacaagcctattttcaagttatttgntggttgtttgcttgtttttgtttttgcagctaaaataaaaatttcaaatacaattttagttcttacaagataatgtcttaattttgtaccaattcaggtagaagtagaggcctacct

SEQ ID NO: 46108 - DNA, 689 bp, Homo Sapiens
gccgagctccagccgaaggagaaggggggtaagtaaggaggtctctgtaccatggctcgtacaaagcagactgcccgcaaatcgaccggtggtaaagcacccaggaagcaactggctacaaaagccgctcgcaagagtgcgccctctactggaggggtgaagaaacctcatcgttacaggcctggtactgtggcgctccgtgaaattagacgttatcagaagtccactgaacttctgattcgcaaacttcccttccagcgtctggtgcgagaaattgctcaggactttaaaacagatctgcgcttccagagcgcagctatcggtgctttgcaggaggcaagtgaggcctatctggttggcctttttgaagacaccaacctgtgtgctatccatgccaaacgtgtaacaattatgccaaaagacatccagctagcacgccgcatacgtggagaacgtgcttaagaatccactatgatgggaaacatttcattctcaaaaaaaaaaaaaaaatttctcttcttcctgttattggtagttctgaacgttagatattttttttccatggggtcaaaaggtacctaagtatatgattgcgagtggaaaaataggggacagaaatcaggtattggcagtttttccattttcatttgtgtgtgaatttttaatataaatgcggagacgtaaagcat

SEQ ID NO: 46109 - DNA, 538 bp, Homo Sapiens
ccagccgctgttggctgggaatcgaagttagaggtgacttccaaaggccccccgagccggcagtgccccccaccacccctccagcgactctgcggtgccagtgccttgttggcttttccggctacgcaccctgcagtcactgagctctcggtctgacgtctgatgtttgtggtttgtttataacacggggccttacctggggaattcagctggtttgaatatttgtagcccgctcccagaatgtcttattttgtaatgactgaactacatttagtaatagttacacatgtatatggttaatacatatggaaattcaatatattttgtagttaacgtattctgaagtaacggatgtttctcgccaatcgtagtgacttcagctaacgaaatgttcttttgtagtaccacggtcctcggcctaacgaaggacgtgaaccttgtaagaggagagctctgaaacgcggtcacctttgtttagtggaagggaaagtgtgttcccggcatgaggtgcctcggaatttagtaagaattgtgggca

SEQ ID NO: 46110 - DNA, 730 bp, Homo Sapiens
agcggctgaaacacatccatatgcacaccacacacactgagatacagtgacacacacagtcacagatgcacagacatatgctgatgtaaatgtacaaatgtggtcacactgacacatacatgcaatcatctacgcagactcatagaaaccgacacaaatacctgaaatacacagcctgggcgacagagtgtgactgtcttattaataaataaataaatacgaaaagtggtttgtttttttacaaatgtgtggttcatactcctgggtggccttattagcttttttggttgggagacaagggaaggaactttcttggatcagtgtgtgctggtgattttattgccttttcctcttaattcaatcccactctttcccttcctcaagtcttgttcacccagcctcctgccccaggaatcacggggaagaagtctgggagaccacagaaaaaacaccaatgacactgagctattagagatcaaaactgggtcaggaagagttcatgttaagctttcacatgtgctaagaacgctgaaagatacacactgatttccatcttaatagtgccggataattgacaaatttgggacaagatgagggagaggtcaaaatccccctaacttcccaaagcaaaaaaacaggagtataatgatcagaaacgtaatagtagtgtcagaagcacacaatcagctgtggacggtgaaccatataatggttctatctgttctgagat

SEQ ID NO: 46111 - DNA, 808 bp, Homo Sapiens
  misc_feature (360)..(361): n is a, c, g, or t
  misc_feature (363)..(363): n is a, c, g, or t
  misc_feature (469)..(471): n is a, c, g, or t
ggggttttaaatggacattgtctgtaccagcttcattaaaataaacaatatttgtaaaaatcatactaatgcttattttattttaattgtatagaaagaaaaaaatgcctaaaataaggttttcttgcataaatactggaaattgcacatggtacaaattttttcttcattactgtacagtgatgatgttaatgactttgaagcactgaaagttactgaagtgccttctgaatcaaggatttaattaaggccacaatacctttttaatactcagtgttctgtttttttaaaaacttgatattcctgtatggtgcatatatgatacagttacctaatcatgttgaataaatgggcatgccnnanaaaaaaaaaaaaaaaaaaaaaaaaaaaaaaaaaaaaaaaaaaaaaaaaaaaaaaaaaaaaaaaaaaaaaaaaaaaattttaaaaaaaaaaaaaaaaaaaaaaaaannnttttgcggccccccccccccccaaaaaattttttaaaacatttttttgggccccgggccccaaagggaaaggaaaaggggcaaaattgtttcccaaaaaaacccgggcaagaaaaagggttggaatccccccaaaaaaaaaacccccgggggaacccaaggtttttaaaaaatccccaaggggattctgggggcttttctgggatctttcaaaggggagtcccagcgcaacctcaaaatcaaatttacgcccccggccgtgtcctattattgggaagaaacgggtggaaaattccttaaaaacttttcgtgcccaaacagtggaaaacccctcccaa

SEQ ID NO: 46112 - DNA, 717 bp, Homo Sapiens
atgaaatgaatggcaaagaaatagaaggggaagaaattgaaatagtcttagccaagccaccagacaagaaaaggaaagagcgccaagctgctagacaggcctccagaagcactgcgtatgaagattattactaccaccctcctcctcgcatgccacctccaattagaggtcggggtcgtggtggggggagaggtggatatggctaccctccagattactacggctatgaagattactatgatgattactatggttatgattatcacgactatcgtggaggctatgaagatccctactacggctatgatgatggctatgcagtaagaggaagaggaggaggaaggggagggcgaggtgctccaccaccaccaagggggaggggagcaccacctccaagaggtagagctggctattcacagaggggggcacctttgggaccaccaagaggctctaggggtggcagagggggtcctgctcaacagcagagaggccgtggttcccgtggatctcggggcaatcgtgggggcaatgtaggaggcaagagaaaggcagatgggtacaaccagcctgattccaagcgtcgtcagaccaacaaccaacagaactggggttcccaacccatcgctcagcagccgcttcagcaaggtggtgactattctggtaactatggttacaataatgacaaccaggaattttatcaggatacttatgggcaac

SEQ ID NO: 46113 - DNA, 751 bp, Homo Sapiens
cgcgtccgttttaagatgactacagacctatttttagatatgttttcagtacaattttgaacagcaactttttaattaaacatcttccagtgttaggaagttgagaaacgttcataggcaagtctgctgttctatgtcaccatcttttgtctcccctagtcccccaggagctctttcctttcccctctagttttgggtgtgcatgtttggagtttgtagtgggtggtttgtaaaactggaccattctgccttgctatgggttgttcaagaaagcctcattcttttctgtgaccctttcgcttttgcattcaccctccttcccacctacctgtcctggggctgttgagcagcataataatcccgggagaatgattcccctcatagaaagacaaaagcatccatcccctcatagttaagtagccactggtgtcctgggaatttctggttggatttggtgccctgaacttttttattaagaaatcagatcccagggtgagagtaacaggccatttggccaagaaagaaacctgtttgtttttcttttgaactatgaaaagaccctgtttgtgaatatattttagaaagagaggaaggatgtctgcagaactttgttctgttttctgccacaaaaatgtgaatagttcagagtgaaaaccttttgtgatggttgatgtctcaggaataagctggatctccaatgttttggggatgctttgagtctcaaaaaaaattgataatcagaaaagtaatt

SEQ ID NO: 46114 - DNA, 629 bp, Homo Sapiens
gtttgcttctggaccgaaaagccaatgttgaacatagggcaaagacgggtcttacccccttgatggaagcagcttctggagggtatgcagaggttggaagagttcttcttgataaaggagcagatgttaatgctccccctgtgccttcctcaagagatactgctttaacaatagcagcagacaaaggtcactacaaattttgtgaactcctgattcataggggagcccacattgatgttcgtaacaaaaagggaaatacgccactttggctggcatccaatggaggtcattttgatgttgtgcagttgctagtgcaagcaggtgctgatgtggatgcagcagataaccggaaaatcacacctcttatgtcagcatttcgcaagggtcatgtaaaagttgttcaatatttggtaaaggaagtaaatcagttcccttctgatatagaatgcatgagatacatagcaacaattacagataaggaactgttgaaaaaatgtcatcaatgtgtcgaaaccattgtgaaggctaaagaccagcaagctgcagaagcaaataagaatgcgagtattcttttaaaggaacttgatctggaaaagtcaagagaagagagcagaaagcaggctcttgct

SEQ ID NO: 46115 - DNA, 820 bp, Homo Sapiens
  misc_feature (771)..(772): n is a, c, g, or t
  misc_feature (777)..(777): n is a, c, g, or t
  misc_feature (779)..(779): n is a, c, g, or t
  misc_feature (781)..(814): n is a, c, g, or t
ttcccgggatgtgccttctcgcctctcctccgagcacttgggcggtagccagtggccatgtgctcccaaccccaatgcgcagggcagtctgtgttcgtgggcacttcggctggaccccatcacgatggacgatgttccctttggactctagggcttcgaaggtgtgcaccttggttctcccttctcctccccagagttccccggatgccataactggctggcgtcccagaacacagttgttcacccccccaccagctggctggccgtctgcctgagcccatggatgctttctcaatcctaggctggttactgtgtaagcgttttggagtacggggccttgagcgggtgggagctgtgtgttgaagtacagagggaggttggggtgggtcagagccgagttaagagattttctttgttgctggaccccttcttgaaggtagacgtcccccacccggagagacgtcgcgctgtggcctgaagtggcgcaagcttgctttgtaaatatctgtggtcccgatgtagtgcccagaacgtttgtgcgaggcagctctgcgcccgggttccagcccgagcctcgccgggtcgcgtcttcggagtgcttgtgacagtccttgcccagtatctagtccccgtcgccccgtgcaggagacgtaggtaggacgtcgtgtcagctgtgcactgacggccagtctccgagctgtgcgtttgtatcgccactgtatttgtgtactttaacaatcgtgtaaataataaattcataatgacttctannaaaananannnnnnnnnnnnnnnnnnnnnnnnnnnnnnnnnnaaaaag

SEQ ID NO: 46116 - DNA, 571 bp, Homo Sapiens
tttttcctgtaaacagggccactttttaattagggagcattttccttctagtctatttcagcctagaagaaaagataatgagtaaaacaaattgcgttgtttaaaggattatagtgctgcattgtctgaagttagcacctcttggactgaatcgtttgtctagactacatgtattacaaagtctctttggcaagattgcagcaagatcatgtgcatatcatcccattgtaaagcgacttcaaaaatatgggaacacagttagttatttttacacagttctttttgtttttgtgtgtgtgtgctgtcgcttgtcgacaacagctttttgttttcctcaatgaggagtgttgctcatttgtgagccttcattaactcgaagtgaaatggttaaaaatatttatcctgttagaataggctgcatctttttaacaactcattaaaaaacaaaacaactctggcttttgagatgacttatactaatttacattgtttaccaagctgtagtgctttaagaacactacttaaaaagcaaaataaacttggtttacatttaaaaaaaaaaaaaaaaaag

SEQ ID NO: 46117 - DNA, 601 bp, Homo Sapiens
ggaatcttcaaaggcagcgattttcatattgcctcacaccctggcgggggcggggggctctgggaccactgggggacctgctaaatcctcttcagtctgagcagttcagccattgtcagttttagtattgtgtctctgtatttcacttgcagaaagagctttgcttctataaaggactttaaaaagtactccaaagagatctagttttggagtagaggggagatgttttctcaaacttagggcagtcctgagatgctcaggcagtagcccttttctcagttccctttgcgggtcttggtcagatgatgccctctagacccgtgctgtccaatatgtagccgctagccatgtgcagctgtcaggcccttgcaacgtggctggttcgagctgtgatacactgcaagtgtaaacacaaaccagacttcgaaggcttagtatgataacaaaagaaaaggagtgtaaaatatgtcaataacttttttatatatgtgttgaaatattttgggtattgggttaaataaaatatattattaaaaaaaaaaaaaaaaaaaaacactagcgtgcggccgcaagcttattccctttagtgagggttaatttt

SEQ ID NO: 46118 - DNA, 583 bp, Homo Sapiens
aatatcagtcgccccatcgtctcctccctgggtaggaggaagtttctgccacctcccctcctgagcctgctgtcatcttcactgcccctgcccatctgtcacccacctgctcctttgacccctggacttggtatacctccatgtggagttgttgggcgagaggtgttctctgtgctgtgaattcagtggggagctgtagcggggtgggggctaggttcctccccccttgggccgagggccccttccccttggtgctctgtccccatccacctcctttcagctgctcctgggcctcagctctgcccagggccagccaggttctgctgggaagggaagggaatggggagaagggagaagcaagcagtgtctgagcctcaggagcttccccctccccctttgcctatcccctcccctctgcttgagccttgagccttgactgggagctgaaaggagttgcagctgttggcatgagacctccttctccccgtcttggggaggtggggaccagcagataaatcccacccttccttgagctgtcgctgtactctgaagttcagccagctcagattttataaaaattaat

SEQ ID NO: 46119 - DNA, 847 bp, Homo Sapiens
cggattcgccgccgcagcagccgccgcccccgggagccgccgggaccctcgcgtcgtcgccgccgccgccgcccagatccccgcaccatgccgtcggagaagaccttcaagcagcgccgcaccttcgaacaaagagtagaagatgtccgacttattcgagagcagcatccaaccaaaatcccggtgataatagaacgatacaagggtgagaagcagcttcctgttctggataaaacaaagttccttgtacctgaccatgtcaacatgagtgagctcatcaagataattagaaggcgcttacagctcaatgctaatcaggccttcttcctgttggtgaacggacacagcatggtcagcgtctccacaccaatctcagaggtgtatgagagtgagaaagatgaagatggattcctgtacatggtctatgcctcccaggagacgttcgggatgaaattgtcagtgtaaaaccagaaaaaatgcatctcttctagaattgtttaaacccttaccaaggaaaaaaaaggggtgttaccaactgagatcgatcagttcatccaatcacagatcatgaaacagtagtgttcccacctaggagtgttaggaagttgtgtttgtgtttcaagcagaaaaactgagctccaagtgagcacattcagctttggaaactatattatttaatgtaggctagcttgttttcaaattttaaaagtttaaaaataaaatactttgcattctaagttgccaataaaatagaccttcaagttattttaatgctcttttctcactaataggaacttgtaattccagcagtaatttaaaggctttcagagagaccctgagtcttctc

SEQ ID NO: 46120 - DNA, 777 bp, Homo Sapiens
  misc_feature (691)..(697): n is a, c, g, or t
  misc_feature (700)..(701): n is a, c, g, or t
  misc_feature (703)..(705): n is a, c, g, or t
  misc_feature (707)..(717): n is a, c, g, or t
ggggggggaaaggaccttagaactttttaaggtaaaatcaaatatagctacagcataagagaatcgagaaatttgatagaggtaacttgtttaatgtaaatctaatagtacttgtaatttctttctgcttagaatctaaagatgtgtttagaacctcttgtttaaaaataatagactgcttatcataaaatcacatctcacacatttgaggcagtggtcaaacaggtaaagcctatgatgtgtgtcattttaaagtgtcggaatttagcctctgaataccttctccattgggggaaagatattcttggaaccactcatgacatatcttagaaggtcattgacaatgtataaactaattgttggtttgatatttatgtaaatatcagtttaccatgctttaattttgcacattcgtactatagggagcctattggttctctattagtcttgtgggttttctgtttgaaaaggagtcatggcatctgtttacatttaccttatcaaacctagaatgtgtatatttataaatgtatgtcttcattgctaggtactaatttgcagatgtctttacatatttcaatacagaaactataacattcaatagtgtgctgtcaaagtgtgcttagctcacctggatatacctacattgttaaatgtctaaacagtaatccattaaaacttttttgatccnnnnnnnaannannnannnnnnnnnnnccatggtgggccgccttcggccctcgaagaacctttcaaaaccattccttttggggcgcg

SEQ ID NO: 46121 - DNA, 933 bp, Homo Sapiens
  misc_feature (737)..(737): n is a, c, g, or t
ccgatggggaggcagcccccgcagtggacagcccccgcttggacacagtccgagtggaatgggaagggaatggtcaatccctgtcctggttgtccaagtcgggatctcagaggaaattgcagtgattccacggttaggcccccctgggggggctgccttcccctcagcctctccccacaccacccacccagctgctgtcattccgctcactgagctcttcttcattctcaccctgatccctgggggactcaaagccaaaactgcccaaagaggaaagattgaatcctaaaggggatccttgcccccatgggaggccccctactagaaggacgtgaaagcagcttttgggggaaactgaggcagtggggaagacagagcagaatgagccctcaccctggctgggggtccagcacaggctgtatctgcagagggtcccagaggaacgctggagccaagagaagccctgggaaggaggggtggggaacgacatgcatgtgagggatggcacactgatgtgtttatgcacctgtacacaggagcgcatggccatggctttggaaaggagaatggaaaaatagaagaaggtcggccgggcttggtggcttatgcctgtaaccccagcactttgggaggccgaagtgggcggatcacctgaggtcaggagttcgggaccagcctggcaaaaaccccatctctactaagccgaaacccatctctactaaaattaccaaaatttncctgggcatgattgcgcatgcctgtaaatccagctacttttggaggcttgaggggggcagcaattgcttgaacctggggaagggggcaggtttccattgaacccaaaggtccgcaacacctgcctcccaggcctggggcggaaaaaattgaaacacctcctctccaccttgaatgggagccttcaaggggaaaatt

SEQ ID NO: 46122 - DNA, 605 bp, Homo Sapiens
cagaattcatacgagaaggcgacgatgaccggactgtgtgccgggagatccgccacaactccacgggctgcctgcggatgaaggaccagtgtgacaagtgccgggagatcttgtctgtggactgttccaccaacaacccctcccaggctaagctgcggcgggagctcgacgaatccctccaggtcgctgagaggttgaccaggaaatacaacgagctgctaaagtcctaccagtggaagatgctcaacacctcctccttgctggagcagctgaacgagcagtttaactgggtgtcccggctggcaaacctcacgcaaggcgaagaccagtactatctgcgggtcaccacggtggcttcccacacttctgactcggacgttccttccggtgtcactgaggtggtcgtgaagctctttgactctgatcccatcactgtgacggtccctgtagaagtctccaggaagaaccctaaatttatggagaccgtggcggagaaagcgctgcaggaataccgcaaaaagcaccgggaggagtgagatgtggatgttgcttttgcacctacgggggcatctgagtccagctccccccaagatgagctgcagccc

SEQ ID NO: 46123 - DNA, 669 bp, Homo Sapiens
  misc_feature (54)..(54): n is a, c, g, or t
gtcacaagtggctggagacttcctcttgaaaaacatttgccgtcgtttttcccntggcagagcccctttgaccctggctaacaaggacagcctgacttggatcccactatgcaggaaggaaggcgactcttccccgcacctcttgctacgattaggacttgcgacttggtgaaaacaggaatcaaaacttgggcctatttctcctgaggtctgcttgcctagaacaattcgtaacgatgaatcttattaaaaagagaaagtcctccccgactttatctttttccgcccagaatccgataaggaagacttgttctggccccctcagctctctgacctcatctaccagaggagagagtgggatcctctaacactcgagccgtcatcccagcactaggggacagtgaccagtgtggctcccgtggccagaacccttctgaagtttgggttgccctgtggtcttcgccttcaaagcaggccgccacttgaatccttctggaacggacagtgttgctgtaaacgccgcggaatagtatcttctaagtattcgtagcttctttcttgagggatctcgggaacgttccgtgtattaaccactaacgtattccaaagttaacttcgtggtaaagtcgctggggaaaaaaataactgctccagttccacaggtgattg

SEQ ID NO: 46124 - DNA, 842 bp, Homo Sapiens
cgcccggctaattttggtgtttttagtggagacggggtttcactgtgttggccaggatggtctcgatctcctgacctcatgatccgcccaccttggcctcccaaagtgctgggattacaggcatgagccaccgtgcccagccgcgtgtggttttcaattgttaccagcaatcatgacctttcatggactccacagcattagaagaacaacgtttatggccttcaagaactttcagggtgaagctatttctctaggatcagcttttcatgtggcagtagccttgggcctgtcacagccctgtatcttatcttctcaccaaccctggtttagttttcaacagacagaaatttgagccagaagaaatggatgtcactacacagttcacccctgacatctgtgatagtgtatgttatcactgacatgttctcattcaaactatgttataagagcaaggagaaagaagtaagaaaaatttgctatcatgtagaaaattctggggaacctcaaataactcactttatatttagcaggagtttatgcttcagagatcatctgtccctgcaatagacattttatcatggtaagggtgtggtcagcaatagaaaactatgatctcagcagaagtccctctaccaccccatagcttagtaattttcttaccaacagctagctgaggtagtgtgcatcccaagacgctccgccaattggggaaaggtcttttagcttgttttgctggttttctcccttcttcacttacaattctttctttcaaccactggtagcactggggaaaaagcttaacttgcaatgttatgtctggtaacagatctgtgtcaacgaag

SEQ ID NO: 46125 - DNA, 502 bp, Homo Sapiens
ggaggaacaagaggaggaccgctcaggaagtggcagcgaagaagactgagccccgacattccagtctcgaccccgagcccctcgttccagagctgagatggcataggccttagcagtaacgggtagcagcagatgtagtttcagacttggagtaaaactgtataaacaaaagaatcttccatatttatacagcagagaagctgtaggactgtttgtgactggccctgtcctggcatcagtagcatctgtaacagcattaactgtcttaaagagagagagagagaattccgaattggggaacacacgatacctgtttttcttttccgttgctggcagtactgttgcgccgcagtttggagtcactgtagttaagtgtggatgcatgtgcgtcaccgtccactcctcctactgtattttattggacaggtcagactcgccgggggcccggcgagggtatgtcagtgtcactggatgtcaaacagtaataaattaaaccaacaac

SEQ ID NO: 46126 - DNA, 704 bp, Homo Sapiens
gcacgagggttaaaacttcatgaagttctaatgtctgtgttccaaaacacatcacattattaggttgtagggagatatgtaggtgtgctccctggggtggggagttttctagttactagaccatctccatttttagcacttggcagcctcatgatccttttataaatgtgagattaacaggagagcagcaatacgattttgccaatggaataacagatttgccggcattcactgaaagagggcagatattgggtccttgtaacttcaactgactcttccaaattgtatgaatttatcaatgtattacacaaatccagtttcagaatgataaaaaatgttagaccaaataatgcggctaattaacagtcgtatgatttctagcccatgggtttaaaactgtatcttaaagagtcattttaaaataatataaatattaaaaaatgtaactgctatcttaatgttctgaaataaaacattttaaaatataaatcctgtagtttaaaaggaagaaatggtgggaaggaaaagtagagaaagaaatgccaattccaggccaaagcgttatttgccaagttttcttagaatgaattttaccaatgtatgagttcttgttaacagaatgtgtaacggaaatactgaaagacttttgcttaaagtggcattattgactgctgatgtgatgctactggtatgcaataattttt

SEQ ID NO: 46127 - DNA, 658 bp, Homo Sapiens
agaagcacagaactactccctcttcatctccatattttcataatttcttgtgtttcaaatagggaaacatcttcctcaaagtctgcctagtgagatatggcctactggttgcctcatagctttgtacagattatgaggactgaaaataattgggcatttacccatcttggtatctgttgtatcctttatctgtgtgtgctgatttgatcttttttcagtttcacataccttatctaaggtttcccaggatttaaacagaaactacttctatgatttcagctggagtctgaagatacttgtttctgttcaagtcccactttaaattatgtcttaggagactgaaagtggaatcttctgagcattcctaaatatctgcttagaaatatcatgtgataaagagggaccttcttaatacactgatgttcttcactaaatggatggccacaagaaaaataaagtaaatgtcttaaataatttaaccataaattttctgtcatgtgatactggaatatgggatacttttcatgtttatatatatatatatatgtatatatatatacatatatatatatatataaacatgaaatatatatatatggctcctttgtgccccatgtcattttcagattatgggagcatgctgatacagcaccatgaa

SEQ ID NO: 46128 - DNA, 574 bp, Homo Sapiens
gagttttttatgaaagactttcctcctttacaagaaagaaatggggtgctgcctttctgtttagtaaaagcagaatttgcagtggcatctaaagagatcttttttaaataaaaattatgtattgtggcataatcctttttttgagctctacagagaacagtcttttggtaatagtggcaggtatttattccttctgaatatataccccattataggaataactgttacttatttaggattccatcattgaaaattttgacccaaggcacagcagtgaaatttatagttctcaatttagttgtcattattgacaggcattggtattattagtcattgctaagcaactaaaacttcatcagttcaaataagttttaattgtcaaatgaagtataaacacatgaactttctagaaatatttcctcttttggataggtctttaaccagttcatatatatactttgtcaaatatatggatgtgtatgtgtacatttataagaaccagtatggatacatccattcactgtggtacattttaaaataaaatattttagcagtgcaatatggaaaaaaaaaa

SEQ ID NO: 46129 - DNA, 450 bp, Homo Sapiens
ctttacagtggcaaaaataatgacatgtagcaaagattttcaaacaaaatattttttccttttgtaaaatttcttgtgttgtgtgatcttgattgcggctttatcattcctttccagttcataaacaacaggcacccacaaccagaggaatctatagtttaagctccagacatacaaacataaggcacattgtgtctttaatttcaggaatcagaaatcatagggttctgatcacattgcacgcctcccccctcacttgtcctcctgatcctgacacattctgagtaacatcagcaggaatgctctgaccatgaggtgggggttttggggtgggcgttgcctgggttcttgggagagaggggaagagtcgggacttgaaaaccactagggcacatctggatgccttcccccagtatgtccttttctggattaaaatgagtgaaatttgaa

SEQ ID NO: 46130 - DNA, 870 bp, Homo Sapiens
gtgggggcattggtgtcagacgggctggatcggaaggagccccgagccggggaggtgatctgtatagacgactgactggatcccaggcctgcccttcacccaggccccgtccccgaggccgacccccagctcaagcgctggggcctgctgccagccctccaccttccccaccccttgggccatcactgggctaggaacccctttgcccctctctgcagctcctctcttcaagaagggccctttgtctttctccactcccacacacctttcccaccaagccttgaagactgtgctggtgagaagaagtctgggtgggagatggctggcagggtcttccaagtaccttcctcccacactgccaagtatacacaacttcccagtaaatggttgtggggaggaaagaggtggagcctccccagccgtttccctgcagaatcagctctgtctcatgtggaagtggagaatcagccttgcctggcctttaggaacttttgtggggaagagagctttgaagagaggagggggactttagagagggatgaaaatgagccctgggagggaggaagggacgaggaggggtggctgcatgttaccgtcccctacctctccccacgtggagggtggagcagttatgagggaggaagtcaactgctgttcagcctcagaataaaggtgccgttcactggctcagttacctcctgtgtaccggcatcttgtgtagggaatgttcccccctcctagggaccaaggagccaccctacaaaaagagtaatggtgggtgatactccctcaagccaacagaggagctccccaacctgttctagggacccaggtaactaagaaggtgggagagaatacatgggcccgatg

SEQ ID NO: 46131 - DNA, 485 bp, Homo Sapiens
ttttttttttttttttttgaggcagagtctcactctgtcacccaggctggagtgtagtggcgcaacctcagcctctccaagtgctgggattacaggcatgagccaccactcccagccaatagtgaattttctaagagcatgtatccctatcagtaacagggatacatgaagatacttataaaatacagaaaaactgcccagcaaatcagggccctaaacagttggtagattccataaattcaactggctaccatgtatagccctcactgtaaggtaggtggttaggtttctagagagcattagtcttagaattatgaagagccatattaacccaaatgatttctaaatttagatatatattttccctgctacataaaaactctgggtaataactagaaatagacccacaatttagagacaatgtatactagatttatctcctttgtttttagttgaaggcaaaaaaaaaaaaaaaaacctcgtgc

SEQ ID NO: 46132 - DNA, 465 bp, Homo Sapiens
tttcacggtccaggttggatgcaattattttgatccagtctttacttaattttaaaaattacaaaacataaaaacaaacaaaattttccctaagtggttcaatgcagaacacttgggaagttaagcatatatatatatatatatatatatatatatatatatatatatatataatattttacaacgcaattacatattgacaaattcaatgaaaaagtagaccatctaaatattttaagagattaaacttcacattctctgcaactagaaaaacaataagctactgcatatcagtacatgacattcaaatatattttaaaatgtacttccccctcttaaaatggcagtgagtatacattagtgcaaccacaaagcacttgtaaacttttttctgttcaacatcatccatgtccattagaacaaattctgtttggctggctccaaggcctttcttgggcctgagct

SEQ ID NO: 46133 - DNA, 526 bp, Homo Sapiens
gctttttggggcagtgttgacaggagtgaggcattttggaaactccaagggaagcctgtgtttgaggccagagttggtacctgctttaagaaactgttacagggcttgttggtaatgttttgaatctttgtaaaaattgatattctgtataacagagtgcctctctgttacttttggcctatgttgttagaaataagatgctatcttgcatagttagaattaagcgtttgtccatctctagataacattgaaaagtttgagtgttacaggctctaaagtgcaatggagaacaattgcttaggaggaggaaggggaaagtatacttatgttggtgtgtaagcatgcatggaggcctcgaggcaccacaacaaggccaggttcttagcacatcctctgttctctacctgtcatgcttcaagagttccagctggcctgctgtgaagccagtagctattttaaaagtgctggctgcaggattaagccaaccctttacaactggcccagaccgtaatggccatttcttctt

SEQ ID NO: 46134 - DNA, 727 bp, Homo Sapiens
ccgtgaaaatgagggtaagatgatcatgcaggataaactggagaaggagcggaatgatgctaagaacgcagtggaggaatatgtgtatgaaatgagagacaagcttagtggtgaatatgagaagtttgtgagtgaagatgatcgtaacagttttactttgaaactggaagatactgaaaattggttgtatgaggatggagaagaccagccaaagcaagtttatgttgataagttggctgaattaaaaaatctaggtcaacctattaagatacgtttccaggaatctgaagaacgaccaaaattatttgaagaactagggaaacagatccaacagtatatgaaaataatcagctctttcaaaaacaaggaggaccagtatgatcatttggatgctgctgacatgacaaaggtagaaaaaagcacaaatgaagcaatggagtggatgaataacaagctaaatctgcagaacaagcagagtttgaccatggatccagttgtcaagtcaaaagagattgaagctaaaattaaggagctgacaagtacttgtagccctataatttcaaagcccaaacccaaagtggaacctccaaaagaggaacaaaaaaatgcagagcagaatggaccagtggatggacaaggagacaacccaggcccccaggctgctgagcagggtacagacacagctgtgccttcggattcagacaagaagcttcctgaaatggacatt

SEQ ID NO: 46135 - DNA, 382 bp, Homo Sapiens
taaacaaagaagacaggggtcccagggatgtgaagcatcttgcccaggcttctgctgctggtgaccagtgtagccaggactccaacccaggttttcctgtctcagaagactgagctttttcctggatgttattaatagctaattgtgtccaagcaaccaagggccttgagtctgcttggttctgcttatggcctcacatcaagaaatggagctagtccatgtctgtagtcccaatgctttgggaagccatgatgggaaggttgtcggaggccaaaagttcaagaccaggctgtgcaatatcacaagactccatctctacggaaaagtaaaaaattagccagccatggtggtgtacacttatgggcctaagtactcaacgaga

SEQ ID NO: 46136 - DNA, 616 bp, Homo Sapiens
tttttgtttgttagaacacccttcagttgcaatatgctaatcccactttacaaagaatataaaagctatattttgaagacttgagttatttcagaaaaaactacagccctttttgtcttacctgccttttactttcgtgtggatatgtgaagcattgggtcgggaactagctgtagaacacaactaaaaactcatgtcttttttcacagaataatgtgccagttttttgtagcaatgttatttctcttggaagcagaaatgctttgtaccagagcacctccaaactgcattgaggagaagttccagaaccatcccctttttccatttttatataatttataaagaaagattaaagccatgttgactattttacagccactggagttaactaacccttccttgtatctgtcttcccaggagagaatgaagcaaaacaggaatttggttttcttttgatgtccagttacaccatccattctgttaattttgaaaaaatataccctccctttagtttgttgggggatataaattattctcaggaagaatataatgaactgtacagttactttgacctattaaaaaggtgttaccagtaaaaaaaaaaaaaaaaaaaaag

SEQ ID NO: 46137 - DNA, 401 bp, Homo Sapiens
cgaacactgacatttaaaagggtaacagctgggaggcagggaaggggcagccgcacactttcggagtgcctcgcggtcccgtggccggtccgggcctcctggctcacgttccagcttgcggagctttgggacacatctttcctagtcagttgcgctcgttcctatggcaaaagagaacttcagcttcggttttccagctcccaaacagttaagtgacttcctgcaaacgctacagtcccagcaaccagccttccaatcaaaagtaagttggttgatgtcactggcattggctcggccaatcacaagggcgttccgaaagcaagcgctcgacacttgtaaacgcgaagagctgtagtgaaactggacacatctttgtattttgtgttgctggtagtaaattt

SEQ ID NO: 46138 - DNA, 642 bp, Homo Sapiens
cgcgtccgggaacagctacacttcatcttccgtatcttaggaaccccaactgaggagacgtggccaggcatcctgtccaacgaggagttcaagacatacaactaccccaagtaccgagccgaggcccttttgagccacgcaccccgacttgatagcgacggggccgacctcctcaccaagctgttgcagtttgagggtcgaaatcggatctccgcagaggatgccatgaaacatccattcttcctcagtctgggggagcggatccacaaacttcctgacactacttccatatttgcactaaaggagattcagctacaaaaggaggccagccttcggtcttcgtcgatgcctgactcaggcaggccagctttccgcgtggtggacaccgagttctaagccacagaccgaggccccagcaggcagcggctggagggatgccacacccctcacagggcagcccccaactacatcttccctgcttactctctgcctacctgcctgagccatgttcacctgcccacttgtcccctgctgcctgcccaaacaccccaccattggcctgtcaacccacccattggcctgtctgctgggtgctaacaaagctctcatcactccttcacttgggctgtctgtctctgtctt

SEQ ID NO: 46139 - DNA, 727 bp, Homo Sapiens
  misc_feature (633)..(633): n is a, c, g, or t
  misc_feature (643)..(643): n is a, c, g, or t
  misc_feature (666)..(666): n is a, c, g, or t
ggattcatgacgagtgccaaacttgattttctctaggcacagctttctccctctgtgcctcctgcttcctttctctctcctgcctctcctctgctccccatcccactttctcatctgcctccttttctcacttctgtcagtctgtaagctttgataacctgcttaatactccaaagtgtgagttcctctgatctcttgattccttagttctaatctcacgttttgtttttaagagatggagtctctcactctgtggcccaggctggagtgcagtggcatgatcatagctcattgcatccttgaaatcctgggctcaggtgatcctcccgcctgagcctcctgagtatctgggactacagatgcgtgccaccaagcctggctaattttgtctcatgtcttctaaaaattattttgtgaagccccttcacaaaaaaccttaagggaaatctgatggtgctcaggaatctaactctccctaaaccatcctctttaactgcttctaaaatatctctgttggcctttcttagcctttttctgtttccattcagtgctccaagcgctttttgtttctaagttgagtgcttggggtttgacaggtagtgacgtgtagtttgacactgttaactttgtaantacagtgaanagtttgtgagtgaagatgctggnaagatgtatgcttgtacaataaagtcttgtaaaaaaaaaaaaaaaaaaaactgtcgcgctc

SEQ ID NO: 46140 - DNA, 578 bp, Homo Sapiens
  misc_feature (577)..(577): n is a, c, g, or t
acatagcctcagagatctgtagggccgaggttacatttggagaacccgtactctagggccaaatccattcttcttgccctggctcacttgtcccccccaccgccccgcgctggagccactgcctagttcttcagccctagatggtgctcgccagacctcctctcaatgctcatcacacacagggctattcctttcctccaatgaaccaaacgcctcccgcccacctccaggtcccagtcctctgttccctttgcctggtccacccttgccctccctgggtcgcagacgaggtcggcctcgtcattccccgcagaccgccgcgcgtccctcttgtgcggttcaccacagttgtatttaagtgatcgtgtgagtcgtcgttaaatgcctgtctccccgcggatcatgggctcctcgaggacagggactggcctgtctgtccactgctgtaaccccgcgccggcatagggacctaaggcccactggagggcgctcatcaagtagctgctggatgttgacgaaggaagcggcggcgcagctcagggatctccgagtcaggacggtcggccagacccacggng

SEQ ID NO: 46141 - DNA, 822 bp, Homo Sapiens
cggacacctgcctctatcaatgctaccccagccaacatcaaccttgcagatctgacacgggctgtgaatgccctgcctcagaacatgacttcacagatgttcagtgccattgctgcggtgacaggccaaggacagaaccctaatgccaccccagcccagtgggcctccagccagtacggctatggcggcagtggaggcggcagcagtgcttaccacgtattcccaacgccagcccagcagccagtggccacaccactaatgacccctagctactcctacacgaccccaagccagcccatcaccacccctcagtaccaccagctccaggccagcaccaccccacagtcggcccaggcccagccccagccctcttccagctcccggcaacggcagcagcagccaaagtccaacagccatgcagccatcgactggggaaaaatggcggagcagtggctgcaggaaaaggaggcagaacggcggaaacagaagcagcggctgacacctcggccctcccccagccccatgatcgaaagcacccccatgtccattgctggcgatgccaccccactcctggacgagatggatcggtagggggcctgctcctcggactctggttacctctgaggctgggaaaggcctggctgcccactgcctccctccctgcccctccttttatgtccataaagtggcgtgaagtgagacgttctctttggtggtcaacccggatgggtgacaggctggatggccttgtgaacttgagctcagtgtatgctaggcaacaattctcccgctccagaccctcaccgaccacctgtcctggga

SEQ ID NO: 46142 - DNA, 521 bp, Homo Sapiens
ggggcctgctcctcggactctggttacctctgaggctgggaaaggcctggctgcccactgcctccctccctgcccctccttttatgtccataaagtggcgtgaagtgagacgttctctttggtggtcaacccggatgggtgacaggctggatggccttgtgaacttgagctcagtgtatgctaggcaacaattctcccgctccagaccctcaccgaccacctgtcctgggaccaggctgggaggggagtgtggcagggaggaggaagaggaaggtgagaatgagtagaacagttttgtattctactccctacaagccattttgaacttctgccctcaccggactctgggctgtgactggggcaccaaactcagcacatgagtctcccctagctctcgtggggagagggatgctatttattcagtttggggcaggagggagaggagggaaagtatttctgaccctgatgccaacagccgggtggctgtccaagcaggattgcaggggacacagggaagcact

SEQ ID NO: 46143 - DNA, 776 bp, Homo Sapiens
tgacaagactcatttccagttaattaattcgagaaccctccctcttcattttgggtactgggctgtcttgtcactgagccctatccctttggaatgtggcaggagtgaggttggtgagagaacatgtgggcacttaactcttcatgttccagttcatcccagaagtagacatcccaggacccattctgtgtcaaggtgaatgcctgtgtcctccccagcttcatgcctctgtcatgggggaaggaatagcttatgttctgctctggtgcagtgccgtagattaaaggtacatttctatcttctttgatttaaaaagcaccagtctcataaaggtgccactcagttttagccatgtcttcactgaaattgcaaaagtacttttagggagcaggagtttatttgacatctagttatctgtctgtctgttcatctatctatctgtctgctgtatgagaggtaggactggattaaatgaccactgaactcactgaatccagatcattcatatcatcaacaaaagctctagggggaggtcacgttgtgaatgcttaaaacatattattttcttcaacaaccatatcgctaaactaatatatccagagattttgcacaattcgtgttgaaccttccaaaacaaaaataaagacctgtccaaaagttttgacaaaaatactgattgctcccaaataaagtgcttctaagctttgtgtagacatagtttaactgatttgtacaacatagcttaagcatgttgagaatgaagtaaaagttttcca

SEQ ID NO: 46144 - DNA, 522 bp, Homo Sapiens
cgaaagcgaagaaggaagctcctgcccctcctaaagctgaagccaaagcgaaggctttaaaggccaagaaggcagtgttgaaaggtgtccacagccacaaaaagaagaagatccgcacgtcacccaccttccggcggccgaagacactgcgactccggagacagcccaaatatcctcggaagagcgctcccaggagaaacaagcttgaccactatgctatcatcaagtttccgctgaccactgagtctgccatgaagaagatagaagacaacaacacacttgtgttcattgtggatgttaaagccaacaagcaccagattaaacaggctgtgaagaagctgtatgacattgatgtggccaaggtcaacaccctgattcggcctgatggagagaagaaggcatatgttcgactggctcctgattacgatgctttggatgttgccaacaaaattgggatcatctaaactgagtccagctgcctaattctgaatatatatatatatatatcttttcaccataaaa

SEQ ID NO: 46145 - DNA, 741 bp, Homo Sapiens
  misc_feature (566)..(566): n is a, c, g, or t
aaatattatctctgtggtttttgtcctgcggaattgttcacaaatacacgttctgatcttggtccgtgtgaaaaaattcatgatgaaaatctacgaaaacagtatgagaagagctctcgtttcatgaaagttggctatgagagagattttttgcgatacttacagagcttacttgcagaagtagaacgtaggatcagacgaggccatgctcgtttggcattatctcaaaaccagcagtcttctggggccgctggcccaacaggcaaaaatgaagaaaaaattcaggttctaacagacaaaattgatgtacttctgcaacagattgaagaattagggtctgaaggaaaagtagaagaagcccaggggatgatgaaattagttgagcaattaaaagaagagagagaactgctaaggtccacaacgtcgacaattgaaagctttgctgcacaagaaaaacaaatggaagtttgtgaagtatgtggagcctttttaatagtaggagatgcccagtcccgggtagatgaccatttgatgggaaaacaacacatgggctatgccaaaattanagctactgtagaagaattaaaagaaaagttaaggaaaagaaccgaagaacctgatcgtgatgagcgtctaaaaaggagaagctagaaagagaagaaagagaaaagaacgggagagagaaagggaagaaagagaaaggaaaagacgaagggaagagggaaagaaaaaaaaaaaaag

SEQ ID NO: 46146 - DNA, 608 bp, Homo Sapiens
ggagagaaagaaaggagaatttttgagacttgggttttcttaatgccagtgtgaatttgcagatgttttcagaaaatcaagtcacagtaacaatttgccacttttttctattataaatcttcttacttaaattttgaatatttagtttttctcagttacccatttgtgtgtgtgtgattccacttagaaattcttaaaaccagatttttctttcattccgtttggatgtctacattccttatcaaaggatataaatactgtgtatgcttttgaattttatttttaggaaaattctgaagccagctatcacaggtttgttagctaataatagtattttcttttagttgagttaggtttttccccatctcctgtagagcgaatttacatattgtattgggtaagtgttcactacttttcctgattaagggatctgtgctggggaacaaagcttttgcagtaccttatattgtagttaaaattttatttaacatatccttcagtgagctcatttcacactgtagcctcttccttaaaatttgtggtgctcctgtaacagtaagaactaattctgaaataaaagacatctcctaaaaaaaaaaaaaaagggc

SEQ ID NO: 46147 - DNA, 677 bp, Homo Sapiens
  misc_feature (2)..(2): n is a, c, g, or t
tntaaaactaacagctagaaatatttcttcttccaattattaaaaataagctgtttctgagtcggtgctgactacatttactgattgaagcagccaactccaaatataccatcttttagtattgacacttaarataaaacttctccccagaaaaagagttctataaatgatggctgtagaaataggcactgtccaggcagttgttttgtggaagtagtgttgttattttctggtgttttccaagtcatctcagatggtgcgtgaaaatgagatgccaaagaaggcttaararagataccctgcaccagcttcagaatgtaagcaaatctttcattccagcgcttaaragttttgagaaagctaatctaaagttaaatgtttactagcatctctccgattatattttagaaactactgcacaaaaataaaacaaatttcttattttctctggggttgaaaagtgcacataaratggaaaatgctttttataccactatttccagcagggattttattttcatttgtcatttgccagcctggggtatgttgggagaaggaacaattgatttttgaaaaggtgcatttgtgtgaaaccaaaaattgtgttcaacaaatactactactaacccatatgtggatatatgtgttttatacatgagtaaaarrraaaaaaaaaa

SEQ ID NO: 46148 - DNA, 640 bp, Homo Sapiens
gagaaaattactttggagttttgaagcctttattaatactacttttaaagaagcagttgttttattgtcaatgttttttttcccccaagcatattttcttgtatttctgtttccatatatatatatatatatataatttccaattcaggatattgccctgccatccatgaaaactgttctggcaccaaaagtaatgacaaatgttaagtgtaataatagaaaagtagagcaaagagccattcagcttcagtctttacataccatgaataaaacattaaaacatcatatggagaagtttacatggtgattgttcacctgcagtactgtggagttttaacattttgtcctcttttcagtgaaacagagtaaaaatattcatctaccattactgttatttgctgattttgttttattttttgatggtaatattctatccttatgacactattgcaaccaaattggctttaccatcttggctttagtaggtatagaagacaatggattaccatctttattgctgtaatgtgttaagcattatatgctagtagaatctagtttaattgtttcaggtggaaagtattctttgagtttccatattgaatgtgtttggactaaacaaacaataaactactgatgtctg

SEQ ID NO: 46149 - DNA, 512 bp, Homo Sapiens
  misc_feature (15)..(15): n is a, c, g, or t
gctattatcctaagncaacctaatgcaagaacagaaaactacatactgcatgttcccattggaaagtggcagctacacattgaattcacatgaaccagaggcactggagatcactagacaggtgagacaggaggggcacctgggctgaaaaaccacctgttgggtaccatgcttactgtttgagtgatgaggtcattgggacagcaagcctcagccttccaaaatctacccatgtaacaaacctgtatgtgtaccctttaatctataataaaggttaaaattaaagattcgtaagtaaaataaaatgacatagagccctccaaaaaatggggttaactgagtggaacgagagaactttgcactatgaacgctaacccagatcaaaaactaaactctagtcatttaaaataatcgtaagttgtatatgatgataattgtataaaagttatacgtgaaagtgccaaaccctaaaattaaacactgtataatgaaattataaaaaaaaaaaaaaa

SEQ ID NO: 46150 - DNA, 762 bp, Homo Sapiens
attaaaaatagatatataagaaaaaaattctttcacttgatgtttgttagaccagaaagtgtgtgtgttctgtagctcagttcccagacagctttttaggtagtggaggaggtggcttcatgtggcacttgggcatttatattccacttgggagggtcaggctgtggccttctggagcaggtggcttgttaaggaacgctagcagggcatggcacgtgagctccggaatagatgtcttcatcacttcttccactgtgtgttgacactgttttccttacctatttcctcagatccccagctttctcctctgctatgcattttcttcacagtgcagcttgcagtccgttgctgaaaatgattataagccctgcataatgttaagctttattgtgattacgtgtatgtttcttctttcttttaagcagacccatacctttccagggtcaaagtacagaatagaatacattgatacaaagtacagaaaaatactttgatttttatccatttcttttactctgtgtaaagacttgagaagtctaattcacaggcaaaccaatacagaattgactgcagttgaacagactagaagtatttgtgggaggagtgacatgaagcatgagttatctgattttttttgtagctgctatatattttaagccttcatttgcaattcatgtaacagttgtgtcataaattacacaataaagcagtcctgttcaaatttttttttaacgtggcttgtagaatttttaaaaaagtgat

SEQ ID NO: 46151 - DNA, 839 bp, Homo Sapiens
ctcttctgcatgttctggaaagaacagaccagtggtatggagtataagaaaactgatgcacctcaaccggatgtgaaggaagaggaagaagagaaggaagaggaaaaggacaagggagatgaggaggaggaaggagaagagaaacttgaagagaaacagaaaagtgatgctgaagaagatggtggcactgtcagtcaagaggaggaagacagaaaacctaaagcagaggaggatgaaattttgaacagatcaccaagaaacagaaagccacgaagagagtgaaacaatcttaagagcttgatctgtgatttcttctccctcctcccctgcaagagtggtcctaggagaggacctggcacaccttaggttgacattcagaaaacttcaagacatcaccatcagcaggctccagttgaacactagtctgtgtaactttaaacatctagcagtaaatacttgcagttgtgatataaaggaccctgtttctgtagaaaagaaaacatttaacataatggttgtgaaatgtaacatgaagcaaactaacttttttttttttaacatctttgtttttaaaatagaatgatagaactttgccagtctttaagatcttggcttaatttaatgtattaatctgtttgtgcaaacataataccaccatttaaaaatgttagggagatgagttgcagtttttataatagattttttttaaagtttggtattgtaaaacattcacacctctgtccctcaaaattgataattacgtttaaagtgcagtcatttgtggttagaatcttgttttgtttgcttccattattgagttcctcctaaggaaattgagg

SEQ ID NO: 46152 - DNA, 574 bp, Homo Sapiens
tgcagcggctccagagatactctctaagtggtggaggaacttcatcccactgaaattcctttggcatttggggttttgtttttccttttttccttcttcatcctcctccttttttaaaagtcaacgagagccttcgctgactccaccgaagaggtgcgccactgggagccaccccagcgccaggcgcccgtccagggacacacacagtcttcactgtgctgcagccagatgaagtctctcagatgggtggggagggtcagctccttccagcgatcattttattttattttattacttttgtttttaattttaaccatagtgcacatattccaggaaagtgtctttaaaaacaaaaacaaaccctgaaatgtatatttgggattatgataaggcaactaaagacatgaaacctcaggtatcctgctttaagttgataactccctctgggagctggagaatcgctctggtggatgggtgtacagatttgtatataatgtcatttttacggaaaccctttcggcgtgcataaggaatcactgtgtacaaactggccaagtgcttctgtagataacgt

SEQ ID NO: 46153 - DNA, 622 bp, Homo Sapiens
tagtttattaaatgccatgcacacatgctatgtttttagatgtgcatgtaaatcaagaattagctgaggaatatctttttattagtagtagtagtaactcatttttagattcaagtaaagtttgttttccaggtgagatgacatttttaagaaattgaatttaagtatgtgcttttatatccggaccaggtttctcaaggaagcagaatacaagggaatgaaaggggaagggagggtagtgcccaagagaaacctcggctcctaagtgctcccctgccaggtttcccccgtgcctgcccactggcaccatcctggcagctccagcccacaccccctcctggaccctgggctgcctctcgctgaatagctgcagggggcctgctatgtgacaggtatggaatgaggtaatccttttccacctctaatttctgaagggtgtgtctgtccagtttttacttgttcattgaatttaaagccttaggaaccaacagctacagtgcaagctgtaattattgatgtctgtttcatattcatctgtaagttctggcatttgatcaagaagtcaatatatcacttcatcttcaggctgaatgtgtctcagctataaaggttttattgtttg

SEQ ID NO: 46154 - DNA, 661 bp, Homo Sapiens
ctgctttaagttgataactccctctgggagctggagaatcgctctggtggatgggtgtacagatttgtatataatgtcatttttacggaaaccctttcggcgtgcataaggaatcactgtgtacaaactggccaagtgcttctgtagataacgtcagtggagtaaatattcgacaggccataacttgagtctattgccttgcctttattacatgtacattttgaattctgtgaccagtgatttgggttttattttgtatttgcagggtttgtcattaataattaatgcccctctcttacagaacactcctatttgtacctcaacaaatgcaaattttccccgtttgccctacgccccttttggtacacctagaggttgatttcctttttcatcgatggtactatttcttagtgttttaaattggaacatatcttgcctcatgaagctttaaattataattttcagtttctccccatgaagcgctctcgtctgacatttgtttggaatcgtgccactgctggtctgcgccagatgtaccgtcctttccaatacgattttctgttgcaccttgtagtggattctgcatatcatctttcccacctaaaaatgtctgaatgcttacacaaataaattttataacacgcttaaaaaaaaaaaaaaa

SEQ ID NO: 46155 - DNA, 478 bp, Homo Sapiens
agctggatgaacctcatgaaaaatataggaagaaaagatccagtagtgcaaaatatgggagcaaggaaaatccaattgttgggaaagcatcttagagtttaacagattggttcagaagaactggaaaatattatttttcttggagcttttcaattcatcatatattttgttcatggtatttaagaatgagcatccgcttcaatgtcatctgcctccacattgtatttaatatttaataattgaaattaattgtttgggaatcctggtattgatgtattactagagaatttaaagcccaagattcccttcatacctgtgtgaccaaatccatgtttctgcaacttctttttaatcgaaagaatcttcctagaaaagctttgtaacaaagggagaactcctccgtagcaagaaaccatctcttcttgtaacactctgttctgtggacttgttttcactaccatcagtgcctgctctatac

SEQ ID NO: 46156 - DNA, 415 bp, Homo Sapiens
tgacaatggcaccttagtaattaaagaagcaacagcttatgacagaggaaactatatctgtaaggctcaaaatagtgttggtcatacactgattactgttccagtaatgattgtagcctaccctccccgaattacaaatcgtccacccaggagtattgtcaccaggacaggggcagcctttcagctccactgtgtgtccttgggagttcccaagccagaaatcacgtgggagatgcctgaccactcccttctctcaacggcaagtaaagagaggacacatggaagtgagcagcttcacttacaaggtaccctagtcattcagaatccccaaacctccgattctgggatatacaaatgcacagcaaagaacccacttggtagtgattatgcagcaacgtatattcaagtaatctga

SEQ ID NO: 46157 - DNA, 528 bp, Homo Sapiens
ggcacaaaaatttgaagacctcacaagaaggatcatctgatgatgctgaaagaaaacaagagagagagactttctcttcagcagaaggcacagttgataaagacacgaccatcatggaattatgagatcgacttcctaagaagcagcaagcaagtgcttccactgatggtgtcgataagctttctgggaaagagcagagttttacttctttggaagttagaaaagttgctgaaactaaagaaaagagcaagcatctcaaaaccaaaacatgtaaaaaagtacaggatggcttatctgatattgcagagaaattcctaaagaaagaccagagcgatgaaacttctgaagatgataaaaagcagagcaaaaagggaactgaagaaaaaaagaaaccttcagactttaagaaaaaagtaattaaaatggaacaacagtatgaatcttcatctgatggcactgaaaagttacctgagcgagaagaaatttgtcattttcctaagggcataaaacaaattaagaatggaacaa

SEQ ID NO: 46158 - DNA, 585 bp, Homo Sapiens
gcaatattcttaaatactactgctctaaaagttggagaagtcttgcagttatcttagcattgtataaacagccttaagtatagcctaagaagagaattcctttttcttctttagtccttctgccattttttattttcagttatatgtgctgaaataattactggtaaaatttcagggttgtggattatcttccacacatgaattttctctctcctggcacgaatataaagcacatctcttaactgcatggtgccagtgctaatgcttcatcctgttgctggcagtgggatgtggacttagaaaatcaagttctagcattttagtaggttaacactgaagttgtggttgttaggttcacaccctgttttataaacaacatcaaaatggcagaaccattgctgactttaggttcacatgaggaatgtacttttaacaattcccagtactatcagtattgtgaaataattcctctgaaagataagaatcactggcttctatgcgcttcttttctctcatcatcatgttcttttaccccagtttccttacatttttttaaattgtttcagagtttgttttttttttagt

SEQ ID NO: 46159 - DNA, 632 bp, Homo Sapiens
  misc_feature (566)..(566): n is a, c, g, or t
  misc_feature (616)..(616): n is a, c, g, or t
gatgaaactataacttaaagaataatacttagaagggttaattggaaatcagagtttgaaataaaacttggaccactttgtatacactcttctcacttgacattttagctatataatatgtactttgagtataacatcaagctttaacaaatatttaaagacaaaaaaatcacgtcagtaaaatactaaaaggctcatttttatatttgttttagatgttttaaatagttgcaatggattaaaaatgatgatttaaaatgttgcttgtaatacagttttgcctgctaaattctccacattttgtaacctgttttatttctttgggtgtaaagcgtttttgcttagtattgtgatattgtatatgttttgtcccagttgtatagtaatgtttcagtccatcatccagctttggctgctgaaatcatacagctgtgaagacttgcctttgtttctgttagactgcttttcagttctgtattgagtatcttaagtactgtagaaaagatgtcacttcttcctttaaggctgttttgtaatatatataaggactggaattgtgtttttanagaaaagcattcaagtatgacaatatactatctgtgttttcaccattcanagtgctgtttagtagt

SEQ ID NO: 46160 - DNA, 606 bp, Homo Sapiens
ccagtaaacttaaattacgtaacttcttgcaaccacgaaacctgtaatacgctgtacagtaacaagtgttggcattatcagttgaactgtaaatacaaaatgcttcttccaattagtctctatgatgattaagtttctaaaatttatctgaacaccattcagaaacttgttttggggaatttgatagttattgatgtgcatctgttaaactgatgacagacataactcatcattccccagaaaccttttttgattacagtatctaacattttgcctcctcttttttggttttgctggttataaaggtttggattggagagggctcactggatcccaatccttggagctggatcattggattcaaatcataatgtggataggatagggaggatgaattaccaggattcatggagcgggatcagattaccaggaacataggagtggattcctgccccaaccaaaccgcattcgtgtggatttttttattcaacttaattggctattccaaagattttttttttcctatttttgacgattggagcccttaagatgcacgatggaattgtgttttgcgttttttggtaaaaggagcaaaagcgaggacct

SEQ ID NO: 46161 - DNA, 795 bp, Homo Sapiens
cggggaaatcccagtcgatttttccaagcagtactccgcttcctggatgtgtttgtctctcttggctgcactggcctgctctgctggagacacatgggcttcagaagttggcccagttctgagtaaaagttctccaagactgataacaacctgggagaaagttccagttggtaccaatggaggagttacagtggtgggccttgtctccagtctccttggtggtacctttgtgggcattgcatacttcctcacacagctgatttttgtgaatgatttagacatttctgccccgcagtggccaattattgcatttggtggtttagctggattactaggatcaattgtggactcatacttaggggctacaatgcagtatactgggttggatgaaagcactggcatggtggtcaacagcccaacaaataaggcaaggcacatagcagggaaacccattcttgataacaacgcagtgaatctgttttcttctgttcttattgccctcttgctcccaactgctgcttggggtttttggcccagggggtgaactttatttcatttccacaggttgaaactggtgagtccagctaaatttgcaattccaactttcatcctaagaataataactgtaatggcaaagcggaaatgccagttcctcctgtattccattgagatgggatttcacattttcctctcatcaactcccctgtaatagctagcgtctttctagcgaaagagaagaattcctagaacttatgcatttttttcctgctgaatggaagtcttgagcaatgaagc

SEQ ID NO: 46162 - DNA, 956 bp, Homo Sapiens
  misc_feature (561)..(561): n is a, c, g, or t
  misc_feature (621)..(621): n is a, c, g, or t
  misc_feature (788)..(788): n is a, c, g, or t
tttactatgcacttagactatgcactttttctgaaatatttttgtaacacttttttgtatttttgccatttgaaaaggttgtggtgtagttggtctgtaattaagttgcagatttaaaactgctgttagctttgtaaatcaaaatataggtgttttttgtcctggtatatcgtcattccatctgcagctggagctggaatcccattgatcttctagctaccattcattttcttcactgttcacaaaagaagagtgtgaaattcagtgaatgctgttactaatcctgttacgagatgaatctcatttcaccaaaattaaattatgtttttccgctaaaatgatgatacaagttgaagacacatcactctgaaattggaagacctcaccacttaaggctccacagtggcttactcagctgaactctaggttactactctttactttgttcacccattggggggtgcagtttttttaaaatgttgggagatggccattctaactactgttgaatgtctctgttttgggaaggtataacaagaaataaaaaagaatatatatganacacaaaaaccactaaaaaaaaaacttgaccaaatcgaaactccccgaaatgccccccgnctccgctgtaaaacaaggacccaattcctcaacatttcctccttaccctggaatcttctcctccgaccccccccccttgaggaagctgaaccccccaagcttagctgcccaaatgggttccctttccctacccatgcgcgccgggccctagaaacctcgccgagatncgccggcgccccccgcccccggagtaattcccctccctggggtgggggccaaccaatttaccttcctccagcctccactctgtttgtgtttgagagtttaaaagggggtccgtctcccccgctagagggggccccttccatttttgatatatgcgcgcgggccccgtc

SEQ ID NO: 46163 - DNA, 653 bp, Homo Sapiens
taagaagggatggcctagacatttttagctcagttaaattcagcatttaatgcaggtgagttcctgggtcgttttccaactagtctggaacagtctggttctgactcaaactggtataaagcattattttaggttttctctttgccagtttttaagcagttataaccatgtaaatcaagatgtgaggacatctatatgaagtatagtaaagaagtggtgtcagcagatcaatatgtgtgtcctgggtgtgctgctctcttaagtgagactttgtgagactatactttaaatgcattattaccattgcttacattttgggggattttcttcctcctcaaaacttccatttctattgtaatattcttaatgacaatctttttttttttttagcagtgtttgtttgaaacagccaaagatggcgatgaaccaagtgtaaatggatctaagcagcccatgcagttggtgttgaatcaacaaacagtgtattgttgaagtgaaattattttctgaaatgacttgttagaccagtttggaggacatactcaaaagtagagtaataattggctccttgggatggagaaatatgagatgaacctggaacattctattatggtgccacaaaggaaatctaaacacaacattcacaacaaggg

SEQ ID NO: 46164 - DNA, 682 bp, Homo Sapiens
ctgggtggcgtgatgctggaaagcagcagtggctgcatgcccatcacccgctgcacagtgtgccgctgcctgcccaggaggactactacagtcacctgaagaaggaaagcgacaagccactgtagaacctgcgatcaagagagcaccatggctcctacattggaccttggagcacccccaccctccccccaccgtgcccttggcctgccacccagagccaagagggtgctgctcagttgcagggcctccgcagctggacagagagtgggggagggagggacagacagaaggccaaggcccgatgtggtgtgcagaggtggggaggtggcgaggatggggacagaaagcgcacagaatcttggaccaggtctctcttccttgtcccccctgcttttctcctcccccatgcccaacccctgtggccgccgcccctcccctgccccgttggtgtgattatttcatctgttagatgtggctgttttgcgtagcatcgtgtgccacccctgcccctccccgatccctgtgtgcgcgccccctctgcaatgtatgccccttgccccttccccacactaataatttatatatataaatatctatatgacgctcttaaaaaaacatcccaaccaaaaccaaccaaacaaaaacatcctcacaactccccaggaaaaaaaaaaaaaaaaaa

SEQ ID NO: 46165 - DNA, 621 bp, Homo Sapiens
ggcacgaggtagattatagctaaaatccagattaatactcatttggggttttttatagtggaacttcatagtaatacaaaaagcagattgtcttcctgtctccgctgctcccacagtaggtattgaaactggtaaaatcagttttttgatagtgtgtgtatataagaaaaaatagatacacacattcttttttctcagtcaacacattgattgaacactctggcaaagatgctgtggtggatgaggttggagttcgaaagaagaagcaagcgctggcctggccttgaaagaaccgaagtctttcccattcacttctctagaaagctgccaagacagaggcagaaagaaatggatgatagttctgtcaagcacacttctgttctcttagaacttagaagtgtttctaagagaacagaagtaataagagaaacagttacgtgtggaattcaacatctttggttggaacgcattggcttttttttcttgttttgatagaaatggaattaagcaaaagtagtttttgtcttttctgttgtcttcaaattttatgccttttatttttaatttaatcccgttcaattatttaattgttatacattgacattaactgctgtattttga

SEQ ID NO: 46166 - DNA, 583 bp, Homo Sapiens
gacgcgacgacggcgacactttgctacggagtgcatcggacgtcgaagcctagagtctctgcgtctttccctcttccgctgcctcattcctttccttcctagccttggtcgtcgccgccaccatgaacaagaagaagaaaccgttcctagggatgcccgcgcccctcggctacgtgccggggctgggccggggcgccactggcttcaccacgcggtcagacattgggcccgcccgtgatgcaaatgaccctgtggatgatcgccatgcacccccaggcaagagaaccgttggggaccagatgaagaaaaatcaggctgctgacgatgacgacgaggatctaaatgacaccaattacgatgagtttaatggctatgctgggagcctcttctcaagtggaccctacgagaaagatgatgaggaagcagatgctatctatgcagccctggataaaaggatggatgaaagaagaaaagaaagacgggagcaaagggagaaagaagaaatagagaaatatcgtatggaacgccccaaaatccaacagcagttctcagacctcaagaggaagttggcagaagtcacaga

SEQ ID NO: 46167 - DNA, 701 bp, Homo Sapiens
  misc_feature (668)..(668): n is a, c, g, or t
ggagtcccctgttgtcaactatctgcatgacattctgattgtgcaaaaatgccattcctgtgcttccccctccattacagaataaggtccgagagaccccacgagtgtgcgtagggaacggtgtagacatttcccccagtatgagcacagtgcctggacctgaatgatcatcttggcagttcttgtgcttttactttgtaaacattgtacaaatgtatttggaattttatttgaaatggagacttaaactagttattaaatttgtttccttcctgtaaatatatatattcaaattccatgtatccaaacatccctttagcgttcagattgtaagtgtgtctttattcgcgggaggccactgtcagcaggcagtgacccccagtgccctagtttgaagcacagtgtgtggagtatttgatgtactacagtaccatagttattttggtctgttaagtaagttgcaatttgtgatgaaatgaagtggaaagtagtacttcataatgaacaaatttccttggttacatggtttttcttgtaaaacttaaagaaaaaaaaagaaaacttgaaattttatatatttggatttttgtagtttttttttttatttaatgcaacacaaggtaccaaaacattaaataaagtaccctgtggtctttttctccgaaaantaaaacagagacacacaaaatagacaacaagct

SEQ ID NO: 46168 - DNA, 968 bp, Homo Sapiens
  misc_feature (798)..(799): n is a, c, g, or t
  misc_feature (801)..(801): n is a, c, g, or t
  misc_feature (803)..(803): n is a, c, g, or t
  misc_feature (806)..(806): n is a, c, g, or t
  misc_feature (811)..(811): n is a, c, g, or t
  misc_feature (813)..(813): n is a, c, g, or t
  misc_feature (835)..(836): n is a, c, g, or t
  misc_feature (840)..(840): n is a, c, g, or t
ctgggtggcgattcggacgagggagagatgatggagaaggcgcgggaagcctataaccaggggttgaagaagtgtccccactccacacccctgtggcttttgctctctcggctggaggagaagattgggcagcttactcgagcacgggccattttggaaaagtctcgtctgaagaacccaaagaaccctgggctgtggttggagtccgtgcggctggagtaccgtgcggggctgaagaacatcgcaaatacactcatggccaaggcgctgcaggagtgccccaactccggtatcctgtggtctgaggccatcttcctcgaggcaaggccccagaggaggaccaagagcgtggatgccctgaagaagtgtgagcatgacccccatgtgctcctggccgtggccaagctgttttggagtcagcggaagatcaccaaggccagggagtggttccaccgcactgtgaagattgactcggacctgggggatgcctgggccttcttctacaagtttgagctgcagcatggcactgaggagcagcaggaggaggtgaggaagcgctgtgagagtgcagagcctcggcatggggagctgtggtgcgccgtgtccaaggacatcgccaactggcagaagaagatcggggacatccttaggctggtggccggccgcatcaagaacaccttctgattgagcggttgccatggccggtctcccgtggggcagggttggggccgcatgtgggaagggctctggagctgtgtcctccttcattaaaagtttttatgtcctcgtggtcagaannananaancccantncccgctctccccctatacgccnnaaancctcccaggcatcttatgtcgggttgggcggaaaaggaagttaatggaattggcccccgggcccatagtctggttccctggacccaacgttttcctgtgaaaaaaagcgggtaaaatccgcccggccc

SEQ ID NO: 46169 - DNA, 594 bp, Homo Sapiens
cacgaggcgcatatgacttttttttttttttttttttttggttggctgcaactgtgtatcatgtatatggaacttgtaaaaaagttctcgacattcagatcttaagagatgaaatcacttttacctataaaaaccacttttattgcggtttgactgcattgagctctaggatattaaatgatatcactaatattttgcatgtaatttgctcatttgagtgagggcactttttttgtacatatgatggggccaatgcacaatacttttatcacaatcaactttttctttgtatccctatttcaatgagcagtcagtctcaagaggttactgcacttcagttctaactagacatttgtactaaggtatttcagttatgtaaactcagcctgggcactttctgataactgtaaaatgttttataagatcatgattattgaagatacattttggaaaattttaaatgttcgtgagcagcttaactacttttgtatctagcctttttttaagtatcttgttacatttacttttttaaataaagaaattacagaagaaatgtcaagtaaaaaaaaaaaaaaaaaaaaaagtcatatgcgg

SEQ ID NO: 46170 - DNA, 544 bp, Homo Sapiens
tggccccccgcgccgcagccggcatcgcggcgggacccggagcccggagttcgggtgggtaacccgagctctccaagctcttgaagccgcgagggtggcttagcttcggtgttttggctgagaacacccttaaagcttaaaataaaacctgcctctggggtgcaggggaggagagaggaggacgcgaatcacacccgctgctgcgcgccagcccgccccgtctgtacaatgggatgctcgggactcggacgggaggatccagtgactgcgagccccgcattcgcccgatcccagcctcacacccccagccagcccccagagaccctcccacacttacgaaggaaatgcatgcggccaggaggagaatccgcaccaggagcagggagctctacccaggaaaaagaagaaaaggacagattcatttggggttcagcctcatgccccccacacccaagactttgtggctaagagaatcaggccaccttgaggttcatcaagttcatcccattaaaacctcccaaaactctggaaaaaaaaaaaaaaa

SEQ ID NO: 46171 - DNA, 718 bp, Homo Sapiens
tttttttttttttttttgatcctgtaatgtatgagagtttgcggcaactaatcctcgcgtctcagagttcagatgctgatgctgttttctcagcaatggatttggcatttgcaattgacctgtgtaaagaagaaggtggaggacaggttgaactcattcctaatggtgtaaatataccagtcactccacagaatgtatatgagtatgtgcggaaatacgcagaacacagaatgttggtagttgcagaacagcccttacatgcaatgaggaaaggtctactagatgtgcttccaaaaaattcattagaagatttaacggcagaagattttaggcttttggtaaatggctgcggtgaagtcaatgtgcaaatgctgatcagttttacctctttcaatgatgaatcaggagaaaatgctgagaagcttctgcagttcaagcgttggttctggtcaatagtagagaagatgagcatgacagaacgacaagatcttgtttacttttggacatcaagcccatcactgccagccagtgaagaaggattccagcctatgccctcaatcacaataagaccaccagatgaccaacatcttcctactgcaaatacttgcatttctcgactttacgtcccactctattcctctaaacagattctcaaacagaaattgttactcgccattaagaccaagattttggttttgtgtagagtataaaagtgtgt

SEQ ID NO: 46172 - DNA, 549 bp, Homo Sapiens
agatagggttttaccattggccgggctggtcttgaattcctggcctcgggtggtccgcccacctcggcctcccaaggtgctgcgattgcaggcttgagccgccgcacccggccattaatttatattttcagtacgatacatatcatccccccatactaaacaaatcaacccaaaaattttgatttcgcttaatttcgcctaacaaatatctaacatgtatatagcactttatagattaagtgtgttactattttctgtgcagtgggcaggaattataacttctacagatggaaaatggtctcttattgagaagttttttgtcaaaagataaccgtcaaaaggattcatgtccgggtttcatcactgtgtagtcccatactgtttatcactccatcacaatttgaaggctgtctgaaatatccatgaactccactggtaattcatggagttcaactctcttaaccaccctcctccctgacccatgatttttaccctaacagccatgagagtttccaaaaatgttatgttttacttttctagtgtatgtca

SEQ ID NO: 46173 - DNA, 504 bp, Homo Sapiens
aaacagaacaaaacaaaaaaagaaaattgtgctcttttctaatccaaagggtatatttgcagcatgcttgactttaccaattctgatgacatctttacggacactattatcactaagaccttgttatggcgaagtctttagtctttttcatgtattttcctcatgattttttctctttatgtagtttgactatgccttacctttgtaaatatttttgcttgtgttgtcgcaaaggggataatctgggaaagacaccaaatcatgggctcactttaaaaaaagaaagaataaaaaaaccttcagctgtgctaaacagtatattacctctgtataaaattcttcagggagtgtcacctcaaatgcaatactttgggttggtttctttcctttaaaaaaatttgtataaaactggaagtgtgtgtgtgtgagcatgggtacccatttgataagagaaatgcatttgattgtgaagaagggagagttaaattctccattatgttcgtg

SEQ ID NO: 46174 - DNA, 697 bp, Homo Sapiens
taacttgcctaggttacacagatgccagaacaggaattcgaactcaagtttgccagcttccagaggccacattctttccattttgccacacgcacgtttaccatttacgatttactccattgtcagccttccgaaaggacttgagattggtgggactttgttagtgccaatcaagatgccactcgcagtgaatgatccctgttcctttaagaaccaggctgaagctgggctgttttgggacctttacaaaatggaacttttctgcctgacctaattgccaggatagccgactgagccaagatagttttgtgttcaccaagcaactgtggaccaaccttagcttcaggaaaacagtggtaaaaaaagatcgatgaggaacactgccaaagaaataccctttcttccccgactgaaagatggctttgtccgttgagttgaaaactattaagtcctgccttcctcacttttcatcacgtggcttctgtttttgaattcctttttgttttcagtgatcccaccactagatatccacattgacagctatggtgaaaattatctaagcttcaccctgaccatggagagtgatatcaaggtaatgtgggaatttcaagccagcagctggatggggctttattttgtatgggaactgaaaggacatagcacagtaagactggaaaaaaacaaaaaaaaaaaaaaa

SEQ ID NO: 46175 - DNA, 778 bp, Homo Sapiens
  misc_feature (687)..(687): n is a, c, g, or t
aagggaagtaacgtcagcctgagaactgagtagctgtactgtgtggcgccttattctaggcacttgttgggcagaatgtcacacctgccgatgaaactcctgcgtaagaagatcgagaagcggaacctcaaattgcggcagcggaacctaaagtttcagggggcctcaaatctgaccctatcggaaactcaaaatggagatgtatctgaagaaacaatgggaagtagaaaggttaaaaaatcaaaacaaaagcccatgaatgtgggcttatcagaaactcaaaatggaggcatgtctcaagaagcagtgggaaatataaaagttacaaagtctccccagaaatccactgtattaagcaatggagaagcagcaatgcagtcttccaattcagaatcaaaaaagaaaaagaagaaaaagagaaaaatggtgaatgatgctgagcctgatacgaaaaaagcaaaaactgaaaacaaagggaaatctgaagaagaaagtgccgagactactaaagaaacagaaaataatgtggagaagccagataatgatgaagatgagagtgaggtgcccagtctgcccctgggactgacaggagcttttgaggatacttcgtttgcttctctatgtaatcttgtcaatgaaaacactctgaaggcaataaaagaaatgggttttacaaacatgactganattcagcataaaagtatcagaccacttctggaaggcagggatcttctagcagctgcaaaaacaggcagtggtaaaaccctggcttttctca

SEQ ID NO: 46176 - DNA, 775 bp, Homo Sapiens
ccaagctctaatacgactcactatagggaaagctggtacgcctgcaggtaccggtccggaattcccgggtcgacccacgcgtccgcggacgcgtgggttgaaaatgaacaaagttagaaaaaaaaacagcaaaatcagtgatttagtcagatgagtttttcgttgtaggagcacttgatttctagtgtgttttgtacagtatataactacaagatagtacattttgtagcagttcaaagccaaagttgctagcatcattttgctgttgtgccagttaatcataggatcccattaaataagtgtgctaacatcgaatatagagaaaactggtaaagaacattccagtaggaaaagaaaagaacaatcttccatttctgggcttggccaccatcaccctggtcggacctgtcctggacttccaaccttgactgctgagctcctggcttagcttcttgggttcctaattcctggtgtttaataattctctccacgatcatgtttttctgattttttttttcagaaataatgttttttaaaagacaaaaacaaagggaagaatatttaattactgagcagaagtaaatactgttggtattttgtacataatctaatttttatatgcatgtttatgctttttaatttttttatcaaaaattaagtcatctacctactacttgtaaccagcttgtttcataacatgttattttcctgtgtcattaaataattacttcaatgttaaaaaaaaaaaaaaaaaagggcggccgcttttaaagat

SEQ ID NO: 46177 - DNA, 714 bp, Homo Sapiens
tctacctgcatctataggtatctcttctttatgaaaaattacttcttacatatgtactctagattattctgtctactttgagtcttcaacctcttcatctgtgaaaagcgttttcagttaaaatacataaaatgtcattgcagatcagcatttatagatgaacagttgctctcagttttaatgatagggaacactaactttgaaccccaattaaatgaactgttatctccctccaaaataattctattcttagtggtaaacttataaaagattatatctaattattagtattagcatatttaacatttcttcaataaaatttttttgtggaaatttgctttctctcattatgtaagtacgtatattacatcttcaattttgtcacagcacctaaaagatttactacttgactctttacagaataagtttgttggcctcaggtgtaggccgccctaactggggcggaaggatagagaaaagtggattcaagagatattcagcaatagaatggatacaacttggtcattaattaaaagtgatgggtgagagagaacaagttcaggatgcttcttaggtttctgtcttaagcatcttgggtgaattaagacctttatgttgtcctggcaaaaactaggatgatgattttaattagctacattgatttatcagtagtaatgaagaattgtatctcttgtctttaaaaaaaaaaaaaaa

SEQ ID NO: 46178 - DNA, 957 bp, Homo Sapiens
  misc_feature (666)..(666): n is a, c, g, or t
  misc_feature (933)..(934): n is a, c, g, or t
  misc_feature (937)..(937): n is a, c, g, or t
  misc_feature (939)..(944): n is a, c, g, or t
  misc_feature (946)..(946): n is a, c, g, or t
tggatgggaatttgtcagcgttctaccaggcaaattcactgtttcactgaaatgtttggattctcttagctactgtatgcaaagtccgattatattggtgcgtttttacagttagggttttgcaataacttctatattttaatagaaataaattcctaaactcccttccctctctcccatttcaggaatttaaaattaagtagaacaaaaaacccagcgcacctgttagagtcgtcactctctattgtcatggggatcaattttcattaaacttgaagcagtcgtggctttggcagtgttttggttcagacacctgttcacagaaaaagcatgatgggaaaatatttcctgacttgagtgttcctttttaaatgtgaatttttatttctttttaattattttaaaatatttaaacctttttcttgatcttaaagatcgtgtagattggggttggggagggatgaagggcgagtgaatctaaggataatgaaataatcagtgactgaaaccattttcccatcatcctttgttctgagcattcgctgtaccctttaagatatccatctttttctttttaaccctaatctttcacttgaaagattttattgtataaaaagtttcacaggtcaataaacttagaggaaaatgagtatttggtccaaaaanaggaaaaataatcaagattttaggggcttttattttttcttttgtaattgtgtaaaaaatggaaaaaacataaaaagcagaatttttaatgtgaagacattttttgctataatcattagttttagaggcattgttagtttagtgtggtgggcagagtccatttcccacatcttttcctccaggatcctccaatttttatcatgaatttcccttttaatcaacctgtagggttatttaaaataaatttctacaaacttaagggaaaannccntnnnnnncncaaaaggcggg

SEQ ID NO: 46179 - DNA, 1053 bp, Homo Sapiens
cgccgcgccgccatcatggacaccagccgtgtgcagcctatcaagctggccagggtcaccaaggtcctgggcaggaccggttctcagggacagtgcacgcaggtgcgcgtggaattcatggacgacacgagccgatccatcatccgcaatgtaaaaggccccgwgcgcgagggcgacgtgctcacccttttggagtcagagcgagaagcccggaggttgcgctgagcttggctgctcgctgggtcttggatgtcgggttcgaccacttggccgatgggaatggtctgtcacagtctgctccttttttttgtccgccacacgtaactgagatgctcctttaaataaagcgtttgtgtttcaagttaactcaggttcttgtctgggttatacgactagggtttctccaggtttcttgagtggctcccaggcggtcaccgatcctccgcactctggaaatcctggccgtgcggtcttgccaaacgaagcttttcctttttgaggcggggggtcgtgtttgtcgattgcaccctctaccccaaacaaaacacaagcgtagtaggaatgttttattagcaaagaagtttcagagagtgggtggatcagggctctatcacttggtccccacctcaccttggtggggccagagtgagccccttcctgccacagtcaccccaactgaaattgcctttctcttcggccagtgttagcctctgagcaggggaccctggacccttctgtgcgccaargctgaggtgactgacgaggagatctcccacagctaggtgtagtgagccagacgaggcagcttactgaacctgggggttctctccattgtcaccgcattctccttcaccaggtgtggctgtctgggagccagggggtgactcgctctggagagaggggaaaagaggggggsctgctgcaatctccttgagcaggaacgtgggatyagcccasctcacttattgaggtytttwmcatggaccagctgctggttakwtcaactctgccctytgactggaragggcttacttcyccamatcctcagtgggg

SEQ ID NO: 46180 - DNA, 609 bp, Homo Sapiens
cacatgcacacacactcacgcatgagcaaacgtgtacagactggcacatgcctccacatgcgaacacccacttacacacacgccactcacactggcacacatgctgtctacccgtgcacaggcacacgtgctggtctgcacacacctgcacacacctgcacactcgctatgccaggcctcctgggtctgcagtgagtctgggggcccatggggacagggacaggtgaggggcttcctgaggacctggggctgttgggagccgctgtgggccacatcttctgccccttctcagcctccctcaccccagccccttcccctagacccactgctggtcccctttctccctcctgcttctcacctgaagccacctgcccctcctttgtgccctcccttgcttcctcctgggctctgtcccctgctccccctttgtcctccatcccgactccatctcccccaccaggctggtcaccccaggccagcgtctgttgaaggatgaagcagctcctgtccggcccagccctgcctcacagctgtgcgagctctgcccttctcagctctcaaacctgaataaatgcaccaagcccagaaaaaaaaaaaaattcctgggcc

SEQ ID NO: 46181 - DNA, 602 bp, Homo Sapiens
  misc_feature (565)..(565): n is a, c, g, or t
  misc_feature (582)..(582): n is a, c, g, or t
agtgcgcccattccaactggaatagcagtttgattttaattgtaaaactaaacttcgggaatatgtatgcccaaagtaagtaggatgagaatagtatacatgggatatggtccaatgaatttaagccccaagatacagctaaatacatttatgatttcataaaatctagtttagatagcattgtgatgcaatttccagaaatccatttgtgtttagagtaaataccatgtttagaagatgttttgtggtttggatttatatatttgtaaggttttttaaaaaaatgttcgttttgtttgaaatgtaacattgagtaaattggtgagttatataatgagatttctagaaagctctggacatgggtacgatgtgttttgcttctctgtataatgtctacagtgataaacttgtgtctccgtgtattgtggcagtctttttttctagttaatttggctttagagagcaatctttgtatgacaccagaaaactcttcatgctattgaatgataaaaagataatgctttaatattttattcactgtgatactattttgtttgtctattanattgttattatttccanaaaaaaaaaaaaaaaaggac

SEQ ID NO: 46182 - DNA, 790 bp, Homo Sapiens
gaacaaaccaagtggaagataaagtaaaggaaaaagctaaagctgaacatagagacaagcttggagaaagagatgacactatcccacctgaatacagacatctcctggatgataatggacaggacaaaccagtgaagccacctacaaagaaatcagaggattcaaagaaacctgcagatgaccaagaccccattgatgctctctcaggagatctggacagctgtccctccactacagaaacctcacagaacacagcaaaggataagtgcaagaaggctgcttccagctccaaagcacctaagaatggaggtaaagcgaaggattcagcaaagacaacagaggaaacttccaagccaaaagatgactaaagaaatacaagttaaggtatctggtatctgcatgtaaaatcttcagctggtggatggtgacttttgaagaacaaaaggctttggcaacagaaaacaattgttctgggtgatttctagaatggtttttgttgagtctctgaacatcctaaatattggtttgttattcttttccagaaagaaaatgaatttgactggttcacctgtgtactgagtattgataaactttgaatttttttaattgccttcaattgggagagaaagctttatatttgtaagaaatatatttgataaagtttcttaaagcaacaccaaaaaaacaaaagaaaagctaagtgaattttgcacattctacacacagtgcctgtaaatctcatttgtactttcagtttgcccttaattttttggtagtgtttagaaaacga

SEQ ID NO: 46183 - DNA, 678 bp, Homo Sapiens
cagccagtctgggcccttctcaggatcctcatctccatcctcatcctcttccttcacagcatttacttggagctctttgtgacacaccatgtcagtcatgatgaatcggccaacagccagcccttgccagctgacgtcacagtctaagatgggaaactgtggtacagatagacatgaagagagcttagcagtgattgaggtggtgactaaatatacagtcattgaataaataccatgtagcaagtgtactttgtggagtgttgagtaagtggaaaatggaaagccagttgcatttagagatgataggcctaaagggaactgtcttctgtcgagaagtaaaggaaacttcatgaaggatgtagaagcttagctgcctcagagaagagagaacctgaagatctgaggcaagctggacaggagaggtggatatttgttgatggaagaattcaagtttataatcaattcccacttagcacctactgtgtgctaggaacttgaatgtgtatgtttgacaagtcctgcttggcctgatgggtgggagaaggaacctgagcctggctgagatggctaggcggagggctttgaagtccaagcagctgaactggctgggtgggtttctacctttgaaactgcaagacttgtttggagctcttaattacaatatctgatatttttaca

SEQ ID NO: 46184 - DNA, 654 bp, Homo Sapiens
ggcacgaggggttggtgggggtgcagcgcttcacaatgctaaagccttagccctcctccaagagctgagacctctcagggcctgaatcttcttttccacaagataaatgatgcaaaggccacacacacaggaaaaaaaaaaaaaaagaggcagaactatctattctttgcacaaagtttccactgcaagaggaggaggtgatgcaggtgccacctccaccctgcacttgctcctcagaaccagggataaactgcatttgtaaaaggcactgttcttagcaatttctggacattcaacaacgcggggggcggccactggtcagaggcaggacagcagccaagatggggagagaaacggggagagaaagaaacaattctaactgactcctatatgcagccagttggaatcatgcctaaagctttgggtctgaaggggcccccaacacaccacctgccttgggaaacagcgaggatggtgcagagctttattgagactccagtggcccatccagttcatctccaggcacccccaaaaacagcaaattacacaagacccccccccaaaaaatgaacaccattttccacacatacacacacacataaagtttgtttcctgtggcatttaaattaaaaaaaaaaaaaaaaaaaaaagaat

SEQ ID NO: 46185 - DNA, 941 bp, Homo Sapiens
agccagctccgtgccctctgaattatgtttcgcagaaaagtgtccccaaggaagtgccaccaggtactaagtcctctccaggttggtcctgggaggctggcccgttggctccttccccatcttcacagaatacacctctggctcaagtgtttgtccctttggagtctgttaagcccagcagcctgccgcctctcattgtgtatgaccggaatggattcagaattctgctccacttctcccagacgggagcccctgggcacccagaggtacaggtgctgctcttgaccatgatgagcacggctccccagcctgtctgggatatcatgtttcaagtggctgtgccaaagtcaatgagagtgaagctgcagccggcatccagctccaagcttcctgcattcagtcctttgatgcctccagctgtgatatctcagatgctgctgcttgacaatccacacaaagaacctatccgcttacggtacaagctgacattcaaccaaggtggacagcctttcagcgaagtaggagaagtgaaagacttcccagacctggctgtcttgggcgcagcctaacttttcacaagatggacccttcatttcaagcttaggctggcgttacttttgctgtctagtcaggactaatcacggtgtttcagtgcggagtgccaagagtcctatcctgacgtcaggctctgggtgtcaacctctgacttattctgcagatgctctgtgtgtgtgtgtgtgtgtgtgtgtgtgtgtgtgtgtgtgtgtgttccggggagagggtggtagcacaggggcttgggaatatcggcagtgtggggaaatgccgaaacattttctcatcatcatcatcctctgctacaggcatgttttccgcatggtcagcgagcgaacactgtcccctggcttccaggttgggaaggttttatcagcccaaagggg

SEQ ID NO: 46186 - DNA, 646 bp, Homo Sapiens
gcgtccgatcctggtcacggccacagcgtccgcgtgggggcagcgggcatccctgctggaggtgtcctcactctggccatcatcctcgaagcagtcaacctcccggtcgaccatatctccttgatcctggctgtggactggctagtcgaccggtcctgtaccgtcctcaatgtagaaggtgacgctctgggggcaggactcctccaaaattatgtggaccgtacggagtcgagaagcacagagcctgagttgatacaagtgaagagtgagctgcccctggatccgctgccagtccccactgaggaaggaaaccccctcctcaaacactatcgggggcccgcaggggatgccacggtcgcctctgagaaggaatcagtcatgtaaaccccgggagggaccttccctgccctgctgggggtgctctttggacactggattatgaggaatggataaatggatgagctagggctctgggggtctgcctgcacactctggggagccaggggccccagcaccctccaggacaggagatctgggatgcctggctgctggagtacatgtgttcacaagggttactcctcaaaacccccagttctcactcatgtccccaactcaaggctagaaaacagcaagatggagaaataat

SEQ ID NO: 46187 - DNA, 549 bp, Homo Sapiens
  misc_feature (540)..(540): n is a, c, g, or t
aaggcataaagatcatataatggactttggggacttgtggggaagggcaggagtgggtgagggataagactacacataaggtggagttcatacacatgagggataagactacccataaagtagagttcatactgctcacatgacaggtgcaccaaaatctcagaaatcaccactgaagaacttattcatgtaaccaaaaaccacctgttccccaaaaactattgaaataaaaaaagaacctcatgaatattttttaaaagcctatgggaaaaaaattacaatctaagttatgactattaccaccctttcaccatttctgaaagctcagctgattctatatgaacttctacaacatcactacccagtagaactttgtattacgcaaaccaattattactaggccgctctccccataactcaattctgcctatggactcacttggagtggagtggaacagttgattctgcttataggattttctcagatgttcatatatgtaattcacacactcctctgaacaagtaataccttcctatgtncaattctat

SEQ ID NO: 46188 - DNA, 629 bp, Homo Sapiens
cagacaaaggtggaaggagctctgcacgcacctcatggaggagaacatgatcgtgtatgtggaaaagaaagtgctagaagaccctgccatcgccagcgatgaaagctttggggcagtgaagaagaaattctgtacctttcgagaagattatgatgacatttccaatcagatagacttcatcatctgcctggggggagacgggacgctgctgtacgcttcctcgcttttccagggcagcgtccctccggtcatggccttccacctgggctccctgggcttcctgaccccattcagctttgagaactttcagtcccaagttactcaggtgatagaggggaacgcagctgttgttctccggagtcggctgaaggtcagggtggtgaaggagctccgggggaagaagacggccgtgcacaatgggctgggtgagaacggctcgcaggctgcaggcctggacatggatgtcgggaagcaggccatgcagtaccaggtcctgaatgaggtggtgattgacagaggcccctcctcctacctgtccaatgtggatgtctacctggacggacacctcatcaccacggtgcagggcgacggagtgatcgtgtccaccccgacgggcagcacggcgtatg

SEQ ID NO: 46189 - DNA, 536 bp, Homo Sapiens
  misc_feature (511)..(511): n is a, c, g, or t
tgcacacgaagttgccctcatctgctggagatcgataaggaaggcacaagacgttctcctctgcccgtgaggagcttcccgcagccgcctggcccagcctgggcacgttctccgaggcatgtgtctccctgctcaccctcgtctgggcacctcagcatctgtggacttgagcgtccaaaaaccctgagtgtgattctgggcagccggcctggcttgaagtccgccatgaccctgggcacaggggaagcccagccgtgggcttaggagagagggaccagcgcccagcgttagggctggaagacggcagtgttcagaattccagccgctcatctgaacacagaaggtgtgaactgacctctaaagcagcgtgagatgggaatgatctagaaaactttggatttttgaagtaaattttaatgtttcatattaatttcttgaaaatgtattaaatgtcattgaaagccttattacgcttttcagatcctttcaataaacaagacttgtagaaaantaaaaaaaaaaaaaaaaaaacgcgg

SEQ ID NO: 46190 - DNA, 780 bp, Homo Sapiens
tacatgaagagtgacagtctaaattgtttgaaggaaagtaaaatgaacaacaaactagaatcagcaaagaggaccctgacaatatcagaaatgatctgctccttgagatcatagcactgttcctgatttgactccctccaccattatttattctccccacacttttagtttggtagggaaaaaaccccacagtttctgtattttggaacagtgactgtgcagccaaactccctatcgctgaaaggtttctggtggaaaataactcatagatcagaatccagcctccttgaaaaagtaaaggcctaggtagtaacttgctcaacattacactgccagtttttgatagaattaactaccttaatttgttagaattgagactaacacccgaatctcttcattctaacaatgctttgtagcttctaaatgatcccacacggggtttttcaaggtcttcctcctccccaatcccttaattactcagaaacatcttttctgaactcacagcatttgataattatgtaccatgttaggaattatttttcattattgtcacacgttttaagtttagagtcatacttctggaatgaaaactatgactcatttcataagttgaaccaatcatctcatttctttatagttgcctccccaactatattaagctccttgaagataggacacatgccttacatttcttaactcttagctagtattcaacataattaatatgacgtttgatacatattagtttaattaacttcataataaaattgataagattaa

SEQ ID NO: 46191 - DNA, 466 bp, Homo Sapiens
ttttcttacattcagattttaatacactagaatgacagtctttaaaacaagcatgctagcctataatgaatattgtatatacagtaatttaaacacttagaactatatattatactgcaaaagcaaacagcacaacactcatcatactcatcattatctgctgtgtatactacctccaaaaatgaaaatacaaaacagtaaaatgcacctatggtttatatatatatatatatatatatatatagtttatatattatatatattcttacaatatatataatatatatttataaaatatacatacattttagacattttcaaataaatcttcatcattatctccaaaagaaatttatagcaagaatactgaaggaatgaaagtcagattaaaaaaaaaatttctcacaaagttcatcatcagtgatgcagctcaatttcccccgttttagtcataactaaaatgatt

SEQ ID NO: 46192 - DNA, 609 bp, Homo Sapiens
tgtgcgctgcttccagccgcccatccaccagtccctcgccagcagctgagggcacgcgctgcactccgtaactcaacatggcatgcctttctctccgtaaactatttagtgagatttttagggactatttttcagtatctctgtacctgttaaagggggtgcttttcgatctaaaaacttaattttataaaattgacttatttttctagactaaaattgtatatgcttttggtaattaggaactcttgagaatattggctgctgattgttgccatcacgttcctacaaaattgtttttctatgggatgttctggcagctgtgtcataaaatgctgctgggttcattcattcattccataagaaacttaataccagcaaatgcattaaatcccttgccagttaccattaactgtaactatttagcttttgtttagggatctttctgatggtcttttatgagcaatcttagttctaagtcattgttcccatcccttttttgtgtgtttcagaaaatagtgaacttgattcccctgcttccactaaatccagttgtgacaaaatctaacgtgacatcagatcgaaaggttatagaaataaaactaatgagat

SEQ ID NO: 46193 - DNA, 817 bp, Homo Sapiens
  misc_feature (768)..(768): n is a, c, g, or t
tctctgtttcttggaaaggtatctattacatcctgctagctgactgacaaaactaagcagggagaataaagataattgtattttatgttttgcacacaaacgcagaatttgtataaccatatgacttcatagttgtgatctcaaaaaagaaggaatttctcctttgtttcttgcagttaatgtaagaatactttaaatctctaagcttctgaagtgttagaggtagagatggtctagtaaagatgtagtagtaatgttttatccatttagcatgtgtttattttttcatatgtactcaaaggtgacttattggttcacctcagtgatattacagctaaaaaaatcattcattagcaaaaggaaaagtggtctcaacctaacatcagaagtgtttcttattattattttatattgagttgaatattgaactctaacagttttctacatacaaaacacagtgtcatgaaggttattcataattgcattatagaggaatgtagtatgtcataagtactttgtaaagatttgacattcaactgtagtatccatatgttgcttaaatttccttatgagccccatgatggaaagacttaaagatgaatttgagaaaaattgaaagaaattagattatcaggttctgttaaattgttacatgtatcttgcttaaatttctgtttattaatttatatccacccaagtacataaagcaaatttggagggaatttcccctttcaccattccttttcctcctctctcccccccccatcnttctcccccctttttttaaaaagggcggcccgctcctaaaaatcccccc

SEQ ID NO: 46194 - DNA, 580 bp, Homo Sapiens
agtatttgcacataactatgcacatcctcccgtgtactttaaatagtctctaaattacttcgtaacacctaatccagtgtaaatgctatgtaagtaattgttatactgtttttatttttactatcttttgttgtacttttttttaaaaaagaaattcatttgtttaatattttcggtcttggggaacccgcgtatatggagggcctgctacatagagaagactgagggatattctgtgcatccgtttctacggatcctctaaatcggcctttgttttcagccaggatttagtgcccagctgtgtcctttggaggccccacatggagctagcaaagtttgctaaatcgggttttgcaagaggactgtctgctccatactgggagtagttaccgcaaactgccctatgaaattggttggggttcttactgttagcatgtttattactttatcagggctctctgtaggagagtctatgagaaaatcttctggtttctgctgaaagaatcgtgttttgttggggtttttttcccgaaaaatattatttttaaaaactcaaaaaaaaaaaaaaaaaaaaacgcgg

SEQ ID NO: 46195 - DNA, 673 bp, Homo Sapiens
  misc_feature (19)..(19): n is a, c, g, or t
  misc_feature (653)..(653): n is a, c, g, or t
tatgccaagttaaataatntgagaatatatacagtatagtttgctatgtataatagacctcatttcatttacagtacacctcacacttgggattaattcacctataacctctgtgaactgcgagtgctcggcagaagcagccctgtgtcttacatgtctacatttatatttatatttatatttatttttttgagacagagtctcactctgtcacccaggctagagtgcagtggcatgatcatagctcacttgcgtcttgaactcctggctcaagtgatcctcccacctcagcctgctgagtagctgggactacaggtgcacaccaccatgcctggctaaaggcatgtctgcatttatgcgaggtgtgttgaccgggtggggagggagctaggactgagattcgcctgtgtaaaatgcacaaaaagggtttgctaagcaaattgatatttgaaatgaaagatggattaggtgagagacttagtttattcaggaataagagcaaaaccaaccacatcaaaaaatgtatttcactgagacagccttttgtacatacagcagggtgctgtttacagatttcaagaaaggagaaaaagaatgcttatactgagattacctacctcccagtagtgaaaataataaatttatcccttganatataaaaaaaaaaaaaaag

SEQ ID NO: 46196 - DNA, 706 bp, Homo Sapiens
aggctgcagtgagcttggtcataccactgcactccagcctgggcaacaaacaagaccctgcctctcaaaaaaaacaaaacaaaaatctgacaaatagggttgttaactgtgagcctgaggaaaagtatagattttagtgtacttaaacaacttgtctgttttctttaaatcttttcccttaggttagataatgctgctcatgattgtgagagcacagaaagttcttttgttttctagaattaagtctgctcacctggtttgcattctgcatctgcctttctttagtgcagggtagtgtcagtcccactgtggcccaaagtttgcattctgcgttaaccaagtcacaattaatgaggttttactataggcacaaatgcttaaaaaagaaaaaaacgattgttttgtgtggttaaaataaaaacttgtggggattttaatgtatttctttggtgaaaatacattagttgtttgtctctaattggatcactttcccttctagactctgaacaggaagtgcctcctggaaccacagagtcgggttcagtctgtggattactactgtgatacgatcattcttcggaacatagctccgcacactgtggtggattccatcatgacagcactgtctccttacgcgtctttagctgtcaataacatccgcctcataaaagacaaacagacccagcagaacagaggcttcgcattt

SEQ ID NO: 46197 - DNA, 689 bp, Homo Sapiens
cgacgatgctgcgattgtgataaaaaacacaaaagagcctccattgtccctgaccatccacctgacatcccctgttgtcagagaagaaatggagaaagtattagctggagaaacgctatcagtcaacgaccccccggacgttctggacaggcagaaatgccttgctgccttggcgtccctccgacacgccaagtggttccaggccagagccaacgggctgaagtcttgtgtcattgtgatccgggtcttgagggacctgtgcactcgcgtgcccacctggggtcccctccgaggctggcctctcgagctcctgtgtgagaaatccattggcacggccaacagaccgatgggtgctggcgaggccctgcggagagtgctggagtgcctggcgtcgggcatcgtgatgccagatggttctggcatttatgacccttgtgaaaaagaagccactgatgctattgggcatctagacagacagcaacgggaagatatcacacagagtgcgcagcacgcactgcggctcgctgccttcggccagctccataaagtcctaggcatggaccctctgccttccaagatgcccaagaaaccaaagaatgaaaacccagtggactacaccgttcagatcccaccaagcaccacctatgccattacgcccatgaaacgcccaatggaggaggacggggagg

SEQ ID NO: 46198 - DNA, 755 bp, Homo Sapiens
cctagagcgtctaaaagtattgcacacaaaatcaactttttactccaatttcctccaactccaaaacccaaagtgtccgtgctgtgtccctgtgcttcactgggtttctcaaccgtggcttttcaccgcagcttgtctgaaactcttagcctgcagaatttaagacaatggcagtttttatcgtgatttgcctttgaacttggtcctattgaagttcacaataagtggaaaacaattttttcagagaatgtatttttgtgcagaattgcacagaattctagagacagcgttgttcggcatcaaggcaaaagcccacctttgctttttatggaaagcattactttatttaaagagacagacaatgacgcattttaatctacctttgtcttaatttacagcaggttttgtatgaatttttaaccttttaacaaactcccaaatctggttgatgcctttgacagtgatgaaaacgatttcaccacatctgaatccagagaaaccggctttttttcttattgcgagcatgttaaaacgttgggaacatgtggggaattgtatattgcgctgaattaacttctcccgcctcttgtaatgctctggtgggttcttgtttgggaatgcgatattttgtggctggtttagctagagagtgaactctcaaaggtatcaaaactgtgcttccattattagtgcaagaaacagacaggctttaaggggtagatgacgtgaaattttgcaagtcttaattacagctg

SEQ ID NO: 46199 - DNA, 640 bp, Homo Sapiens
tcaaaatttaatattacgaattgtgcaaagaagtatgttactttgatcagctttattttagagcttctttatcaagttatcatcagtcctcttgaattatttctgaaataaggggaaggaaggaagggaaaaaatatgaatgcatagatagatctaagcagatgccttcagagccctggaataatcctagctgggatatgggacatgaaaacaactctggcctactgctgctgggggctgttgcatggtgtgacataggaagtaaaatgttgctgtatgaataggaaggagggtcttcctgtcaatgagaattaatgttttcctaatgatttaacttttttactgaaaaaataatatgtgtacatggtaaaaatccaaattgtatcacagaaaatacagtgaataaaaccatcctcttaagagggtgtgtacatttataaatttgcctatgattgcctataaagtcaaagaagttgcaccagtatgcatgactgccaaaagtacataaactgagcatatccatttccctacattcttgcaaacattgtgccttcgaactttttggcctctgatagaggaaaaatggtaactccttgttttattttttatattcattattccttttgtaagattaaatatc

SEQ ID NO: 46200 - DNA, 786 bp, Homo Sapiens
tgaggactggatcaactgctagtcacgttatatccaaatctgcattatcattgggcacattttcacagaattttactgaattattccttaattgtttaatggttgggaatagtttgggaattaccttccatcaactctgctaagaaaggaatggattctggtagcaagacaatataattctcctttagtttttcagccagtgctaacacagtaatcaaagcagcaaatcgaacctgaaagggataaaagagcaaagaaataaaaagtagtgttactgtatttattatcttaagagctgtactgacttgagacaagctctaactttttaaacattagttcacacgcgtttattcacttcattatgttcattaagctttcatcttagaataccagtttcaccatttgggagctgtttgtaatatgtgcaaccttataaatagtgttttccaaactgtgtcccaggactgcaaatctttaatgtgaaatgtctttttataatctcttcctttaaaaaaaaccaattaaacataacaatgccacattgcaagacttcaaaaacacaacacacaaacacacatcactctccaatacacacatacattctacccactcccccaaccacatgatgggcaggacaggtggctgtagagagaagcttataccgcacaaccatagagcagacgagccgacacaaggcgataagggagcaagaaggaatcgatcagagcaagacagaccaccgctgcgcacgcgcagtggcgcaggtgcgctacaacacagaagatg

SEQ ID NO: 46201 - DNA, 593 bp, Homo Sapiens
tgcggccgcggcggcgggacgacggagactcggacgcggcagcggcggcggcggcgcccctgcaggacgcggagctggccctggccggcatcaacatgctgctcaacaacggcttcagggagtcggaccagcttttcaaacaatacagaaaaagttttttgacttctgagaaaacctcagcgcttcctggagaaactcaaaggcgcttgtaagagatgttgagtcagcaggcctctgagcctcttctctgcctaaaaccatgtcagattcttgggaggactggaaggacttgcaggctgtccatgatttctagacaagtcatctgctcacagacaagaatgtgtctctgccttgctcctggagacgataggagagtccacagatgcagagatgtaagaaaaggagaagaaatgaaaagcagaaatggtttaagggaactggcgggaaagacaggaaactcatctgttgactttttccatcctcttcaactcagtggtgtgttggaaaaaggcatcttttttcccccaactattacactgtctgaaaaggtcctaattaaatattcattaaagataaaaaaacctcgtgccgaa

SEQ ID NO: 46202 - DNA, 700 bp, Homo Sapiens
ttttttttttttttttttaaaaaaagcattccagaaccacttctctttatgggcacaacaaagaaacgaaggctgaagttcgcctacccaaaatgaaaagtaggctttacagtcaaaagtacttctgttgattgctaaataacttcattttcttgaaatagagcaactttgagtgaaatctgcaacatggataccatgtatataagatactgctgtacagaagagttaaggcttacagtgcaaatgaggcgtcagctttgggtgctaaaattaacaagtctaatattattaccatcaatcaggaagagaataataaatgtttaaacaaacacagcagtctgtataaaaataccgtgtatcatttactctttctgcagctctatacgataggcaggagaggcttatgtggcagcacaagccaggtggggattttgtaaagaagtgataaaacatttgtaagtaatccaagtaggtgtattaaggcaccaaaagtaacatggcacccaacacccaaaaataaaaatatgaaatatgagtgtgaactctgagtagagtatgaaacaccacagaaagtcttagaaatagctctggagtggctctcccaggacagtttccagttgctgaatagtcttttggcactgatgttctacttcttcacattcatcttccatcaactctgctaagaaaggaatggattctg

SEQ ID NO: 46203 - DNA, 661 bp, Homo Sapiens
aggagggcaagtgtcaggataataggtggactttttactcacctattttaccacaatctcaccctgcaggtgatggtcaatgcttgctgctccatctttattcatcgttaatgttaatttatgacaactcagggggaaaaacataacaagcctagtttggttacaggtacacacaagcttgaatatttctctgcactgaaatgaaagtggcatagttcatcaccacctgctacattttgtagagcatcttatcagccatagaaataggacaatctataaaactttggggagggtgggggaggaaatgacaaagtgtctgtcaaaaacaggcataatctaaaacaaggtggatgtagcaaatctctgtcactgcttgagaactttgagcttgtggcagttttgcagacttacatgacttcagcactttacgacatattttttactatgaatgttcaatacaatttaatatttataactgatttctgagggatctgctccatgtctattctgttatctgcatgaaaacaaaatgtatgccaatttcagtatgtcaataatcaaggttttaaatgtttggaagaaaatacaaacaagattgctgatctgttctgtattagtgacattctggtacttctagattttgaataaatttatggatttt

SEQ ID NO: 46204 - DNA, 506 bp, Homo Sapiens
cagatgaccgagggagagaagaatcaactttgtggagatcaaaggtgatgaccagctcagtggggcccagcaatggatgactaagtcattgacagaagagaaaaccatgaagtcattcagcaaaaagaaaggtgagcagccaacaggccagcagcggcggaaacaccagatcacatatcttattcatcaggccaaggagcgggagctggaactgaagaacacctggtcagagaacaagctcagccgccgtcagacccaagccaaatatggattctagggctctggaactgattgctcccaggatctcctgccagcccagctggcctggcccccagcttcacctttgggaccccagctgctctaagcccaggatctctttccccaaggacccagccctcgcctctgcgagaatgaacatatttgatagatttttcttaacaagttagaaaattcagctcctttctgtcctggagctagcaaagacttgtgtgatgcctccgaagggg

SEQ ID NO: 46205 - DNA, 715 bp, Homo Sapiens
ggattggtaagtggcacatgacggtatcccagtcataagagggttgcatgattcctttgagtgtttgatttgaaaagcctagtcttgtctctcaagagcatctcggacccagaacattctccagtagtgcattcagttcaacacagcaagtgcttcattgcatggaaaacactttgaagacaaaaaagaaatcttatttctttttttgtagccttcctgatatttacagtaataccattaactgttttatcgatagcaaaaaaggatactttttgcaatgttattagatgttctatagtgctacaaggaattgccttccgaatggaggttcatgtataatactcatttacaattcaatatataattacacaaataatttttaaatataatcaatagtaaagactgttctgtggatggtagtgtttaatacattttctattttgtacagtgatttcaggccttttgttttcttaaaatcagcagctgtttggcctaattcttagcattattttgtcctttgcgccagtacttttttgtgcacgctttttgtgatctgtgttaaaaacctgcattgccaacattgcagctcgaacttaaacttgttattcaaataaatatttaattttttaaattgctcttgtataatcagatgccccttttagtattattttaaaagcgttggggaggggttttgcctaaagtacaatttatcggg

SEQ ID NO: 46206 - DNA, 590 bp, Homo Sapiens
gaaaaactagattttagttttataaaacttttaagtctttcatgggacctatattttcttgaattaaattttgtagttctagaataaataggcaatctaaaaaggtgttctctgtgttatgtaaagtggaggcttccttatattttaacctactaagcaatgaggagggattcctgtcattaagcacaagggcgctggatcctcaagtgcccatcttcgtgagagaaaaagcagcacatcctgcccatttctggtgctttctgctcacaggcaccaaagctgcacatgtaaactgacttcttgccaaaggaaatgacccctgggaagttcaagctcctggaagaggctttaactcggacgcgccctcctccaggaaccagtgggcagggcagccttcatgcatgtgtaactggacctccagccataagcatggtgtgcagtatggaagagcctgctacggaactgaaagtgattggacattttataggaattgatagagatgttggtcctcaaaagctacaaaccagtggtctgcaaaataaagtgtgttggaaacctctagtgaaaaaaaaaaaaaaaaaaaaataggt

SEQ ID NO: 46207 - DNA, 636 bp, Homo Sapiens
  misc_feature (218)..(218): n is a, c, g, or t
  misc_feature (623)..(623): n is a, c, g, or t
ggaagattagcacatccatcaaaggctggtgaaaagatttagtattgacatgtttctctctaagaacagttggcttcacattcagcccctgccctgagacaaatgcattattttcatcagccctgggtgcttatttttctaagctctcattttattactggagtcacaatttgtgtgtaggtgttgccgacaaaaatgataattaactttcccttgangtgacacataactaaaatttcaaatctttagtatttctccctttcattttaaattcatatgcctaactataaaataactgtgactgagatacaagtacaaaccaaagcctggaattgcagcaggtgctgaggcatttgaaagtgaaatgtttctcttcgcaaaggactcttataccctcccctaaagaaatcaccatgccggtctcacccctactggctttgttacctaaggcttcacctctcagtgcttctggttccttccttatccttaaaatgagtgttaataattctctcgtggggtcattgtgcggaccacattgagtagtgcctgtaaaacagggctggctacacggtaaatactccataaatgttgacacgttcaaaacacaaaccaataaaaaaaanaaacccttgtcgg

SEQ ID NO: 46208 - DNA, 534 bp, Homo Sapiens
caattttataacaaatgacttttttccttagggggaggtttgccttaaaggcttttaattttgttttgtttgcaaacatgttttaaattaaattcgggtaatattaaacagtacatgtttacaataccaaaaaagaaaaaatccacaaaagccactttattttaaaatatcatgtgacagatactttccagagctacaacatgccatctatagttgccagccctggtcagttttgattcttaaccccatggactcctttccctttcttctctgaaaaaaactaatttaaatttgcttttcttttttttaactgagttgaattgagattgatgtgttttcactggatttttatctctctcaacttcctgcacttaacaatatgaaatagaaacttttgtctttactgagatgaggatatgtttgagatgcacagttggataatgtgggaaaatgacatctaagctttacctggtcaccatgtgatgtgatcagatgcttgaaatttaacacttttcacttggttcttatactgaa

SEQ ID NO: 46209 - DNA, 644 bp, Homo Sapiens
tgctggtggaggggccgctcaacaacctgcgtgagagcctcatgcagttcagcaagccacggaagctggtcaacactatcaacccgggagcccgcttcatgaccacagccatgtatgatgcccgggaggccatcatcccaggctccgtctatgatcggagcagccagggccggccttccagcatgtacttccagacccatgaccagattggcatgatcagtgccggccctagccacgtggctgccatgaacattcccatccccttcaacctggtcatgccacccatgccaccgcctggctattttggacaagccaacgggcctgctgcagggcgaggcaccccgaaaggcaagactggtcgtgggggacgccagaagaaccgctttgggcttcctggacccagccagactaacctccccaacagccaagccagccaggatgtggcgtcacagcccttctctcagggcgccctgacgcagggctacatctccatgagccagccttcccagatgagccagcccggcctctcccagccggagctgtcccaggacagttaccttggtgacgagtttaaatcacaaatcgacgtggcgctctcacaggactccacgtaccagggagagcgggcttaccagcatggcggg

SEQ ID NO: 46210 - DNA, 541 bp, Homo Sapiens
  misc_feature (514)..(514): n is a, c, g, or t
ggcacgaggcctggtcccgtttcaccagacatgaatttcaagtggagtcgtcgttctctgagagtgagtgtcttgacattttcacccaggccctcctgtcatcacatcaccggctgtcactggcgggtggccgtaaacgtcctgcgttgctatattaggatctctgcagttcaggcttcaaaaccagttcagtgtatccgggcgacgggtagtggtggtgcatgcctgtctgtgtgccccgctggcgagctgtagttgcggcttgcgtgcctcgcggcccactacagggctgcagacaatcgaggcgagggcgctggccgccagcagctcacagcgcgggggtcatgtggtcgctcctcgagggtttcgtttttgttctgcttcattaagactggaatcaagcttacatgtaaactattggtaatttaagtttccttttgtgtcattcagtgtaaaactgtctaatttgaaaaaaaatgtaggttatgaaaataaagatttaggcactgttcanaaaaaaaaaaaaaaaaaaaaaccactt

SEQ ID NO: 46211 - DNA, 889 bp, Homo Sapiens
tgcagcatcttccaggagctccagatcgtgcacgagaccggctacttctcggcgctgccgtctctggaggagtactggcaacagacctgcctagagctggaacgttacctccagagcgagccctgctatgtttcagcctcagaaatcaaatttgacagccaggaagatctgtggaccaaaatcattctggctcgggagaaaaaggaggaatccgaactgaagatatcttccagtcctccagaggacactctcatcagcccgagcttttgttacaacttagagaccaacagcctgaactcagatgtcagcagcgaatcctctgacagctccgaggaactttctcccacggccaagtttacctccgaccccattggcgaagttttggtcagctcgggaaaattgagctcctctgtcacctccacgcctccatcttctccggaactgagcagggaaccttctcaactgtggggttgcgtgcccggggagctgccctcgccagggaaggtgcgcagcgggacttcggggaagccaggtgacaagggaaatggcgatgcctcccccgacggcaggaggagggtgcaccggtgccactttaacggctgcaggaaagtttacaccaaaagctcccacttgaaagcacaccagcggacgcacacaggagaaaagccttacagatgctcatgggaaaggtgttgagtggcgtttttgcaagaagtgatgagttaacccaggcacttcccgaaagcccaccggggcccaagcccttttaaatgctcccccctgtggacagggtgtttttcccgggtctgaaccaccctgggccttgcaccatgaaagaagccacctcttgaagggaagccaaaaagggtgggaatcctggtaaggctaa

SEQ ID NO: 46212 - DNA, 736 bp, Homo Sapiens
  misc_feature (558)..(559): n is a, c, g, or t
  misc_feature (599)..(599): n is a, c, g, or t
  misc_feature (657)..(657): n is a, c, g, or t
  misc_feature (659)..(660): n is a, c, g, or t
gggcggacgcacacaggagaaaagccttacagatgctcatgggaagggtgtgagtggcgttttgcaagaagtgatgagttaaccaggcacttccgaaagcacaccggggccaagccttttaaatgctcccactgtgacaggtgtttttccaggtctgaccacctggccctgcacatgaagaggcacctctgagggagcagagaggtggatcctgtaggctaaaaggcttccaggctgagagccggccgtggaaggagggatgcgtgttccagccaaagcatgccgttctgcaccctacccagttgcctccagggcctctccttggaaggtcttttgagggctaaaaaggtcctgtaagaagcggcatagcacccgtggtgcatggtatgtgggtgaccctggactcgccactggtacccgcccttccgagcggcgcctaagcctttgccgtgagcatgcacactgagaatgctaatggttgggttgattgtatgttgaggatctattactgaccgtatgatgaggccaactttttttccttgtggttagcaagactgnncagagatggaaaaaagtagtttgaatgttttgtgtgtaangagtataccatgagatgagatgaccaccatcatttcctgggggggaggggtgtctgcncnntataaaaaaaaaaaaaaaaaaaaaaactgtcgcgctcggcctcgaacttctaaccatctttgggccggcaatagat

SEQ ID NO: 46213 - DNA, 766 bp, Homo Sapiens
tcaggttcctggaaagcaactggtttgtgtgggtgacacagatgaaccatattcccatgcacattgatcatgaccggaacatggactgggtttccacccagctccaggccacatgcaatgtccacaagtctgccttcaatgactggttcagtggacacctcaacttccagattgagcaccatctttttcccacgatgcctcgacacaattaccacaaagtggctcccctggtgcagtccttgtgtgccaagcatggcatagagtaccagtccaagcccctgctgtcagccttcgccgacatcatccactcactaaaggagtcagggcagctctggctagatgcctatcttcaccaataacaacagccaccctgcccagtctggaagaagaggaggaagactctggagccaaggcagaggggagcttgagggacaatgccactatagtttaatactcagagggggttgggtttggggacataaagcctctgactcaaactcctcccttttatcttctagccacagttctaagacccaaagtggggggtggacacagaagtccctaggagggaaggagctgttggggcaggggtgtaaattatttcctttttctagtttggcacatgcaggtagttggtgaacagagagaaccaggagggtaacagaagaggagggacctactgaacccagagtcaggaagagatttaacactaaaattccactcatgccgggcgtggtggcacgcgcctgtaatcccagctacccag

SEQ ID NO: 46214 - DNA, 691 bp, Homo Sapiens
ttttgggaggtccggcaggaggatacttgggcccagagttcaagcctgcagcgagctgagatacaccactgcactccagcctggggtgatagaacaagaccctgtctcaaaaaaaaaaaaaacaacaaaaacttagaattgaggagttgtacctccattggcttcctcactccaaaataggtgctgatccttcctattcctattctttgccaccttttgggtgtggtgtcaccagcctgtttagccaagtagctttgggcataggctgcccaatctgagcaaacaccagtgaggctctattgagccaagaccaagtcctcaaagcacctgaaccactgtggccttctcagcctacagcagtgtggtctcttacatggccacaaagggacacacagtgacaaaaggctcggaatgttacaatggtaaaatgagtgatctcaaatccactgacagatataaaataggcttagagaggaaaagctgcctctggtcaagtagatcatggcagcatgaattccaactcacttttttacaactccaacttctatgtttatctttgttactttcacttttttacaacctggccagaggcattttttaaatcaggcccaatatcagtattctttttgtgtgtgccaattttgttatcacatccctatgaagttgaaaaataaagttaattttgaccaaa

SEQ ID NO: 46215 - DNA, 873 bp, Homo Sapiens
cagaataggagcaagccagcactagtcagctaactaagtgactcaaccaaggccttttttccttgttatctttgcagatacttcattttcttagcgtttctggagattacaacatcctgcggttccgtttctgggaactttactgatttatctcccccctcacacaaataagcattgattcctgcatttctgaagatctcaagatctggactactgttgaaaaaatttccagtgaggctcacttatgtctgtaaagatgggaaaaaaatacaagaacattgttctactaaaaggattagaggtcatcaatgattatcattttagaatggttaagtccttactgagcaacgatttaaaacttaatttaaaaatgagagaagagtatgacaaaattcagattgctgacttgatggaagaaaagttccgaggtgatgctggtttgggcaaactaataaaaattttcgaagatataccaacgcttgaagacctggctgaaactcttaaaaaagaaaagttaaaagtaaaaggaccagccctatcaagaaagaggaagaaggaagtggatgctacttcacctgcaccctccacaagcagcactgtcaaaactgaaggagcagaggcaactcctggagctcagaaaagaaaaaaatcaaccaaagaaaaggctggacccaaaagggagtaaggtgtccgaagaacagactcagcctccctctcctgcaggagccggcatgtccacagccatgggccgttcccccatctcccaagacctcattgtcagctccaccccaaactttctcaactgagaaacccgaaaacagtggcccaatgtccaggtaaactcccagaaaaaatgttctccaaaaaaccgcc

SEQ ID NO: 46216 - DNA, 530 bp, Homo Sapiens
tgaattcacttattatgaaatacaagataatacagggaagatggaagtggtggtgcatggacgactgaccacaatcaactgtgaggaaggagataaactgaaactcacctgctttgaattggcaccgaaaagtgggaataccggggagttgagatctgtaattcatagtcacatcaaggtcatcaagaccaggaaaaacaagaaagacatactcaatcctgattcaagtatggaaacttcaccagactttttcttctaaaatctggatgtcattgacgataatgtttatggagataaggtctaagtgcctaaaaaaatgtacatatacctggttgaaatacaacactatacatacacaccaccatatatactagctgttaatcctatggaatggggtattgggagtgcttttttaatttttcatagtttttttttaataaaatggcatattttgcatctacaacttctataatttgaaaaaataaataaacattatcttttttgtgaaaggaaaaaaaaaaaaaaaaaag

SEQ ID NO: 46217 - DNA, 768 bp, Homo Sapiens
  misc_feature (768)..(768): n is a, c, g, or t
cctagaacatctacctaggctgtaaatttcgttaaatgatggatgcaaagatggaagacagatggatggaggaaaagacagaatcagatactggatgagttagtactgctgcctgtgcttcagagctgtcttattaccacaaggccggcaagcatcaatgtccccacatccccctctgcctccccctgaaatgtaccgatttatatgaaaattaagattacaaattaaagcctggctatcctggagttttccagttcatcagccatccaataaaaatgatgtcaagcctgtatgcataattcccgaaagattactttcgtccttacagctaaaccctgtccctgatatgaaagatctctatccacttttattgaaataaagaactaacatcatgatgccaatattgaggcataatcttaattatctcctgaccctgttgaggctcccccaatctatgttactttacatttggtagatgagccaagcttatgcattcacttccattgacataggacctgaatctctcccgttccctcacacctgcttccaaaatgacccttcttgatcagattggtcgtcctattatcatccaacacgtttactagggaatacaacatgagacctcggtaactgacacctgggagatcagtgacgttccccgaactgagagtgagcctctcatgagtcctttactctcaccgacgatcccgaccattatctttctcctctctaccaacacaataccccaggtaagcgccccaacaaacn

SEQ ID NO: 46218 - DNA, 814 bp, Homo Sapiens
tgagaacgtccacaggtctgtgaagccgcagattctgtcagtgtttggtgatattgcccttgctattggaggagagtttaaaaaatacttagaggttgtattgaatactcttcagcaggcctcccaagcccaggtggacaagtcagactatgacatggtggattatctgaatgagctaagggaaagctgcttggaagcctatactggaatcgtccagggattaaagggggatcaggagaacgtacacccggatgtgatgctggtacaacccagagtagaatttattctgtctttcattgaccacattgctggagatgaggatcacacagatggagtagtagcttgtgctgctggactaataggggacttatgtacagcatttgggaaggatgtactgaaattagtagaagctaggccaatgatccatgaattgttaactgaagggcggagatcgaagactaacaaagcaaaaacccttgctacatgggcaacaaaagaactgaggaaactgaagaaccaagcttgatctgttaccattgggatgataacctgaggacccccactggaaatctcccatcttttgaaaaacctggaagtgaggagtgtgcacggatgctgaatgtttgggaatgagaggatgagtgagtgaggcttgaaaacacaccacattgaaaatcctgccacagcagcagccgcagccgccaacagcagcgctgttagtgagctaagtaagcactgacttcgtagaaaaccataacatcggccatcttggaaaagagaaaaacaatggagttacttatttaaaaaaaaagaa

SEQ ID NO: 46219 - DNA, 500 bp, Homo Sapiens
gacttttcagctcagagagattactttgctttgctgggcttgaccatgaaatgtgcctgcatggagaacgtccaggtaaacatgatactcatgtgtgccaatcacaaccctgcacttttgtattgttgcttatggcaaaaaggtgacagagcgagactttgtcccaaaacaaaataggtgaggggatagcgaatgcactcagggtcagcagtggagtttaaaaattgtctcttttcaacttatttaaatgacagcacctgagaagaggaaccgttttacactggatgtttttcatgtagaacaagaaatctttctggaattgatgtttacatgtctgttgttggtcatctctcctgtgtcttaaatactttaatgttggaagagcatagtgtttgggctaggtgggtttttgacaggcccatgggaatgccctgaaactactgtatctgatgtttgttttcgatgaggttccatgttttgttttcttgggaataaattaa

SEQ ID NO: 46220 - DNA, 684 bp, Homo Sapiens
tttttttttttttttcttcaattgatgcaactcagtaatttttattgcaactggaagacaatacatcacagaaactttatggtaggtctggggaaaagtgttatttacaataaatgatgaaatagtttgtctttggcaatatgattacatacgaagaatgcaaaatgcaggtatggatgccttccaagcaacaccaagtccctagagttcggctgatcgcgcctgcctccacactgtttctttaggtttacatgaacataacagaacatcacgttctttctcctttatggttctccctttctattcatgatattggcagtttcatacagaaaatacagaaaaaaaattggcttttgaaaaattattactctcgtaaattaatttggccgtgtaggtctattggccagccaaggtcagacgaccctaagcatcaatagtaaacctcttggtcttctgattgctttatcactttttttttttttctgtaaaacaaaacaaaactcagaaatgttacagaatcagagtattaaaaaatgtacaagtgtatatgcttcccagacacacatggatacatttttcctccacattttcaccatggcagtattaagtagtgagtgtgaatgacacagcatgaaactggttactgaatcagctatgagctcagatggcctcaacatacatact

SEQ ID NO: 46221 - DNA, 928 bp, Homo Sapiens
gaccgaaggagtagaaagaacgggcggagggcgcgggccgaccgggcgcaccgaccatggcctccaaatgccccaagtgcgacaagaccgtgtacttcgccgagaaggtgagctccctggggaaggactggcacaagttctgcctcaagtgcgagcgctgcagcaagacgctgacgcccgggggccacgccgagcatgacgggaagccgttctgccacaagccgtgctacgccaccctgttcggacccaaaggcgtgaacatcgggggcgcgggctcctacatctacgagaagcccctggcggaggggccgcaggtcaccggccccatcgaggtccccgcggcccgagcagaggagcggaaggcgagcggccccccgaaggggcccagcagagcctccagtgtcaccactttcaccggggagcccaacacgtgcccgcgctgcagcaagaaggtgtacttcgctgagaaggtgacgtctctgggcaaggattggcaccggccctgcctgcgctgcgagcgctgcgggaagacactgacccccggcgggcacgcggagcacgacggccagccctactgccacaagccctgctatggaatcctcttcggacccaagggagtgaacaccggtgcggtgggcagctacatctatgaccgggaccccgaaggcaaggtccagccctaggctacagcggctctcatgatgtgggctcacctgcgccccagaccctgcaggggcccccctgcttggctctgctgggagagtgctcagccgcccagtcctgcctgcaagcccagggcgagttattgggaaggagggggcagcccacggggcaagagcaccaatgccccttcccccgaaatctcctggttgtggtcctgccccccttcctggcaattccttcttggggcggtccccatgaattccca

SEQ ID NO: 46222 - DNA, 841 bp, Homo Sapiens
ttaatgttgggtagaaagagatacagaggggctgttgaatttcccacataccctccttccaccaagttggaacatccttggaaattggaagagcacaagaggagatccagggcaaggccattgggatattctgaaacttgaatattttgttttgtgcagagataaagaccttttccatgcaccctcatacacagaaaccaattttcttttttatactcaatcatttctagcgcatggcctggttagaggctggttttttctcttttcctttggtccttcaaaggcttgtagttttgggtagtccttgttctttggaaatacacagtgctgaccagacagcctccccctgtcccctctatgacctcgccctccacaaatgggaaaaccagactacttgggagcaccgcctgtgaaataccaacctgaagacacggttcattcaggcaacgcacaaaacagaaaatgaaggtggaacaagcacagatgttcttcaactgtttttgtctacactctttctcttttcctctaccatgctgaaggctgaaagacaggaagatggtgccatcagcaaatattattcttaattgaaaacttgaaatgtgtatgtttcttactaatttttaaaaatgtattccttgccagggcaggcaaggtggctcacgcctgtaatcccagcacttcaggaggctgaggtgggcggatcacctgaggtcgggagtttgagaccagcctgatgaaaccctgtctctactaaaaatacaagaattggccgggcgtggtggcgcatgcctgtagtatcagctactcaagaggctgaagtgagattatcgcttggacccag

SEQ ID NO: 46223 - DNA, 932 bp, Homo Sapiens
  misc_feature (914)..(914): n is a, c, g, or t
tgcaatgtgctgtgaatgaaggatctggtcccatcacctataagttttacagagaaaaagagggcaaacccttctatcaaatgacctcaaatgccacccaggcattttggaccaagcagaaggctaacaaggaacaggagggagagtattactgcacagccttcaacagagccaaccacgcctccagtgtccccagaagcaaaatactgacagtcagagtcattcttgccccatggaagaaaggacttattgcagtggttatcatcggagtgatcattgctctcttgatcattgcggccaaatgttattttctgaggaaagccaaggccaagcagatgccagtggaaatgtccaggccagcagtaccacttctgaactccaacaacgagaaaatgtcagatcccaatatggaagctaacagtcattacggtcacaatgacgatgtcggaaaccatgcaatgaaaccaataaatgataataaagagcctctgaactcagacgtgcagtacacggaagttcaagtgtcctcagctgagtctcacaaagatctaggaaagaaggacacagagacagtgtacagtgaagtccggaaagctgtccctgatgccgtggaaagcagatactctagaacggaaggctcccttgatggaacttagacagcaaggccagatgcacatccctggaaggacatccatgttccgagaagaacagatgatccctgtatttcaagacctctgtgcacttatttatgaacctgccctgctcccacagaacacagcaattcctcaggctaagctgccggttctttaatccatcctgctaagttaatggttgggtagaaagagatacagaaggggctggttgaattttccacatacccttcctttccaccaaggttgggaacatcccttggnaaattggaaaagagcaca

SEQ ID NO: 46224 - DNA, 850 bp, Homo Sapiens
tgatttcatagcagcagtcactaaattggaaacaaaaggttgcaacgtgacaaaaaaaattgtgtagtatttaccagcaccattcagtaatacagccttaaccatacctccttgaactacttcataacttgtcaagaaaagcagtttgcagcaagggcatgtggtgtgcacctagtattaaaattgctttgtcttaaaattgaacatgaggatattaaaaatacattgtgaagaagactgcttatctcagagtgaagatactgcggctgaaaagcactagtttgatataaaattaaaatgaccaaaaccctccaactttgaagctaaagaaggtaaacctttccattattgcattacatgttgtggaatctctcgagtgcaaagactgtctagttatttatcaggctatttctactgatgaactgcttcaggtgggggagggaaacttatttttatttgcctgatttaagtgtctgagaaacaaatctttgttctcttaggctgcaatggaacaactttaccagggttttggcatttcctttcctttcctttataaaacatgctcagcaaactgcaccagttaactacagtttggtaaattgttatgttaacaattatgacatctgcaatgttttataaagcaactaatttaataaaatcactgttgtgaggacttaaattttgtgttacctcccaagagatactttttgagagtatagaacacagctcttgggagtacagttctctacgttctctactaaatcttaataaatgcttgacatagttacagcctttaaaacatgaagtgatttgccaagtccttaatgttgtcacccatagagcaaccaag

SEQ ID NO: 46225 - DNA, 571 bp, Homo Sapiens
aacatgttttgctatgacaagaacttggactgtagtccttccccctctcaagaatgtgacatcacaccttatcagatcctacgagtgagctactgacctcaaccactgaacttcaaactatgtaaaaacctaagggttcgacagacactttgagagcttgggctgtggcaagctacactctgtcagcctctcttcgacagggccccaccctgctagcctttgaacttggaagcatcgcccacaaacaccagtgccaccctctagccttgagggaccatatatgtctctgtgaatctccgttgcattggacagcttctctcccaagagctgctcttataaaagagacacaccacattttaatgaggcttcgctctccacagaggcctgcttccatcctaattgagcaagtagactttagtaactttggaactcactcaccccgtgactaatacaccctgtctacccagcgcattccctgtgagatttgttcatgttgttctccccctccttaagcattgtgaacctaggaaaaatatcatctctgtagggcaataaaccatgtgatttgtga

SEQ ID NO: 46226 - DNA, 462 bp, Homo Sapiens
cacttcttaagctgtacctccgagaacttccagaaccagttattccttatgcgaagtatgaagattttttgtcatgtgccaaactgctcagcaaggaagaggaagcaggtgttaaggaattagcaaagcaggtgaagagtttgccagtggtaaattacaacctcctcaagtatatttgcaggtttcatcaaagacatttgtaactgaattctgttagaaaaataattgtgccagaaaaataattgtgcctggaaaatatacctctcaatgtataactcaagacctgggatgggatatgccatatatgtgctcctgtttaagaaaccaaatatgcaaaattgaaacagaataaatttaaatagagagtgatgattggcactacaagtcactgcagggtgtcttacatgatagcttcccagtccattttaaaataaaattcaaagttttaaaaaaaaaaaaaaa

SEQ ID NO: 46227 - DNA, 821 bp, Homo Sapiens
  misc_feature (669)..(669): n is a, c, g, or t
  misc_feature (712)..(712): n is a, c, g, or t
aggaggcgatcgagatcggatgacagcaaatcatgaaagctacctcctcatggcaagcacccagaatgatatggaagactgggtgaagtcaatccgccgagtcatatggggacctttcggaggaggcatttttggacagaaactggaggatactgttcgttatgagaagagatatgggaaccgtctggctccgatgttggtggagcagtgcgtggactttatccgacaaagggggctgaaagaagagggtctctttcgactgccaggccaggctaatcttgttaaggagctccaagatgcctttgactgtggggagaagccatcatttgacagcaacacagatgtacacacggtggcatcacttcttaagctgtacctccgagaacttccagaaccagttattccttatgcgaagtatgaagattttttgtcatgtgccaaactgctcagcaaggaagaggaagcaggtgttaaggaattagcaaagcaggtgaagagtttgccagtggtaaattacaacctcctcaagtatatttgcagattcttggatgaagtacagtcctactcgggagttaacaaaatgagtgtgcagaacttggcaacggtctttggtcctaatatcctgcgccccaagtgggagatcctttgactatcatggagggcactgtngtggtccagcagttgatgtcagtgatgattagcaaacatgatngcctcttttccaaagatgcagaactacaaagcagcccccaggatggagtgagcaccaccattggatattcagaagaaagccaccatgggggcaggtacaggacaaggag

SEQ ID NO: 46228 - DNA, 517 bp, Homo Sapiens
gcacgaggagttagcccccatagaatgtgaccctgtctgcagagtctcatttacccctctttttctcattgtcatttgttggctttattagggctgtcttacaggatcatgttggcatttactatcatgtctttatcataaaccatgtttgtttgaggtagaagaatcaccatataattcgttgcccaaattgggactattgagagagaaaggggatgctattaattacaccagatcaaaaggcataaaccagacctgtcccaggccgatgtggaaatatgttctttctagttgtgggtaccctgatctaggtggtttgtaattgtgcattactgactgcatatgtttgtgtatgtgtaaatgtgggctccctgttaagtggggctcatggatacgaggcctgaggaagtgtggcttgctagtctgttacgttaacatgcttttctaaaattgcttcacgtgttaattcatttactcctgcattcattgactgtttttgttcttttccattcacttt

SEQ ID NO: 46229 - DNA, 642 bp, Homo Sapiens
ttatttttcagttaacgcacgcacagacttacatgtcaagagtggactttagactttcatgtgttaagttgcttgagttacaccttgtgacccttctcccataacatggtgtgaggacggactgggagccggtacagactccagtgtttacagccttgctttcctcccaccgaccctggccccaggctgccccgggcctggcgggccacccctctctatgcaaacacgtaaaagccatgaatgctggaatccaaaactgacgaggtttatttttttcagagccagtggctggtcttccatttacagtgtcactattccctgacggagctgttatgtgccgctctagcgaaggccccagccgggatgctaggcctaattgttcagcgtggagatggcaactcacgtggtgccctaggtgcagctgcgtggtctggtatacatgctgcaaaattcacccagttcccctcattttaatttttctaacctacagcttaattttaataactttaaaacacttctaaatatttattttggcaccagcgtcaagacaaataatatcctctcccattattttcataagtaacacagattccctgatttttaaaaactaaaaatacagctaaacctttcttatgtataaaa

SEQ ID NO: 46230 - DNA, 677 bp, Homo Sapiens
  misc_feature (628)..(628): n is a, c, g, or t
atgtttttgatgtttaacttctttttacataatttatactaatagtaattattattacggttaaggtaacgatgccaagtctgtaagcaagcagtatactttgaaagtaacaaagctagagcatgatgcagaacaggcaaaagtcgaactaactgaaacacaaaagcagctacaggagctggaaaacaaagatctttctgatgttgcaatgaaggtaaaattacagaaagagtttcgtaaaaaggtggatgctgcaaagctgagagttcaggtcttacagaagaagcaacaagatagtaagaaactggcatcactgtcaatccaaaatgagaaacgtgctaatgaactagagcagagtgtagatcacatgaaatatcaaaagatacagctacaaagaaaactacaagaagaaaatgaaaaaaggaagcaactggatgcagtaattaagcgggaccagcaaaaaatcaaagtaatattgtcatacattcctgctaagtataatatgaaatgttaaacggctcagagctaacgaatccatggtcttcattcagttggcttgtgaagtatctatccttgacttgcccttcactgctgtccttattcactttaaagctttgttcatctacantagtaaacctatttaatgaaaaaaaaaaaaaaaaaaaaaaaaggacgcg

SEQ ID NO: 46231 - DNA, 640 bp, Homo Sapiens
gcaggctttctttcatgcactttactcatagcacatttcttgtgttaaccatccctttttgagcgtgacttgttttggccccatttcttacaacttcagaaatcttaatttaccagtgaattgtaatgttgtttctcttgcaaattatacttttggtttagaaagggattaggtcttttcaaaagggtgagaacagtcttacatttttcttttaaatgaaatgctttaaagaatgttggtaatgccatgtcatttaaagtatttcatagataattttgagttttaaagtccatggaggtgattggttctctttacacattaacactgtaccaagctttgcagatcttttccgacacacatgtctgaagacttattttcaaagacagcacatttttggaaactaatctcttttccgtaatatttcctttatttcaatgattctcagaaggccaattcaaacaaacccacatttaaggttctttaggattatagaataaattggcttctgagtgttagctcagtgagctaggaaagcaccaatcgatatttgtttcctttagggatactttgttctcaccactgtccctatgtcatcaaatttgggagagattttttaaataccacaatcatttgaagaaat

SEQ ID NO: 46232 - DNA, 1010 bp, Homo Sapiens
  misc_feature (860)..(860): n is a, c, g, or t
  misc_feature (878)..(878): n is a, c, g, or t
  misc_feature (925)..(925): n is a, c, g, or t
gctgggtaccggtccgggaattcctcgggatcttataacaccgttattagctggtactttggtgatttctattactagtttttctaagctatttacagagtgtttgtagctttcatttgcagcattatgttcccacaaattctgtactcagcatatacagtatagtttatctgctctatttctgtcttatagaaatcatgaatgtggtctgcagacattgatgaagaaaatctgttggtaattgatacatgggctaaagcatcagaggtttaatttgaagtttatgttcacacactgaaaacttagtttttttgttggtagatccatgtgcatgctagaatttgggacaggcactatttgcataaagtattaaagtcaatttttaaactaagcaaaggtacacgttgtaacggtggggcatctgtgaaaaagatgtccctttcataatatatgcaatatattccagatgttttgagagattacagaagaggaggcctgcttcacttgcagataagtttattataattctccagaaatgtgcaggatgtgcattagcaaattgcactgtacttttcactccagcctgggtgacagagcaagactcccgtctcgggggcttaaaaaaaaaaaaaatgctgtatctaaatgaatctgtgtaattgggcccagatgtgggtttgctcagtattagtagacaaggtctttgttcagacgattaggtgcctaactggcaaatgccttagtttcttaaaacgtattttctgatgtggctttacatttcaaaagtgaacttgattcaccttgagaaaactgattaaaaaaattagtttaattttgccagcagggaagtaaaataattnatggggaagagtgtcttnaggcctaaatatttaaatcagtttttgttaagagggaaaaactcaantaggtcttgttactttaagctgtttaaatccaagattgaatttttggtgccaaacgccaaaatttttggtttaacaatttaggct

SEQ ID NO: 46233 - DNA, 596 bp, Homo Sapiens
aaaagagtctcttaaaaacacggagcccctgaacacatcttattgtcacaaataaatgactaagtttagactaaatggttgcattaggaatttgacaaccaaaattatatcgctgtattccaggaaatccgttcttgaaaaatgtaaaaaagacccacttagactaggttgaaacatataatgcaaaatataatgctctgctatagaaaaacacaaacatgtatatggcttaatttcttaaagatgattcttttagccaattgtttacaaaggtagaataattcaaaataattttatttttttttacaaagagcaagtacaggagctgttcaagatcatgtattcaatcaaaatgaaatgtgacttgtaccgactgctgaagttgtcttgatgtttgagagacttgaaatctgtgaagaaatttgaatagattaccttttataaaaatagtagtagtctttaagtgtagaatactgcctaactctggaaatgtaggaaaagtcagcattctttaggttcaagatattaagtttaaatagcagctgaatgtggcctcatggcaaagcataaagaccttttttttccttgaaaaggaa

SEQ ID NO: 46234 - DNA, 741 bp, Homo Sapiens
attttattcaggtttctgcaaaaaataaaaagataacttttttaaacaaacatgaatagaattttgcaaatttaacgttttcaagatttattcaaggaaacaaaatgcctatgttcaaccactggtgttaatgaacaaagatactgtgcgtctctggggaagacgcacctaggtggcggccactcccatggccttgtctagggctcagagaccactcggctctgagcttccaggcgcctcgtctgtgtgcatctcacgcccgacgtggcttctgaaacgtgcattcaacctcaaacttttgcataaaatagaatgaatcgttttgctctgatgaaatgtaggccttacttgtatataagactgttcctgccttcggtctgtcattttcccacctgcctcccctacccaccccccacccaccacctggggcttcctctgggggtccgagggtcttcccatcacatgaagacatcaggttgggtcctgccccactgcccctccccctgttcctgccccaagccgtcaatcagattgtggagcagtacacagtcagatgaaaatactgtaaatgcactcattgggggttttttggttttacttcatatcatgtgcaatgttgtggctttaacattttatgcaactatttatgaagacctctgttgtacctgtaataaatatatagaaaaagcacatacttcgtatggtgagctttatggttttgtgtgtgtgtgttggggttgg

SEQ ID NO: 46235 - DNA, 713 bp, Homo Sapiens
  misc_feature (705)..(706): n is a, c, g, or t
aatataaaactggataataggggaatgttttaaaatttattatgctattattcagaatgccaaagtattattttttttcccaaaatcagtctggacatttactaccttttagactttttgacgttgaactttctgtataaaaattggctgggttttgagcttttggtaagaaataaaagccgattaagcactggccgccccgcggctggtacccaatgcccgagtcactgtggcagcattcgcactggtgtggggagtcctttcaactcaaggaggctgggtttctgggcaccctcgaagttttctggatgtctttttatctttctcgtgtgaactgcactacaaaagagaccagcccgcttcccaagccagccagacacctgggtcttgagccataaactggcgtagttaagctttgcagcttccagtgtattttatttattcttttgttgggtttttgtttgtttcttcttgtaaaattgtacagaaactttttaaaagaaattggattcgaaactggatgtgtattcgtaacctcataatttttatttgggtattggttcttttattatttcagttaaatttttacattattttgcatgtatatttctttgtacagagaccttacatgtttacacagtatgatgtgatgtaaatattttattttgccatcagttattttaaaaattaacatatttgcctaannaaaaaaa

SEQ ID NO: 46236 - DNA, 689 bp, Homo Sapiens
ggggggtcttcacggcttctctgcccaggggcccgaaccgaggaggccaggagggctgctggggctaaggggtctaaggacctcgttgcacacgctaccaggagcaggggcatggagcacagtgagggggctcccggagacccagccggtactgtggtaccccaggagctgctggaagagatgctttggttttttcgtgtggaagatgcatctccctggaatcattccatccttgccctggcagctgtggtggtcattataagcatggtcctcctgggaagaagcatccaggcaagcagaaaagaaaagatgcagccaccagaaaaagaaactccagaagtcctgcatttggatgaggccaaggatcacaacagcctaaacaacctaagagaaactttgctctcagaaaagccaaacttggcccaggtggaacttgagttaaaagagagagatgtgctgtcagttttccttccggatgtaccagaaactgagagctagtgagggttcagagaagccccatcctaagccagacacatgatgtgggctcagctcagtggcctgaaacctctcaggttttagagtctctcccaagaagccgcttttttctttttctttctttctttttttttttcttagcagatacaatgaatgaactgcaagcaaactaaaattctgttattaaaaaaaaa

SEQ ID NO: 46237 - DNA, 861 bp, Homo Sapiens
tggaaggcgtggaccatctggttcaacagggcatcgcgcacagagacctgaaatccgacaacatccttgtggagctggacccagacggctgcccctggctggtgatcgcagattttggctgctgcctggctgatgagagcatcggcctgcagttgcccttcagcagctggtacgtggatcggggcggaaacggctgtctgatggccccagaggtgtccacggcccgtcctggccccagggcagtgattgactacagcaaggctgatgcctgggcagtgggagccatcgcctatgaaatcttcgggcttgtcaatcccttctacggccagggcaaggcccaccttgaaagccgcagctaccaagaggctcagctacctgcactgcccgagtcagtgcctccagacgtgagacagttggtgagggcactgctccagcgagaggccagcaagagaccatctgcccgagtagccgcaaatgtgcttcatctaagcctctggggtgaacatattctagccctgaagaatctgaagttagacaagatggttggctggctcctccaacaatcggccgccactttgttggccaacaggctcacagagaagtgttgtgtggaaacaaaaatgaagatgctctttctggctaacctggagtgtgaaacgctctgccaggcagccctcctcctctgctcatggagggcagccctgtgatgtccctgcatggagctggtgaattactaaaagaacttggcatcctctgtgtcgtgatggtctgtgaaatggtgagggtggggagtcaaggagacaagaccagcgcaaagagggcctggtttagcccgggaaaaggcccctcggggctttggca

SEQ ID NO: 46238 - DNA, 684 bp, Homo Sapiens
cggacgcgtgggtccggacgcgtgggaaataaattagtttagaacagaaagtggctacttgccattttgacatcaactcattttgcgaggcttaggcagctagacatcgtttaaaacaaaatattaacttatattacatgtgtatctatctattgtcagtcgtctctcagttcttgaggtatattattttaatcattccatgccttaatatgcttgcaatacaagaatatcttcagatgggtgaataccaaaaggctttcagtttttagtcagaaatcaagcattgggctgtggtagccaaaaaccataggttagctaaaaagatcatgatacaattattttattaagtcatggttaataacaaatgaatccagacttgtctaacagattttccatcaacaaatattgttatgtgcaaaagtattgcctatgttgttttacacaccactgcattaactagaactgctgagaggactgtatatatgattttaaacctaagttgattttttttctcactcttgaaaggagtgcttctttgtgaaagcagttcttacagctttgttttcaaccagctaaaaatgttttatatattactctaacctgttgtcctccacattctattgtcctaattgtactgttttctgatttgtatttatgtcttgagacagtaactttttgaataaa

SEQ ID NO: 46239 - DNA, 719 bp, Homo Sapiens
gatgcagacaccacaactcacctccactattatgagagagcccaaaagattacggcctgaggatagcttcatgagtgtttatccaatgcagactgaacatcatcaaacacctcttgattataatcggcgtggcacaagcctaatggaagatgatgaagagccaattgtggaagatgttatgatgtcctcagaagggaggattgaggatcttaatgagggaatggattttgacaccatggatatagatttgccaccatcaaagaacagacgagagagaacagaactgaagcctgatttctttgatccagcttcaattatggatgaatcagttcttggagtgtcaatgttttaataccagtacacaattaaatctgtggtgaagtcattttctaagtggaagaggaaattttaaagtgtggtagatacagtgaaattctgtacagatttttctctaaggagaatatgacatgcttatgcttaccaagatcaagtgcattgaggggcagttttgtttgcctgaataaacgtaaaggacaagtaaacaatttgatgataagctacagtttttcttagaaagtaaatattttatttatgcgctgttagttggcttttgaatcgattatttcatgctttttttagaaaagaaaaaaacaataacattgaaaaggcttggggcacgatttgaattctcttacatttaatacgggttgactaaatag

SEQ ID NO: 46240 - DNA, 744 bp, Homo Sapiens
catgctgacctccgcaagttggcagtcaacatggtccccttcccacgtctccatttctttatgcctggctttgcccctctcaccagccgtggaagccagcagtatcgagctctcacagtgccggaactcacccagcaggtcttcgatgccaagaacatgatggctgcctgtgacccccgccacggccgatacctcaccgtggctgctgtcttccgtggtcggatgtccatgaaggaggtcgatgagcagatgcttaacgtgcagaacaagaacagcagctactttgtggaatggatccccaacaatgtcaagacagccgtctgtgacatcccacctcgtggcctcaagatggcagtcaccttcattggcaatagcacagccatccaggagctcttcaagcgcatctcggagcagttcactgccatgttccgccggaaggccttcctccactggtacacaggcgagggcatggacgagatggagttcaccgaggctgagagcaacatgaacgacctcgtctctgagtatcagcagtaccaggatgccaccgcagaagaggaggaggatttcggtgaggaggccgaagaggaggcctaaggcagagcccccatcacctcaggcttctcagttcccttagccgtcttactcaactgcccctttcctctccctcagaatttgtgtttgctgcctctatctggttttttgttttttcttctggggggggtctagaacagtgcctggcac

SEQ ID NO: 46241 - DNA, 741 bp, Homo Sapiens
gggttcagtataatgatccatatgcagatggggatcctgcttgggcccccaagaattatattgagaaagttgttgcaatatatgattatacaaaagacaaggatgatgagctgtcatttatggagggtgcaatcatttatgttataaagaagaatgatgatggctggtatgaaggagtctgcaatcgagtgactggtctgttccctgggaactatgttgaatcaatcatgcactatactgattaatttttttttttcttttgaagtagattcttattactcagtcatactgtgggactattatggttaacagaactgtcttaatatgttttaaaatgtgcccatattttcagaacatgctgttttattggtaaattgaatgtctacctgtaagcataaatctttgaggcagtttatgtattgctgaatagcaatttatacaagaagctgtccataactgattatgcttatgtacttacttacacatttttaactttatgaccagcctaaatattctgggggaagtggggtataatatttaacgaatcatgattcagattgtaccattacatgtttcagtgcagcatggttactaacgctatgtcagactaatattaaaatcagaaaatttaaatgctggtgctggtcagactttttttgttagattctctcatttaaaaaaaatactgtttgtttaaagcatgcataaaaatttatgtattgaaatatacttaaaaattca

SEQ ID NO: 46242 - DNA, 627 bp, Homo Sapiens
tgatttgtgagtaggcactctttaatccattacctggcactagcaacattagaattttaaaataaaataattgggaaagaaggtgggtcatgtattaatcagtgaacagagatttacctaaccaacagacttggattgtcttttgacataatcaaaatgcaacacatgcactttgtgtgtctcctcttaattgaagggagggctgagggatgttttctcttcttgtcttgtgtataattctctattgcttaggatattaaagtagagcactcaagtgtgggtttctgtgttattgaggatttgtttggaattcaaattacagttatgtactggatgctacagacttataacagcatagtgaatggtaagactagtgcaaaacagttatttctgaaaattaaagaccattattgctaccaaatcaatgtgactatttcatatgcattttgcctttgttaattttaaacaaacaaagtatcattagtgatcagctagctaccttctactttccatttttcaagtggattgttctcttaatttgtatataacctgttgtctaaattttatgtacagtcttttataataaaccattctcctatatgaaaaaaaaaaaaaaaaaaaaaggac

SEQ ID NO: 46243 - DNA, 617 bp, Homo Sapiens
gagagccttctgtgcccctggccagctgataatcctaggttcatgacccttcacctcccctaaccccaaacatagatcacaccttctctagggaggagtcaaatgtaggtcatgtttttgttggtactttctgttttttgtgacttcatgtgttccattgctccccgctgccatgctctctcccttgtttccttaagagctcagcatctgtccctgttcattacatgtcattgagtaggtgggtagccctgatgggggtcgctctgtctggagcataacccacaggcgttttttctgccaccccatccctgcatgcctgatccccagttcctataccctacccctgacctattgagcagcctctgaagagccatagggcccccacctttactcacaccctgagaattctgggagccagtctgccatgccaggagtcactggacatgttcatcctagaatcctgtcacactacagtcatttcttttcctctctctggcccttgggtcctgggaatgctgctgcttcaaccccagagcctaagaatggcagccgtttcttaacatgttgagagatgattctttcttggccctggccatctcgggaagcttgatggcaat

SEQ ID NO: 46244 - DNA, 468 bp, Homo Sapiens
aacaaaacagataatggtacataccgctgtgaagcttcaaacatagtggggaaagctcactcggattatatgctgtatgtatacgatccccccacaactatccctcctcccacaacaaccaccaccaccaccaccaccaccaccaccaccatccttaccatcatcacagattcccgagcaggtgaagaaggctcgatcagggcagtggatcatgccgtgatcggtggcgtcgtggcggtggtggtgttcgccatgctgtgcttgctcatcattctggggcgctattttgccagacataaaggtacatacttcactcatgaagccaaaggagccgatgacgcagcagacgcagacacagctataatcaatgcagaaggaggacagaacaactccgaagaagagaaagagtacttcatctagatcagcctttttgtttcaatgaggtgtccaactggccctatttagatg

SEQ ID NO: 46245 - DNA, 871 bp, Homo Sapiens
gggccttttgggaacggactggtatgtaaaagaaaatccgttatcgagcagcattttatttacccctcccctatccctaggcacttaaccaagacaaaaagccacaatgaacatccctttttcaatgaattttataatctgcagctctattccgagcccttagcacccattccgaccatagtataatcatatcaaagggtgagaatcatttagcatgttgttgaaaggttttttttcagttgttctttttagaaaaaaagaaaaacaaaaacaaaaacaaaaaaaaaaaatcacaccattgctcacagaattggcatctcatttttgggacctcccatctttctgttttgaaaagtgtacagtagtgcagtgttcctgatgtaactttatggcttacaatgttgacatgtctcaggttcatgtgttgcgattggtgttttccgtctcaggtagattgcaaagtgtaggccccacacattggaaaaaataataataaaacaaagcaaaaacaggaaattatggattttagttgtatattggtttatgtattttttcttaagtatacagtgcactgtttgaaatgtattgttgagtattactttgtacaggttgatcactttttttagagtgaagaaagaacaaacttgttttttgtgttttttaaaggaatataaaataatgaaggatgtataattgatgccaaataagcttgttctttagtcacaccgacgtcttatttttccctttaggccagttctgtttttaaggtgtacatggacaatgttacagtgtaagaaactccatatccatatgttcccattcgcattttgtattggttcatgtataccatttttacaaaaaaaaaaaagaa

SEQ ID NO: 46246 - DNA, 701 bp, Homo Sapiens
gatcctcgcatgatggcaggccatagtgcatagctactaaaatcagtgaccttgaacatatcttagatggggagcctcgggaaaaggtagaggagtcacgttaccatttacatgttttaaagaaagaagtgtggggattttcactgaaacgtctaggaaatctagaagtagtcctgaaggacagaaactaaactcttaccatatgtttggtaagactccagactccagctaacagtccctatggaaagatggcatcaaaaaagatagatctatatatatatataaatatatattctattacattttcagtgagtaattttggattttgcaaggtgcatttttactattgttacattatgtggaaaacttatgctgatttatttaagggggaaaaagtgtcaactctttgttatttgaaaacatgtttatttttcttgtctttattttaacctttgatagaaccattgcaatatgggggccttttgggaacggactggtatgtaaaagaaaatccgttatcgagcagcattttatttacccctcccctatccctaggcacttaaccaagacaaaaagccacaatgaacatccctttttcaatgaattttataatctgcagctctattccgagcccttagcacccattccgaccatagtataatcatatcaagggtgagaatcatttagcatgttgttgaagg

SEQ ID NO: 46247 - DNA, 606 bp, Homo Sapiens
ctgaatttaggtgacactatagaagagctatgacgtcgcatgcacgcgtacgtaagcttggatcctctagagcggtcgcctactactactaaattcgcggccgcgtcgacgggcaatcctattctcccagtagagttctgatcacagagaatgacgtgaaggagggcctacagcgatcccacattttatatgaccgggcaggtaagtaattcacctgtggaaagagtgaaaccatacggaaagaagtgtgtgcacacattctcatttccggaagcctgactgggttccggaagcattccagctgggtccagagcattccagtgattctcaggtggatctgcatgttggtattaagccttctacacagggctgacctttccgaagagaggcatgaagcagaagctgccctgttgagaatctagaggagttttggggttggaaatggcaggctgcacattcaccttagaaggtagttggctattccccaccttgcagaatacaatcacctttgaaagcctgtgcattcacttgacaatgaatatgttttgtgatcatttaccacggccgaaaataaaaagaggacttttgtcataatgacttattagg

SEQ ID NO: 46248 - DNA, 532 bp, Homo Sapiens
ttttttttttttattcttaaaaacattccatttatttacagatgtataaaaaggtgaattattggtctattgagatcatgcttcttatagtgttagggtgagagctcactgtcttccacgttcctcaactcctctcactcaacttcacctttcataatcacacatgtaatattcatagatcagttccccctagggtaaggttaaagggtaggagtttttggagattttagatttctgtcaagactgcaggattgttctgaagactaagccctcctcaaattatccctgacaacacctagttctaagaggtcttgagaacacagtatcttgggggttagaatggtatctgcagccttccccctaaaacgcctggaatcatccctcatttccatcttcgtacaactctcatcaagagtcaaatggtatctccaatcaagaatcattacctgtttacctatattcttcttaaaaaaaaaaaaaaaaaaagcctacagccgcggccgctccaacatcagaatggtaaccctcgtgc

SEQ ID NO: 46249 - DNA, 453 bp, Homo Sapiens
ccggttcgcgctggccaaccacctcatcaaggtcaagctggagggccacgagctgcccgccgacctgcccccgcacctggtgccgccctccaagcgcagacatgagtgatggcgcccggccccgcacctgccatttgcacgcccggccgggaggcagagacggggggaggggaagcctcaccatttctcaaggtccataaagactgagcggatgtttcctcgcctctcgaaaaggaaaaccaccatctttcttttaaggctgttcctgggcctggcgggggaggcaggggtgagaggatggaattgtgtgcacaagaactgtggctattttaatatataatgttagaggctgcgttctttgtcgccgcctcccctgtgtgccagccctgtgtgcacggcctctgccccccggcctttgctgtggctggagctggacagtgcagtgactgcgac

SEQ ID NO: 46250 - DNA, 629 bp, Homo Sapiens
ggcctctgccccccggcctttgctgtggctggagctggacagtgcagtgactgcgaccgtgggggagccaggtcgcccttttggcagctgctaggctgaggctgcatggacaggaacaccaggcaccctccgtgtgcttctgagctgaggttgcttcacgggaccgtggcttccttcctcacctggctctgcctcccccgtgctctcgggcgaagtgggttcttgtgccttcccctcccgggcccaggctccccgtgcgcgggccctgccctttcctcccgcgccccaccggctccgacgcgcaaccccgctcagcagtcacagaagcagggcccagccaccttggtctttttttgggagttcaggggagtaggagaatgtcttccagaaaaatacataagctagtttctgttctgtaaagtgatatctttcatacttgaccaaagttcccaataacttcccaaccactgttcaaaagctgtgatttttgtctccccttcccaccctccagccaaggagcagccctgcccagggggcattaggtgtgggtacccggggagcaccccgttcctggaccccagtgttgcatttcctggctgaggaagggtggtcatcccagctcctgccct

SEQ ID NO: 46251 - DNA, 674 bp, Homo Sapiens
  misc_feature (628)..(628): n is a, c, g, or t
  misc_feature (656)..(674): n is a, c, g, or t
ccacagtgggaggtggtggtgggtggcggtggcggggcctcacgacagcttggtgctggtaagaggaagcccgtggttctggctaggctctcatgtccagacagcggggaccaggggaaaacccagccccttctgtaatcccccttcatttcctaccttccttcctcctctgtttagcaaggagggcagctcacttggatgtccttacaacgcccctggccccaggttgagcaataagaaaccagaaccttgcggcccagtggcccgggccagttcaggccgcctccccctcctctgcctggggccattgagcccagcctccagggcccgggtgcgtttgcaggccagtggccactgtccgggctgtgatggcaccaaggcaggtggagcaccaggtaccacacagctgggcttcccaccaggctttcccgcgggggtctcagggagcttctccccagcgctgctcggagtctgcaggaactggccttgttctccttagcccgtcactccatacagtattaggtgaggatggatgcgggcgctgtccttgccgggaagtcactgttgaagttgcagtggcttgttcacacctgtgggaagagaagtgaagactttctccttgcattanaaagtctgaactgtgaaaaaaaaaaaannnnnnnnnnnnnnnnnnn

SEQ ID NO: 46252 - DNA, 732 bp, Homo Sapiens
gcgcgcggctgaggcgaggtcgctcggcgcagctgttgcggggccatggcggggaccgcgctcaagaggctgatggccgagtacaaacaattaacactgaatcctccggaaggaattgtagcaggccccatgaatgaagagaacttttttgaatgggaggcattgatcatgggcccagaagacacctgctttgagtttggtgtttttcctgccatcctgagtttcccacttgattacccgttaagtcccccaaagatgagatttacctgtgagatgtttcatcccaacatctaccctgatgggagagtctgcatttccatcctccacgcgccaggcgatgaccccatgggctacgagagcagcgcggagcggtggagtcctgtgcagagtgtggagaagatcctgctgtcggtggtgagcatgctggcagagcccaatgacgaaagtggagctaacgtggatgcgtccaaaatgtggcgcgatgaccgggagcagttctataagattgccaagcagatcgtccagaagtctctgggactgtgagacctggcctcgcacaggcgcacacacaccgccaatcagctcagcattctcccccggcacacttagtgacagtgatgctctgtgctggtaccaaacaaggcagacttgcaagaaccacggcatcttttttttttttcaaacctttcctacttcaaacaggcttctcttctgaaatgatgacttaatgtc

SEQ ID NO: 46253 - DNA, 581 bp, Homo Sapiens
gttctctaacagggccagctgagcagcacaggccaggaggccacagtgtaagcaataacagatctgccacatgcagaagcaaatatcaggcctgtcgcacacgggcggcatttaaataggaatttctatttttgaaataagggatggtctatgaggcatacagtagatttgatgtgatccttttctccctcccttccataatggatcgtggtctgtgtgactgaacccacacagagtgtcatgggtgacagtttctggttgaagtagctccacgctgggcttctgtggacagcagattcttttccttctcacaaggggctcatttaaaatttggaggctgggtgctgtggctcacgcctgcaatcccagcactttgggagactgaggcgggcggatcatgaggtcaggagatcgcgaccatcctggctaacagtgaaaccctgtctccactaaaaatacaaaaaattagccgggcgtggtggcgggcgcctgtagtcccagctactctgaagactgaggcaggagaatggcgtgaacccaggaggcggagcttgcagtgagctgagatcgcgccactgcac

SEQ ID NO: 46254 - DNA, 541 bp, Homo Sapiens
  misc_feature (537)..(537): n is a, c, g, or t
  misc_feature (539)..(539): n is a, c, g, or t
  misc_feature (541)..(541): n is a, c, g, or t
ggtaccacctgacctgcagggatgtgattgggaaggaattgcagaaacagggccgccaggaagctctcgagtggctcatcagagagacgcaacccatctccaaacagcattaataaatacctccccggttttgtttttgtaaaatgctctggaggaaggaagaaacgtggcagatccctgacatctttcccctttcctttccttcttccctacctcccctttttactttagactttaagaagaacagaaaatcttcttatcctctttgatattttattgcaaacactcagtcttttatgattttttaattgttgagaacaagccaagaataaaattgctgcaccagaaggagggtccctccaaagttgaacacttggtgaaaggaagatgccccgacttctttggccagtgatggggaatcagtgagtgctccatgatggtcatgttccaggtgctagtacatcattcatgatcaccttaatgctcatgagactatatttatgatcagtgaataaaaatgtcagaactgtgaaaaananan

SEQ ID NO: 46255 - DNA, 714 bp, Homo Sapiens
cacgcgtccgattaaatatccttgtttacagaagagaaacaaacaagccccactcagctcagtcacaggagagaacacagaaagtcttaggatcatgaactctgaaaaaaagagaaaccttatctttgctttgtggttcctttaaacacactcacacacacttggtcagagatgctgtgcttcttggaagcaaggactcaaaggcaaggtgcacgcagaggacgtttgagtctgggatgaagcatgtacgtattatttatatgatggaatttcacgtttttatgtaagcatgaaacacaggcagtatgagagaaagcaaggcccgtcatgctgtccgtacactacgtatgctgtagagccattttgtatgttgtgtaaaacaaaaagcattgatgaaaaagcaaaaggtgatgtatgtatatgagaaaattaattgtacgatatcattccagtacgttttgttgtacattttagtcttgtttactttctcttcattgttaagaggatgcgaactgtacagtttccagctagttacccatattagagaagaaataagagagtattagaagaaaacaggagagaaagaacatttgtgaattgcagttgtcaaaaaaaaaaatagcctagctggccttatttgtgaagcataattgcttttagcatatggaagtattttttcacattttctttgtataaaatttgtattaaacttaa

SEQ ID NO: 46256 - DNA, 744 bp, Homo Sapiens
gccgctctacaaccagcaggtgggcgactgctgtatcatccgcgtcagcctggacgtggacaatggcaacatgtacaagagcatcctggtgaccagccaagataaggctccggctgtaatccgcaaggccatggacaaacacaacctggaggaggaggagccggaggactatgagctgctgcagattctctcagatgaccggaagctgaagatccctgaaaacgccaacgtcttctatgccatgaactctactgccaactatgactttgtcctgaagaagcggaccttcaccaagggagtgaaggtcaagcacggagccagctccaccctccctcgcatgaagcagaaaggactcaagattgccaagggcatcttctgagggcatcctcccagggtctggctggctggtagccaagcacttatggaccagagtggcccaggccagctgggcgccttcctcccacctgccagcccagggtaccccagactccagtttcatcctgaacctctcccgctgctgggattgacgcctgccattggtcaggctgacctggcctcccgtggaccactcgctgccttaggtgccttctgctctctggaaccagaggactagctgacttttgccaaggagcagtgccaacgggcatggcatggtgccctgcctgcccccgggcgccacctctgtacacttccctgacaccttcccaggtgtgggtcactgccacctgtgcccatgggcacccc

SEQ ID NO: 46257 - DNA, 720 bp, Homo Sapiens
acgcgtccgcgagaacgacatcacccacttctacatgctcactatagacaaggaccgtataatagacgctggccccaaaggaaactactctcgatttatgaatcacagctgccagcccaactgtgagaccctcaagtggacagtgaatggggacactcgtgtgggcctgtttgccgtctgtgacattcctgcagggacggagctgacttttaactacaacctcgattgtctgggcaatgaaaaaacggtctgccggtgtggagcctccaattgcagtggattcctcggggatagaccaaagacctcgacgaccctttcatcagaggaaaagggcaaaaagaccaagaagaaaacgaggcggcgcagagcaaaaggggaagggaagaggcagtcagaggacgagtgcttccgctgcggtgatggcgggcagctggtgctgtgtgaccgcaagttctgcaccaaggcctaccacctgtcctgcctgggccttggcaagcggcccttcgggaagtgggaatgtccttggcatcattgtgacgtgtgtggcaaaccttcgacttcattttgccacctctgccccaattcgttctgtaaggagcaccaggacgggacagccttcagctgcaccccggacgggcggtcctactgctgtgagcatgacttaggggcggcatcggtcagaagcaccaagactgagaagccccccccagagccagggaa

SEQ ID NO: 46258 - DNA, 572 bp, Homo Sapiens
ttgaatttctccgaatgtaaggttccctcccactctatttttttaggtaaagttaattggcatatggaatgttttaatctcctctgaaatgtgtagcgtaggcttttcccaagggtcgctagaaactcgtcttcgcgttgccccctttctggctctcagcgccgtcgccactcgggagaggctgggtgaggcccgtgtgaggactgaccctggattcctcgaaactgccattgtgatcattactctgctctttggaaatggctgtatcatttttttgtactaatgtgaattgttcctcagaaacgcttcttttccatcctagtgagaagctggccctgcaggtggtggcagcaatggtgttgtaagatttcctcccgtagttttttctcctcatggatttgaatgaaatgccaataacacgtccactttcaacgtgtagtttacgcggagcactttcgaggcctggccgggttgggcctacttctcacctgggcctatcttctgaactcgctaggttcttatcaacatttgggggataactttgtatattttttttcatttggcttttcttt

SEQ ID NO: 46259 - DNA, 986 bp, Homo Sapiens
agcaaaacacaaaaaccgccccaatccctcaggattccttggcatccgaaaccagcatctgcacctaaacccatacccacccgtgtgcgcccacagggggatgtgtccgaatgggcagcttaaaatgtggtcacctgtgggggaaactcttcaggcacctgaagtgagaacccagctgtccgtcctcaggccggcctttcttccggcgacacccgtccatggctggctgggtccccttcgcagtgtttgtctgtcttgacatctaaaccccggcgtgtgcagtgcccatcttccaggactaccttattttccagaattaaacctgttttataattcaagttaatgcaaatgactgtcagttgccaaatatcttgatcctatgagtgtagttgatgactgtttgttagtcagtagagtaaaatgctgtgtccacggggtgtcacagcctcaccataccctgttgaggtgtgaaatgccccgtcagaaattaaatacaaacttaaatgtgcctattggtgtctaaacttcatacaatgtaaggtcagattccttttaggaatactgggtgctgtcaccaggtttgatagttagacttaaaaacttgaaattcactttctggggggagggatatactgaaatagagagttgagacttgccagctgggggaaaatagcatttaaaatggaaagctgtgttggacactgtgtatgagtattttgtttcaaaactttaacgccttttcttacgttaaaaacaaaaaggggggcgctaaagttctcccgagcgcccagtagcggtacccgctttccgtccacaggggccccatgagagccggaaataagcaaagacaggcgagtttaacagcggcgcgggaacccgcgccgtcgggacctgggaggaaccactccgggggacatggacacccagaagaagccggaaaaaaagggagctaaacgcactcgcgagtgctgtaaaacacacaagag

SEQ ID NO: 46260 - DNA, 767 bp, Homo Sapiens
acgcgtccggcgagtgaaattgcacgtcaaactgccgaggaatctggcataacaaattctgcttccagtacacttttgtctgagtacaatgtcaccaacaacagcgttgctcttagaacaccacgaacaccagcttcccaggacagaattctgcaggaagcccagaacctcatggccctcaccaatgtggacaccccattgaaaggtggacttaataccccattgcatgagagtgacttctcaggtgtaactccacagcgacaagttgtacagactccaaacacagttctctctactccattcaggactccttctaatggagctgaagggctgactccccggagtggaacaactcccaaaccagttattaactctactccgggtagaactcctcttcgagacaagttaaacattaatcccgaggatggaatggcagactatagtgatccctcttacgtgaagcagatggaaagagaatcccgagaacatctccgtttagggttgttgggccttcctgcccctaagaatgattttgaaattgttctaccagaaaatgccgagaaggagctggaagaacgtgaaatagatgatacttacattgaagatgctgctgatgtggatgctcgaaagcaggccatacgagatgcagagcgtgtaaaggaaatgaaacgaatgcataaagctgtccagaaagatctgccaagaccatcagaagtaaatgaaactattctaagacccttaaatgtagaaccgcctttaacagattt

SEQ ID NO: 46261 - DNA, 666 bp, Homo Sapiens
cttgatagacacgggtcacatgacgtcagtagccaagagggctgcaaagatggaagagaagatgaaaattttgcttgggggttaccagtctcgtgctatggggctcatgaaacagttgaatgacttatgggaccaaattgaacaggctcacttggagttacgcacttttgaagaactcaagaaacatgaagattctgctattccccggaggctagagtgtctaaaagaagacgttcagcgacaacaagaaagagaaaaggaacttcaacatagatatgctgatttgctgctggagaaagagactttaaagtcaaaattctgaagtacagtttatattctgtcacaggattaattaattgccggttttcatactctagaaggctgaaactgatgtttatcttcattgacaaatttacccaccatctgtggtttttcagttgtttattttaaatgatatcgatcttacacattctgtgtataaagaccttaactccacaggacggacattttagagtttaaattattaaggctatcattcttttagtaatgtcatatttgcaaacttttttagttttggcctttaatttaaaaagcctaattttaaagtgctgcctgtgagtaactcttgaataaaaacaaaatataaaaaattgaaaaaaaaaaaaa

SEQ ID NO: 46262 - DNA, 631 bp, Homo Sapiens
ccacgcgtccggttggccaaccatgcatcctccctagaaatgcatttgaatttgatttactaatcttttatttaggaaatttacatttttacattagtgagattggtcttttgggctattgtacttttttttttttttttttgagatggagtcttgctctctcacccaggctggagtgcagtagtgcaatcttggcccactgcaacctctgcctcctgggctcgagtgattctctgcctcagccttccaagtagctgggactacaggcatgtgccaccgcacctggctaatttttgtgtttttagtagagatggggttttgctatgttggccaggctggtcttgaattcctgacctcaggtgatccacctacctcggcctcccaaagtgctagaattacaggtgtgagccaccatgcccagcctggttattgtattttgatattgggattttgctagctctctaaagtaaataggataactgtatatctttttctgtgcattaagcagttataacatgggaatgatttgttcatgaaaggttgaaagtctgtacttacagaacttttgagttcacagtgctttctggaaataatttctttataactgtcagtttcttttgtgactattatg

SEQ ID NO: 46263 - DNA, 704 bp, Homo Sapiens
  misc_feature (583)..(583): n is a, c, g, or t
ggggaaaggtgtaaatatcaataacagtgctacttagttatcagtatttaatatctgaggtgagttgggggtatctatattaggggtagggtattacagaagataattggcttgatgtcctagaagttctttgatccagaggtgggtgcagctgaaagtaaacagaatggattgccagttacatgtatgcctgcccagttccctttttatttgcagaagctgtgagttttgttcacaattaggttcctaggagcaaaacctcaaggattgatttattgttttcaactccaaggcacactgttaataaacgagcagggtgttttctctcttcctttctaatatatggagtttcgaagaataaaatatgagagcaatatttaaattctcaggaattgacttatactcttgagaatgaattcagtttcaatcaagtttacattatgttgcttaaaaaaatagaaattattctttatcttgcaaagaattgaaaccacatgaaatgacttatgggggatggtgagctgtgactgctttgctgaccattttggatgtcattgtaaataaaaggttctatttaaaaaanaaaaaaaaaaaaaaaaacatgtcggcgcccggccccgagagcttctagacattcgttggccgcgggccatagtaatgacatgtcatactgttcctagaatctggctgacaggctggatccc

SEQ ID NO: 46264 - DNA, 636 bp, Homo Sapiens
agcagcagcagcaacagcaacagcaacagcaacagcagcaacagcagcaaacccaggccttcagcccacctcctaatgtgactgcttcccccagcatggatgggcttttggcaggacccacaatgccacaagctcctccgcaacagtttccatatcaaccaaattatggaatgggacaacaaccagatccagcctttggtcgagtgtctagtcctcccaatgcaatgatgtcgtcaagaatgggtccctcccagaatcccatgatgcaacacccgcaggctgcatccatctatcagtcctcagaaatgaagggctggccatcaggaaatttggccaggaacagctccttttcccagcagcagtttgcccaccaggggaatcctgcagtgtatagtatggtgcacatgaatggcagcagtggtcacatgggacagatgaacatgaaccccatgcccatgtctggcatgcctatgggtcctgatcagaaatactgctgacatctctggaccaggacctcttaaggaaaccactgtacaaatgacactgcactaggataattggaaaggaacattggtcaggcttcatcttggaagaaggaccactttgagctccatcaagtgatttaaaggatgcaat

SEQ ID NO: 46265 - DNA, 500 bp, Homo Sapiens
taaagatcaatttatatagctttattttttactttatcaaagtatacagaattttaatatgcatatattgtgtctgacttaaaattataatgtctgcgtcaccatttaaaatgtctgttcattatgtaatgtaataaaagaaggtcttcaaaaatgtatttaacatgaatggtatccatagttgtcatcatcataaatactggagtttatttttaaattattaaacatagtaggtgcattaacataaatcagtctccacacagtaacatttaactgataattcattaatcagctttgaaaaattaaattgttaattaaaccaatctaacatttcagtaaagtttattttgtatgcttctgtttttaacttttatttctgtagataaactgactggataatattatattggacttttctctagattatctaagcaggagacctgaatctgcttgcaataaagaataaaagtctgcttcagtttctttataaagaaactcac

SEQ ID NO: 46266 - DNA, 588 bp, Homo Sapiens
  misc_feature (513)..(513): n is a, c, g, or t
gcgatgtgacgtaacgcgcctgcggactgggcccagcttgtcctctatgacttacccagaaggcaacgcttctctttctggtcaaaatggctggtaagcaggccgtttcagcatcaggcaagtggctggatggtattcgaaaatggtattacaatgctgcaggattcaataaactggggttaatgcgagatgatacaatatacgaggatgaagatgtaaaagaagccataagaagacttcctgagaacctttataatgacaggatgtttcgcattaagagggcactggacctgaacttgaagcatcagatcttgcctaaagagcagtggaccaaatatgaagaggaaaatttctaccttgaaccgtatctgaaagaggttattcgggaaagaaaagaaagagaagaatgggcaaagaagtaatcatgtagttgaagtctgtggatgcagctgttatgaagatggttaaacttgaaacaaacaattttaagaattatttggtctgaagatgttntactttaaataaatgtctattgtaatggctggagtttttgaattccaaaccttatactgaataactactgaatcc

SEQ ID NO: 46267 - DNA, 491 bp, Homo Sapiens
gtccgggcagcaacagcaacaacaaaaaggtggaagaggtgctgcagctggtggacgaggtggtacgaggggtcgtggccgaggtcagggccaaaactggaaccaaggatttaataactattatgatcaaggatatggaaattacaatagtgcctatggtggtgatcaaaactatagtggctatggcggatatgattatactgggtataactatgggaactatggatatggacagggatatgcagactacagtggccaacagagcacttatggcaaggcatctcgagggggtggcaatcaccaaaacaattaccagccatactaaaggagaacattggagaaaacaggaggagatgttaaagtaacccatcttgcaggacgacattgaagattggtcttctgttgatctaagatgattattttgtaaaagactttctagtgtacaagacaccattgtgtccaactgtatatagctgccaattagttttctt

SEQ ID NO: 46268 - DNA, 836 bp, Homo Sapiens
gggttatgacaaagtcataacaaatgtgactaagtcattacaaatgtgactgagtcattacagtggaccctctgggtgcattgaaaagaatccgttttatatccaggtttcagaggacctggaataataaaaagctttggattttgcattcagtgtagttggattttgggaccttggcctcagtgttatttactgggattggcatacgtgttcacaggcagagtagttgatctcacacaacgggtgatctcacaaaactggtaagtttcttatgctcatgagccctccctttttttttttaatttggtgcctgcaactttcttaacaatgattctacttcctgggctatcacattataatgctcttggcctcttttttgctgctgttttgctattcttaaacttaggccaagtaccaatgttggctgttagaagggattctgttcattcaacatgcaactttagggaatggaagtaagttcatttttaagttgtgttgtcagtaggtgcggtgtctagggtagtgaatcctgtaagttcaaatttatgattaggtgacgagttgacattgaaaattgtcctttttccctgatccaaaaatgaataaagcccttttttaaaccaaatttacaagcccccagacctaaacaacaccacccaaaaaaaatggtccgggccggcccctcgggccccttcgaaggaaagccttttcttaagaaacaattccccttttttggagccccccccgggggccccccccattttaaagggataaaagtgtggaaaaaacatcggggggccaacacaaaaggcctgtgggcttttttcccccccaaa

SEQ ID NO: 46269 - DNA, 602 bp, Homo Sapiens
gggtacagggggcgcgccctgggtgaaggccctccttagcagggcttgaaccccagaaatacccaggcaggtattgagaggtgaggtggatggaaccatcacacaggaaggaacacacgctgcgtttcagttctgcgtaactcatgtctttatgataccttgtacttttccttagtttaaaatatcacagatttacctaagagtagacgctcgtccaacagaaataaaaaatgccttgccaaagaaagtgaaaaaataaaaataaaaaatgccccccaaaaataaaaataataaaaactaaaaatgtcttgccagcctgggtgtggtgggctcagcctagccccagcctcatggggggctgagctccagccgctgactgtgggccggagggctgctgccgcccgtggctgtggagggacagccgtgctttcagcgcagcaggggctctgcggagaggtgtggatctgcagcaccacctctggtgaaactcatggtcccgaccgtcagtaggaacgggagatgagttttggtgacgggtgaccggtgggctgaccgcctctgactgccgttccgtggctgctcagtgtggggtctgcgacgtc

SEQ ID NO: 46270 - DNA, 737 bp, Homo Sapiens
gggtgctgggtactccagaggtgccactggtggaagggtcagcggagccccagcaggaagggtgggccagccaggccattcttagtccctgggttggggaggcagggagctagggcagggaccaaatgaacagaaagtctcagcccaggatggggcttcttcaacagggcccctgccctcctgaagcctcagtccttcaccttgccaggtgccgtttctcttccgtgaaggccactgcccaggtccccagtgcgccccctagtggccatagcctggttaaagttccccagtgcctccttgtgcatagaccttcttctcccacccccttctgcccctgggtccccggccatccagcggggctgccagagaaccccagacctgcccttacagtagtgtagcgccccctccctctttcggctggtgtagaatagccagtagtgtagtgcggtgtgcttttacgtgatggcgggtgggcagcgggcggcgggctccgcgcagccgtctgtccttgatctgcccgcggcggcccgtgttgtgttttgtgctgtgtccacgcgctaaggcgaccccctcccccgtactgacttctcctataagcgcttctcttcgcatagtcacgtagctcccaccccaccctcttcctgtgtctcacgcaagttttatactctaatatttatatggctttttttcttcgacaaaaaataataaaacgtttcttctgaaaaaaaaaaaaaaaa

SEQ ID NO: 46271 - DNA, 1028 bp, Homo Sapiens
atatcaaaaccaaatgtgaagcttttcatacttacagatgcctgggcccccatccctggtggttttgggtctggcatagtcttcaggcatctgtttgcattaagttccattgccagggttcagacctgccattggggacccagtcctgttttgttctcaacaaacatttattgggtagttaaccatgtgccatgttaacctgtgttaaatgctaggaatggaaaaatgaatatgttccttctcaggagagctcttagacaacaagcaaagaatgtcaatgaaatttttaagtgctcagtgttccaggccagagtacagagggagggacactttgctgtctttcagtcctttctttttaattgtattgattcttttcctcggtaataaataagtccatcctagttttattaagaaaaagacaggtacaagccaaattgtattcatttaatcatattcgatttcaaacaaataggttctgtgtatgtgtttgcaaatcaggtgcagcctttcgggttgcttgacaagttgcttgggcagcccttagactataaagtttctacgtcattgatttaagggtgttttaaaatgcgataggctagcttccagaccatgattagtgtcactcctgagaagtagaggtttaatatttcataactgatttcattgcagatttatgtcttccatattctctttaaaaaaaaaaaagataaacttatgttagaacctctctggaaacagacttgctgacacaaactgaactgtataggaaatctgtaagaagcactgcctaattgacaaaaatggtcctatgattaacatgtatgctaatatcaactaattgatttttttggcttattctcaacaaataacctcatcctacttaaccccctactaccttacagagtcatagcttkggctccagagtaatarcagatatggttggaaycgtgcmctgctactgcttagttgtgtgmgttgtgtattgaggcagggaacarttaaagmctttmtgatwttctgtgrgattg

SEQ ID NO: 46272 - DNA, 453 bp, Homo Sapiens
  misc_feature (94)..(94): n is a, c, g, or t
aaggatttctttaaagcaaggcacaaaagcatacacaggaaaaaatgatgcataaaaacatggcttctgtagaacaatagaggctgtaaaagancaagctacagacaaggaaatgtttgcaatgcatggaactgtcaaaggattcgtatctggaatacattaaagaagcaaaagaacctcatacaaaagtcattgagtaaatgacagccatgcattagaacagcaattctcaaaacttttggtctcaagatccctttacactcttcaaaagtgagaaccccaaagagttttcatgtatgtgggttaaatctattgatattttctgttagaatttaaaaattatgttaaaaaaataagaagaatgactatttttcaaaacaaaaaatgagaagagtggtattgttttacatttttacaaatctctttaacatttagcttaataaaagatagctg

SEQ ID NO: 46273 - DNA, 718 bp, Homo Sapiens
  misc_feature (611)..(611): n is a, c, g, or t
ttttttttttttttttttatttagatacatttatgtccacatgaaacgcttagacttgcatcctattacatatggaattcggagtttacaatacaccatgaacggcagattggctagcccacgctacttaagaggacactcacagattccacatgggatggtacattatgtacagaatacagtagtagagaaccttcgagggaggctctggaacttttgtctctcagcctccggccccctcccccatcatgcccctgcctcccggaactgaaatcctgtctgagacaatacattctgattatttgatagccaggtgtttggattaaggttgcccccctgcaggtccccgacaagagggatggattttatttatatgtttttgtgttttagtttacttacttttttttggtagaaaaaaaagaaagaaaaagaaaacaaacatattacagtattaaagtattgcttaacttccagcgtctccttgtgtagtgtctgtgcccaggacggggctgagctgacgtctgctagttttctgctttggggtgagggtggggaaacccgccagtgtctttcttcaatgtgcttgcctgcagtcagtccctctgctctcncactgtctgccttccttggaagatagcctggcttgcgaagcacattcaagaaaaaaaaaaaaaaatctctcctcccccaccagcccccactctccctctgttcctgc

SEQ ID NO: 46274 - DNA, 552 bp, Homo Sapiens
acccatgagttggggtctggcagcctcccatccagggcccccatctcatgcccctggctgggacgtggctcagccagcacttgtccagctgagcgccaggatggaacacggccacatcaaagaggctgaggctggcacaggacatgcggtagccagcacacagggcagtgagggagggctgtcatctgtgcactgcccatggacaggctggctccagatgcagggcagtcattggctgtctcctaggaaacccatatccttaccctccttgggactgaaggggaaccccggggtgcccacaggccgccctgcgggtgaacaaagcagccacgaggtgcaacaaggtcctctgtcagtcacagccacccctgagatccggcaacatcaaccccagagtcattcgttctgtggagggacaagtggactcagggcagcgccaggctgaccacagcacagccaacacgcacctgcctcaggactgcgacgaaaccggtggggctggttctgtaattgtgtgtgatgtgaagccaattcagacaggcaaataaaagt

SEQ ID NO: 46275 - DNA, 652 bp, Homo Sapiens
tcctgtactttgagatcacttccgaggcccctttcctgcactatctctccatgttcagttccaaggagtcccagcggggcatgggctacatgcccaaacgtggcctggaggtgaacaagtgtgagatcgccaggttctacaagctgcacgagcggaggtgtgagcccattgccatgacagtgcctcgaaagtcggacctgttccaggaggacctgtacccacccaccgcagggcccgaccctgccctcacggctgaggagtggctggggggtcgggatgctgggcccctcctcatctccctcaaggatggctacgtacccccaaagagccgggagctgagggtcaaccggggcctggacaccgggcgcaggagggcagcaccagaggccagtggcactcccagctcggatgccgtgtctcggctggaggaggagatgcggaagctccaggccacggtgcaggagctccagaagcgcttggacaggctggaggagacagtccaggccaagtagagccccgcagggcctccagcagggtcagccattcacacccatccactcacctcccattcccagccacatggcagagaaaaaaatcataataaaatggctttattttctggtacctcccaaaaaaaaaaaaaaaaaaggcg

SEQ ID NO: 46276 - DNA, 789 bp, Homo Sapiens
  misc_feature (672)..(672): n is a, c, g, or t
  misc_feature (738)..(738): n is a, c, g, or t
gggggtggtgaaggcagatattgtaaactacaaccaggaacctatgtcaaggactgttaaccctcctagaagctctatgtgtgcagttcagtgagcgcatttttcttttgtgttgatagttctggctgcccttcacctctaggtgggcccgaggacttctaggaacttgttttatcagtgaccatctctgtagttcagttaacactttactcccaacttgcttcatcattgctattgcctcacagtggcaggcagctccttggatttgaaagaattcaactttgggaccacacactttgaattcaaaatggaaaacccattccctggaattagactgcttcattgcaaaagaatgatgttgtttctttgtatgtccttgcttcttttttcattgatgtaaatttttttaacttaatatgaaaactctccaagtcttgatcatcagccaggattttgccacagcaatttcattctcttatcggaacttgtatgtgtcaaagtatacttcagagtgcaaacattaagcaagtaatatattttacctacagatacttatgaagacattctttcgctatcgtgagtaaaagtatataaagctgtttctaactgaaaatgcttgaaataagcctgtaatagaaatattttttcattttttaaaaagggcctaaatgnttaatattggagtttgtaactcacaaagtaatatttgatattggatttttattaccggatcgttgnccgtatgtattggggaaaacctccgggttaaaagctttcctgaattctgaa

SEQ ID NO: 46277 - DNA, 695 bp, Homo Sapiens
ccatttttcactagcgacagccactttttactctccctcctgaccagtccagctggtctagagaaagccttgttttttcccagagcaaccatgttttagcataatgggatgacctggtgtcccattataaataaagggtggtatggctagaagggtatgagcagtaggcttatgtacacctcttatagaggttgataggactgcttgggtcctccactgtcctctgtcaatctagttagacgtgcttctgaatgactgtagaattggaactagaaactacacctgggctttggagtcagattttagttaacaataatgagcctgggagcagtagtactaaggcgtcttttgtaggcttaagaatttatcctaatggcctttataggaccaatgctgattttttttaaaggcagttcctattatgtggtgaaattttgtaaataaatgattatacaaaacagtcaccacctagaactgggtattctttgtacattgtcagatatctttcaaagtataaattaggaataaaaatgttccacatgatatgtgtacaaattctttttaagattgtcatcttgtacagcaaaatattatgttggtatattacttccttattaatttgcaaatgattggattaaaaaagctcactgtattccttactaacctgttgtgtgaaacataacattggcagtcga

SEQ ID NO: 46278 - DNA, 485 bp, Homo Sapiens
cagcgagactccgtctcgaggaaaaaaaaagaaaagacgcgtgcctgcggtgaggaagctgggcgctgttttcgagttcaggtgaattagcctcaatcccccgtgttcacttggctcccatagccctcttgatggatcacgtaaaactgaaaggcagcggggagcagacaaagatgaggtctacactgtccttcatggggattaaagctatggttatattagcaccaaacttctacaaaccaagctcagggccccaaccctagaagggcccaaatgagagaatggtacttagggatggaaaacgggcctggctagagcttcgggtgtgtgtgtctgtctgtgtgtatgcatacatatgtgtgtatatatggttttgtcaggtgtgtaaatttgcaaattgtttcctttatatatgtatgtatatatatatatgamaatatatatatatatgmvcccycccgcttaattgtcccagaaaaaaaaca

SEQ ID NO: 46279 - DNA, 526 bp, Homo Sapiens
  misc_feature (481)..(481): n is a, c, g, or t
gacttgttggtagccatgtcgcgagccccacagggtccagttcacctctctcccaggttccctgaatcctgcgtttttgaagaagtcccggaaggaggaggctggggcaggagaacagcatcaggactgtgagccggctgcagcagctgttcggattacactcaccctctttgaaccagatcacaaacgctgcccagagttcttctacccagagctggtgaagaatatccgagggaaggtaaaaggccttcagcctggagataagaagaaagatctgtcagatcctttcaatgacgaagaaaaggaaaggcataaagtagaggcccttgcccgaaaatttgaagaaaaatacggtggaaagaaacgtagaaaagaccgaatacaggacttgatcgatatggggtatggttatgatgaatccgactccttcatcgataactctgaggcgtatgatgagcttgttcctgcttctttgactacnaagtatggaggattttacattaactcgggaaccctgcagtttaga

SEQ ID NO: 46280 - DNA, 1043 bp, Homo Sapiens
  misc_feature (988)..(989): n is a, c, g, or t
gtacagccacagcatcatcacgaacctcctgtaccatgtggtcggctggaccgactggaaccttgccctgaaccccgaaggaggacccaattgggtgcgtaactttgtcgacagtcccatcattgtagacatcaccaaggacacgttttacaaacagcccatgttctaccaccttggccacttcagcaagttcattcctgagggctcccagagagtggggctggttgccagtcagaagaacgacctggacgcagtggcactgatgcatcccgatggctctgctgttgtggtcgtgctaaaccgctcctctaaggatgtgcctcttaccatcaaggatcctgctgtgggcttcctggagacaatctcacctggctactccattcacacctacctgtggcgtcgccagtgatggagcagatactcaaggaggcactgggctcagcctgggcattaaagggacagagtcagctcacacgctgtctgtgactaaagagggcacagcagggccagtgtgagcttacagcgacgtaagcccaggggcaatggtttgggtgactcactttcccctctaggtggtgccaggggctggaggcccctagaaaaagatcagtaagccccagtgtccccccagcccccatgcttatgtgaacatgcgctgtgtgctgcttgctttggaaactgggcctggggtcaggcctaggttgagctcactgtccgtacaaacacaagatcagggctgagggtaaggaaaaaagagactagggaaggctgggccccaaaactgggagactgtttgtccttttcctggagatgcaaaaactggggcccgtgggaaccaccaatggtcagcattcaggaggcggaaacccttaaaagcagcagcggggggttggcccaaggcaccccaaaatgattccttatggggccccagcccaggaaaaaaggggccgcctctttaaaggaaaaaaaatggtttgaagcccccccnnagaaaccaaaggagagaaaaaatctccagaggccttctttgtgtcgggggtgga

SEQ ID NO: 46281 - DNA, 648 bp, Homo Sapiens
ggcacgagggttaccattctgatgttggagcatttggagcaaaaaaaaaaaaaaaaaaaaaaaaaggagtttgcttttgtcgggagattgaaagatgtttttgtttctttctttgtaaaggccttggatattgaaaaaataccaaggcagaacagttggacaatctatttcttgagccaaatttaattattcttatttttgtaatcagtcattggcttcttatctggatgaaggcttttggaggagaaccaaaacgacaagttccaagaagaagatgaagctccgcctccgccgcttagtcccaaccctgcccaggaagaagggcccgtggggctttgcctgtgcccgtccaccaaaggctgtcatgtgtctcgaaatcagcagccctccccatcccaatcccaggcagcttgtgtgtacaatcagcttctctagcaactctgtatctgttggcttcaagagaatattttgcctccacatatgtaccccttctcctttttttaaagatggatttaaaccaagatgcctccaggaaagaggacgaaatgagtatattcacagaggaatccaaaaaatacagtttgggggaaaatgcaataatttttgatgagatgggtgaaggacaagaagtgagttgtgtcaattatt

SEQ ID NO: 46282 - DNA, 477 bp, Homo Sapiens
agaaccagcccacgcctgcacagccaggagtatacaacaacatgagcatcaccgtttccatggcaggtggaaatacgaatgttcagaacatgaacccaatgatggcccagatgcagatgagctctttgcagatgccaggaatgaacactgtgtgccctgagcagataaatgatcccgcactgagacacacaggcctctactgcaaccagctctcatccactgaccttctcaaaacagaagcagatggaacccaggacaagaagacagaagagttcttctctgtggtgactacagactagaggaatgctctacaggtgcaacaggttcaggtgtttgctgacgtccagtgtacagtgaatctggtaggcggggacccttacctgaaccagcctggtccactgggaactcaaaagcccacgtcaggaccacagaccccccaggcccagcagaagagcctccttcagcagctactgactg

SEQ ID NO: 46283 - DNA, 485 bp, Homo Sapiens
tttttttttttttttatagactgaaatttttagtttaaaatatgcaagcctgaacaaggggaccaacattcccaagaaactggaacccagtcagacatatgatcaactgcttaatgtgtatgccatgtatgtcatgtgtcattcctttcccccaccccctccctagtggaagtgcttgcctactcccctaggacaggtaagtcctgggaaagtctaatcctcaatcttttgggcacaagttttataagggccaaccaagcatggagtcagggaaaaataggatcgagggccacaaaaaaagatggaagtggtaaaatagaagaaaacatcttaaccggaataaaggcttccattcaaaacccaagaagggtcctttgagggataaaaggtacaaaaataacagcaagacaagaggaataaaacccacatgaatcactgtggcatccagtttctattcacaaagaaaaagctcctcgtgccgaatt

SEQ ID NO: 46284 - DNA, 566 bp, Homo Sapiens
tctactgctacacctggcgtcaccagtggcccgtctgcctcaggaactcctccgagtgagggaggagggggctcctttcccaggatcaaggccacagggaggaagattgcacgggcactgttctgaggaggaagccccgttggcttacagaagtcatggtgttcataccagatgtgggtagccatcctgaatggtggcaattatatcacattgagacagaaattcagaaagggagccagccaccctggggcagtgaagtgccactggtttaccagacagctgagaaatccagccctgtgggaactggtgtcttataaccaagttggatacctgtgtatagcttcccaccttccatgagtgcagcacacaggtagtgctggaaaaacgcatcagtttctgattcttggccatatcctaacatgcaagggccaagcaaaggcttcaaggctctgagccccagggcagaggggaatggcaaaatgtaggtcctcgcaggagctcttcttcccactctgggggtttctatcactgtgacaacactaagataataaaccaaaacactacct

SEQ ID NO: 46285 - DNA, 788 bp, Homo Sapiens
gatatgtgcccttttgagaattcaagatggcactgacacgggaaggccagctacaggtggactcctggaatttgaggcatcataatgatactgaatcaagaacttccttctgcttctaccagatggcccaaggaagcacatcgtcctgttttattgctttctaccctgtgcaatattagcatgcaagcttggcttacataatcatactttatattcaattgatatataataaccgttctaacctcttccaggaaaatatttttagaactactagcttttccacttagaagaaaatgaggattcttaagggagccactccaccatgctattaagactctggcagagttatgggtaggatatggatccctacatgaataagtcctgtaaatacaatgtcttaaggctttgtatagctgtcctagactgcagaaatgtcctctgattaaatccaaagtctggcatcgttaactacatagtgctgtagcaacaagtcttatcatggcatctctttctatgtttggtttgctttttccaagagtattcaggtctcctcttgtgagataggaaggccatgaaaacaattagatttcaagatgatctatgtgaccaaatgttggacagccctattaaagtggtaaacaacttctttctaaagaaaaataaaatacaaattacaaggacaagagaaaacaaaagggggggccggctccaaaaattttcccccgaggggggcccaaattttgaggttcccccggttctcttgtgacaagggggcccccattgggggg

SEQ ID NO: 46286 - DNA, 783 bp, Homo Sapiens
  misc_feature (757)..(757): n is a, c, g, or t
aaaacgcggacggtccgattcccgggatgtggcttttttaaaaagcaacagaaacctatcctcactgccctccccagtctctcttaaagttggaatttaccagttaattactcagcagaatggtgatcactccaggtagtttggggcaaaaatccgaggtgcttgggagttttgaatgttaagaattgaccatctgcttttattaaatttgttgacaaaattttctcattttcttttcacttcgggctgtgtaaacacagtcaaaataattctaaatccctcgatatttttaaagatctgtaagtaacttcacattaaaaaatgaaatattttttaatttaaagcttactctgtccatttatccacaggaaagtgttatttttaaaggaaggttcatgtagagaaaagcacacttgtaggataagtgaaatggatactacatctttaaacagtatttcattgcctgtgtatggaaaaaccatttgaagtgtacctgtgtacataactctgtaaaaacactgaaaaattatactaacttatttatgttaaaagattttttttaatctagacaatatacaagccaaagtggcatgttttgtgcatttgtaaatgctgtgttgggtagaataggttttcccctcttttgttaaataatatggctatgcttaaaaggttgcatactgagccaagtataattttttgtaatgtgtgaaaaagatgccaattattgttacacattaagtaaaatcataagaanacttccatagctattcattgagtcaa

SEQ ID NO: 46287 - DNA, 637 bp, Homo Sapiens
  misc_feature (592)..(592): n is a, c, g, or t
gcggcgggggcttgcccgccccacccgacgacttcctgccgccgccgccaccgccgccgcccctcgatgaccctgagctcccgccgccgcccccggacttcatggagccgccgccgcccgcgcccgcgcccgcccccgtccccgactccgccaggccgccccccgcggtggccaagaggcctcctgtgccccccaagaggcaagagaacccagggcaccccggcggagcaggaggcggggagcaagatttcatgtcagacctcatgaaagctttgcaaaagaagagaggcaacgtgtcctagggacgggcatgatgagtgttccagagggagaagcatcgctgaccccgagcgcaggttttgctagcagattgccctgacatcttgttcatttcagataaaatgtgatgggaaacttctcactgatgtgctcaagtacaggcataaccattaacccagtagagttcagaatatctgcccaaatgtacatatcgttcccatgtattttaacctaaatggaatgtatcttcccttccaagctgcctaaagcgctgttttaggttcatttattttattatgttcagaagcatcanataaaagttaaacgtttttccggaaaaaaaaaaaaaaaaataggt

SEQ ID NO: 46288 - DNA, 888 bp, Homo Sapiens
  misc_feature (818)..(818): n is a, c, g, or t
  misc_feature (868)..(868): n is a, c, g, or t
atctctccaaacattgaaagaattggggcttgttgatggacaagaactggcggttgctgatgtcaccaccccacagactgtactattcaaacttcattttacttcttaaggaaaatctccacataatagaaaactcatggaaataatatactttgtggatgctaagaagttgaatcgatgtcatttttagcaatagtgttgccacgatttgtctttttttatataatgaaccactcttttttaactttgtaaccttcccttgaagacagaattttggtgttggtgcttgtaagcattttcattaataatatgagaaatgatacctggagagagagattatgagcaaatgtattgcttcttttagaggaggaagcatacaacctcttttgtgtgaattttgttattatggtcaaagaatgcattcctaagttttcatttgagtacccaaatacacaaaaggtgtccctttaaggaaaataaagaattaagttttaaataacattacattttacaatctgacatctggagtatattgaacataggctatttcttgatataacactcatttaattgtggccatccaaatgaatattattgcagaatttatcttgttcataatgatttgtaaatggtgttatagctgaatacctgtgcatgaaaatgggcaatattttcatctgtttacttgtagtgccatagaggccaatatgcacaatattaactaatgccaagacatggctgtttaaaaaatttaatgttcaaacagttatcactgatgcttttgcactatttattaataaaatcatatattgtgtaanccccaccccccccccaaccccccccccaaacaaccccaaacaaaaaaacnccaaaccccccccccccccc

SEQ ID NO: 46289 - DNA, 481 bp, Homo Sapiens
gcacgagctacccttggacccagaggttctttgagtcctttggggatctgtccactcctgatgctgttatgggcaaccctaaggtgaaggctcatggcaagaaagtgctcggtgcctttagtgatggcctggctcacctggacaacctcaagggcacctttgccacactgagtgagctgcactgtgacaagctgcacgtggatcctgagaacttcaggctcctgggcaacgtgctggtctgtgtgctggcccatcactttggcaaagaattcaccccaccagtgcaggctgcctatcagaaagtggtggctggtgtggctaatgccctggcccacaaggtatcactaaggctcgctttcttgctgtccaatttctattaaaggttcctttgttccctaagtccaactactaaactgggggatattatgaagggccttgagcatctggattctgcctaataaaaaacatttattttcattgc

SEQ ID NO: 46290 - DNA, 458 bp, Homo Sapiens
  misc_feature (142)..(142): n is a, c, g, or t
gggaatggctgactgtgggctgccctggacttggcccccggacagtcgcctctcctcctcctctacctcctccttcaccaccacctcctcttcctcctcctccacctccacctcctccgccaactcctcggctgcacaccanctctaaaagcgagagtgaacgagagagggagggagagagtgagagcgagcgagatctttggagagatttttttttttgcctcctacttctgtcttgaagccagacaatcgacttcagctctccctcccctccctctttctccacgttctgctcccactcgctctcctgtccccttcccctcccctcccggcggaaagccccccgaaaccaacaaagctgagccgagagaaacaaacaaaacaaacacaccgggccagacaagccatcgacaaaactttgcaaagtcaacccccaggaaaaaaatacagccttgttg

SEQ ID NO: 46291 - DNA, 635 bp, Homo Sapiens
gagggtgctccatgcccctcccgtcgccccgctcctggccgccgaccgggtggtcgcctttatggaccacatacggatcttccaagagcaagtggagaagctcaaggcgctgcacgttgactcagccgagtacagctgcctcaaggccatagtcctgttcacctcagatgcctgtggtctctctgatgtagcccatgtggaaagcttgcaggaaaagtctcagtgtgctttggaagaatacgttaggagccagtaccccaaccagccgacgagattcggaaagcttttgcttcgcctcccttccctccgcaccgtctcctcctcagtcatagagcaattgtttttcgtccgtttggtaggtaaaacccccatcgaaaccctcatccgggatatgttactgtccggcagcagttttaactggccgtatatggcaattcaataaataaataaaataagaagggggagtgaaacagagaaagaaaaggcaaaagactggtttgtttgcttaatttccttctgttaagaaaggatataaaaggatgttacaagtttgctaaaagaagagaggggaagaatttaatggactgtgaatttcaaaaaaaaaaaaaaagactgtcaaatgaacttttacagaa

SEQ ID NO: 46292 - DNA, 867 bp, Homo Sapiens
ctgagatcaaccgcatgatccagaggctgagatctgagatcgaccacgtcaagaagcagtgtgccaacctacaggccgccattgctgatgctgagcagcgtggggagatggccctcaaggatgctaagaacaagctggaagggctggaggatgccctgcagaaggccaagcaggacctggcccggctgctgaaggagtaccaggagctgatgaacgtcaagctggccctggatgtggagatcgccacctaccgcaagctgctggagggcgaggagtgcaggctgaatggcgaaggcgttggacaagtcaacatctctgtagtgcagtccaccgtctccagtggctatggcggtgccagcggtgtcggcagtggcttaggcctgggtggaggaagcagctactcctatggcagtggtcttggcgttggaggcggctttagttccagcagcggcagagccactgggggtggcctcagctctgttggaggcggcagttccaccatcaagtacaccaccactcctcctccagcaggaagagctacaagcactgaagtgctgccgccagctctcagtcccacagctctcaggcccctctctggcagcagagacctctcctcaggttgcttgtcctcccctggctccagtctcccctgcctcccgggtagagctgggatgccctcaacttgtcttctcatcaaatacctgttccaactgaggctcctgtttggcttacccatcaaagtcaaccagttatccagcacttcagaccttgcgaatgtcctttgaggtccccgtattatttacaggtaatccgaagtctgccaaacatgctgagaaagaacaattgagcctatatctccataagaac

SEQ ID NO: 46293 - DNA, 598 bp, Homo Sapiens
cagtagaatgtagtgactttctattagtttccatttgaattggtaacaaatcctgacttttctccaactccagtaaccttcgagaaagctttgaatgccggcttcatccaggccactgattatgtggagatttggcaggcataccttgattacctgaggagaagggttgatttcaaacaagactccagtaaagagctggaggagttgagggccgcctttactcgtgccttggagtatctgaagcaggaggtggaagagcgtttcaatgagagtggtgatccaagctgcgtgattatgcagaactgggctaggattgaggctcgactgtgcaataacatgcagaaagctcgggaactctgggatagcatcatgaccagaggaaatgccaagtacgccaacatgtggctagagtattacaacctggaaagagctcatggtgacacccagcactgccggaaggctctgcaccgggccgtccagtgcaccagtgactacccagagcacgtctgcgaagtgttactcaccatggagaggacagaaggttctttagaagattgggatatagctgttcagaaaactgaaacccgattagctcgtg

SEQ ID NO: 46294 - DNA, 676 bp, Homo Sapiens
tgagcttaatttctgaactcttagtgattcatatatgtacataaatctgtgatcccatttcttattgcaccattcaggaacactttatataaatgagtggctttttatttcatattattagtagtatcatggttccattacaggcctattaacatcatacattgtcattagtctttgaagaaaaaatatgtaaatatatatgtgtaacatgagaatttctctctaaagcagggcttaaaattttttggaaaagtttgacaaagcataccacatgaattcagatttacctcaatgctaagaattatgtttagttaggaaaaaggaaagtcattttgacctcaggtagaaaaatagattgctttgagttttatgtagctttagactttaaaaagttagaatttattctgtaactaaaaattatttgaaaaaattatgcctctggtttaattattggtgattacacactctttctcttacccttgtgtattgaactatgtccataatcaagttgatgtggatcctgaaaagtgttatgaacatctgattggtatttgtcacatttattttaaaattagcatctgaacacttcaaagctgtcagtgtgtattggtttcaccaataaccactgcttgatccttacaattaaattttttaactaaaaaaaaaaaaaaaaaaa

SEQ ID NO: 46295 - DNA, 647 bp, Homo Sapiens
  misc_feature (603)..(603): n is a, c, g, or t
  misc_feature (616)..(616): n is a, c, g, or t
atggataatctgtcatcagaagaaattcaacagagagctcaccagattactgatgagtctctggaaagtacgaggagaatcctgggtttagccattgagtctcaggatgcaggaatcaagaccatcactatgctggatgaacaaaaggaacaactaaaccgcatagaagaaggcttggaccaaataaataaggacatgagagagacagagaagactttaacagaactcaacaaatgctgtggcctttgtgtctgcccatgtaatagaacaaagaactttgagtctggcaaggcttataagacaacatggggagatggtggagaaaactcaccttgcaatgtagtatctaaacagccaggcccggtgacaaatggtcagcttcagcaaccaacaacaggagcagccagtggtggatacattaaacgcataactaatgatgccagagaagatgaaatggaagagaacctgactcaagtgggcagtatcctgggaaatctaaaagacatggccctgaacataggcaatgagattgatgctcaaaatccacaaataaaacgaatcacagacaaggctgacaccaacagagatcgtattgatattgcncatgccagagcanagaaactcattgacagctacccaactttctt

SEQ ID NO: 46296 - DNA, 570 bp, Homo Sapiens
tacagacgtcttccagatcggtctgaatggctggctgcgcatcgatgaccagacagtcaaggtgatcaaccagtaccaggtggtgaaaccaactgctgaacgcacagcctacctcctgtattaccgccgagtggacctgctgtaaaccctgtgtgcgctgtgtgtgcgcccagtgcccgcttcgtaggacaccacctcacactcacttcccgcctctctttagtggctctttagagagaaactctttctccctttgcaaaaatgggctagaatgaaaaggagatgccttggggttcgtgcacaacacagcttctgttgactctaacttccaaatcaaaatcatttggttgaaacagactgttgcttgattttagaaaatacacaaaaacccatatttctgaaataatgctgattcctgagataagaaagtggatttgatccccagtctcattgcttagtagaataaatcctgcaccagcaacaacacttgtaaatttgtgaaaatgaattttatctttccttaaaaaagaaattttttaatccatcacacttttcttccctaccctttag

SEQ ID NO: 46297 - DNA, 581 bp, Homo Sapiens
  misc_feature (560)..(560): n is a, c, g, or t
ttttgtatcttctttgttttgacacactcccctttgcttttatctcttacctgccagaatgttctcaaatgatttagttcaaatactgaaatacttaatgagcaattacttgatttttaatgatgacttcgaaggagtcatcactaggtgctttgtcctttttgtattctagttgcacccacctcttggattggatatagcaataacatttattggccgttgtgagctcttgatcccagtcattacccctgagaactaaaaatagatggttcttaattcaacttactgaaaatttccccaaacaatagcaaatctgacttttccctcttcagttgcctggtattaaggttggataaatgaagcatgcacagctacaggctttctacttaacttctgggtttgctattacaaatcctatttactctcatacccttctccttagtccttcatatttctctgcctctattcttctatactgcagatttttctcacctattgtacaaagaaattgcgatgtatattttcatgtaatttgattttggaattctgtcaccttatgnagtgagttcttccaaatataa

SEQ ID NO: 46298 - DNA, 583 bp, Homo Sapiens
ctctccccgggcagccgcggcggcagcagcagcagcagcagctggagctgtggggctgtcaccgccgcccgccccgctcactcgcggatcccgaccgcccatctccgcctcgcttccagcccaggatgagacttctgtgagcagcgaggattttgatatgagcgactccacatggatgtcagctgacccgcacctggcctccagcctgagccccagccaggacgagaggatgcggagcccgcagaacctccacagtcaagaggacgatgactcctcctctgagagtggcagcggcaatggctcctccaccctgaacccatccacgtcgtgcagcacgcagggcgaccctgccttccccgagatgaatggcaacggcgccgtggcccccatggacttcaccacggccgccgaggatcagcccatcaacctgtgtgacaagctcccgccggccacggcacttggcacagcctcctacccctcggatggctgcggtgccgacgggctgcggagccgcgtcaatacgggggtgaagaccacccccgagtcccccccctacagctctgggagctacgattccatcaag

SEQ ID NO: 46299 - DNA, 843 bp, Homo Sapiens
  misc_feature (751)..(751): n is a, c, g, or t
  misc_feature (816)..(816): n is a, c, g, or t
ccacccgccaaggaacactgatgagttgtgggacattatggtcggccaagtgaggaatgattgcagggaccagagaagaccaaagatgccagatgtccccagagtttcttgagggctgggtttcacgtctttgcttgtcctttttgtccccacttgcctgcaccgtgcctgactcatccagtggggaaggtgactcaagaagttgtttaagcctaggcctaggcagtccacttcgggaggtgggggcactccacactggggggccctgcagctccagggctggtgctctagcagatccgctcaggcacggttgggtgaccgtggggtcaccgattgcgtagattatttctagggcagtgctgggttagaaatgtctgtctggaaacaggacacatcttgccaccacaagtccacacctggccttggctgctgcccgctctctgcagcgtggatttcctttgcccatttgggccagaaggtcaccaggagttcatcactgcttagtgtcaacttgacatcttcagcttccagacagaaaacccatgctttactttgtacagccctgtcccagagttagtaagcctcggcttgtcacctgcttgcaaagggtatagacatcattctgggtagttctagaggatatcgcaacaagtgcgtttgaaggttcagcacagctggaattgtacggtagtgagctcttcaaaatgaaaacagaatgaccgggatggccatctgtcctgggaaactgtanaattggaataaatcactgaaaatagaacactttctttggaggctttctttcagaactgaaactanaaaaccaaggtttcccagggctcccca

SEQ ID NO: 46300 - DNA, 603 bp, Homo Sapiens
gggaggggccctgtcactgtccagagtctctttttacacttcacctccttctgcagtcagactgaaatataaaaaaggtggtggtggtggtgaaggggctggtggagatgtaggaaccgatctgctatttttaatttcctgtgaggatagagacttgcagttagactcaaagaagtactgtactttcccaggttgactaagaaatgccagtggtggaggtgggtgtttgggaaaggcagggccctgaaatggcctgtccctagggctctccaagcactagccttcccagcttcccgccgccccccccatctcttcctgtctaacttggggaaggggcctgggctgtgaggacagggcccccacaggggatggtttcacgagtgtagtcccggaggccttccctttacagctctcctccagccctgggcacatagcataggctggggacacaggatcctggcctgagaattgaggggaggtggccagcccgcagaggtggggtgctggggctgcatgatttttgccctgcgtcccttctctttggggctcctttcccctctcatacataaaatcgctttcaaattaaaatcgctgttttctgga

SEQ ID NO: 46301 - DNA, 553 bp, Homo Sapiens
gggatgtgggaaccactatctcttgggagcccccaaaagctgggaaatgctggaggaaccaggcctttcccgcttttgcctggctgcagggttcggctccgcccctgccccccagccctcgtgtgtacacaccgcagtgcctctgcccctcgggggactggacacacatcctgccagaggcgctacgaagctttgcccagatgaagccaggtgggctccgcgttcactcccactctcccgaggggtgctggcctccccagggtttgccttcttacggatttagacgaggttcgaggctcacctatcagggcagctctcaggattgtcattttcctctttgcctgtgggtttaacttttgtatttttttaatcacaagtttgatacaaaatgtttttatcgtactctttggagatgcccattctacttttgaatttagcttttactaattcgcatctggaagctcagcaagtgcacaagccttactttggttaccgtggaaaccactgccgcccctccccgatgtggtgcgctcaataaaaatgctggaattca

SEQ ID NO: 46302 - DNA, 697 bp, Homo Sapiens
ttttttttttttttctttggaaaaagagcatttaataccttaagggagagtaggaactttcagttacctaagactacagccaacccccagcccagaacaaaaacaagacaccttaatgtttgttcaaagacaaacccacagcgaacggctctcgcacccctgctctaactcctctttctgggggaggaaggagggaagggccaggtccgcggggaccctcactccctgctttctatcacacgggtcacaaggcagctctcagagcagaaggcacacacactgcagtggaagttgagaaaggaagtcactccaaggtacacactggcccaaagaccaggaaaccgtgccacggagctggaaggcaaggccgatgggacggtgcaaggaccacgcccacgatagcgcctgccgccccgaagggcctcgtgacacatcaggtcacatctccagtcaccttatttgtacacagttctctcctggaaaacctttcatttcttaagagtaaatgtgactagttagaggctaaaaaaaaaaaaaaaaagaaacaagagaccctgcccccgcaaaacggaattagaaggaaaagtacatctcagtgaaaccttgttacaaatgccaaggtttcccaggcctgtttccagggagagtagaatcttcctccacttccacgtaactcactgaattataatttttatag

SEQ ID NO: 46303 - DNA, 843 bp, Homo Sapiens
tgtgataaatctatagaaagaatttagctgcaagtggacaaaggaacaagcccccagaaaagaaagggaagaactgccttcttatactacagaacatgcattagtgtgggctatatagctgtggctcatgctacccaattccagatttctttgtcctctaagagttgattgctgtatattaaaattgaacatcagaggatgggaagagggctctgtaagccagaaccttactaaagtagagggcacaatcagtgtgaataaattcacttcagaatctcaagtcaaggccaggcacggcggctcacgcctgtaatcccagcactttgggaggccgagacaggcggatcacctgaggtcgggagttcgagaccagccttaccaacatggagaaaccccatctctactaaaaatacaaaattacctgggcgtggtggtgcatgcctgtaatcccatcatctactcaggaggctgaggcaggagaattgcttgaacccaggaggcggaggttgcagtgagccaggattgtgccattgcactccagcctgggcaacaagaacaaaactccatctcaaaaaataaaaaatcccaatcccaagtcgaaatcacttcttgttttaaaccaagaatgaatcattactgtgtatgttagggtattaaaactgtttcacccgtaccagtgaaaagttgtttccaacattttaaacaaacagggggtatagactcttttctttaaccattgtatattttcttccatccttgtcattggccaatagggggagcggaaattagctgctccaaaatttcataaaggggaatatttctaaaaaaaaaaaaaaaagggcg

SEQ ID NO: 46304 - DNA, 802 bp, Homo Sapiens
ggggaagagagagtttatttagtcaactggcccaaggcagcgaggcttctacagtcccacaccccatagccgcctgggctggggcttactgggggctgaaggttctggacatgaacaagggtcaggtagaagagaaaggcttcccctacaccccagcctcctgctgtcccctgaagcccaggactgcgttgtatgctttccatccactcaccttaccccatagcatcttgcggcccagaaaccagagccatttgtctcagaccctaaatcaataatcacaaaccccaaaacgggagagagcagtgaaaacatgcagggctgtggacgggggaagggttgtggcgggtgttctgaggctgagaggacacctatatgcgtatttcctctacacacatcaccccccttctataatcttaagccatgactagcctggtggcgtgttagtttctgcccagttctaccccctcatgtgcttcttctgaatactgaatgtgactgtttgaaagctggtagaattcatccctcttactgtagataacactgcaaatcttggaattttgttttttgctgtttccagatgtatctataaatatctatacattatatgtgtgtgtgtgtgtgtgtgtgtgtgtgtgtacatcgggtcctcccatgtgtggtgttcttctggagggtgtctcctttggccaggcggaacttttaatgggtaattatttcctcctccgcacaaagaaaagaagcctaatttttggggatttccgggcgggctggctgttcctggaaaaagaataaaaatggtaac

SEQ ID NO: 46305 - DNA, 881 bp, Homo Sapiens
  misc_feature (603)..(603): n is a, c, g, or t
  misc_feature (608)..(608): n is a, c, g, or t
  misc_feature (627)..(627): n is a, c, g, or t
  misc_feature (636)..(636): n is a, c, g, or t
  misc_feature (666)..(666): n is a, c, g, or t
  misc_feature (670)..(670): n is a, c, g, or t
  misc_feature (674)..(674): n is a, c, g, or t
  misc_feature (682)..(682): n is a, c, g, or t
  misc_feature (700)..(701): n is a, c, g, or t
gactcttcttcttgtaatggctgcccttttcctacctgaggccgtcttagagaaaggggccagtctcctctaatgctcagatttcccatagttggcttttgctgtgtctcctgcctcaggcagtgtcatttctgggagcaggtggttgtagtccaggcccctccccagcagggtctgcccaggctccttcgagcccctttccccgcctcctctcagcctgtccggatgacagtgttcgcctcctgtttagactgtacactcttcaggggtaggggtgccgtcagttcttcaatcagctggcacacacttgtatagtgaaatgtttacatgtgggaaaactccgccttagacaaactaccaaagtacaatcgtgtctctctctagccggaatgctacagagagaaatggaaccttagatttgcaacaaaagtctgtaaactggtctgtttgccaaagtgaacactggatgactaaggagctgaagaaggcccccagaagcggatttgtggtgggttattttattttgcctgtggccaatcttctgtgaaatacaatgtgctgttggtgcaacagatgattcaataaatgtctacagcagaaaanaaaanaaaaaaaaaaaaaaaaaanaaaaaaaanaaaaaaaaaaaaaaaaaaaaaaaaaaaaanaaanaaanaaaaaaanaaaaaaaaaaaaaaaaannaaaaaagggggcccccccaaaagaaaaccccccggggggggcccaaatatttaccgtcccccctttttttttttttaaaaagggggcccccctaaggggggggcgtattaaaaaaaaaattggggccaggggggtctcttttttttaaacacaccttttggtggggtgggaaaacaactg

SEQ ID NO: 46306 - DNA, 689 bp, Homo Sapiens
  misc_feature (518)..(518): n is a, c, g, or t
  misc_feature (679)..(679): n is a, c, g, or t
cccacgcgtccgggcagatgcaggcgggcctcctcccaggctgctccagacatgggggttggggatggggggcaccttgcagccccttcctgctggggctccctccttgtagcaccccccttgcggctcagctctggtttcctctcccaggctcacccaggctctgctcaggctgggaggcagagggcacaaaccttataattttttaaatgaaaaaccgctgctgctggctgtggctagagccccctggggctgctggagctgctgcctctgttctggaggacgagccttctccttatctgctgcccatctttccaggaagtcaggatggagtcagaacaactacagtcatcccccgtggtgtctgcacatcactccagccccataaagagtgtcatgttagctgagtcaccatttggcttcggcctggaaatagtgtgattagaacactgatcgtgtgcgaggccaggagatcaagaccatcctgactaacaaacacagtgaaaccccgtctctanctaaaatacaaaaaaattagccaggcgtggtgggtgggcgcctgtagtcccagctacttgggaagctgaggcaggagaatggtgtgaaccccgggagatggcgcttgcagtgagctgagattgccctccaggcctgggcgacagcctcaaaaaaaaggacnaaaaaggaca

SEQ ID NO: 46307 - DNA, 803 bp, Homo Sapiens
  misc_feature (758)..(758): n is a, c, g, or t
tcagaaatggcacgataagacaaactggcttctggaaaactggggaagggttttggtgcctttgaacgctcaatcttgactcagatcgaccatattctgatggacaaagagagattacttcgaaggacacagaccaagcgctccgtctatcgagttcttggcaaacctgagccagcagctcagcctgtcccagagagtttgccaggggaaccggagatccttcctcaagcccctgctaatgctcatctgaaggacttggatgaagaaatctttgatgatgatgacttttaccaccagctccttcgagaactcatagaacggaagaccagctccttggatcccaacgatcaggtggccatgggaaggcagtggcttgcaatccagaagttacgaagcaaaatccacaaaaaagtagataggaaagccagcaaaggcaggaaacttcggtttcatgtccttagcaagctactgagtttcatggcacctattgaccatactacaatgaatgatgatgccaggacagaactgtaccgctctctttttggccagctccaccctcccgacgaaggccacggggattgacatcgcccacctccgacacccagtgggcgccttggctggtgcggctgctggtccagatggaggaaaccagtgactttatggggctgagctagtagggaagcccctggaaagatgctgcgttccgaacctgtgcctaatacacgcaagggcgctgtcccgcccaaccccgcctttanacgccacaaataaagagcattgttaccgccaaaaaaaaaaaaaag

SEQ ID NO: 46308 - DNA, 551 bp, Homo Sapiens
  misc_feature (474)..(474): n is a, c, g, or t
gtgttaccttattaaaatgaccaccattctaaaccatttttcagtggtctggatacgaagtttacagtttcataccaactatctaaaacctaattgcaaattgaccacagacctctaacctcctacttttatagacttgaatacttaagtaatttaaattagggttggtatttcatttttttcttatctaaatcttagtttcctggaataataaagtttgatgttcagcaagagaactgcttgagtttaagccattttcaaaagaaacttgccttttacattattgtgttccagaacattaagtgactgtaggtactgggtattagtgatggtaaactttgtgttgctctttatgaaatgatccatataactgttgggtgcatcagtgcttttcaaaggggctgcttactatagggttaactatgtatattcattgttaagagttaacttgtggtttggctgtttcctggattntataacatacatgtgcagaaatgtattcaaatgaaaggaagcatacctttatcaagatgctattaaaattgaacatc

SEQ ID NO: 46309 - DNA, 967 bp, Homo Sapiens
accggacgaaggatagaaacatttgtattctcttttttggttaatgcctaaaaatgcctatttgggattttttttttttttttaaattaagagaagctctcttctgtgtagaacagttgttccaaaatagcttagtgttttgttttcctgttgcatgacagatttaactattctttccagcagtggaggtgctgtcagagtccagtgttctagaagaggcagtgtctaaagcctaattttacttttctaattctggtagctattaccaggaatttttgaaagttttgtttaagtagtctaatattttttatgtaaagagcattaaattttgctatgtataaatttttgtaacctaacagtgaatcaatattttctatcagtgccaagggcttcctgtagttctattcaagtgttacaataaatatttgtagataatagtccaaaaaaaaaaaaaaaaaaaaaaaaaaaaaaaaaaaaaaaaaaaaaaaaaaaaaaaaaaaaaaaaaaaaaaaaaccccaaaaaaaaaaaaaaaaccccccttttttttaaaaaaggggggtttaaaaaaaaaaagttgtgtttcaatttttggtccacaaaaaagggcctttttcttcaaaaaaaaatcctttttttgccccccgtcggaccttgggcgccgggtttaaaaaattggatttttttctttcccaaaaaaaaaaaaaacctctcgggaaaaaaaaaaaggtggtcgctttcaaaaaaaggaaaaaaggggggggtttataaacccctttttccggggggaaaaacttccggccgcccaatttaatattcccacggggggaggcgggttttttacgggggataaaaagggggcccccccagataattgggcgcgacacagggggggagaaaaaaccactacttttggtggggagaaaccccgtggggcccaaaaatattgttttttcaaaaaacagggag

SEQ ID NO: 46310 - DNA, 631 bp, Homo Sapiens
  misc_feature (630)..(630): n is a, c, g, or t
gtaggtattgaaaaagtttggaagcactgatcacctgttagcattgccattcctctactgcaatgtaaatagtataaagctatgtatataaagctttttggtaatatgttacaattaaaatgacaagcactatatcacaatctctgtttgtatgtgggttttacactaaaaaaatgcaaaacacattttattcttctaattaacagctcctaggaaaatgtagacttttgctttatgatattctatctgtagtatgaggcatggaatagttttgtatcgggaatttctcagagctgagtaaaatgaaggaaaagcatgttatgtgtttttaaggaaaatgtgcacacatatacatgtaggagtgtttatctttctcttacaatctgttttagacatctttgcttatgaaacctgtacatatgtgtgtgtgggtatgtgtttatttccagtgagggctgcaggcttcctagaggtgtgctataccatgcgtctgtcgttgtgcttttttctgtttttagaccaattttttacagttctttggtaagcattgtcgtatctggtgatggattaacatatagcctttgttttctaataaaatagtcgccttcgttttctgtaagaatgaaaaana

SEQ ID NO: 46311 - DNA, 807 bp, Homo Sapiens
  misc_feature (781)..(781): n is a, c, g, or t
ggggtcatttatatttgttaagaggaaataatcaagatcactcatatcccaactgaatctgaggttttataaatccctcaaacgattgctgagagcctgattgtggaaagaagtgagatgcaccttattttcaagaagtcctgggaagcgctctcctagcacggccatttccaggaggagaagcaagcagatgagaggttttccattttgtcatccaaggtagctgtgcacttgccttgttgctgaagttccaataatgtgaaaaccaaagtagaggtttttttcttcttctttttgttttctattaatttcacttataccaaagtgtttgaaagtatgaaatgtgttgcttctgagctatataaggctacttcatgacaagactgctttgtaatatttcactttgttttactacaaattcagatcactttgttttactataaattcagattatccaaatattttcctaatactatgtgggaatgctgattttcttttgttacgtagtggaaacattttgcattgtttacatagttctcatggaacatggaaaatttttgaaagtgatatatggatacacaattttttggggtaggaattccaaattaagttggaaataaagccagtaacaattaatggcaattttttgaagcaggcaaaacctaaagggattttctccctgggcctcccctataaaagtggtcccccaatgaaaactccgagggttttaattcccccctttttccatttttggagagacacccggccttaataatggggncccaaggtatggttaaacacgcttat

SEQ ID NO: 46312 - DNA, 460 bp, Homo Sapiens
tgttaatagtctcatggacatggaaattttgaaagtgatatatgatgcacatttttgtgtatgtatactaattagtgtgaataaagcagtaacattaatgcattttaagcagcaaacttatgtatttctcttgtcttccttaaaagtgtccccatgaactcagtgtttattcccttttcattttgagtaccggcttatatggtcagtatgtaacgttagcattggctcctaatggtagaattagaacagcaagattgtagagctgtaattgactccagacaacatagatttcagccacctcattccacagctgaggccaggacaataaatgcctttcccagactgggtagtggcagatctgggatggaatatggttttcttgattccctttcagccttcatttctctctctcaggactactacttcttaattacttttcacttaatttcccaatactgat

SEQ ID NO: 46313 - DNA, 879 bp, Homo Sapiens
  misc_feature (802)..(802): n is a, c, g, or t
  misc_feature (829)..(829): n is a, c, g, or t
  misc_feature (878)..(878): n is a, c, g, or t
caagggtcgagaggaggagagtgatcaaatccgggagaagttcgctgttcctgagagcgatcatttgacctacctgaatgtttacctgcagtggaagaacaataattactccaccatctggtgtaacgatcatttcatccatgctaaggccatgcggaaggtccgggaggtgcgagctcaactcaaggacatcatggtgcagcagcggatgagcctggcctcgtgtggcactgactgggacatcgtcaggaagtgcatctgtgctgcctatttccaccaagcagccaagctcaagggaatcggggagtacgtgaacatccgcacagggatgccctgccacttgcaccccaccagctccctttttggaatgggctacaccccagattacatagtgtatcacgagttggtcatgaccaccaaggagtatatgcagtgtgtgaccgctgtggacggggagtggctggcggagctgggccccatgttctatagcgtgaaacaggcgggcaagtcacggcaggagaaccgtcgtcgggccaaagaggaagcctctgccatggaggaggagatggcgctggccgaggagcagctgcgagcccggcggcaggagcaggagaagcgcagccccctgggcagtgtcaggtctacgaagatctacactccaggccggaaagagcaaggggagcccatgacccctcgccgcacgccagccccgctttggtctgtgactgagttccaaagagacagatggctgactcgcgactagtggaagctctcagattcggaagccagatcgtgcactgcnaggattctcacgtcgcgtatagtcgcnagggcctagcacgtgtgggttctgcacgttgttattaagtgtcctttanc

SEQ ID NO: 46314 - DNA, 573 bp, Homo Sapiens
cgtccgccccagaaagagtccttaccttggagagggtcctggagagaatttcctcttccccagctaaataccctgcctgcaactgaagcagacccgggggtgtcctccctgccctctgcccagaggccacctccactcctacaaaaagtattgtccagacaagagtcactggcccctgctccagcttctgggtatccagagagcactgcacttccccaaaacggaaggggcccctgggcagtgggttttgggcaaattccctttctttgcatccacaatgtggggtcggagcttgggggcaggtcctgggagtgggaagcctcttccttgtgtctttcgctccacttttagctcatcgcaccaatattgcagacttggaaggaagcataagcttcccatttcacaaaggggaaactgaggtgcgggtgcgcgggcctggggacggccgtcccatggcttccatctgagccacctcgggaccccagcgctcctggcgccctcttctcatcgcttggcctatgacaggtcaccgtgtgtaaatctttcccaataaagtgttgcacaaagaaaaaa

SEQ ID NO: 46315 - DNA, 659 bp, Homo Sapiens
aaatttctcaggaaaatacatggtgaaccccaagaccagtctggattcaaaccagttgtcacagtgggaatggggtcattcgatctgcatgcatccctcatacatctggagacttcgttaaggttccagagttactgactgagatttctgagcttttttccccttttctgtttggtttcagagtggagagcagcccaaaaatatgcaggtaactgaagccaggaaactgatttgtgttttggtttggccggatcttaaacagaagggaggtggagagatctgagattagaggacggggctttataggagccaagtatggggcctgcacacacaagacacacacgcacacttgcaaacacgccacacgacacatatgcctgcatgtgtatgcacacacatgcacacgtgagctcccaaacacatcgctccttggggttacactaggtttgtttccatctggcttgaggctatttgcaggcgagagtgcagagtctgtaatgaacctcccagattctctgacgaaggggtcccctaggttcccatctgtcagatggcatggggtgttgaaatgtggggcactggactagatgatctcaaaggtccttttaaaatccttttaaaaacttttctgaaggactgtatgtaaaaaaaaaaaaaaa

SEQ ID NO: 46316 - DNA, 982 bp, Homo Sapiens
ataggcatcaatgggtggtatttgctttgtaactccccccaggtacgatagggactgaatatggaccctgctgaaagcagtgtattgacgcatatttaactcgccctctatccgtagagtagtcatgacactatacagatggttcgtgttcatactgcagcttaaaacaagcaaaatacacagatgataatatgctaaattttcctctatcctgtacatttcacaaaaaggcatatgcaatatttacatttttaatttagtttacagaatggaaccaaaatgtataaatgttatgtttgctaaaacttcacaatgtatattgggtctttgtacattttgcctgacttaccttaaatttaaaatattttttgctatataaactttaacagttattaaacagtgttttctttttgggtacgtattgtttctggatatcaagatgttaaatatatttcttgctattgtgatatgacaagagacttaacttatcttgctctgtcttccactgtacacgctgtatataggggtcaatgtgatgctgctggagacgagaataaaactggactagaatagtgcattgtatttagtctgtattgatcatggatgccctccttaatagccatatgcaataaaataaagtacattatttatgaaatgaaaaaaaaaaaaaaaaaaaaaaaaaagaaaaaaaaaaaaaaaaaaaaaaaagaaaaaaaaaagaaaaaaaagagagaaagaaaaagaaaagagagaggagggagagaagaaaacagcgaggacagacgaaagaaacacagaaaaaaaaaaggcacaaagaaagggaacaaagaagaaagagacgagaagaaaaaagggagaaggacgaaagcgagaggacagagagagagcacacggagggggaaaaagaaacaacacagaaaacacagggagaaaaagcggaggcggaaaaccacaagagcggaaaagaacgagaggagaaaaa

SEQ ID NO: 46317 - DNA, 662 bp, Homo Sapiens
  misc_feature (564)..(564): n is a, c, g, or t
  misc_feature (629)..(629): n is a, c, g, or t
gtgactccagagcttgtgacattgatgtaaaactctgacaggaataaaggatttattgatatcattggttctcaaactttttttggtctcagggcctctttatactctaaaaaaattattgaggatccccagagagcttttgtttatatgggttataattatcaatactaacagtagaaattaaaacaaatttctaaaatgacttttctaaaaaagctgagaagagtagcattttacatttttacagatattcaacatgtgtcttaaggcaattttacttaaacacatttgattgctgtggcggatcattttggtggaggtatatgaagacaatccaaagtcacaaatagatgaaaaaagggggccttacacaaccccctcccaaaaaggactctggaatccccagtgaatccgtagaccacattttgagagccactggtttatattaagtactttctagcgcagggggtccaatcttttggcagccctgggccacattaggagaattgtcgagggctacacgtaaaatagacttaataccaaccatagctgatgagctaaaanaaaaaaaaaaaaaactcgagggggggcccggtacccaattcgccctatagtgagtcgtatacaantcactggccgtcgtttacaacgtcgtgactggg

SEQ ID NO: 46318 - DNA, 902 bp, Homo Sapiens
ccacgcgtccgcaagattttccttttttatacacataattaaagtgtccattgacatgtacagagaactaacactattttatgcaaatatttttttgtagatgaaaaagcatgtacagtgttctgtttaatactcatccttgtataaaaaaatagttgagccagcagacattgtcagcaaattaattggcagcagattttaggaaatgaatgtgtgtggttttttttctaaaactaaatagcatgtattgtgtcttttgcatgatgatccggatttaatttgatatcacagtctaatttttattcataagccaatttttctgcactgagcagagtcttgctacctcagtcagtattgttttggtttgctacttccctcacccactttggcctccgttcaccccaccccaccccacctctccccaccttacccccgccccgcttggcttcttctttaggattgtgatggttcgttctgtttacatcagttttaacgagaggtatgcctgtactcgcttgtgcagaaaacattgttccagattcaatcgactgggtttatgtcccttcacatagttttttaggttatttatttaaatgtctaatgtattttattgtaacagacattgttttgccaacattgcctatttcagtggcacgtcatctagttttaaaaaaataaaacatttttaattggaccgagaaaaaaaaaaaaaaaaagggggggccgcttctaagagtatcccctcgaagggggccccaagcttacccgtaaccccagcttttttttgaaccaaaggggatcccctaaaagtggaggcccgtatttattaagctaaagggcactgggggccgccgtatttatacaacaggtccgtaggactgggggaaaaaactggcctaacc

SEQ ID NO: 46319 - DNA, 654 bp, Homo Sapiens
agaaaggaaaagtcacttaagatagtattaagtaattaaattcctatgtcagttgccaaatcttttaaacttatgtattcaccaagcccaaaaatagattgtggctcccaggattccaattttaattggagagctaagtaagtaaagttttataactgttaggtttcttaatgatcatattttgcagttttagtaaaagggaaatattgttatacatttattaaatatacttcccccatgaagtgaaaaggttaattttgctgaatgttttaagttgaagttacttcatggatgtcatacccatgaagtgcatttggatgagatagaagaaattgttttttaaaaagtttaagtaccaaaggtagtctagtctagaacgataagttaatacgtgttggcttttctaatttgtactgtaacatccttatactttctattttaagtatatctgtttcttaagtaaacaacttagatattttccacaccttttttttttttttctgatgcagagttcaggttaatattttactgcatctgataatgtattatacgtttgaagcctagtgacttttcattttgacattcttgtgatttcatatgctgtattcttcaagcaataaaattgtgatgtgttttataaaaaaaaaaaaaaag

SEQ ID NO: 46320 - DNA, 643 bp, Homo Sapiens
ggctaagagtagcaggaactctaagaccacagagttttttataaatgtataaatgtatcaagccaaatgtgcagatgctaactggacattctggggaactgggcaccaggagtgccttcatacactgtaccccagctctcttctaaaagagaagtgggtgggcacactgaactgtttggtggccccaaccacaggaagctgcaattctgtggcttagggtgatacttttgccctccttgtgcccctctcagctttccatccccagctaggaagaaagaatggcactcttgggcttggcccagaattagagttattagagcaagagagagcttaggaagcatgagggcaactatagtgaggccttattgccaggagggagggttttggttgctggcgcttgtgtataaaggggcaagagcagctcctttggactattcctgggaggactctgatgcagggcgtctgttgctcccctgggtcacctcctccctgctcgctgacatctggggctttgaccctttcttttttaatctacttttgctaagatgcatttaataaaaaaaaagagagagagagagaggtgtgagggacaaaatgcaaacctatttcccttgcctcataggcttctgggatgtcatcacct

SEQ ID NO: 46321 - DNA, 963 bp, Homo Sapiens
ggtagcaaccatctagatttgagaaatatcttgatatatctttaatggcatctagaacaatatgcaataaaacttagtctctgattataaacagaaagtggttaggaatttgaatataaaatgttcttggttaatgtaagaagcgtgctccttctgtcgtaccctaatgtgtgtatatatcgtgtatctattgggcagtttaaatgtaataacgactgtaatactgacataccttgatacaaatgtttaatcctttagtgaagatttcaaaaattgtgcagctttttttttaatcataaaatggtgttgaagtttgtatcaaggtaactacagttttacatatttaaatctatattacaggtttcttcatgggtctaattttgcctctcaacctgtctttattgccaataaattattgtagcaattattgtaaaaatatttgaaccttagaatatcatcttcattatttttatgttctatcatgattctccatgatagaatcatggaggcaagctgatgaaatccaacttcctcattttaccaatgagaaaacaaagacctagaggagtactgggaatagccataggtgatagaataggtaattaaatatatctgtcaagactaatatataaggaagcttgatgatgatttactacttattacaaactactgggccttctaaggtaagattgcttctaaggtaaaagacactaatactatctttgtaggtgaaaaatgatacaatgatgatgcatgttctgttacatttcagaaagaaacacctccctatcagctaccccgatgagaggggagggggcctcaagccatgtttatcccaacttttaaatcacgtgaccataacatatttttaaaataaaataatttgtacttgatttaaatataagtgaaataatttgggrgaataatttatgtatttataawaaatgtaattatgaattgraa

SEQ ID NO: 46322 - DNA, 498 bp, Homo Sapiens
caccgccaatgacggggaggaagcttttgaggatgaggaagaggagatcgatggatagtcggaatagagccgccccaactcagatcctacaacacgcaagttccttcttgaaccctggtgcctcctaccctatggccctgaatggtgcactggtttaattgtgttggtgtcggcccctcacaaatgcagccaagtcatgtaattagtcatctggaacaaagactaaaaacagcagagaattgcgggttctacccagtcagaagatcacaccatggagactttctactagaggacttgaaagagaactgaggggccacaaaataaacttcaccttccattaagtgttcaagcatgtctgcaaattaggagggagttagaaacagtctttttcatcctttgtgatgaagcctgaaattgtgccgtgttgccttatatgaatatgcagtatgggactttgaaataatgattcataataaaatactaaacgtgtgtcttcaa

SEQ ID NO: 46323 - DNA, 684 bp, Homo Sapiens
caacctcccaggctcagtcagtcattctgcctcagccatcctaagtagatgggaccacaggcacatgccaccatacccggttaattttttgaatttttgtagagacagagtcttgccctgtttcccaagctaatatcctacattatatgatacatgcagaaaaaaactttcttcccctttaccccgagtgccctttttagctactttttatcctttacccatacttggagtagtttatattatatacaagtgctttttacaaattagtgaaataaggctctttattataagtgaaaaatgttagccttagttctaggtcattcagttagtttcccctcctttcctagagactcaattaacattgtagactttaacagtttacaaaatgcatgataaacatttaaccaagcatttgcagtccagatggtcttcattcctttctcaccatagctgtgaggtagaaagggctggtaaacgagctgcatctcctcacttgtgattgaatacttgttctagcagaccatctgccactctaggacaattaactgggatattacttagatatagcaatagtagtggtcttgctgttgcttctatgataaatactcactgaattctagatatttgcatcattcatcgttgtttctgaaaaccaggctacctgccagtaaaaaaaaaaaaaaa

SEQ ID NO: 46324 - DNA, 752 bp, Homo Sapiens
  misc_feature (725)..(725): n is a, c, g, or t
  misc_feature (740)..(740): n is a, c, g, or t
tgacaaacgtctgggaaaacagcctcaccccactctcctctctcttccccatttccttgtagctttattccttgcatctttgggtctactgagcagtgggtgctgagatgacaggggaggaaccagttgttctgtagcctaggaactgcctcagtgtctttgccagaaaaaggcaaagaggcggacagtgcagggctcctccctcctacctcaggcctgatccatcgtgcccttgactttgccgtctcaaagtttcttagctgactttggctttcacatttgttctttccagagctaactgataagagtggaggaggaatgccttctcctaagagtcagttgaaagaaagacaagagagtcacatcttagcttttgcacaaggcattcgtggtcaggaataggttagggaatggtcacttctgattttccaacagttgctccttctctgaagagatcttgattcctttgggaagacaagaatttttcttaataacaaaggtccctttatgagttattccttctttcagttcatctcactggagcacagccaagatggacatgtttatggacagtgctctagatgtgaaaacagatagaactggtttgtgggacaggggcagcttgctcaggagagggaataacgcaggtcccttttcttggaggcttgtactatggccatgacagtgacattgccctcaccatgatccctctccaaagtggttgnctttctttaccttgngtcttctcttgg

SEQ ID NO: 46325 - DNA, 424 bp, Homo Sapiens
gtatgagatacaccaagatagtgacttcccagcttttctccccaaagcacccctaatagctgagaagaatctggaggcatagctaccatcacagctacactaaccaccatactttactgtatccttcaggtgtctgtcctagctagttttgtggtctggctccttcagtccctgcaacaagcctgtttattttcattatattgatgaggttatagagcttggacaagttacatgacttttcgaagatcacatagctaataagtgtcaagagtcttattctcaaaaccctggtctgtccaactacaagcctgtgctcctgactccactattctgcttaccctaagcctaaagctgcccacttcaagctcaaatcctcttggaggcttcatgctttaaaaaaaaaaaatccatgcaattttttgca

SEQ ID NO: 46326 - DNA, 595 bp, Homo Sapiens
gcacgagttttatggcgttaatttcctgccactacagatcttttgaagattgctggaatactggtgtctgttagaatgcttcagactacagatgtaattaaaggcttttcttaatatgttttaaccaaagatgtggagcaatccaagccacatatcttctacatcaaatttttccattttggttattttcataatctggtattgcattttgccttccctgttcatacctcaaattgattcatacctcagtttaattcagagaggtcagttaagtgacggattctgttgtggtttgaatgcagtaccagtgttctcttcgagcaaagtagacctgggtcactgtaggcataggacttggattgcttcagatggtttgctgtatcatttttcttctttttcttttcctggggacttgtttccattaaatgagagtaattaaaatcgcttgtaaatgagggcatacaagcatttgcaacaaatattcaaatagaggctcacagcggcataagctggactttgtcgccactagatgacaagatgttataactaagttaaaccacatctgtgtatctcaagggacttaattcagctgtct

SEQ ID NO: 46327 - DNA, 565 bp, Homo Sapiens
  misc_feature (544)..(544): n is a, c, g, or t
  misc_feature (550)..(550): n is a, c, g, or t
  misc_feature (556)..(556): n is a, c, g, or t
tggggggcaggaccgggctgctgggccctcatgtgggagagaggtgaaaagcgtcccccactagggggctggcagtgcatgtgcttgagttaaatgtgcagggcagacagagccagaagggcctgtacccaggggctcgtcccctcctccggtttcccagacaaatccagacaccagcctttagggtggccttgggaggagagggccaggctgtcctgggtgtgagagaactagatagagcctcccaaccctgatttagaaatgcattccttattttgtctagaaattaataaatgaactagcttgttttgacaggtttatttcacatcctatgaatgtatgtaaataaactgtacataggtccatccacataaaatatcttttaataacatatcaacatttgtgtaaatttgaaatttaaaaaaatctatgaagctggtgtacatatgttacaattacgtatattttctttggtccttcataaaaaatatatttactttgccaaaaaaaaaaaaaaaaaaaccttatgcggcccgcaagcttnttcccntttatngagggttta

SEQ ID NO: 46328 - DNA, 623 bp, Homo Sapiens
ttttttttttttttttttacaaaaggaaaaaatattttggtttgaaaatctttgctacatgtcattatttttgccactgtaaagcttagcacagatgccagcaatacagaaatggccaacaagaaaacaaaacagtcaaaaataaaaccctgaaggaaaagcaaaaacaaaacccccagagcatcttctcgctatcctccccttccccaaaagccctataataactgtacaatattatagtcctgatcacatttaaaaagtcgattattaaaaaacaagggttccattggaaactcaactttttggtttcgtaaattgtgatataaatatatatgtatactgtaagtgtgcacatagaataaaaaaataaactgtctccttttttactccactacctggcaccagactggagacataaggaagggaaactcagcaaatggacattcctttggcctcttcaaggccacccttgctcctcagtcccctatgactacatttaatatatcttctcattaattcagtcttgcactttagctactggccaaagccaatttaaaaaaaaaaaaaaaaaagcctacagccgcggccgctccaacatcagaatggtaaccctcgtgccgaat

SEQ ID NO: 46329 - DNA, 727 bp, Homo Sapiens
gccgcggagggagcgagcgagccggctagaggccagcsccgccgccgccgccgcctccgagccgggcagcaacagccccggcagcggcgcaggctccagcgcgccgggcccggccggccgcagcccccgacgcctgggtgcgcctgcctgccggcctccgcaccgtccgcsgccgctcccggggctgttgtgtctgcgactgctcccggccggaggtgcagggagctcagccgagccgccgctgccatcccggagcgagcaagcgagcgagcgcgcgggakkkakgwakgtggcggcggaggaggaggaggagcgggaggagcgcgggcgggggcgggggccgccgggcgggggaatatacaaagtgaagccacattgccaaacttgcagcagcgattgcagcagttgctgccgctgcgccgcgcctgaagccgcgccgcgcgggccgagggctcctgcagctgctcgcgcgcagtcggaggcggagaaggacgaagactgagactgacacttctgctcccggccgcccggcacttacgcgggggccccccaacccgccccagagcaacgcgatttaaaaaaaaaaaaaaagccgcccttbkcbccctcctcccctttcctgcttctgcgagaactccctccctccctccagctccgccagcccaggcgccccttccctggaagcccascssckkcsckcscakkkcaccsccsccscctctcscaa

SEQ ID NO: 46330 - DNA, 833 bp, Homo Sapiens
gaattcccgggatgcaatccactactgccagaccagaaggtctgctaaaaggtcagagtaatgcagaatgcgtgccttcatctcagatttgttcatcacaggtggatcccatgtgtcttcagtagacaagtcacctttgtagctagcaccagtgccagctccatgccattgcaccttctttagtcttgattgcccttcccgcatttattggtgtattaaaatgactgaatatgaacattaaggactccatgaacctgggctaatgggagactgtagagaaaatgaaaaaagatccaccagaggacatcttggggagggggagggagctgggggggagggaaatgactaatgaagctaattaaaagaagcattcaaatctgctttctaccctcattaacaattagcagggcactggccagagtttgtaccctgtgttttaccttaacaacattctatttgctctttgtatatttaagtgttgtaaggaaacgtgtttcaatcaaaactgaccatgagataaaggaaagagatgtggcttttgtgatattctatcacaaacacttattgtatctctgtaaaatacaatgtatgtatgcatgtaagtgtttttgtcctaatgttgctactcccatggcaaagaaaaaaaaaagaatgaaaaaaagaaaaaaatttggaaaaaaaaaatcaggctcatagcagctactgtgtagaaaattccccctacttctaatttgctgaatgaagaaaaaaaaaaatcttttatttgtgatattttcagagacatttgctctagtatggtgtatttaaataataaaaacttaaaagaaaaaata

SEQ ID NO: 46331 - DNA, 847 bp, Homo Sapiens
  misc_feature (518)..(518): n is a, c, g, or t
  misc_feature (526)..(668): n is a, c, g, or t
  misc_feature (670)..(670): n is a, c, g, or t
  misc_feature (678)..(679): n is a, c, g, or t
  misc_feature (683)..(683): n is a, c, g, or t
  misc_feature (689)..(692): n is a, c, g, or t
  misc_feature (695)..(696): n is a, c, g, or t
  misc_feature (699)..(709): n is a, c, g, or t
  misc_feature (795)..(796): n is a, c, g, or t
  misc_feature (824)..(824): n is a, c, g, or t
ggacttaaaattcctgtacatactgcaaatatttctttaaattgcacaggaaaatgagcgaactttttatttcttaatatctttggcaaaaaactttaaccagtaagcaattttataaccctgagggatcatcaaagatactatcctgattcctggtaaggaaaaatatattatttccttataacaaggcaaggagaaatgctattttattcctgataatttatataactagaataatttttttcctttcttttatggacctaaatctgccaattgggaattttgtgcatgaaatatgaagttactttttatagataatcagtgcttttaagtccctaaaaggctcctgctgaagtaatgatgatgttaataataaaagcctttgaaaggctgaaaacctacatagtggtaccatagtatttggagcttctataggagtggagaggggcagctcattgttgagagttgcatgctgcaacctaatggtcagcaatgaaataaatacttgtagaatgttncaaaaaannnnnnnnnnnnnnnnnnnnnnnnnnnnnnnnnnnnnnnnnnnnnnnnnnnnnnnnnnnnnnnnnnnnnnnnnnnnnnnnnnnnnnnnnnnnnnnnnnnnnnnnnnnnnnnnnnnnnnnnnnnnnnnnnnnnnnnnnnnnnnncncccccccnncccnccaacnnnnccnnccnnnnnnnnnnncccttgtgggcgccgcctccccccccccccagaaaagatttttctacaaaaaccctcttcttgtgggcgcccgcgcgcgccccccnncaaagaaaaaaaagaaaaaaaagggganaaaacaagttgttttcccacaag

SEQ ID NO: 46332 - DNA, 566 bp, Homo Sapiens
gtcacaatcgtcccttccagcaccccatccagcagtgactgcacacactgagcctcctaccagcccctttcaccctgctgactgtcactgggccctgggatgtgcaagactccacagcagcagaggtggggggacatatcacagcctctgcccccggctgtgatgccaccgaggggctcgcctgctgatggcttcaacagggtctcacctcatcttttcctgctctttggccctggatcgagaaaatttccatcagtgccccattaatatgctgccctgtggcatctgcccaggaggccctgccaggcgtgcacaggtgtgcattggtgtaccctggcatgcacaggtgtgcactgatgtgccctggcatccattggtgtaccctggtgtgcctgccataggaccctgggcgggagctcccatctcatctacatctcctgattcatgcgttgtttcataggtttcaatgtctctgtaaatgtggtagaaatgcaggctttatgggcataaagtgtacatttctaaataaatcccttctatttagtatgctcaaaaaaaaaaaaaaa

SEQ ID NO: 46333 - DNA, 834 bp, Homo Sapiens
tgacatgaaaaacagtatgcacactggatggcagcctgcagattagcctccaaaggcaagaccatggcggacagttcttacaacttagaagttcagaatattctttcctttctgaagatgcagcatttaaacccagatcctcagttaataccagagcagatcacgactgatataactcctgaatgtttggtgtctccccgctatctaaaaaagtataagaacaagcagataacagcgagaatcttggaggcccatcagaatgtagctcagatgagtctaattgaagccaagatgagatttattcaagcttggcagtcactacctgaatttggcatcactcacttcattgcaaggttccaagggggcaaaaaagaagaacttattggaattgcatacaacagactgattcggatggatgccagcactggagatgcaattaaaacatggcgtttcagcaacatgaaacagtggaatgtcaactgggaaatcaaaatggtcaccgtagagtttgcagatgaagtacgattgtccttcatttgtactgaagtagattgcaaagtggttcatgaattcattggtggctacatatttctctcaacacgtgcaaaagaccaaaacgagagtttagatgaagagatgttctacaaacttaccagtggttgggtgtgaatagaaatactgtttaatgaaactccacggccataacaatatttaactttaaaagctgtttgttatatgctgcttaataaagtaagcttgaaatttatcattttatcatgaaaacttctttgccttaccagaccagttaatatgtgcactaaacaagcacgacta

SEQ ID NO: 46334 - DNA, 571 bp, Homo Sapiens
gcttgatttgtttttgtccttgaataagcatgttatgtatattgtctcgtgtttttatttttacaccatattgtattacacttttagtattcaccagcataatcactgtctgcctaaaatatgcaactctttgcattacaatatgaagtaaagttctatgaagtatgcattttgtgtaactaatgtaaaaacacaaattttataaaattgtacagttttttaaaaactactcacaactagcagatggcttaaatgtagcaatctctgcgttaattaaatgcctttaagagatataattaacgtgcagttttaatatctactaaattaagaatgacttcattatgatcatgatttgccacaatgtccttaactctaatgcctggactggccatgttctagtctgttgcgctgttacaatctgtattggtgctagtcagaaaattcctagctcacatagcccaaaagggtgcgagggagaggtggattaccagtattgttcaataatccatggttcaaagactgtataaatgcattttattttaaataaaagcaaaacttttatttaataaaa

SEQ ID NO: 46335 - DNA, 580 bp, Homo Sapiens
ttatctaaattacagtgcagtttagttaatctattaatactgactcagtgtctgcctttaaatataaatgatatgttgaaaacttaaggaagcaaatgctacatatatgcaatataaaatagtaatgtgatgctgatgctgttaaccaaagggcagaataaataagcaaaatgccaaaaggggtcttaattgaaatgaaaatttaattttgtttttaaaatattgtttatctttatttattttgtggtaatatagtaagtttttttagaagacaattttcataacttgataaattatagttttgtttgttagaaaagttgctcttaaaagatgtaaatagatgacaaacgatgtaaataattttgtaagaggcttcaaaatgtttatacgtggaaacacacctacatgaaaagcagaaatcggttgctgttttgcttctttttccctcttatttttgtattgtggtcatttcctatgcaaataatggagcaaacagctgtatagttgtagaattttttgagagaatgagatgtttatatatttaacgacaatttttttttgggaaaataaaaagtgccta

SEQ ID NO: 46336 - DNA, 516 bp, Homo Sapiens
tgtcctccgtggtcgctggctatggctcaccagggcagaagggcacggtcatgggtacactgcgcagcctaggtgctctggccagggccgcggggcccctggtggccgcttcagtgtactggctggccggggcccaggcctgcttcaccacgtggtccgggctctttttgctccccttcttcctcctgcagaagctgagttacccggcacagacgctcaaggctgagtagctgagccactgtgcccaggctgtgggcaccaggcagagtgggagcctaggtcaggcccctgcccactgcctgacccccaccccccgccagtccagggagaccctgtgggtgggggccggcccctaagcaggaagctcaggcagctcctccagacttacttactccttcagtgactccgagctgcagcactccaaggctgtcagggcttctgtttgttttttaaactatgcaccaggtttctgatgatgaaataaagcacctgtttgttttaaaaaaaaaaaaaaag

SEQ ID NO: 46337 - DNA, 497 bp, Homo Sapiens
tatgaattattttctgccacagatgattccctgcatcaactaagaaaagcctgttttctttatttcaaacttggtggcgaatgtgttgcgggtcctgttgggctgctttctgtattgtctcctaaccctctagttttaattggacacttctttgctgttgcaatctatgccgtgtatttttgctttaagtcagaaccttggattacaaaacctcgagcccttctcagtagtggtgctgtattgtacaaagcgtgttctgtaatatttcctctaatttactcagaaatgaagtatatggttcattaagcttaaaggggaaccatttgtgaatgaatatttggaacttaccaagtcctaagagacttttggaagaggatatatatagcatagtaccataccacttataaagtggaaactcttggaccaagatttggattaatttgtttttgaagttttttgtatataaatatgtaaatacatgctttaatttgcaattt

SEQ ID NO: 46338 - DNA, 806 bp, Homo Sapiens
cgtccgctattggcaagttatgtgcccattctcaacaacgccaatatagatctgcttattatcctgaagatctctttattgacaagaaagtattaaaagttgctcatgtagaacatgaagaaaccttatccagccgaagaagggaactaattcagaagttgaagtctttcatcagcttctatagtgctttgcctggctacatctgcagccatagccctgtggcggaaaacgacaccctttgctggaatggacaagaactcgtggagagatacagccaaaaggcagcaaggaatggaatgaaaaaccagttcaatctccatgagctgaaaatgaagggccctgagccagtggtcagtcaaattattgacaaactgaagcacattaaccagctcctgagaaccatgtctatgcccaaaggtagagttctggataaaaacctggatgaggaagggtttgaaagtggagactgcggtgatgatgaagatgagtgcattggaggctctggtgatggaatgataaaagtgaagaatcagctccgcttccttgcagaactggcctatgatctggatgtggatgatgcgcctggaaacagtcagcaggcaactccgaaggacaacgagataagcacctttcacaacctcgggaacgttcattccccgctgaagcttctcaccagcatggccatctcggtggtgtgcttcttcttcctggtgcactgactgcctggtgcccagcacatgtgctgccctacagcaccctgtggtcttcctcgataaagggaaccacttttcttatttttttctatt

SEQ ID NO: 46339 - DNA, 567 bp, Homo Sapiens
  misc_feature (459)..(459): n is a, c, g, or t
aggattgtggcgttattcaaagaggagactttgaaattccccgatggctggaatgtggagcccaggtgcctctggtggagggtcatctgcttttccagactgtggttgtgaaccggctccttctccaagaaaggttgcaagctgagaacatccagaggtgagactcagacacattgaaagtgactgcatttagggaggtttaacgagttcttactgatcattccacttgttactggttaagataatttgcccacgggtttgtttccaagtcctcttctaggaccaggctcctggtatttcaggggctggttggctgcacagacagcccctcttctgctgtccttgaggacagacaccaaaccagaggtggaggaagaacggtaggaaggctgatggcaaaagcggctgtgtgtcgaggttattttaactttttactactttttgttactgtttctgcanatgctaacacataaaccatgacctaacttttgtcaccttggatatctattgaatgttaaacatctctaataaagatggccaccacttaaaaaaaaaaaaaaaaaagga

SEQ ID NO: 46340 - DNA, 603 bp, Homo Sapiens
ttttttttttttttttttaaaagtataattttgcattttattcattcattccatcagctgggaattgctctattgtacaaatacagttttgtacaaaaaaatcacaaaatgttacaaaataaaaaaagtacaaactgcattacttaataaatatgactaaaagtagttaaagtggcaatgagattgattttaagttggaaacattgtttgacccagcaaaccatacaagctctgtttacagacatttctacatcaatacagggcaatcctattttgccttttgaaagaatgtaaagaaatattaagacagtgttctcctgctataactgccaaggttggctccagacatttatgccattagtttataaatctcttagctggattcaagaagttatataaagcaggaggcttatcttgtcacagagttttataccatgttaacattctcttacaacaacgtgacaaatgtaaataaaaacaactgagagcaccagacaatctactctacacatcaaccagggtacagaataatcattctgccatcagcaaatatcagactttcattcaagtaagacctgctactatcccttaaaagaggaaaaa

SEQ ID NO: 46341 - DNA, 602 bp, Homo Sapiens
gacaggaggcagtgccgcttcggccgaaggcccgagcgcccgaggcgggagggaggtgttgccgtcactgtattaagtcgatgttgggaaacgttttaacatctggagcctttgtgggtggaaatatgtctccagttacaactccgcagtggatgtgaagaagcaaaaaaaaaaaaaaaatctattcagtctactcacaaaacagtacattgtggaatattatggggaattgtaccaaaacaagaaccatataaatgatgcctagggacaagaaagaggaacaattctatagcgcacaataaaggaaacctaagaatgggagttacaaatagtaaagaagctttttttttttttttaatttaaagtttttttatgtaagttttcccacatgatggggccttgttttgcatgttgatgaagaactacacaaagaaaactaatatagttaaaagtcagcttgccttcccgtagtagaagcaggttctttggaagttacaatttaaggtaccccaaaaaaaagttggaaataaaacaaaacaaacataaacaatgaagcaccctgtgaaatgccaaatgagtcactccttttaccttttttgggg

SEQ ID NO: 46342 - DNA, 771 bp, Homo Sapiens
  misc_feature (655)..(655): n is a, c, g, or t
  misc_feature (709)..(709): n is a, c, g, or t
atgccatattgggaacacacctaaatccagaattcattttcagtctgcaacaatgccacatgggcaattggagaaatctccattcaaatgggtatagagatgcagccttatattcctatggtgttgcaccagcttgtagaaatcattaacagacccaacacaccaaagacgttgttagagaatacagcaataacaattggtcgtcttggttacgtttgtcctcaagaggtggcccccatgctacagcagtttataagaccctggtgcacctctctgagaaacataagagacaatgaggaaaaggattcagcattccgtggaatttgtaccatgatcagtgtgaatcccagtggcgtaatccaagattttatatttttttgtgatgccgttgcatcatggattaacccaaaagatgatctcagagacatgttctgtaagatccttcatggatttaaaaatcaagttggcgatgaaaattggaggcgtttctctgaccagtttcctcttcccttaaaagagcgtcttgcagctttttatggtgtttaatctaatacacttaagctgcagtcccaaaattaggggtccttcagtcttggagactataagggagcctctgcacccagggaaaatgttaccctttacagggggggagggntaaaccagtagggaatacagtacaattccaacccttactggatgggcggaaggnaaggttttttcctcacttttttatagttttgttgctaacgggttaaacttggtgcctatgtg

SEQ ID NO: 46343 - DNA, 606 bp, Homo Sapiens
cgcgtccgctcctctggacccccaggaggctggtgccagggagacaggcccaacccacccccatttgcactgagaagagaagttttggagcgttgcctcctagaataaagatacagagagtcaaatagagagaatggagagagagaaacatatattatatattatatagagagagggaggagagcgagagagagtgaggacaccgaactgggctggcggctccaaagcacagccttccctgttccgtcccagcgggagctggtgttaggggtcccaaggttgccacccacgtgcccagctgtcccacgctgcagcgcagacggccacgcccacacccggccttttagctcaggtccaccatgggggacggcccagcgtgggtgggggtgccagagggtcccgagtgggggccgtgcctttgcccagaccctgcactttcaaccaggccagtccggctctggggagcaggggcctccccggcaacagccccaggggccttgagggtctgaggtcccagccctgttgccaagtgaccttgtccccagctccctcctcccaggctggtgtgagtgtgcgtgcgtttgtgcccagcttctatttcatatt

SEQ ID NO: 46344 - DNA, 601 bp, Homo Sapiens
ctagattgggcttcaggctgcatcccaggactccaaacagggatctgtctctttggctctcagctctgctttcatttgagttggctttattcttgggcttcacagtgtggccccacagcaccagttattgataaaaagagctcccctttgctgacagaactgctggatttggttctcattggtccagacgaggaaggtatccagcctcaagtcatcattgtggccaggaagatggaatacaccaaatggacaggcctggcatgtacccacagagactgagagttggtgctggtggttgtggtggcagatgatattacctgaagaagggacgaatgggtgctgggcaggacaaagcatcagctgtccagttcaggcctctcctctttccctggtgtcttcattttcctccgtctccctgctgtcccttaccctctgcccaatctctcattactcctggtcttgggagttgccttctgaggatactccactgggggtacctgagcctggattagagggcagggggaggatattgcctagccaaagtgggtgttcaataaagaaccatttggagatggtcttctgtctggaaaaaaaaaaaaaa

SEQ ID NO: 46345 - DNA, 600 bp, Homo Sapiens
ttagtatttgagccccataagatctttaaaaagcctccaatcatttaaaggaagaaatcagagttgctataaaattcagtaaaaagctcatagccaaacggctgtgctcagatggaaagtctgagctgaggttggtctcttgccaaaccgtggctgttgtgtgttgttcttcatgtcttcgagttcattttttttcattctgcctattctggcatcagctcacttgaggagtccctcagccttcttgtatttaaggcatcgtcttagactttgtggctctaaagtacctgtctgttgagatttcaagtctcttgtcaccatcctcacacatgacaacaaaacccataatgcataagtggcctttttgaaccaagactttgcaaactgatctctcccccgtgaaggagttgagcacattagcaacaatgtacattaattttggattttcattttcatgttttattttgtaaatattatctgatgtttggagcttgagtatacagactgtaaatatagttcttgtatttgtactaattctgattcttttgctgtatagccttagatgtgcaatgcagacactatctaactgtgtgtggtaac

SEQ ID NO: 46346 - DNA, 692 bp, Homo Sapiens
tttttttagtagagacgggatttctccatgttggtcaggctggtctcgaactcccgaccacagttgatccgcctgcctgggcctctcaaagtcctggaattacaggcttgagccactgtacccggcaacattctgtcttaaaaaaaaaaaacacgggccgggctcagtggctcacgcctgtcatcccagcactttgggaggccgaggcaggcgaatcacgagacagatcacctgggcaagagagggagactccatctcaaaaaaagaaaaaaagaaaattaagtcccccccatgctcccgagtcttcttactcctcataggtgaccactgttcagtctaccgtttcttcccagaaatatgtgcacatacaagcatatacatatgtctactctttgcttagcaaaccatttattcagccaaattacaattgttgtctttgataaagcaggctacagacctccagatcctaaattggtggcaccaaaattagagaacttactttgtcttgaagagaacacttgcaaattgaccaggaacccctactgccagtgtacatgaattagacttccataaagattataacttaggtgccagaatacacattttgaaatgaatgtaggccatctaaaggcatttttagcttctaaacattaactttatgggggcataatttacagacaataaatatacct

SEQ ID NO: 46347 - DNA, 646 bp, Homo Sapiens
aaattgatcccaattaagtttttctgcttagcagacagaaggtataattttttgacaccctttcccacctggtgcctatgctaggcttgtcctgagaacatccctcagtaacttgatattcacatgacctacaggatgtcccatctgcagggctgagtcagttggggaacaccagaggctacacagtagctcttcctgctactcggttaatgagcttggcaggttctttgtctcactgaattcttatcatggaaacagcagcagcagccgctaggaaatcttcaagtgtagtgtctgtgctaacccagtggtaaatcccttagatcccctgctggtctctggcagtctccttgattttgggtaccatgtatattttccgctttgactttaacgctttctaggatagggtaagcacccttaattcaggcactgtccattagcttcctttgcaaaggctacttatggccggtcacaatccagcactcagacagagccaaggcaatatcctcttgcccatggctatgatgtcagacagtggatgggctccagcaacaagagacaaaataactaaaggcctttgctctcctctgacattgaggcctggggcttacagtttggaatacaacatgtgaaggtttttggtgtt

SEQ ID NO: 46348 - DNA, 750 bp, Homo Sapiens
  misc_feature (568)..(568): n is a, c, g, or t
  misc_feature (610)..(611): n is a, c, g, or t
  misc_feature (623)..(624): n is a, c, g, or t
  misc_feature (631)..(631): n is a, c, g, or t
  misc_feature (635)..(635): n is a, c, g, or t
  misc_feature (639)..(640): n is a, c, g, or t
ggacagctggctgaagatgtgaagctgcagctgtataagttactagaaattcctgatccagacaaaaactgggctactctggcgcagaaattaggtctggggatacttaataatgccttccggctgagtcctgctccttccaaaacacttatggacaactatgaggtctctgggggtacagtcagagagctggtggaggccctgagacaaatgggctacaccgaagcaattgaagtgatccaggcagcctccagcccagtgaagaccacctctcaggcccactcgctgcctctctcgcctgcctccacaaggcagcaaatagacgagctccgagacagtgacagtgtctgcgacagcggcgtggagacatccttccgcaaactcagctttaccgagtctctgaccagtggtgcctcactgctaactctcaacaaaatgccccatgattatgggcaggaaggacctctagaaggcaaaatttagcctgctgacaatttcccacaccgtgtaaaccaaagccctaaaattccactgcgttgtccacaagacagaagctgaagtgcatccnaaggtgctcagagagccggcccgcccctgatcatctcgattnnactcgagacttnntcacttngctncttnnctggtcataatgaatttagttggtcactacagatatactagcatcacacctgctgagcgagctctgggatagtgctactactgcactgtgtgacagctgctcgtgctgcg

SEQ ID NO: 46349 - DNA, 553 bp, Homo Sapiens
tccgattatgtctttccaaagcgctgaggctgtgcacctattctgtagttgcagctgatgcctgaatgtatcctagctgacaaattattgattaataagaacttgaatttctggaagattcttactgttaaccaaattttgagcaaggagtctcaaaggtaattctgaaccagaattacatgttaatgaacagtgtaccttttaacagtgtaaatcacggaatatccgtgaagggatttcttaatttattttttaccggttgattgaaatatcagttaaaggttgccagcatggttgcagataaactgatgtttgaaattcgctgaaatacttaatgtggaataggataatatacttccaatgccctcaaggctgtgaccttacagccattttacatagcacatcattcctcctatagggatgaactttttcctggcacgaaaagtagccgctctggttgaagctttgcttattgtaacaggcttttatttccaggtaatatgtcttggaagacttaattctgattagagatatagatattactggaaactaa

SEQ ID NO: 46350 - DNA, 547 bp, Homo Sapiens
cctgtccccagcttctggggagggacacagcttccccttcccaggaattgagtgggcctagcccctccccccttttctccatttgagaggagagtgcttggggcttgaaccccttaccccactgctgctgactgggcagggccctggacccctttatttgcacgtcaggggagccggctccccccttgaatgtaccagaccctggggggggtcactgggccctagatttttggggggtcaccagccactccaggggcagggaccatttcttcattttctgaaagcactttaatgattccccttcccccaaactccagggaatggaggggggaccccgccagccaaaacattccccccattcccgacccccatctcctcttctagcccatgcccttccccggcggagggagggagcagggagccctcactctccacgccccttgcttgcatctgtatatagtgtgagcagcaagtaacccttctccctccccccccacccctcctcaatgtagtggccttggatatcctgtttgttaataaagacaat

SEQ ID NO: 46351 - DNA, 615 bp, Homo Sapiens
gcacgagatttggttaaatattttgtctcaaattccttaaataatctttggtgttttggtaataaattttatgtatgtattttccattacaaatataatacatactcatacaaaactttggaaattcagtaaagaaaattcacacatattcccaacacccaacaacaattaactgttaacatcttgatctgtgcactagtctgtgattattagggtgttagtgataagtatgcataaatgtcaaagatgggaagaaagatgaaaaacaagaaatagttgtgtggttgttgtgggattatggttattttgtttcggtttccttgaaaggtcatcattctagtgttttggtagtccacctttactacatatatttccattatatatgaaatgtgttcattatagaaactttgaagttacagaaatgtagaagagaaactcacccatgttttcaccatccaaagagtgtggttaacatcttgatatattttcttcatcttgtttctgcgcacaggtttttggtttgttaatatggttgtggtcattctatctgtaatagtgtcaacaataaaaataaagttaaaaataaataaaaaaaaaaaaaaaaaaaaaaaaaac

SEQ ID NO: 46352 - DNA, 569 bp, Homo Sapiens
cgccgacgacatggtggagaccgtgctcatgaacttcctgcggggcggctggcccggggcgggggcctgggctctccgggctaggggggcgcccttccgcgctgccgcccgctgcagttcgcctcgcaggaggtggtgccgtacgggcacttccgccgcctcgactacttctcagaagagaggagcgcccgggacctgctcaagcgcctggaggcgccgcggccgtcggcggtgctggacctcgtgcactcggccgaacgcctggcgctggcctccgccgcgcggccccgcgccccggcgcctgcccccgctgtggggcgctggccagcctgcgcgctctgccaggcctgctccctcctggacggcctgaaccgcggtcggccccgcctggccatcggcaagggccgccgggggctggacgaggaggcgacgccggggacgcccgggggatccggcccgggcccccacttccgagaccgtccccaccttctagcgactccgggcctcccgccgggatccgacgcgcccgggtgaggtctgcctgtaaattgacactgtgaataaacccg

SEQ ID NO: 46353 - DNA, 1124 bp, Homo Sapiens
ggtcggaatttcgggatatcgggttctgcacagcctgaaccccagcacttccagcccaaaaagcacaactcttatccccagccaccccaaccctacccagcccagcggcccccagggccccgctaccccccatacactactcccccacgaatgagacggcagcgttctgcccctgacctcaaggagagtggggcagctgtgtgagtcccacatcctgggcagagggcctggtggggccccttgctaggagaagggaagacgcccgagacgctgcttccccagaagtgctggggcagggaggcccaggagatgagagagaaggtccgagtaggtgatagaagacaagggggagaccgagccggaggctgaggaaaggaagagggcacggagttgccaggagcaaaccaaagtgaagagagagataggaagctgcctcggggccaccccttgcaaagggggtgtgtcccacaaacgctgctatgggtggggtggggggctggggtgctgcgtagccagtgtttgactttcttttcaagtgggggaaagtgggagaggactgagagtgaggcaagttctccccagcccctgtccgtctgtctgtctgtctgtggtggtttctgtttcttgggaggcatggtaggatcataagtcattcccctccccttccaggcctcctgctatatttgggggacctgactggcttggctggagtcccatgaggatgtgggcccctttaataaaggataggcaaccgggcccaatagtcgctacctccccccccgcaatcttattcgcctttctttcttccaggccggcccgctctaaagtatcccctccaggggcccaaggcttaccccgtacccagattttccttcgccaaaaggggccccccctatacggatgtcgctctctccaacctagggccccggcccgtgattttttaacaacctctggccctgggcaaaacctcgccacctctgtgaatttccttgtaaaagcggaacctcactccccgcgcgccgggctccccctcattccggcaaactctcctctccatagcccctcaaagccccccccaggcaacaccacacggaccgctctcagtcgccttattgcgcgccaac

SEQ ID NO: 46354 - DNA, 613 bp, Homo Sapiens
cgcgtccggtgattttaaaatgttttggtgaatgtgaaaactaaagtttgtgtcatgagaatgtaagtcttttttctactttaaaatttagtaggttcactgagtaactaaaatttagcaaacctgtgtttgcatatttttttggagtgcagaatattgtaattaatgtcataagtgatttggagctttggtaaagggaccagagagaaggagtcacctgcagtcttttgtttttttaaatacttagaacttagcacttgtgttattgattagtgaggagccagtaagaaacatctgggtatttggaaacaagtggtcattgttacattcatctgctgaacttaacaaaactgttcatcctgaaacaggcacaggtgatgcattctcctgctgttgcttctcagtgctctctttccaatatagatgtggtcatgtttgacttgtacagaatgttaatcatacagagaatccttgatggaattatatatgtgtgttttacttttgaatgttacaaaaggaaataactttaaaactattctcaagagaaaatattcaaagcatgaaatatgttgctttttccagaatacaaacagtatactcatgaaaaaaaaaa

SEQ ID NO: 46355 - DNA, 414 bp, Homo Sapiens
tctcttctgtaaaagtgccatcattattagttcatcttacttcaactacacctatttaaatattgaaaaatactcacccacaactcttaaggctggaatgggcttatttttcactgttttaggaaatatgccaggttttcttggtgcttcttctggtgggttgttaagaaactgaaatgattgcaaaagttactattttaatacttgttttcttttctttctttttttttttttaggatctggacttacctcaattgcttttgctgcttgttcttttgtttcaaattccacaaacgcaaatccctttggatctccagtagacttataatgtggtatacttatataaacaacattgccacatttcccaaatactctttcaatccagctgtgattaacatttttgggaagtaactc

SEQ ID NO: 46356 - DNA, 770 bp, Homo Sapiens
gggtacacagctggcattgtgggaggcctctccactgtggccatgtgtgcgcccagtgaaaagtttctgaacatgggtgcacccctgggagtgggcctgggtctcgtctttgtgtcctcattgggatctatgtttcttccacctaccaccgtggctggtgccactctttactcagtggcaatgtacggtggattagttcttttcagcatgttccttctgtatgatacccagaaagtaatcaagcgtgcagaagtatcaccaatgtatggagttcaaaaatatgatcccattaactcgatgctgagtatctacatggatacattaaatatatttatgcgagttgcaactatgctggcaactggaggcaacagaaagaaatgaagtgactcagcttctggcttctctgctacatcaaatatcttgtttaatggggcagatatgcattaaatagtttgtacaagcagctttcgttgaagtttagaagataagaaacatgtcatcatatttaaatgttccggtaatgtgatgcctcaggtctgcctttttttctggagaataaatgcagtaatcctctcccaaataagcacacacattttccaattctcatgtttgaagtgattttaaaatgtttttggctgaatgtgaaaaactaaaattttgtgtccattgagaatgtaaagtcctttttttccaacctttaaaaaatttaagttagggtttcaccttggagttaaccttaaaatatttaggccaaaaccccttggttgtta

SEQ ID NO: 46357 - DNA, 590 bp, Homo Sapiens
  misc_feature (590)..(590): n is a, c, g, or t
ggggagttcgagaccagcctggccaacacggtgaaaccccatctctactaaaaatgcaaaaattagccgggcgtggcggcacatgcctgtaatcccagctacatgggaggctgaggtgggagaattgcttgaacccaggaggcggaggcagaggctgcagtgacccaagattgtgccactgcactccaccctgggcaacagagcaagaccccatctcaaaaataaataaatatatataaaaaataaaaagctatttctagtttatttcactataaagttttgctttattaaaaagctaataaacagctattaatcacagtgtattagtatttgttacatttttgtatttcactatctttatactatataatatggtaacttgggtaccgggggaactttaaaatttcatctcaaaaataatttttaaaaagcctgaggtatgatatagcataaaagattgagatgaaaatatatttccctgtaagctgaattactcatttaaaaattttaacttctatatgggacccgaattagacactgctgaatcctgtacagccttactcataaataaagtacttactgaatttctn

SEQ ID NO: 46358 - DNA, 767 bp, Homo Sapiens
tccttgcctgattcccatctgctgctctttgtagaaaaggtttcctctagaactgaattcctctggaattgagtgatggacttcacaacaactagccaggaagggtgacaagtaccttctgcctcctccattcttcctgggtgcagaactgtagaagaccctgaggactcctgggctagtgtgagcagctattctgcatgggtgcagatggctggatgtgaaagagacatgctctagctgcagaggcaaatttgaagtgccacggaacgttgtcaagaggtagtgagattgttgctgtgagcaaggctctgggagagtcacctcaggctcaggattctgaaccattgagatcagaaaccagatacttagccttctactgtagctacggaaccagattctggtgaatttgtccacaatcagccattggcctgtctggggagtttttggaagacagcaaagaggggcaatggctgctttcagctttgaggacagatgctatcctaagggcatggcagtacccatgttgatttgacatctctctagcccatccattgcttacagtagaagagtggggctgtatgcttgataatcttgaacattgaacttaatagatgacttgacaaggtagagatctgatattttgagattttggagaccatttcctgtgccagaatcactgctctattccataccgtgccatggaggctgttttagaagtggttggataacatgttaaataaaatattaagtgtaaaaaaaaaaaaaaa

SEQ ID NO: 46359 - DNA, 533 bp, Homo Sapiens
ggacagaggtctgctttgaagcggagaccatttccaggccttattgagaccagaccccaagtcccccacccccatcctgctccagcgtttcctctaacagggaccagctctccgctttgcccccacggggttcctctaaccagaaccagcttcctagcctcgtagagaccaaaggccgcccccgcctgctggggttcctcccagcaccccagcttgctggctgccctctttgccttctggcctccagctgggtgtggggggggcggagcaaggcgggggacagacgcagcaccttcttagcgatctaggcctggcaagagctctggccccaaggcctcctcttcccaggggctgccaagtcctggccctggccctggcatatcaccccgcactgtggggccaggcaccactagcctggctcaaatattccccagggagactgctgtgtgctgcccgcctgcctgctggctctcccccagccccacatcccctctggaagagaatgtaaaataaacctggacacaaggaaaaaa

SEQ ID NO: 46360 - DNA, 768 bp, Homo Sapiens
aacggactgggtcattgtttaagatctggctggtggtacctagcctgctggaactggcatgggagaagctgcttgcggccttccctaaccttgcaaacctctcccgaacacaacttctgcaccttggactcacacagggactcatcgaacgcttgaaatgaggatttctggactgttcattgatactggaaatgttaatttaaagagactcctttatttatgggcagtgtagaatgtgctacaaagaggattggttaccctgatcaaggccttatttagaaaatacatcagatgcctttctgtaaattggtttttcagtttatggacatctcactttcccacgtgcttccttctttgcttctgttcctcctgacccattacatgcacatgtactcacatactccctcttccttctcgatggagttaagggaaagcctgaaagtaccttaataatgttattaatcaagacagattcctttttaaaggaattctgaatagttccatgtcatacaatattctagaaattaaaacatcatcaacataaagaaaaatgaaattaaaaaatttttacatctagcaacagcaacaaccacaaatttaggggaagctgagaaggctaaccttgggaatcttgcaggttatacttaaacctagatgtttaacttagtgttttcaagatgtgtctaactgagtagtagctgggtctgatggcagcagtgcttgccatcttgttgcacagataactcaaacctaccctttggctttgaa

SEQ ID NO: 46361 - DNA, 527 bp, Homo Sapiens
  misc_feature (488)..(488): n is a, c, g, or t
cggccgcgccggttttgcttttcctctaatcttgcaagagctatggctcttctattttccaatcacacagcttggcatgtaggaaaggttgaatgatcctctaagactgtgttggtcttcgtattctgtaaaacccattttttttttttgtggtcttacagatgtttagaaagtggcacaggttactgaattgtctacctgccagcattctgatatagcacaaaaagctattttcctttattttttgtattattttttatttttctggcattgagctctagggtggatgagggtttatggtccactgatcataagctccattctaaaaactggtcactgttagctgaaattgctttggttccccaaatgccttggaactccagacgcacccgcagggcctgaggtaggcttcatagagttctaggacttccgtgtgcgttgccaccagatcctgcccagcaatggcctttcccttctaaggtcattanattcagccaaaagcgacctcttctctagtccggtgttac

SEQ ID NO: 46362 - DNA, 592 bp, Homo Sapiens
ttgtttggctgaggggagcgagcggcgctttgggggaggggtcgcgtaggcgcctcacctgaccctgcggccgtgcggttgctgctccggggcaggtctccttccaggccaggggcccggaatcatgtacataaagcaggtgattatccagggttttcgaagttacagagatcaaacaattgtagatcccttcagttcaaaacataatgtgattgtgggcagaaatggatctggaaaaagtaactttttttatgcaattcagtttgttctcagtgatgagtttagtcatcttcgtccagaacagcggttggctttattgcatgaaggtactggtcctcgtgttatttctgcttttgtggagattatttttgataattcagacaaccggttaccaatcgataaagaggaagtttcacttcgaagagttattggtgccaaaaaggatcagtatttcttagacaagaagatggtcacgaaaaatgatgtgatgaacctccttgaaagcgctggtttttctcgaagcaatccttattatattgttaaacaaggaaagatcaaccagatggcaacagcaccagattctcagagatta

SEQ ID NO: 46363 - DNA, 849 bp, Homo Sapiens
  misc_feature (788)..(788): n is a, c, g, or t
aagagataaaatggaggatatcgaacgccaagttagagaattgaaaacaaaaatttcagctatgaaagaagaaaaagaacagcttagtgctgaaagacaagagcagattaagcagaggactaagttggagcttaaagccaaggatttacaagatgaactagcaggcaatagtgaacaaaggaaacgtttattaaaagagaggcagaagctgcttgaaaaaatagaagaaaagcagaaagaactggcagaaacagaacccaaattcaacagtgtgaaagagaaagaagaacgaggaattgctagattggctcaagctacccaggaaagaacggatctttatgcaaagcagggtcgaggaagccagtttacatcaaaagaagaaagggataagtggattaaaaaggaactcaagtctttagatcaggctattaatgacaagaaaagacagattgctgctatacataaggatttggaagacactgaagcaaataaagagaaaaatctggagcagtataataaactggaccaggatcttaatgaagtcaaagctcgagtagaagaactggacagaaaatattacgaagtaaaaaataagaaagatgaactacaaagtgaaagaaactacttgtggagagaagagaatgcagaacagcaagcacttgctgctaaaagagaagatcttgaaaaagaagcaacaaacttctttagagcagccaacagggaaaggcccatttttaaatgggaataggacagccataaaacaaaagtggctaggacccacctccccntccgaaaaaaggaaataaaaccccagccatgggttccaaaaattgggccttattcaatggg

SEQ ID NO: 46364 - DNA, 1035 bp, Homo Sapiens
aaaaaggctttggatcagtttgtaaatttctccgagcagaaagaaaagttaataaagcgtcaagaagagttagataggggttacaaatcgatcatggaactgatgaatgtacttgaacttcggaaatatgaagctattcagttaactttcaaacaggtatctaagaacttcagtgaagtattccagaagttagtacctggtggcaaagctactttggtgatgaagaaaggagatgtggagggcagttagtctcaagatgaaggagaagggagtggtgagagtgagaggggttctggctcacaaagcagtttcccatcagttgaccagtttactggagttggaattagggtgtcatttacaggaaaacaaggtgaaatgagagahatgcaacagctttcaggtggacagaaatccttggtagcccttgctctgatttttgccattcagaaatgtgacccggctccattttacttgtttgatgaaattgaccaggctctggatgctcagcacagaaaggctgtgtcagatatgattatggaacttgctgtacatgctcagtttattacaactacttttaggcctgaactgcttgagttagctgacaaattctatggtgtaaagttcagaaataaggttagtcatattgatgtgatcacagcagagatggccaaagactttgtagaagatgataccacacatggttaattggaaaatactacctactggtttgggagatgtatatagtaatatgattctcatacccaggaactgtaaatttaaacctaaatatttggccaatagttttcagacttaaagcatcatagtccttttatatttgtctttgtattttataagatactctgtaatgtcatgtttgtactgatagtttaagaatttaatttcctgtacaactttttgtaaaatgttctgctcctattttaaatgttttgaaacatgctaaatattctttcctaattattttatcacttatactacttttttatagcttcaattaataatcggttttatgactaa

SEQ ID NO: 46365 - DNA, 637 bp, Homo Sapiens
gcgcttcgggcgcctgctgctgcggctccccgccctgcgcgcggtccctgcctccctcatctcccagctgttcttcatgcgcctggtggggaagacgcccattgagacactgatcagagacatgctgctgtcggggagtaccttcaactggccctacggctcgggccagtgaccatgacggggccacgtgtgctgtggccaggcctgcagacagacctcaagggacagggaatgctgaggcctcgaggggcctcccggggcccaggactctggcttctctcctcagacttctattttttaaagactgtgaaatgtttgtcttttctgttttttaaatgatcatgaaaccaaaaagagactgatcatccaggcctcagcctcatcctccccaggacccctgtccaggatggagggtccaatcctaggacagccttgttcctcagcacccctagcatgaacttgtgggatggtggggttggcttccctggcatgatggacaaaggcctggcgtcggccagaggggctgctccagtgggcaggggtagctagcgtgtgccaggcagatcctctggacacgtaacctatgtcagacactacatgatgactcaaggccaataataaagacatttcctacctg

SEQ ID NO: 46366 - DNA, 745 bp, Homo Sapiens
ttttttttttttttttttaaatgaaatctatgaattttttttattaaggatttgataagctgatataatgaaaacatgtaaatgaaaaacatttacactgactgtacgactagtgtgctaagccattacaatagtttactgacataactggcaagagtaacttggaaaataacttaatccagcagaacaaaaacatcctcagaaaaacatcctcagtagtactgaatatatctctctcatatatctatctatctatctatctatatatatatatatatatatagctttgcacaatcagggagcaaggcacataatgaaatgagcatacatttatgcagaagaaaataatagcaacaaagctgcgagaaaaattgtaacttcatcttcactgagctgtgcataatcctttgaataataatgtcctctacctggtacattataatgaagttccttgtcttcttcatgctttaaaaaagtatacttctacattgtatctacctatggcaaagctcccacagcctacaagttggtgtgagccttgactcttgttttttaaagaactgagggagggagcaatcccagttaaatataatgtgcaattcccctttaacagtaaacaatgtttttaaaacacttagcacaagctaattttatcttaaatgtacatctctgtaagagttcactagtggctgatagtaaaatgaagcaaattgtttgaaacattccagttaatgcttattttcta

SEQ ID NO: 46367 - DNA, 604 bp, Homo Sapiens
aaactacttatcagtttcctagaggaagttctggcttctggactgcacagccgaagcaaggagagctctcaagtcacatcaaggtcagcgagcagaagatgaaacggtggttgggggaagggcacagcttcctctcttgtccccactacaggttttccctactaaacaaaggtgttggagagcagctttgggttctgtgctggttgttagaactcatctccaggtagcccacggatacgtggttggcacagacacaagactcccagagttgtcctaacaataagtctgagcccatctcaacccacttttctccggtagtctttatgtatctgttagcacaatcacttcagttactgatgaattttgttgggatctgacttggggaaagggttatcagagcctagaggggcttaaaaagtaatcatttgatgtacataccacactccttggcttcctttctcttcccttaaccctttctgcttttcattaaccacattcctgcacaactcatttctgaaaacctaccatgtttctttacagagccatccaaaaattttttgtccctacatagcaattttctgtggcactgagaaaccatgtatga

SEQ ID NO: 46368 - DNA, 909 bp, Homo Sapiens
gcacactttctgaaatcacactatctggtggtttaatcatatttttaaagacagaatccctgagtgctgagcagattctcaaaacacatttagaatccctgaaattagaaagatcaatgacaaaatatctgtcagccaggccacaaacaggtgtaaaattatgaaaggagtggttggatgtgccaagtttggtaaagtggtgactgcatctgagaaagaggctgtgaggctgaactcttggtggcttccttctgtaacttccagagggagtcttcaacacaggccccgtgctcgtaggaatacggtagcacctatgtaggaagtgcgtggagttttctgtcttctttctgtgtgatttttggcctttttatcagcacttctcccctcccaggagcctggggatgccaaacatccagaatgtgatgggacaagatgggggcaggggcctcacctccctgcagaggtccggccaggtctccttgtccctggacaatctcctgagcctctctgcttggtggagcaggcacctgtgtgcagaattcccactgtggccagcacgaggaagtcttttctagtgaaaatgtgtcttgtggtcaggaataattatcctttcccctgtagccaccaagagggcaaatagagaaaagtaacctaattgaaaagattggtcatgtgaaaaagggctacattttgggaagctgggaaaaggccctctaggctttcaaaagcaacctaggcttgggctgggattctcacaccccaaggctgccccctttggaatggttctaccccaaagctcttttcccctggggggttcttggggcctccccttcccaaaaaagggtaaaaggggggcccctttttaacccttaaatagggggcccctttccctttttaagcacaggggat

SEQ ID NO: 46369 - DNA, 654 bp, Homo Sapiens
  misc_feature (518)..(518): n is a, c, g, or t
  misc_feature (591)..(591): n is a, c, g, or t
  misc_feature (605)..(605): n is a, c, g, or t
  misc_feature (622)..(622): n is a, c, g, or t
  misc_feature (625)..(626): n is a, c, g, or t
  misc_feature (628)..(629): n is a, c, g, or t
  misc_feature (640)..(643): n is a, c, g, or t
  misc_feature (645)..(649): n is a, c, g, or t
  misc_feature (651)..(653): n is a, c, g, or t
gaaaactttgtttattgaaaaaaaaagaaaaagaaagcaagaaaaaaagatactatggggtcaagtgtaactccatggaaatgccacgtctgctcttcagtgaagaagctggtttagagtctcacagaaaacttttgactgtatttatttattgttgcaaaaaagacgcttttttattgctgccctcatttgtcagctaagtattttttcttataaaatccagccccggttacatataatcatctgtatcttatcatgattcctgtaggtaaaagtacaagacgacctctagatgtcttttctttctatgaaaggagctgctatgtacacatgtgcacacacacacaactgggaatcaacaatgagtttattgttcatggtagattaaaattaagcttgcataaaggttgggctaagtggtcctggactacagactctgttgccttgaatataacagtacaatttgtcaattactctgcaccaggctaaagtgagtaaaatctatttgaaggtatctnggttgtaaacaattgtcagaatctaattttttcttttgtattaaaaatcaactatggatgtatatgaaacaanataaatggagatanattttctccacagacanaannannaaaaaaaaaannnnannnnnannna

SEQ ID NO: 46370 - DNA, 889 bp, Homo Sapiens
tatataaattgcttcttcattttaatttgtagaagtactttacagtaggaaacgccagtaaacaacttttatactgttaaaaggcttttttccccttcctaaatgttttaattgtaccatagtgttttgctcactgaagaagcttcttatggaccttgcaactttgttgctagcttgaggttgattattgtggttgtattgttcactgtgtgtagaaatagtatgagtacgatttcaatagactgttcagtttttaatattagccatagcactggttagtatatctcagtagtttcatgaaacgtttcctgtattctaatctattttgaaacattttgtttttttttaattgtgtcttacagtcaagtttgtagattttcataagccacaattttaaaagatgcagtaatcttccaacttccaatatttatccattcgttgtggacccacagattgcatctttaaattcataataagtttccttaactatcttatgtttctagtctttcaagcttagtgataaggtggaagcacaagaaaaatttcagtagaatacagtttttattttgtaaacactaatgtattaaacttgctatacattaaagcaaataatatatatttttatttgaattgtatatgtgaattggaagttataattagttgattttttcattttgttagaggtattttcactgaacaaggtcaattggttacctcagtattacagccaatatagtccaagggaccatttctccccgagtctcttacactttattgtgcgatgtccacgtttttgtgactcttcaagctgttggtgaggtgggacgaatgcacttgcttcctgtggcaataaagattttctgtgcctcacaaaaaaaaaaaaaaaaaa

SEQ ID NO: 46371 - DNA, 586 bp, Homo Sapiens
ggcagccctcaccctgacaccttcagcagtaaacaagataaaacaacttcttaaagataagcctgagcatgtaggtgtaaaagttggtgtccgaaccaggggctgtaatggcctttcttatactctagaatatacaaagacaaaaggagattctgatgaagaagttattcaagatggagtcagagtattcatcgaaaagaaagcacagctaacacttttaggaacagaaatggactatgttgaagacaaattatccagtgagtttgtgttcaataacccaaacatcaaagggacttgtggctgtggagaaagctttaatatttgaaatctcaggactcttctggccgtaggttccaggaaagctcgtggaagctttggggctcactgcagaaatcatgtgactgtcacgtgctggaaaataaagtgatacatcttgaaaatgaatccagtgtgttggattccagaagaaatgatatttatattctctataggggacagaaaatgagaagccatcactctttttggatcatttaggtctcttgtatcctttgttttagaaccagtttcattaaagttgccttcctgg

SEQ ID NO: 46372 - DNA, 558 bp, Homo Sapiens
ttttattttgagtgggaagaattttaaaacctttttatgtcaattaccatcttgtttctttcacctttgaaacaatggtttgtagcagagatgacattgtagcaacccagaattatgcttttggaatgtggtcctcactgtacaggagaatgtgtaatcttttgttaaaattcccagtgtgcatacattttctggttcctcggtccagttgctaaagttcttagtattttagcctaacatatttatcaccaacttttctttaaaagtgttccttttgtcacttagttactgattttcctgggtttgacataagtattctatgagatgatatatatgctttttttgaaagctgattctcatgaattcaagtagctgagttcctttatgtttcgtttattcactaaagtagctgacacaaaacacaccaaaacctagagcggtagttttatgtaaatgctcatgagtttgtatcaataatataattgttgatccacttataattcgtgcaatactgtatgtatgtagagattgagttgtcaattaaaaaaaatgtggcct

SEQ ID NO: 46373 - DNA, 891 bp, Homo Sapiens
  misc_feature (425)..(425): n is a, c, g, or t
  misc_feature (441)..(441): n is a, c, g, or t
  misc_feature (556)..(556): n is a, c, g, or t
  misc_feature (597)..(597): n is a, c, g, or t
gagacccagctgagtgcagcgtggcgtttccctttctgggggggcctgaggtcttgtcacctggtcctgtgcccccacaggaaccagaggtaggatgggagggggaacgagagcctctttctccccagagcccccggcccaggcctgttgatccgcgccccaggacccccttctttgcagagcccgaggagcctcccctgtcccctcgggcagatctgttgtgtctctcttcccacctggcagcctcagctctgtgcccctcaccctgctccctctcgccccttctctcccaccccttccttctgagccgggccctggggattggggagccctcttgttcctgatgagggtcagctgagggggctgagcatccatcactcctgtgcctgctggggtggctgtggggcgtggcaggaggggcctangtgggttgggcctganaaccagggcacgggtgtggtgtctgctgggctggagataagactggggagagacaccccaacctcccagggtgggagctgggccgggctgggatgtcatctcctgccggggcggngggagggctctgcccctggaagagtcccctgtggggaccanaataagttccctaacatctccagctcctggctctggtttggagcaagggggaagggttgccaaaatcctggggggcccccaaggagcaggagtcggggaggggcccagaggtggcccttcgactggggtcgaagaggagcagcacccccaacgctggagggggcccgaggacccttgccagaagggcgccggccccggcgcggggcaaagggttgcggggcccttcgggggggggatcggcggggggggaagggggaagagggggctcgcgggacgtggcgccgtttgttgggg

SEQ ID NO: 46374 - DNA, 592 bp, Homo Sapiens
tttggctgaggaggctggtctgaacatcactcacatttgcctccctccagatagcagtgaagccgagattatagatgaaatcttaaagatcaatgaagataccagagtacatggccttgcccttcagatctctgagaacttgtttagcaacaaagtcctcaatgccttgaaaccagaaaaagatgtggatggagtaacagacataaacctggggaagctggtgcgaggggatgcccatgaatgttttgtttcacctgttgccaaagctgtaattgaacttcttgaaaaatcagtaggtgtcaacctagatggaaagaagattttggtagtgggggcccatgggtctttggaagctgctctacaatgcctgttccagagaaaagggtccatgacaatgagcatccagtggaaaacacgccagcttcaaagcaagcttcacgaggctgacatttgtggtcctaggctcacctaagccagaagagattccccttacttggatacaaccaggaactactgttctcaactgctcccatgacttcctgtcagggaaggttggggtgtggctctccaagaatacattttggtggactca

SEQ ID NO: 46375 - DNA, 626 bp, Homo Sapiens
gtacccggccagcccctggagccacatctcagctggagccattgacctcatcaacaacctgctgcaggtgaagatgcgcaaacgctacagcgtggacaaatctctcagccacccctggttacaggagtaccagacgtggctggacctccgagagctggaggggaagatgggagagcgatacatcacgcatgagagtgacgacgcgcgctgggagcagtttgcagcagagcatccgctgcctgggtctgggctgcccacggacagggatctcggtggggcctgtccaccacaggaccacgacatgcaggggctggcggagcgcatcagtgttctctgaggtcctgtgccctcgtccagctgctgccctccacagcggttcttcacaggatcccagcaatgaactgttctagggaaagtggcttcctgcccaaactggatgggacacgtggggagtggggtggggggagctatttccaaggcccctccctgtttccccagcaattaaaacggactcatctctggccccatggccttgatctcagcacacggcactctcgaatcattactctgttgtaccaacatggagttcatctggaaggaggactgcctgaaaagaggaaggatgg

SEQ ID NO: 46376 - DNA, 506 bp, Homo Sapiens
ctcctgatgtgcaaaacagtttattagaagataagacttaccttgattctgaagagagaacttctattgatatagtatgctctgaaggagagaacagcaattcaacagaacaagattcatatagtaactttcaggtttatcatagtcaattaaatatgtcccatcagtttagtcattttaatgttctcactcatcagacatttttggggacaccatatgccctttcatcaagtcagtctcaagaaaatgagaattacttcttatctgcttatactgaaagcttggatagagataaatctccacctcccttaagttgggggaaaagtgattcttccaggccatattcacaagagaaataactgtagtaactttttttttaagagattgttgtggactttgtttattaacaatttatatttcattctctaaacaaaaggttcttgttctttctcaaatgttttttcttttatttaaatcatgatggcctgtaacagttgaagcatcta

SEQ ID NO: 46377 - DNA, 570 bp, Homo Sapiens
gaaataacttatgtaaaactcttagtaaccctgttgtcttcaaatgagtaaatagaccaaagtggggggacaattttctagttctgtagagggaaaaacatctgagtcaacattttcaaatgcagagggtattggtacatgacgacatggaaaagggcacttttaaacacagcttactcttcctcaagtacagagagtatatagtgaatcaaaactaactacagccattctttttaaagcccaagggatggagcaaaggtgtaaggatgttacctgtttgttttaatcagagagcaaaaagaagtcacaatagttgggagaaaaagtagtatggtgagtaaggttatgcgtataatttcatactgaatttattactatttgggatgtacgtcaatgttctaacaaacactgccaacacgtcaattttttaaaaagcgtgggccacattgctaagaatttgttaaagcataactgtattttttgttttagggccttattgatgttttgccgttccaatgtatgcatttttttactcaataaacttgtcttaattttaaaaaaaaaaaaaaa

SEQ ID NO: 46378 - DNA, 657 bp, Homo Sapiens
ttttttttttttttttttaagtcagcactgatgccaccctctcagtggtcatttctgagcatcttcctgacttgaacaccttctacagcaaactcttgcaagtccagtttcatccctgtaaggcaaatgtcttttcacgcagaaagtgccatatagacgagataaaggcagctaaaacgagggcagtagagagcacttacccgaccccaaggtgccagagatgccctgaggatggtggttaaggaaacaggagcaggaaatgtacacacagattcctgtccctttgccaactactccttccccatcaaagaaaaacacttgcacacagtaactaccagctccttctctcaaacttgtatttctcctggaaatgtatctcagaaatgacctcctctcccaaccacttcaacgattctttctttgggtttggggttcttgcagttctatcatctaaaataacctttggactgcaggtaaaatgcaattaggacaactaaccaagtagacgaaacaagttcccctaggcaggggtgtccaatattttagcttccctggaccgcattggaagaattttcttgggccacatgtaaaacacactaacactaaccatagttgatgagcttaaaaaaataaaaatagaaaattgccctccgtgcc

SEQ ID NO: 46379 - DNA, 519 bp, Homo Sapiens
  misc_feature (509)..(509): n is a, c, g, or t
ttttctgttttcacatttgaactttatgggttttggggattttcttgtagttcttatatatccctatatattatatctatattgcaaaattttgactgtcagctacatgttggtaagacacaggcaaagtattactgtaactaagttatttttaaagttaaaatatatttttacgtgcctttggctttttattgcagagtctacattttatagattctacatcagatgttgtcacttatttccattgggattccattgtaagctgtgtatgtgcgtgtttggaaaagtgtattcatacttagtttttttttcttcatctgttatcatacttttaacagcaaccaataacggattgtaaagtgtaaaggcacaggttactcatgatgcttctgcagagactgtgggctacaccacatatgttatttggaaatataggtattttagtacagtacatacttgcattacataggtacttcaagcaacacaataaaaagtaaatgataaagtgnaaaaaaaaaa

SEQ ID NO: 46380 - DNA, 1008 bp, Homo Sapiens
aaaattaatataatattttccccacaaaagaaacacttaacagaggcaagtgcaatttataaatttatatctaaaggggaatcatgattataagtccttcagcccttggactctaaatkgaggggattaaaaagaatttaaaataattttgaacgaatttattttcccctcagtttttgagggcattaaaaaggcattaaatcaagacaaatcatgtgcttgagaaaaataaaattaatgaaaacacagcacttatgttggtttagctgcagcctccttggaggtagaatttatttatttaaaattactggttgcatcaagaacccatagggtgtacaaaaggttctataaaatctgcattatagagacaaagaggcaggcaaatccatgtcacaagggtaaagcttacagtttacaaactgggaacgccagggtgtaggatataaaaacgcactcttgagaaaacaaatgtaatcagggtgctgaaaacttgcatggtgctttcagacattagccttgttcaacaaatttcttgtattgacagatccatagtgtgcatgggcagacacattttgcctctatgtctcttaaaattttaattaaaaatactctttccagtaatcctaatttgcacgaagatataatgtccacattacgtgccttgccttgaaatctaaaaaacaaaaaacaaaaaaaaaaaaaamaaaaaaatacaacaaagtgacatcactacacttgttttgctgcatttattatcattttaaatctttaccatttttatgacaaaatattttgtactccagacgaagaaaaatgtgtgacatcatggattttttagacagttatacctttatctcmcatttataaagcatatcatggctgtgtatagttgcsgcttaaaattgtwatcgrccagcaatattttcagtattttggkgttttttccattmaccyttcatgtttttcacctccaataaaatwggggggggggggttawaattawacaat

SEQ ID NO: 46381 - DNA, 1169 bp, Homo Sapiens
  misc_feature (927)..(927): n is a, c, g, or t
  misc_feature (1021)..(1021): n is a, c, g, or t
aagactggacaaaacaacacaaaggcagaaaggaaagaaactgaagaaagaagataatagaccagcaattgcagcacttacaatcactaattcccttaaggttgaaactgtaatgacataaaaagggtcgatgatatttcactgatggtagatcgcagcccctgcaacgtagcctttgttacatgaagtccgctgggaaatagatgttctgtctctatgacaatatattttaactgactttctagatgccttaatatttgcatgataagctagttttattggtttagtattcttgttgtttacgcatggaatcactattcctggttatctcaccaacgaaggctaggaggcggcgtcagaggtgctgggtgacagagccatgagccagccattttataagcactctgatttctaaaagttaaaaaaaatatatgaaatctctgtagcctttagttatcagtacagatttattaaatttcggcccttaacccagccttttccagtgtgtaacccagtttgaaatcttaaaaaaaagaaaaaatgaaaaaaaaaggaaaaaaagaaaaaaggaaaaaaacagtttgaacacaaaggctctatggaagaaatgcctctatgtaggtgaagtgttctctctgcatgcaacagtaaaaattaatataatattttccccacaaaagaaacacttaacagaggcaagtgcaatttataaatttatatctaaaggggaatcatgattataagtccttcagcccttggactctaaattgaggggattaaaaagaatttaaaataattttgaacgaatttattttcccctcagtttttgagggcattaaaaggcattaaatcagacaaatcatgtgcttgagaaaaataaattaatgaaaacacagcacttatgttggtttaactgcaccctcctgnaggtagatttatttattaaaaatactggttgcatcaagacccatagggtgtacaaaaggtctataaaatctgcattatagagaaaaagaggcangcaaatccatgtcccaaggtaaaagctacagtttacaactgggaaccccagggtgaagatataaaaccccctcttgaaaacaaattgaaacaggggctgaaaacttgcgtggggcttcaaaattaccctggtcaaaatttcctgattg

SEQ ID NO: 46382 - DNA, 527 bp, Homo Sapiens
ggtcaaaatggattctgaatgattttgcatatgggatgaggaaatgcttggatccttaaggagtttacgaaatctgctgttttatcaaagtgaaaaaaaattgcttattactcttcattttacactaaagcttaatgtcactaagtttcatgtctgtacagattatttaaatcatggaaatgaaaaaaatgttctctgcttgctaccaaaggacaaactcttggaaatgaacactttctgctttccttcctccaaagaattaataggcaacagtgggagaaaaaaaaggcataatggcagatccttcaagcagggataaaagtcgatcttcaaacattaacttaagcagaccaaaaattctgatgaccgcatctagattatttttttataaaaatgattttcactatagctatgttacgctaagctactgtccaatctcttgtgatgtgtaacttttacatgtgaatattaaagtagatttctctgtcttgtaaaaaaaaaaaaaaagtactctgcgttgttaccac

SEQ ID NO: 46383 - DNA, 792 bp, Homo Sapiens
  misc_feature (585)..(585): n is a, c, g, or t
  misc_feature (641)..(641): n is a, c, g, or t
tctagcgaggtgacagcgtagaaccagcatggccacagcctgggtggctccgcagccgcggcggcggcggcggcggcagcgcgctgtaaggcggccgaggcggcggccgacgagccggcgctgtgcctgcagtgcgatatgaacgactgctatagccgcctgcggaggctggtgcccaccatcccgcccaacaagaaagtcagcaaagtggagatcctgcagcacgttatcgactacatcctggacctgcagctggcgctggagacgcacccggccctgctgaggcagccaccaccgcccgcgccgccacaccacccggccgggacctgtccagccgcgccgccgcggaccccgctcactgcgctcaacaccgacccggccggcgcggtgaacaagcagggcgacagcattctgtgccgctgagccgcgctgtccaggtgtgcggccgcctgagcccgagccaggagcactagagagggagggggaagagcagaagttagagaaaaaaagccaccggaggaaaggaaaaaacatcggccaacctagaaacgttttcattcgtcattcccagagagagagaggaanagaaaaatacaacttttcattcttttctttgcacgtttcataaaacattctacatnacgtattcctctttttgtctccttcattttataacctgctgtgaaatttgtacatttttctggtgtttttttttggaagttggcagtttaaaacctttttaaagctttaaagttggtggacaagggaactggaatataaattaagaaagaa

SEQ ID NO: 46384 - DNA, 604 bp, Homo Sapiens
  misc_feature (26)..(26): n is a, c, g, or t
cctaatcctacaggctgctacaaggnaaatgcattagaccaggtagcttataaataacagaactttgtttctcacagtcctggaggctgagaagtgcaagatcaaggtgccggcagtcttggtgtctggtgaaggcctgctttctcatagaggcttccttcttgctgtgtcttcgcatggtgagaggaacaaacaagctcccttgtgcctttaataaggtgctaatcccagtcatgagggcagagtctcccgtaaggcttaacctcctaatgccatcaccttgagggttaggattttaacacatgaacagtgacggaacacaacgttcattccatagcaccagggtagtctcctcatgtcaaggtctttacctgaatcacatgcatgatgtaccgttttcatgtaaggttctaggaatctgtggacatctttggggggccattattttgctgatcacatattacatattttttaatattctagactagtatgaaaacaatgccacttccattgctttatatacgtatctatatacacattgtctattgctataattaaaaaaaagttgtagacacaaatatacccatttaaaaaaaaaaaaaaa

SEQ ID NO: 46385 - DNA, 645 bp, Homo Sapiens
gcaaatgaaggtgatcccactgagactctgagacagtgcttcgatgactttgcagacttggtgccctttgactcctgggagccgctcatgaggaagttgggcctcatggacaatgagataaaggtggctaaagctgaggcagcgggccacagggacaccttgtacacgatgctgataaagtgggtcaacaaaaccgggcgagatgcctctgtccacaccctgctggatgccttggagacgctgggagagagacttgccaagcagaagattgaggaccacttgttgagctctggaaagttcatgtatctagaaggtaatgcagactctgccatgtcctaagtgtgattctcttcaggaagtcagaccttccctggtttaccttttttctggaaaaagcccaactggactccagtcagtaggaaagtgccacaattgtcacatgaccggtactggaagaaactctcccatccaacatcacccagtggatggaacatcctgtaacttttcactgcacttggcattatttttataagctgaatgtgataataaggacactatggaaatgtctggatcattccgtttgtgcgtactttgagatttggtttgggatgtcattgttttcacagcacttttttatcctaatgt

SEQ ID NO: 46386 - DNA, 553 bp, Homo Sapiens
  misc_feature (49)..(49): n is a, c, g, or t
  misc_feature (93)..(93): n is a, c, g, or t
acaagtaatgaatgtatccatttgtccatggtttacaatgttgtggatnctttgtaaacattttcctgtatgtttaaattgtgtttcagcagnatgtaattgcccttgtgtgtagttaaaatgagtcatcatctggtcctttgtgaaatggaattcatggtattttctgtaacgttttcctgaagctgtttctggagagccacacatttaaatacagacagctttcctgatcatttgatttattgtgcacctgatttttggtctaaaaggaattattgccacaatatattttatttattctttagattttagccttgtaagttaaagtgctttacatgatgatgtgaaaagctgtttgtccctttactgggtttggggggttgttaaaagatagggaatgaagaatgcaaaatggtttatcgttcaaactgtccactctgatccaaccctgtactgatagtacttcccagtatgatattgtgatgtttcatacaatgcagtgaacataaccaacttgttacctaaataaagaattgataaaaacagtgtgaca

SEQ ID NO: 46387 - DNA, 677 bp, Homo Sapiens
aattttgcgtgtttgcatagcataaaatcagtagacaacaccactgaggtcgttacgatcaacgatatccacagtctctttttagtctctgttacatgaagttttattccagttacttttcatggaatgacctattttgaacaagtaattttcttgacaagaaagaatgtatagaagtctccctgcaattaatttccaatgtttacattttttaactagactgtggaatttctacagattaatatgaaatggagctcatggtccgtttgtgtgttagatatgctgtagctgaagccctgtttgtcttttaaacactagttggaagctctcaataaaaatgcctgctgctcacagcacagaaaatggggcagggggagcctcaagcacaatctagctgtcctcctaaagactctgtaatgctcactcccctcgcgttctcccggcgctgtcgggaggctgtgctggtggtcgtgtagaggtccttctcctttcacatggtgcagagagcgaggacctctcctcctcgttcagttgcacttcagtattttcacggatatgaatgtaaaatatataaatatataaacctgcggtttaacaactgtatacaaccttttgaattagttccgtgtatagatattaaatttcttcatacaaaaagttaacaaacacaaaaaaaa

SEQ ID NO: 46388 - DNA, 565 bp, Homo Sapiens
  misc_feature (554)..(554): n is a, c, g, or t
ttagttatagagttgtctttgcaggaaaaaatgatagtctgctaacctttactgtataagctaagaaactggcaacagcagtgtatacacatgtacttaaaatccagcttagatgtaatataagtaggccaagtgtggtggctcatgcctctaatcccaggactttggtgggaggaatgcttgagcccaggagtttgaggttatagcgagctatgatcacaccaccacactccaatctgggcgacagagcgagactctgtctaaaaaataaagttcagtgagtcaagtgggcccatttcacctaaaaaaatatatatgtaatatatgtaaaatatataacgtgcatcattacatgtaatatatcaaataattcagtttctcctggtagtctaaatttgtggtttaacagttccactagtatttcaattaactattatttcctcacactaagttcccaagtatgcatagacataggaaccttgtgattcaaaattttggttttaattgtaaaaacaggtcttggctgcaaagagaataaaaaagccatgccaaanaaaaaaaaaaa

SEQ ID NO: 46389 - DNA, 463 bp, Homo Sapiens
caatgtggtaagatgcagtaatacgtgcaaggcccctgacttagtggcaatgatgtttaagccgagatctgaaggataactaacaacggcgtgccagagaaaagagtagcgggtggagagaggaggccaggggaatatttctgggcttggtaagtaagccaggtccctgccagacatggactgagaagagcaaagccaggagtgacagctgatgattattttttaactgaggaaggaagatccttgagaacggaacctcttgggaccttctacccagaacaccagagcacctcactgggatcagagccaggccatcgggtggattaagcaactaaaattgattgtcctgaaccatgagtctgtctgtttatggggagagaaactttgagatgaattaatccacaggtccaatgggactttgacattttaatttgtagaaataaaacttgcctttgattttgcc

SEQ ID NO: 46390 - DNA, 638 bp, Homo Sapiens
  misc_feature (184)..(184): n is a, c, g, or t
ccagcagcagaatctgttgagttgctgccacaaacaaaaaatacaataaatatttgaaccccctcccccccagcacaacccccccaaaacaacccaacccacgaggaccatcgggggcagagtcgttggagactgaagaggaagaggaggaggagaaggggagtgagcggccgcccccagggangtttccaggagctggcggccgccgatccgatggagaaggggggacccaggccagcaggagacaggacccccgaagctgaggccttgggatggagcagaagccggagtggcggggcacgctgccgccttccccatcacggagggtccagactgtccactcgggggtggagtgagactgactgcaagccccaccctccttgagactggagctggcgtctgcatacgagacacttggttgaacttggttggtccttgtctgcaccctcgacaagaccacactttgggacttgggagctggggctgaagttgctctgtacccatgaactcccagtttgcgaattatagagacaatctattttgttacttgcacttgttattcgaaccactgagagcgagatgggaacatagatatctatatttattcgactatgagggcctgtaaataattctaagcg

SEQ ID NO: 46391 - DNA, 723 bp, Homo Sapiens
ccgttggtttccgaacttcctggatatcctcgccaggactttgcaatatatttttccgccttttctggaaggatttcgctgcttcccgaaggtcttggacgagcgctctagctctgtgggaaggttttgggctctctggctcggattttgcaatttctccctggggactgccgtggagccgcatccactgtggattataattgcaacatgacgctggaagagctcgtggcgtgcgacaacgcggcgcagaagatgcagacggtgaccgccgcggtggaggagcttttggtggccgctcagcgccaggatcgcctcacagtgggggtgtacgagtcggccaagttgatgaatgtggacccagacagcgtggtcctctgcctcttggccattgacgaggaggaggaggatgacatcgccctgcaaatccacttcacgctcatccagtccttctgctgtgacaacgacatcaacatcgtgcgggtgtcgggcatgcagcgcctggcgcagctcctgggagagccggccgagacccagggcaccaccgaggcccgagacctgcattgtctcctggtcacgaaccctcacacggacgcctggaagagccacggcttggtggaggtggccagctactgcgaagaaagccggggcaacaaccagtgggtcccctacatctctcttcaggaacgctgaggcccttcccagcagcaaaatctgttgagttgc

SEQ ID NO: 46392 - DNA, 477 bp, Homo Sapiens
actagtcacggttggcttcctgcgagacaaggaagccaagatcaaggagttgttgaagaagctggagcagctttcagaagaggttctagcaattcggggagaaaatgctcgccttgccctgcagctgcaggattcccagaagaaccatgaagagatcatctccacctacaggaatcatctactgaatgctgctcggggttacatggaacatgaagtgtacaatatcctgctgcaaatccttagcatggaagaggagtgaggcagcctcactgtgtgccctcagggatacgagattctctgttggaataagaaaccctggttgacagaggcttcatcaggctgtggtgggcgggggtgttggccactaggcaatggtatgggcagggcttcacctgacattatggacctcagacctgagaacctggaccctggaatcagcatggatgagaccagaggaggtctggttggaaacaagct

SEQ ID NO: 46393 - DNA, 631 bp, Homo Sapiens
  misc_feature (570)..(570): n is a, c, g, or t
  misc_feature (593)..(613): n is a, c, g, or t
  misc_feature (615)..(621): n is a, c, g, or t
gggtggaccttgatacgactaagcggttacatatgtggttgtgcaaaagctttctgtttaatgcatagtgttaccgatttacatcttggttttcagtggcactatgtctaggaggcaatatccttttaaacagtgctttggctaagatagatacttgtgaatcaaagatagcacagaaatgaactaagtatatcccatttggaattatattttgatactatttaaaatggtttcacctgttaaagggccaacagaactcttggttttacttttgtaattactgtacagaaaatttcaagagtgtttgagtgcttgtcatcaggtgttttccttaataagtagggatatgatcatttacaggaattatatatgaaaaaagtttttgaaatgtatttttgtgatgtgctatgttgaggggaaaccaaatatttatgattttaaaacattcgtatgaaaacattgtacaatgtaatatgctcaactttctcaattttttgctaatttttctaagatacattaaaaatgttttatatttttttttaagtaaaatggacccagtaagaaaattanaaataccagaacatacactcaannnnnnnnnnnnnnnnnnnnnannnnnnncttggtcggc

SEQ ID NO: 46394 - DNA, 582 bp, Homo Sapiens
actgctggtgttgtcactgagataaaagaatgatgggtcagaatttctaccacgtttctggatacagtgaaatagctaacctctgtttcaagaatgcagttattaagtcaaaggaacaatgtgcaattgatatgtttttagatgagagagaaaaattaaagctaaaattagctgcaaagaagtattaataatcacctctgcaaaaattctaagttgccaactggcaaagaaagtctaatgttaaaaacaactttgcctttgaaacgttaataaatggatttactttgctaagatttatggcaagtgtcaaaaatagtatctgaagatactgaatcatcatgaaatgaactctacttctggccaaagcacaatgtatttgcagttttctcttttgattcaattatactgcacatgttttaaggaaaagtaacttaattgggtttttcaggcagttgatatttgacctaagctttttttttttttttttttttccagttaatgctaagaaaagatttggggaaggttataataaaagtattttgtggtgaccataagaatgtccctccccaaacaagtaaactt

SEQ ID NO: 46395 - DNA, 601 bp, Homo Sapiens
catggggaaccatgagtcaatttaacctctttcctttacaaattacccagtctggggcagttctttatagcagtgtgaaaatggactactacactgcatatataggaaagtatggtcagacagtaaatagctctgttcaaaataattgagttccaaacaagtaaagttttttctaccttctgaaacttgctctttccaaaccattgttcatcctttaacttctttacactatcaaaaattctatttaaaaatagagggctttcagatgagtacatacaaaaacaaacaaaagtatacataggggtaacacaaccatgagattagtaaataatacatatggctagcacataatttgacaccttataaaacaagaatctgtactatcttttccttcctcccaatatttcttcatttctatgctcaattttctaatactttttcacatgcttaatcatttactctttcatcgccttccctcaaaaaaacctgctccgttgaagtaaactaagtaactcaatattctttattttggtttggaacctgtctcaattttttgtatccatattaagaagtcaccctataatctaaactttgtaattct

SEQ ID NO: 46396 - DNA, 585 bp, Homo Sapiens
atatgagaaagatttggaaaacgagactgggactatggcttattcagtgatgactggcttgagatgataagagaattctcgaactgcatgtattgtgccaatctgtcctgagtgttcatgctttgtaccaaatttaatgaacgcgtgttctgtaatcaaactgcaaatattgtcataaccaacatccaaaatgacggctgctatatataagtgtttgtcatatggaatttaatcgtaagccatgatcataatgttaactaaataactttatgtggcactgcctagtaagggaactatggaaaggtttggatttctccaaatctgggagaattttcaaaataagaaaataacctttatatgatatactatgactaggctgtgtatttcttttcagggatttttctaccttcagggttggatgtagtttagttactattaccatagccaacctgtagttttacatatacattttcttgtggagcaatagagttctccattttacagaagcattttaaatgtagtttgaatattttccacaagatgctgcaatgtgagttatcacttcatttatcttaaagaaagact

SEQ ID NO: 46397 - DNA, 512 bp, Homo Sapiens
agcctgcaacagtccaaaccggaagggagaatttattttttgaaactgaaggaagtcccgaccttcctggattgaagtgcacactcatggactttaggtttagaaacctcctcagccttcatttgttcgtggatgtgtgagctctgagggtggccctgctattcctctgtgtgcctgtagtgtccccagcataggggtcttaggcatagggctgaacagtccttccagagccctcgttccaatccctgccgtccttgcccctgaggggccctgaccactgtgagcaggagggtggcagagctgggacaaagctgcctttgccgctgggctttccgggactgtggagggagcacaggcggggaagctccacttcagacagggcttggtggggcaggacatggctcccattttgaagggaggtctccatgtggtccgagtgaggtgagacggccctcgtcctggtgttcctgatcatcttgaaaggttcttctggaactcctgtccccttagtc

SEQ ID NO: 46398 - DNA, 943 bp, Homo Sapiens
  misc_feature (728)..(728): n is a, c, g, or t
  misc_feature (736)..(736): n is a, c, g, or t
  misc_feature (793)..(793): n is a, c, g, or t
  misc_feature (805)..(805): n is a, c, g, or t
  misc_feature (815)..(816): n is a, c, g, or t
tttaaagcggacggtccggattcccgggatcttcccacccgctgctcgccacgggtggaagggcttggccctgggaggtttggggagtgtcccgtactgcttgggacccatggatcagtgctcggctccaaccacccaaagcccccacccgccctcagtctaggctccccccgtaacgccacgttcttgctccccctccctctccaggtggtagaagaaacccaagtcatcctccgagagtacggcttccgctttgtgaggcgaggccccatctttgtgaaggggaagggggagctgctgaccttcttcttgaaggggcgggataagctagccaccttccccaatggcccctctgtcacactgccccaccaggtggtggacaactcctgaatggcctcgagcctgcaacagtccaaaccggaagggagaatttattttttgaaactgaaggaagtcccgaccttcctggattgaagtgcacactcatggactttaggtttagaaacctcctcagccttcatttgttcgtggatgtgtgagctctgagggtggccctgctattcctctgtgtgcctgtagtgtccccagcataggggtcttaggcatagggctgaacagtccttccagagccctcgttccaatccctgccgtccttgcccctgaggggccctgaccactgtgagcaggagggtggcagagctgggacaaagctgcctttgccgctgggnctttcggnactgtggagggagcacaggcggggaaagctcacttcagacagggcttggtggggcangacatggctccnatttgaaggnnagtctcatgtgtcgatgagtgaacgcctcgtctgtgtctgactctgaagtctctgactcgtcctatctggacgatgcaatctcctgcagagggttttcgagatatacatcatattactgtactcatt

SEQ ID NO: 46399 - DNA, 507 bp, Homo Sapiens
tccggagctggtccccgtggttgaattggaagaggccatagccccaggctcagaggcccagggcgctgggtctggtggggacgcgggggtgcccccaatggtgcagctgcagcagtcaccactagggggtgatggagaggaagggggccaccccagggccattaacaaccagtactccttcgtgtgagccaaccccacccgctccaccctttttaaaccccccagccctgctcgtgagattgggctgggtagggacagaggaggccgaaatccctcccccatgcttcctgacccttgttggccaagggcatctttgatggtacaagcagaggctcgggagaggctcccgtcacacactacaggtcccctccccagggcaggggatttgggctccatgagctccttgaggggctcttctggtcagccccaccctgggggccatttccccattaactacccccagcccgaggcagggtgagggggaagggctgtcagttacattaaggt

SEQ ID NO: 46400 - DNA, 518 bp, Homo Sapiens
acagcaaagagaatagaaacttctcagaagatgtgctggggtggagagagtcgttcgacctgctgctgagcagtaaaaatggagtggctgccttccacgctttcctgaagacagagttcagtgaggagaacctggagttctggctggcctgtgaggagttcaagaagatccgatcagctaccaagctggcctccagggcacaccagatctttgaggagttcatttgcagtgaggcccctaaagaggtcaacattgaccatgagacccgcgagctgacgaggatgaacctgcagactgccacagccacatgctttgatgcggctcaggggaagacacgtaccctgatggagaaggactcctacccacgcttcctgaagtcgcctgcttaccgggacctggctgcccaagcctcagccgcctctgccactctgtccagctgcagcctggacgagccctcacacacctgagtctccacggcagtgaggaagccagccgggaagagaggttgagtcacccat

SEQ ID NO: 46401 - DNA, 883 bp, Homo Sapiens
  misc_feature (44)..(44): n is a, c, g, or t
  misc_feature (758)..(758): n is a, c, g, or t
tatttttttatgtattcccttcaggattccctgtccccaacagnaatttttaaaccaaaacaccccaacttggcagctttttctgtggaggacagacggccggccggacctctgagcacatagtgtcctgcccaccctaccagctcctccagccctgccgggcacatgcccgggggacgcctgccctgcccaggtggcctcctggcctgccctcacctctgatagactttgtgaatctgaactgctctactttgagaagatgaccggtttggagtaatcagaatgaaccctcctcctttttaagggtttttttttttttcctttttctaaaaagctatgtatcgctcctattgaaagaccagatccttaaagaagtttgtggtataaaaagaaagtggggacagattcgcagcacagagtcgctggcatgtctcactcctgcttctctcagccagctgtttaagcctgcggcgccagcctcacggagggccgtgtgacactctcgtggtatgtatgggagacggcagcagtgaagcagcagccaccagggagtggccatttggggttgggacagggagggtgttttgggtggatagagggttttgtattgagggccagggatgatgttttgatatttatttcctgctacttaaatttgaatctgagtgaattgtccctatttctgatgatgtcgggcttgcaaagcgaccgattcataaagtaatgatggaattctttctttcttccggtgtgttttntaatgaatagagcccactgatttttgttgtaaatacaagaagcaatttacctggtctaaaaccgccccccaggtggacccttcccagcccttaacccactttcttttttaatggcctgggacctg

SEQ ID NO: 46402 - DNA, 722 bp, Homo Sapiens
agatggcacaggggcgtgtggcgggcgggtgaggctgctttgcacacctgtgttggtggctgtcccctgccgcccctccctgtggcagcagcaggacaggtgtgtgcccagcaccctccctacctgggcctggaagcagatgaggggaatacttcatgcaaagaaaaaagtaacatgtgcaaaagctccccgtccagctttgacagtcagtttcgatgtcagctcctcggcagggtaggcctgatgacagccctgtccctccctgcctctgccttgcccaaggccacggagggcgtctgcagagaggcctgccttccggattccaggcgggcatgccctgcaaaccccgcctgggcctcccttggtctgcccagccctcggttagccctgcctgaatcagtagatacttgaacgagtccccagtctgcgggaggcagtggtggggccatggacccatgcggggggttccagggtcacacgccacataacagacaaaaatacacacacgtgtgtttttctttgcaatacttgaaatattgccactgtgcttggacttagaagaagaaaatccccgtgacttcttcctcatcaccttgatggctttattctcaccttgtggggcatgtttgtatttattgcttcatggccgactggaatcccgagtcctgggaagctggcactgcggggatcttgcccggtgtcctggtcctcttgcttccgtc

SEQ ID NO: 46403 - DNA, 641 bp, Homo Sapiens
agtccagagccgggacgctgctgcctgtcattcagttcctccagaagagcatccagcggcacctggacgacctgtcgaaactctgtagctggaaccactataacatgcagtacgcactagcagtttccaagcagcggggcacaaaacgctccctagacccgctgggaagtgaggaggaggcagaagcatctgaagatgacagcctgcatctgcttggaggaggaggcagagactcagaagaagagatgctggcctagagccagccggttgcagcgttggattgtgccggctaagacctgccagggagatgggacccttgtgccacctgggccagcaaagaggaggggtccagagaacagctgaaatactgtcactagtggtagtgacttgcttttcctgtgcacacatgtagcccatcaggacagcgagccgacgggtcacgccaggggccggcacgcactggcacctggccccaggagcggggccgtgtgaacggtgatgaatgttgaaaatgcgtctcagagaggtattcacatgaactttgtatgagacttatttatatttttaacataaaggtttgataaagaacttagggattaaaaaaaagatggagctttctaaaaaaaaaaaaaaaaaaaaaa

SEQ ID NO: 46404 - DNA, 332 bp, Homo Sapiens
aaagataatgaaacagccaccagttaaatttgatgcaaaaatattgcatctaccaacatattcagtggataagttattatttctgaaagatcaagattggaatgactttttgcaacaagtgtgctcgcagatcgactccactgagaagagcatgggggcctcccgagccaagctgaatctcctttgctatttgtgcgtggtggctggtcaccaggaggtggccaccaggctcctccattcccccctgttccaattgctaatccagcatttgcggatagctccaaactgggatatacgggccaaggttgctcacgtgattggtttactggctt

SEQ ID NO: 46405 - DNA, 896 bp, Homo Sapiens
gtttctacaataaatatgaataaatgttatataaggaaactcacctatttgaaatcatggctatattgtttttattttctagattccaaaaatacaaacactagttgttccagcattgtactttgataagtctgtacattgacgtgtatggactaaatccagggtaaaatcaatgttacaaaatttaagggtatgttaactaaaggatagcatttctaagatattttgaatattagggtcatttggcacttctcagcaagtaggatacttctcatgttttgaaattatatgaatatggaaaaaaatggcttaagaccagcgtctctgtatgacattgtgtggttgaccctctgagataactgttttcatctacagaattgcatttttgcttttaaagaggtcttataatggaactaggaatcaccgttttgagagaacctgcatatataccagtcattatctgtttggtccttatacagttttaacttacttagatttattctagttaagccataagttcaacgtggtaaacttgttttcattaaaaaatttttctatcaaaaaaaaaaaaaaaagggcggccgctcctaaaataccccccaaggggccccaaacttacccgtaccccagcttttcttgaacaaaaggggcccctaatagggaagccgaatttaaaaacttaggcaccgggcccgttcggttttaaaaacgcctctggaatggggaaaaaactgcccaacatttggggaaccttttttgggaaaggggaaacccttaaattttgggggggggggggcgaactaaaattggggagaacaacttctccctataagaaaaatttttaaaaagcctcccgaggggaaaaattaagagaacatcttttaaaagagcggaaa

SEQ ID NO: 46406 - DNA, 948 bp, Homo Sapiens
acagagcgagggaaagggggagaagaaaagaagcaacaaggacggggggggacgggggggggggggaacagctggtacggtccggattcccgggatgcgacaacccaatggaataagtggaaaatttgtctttgacatcttccagtttgcaaagaagtttgtggtatatgaagtattgcgagaagatgagttttccccactaaagaatgctgatagtcagaatgggaaagacaaccctactactgcaaggcatgctttgatgtcccttcatcattgctgggtcctcaatgcagggggccatttcatagatgaaaatggctctcgccttccagcaattccccgcttgaaggatgccaatgatgtaccaatccaatgtgaaatctctcctcttatctcctatgctggagaaggattagaaagttatgtggcagataaagaattccatgcacctctaatcatcgatgagaatggagttcatgagctggtgaaaaatggtatttgaaccagataccaagttttgtttgccacgataggaatagcttttatttttgatagaccaactgtgaacctacaagacgtcttggacaactgaagtttaaatatccacagggttttattttgcttgttgaactcttagagctattgcaaacttcccaagatccagatgactgaatttcagatagcatttttatgattcccaactcattgaaggtcttatttatataattttttccaagccaaggagaccattggccatccaggaaatttcgtacagctgaaatataggcaggatgttcaacatcagtttacttgcagctgggaacatttgttttttgaagttgtacatagtaaataatatggtcattggtacatgtttgaaaagggtttcctatgggtactaaaaaagtttgggttttaatttttaccaaaaccattaaagcctttttt

SEQ ID NO: 46407 - DNA, 847 bp, Homo Sapiens
  misc_feature (608)..(608): n is a, c, g, or t
gggagtccctgtctctcacagcatctagcagtattattaaatggattcattttaaaaatagctcctatattttgtaacatgtctcaaacactcatactgggttccacaatccactgttagaatacctatggttagggcttctgaactaaaataatggaaaattttaacaatttgtatagtgcctggatcattactagtgccataaccctgcttcttcaacatttcacagaacttctcttttatataaaggcaagagcacaaaatgagttcagatgatcacaaacaggtgagttttgttggagaagaaagttggagtaggagactttcacaagtggtttccatggagatagaatgaagcattctgtggtcaagtaagtttagggagctattcatgtttcacttgctttgtggagattcacactatgcactgggaaagtatctgaaaagtcttataataaagaaacaggcttaactttgtgtaagaacactgtttatcaatgtcatttggctatagaaacattttctcctgctgattgtgtgtgtgaaacatgtattaacattccaatgaactagcatttaataaagcacaattttgggaaaaaaaattnatacgtcgccccccccagactagcatgcgcgaggctggagagatgtgtttttcataaactcgatacaataattagatagtctattgtggggcccctttgggccccccaaaaatccttttaaaaacctttttttttgggcgccgggcgccccccttagggaaatgtggaaaccgggggccaaaaagctggttccccaaagaagaaaatccgggggaatataagaaaaaggacgtgtggga

SEQ ID NO: 46408 - DNA, 874 bp, Homo Sapiens
  misc_feature (645)..(645): n is a, c, g, or t
  misc_feature (647)..(647): n is a, c, g, or t
  misc_feature (666)..(666): n is a, c, g, or t
ggattcaacttccctgttctcatctttggtaggattctgccagttgcttttgcatcttctgttcctgggtaatggtgggtcttaatggaggctgggtggaccactgcccgtccactcttcaacaggaggaacagcatgccaccacagtaacacacattagagaaaggacagaggtctgctccttcctgccacctttctcctggccccttagcattcccccagtccctccctcttcaccttgctccgtctatgtcttcccagctcagccttttccccactcttaaatactgtactacttcactgtaagaacgaaagaatagttaggataccaatgagtaaaagggttcctgttcactctgactctgtgcaaattgtattacagtagaccgctgacgttcccaagtgacagatccagggcctttcaaacatccccaaagtcatggccatactcaccattagccagtttctaacatctgtttcagggtatccagctgtagatgttcttatcccccatacttgtgagttattggggttgctcacaaatactaggggtttttgttgtatttttaacaaatatatcctaatgtcatatttattctcttttgtaactgctgtctttacaataaagaaatcatctgcaaaacncnacaatccgtcgacagtganccctgtccggccgcctcgggccctcaaaaagttttccagaccatttcctttgtgcgcgcggggcccagtaaggtaagggaaacatggggcataggctgggttcccaaggaaaaacccggggccatggaactaaggccttgggattcctccaccaaataaaaaaacaccccccggtgggacaaccgaaagcgtttccgtgaacaaaaaa

SEQ ID NO: 46409 - DNA, 913 bp, Homo Sapiens
gggatgaggactatggctgcatgtcctctgcttgcccggctgcagagcagagatgtgcagccctctggtcagctggtccaggctggtccccgccggtccccttccagtccagccaccaagagtccacttgtcccgggcttccacctggctgacaggaagaatttctgagagctggatgtgcatgccctgtggacgaaggtacagctcgcctgcctgccccaatcccagccccgacaatcacatgcagctgactcggacactggccttgggaacaatgttcgagagaacacttgccccttgactgtaggagccagaaggggacccaggtgtgcatagctctctgtagacatttttacccaaacctgttggtaaagtgcccatctggtgctcaagagagcctgggggtctaacagggagcccggctgcctcacctggccacagcctccacaccagatctccacattgtcttgatccagaccagctctgtgatcagaaggaaattgggtccagtgtaggagagagctggtcctgggcctggcaagagtgtgggcatcctttcctggcctttctccactctccctcaagcctgtgctcaggttgccttgaatgtggactctggaagagccaggggcccagaatgccgggggaggcttctgagtggcactcatggaacaccgtccctctgccagccataggccctgcctccagtgtcagggaatggaggctgggctgcgagagtgttgctgccccctgtgtcattcttctaatccaatgtagaaattgtacgtaatgtatttaaatcaacgcaaatgtatgaataacaaatacagttctgaccttttttgtccagtttctttgggggaaggagacaaagaaggtaggacggaattttgagggcaagaacctgtgtttc

SEQ ID NO: 46410 - DNA, 880 bp, Homo Sapiens
  misc_feature (702)..(702): n is a, c, g, or t
  misc_feature (708)..(708): n is a, c, g, or t
  misc_feature (710)..(710): n is a, c, g, or t
  misc_feature (714)..(714): n is a, c, g, or t
  misc_feature (735)..(736): n is a, c, g, or t
  misc_feature (762)..(762): n is a, c, g, or t
  misc_feature (767)..(767): n is a, c, g, or t
  misc_feature (769)..(770): n is a, c, g, or t
  misc_feature (772)..(772): n is a, c, g, or t
  misc_feature (778)..(778): n is a, c, g, or t
  misc_feature (786)..(788): n is a, c, g, or t
ttaacagcggacggtccggattcccgggatgacacaatcgcccaggcaccctcatggcagctgacagagccaaacaaatgtttggaccccaagtgcttacgacccggcactacgtgggctcagcagctgcttttgcagggacaccagagcatggacaattccaaggcagtcctggtggtgcctatgggactgctcagcccccacctcactatgggcccacacagccagcttatagtcctagtcagcagctcagagctccttcggcattccctgcagtgcagtacctatctcagccacagccacagccctatgctgtgcatggccactttcagcccactcagacaggtttcctccagcctggtggtgccctgtccttgcaaaagcagatggaacatgctaaccagcagactggcttctccgactcatcctctctgcgccccatgcacccccaggctctgcatccagcccctggactccttgcttccccccagctccctgtgcagatgcagccagcaggaaagtcgggctttgcagctaccagccaacctggccctcggctccccttcatccaacacagccagaacccgcgattctaccacaagtgaccatcagattatatcttcaacaccacaccccccaccccatcgtgggtgagggtatcccctgtgtgtcccaggccaataaaatctacctgccactgcnaaaaananaaanaaaaaaaaaaaaaaaaaaaannaaaaaaaaaaaaaaaaaaaaaaaaanaaaanannanaaaaanaaaaaaannnggggggcctctaattcctgaggccaaatacaccccttttgaagggctatagtatatacagccgcctttaaccggggagcctgtttgaaattt

SEQ ID NO: 46411 - DNA, 698 bp, Homo Sapiens
  misc_feature (615)..(615): n is a, c, g, or t
agcggggcggggggcgcgcagcggcggtagccgagcgagggcgcggtggcctctgacaggaatgactctgcgcacgtgcgtttcgcagcagtggaagtcttcacacccggaaactcgactttggccgtttctccatttctcctcacgcactgtctttccttgggccctcgtcactcctggcaccgggggaagggcttccccgcctctggccgggcgctggggcgcgaccgaaggcgaggcggcggcgaggaaccttctggaattcggccgtcggggcaggcgtcgagtttacaggagaaggcgcggtgtcccgggatgagcggagtcgccctcacttaaggagcgagggaggcctcgggggtccccagccggtgatgagccctcctcttcagctaggaaaatgacggtgttcagaaagttaaaacttcttcgctggaaggatttcatcttaaagttgggagactggaagaaattaaagtgttctaaatggaagagcattcaccacatgtgttctggtttgggttgacatttagctttggtttttattttagaaacggaagactctggtagcagtccttgaaatcttgatgccattgctattttctgcattgtatngtatcttcgttttagtagtgctccaataaaaagacctgctactagctgccatgcgaaaaaaaaaaaaaaaattctccagcgct

SEQ ID NO: 46412 - DNA, 917 bp, Homo Sapiens
  misc_feature (615)..(621): n is a, c, g, or t
  misc_feature (623)..(624): n is a, c, g, or t
  misc_feature (627)..(628): n is a, c, g, or t
  misc_feature (630)..(630): n is a, c, g, or t
  misc_feature (635)..(638): n is a, c, g, or t
  misc_feature (640)..(645): n is a, c, g, or t
  misc_feature (647)..(647): n is a, c, g, or t
  misc_feature (654)..(654): n is a, c, g, or t
  misc_feature (659)..(661): n is a, c, g, or t
  misc_feature (668)..(669): n is a, c, g, or t
  misc_feature (701)..(701): n is a, c, g, or t
ctgaggcgactgtcccatggaggcatccaaggctttctgtgccaagaatcccaagtgactggggctggggaccacttctccaggcctctctccccgaccatgagagcccctggccctggcccctgcacaccagtaggcccagaataaccgccacccttgccatcctgcaacagctggactcaagtttccaggaagtggagatgtgtttctagaagtttcctgtggaacctggaggctcctgatgcctttgactccaggctgggcgattccgatgctgacccgtcctcctgggctccccacccccgctccccaagtgtcacacaggcactttgtacacatcctggttttctaagaagggaacttgccatcaagattcctgtaccaggcccacggccgtctcgggcagagccacctgggccccgggtgcagccggagaccccgccgagcccctcctcccagtattcccatccccgcatgcttctagggagcgcctcttttccgttcttgaggaatttctgttctggggcttgtccttcctttgcagctgttttgaatgtagttttccttttctatttatttgcacattaaagttaataattgaatattgacatcaannnnnnnannacnncncaagnnnngnnnnnnanaaaaatnatagnnntcaaaannaaaaaaggttataaaaaaaaaaaaaatgaganaaagatgggggggatgtaaaaaaattcccttcggaaagccaatccggggtttttggcaaacctatcccttaaaaaaaaagctgggggggggggggtcttattaaattacccaccgaggggggggcgggttttttttcccccccaccctttttttctaaagggcggggaggccccattaacggggtggggagtaaaaattggacgagcggggggcgc

SEQ ID NO: 46413 - DNA, 931 bp, Homo Sapiens
  misc_feature (794)..(795): n is a, c, g, or t
ctttgggaggtcgaggctggcggatcacgaggtcaggagatcgagaccaccctgattaatgcggtgaaatcccgtctctactaaaaatacaaaaaattagccagacgtggtggtgggcacctatagtcccagctactcgggaggctgaggcaggagaatggcatgaacccggaaggcggagcttgcagtgaaccaagatcgcgccactgcactccagcctgggcgacagagtgagactccatcgcaaaaaaaaaaaaaaaaaacctgcatggaagcctagtatatttattaataacaaataaattatactttagtgtactattaacctataccaattttaagttgtgattagggaatggggatgtttttaagctgaattgtcttgctgcggaactttccttttttaataagaccatattatgactctgaatgctcaagggtaagtctaaggcctcattgctgttaccaggagatttttctagttacagtaataaagatgttaattcacatgcatgcagacaactgaaactcaagtggagaatttgtttgtgaacaagtcatactacttctgttatttgcatgaatggaatctgcaatatctttttccctgggagaccctaaaagaaaaccctggatcagaatgatctgcagtttcagataataaaggcttttaagagacatttttagaattaaaaatatgctaattctatcaaatgaaaatatttgtaactgttaactttctcactgaccaagcaagtgtctccataaaatacctattttaacttgcaaaaccnnccccccccccccttattattacccccccccccccgtccctgcttccttctcccccccaatccttccccttccgcccttcctggtcacccaacccctataatccccaagaaaagggggggcgccccgcttctaaaat

SEQ ID NO: 46414 - DNA, 594 bp, Homo Sapiens
cggcacgaggattaatcttggcaaactgcttaatcttgtggattttgtagatggtttcaaatgactgaactgcattcagatttacgagtgaaaggaaaaattgcattagttggttgcatgaacttcgaagggcagatattactgcacaaactgccatctcgcttcatttttttaactatgcatttgagtacagactaatttttaaaatatgctaaactggaagattaaacagatgtgggccaaactgttctggatcaggaaagtcatactgttcactttcaagttggctgtcccccccgccgccccccccacccccatatgtacagatgataatagggtgtggaatgtcgtcagtggcaaacatttcacagatttttattttgtttctgtcttcaacatttttgacactgtgctaatagttatattcagtacatgaaaagatactactgtgttgaaagctttttaggaaattttgacagtatttttgtacaaaacatttttttgaaaaaatacttgttaatttattctattttaatttgccaatgtcaataaaaagttaagaaataaaaaaaaaaaaaaaaaaaatggtgggcg

SEQ ID NO: 46415 - DNA, 644 bp, Homo Sapiens
  misc_feature (224)..(224): n is a, c, g, or t
gcctgattgatacttgccttgactaaattttgtggacctcttggggcattttgaagtatttaactgtcttgaccagttggaagaagatacgtgggccataagcatcttctggacaggggaactgctttcagagagaaaacctttccaagagagttttgttttgttttggtttcgttttgtttgagatagggtcttgctctatcacctaggctggagtgcagcgncatgactgcagccttgaactcctgggcttaagtgaccctcccacctcagtctcctgagtagctaggactacaggcacacactactgtgcccagctaacttatttttattttttatggagatggggtcttgctttgttgcccaggctggtcgtgaactcctggcttcaagcagtcctcctgcctcagcctcctaaagtgctgagggctttaatggtttcacattgaagcctgaagttgctaagacttaggttgtttcttatatctggttttaagtagatgaaacaaccagaaacttttacttgtgatactctaccatgaaggatgcggtaatggcaggaatagcagaataattggtgcttgtaaacatttaagattctcctgtggattttggtgagtgatcattaaactgttttccaactt

SEQ ID NO: 46416 - DNA, 573 bp, Homo Sapiens
ttcccgggaatcgtcgaccacgcgtccgggagactccaccctggggtcccaaacgccgctaacgcccagacgcatggatgcaccccctaccctgcctccatctatgggagttctttctctcagagtgggggcagtttctggcccaggggtctgagctgcggcagccccagggcagggggccctacctcctcagctctgtgcttggatacagggagcagccaggagactccctagtgcccccaccatggcgggtgtcactcacgcactccccatcccttagggcttcctggcctactgcatccttgtgggagtcagggaggagggcccgttgggtagctggggccaggcttctctccccaccacctgcagatttcttgctgcttccactgatacccttttgactggaatgaactggctgggcttgtcagggggcaccccaaagagggggcactgccaggtagctgggggagtggcatggggcaggggcccagttctcagcagcagacactctgtacagttttttcaatccctgtttttgaataaatattctcagcgacaaaaaaaaaaaaaaag

SEQ ID NO: 46417 - DNA, 680 bp, Homo Sapiens
gagaatttcctggctgttgtgaaagaatttttctacatcctgaactatttttcctatttcttttcaccttgctttttttcatccttaatttgcttgtcatcacaatgaagtatgttttttgaatcatcaattctttctcattctccatttatctgaaggttcttttgcccttattaacctctcaacttttattgctgtattctagtcagaccagaacatacttccactacatcagttacttggcatcatttcacctcagtttattattgccaaataataatttgtgtcagcattttcaactatggttattcatccaacccttggatctctttgagtctactgataatctccactggaaaggtggaattgaaatgtggtccacattttaactagctatttcctggggctgtatttttcagaatatgctgagctacatttgctgcaatctgttgctattcagagtttaagtttcaggagaaaacaggaacaatagaacactctgcctgttatttttgttgtaatcaagcttttccacagttcttgaaaagtactatgtttcaaatttcaggaacaccagcgttagctataaagttgcagcaatttattggctagtcatagaaaatttttgaacttttaactgtattttaattgatgtttattaaaaacactttgctatcaga

SEQ ID NO: 46418 - DNA, 889 bp, Homo Sapiens
gctctgtgccacgcaacctgccagctactgaccccctacaaagggagctgctggcactgatccagctggagagggagttccagcgctgctgccgccaggggaacaatcacacctgtacatggaaggcctgggaggatacccttgacaaatactgtgaccgggagtatgctgtgaagacccaccaccacttgtgttgccgccaccctcccagccctactcgggatgagtgctttgcccgtcgggctccttaccccaactatgaccgggacatcttgaccattgacatcggtcgagtcacccccaacctcatgggccacctctgtggaaaccaaagagttctcaccaagcataaacatattcctgggctgatccacaacatgactgcccgctgctgtgacctgccatttccagaacaggcctgctgtgcagaggaggagaaattaaccttcatcaatgatctgtgtggtccccgacgtaacatctggcgagaccctgccctctgctgttacctgagtcctggggatgaacaggtcaactgcttcaacatcaattatctgaggaacgtggctctagtgtctggagacactgagaacgccaagggccagggggagcagggctcaactggaggaacaaatatcagctccacctctgagcccaaggaagaatgagtcaccccagagccctagagggtcagatggggggaaccccacccggcccccccctctgaacattctttaactaaaacacctcttgaaaaaaaaaaaaaaaaaaaaaaaaaaaaaaaaaaaaaaaaaaaaaaaaaaaaagggcgggccccttaattttaccccaaggaagggggcccttttaggtggaccctaaatttaatgccctaggcccgtggggccgc

SEQ ID NO: 46419 - DNA, 848 bp, Homo Sapiens
  misc_feature (823)..(824): n is a, c, g, or t
  misc_feature (834)..(835): n is a, c, g, or t
  misc_feature (843)..(843): n is a, c, g, or t
  misc_feature (845)..(845): n is a, c, g, or t
agtattctacgcacctgcatctagcagatgattgtatgaagcacttcaagggctcggtggagaagctgtgtagtgtggagcaggacctggccatgggctccgacgcagagggggagaagatcaaggactccatgaagctgatcgttccggtgctgctggacgcggcggtgcccgcctacgacaagatccgggtcctgctgctctacatcctccttcggaatggtgtgagtgaggagaacctggccaagctgatccagcatgccaatgtacaggcgcacagcagcctcatccgtaacctggagcagctgggaggcactgtcaccaaccccgggggctcggggacctccagccggctggagccgagagaacgcatggagcccacctatcagctgtcccgctggaccccggtcatcaaggatgtaatggaggacgccgtggaggaccggctggacaggaacctgtggcccttcgtatccgaccccgcccccacggccagctcccaggccgctgtcagtgcccgcttcggtcactggcacaagaacaaggctggcatagaagcccgggcgggcccccggctcatcgtgtatgtcatgggcggtgtggccatgtcagagatgagggccgcctacgaggtgaccagggccaccgagggcaagtgggaggtgctcattggctcctcacacatcctcaccccgacccgcttcctggatgacctgaaggcactggacaagaagctgggagacattgccctgccctgacccctggccccgccccctacccctcccttttcagagaaataaactctttcccgtcgctctggccnnaaaaaaaaannaaaaaaananaaa

SEQ ID NO: 46420 - DNA, 533 bp, Homo Sapiens
  misc_feature (519)..(520): n is a, c, g, or t
atggggcaatgcagcatctctgccttcttctgggtattcctcttaaatggcttgacaataaccaccaaccagcactgccatacatgtgtcctgtacctatcagaggcactagggcagttttggaacagagagcccatagaaaggctactgcttagagatagccattttcttcttggagctggaccagtgaattagacgcatggaggagagctggaaaatccctttttggaagagctacacaaaaccaaaatttggaattcgtagctaataaccataaaaattaagaaatgactgttggaagagcactggaaatcacctgattaagttaagaaaaaataactagctcatgagaaaattattttcaggccagctgtagcctgtacccttttgaaaatcccctgactagtgagttcatttttgttggaatatagaatttttcttttctaagcagatgtaaacttgtctttctgtggttggctttggagcccacaagataattaaatggcagtgctaactgannaaaaaaaaaaaaa

SEQ ID NO: 46421 - DNA, 540 bp, Homo Sapiens
ctcacagaggcctgggttcaagtcccacctctgccactaactggcatgtgaccctatctatccttcactgctctgagcctagaccctggcccctgcctggctccctgccaggctccctgccacccctcacgacctctgatggtcgttgtgggggtctcttgcctggctcccagggctagggttagggctctggaggtgctttcactcaaccaagggggccacagcactggggagtgaaactgccccgcctcaccctgcgttgccctctgggtctgtgagggtgggctggcaggaggcctaggccttgccctaggggcagtcctgcttcctcattttatagatagggaaactgaggctttgggaggactcactgacatacctaccttcaagatgagttcaggtgggctcagttctggggcttgggaaaagggccccagtggctttgggaagcacccccagcccagggtgaaacatgcttcttctcttcctgtgggtccatccgaaggattgtggtgagccccgtgccttcagttaataaag

SEQ ID NO: 46422 - DNA, 773 bp, Homo Sapiens
aggcaccatgcgtgagatcgtgcacatccaggcgggccagtgcggcaaccagatcggcgccaagttttgggaggtcatcagtgatgagcatgggattgaccccactggcagttaccatggagacagtgatttgcagctggagagaatcaatgtttactacaatgaagccactggtaacaaatatgttcctcgggccatcctcgtggatctggagccaggcacgatggattcggttaggtctggaccattcggccagatcttcagaccagacaatttcgtgtttggccagagtggagccgggaataactgggccaagggccactacacagagggagccgagctggtcgactcggtcctggatgtggtgaggaaggagtcagagagctgtgactgtctccagggcttccagctgacccactctctggggggcggcacggggtccgggatgggcaccctgctcatcagcaagatccgggaagagtacccagaccgcatcatgaacaccttcagcgtcatgccctcacccaaggtgtcagacacggtggtggagccctacaacgccaccctctcggtccaccagctggtggaaaacacagatgaaacctactgcattgacaacgaggccctgtatgacatctgcttccgcaccctgaagctgaccacccccacctacggggacctcaaccacctggtgtcggccaccatgagcggggtcaccacctgcctgcgcttcccgggccagctgaacgcagacctgcgcaagctggcggtga

SEQ ID NO: 46423 - DNA, 780 bp, Homo Sapiens
  misc_feature (778)..(778): n is a, c, g, or t
  misc_feature (780)..(780): n is a, c, g, or t
cttttttctcagtacatcagagagagcgtgatccccctacagctgtcacttccaaatgttcctgtagcataaatggtgttacagacactgaggtgcactcttggtttctgagcagagttgtcatactggtttcctggtctctagggcactggggatgtactttgaaatcaccgaacaggcttgcaattaagatcaataaggctgcagcaccatttcaatttactttccatcttacccagtagtttttgtgtttttaaattcgtttgggtggttatgtttgcatgcttaagcacacatttgaaaattaattatagctgtactacccgatgtttttccttggggatgatggccttgttcctttttaaattctgatgcttgaattctattttctagtgatttttcacatctccctttaagtttttgctgcagcaatttgagagagtacttttgattaaatgattctgatggtgggcaccaatctacaactatgtcattaactgaagatacatgttttaatcttgttgggaataagcttacccactttctccttggtaaagcgtttacttaacaaaataatacccgagaatgtaaggtctctaagtcattactaacaaagagcaaaaataatatctgcagtattgtttttcccattgattttaagtcagtttagagtacaaactgtatattagaatttgcctgtaaaatgaattctaaaaagcagatgtaaagtctctcctgaaaatgttggcatagtaaataaaaataaagttcataattntn

SEQ ID NO: 46424 - DNA, 367 bp, Homo Sapiens
tttattaatttgaaaccaggacattaaaaatgttagtattttaatcctgtaccaaatctgacatattatgcctgaatgactccactgtttttctctaatgcttgatttaggtagccttgtgttctgagtagagcttgtaataaatactgcagcttgagtttttagtggaagcttctaaatggtgctgcagatttgatatttgcattgaggaaatattaattttccaatgcacagttgccacatttagtcctgtactgtatggaaacactgattttgtaaagttgcctttatttgctgttaactgttaactatgacagatatatttaagccttataaaccaatcttaaacataataaatcacacatca

SEQ ID NO: 46425 - DNA, 775 bp, Homo Sapiens
ccccgcgtccgcccacgcgtccggtcactccctgaggcagtggcgacagcggcggcgagaggatgaacaacaagttcgacgctttgaaagatgatgacagtggggaccatgatcagaatgaagaaaacagcacacagaaagatggtgagaaggaaaaaacggaacgagacaagaatcagagcagtagcaagagaaaggctgttgtccctggaccggcagagcatcccctgcagtacaactacactttttggtactccaggagaacccccggccgtcccacgagctcacagagctatgaacagaatatcaaacagattggcacctttgcctctgtggagcagttctggaggttttatagccacatggtacgtcctggggacctgacaggccacagtgacttccatctcttcaaagaaggaattaaacccatgtgggaggatgatgcaaataaaaatggtggcaagtggattattcggctgcggaagggcttggcctcccgttgctgggagaatctcattttggccatgctgggggaacagttcatggttggggaggagatctgtggggctgtggtgtctgtccgctttcaggaagacattatttcaatatggaataagactgccagtgaccaagcaaccacagcccgaatccgggacacacttcggcgagtgcttaacctacctcccaacaccattatggaatacaaaactcacaccgacagcatcaaaatgccaggcaggctgggcccccaaaggctcctttttcaaaacctctg

SEQ ID NO: 46426 - DNA, 326 bp, Homo Sapiens
cagccgcggtagggatggggctgtggggatagtgaggcatcgcaatgtaagactcgggattagtacacacttgttgattaatggaaatgtttacagatccccaagcctggcaagggaatttcttcaactccctgccccccagccctccttatcaaaggacaccattttggcaagctctatcaccaaggagccaaacatcctacaagacacagtgaccatactaattataccccctgcaaagccagcttgaaaccttcacttaggaacgtaatcgtgtcccctatcctacttccccttcctaattccacagctgctcaataaagtac

SEQ ID NO: 46427 - DNA, 564 bp, Homo Sapiens
ctcaccaatgccatcaaggatgcactcgctgcaacgtagccctctgttctgcacacagcacgggggccaaggatgccccgtccccctctggctccagctggccgggagcctgatcacctgccctgctgagtcccaggctgagcctcagtctccctcccttggggcctatgcagaggtccacaacacacagatttgagctcagccctggtgggcagagaggtagggatggggctgtggggatagtgaggcatcgcaatgtaagactcgggattagtacacacttgttgattaatggaaatgtttacagatccccaagcctggcaagggaatttcttcaactccctgccccccagccctccttatcaaaggacaccattttggcaagctctatcaccaaggagccaaacatcctacaagacacagtgaccatactaattataccccctgcaaagcccagcttgaaaccttcacttaggaacgtaatcgtgtcccctatcctacttccccttcctaattccacagctgctcaataaagtacaagagcttaacagtgaaaaaaaaaaa

SEQ ID NO: 46428 - DNA, 734 bp, Homo Sapiens
  misc_feature (9)..(9): n is a, c, g, or t
  misc_feature (653)..(653): n is a, c, g, or t
  misc_feature (664)..(664): n is a, c, g, or t
ttctctttnggcgcctgcattgagggtgtggttctccgggacaagtatggcgatggtgtcagcaggaacttggtggtgggcacactggcctggccttcaccctgggtcatcgtcatcggctccttcttttcaacgtgtggcgctggcctccagagcctcacaggggcaccacgcctattgcaggccattgccaaggacaacatcatccccttcctccgggtgtttggccacgggaaggtgaatggtgaacccacatgggcactcctcctgacggcactcatcgccgagctgggcatcctcatcgcctccctcgacatggtggcccccatcttatccatgttctttctgatgtgctacctgttcgtgaacctcgcctgtgcggtgcagacactcctgaggacccccaactggcggccccggttcaagtactatcactgggcgctgtccttcctgggcatgagtctctgcctggcccttatgtttgtctcctcctggtactatgccctggtggccatgctcatcgccggcatgatctacaaatacatcgagtaccaaggggctgagaaggagtggggtgacgggatccgaggcctgtccctgagcgctgcccgctacgcgctgttgcggctggaggaggggcctcctcacaccangaactggcggncgcagctgctggtgctgctgaagctggacgaggacctgcacgtgaagtactcgcggctcctcaccttcgc

SEQ ID NO: 46429 - DNA, 587 bp, Homo Sapiens
gcacgaggtcagacagagctgctgggtccgtgccatatcccaggaggaccagctggccccctgctggcaggctgaacaccctgcggagcgggtgagatcggctttcgctgcacccagcactgattccgaccagggcacccccttcagagctagggacgaacagccgtgtgctcccacctcagggccttgcctctgcggcctccacttggaaagttctcagttccctccaggcttctagaagcatctgggccagggctcatggctggataatttccctaggcttaacaacccaagcaagcttcgcatcctcgttttatttttggttaaacttatgaaaatgtattaagaaagagtgcagctcgagagagattcagagatggaacacaccagaccccagatcacaaagccaaccatgcccagcccctcccagcacccccagccccacgaccatcgttctgaattctgacgacaccgtgagcctgcctttgtacttcaaactcatggaaggataaccaccttcatgttttgaaataaatgtttcctgttgaaatgaaaaaaaaaaaaaaaaaaaaaaatgcggcattgcg

SEQ ID NO: 46430 - DNA, 1036 bp, Homo Sapiens
  misc_feature (1003)..(1007): n is a, c, g, or t
gaggccactgctgtcatatcagagagtccggcccagggcgacgtcttcgcaggggccacagtccaagaggccagcgtgcagcccccatgcagggccagccaccctgagcctcactaccccggctatcaggacagctgccagatcgcaccgtttccagaagctgcgttgccaacgtcacatcccaaaatagtgttgacatccctgcctgcgctggcggtcccacccccgactcccaccaaagcggcacctcccgcgttggtcaatgggctggagctgtcagagccgcggagctggctgtacctagaagagatggtcaactccttgctcaacacagcgcagcagctgaagacgctgtttgagcaagccaagcatgccagcacctaccgagaagctgccacaaaccaggccaagatccacgctgacgcagagcggaaggagcagtcctgcgttaactgcggccgggaggctatgagcgagtgcaccggctgccacaaggtcaactactgctccaccttctgccaacgcaaggactggaaggatcaccagcacatatgcggccagtcagcagctgtcaccgtccaggcagacgaagtccacgtggctgaaagcgtgatggagaaggtgaccgtgtgaggctccatcggccgccctgggagctggggcccctcgcactcctgtgaggcttttgcaggtcgaaggcccccctgaggactctggggggacgttgagaagaggggtgtgggaaggaaaagaaacttgctggacaagtcattaacaccctttaagcgaatgggtgccctgggaagcgcaactccccctgccccggggccccttgccccgctcgcggaacagatttttttatccctggggatcatgaagcgttccggtccttgcccacaggggcctggtgctgcgaacccccatacactacgtggttggggtccggcaattaaaggggtaaataaggggccaaaaaaaaaacccaaaaaaaacagaaaacaannnnnacccctccgagggccttcttatggtcggg

SEQ ID NO: 46431 - DNA, 849 bp, Homo Sapiens
ggatttttctgggcaaacaggacgcgtgatagagaatccggcggaggcccagagcgcagccctggaggagggccacgcctggaggaagcgaagcacacggatgaacatcctaggtagccaaagtcccctccacccttctaccctaagtacagtgattcacaggacacagcactggtttcacgggaggatctccagggaggaatcccacaggatcattaaacagcaagggctcgtggatgggctttttctcctccgtgacagccagagtaatccaaaggcatttgtactcacactgtgtcatcaccagaaaattaaaaatttccagatcttaccttgcgaggacgacgggcagacgttcttcagcctagatgacgggaacaccaaattctctgacctgatccagctggttgacttttaccagctgaacaaaggagtcctgccttgcaaactcaagcaccactgcatccgagtggccttatgaccgcagatgtcctctcggctgaagactggaggaagtgaacactggagtgaagaagcggtctgtgcgttggtgaagaacacacatcgattctgcacctggggacccagagcgagatgggttagttcggtgccagccgaccaagattgactagtttgtcggacttaaacgacgatttgctgctgtgaacccagcagggtcagctccctctgcgtcggcaaaatggggagggctggaagatcagcggaaacgttgaaaataactggaatgatcatctggggtgggccgctacgaacagaaccgcaaacaggatggcatgaatcttgccctggatatctgacattacacggactgtcactaacgatgacacc

SEQ ID NO: 46432 - DNA, 1050 bp, Homo Sapiens
  misc_feature (776)..(776): n is a, c, g, or t
tccgaatacaggtggacagcatcgtcctgttccggccacggagtgatgagttgtgtgcttgtccctggcagtggcaggctgtgtcctatggacatcttggcaggacatggaatttggcctcatgacaggcccaactagggataggaaggaaaatgaagagagccagtatttccccttctccagaagcaggtactcagctttctgggaaaagcgtgcctccagccgtggggacaggccatcctactgactacctcttgcttggcatgaaataaactgctatcctccccttggaatctaccgccactctacatcctactgctttggcctccctctcctctcaccagatggcatgtggtgtggcacctgtggctggacacaggaggcctcaggatcacaaatgttacactagacatatgtcctaatgtgctgcccagaaacctcaactgttccccagctactgaggggcactgtcagcgagatgttgggtctggaggtgatgagatcgggccacacttgagctgagtcaccagaccctattgcttcaacagtgctttggcccccgccagcttgtcccagccacctctaagctgcctgggatgtggatccctgggggaacattggtacttcccaagcccctcccggtccaccaaaaaaacaaaaaaatcaaccccagccttgccccaattaagaaccacccgggggggagaaaaaggctttggccggggaagaccccccaaggggttggtagaccaaagtccttcaagccaaatttcggnggaccaatccttccttgggggggaaaaagggaaaagggtggggcccaccaagaacccatgtgttttcccccgtgggtttgccctccccctggcgccccccttgtgcccaagggcttttccctataattcccctttaagcgattgggcgaaaagaagggttcaaataatcccccttttcccctggccccccctccgcctatgttctttttaacacaaaggcgggggtttcaccctggcctttccattttaaaaaaaaggaacaaagtctccaaag

SEQ ID NO: 46433 - DNA, 719 bp, Homo Sapiens
ggcggcctccgtcgtggccccctcggggctgacactaatggacagaggctctcggtgccgaagattgcctgccagaggactgaccacagcctggctggcagctgctctgtggaggacctccaggactgagactgggctctgttttccaagggtcttcactaggccccctagctacacctggaagtttcagaacccactttggggggcctcctgcctgggcaggctcttcaagtgtggccctctttggagtcaaccctccttcccgaccccctccccctagcccagccccagtcactgtcagggtcgggccagcccctgcactgcctcgcagagtggcctgggctaggtcactccacctctctgtgcctcagtttcccccccttgagtcccctagggcctggaagggtgggaggtatgtctagggggcagtgtctcttccagggggaattctcagctcttgggaacccccttgctcccaggggaggggaaacctttttcattcaacattgtagggggcaagctttggtgcgccccctgctgaggagcagccccaggaggggaccagaggggatgctgtgtcgctgcctgggatcttggggttggcctttgcatgggaggcaggtggggcttggatcagtaagtctggttcccgcctccctgtctgagagaggaggcaggagccccagggccggcttgtgtttgtacattgcacagaaact

SEQ ID NO: 46434 - DNA, 665 bp, Homo Sapiens
gattgccagtacctcttccctgccaaggttgtctctcgcctggtgaaatgggtgacaattgcccatgaggattacatggagctgcacttcaccaaagacattgtggatgcgggactggctggggacaccaatctctactacatggcgctcatcgaaaggggcacagccaaactgcaggccgctgtggtgttgaaccctggctactcctccatcccacctattttccagctctgtttgaactggaaaggggagaaaaccaacagcaacgatgacaacattcgggccatggagggcgaagtcaatgtgtgctacaaggagctgtgtggcccttggcccagccaccagctgttgaccaaccagctgcagcggctgtgtgtgctgctggatgtttacctggagaccgagagccatgacgacagtgtggaggggcccaaggaatttccccaggagaagatgtgtctgcggctcttcaggggtcctagcaggatgaagccatttaaatacaaccatcctcagggattcttcagccatcgctgatctcccgcgcagaccgttgtttcccccaaggcctcaccctgagcactgggcttctgctttctgctctggcccacatgtgactcttgatattctccaaagacaccagccaattaaaaagcgtcacctga

SEQ ID NO: 46435 - DNA, 771 bp, Homo Sapiens
  misc_feature (656)..(657): n is a, c, g, or t
  misc_feature (685)..(685): n is a, c, g, or t
  misc_feature (718)..(718): n is a, c, g, or t
ctggcagcttctctacagggctcgagaaacctatgggctgcccaacacactgcctaccgcctggcacaacctggtatatcgcatgcggggcgacatgcaacttttccagaccttctggtttctctaccataagggccacccaccctcggagccctgtggcacgccctgccgtctggctactctttgtgcccagctctctgcccgtgctgacagccctgctctgtgccgccacctgatgccagatgggagcctcccagaggcccagagcctgtggccaaggccactgttttgctagggccccagggcccacatttgggaaagttcttgatgtaggaaagggtgaaaaagcccaaatgctgctgtggttcaaccaggcaagatcatccggtgaaagaaccagtccctgggccccaaggatgccggggaaacaggaccttctcctttcctggagctggtttagctggatatgggagggggtttggctgcctgtgcccaggagctagactgccttgaggctgctgtcctttcacagccatggagtagaggcctaagttgacactgccctgggcagacaagacaggagctgtcgccccaggcctgtgctgcccagccaggaaccctgtactgctgctgcgacctgatgctgccagtctgtnntaaataagataagagacttggactccanaaaaaaaaaaaaaaaaaatcttgattctgcggncgcaagcttattccctttagtgagggttattttagcttggactggcgtcgttt

SEQ ID NO: 46436 - DNA, 958 bp, Homo Sapiens
  misc_feature (709)..(709): n is a, c, g, or t
tatcgacttacggacagcagatggggaattatggctgttggagcaatagaaccccagttctacgagctgctgatcaaaggacttggactaaagtctgatgaacttcccaatcagatgagcatggatgattggccagaaatgaagaagaagtttgcagatgtatttgcaaagaagacgaaggcagagtggtgtcaaatctttgacggcacagatgcctgtgtgactccggttctgacttttgaggaggttgttcatcatgatcacaacaaggaacggggctcgtttatcaccagtgaggagcaggacgtgagcccccgccctgcacctctgctgttaaacaccccagccatcccttctttcaaaagggatcctttcataggagaacacactgaggagatacttgaagaatttggattcagccgcgaagagatttatcagcttaactcagataaaatcattgaaagtaataaggtaaaagctagtctctaacttccaggcccacggctcaagtgaatttgaatactgcatttacagtgtagagtaacacataacattgtatgcatggaaacatggaggaacagtattacagtgtcctaccactctaatcaagaaaagaattacagactctgattctacagtgatgattgaattctaaaaatggttatcattagggcttttgatttataaaactttgggtacttatacctanattatggtagttattctgccttccagtttgcttgatatatttgttgaaattaagattcttgacttatattttgatgggttctagtgaaaaaggatgatttatttcttgaagacttgatttacatttatttaaccttcttgattttacaatgtgaaaaattgagggaaatgcccccaattggttatggtgatataagggcacgtggaaacaaaatgtattgggtgtgattccaggccctttttgtttttg

SEQ ID NO: 46437 - DNA, 629 bp, Homo Sapiens
ggatgttgaaagaatgaactacctcactagtagttcacgtgatgtctgacagatgttgagtttcattgtgtttgtgtgttcaaatttttaaatattctgagatactcttgtgaggtcactctaatgccctgggtgccttggcacagttttagaaataccagttgaaaatatttgctcaggaatatgcaactaggaaggggcagaatcagaatttaagctttcatattctagccttcagtcttgttcttcaaccatttttaggaactttcccataaggttatgttttccagcccaggcatggaggatcacttgaggccaagagttcgagaccagcctggggaacttggctggacctccgtttctacgaaataaaaataaaaaaattatccaggtatggtggtgtgtgcctgtagtcctatctactcaagggtggggcaggaggatcacttgagcccaggaatttgaggccacagtgaattaggattgcaccactgcactctagcccaggcaacagaacaagaacctgtctctaaataaataaatttaaaataatataataaaaaagatgttttcctacaaaaaaaaaaaaaaaaaaaaaaaaaacatgtcggccgcctcgccctcagact

SEQ ID NO: 46438 - DNA, 544 bp, Homo Sapiens
cttgaccttgaagcacacagccctgctttcctatcctgggatgttaaatccaaatgcccttagagtccaagtgcagtggtgcctcaataaatgaatgaaaataagaaaaaaaaaagtcctaagaatccatttctttccacctctggatcgtgacccaatatcacctaagaaggagcttgggaggaatgttaagaggtgtggattctcatcctgactcttccacctcttggctttgacttcaggcagaccctggaatttttctgaaattttgcttactctgttaaatgggaatcacaatgccatccgtgcataagaaggcaccccacagacctctatttacagaaagcagaattgactatgggctcccagctgtgacactgaaatccatcatcatgtttatgctgaaaccagattccttgaggctccttctagctagttcctgggtatggaagggatactaaggcaggcccatttctgggagacatgctagacgtgcccttggcaaaacatttgtaattacttttcctggaaaaaaaaaaaaaaa

SEQ ID NO: 46439 - DNA, 647 bp, Homo Sapiens
cccacgcgtccggaggcatgaccatagccttagctgggtggcgctgggcctctcagtagctctgtcccttgaaattgcaaatatgggagttgacaggctgacttggaggaggctcatgttccaactattcactcattgtgcaagctacggggcctctttgtgcccagtgccctaggtctggaataacagaatgctgaggggtagacagcaggggggagttgcccccaggttcctgaccagtcctcctacggcttatagcacgtcgacatccagaacttctcctccagctggagtgatgggatggccttctgtgccctggtgcacaacttcttccctgaggccttcgactatgggcagcttagccctcagaaccgacgccagaacttcgaggtggccttctcatctgcggagacccatgcggactgcccgcagctcctggatacagaggacatggtgcggcttcgagagcctgactggaagtgcgtgtacacgtacatccaggaattctaccgctgtctggtccagaaggggctggtaaaaaccaaaaagtcctaacccctgctcggggccccacggatgctggtggactgtgtgcccctggtggaggtggacgacatgatgatcatgggcaagaagcctgaccccaa

SEQ ID NO: 46440 - DNA, 658 bp, Homo Sapiens
tcctcctgcatggctccaaaaagcgactacaaccccaatgccgcctgtgcaacatacccctggccagccgagagacgacccgccttgtctgctatgatctctttcactgggcctgcctcaatgaacgtgctgcccagctaccccgaaacacggcacctgccggctatcagtgccccagctgcaatggccccatcttccccccaaccaacctggctggccccgtggcctccgcactgagagagaagctggccacagtcaactgggcccgggcaggactgggcctccctctgatcgatgaggtggtgagcccagagcccgagcccctcaacacgtctgacttctctgactggtctagttttaatgccagcagtacccctggaccagaggaggtagacagcgcctctgctgccccagccttctacagccaggccccccggcccccagcttccccaggccggcccgagcagcacacagtgatccacatgggcaatcctgagcccttgactcacgcccctaggaaggtgtatgatacgcgggatgatgaccggacaccaggcctccatggagactgtgacgatgacaagtaccgacgtcggccggccttgggttggctggcccggctgctaaggagccgggctgggtctcggaagcggccgct

SEQ ID NO: 46441 - DNA, 706 bp, Homo Sapiens
agcggagcgtcaggactccctcacccgcaccccatctctttccgtgggctcatgggttccctctcatttgttaaattgcttatactttcccttcattggaacgagcccatttcccgaagcatcctagaggctttcagcagaactcggaggaatcaggatttaaagtggcggttgcacccgctccactttggttttcagctgggaggagagcgccctctccccgctccgcacctccgccaccccgcttctctcgtcaactggtggattatatcacttgaatactggggaaaaaccgagatcactttagtcgatgcagggcccacgtgataagcagatgttttaacgtgggtatgtttcttcttgcctccactcctccgtcccccacccccatcccttcctcatcctaggggagcgatctctgacaatcgcccattcagtccgacttggatgcgttccaactcgggatttcaaacatgcgccaaagaagtcttgcaatacctctcccggttttgagagctggacacccagggcagccgcggtgtgtccagctgatcaaccacttgcacgccgtggtcacccagttcctttgccaccccgcagctgttgactcaacaggtccctctgagcagaggcaccggcgctccctcgggcgccgggtccggggcgccccctgctggagcgcgcggggcataaggctgggagccca

SEQ ID NO: 46442 - DNA, 689 bp, Homo Sapiens
  misc_feature (641)..(641): n is a, c, g, or t
  misc_feature (657)..(684): n is a, c, g, or t
gggaaccacactagggtctccacctacttatacaatgcggatgcccaactgtttttaaggaagccagaagcatcccatggaccatggggtgagtgtcctccaagagccccctgagctcagccctctgcctggagggctccagacctttctgagccctgcttggaggcgagcattttcactgctaggacaagctcagctgttgaggacacccccaccccaaatttcagttcttacgtgattttaaccattcaacatgctgttgggttttaattctctaattattattattattgttattattttttaggaccagttgtagtgaattgctactgaaagctatcccaggtgatacagagctctttgtaaaccgcagtcacacattagggttagtattaaactttgtttagatgtaccataattaacttggctagttgattgtttgaagtctatggaagaaatagttttatgcaaaattttaaaaaatgccagtctggtcagggaagtagggggtttcaatgctgttgggaaccaggaaggtgggacagccggcaggtagggacattgtgtacctcagttgtgtcacatgtgagcaagcccaggttgaccttgtgatgtgaattgatctgatcagactgtattanaaatgttagtacactnnnnnnnnnnnnnnnnnnnnnnnnnnnncatgt

SEQ ID NO: 46443 - DNA, 828 bp, Homo Sapiens
gttaccataatttgatgtatatagtgtccagatccatttagaaatttaatatttattaataactgaaactgtttgtcttcctttggtatatagtctcgcatattatattatagcaggccaagataaaattttgacagctctttaagcccacatgcagcagtgggtcagataaccctgtggcagtgacacgggcaaattggcatttgaataaagccctgggaccacctcaacatgcgtagcctcttgtcttaaatgtactccccatggcagcatggaggaggcaagacctgtgggtcaattttgaactggccttactttgatttttaaaacaagagactcagggaaagtactaaaccaaaatctctgattttactttgcgttttctgtagtttttgttttactgagatgcttttgtaaaggaaaataatactgtgacagtttagtaattctacagattcttaatatttctccatcatggccttttacttcacaattttctgaagtctgaattcaattacaattttttttttaccaatttaatctcaaatgttgtttaactgctttaaattcatatacgtagagtattataaactgcagagatgaaaaatgtgttttcacgggatttatattgtgaactaactaagcctacttttggtgacttatttgtgatgccttgttgatactatgtgtcttagtctggtttaacacaaaaaccacaaaaagcaaacgaagacaagacgaaaaacagaaaagaacagacaagggacaaaacagggggggggcataaacctcgcgggacaaaaccctgttaaagcaggccgagaaaag

SEQ ID NO: 46444 - DNA, 695 bp, Homo Sapiens
cacgcagctgctgggttcttgccctaacggccctcccctgcaacatccgtcttggaggagaggctgcagccacagcaccctactgccctttaaataaaggagggctgtgggcagggccatgtccctttctcctctcccctcaacctcttactgctgttctccctttctccgtccttcatggaagccctgggagataacctggcttcctggagttgatggaataaaggttggggtggccataatggtttgttgggggtgagggaaaaaacccacagggaccagaatgttttgttgttcttttgttttcttttttgtaccaaagtcaactgcacgtgttttatatttttaagagatcgtaggcaattagagatcgaagcctcctatctccacatctctgaagaagttgaggggtgggggagagaatgacttctgccttcatctgcagtaacggggggacctatactgacctcttccccagccatttagaaacaagttctagggtgggttggaaaatctccaagagccctgacctcatcttccacctcagcaaccatgacctgaaacctcagcgtgaatttgggggatttttcagtggaacccttgcccccaaatgtcgaccagcccccaaatgtcgaagaattttcttcttgccaattttgttgtttaaaaaaaaaaattcaggggaaaattaaaaa

SEQ ID NO: 46445 - DNA, 581 bp, Homo Sapiens
  misc_feature (576)..(576): n is a, c, g, or t
gtgtacgctagttttcatttttgcagtgtggttcgcccagtagtcttgtggatgccagagacatcctttctgaatacttcttgatgggtacaggctgagtggggcgccctcacctccagccagcctcttcctgcagaggagtagtgtcagccaccttgtactaagctgaaacatgtccctctggagcttccacctggccagggaggacggagactttgacctactccacatggagaggcaaccatgtctggaagtgactatgcctgagtcccagggtgcggcaggtaggaaacattcacagatgaagacagcagattccccacattctcatctttggcctgttcaatgaaaccattgtttgcccatctcttcttagtggaactttaggtctcttttcaagtctcctcagtcatcaatagttcctggggaaaaacagagctggtagacttgaagaggagcattgatgttgggtggcttttgttctttcactgagaaattcggaatacatttgtctcacccctgatattggttcctgatgcccccccaacaaaataaataaataaattatggctgctntattt

SEQ ID NO: 46446 - DNA, 937 bp, Homo Sapiens
acccgagagatgaccccgcatgagatcaagtttgctgtccatgtcgaatcggtgctgaaccgcgtgccgcagcccgagtaccggcagctgctggtggaagccatcatggtgctgacgctgctctcggacacggagatgaccagcatcgggggcatcatccacgtggaccagatcgtgcagatggccagtcagctgttcttgcaggaccaggtgtcaattggtgccatggacaccctggagaaagaccaagccacaggaatctgccacttcttttatgacagcgctccgagtggggcttatgggacgatgacctacctaacaagagcagtggcttcttatttgcaggaattgttgcccaattcgggctgccagatgcaatagggtctcacctggaaacatgatcacactctcaatctgtcacgtgccccctagccttactgggaaccttctgtcccccaagatcccctgtgctatcaggaaagcatgtcccatcagaaacactctcggggggcaatggtagcactcaccctgaaactgatgtatgttaaagccacagagatagagctgaggagtcctgtgttcccccgcaaggagcaccccgggatcattttctaggttcatttctctggaacatttgctgtagcatctggtctcacggactctgaggaggaattggaaattggtctcttttgagtgcagagggaactgagacgccagcttaaattggctcttgcagagagttacagaaatagtttcgatgagctagtgacacatcctaaagatgcaaagatcctcctggcggcagtagccttgaccaaggccacctcttcacaggatgcagtctgtctgtgcaccaaactcttcccccaaataaaaaaccttgtggtctctccggggtaaaaaaaaaaaaaaaaaaaaaaacccgaggcattctagc

SEQ ID NO: 46447 - DNA, 603 bp, Homo Sapiens
gcggttggctgctcctggctccagatgggaccgactttgacaacccagtgcaccggtctcggaaatggcagcgacggttcttcatcctttacgagcacggcctcttgcgctacgccctggatgagatgatgtcttcccagtgactctccttggggcctggggaaaccacaagggagcttggattcattcacccattgctgccttgctgtgtgcctcagaggggctcagaggtggaaaataaatatgaaaaagcatccttgtcttctagaatctcgtcggctgctgggaagaccaaggggccagccatcgcagggagcataagcactgagacaggcacacgtgcctgcccggctatcgtagccaggctggcagccttgcaactccctggggaagaacaatctaggaacattctggggtgtggagcaggaagggagtgtcacatgcaaaaggcaggatcagccaaagcagaggggctgaagaagcagtgattcccccacctaatgtcagaagtaaaatcagttcatggtgaaaatttggggaaacaaaatcatgcagcaaaattgcctattaaaccccacacggaggtaaaaatcggttcatatt

SEQ ID NO: 46448 - DNA, 559 bp, Homo Sapiens
cttcctttcctttttcactatgtatcctgttactgggcttaaacagctttcagagaagagatgtcatttctattaaatgctctttcagtagcgaactgagttcacacttgactaaggatattttccggactgtctgtcatcagcatccttagtgggtttccccatatttaaattggtagaggccagggatggtggctcacacctgtaatctcagtactttgggaggccaaggtaggtggattgcttgagctcagaagaccagcctgggcaacctggtgaaaccctgtctctactaaaaattcaagttagctagctgggcatggtgatgcacttctgtagtcccagctacttggagagggggtggtgctggggcagcaggatcgcttgaacccaggaggttgaggttgcagtgagccaagatggtaccagcctaggtgacaaagtgacaccctgtctcaaaaaagaaaccaaacaaacataaaaaaaaaaacaaaaaaatcggtagagagtgatttctctcccaggcccacttaatgtagactgggcctggctgacacct

SEQ ID NO: 46449 - DNA, 913 bp, Homo Sapiens
cacgaatggccctcctccactctgaactaagcagatgccatctgcagaagtgctggtagcataaggaggatcgggtcataagcaatcccaaactaccaacaagaggaccttgatcttggcgaaagccctcggtgtggcagctttagccctcctccagatcacatgtgtgcaaattatggcttcagaggtggaagataaacagtgacgggggaacaaacagacaacaagaaggtttggaagaaatctggtttgagactctgaaccttagcactaaggagattgagtaaggacctccaaagttccccggactcatgaattctgggcccttggcccattctgtgcacagccaaggacttcagtagaccatctgggcagctttcccatggtgctgctccaaccatcagataaatgaccctcccaagcaccatgtcagtgtcgtacaatctaccaaccaaccagtgctgaagagattttagaaccttgtaacatacaatttttaagagcttatatggcagcttcctttttaccttgttttcctttggggcatgatgttttaacctttgctttagaagcacaagctgtaaatctaaaaggcacttttttttagaggtataaagaaaaaactagatgtaactaaataagatcatggaaggctttatgtgaaaaaagttgaatgttatagtaaaaaaaacaagatattatgtatgtaccaggttgggctaagaggcccaaggttatcggttggcaatggatcacgtggacactttaattcatagcgatatttatgcagttacacagacacgcaacaaacaataacaccacagcgaagcgaaaacatccaagacacatacacgaacctcacactcaccacacaataacaacaacagagcggcctacgtaacaacaaacacga

SEQ ID NO: 46450 - DNA, 610 bp, Homo Sapiens
ggggatttccttcggcatcttaattcacacttcaatggagagacttaagacacatttgaaaacagacatatcaagttctatgtgatgattttgggtttttaatactataaatacttgattgtaaactaaattcaagatcatttataggaaaatctagtttcacagctatttgaatttttttctggatttactatataactcttattttttaaaagatcattctgttctttcaaggagaaataagcctaaaagaagaaaaacaaaaaaaattctgtataaaactgtaatcctttgtattcatgtttacagtgctattactataattcaaaattatgtatgtgacttagagttatataatcataatttatgtttatttcaaatatctaagtttattgcttggatttctagtgagagctgttgaatttggtgatgtcaaatgtttctagggtttttttagtttgtttttattgaaaaatttaattatttatgctataggtgatattctctttgaataaacctataatagaaaatagcagacaacataaacatctttgtaaatatcaaacctaatacatttcttgtccagtgataaaacaactggtagaattat

SEQ ID NO: 46451 - DNA, 600 bp, Homo Sapiens
tctgcctctaactccctcctcacactccagaattacccttcctcatctgtgcctgtctgtccaacccctcccccacgtctctctgcctgctgggctcttaactgttgctcgaagactgtgacatcagaagtaactcccactcctaatcaagagtctctccagcctcacagatgctggcctcttggcacctgcctagctcttgggcctgacctccagtcctgctggcctgctcttacttcccccaccctgggtttggcccctggaacctttcccttgtgtgtaccacaccctgcctgctgtggagcccattgtggaggcggtgggggggagaaggcctcccctgaggatcccctgtcccctggggctggtggattgggcagaatcctgggcccccagagacctttgcccacacacactccttccccttgtccctggggcactcccccaggattgtgcaatagtcagagtgtccctttttgcaggggactgggccatgggtcctcggcccatctgtccatcctcctctccatgcaagtgctgtttgggcaggagtcaccatgcaagggtgacatcgacaaccacgttacaagccaccgcagc

SEQ ID NO: 46452 - DNA, 924 bp, Homo Sapiens
  misc_feature (810)..(810): n is a, c, g, or t
  misc_feature (820)..(820): n is a, c, g, or t
  misc_feature (823)..(823): n is a, c, g, or t
  misc_feature (866)..(866): n is a, c, g, or t
  misc_feature (893)..(894): n is a, c, g, or t
  misc_feature (899)..(900): n is a, c, g, or t
  misc_feature (902)..(907): n is a, c, g, or t
gagactgaccggaccgaaggagtagaaaactttccgtcccactcgctccctcctccgcgctcggcgcctcccgctccagcccggctggccgcagggtaggggggaggctctgcagtgtggagtggagcctcatcgaggggcgctgggttaggggagcacctgtttcagactgggcatgaagaagggagcacagcagctactagaccccattagcacctcattagcccacaagccagccaggggccccaggaagatggggcaccccccagcaccctccagattgagagcaaggtagaggaaggagtcccagcctctgggcagaccagaggcccagagggagagagtagcagaaggcttttgatttttctcttgcctgaggcttgaatctgacaaacccttggtgggcactgctcccttaggttcttccccacctcaatctacctgcctagagtagcagctcccagacccagttctgggactgaaggctaacccttcacctgctgtcccttcttaacacccaggcccccagagccagctgggcctgtccagcagccacctgtgggtatttatgagtttcatatgaagtactgtgccccttcccttcctcatcccgaccctgcccgagcttcctgaaggtcctcactgtttgcatatcgctcaggccacctccaaaccccacctaggttttataatgtatattatatatttttttgtgtatttttaaaatccagctgtgatgggttatatcataaatgcagcttggggttggggagcagggggccctccaaggcccagctcctgctcaaaaanaaaaaaaaanaanaaaatttaagttatttgttttgggggtcagttcatgttaaaanaaaaaaaaaaaaaaaaaaaaaaagaannaaatnnannnnnnttccccgctttcctggg

SEQ ID NO: 46453 - DNA, 682 bp, Homo Sapiens
tttttttttttttttttaaaataaaatccttccttcccatgttactaaattaatttatgtttttgagaggttgagtctcaaagtgtaaacaataaacctccattcataaggtggatgttgtaagcttgatggtggttgtgaaagtgatttagctttgaccacttttcatcctacagcttcaatatcaaactggttaggaaagcccagggggaagggagggggcaggggaggaggcaattctgaatgaatgaatggattttttgttgtttttgcatgtttaatatagaagttcccctcgttccttgggagatgatggcctttgaatatgcagacaacctttgaattgtgcctactaaattatagcaggggactttggcacccaaggagttctgactttctgggattataatagtaattcccagccatactctggactttattttgctaaccataactgagcaaatgtaaattactgctatattaatgttttaaagcactgggatagtctaattctaacttgtaattaattatgtttgccaattatctgtttgaaataaatttgtgtctgaacagctattgaaactgttaaattgtacagatattattcatgacagctttgtactgtggaatgtgcttaataaaaaacaaaaaagttaaaaaaaaaaaaaaaaacctccgtgcc

SEQ ID NO: 46454 - DNA, 762 bp, Homo Sapiens
atcatcagcagctcccatgatgacactattttgatttgggatttcttaaatgtgcctcccagtgcccagaatgagacccgttctccctccagaacatacacttacatctctagataacagtctgcactttcacccgtttcagggttttctagtcttgaactactggctacgtggctaccaaatgcctaagggagttcgttcacagctgagttatgaagctggaattggttctagacgctgggtagatgcaaagcagcctaactcttcaagtaccgacatttctcacctctgattccggctctcctttgagaaggagaccttagcttccccggcttcaagtagaacagaagcccgtttccttccctcatcagtgaaaaaatctaatgtttcaaatgtaaattgttcatagaaaaggaacatagaatctgttttacagaagtaaatcgaccgtcaagagaagacttggcctctaatttatattgctttgcactttggtttgatattaagaaacagcattcttcttcagtgaaattttgggtgccaaacacctacccagaatgtccagggctttcattttcaaaagttagcattctccttttgaccgtccaagtcattatgaattctgacttgttgtattaggaacatgttggacagtggaaaattttctctggattgttttagtaatatttttgggattatacttcctttctgtaccaatttcttttaatttaaagaactataagtcagttatattatctacca

SEQ ID NO: 46455 - DNA, 591 bp, Homo Sapiens
ataaatacctgcagcaacgtgggagaaagaagttgctggaccaggagaaaaggcagttatgaagccaattcattttgaaggaagcacaatttccaccttattttttgaactttggcagtttcaatgtctgtctctgttgcttcggggcataagctgatcaccgtctagttgggaaagtaaccctacagggtttgtagggacatgatcagcatcctgatttgaaccctgaaatgttgtgtagacaccctcttgggtccaatgaggtagttggttgaagtagcaagatgttggcttttctggattttttttgccatgggttcttcactgaccttggactttggcatgattcttagtcatacttgaacttgtctcattccacctcttctcagagcaactcttcctttgggaaaagagttcttcagatcatagaccaaaaaagtcataccttcgaggtggtagcagtagattccaggaggagaagggtacttgctaggtatcctgggtcagtggcggtgcaaactggtttcctcagctgcctgtccttctgtgtgcttatgtctcttgtgacaattgttttcctccctgcccctg

SEQ ID NO: 46456 - DNA, 445 bp, Homo Sapiens
ccgtggccgacagtctggaaatgaatccatcatacattagtgccatagagtttagtaaccgtccagcaagtgtcatcacttttacagaaaacaaggtccagtaatagcaagtcttagtacatcctcacttttattataaatgggtgttttttcataatttttactgacgctcagtaaccatgcaaaattgtgtatagcattaatgtatctacatacctacacctatctatatataagctcatggtagaaaaccatagctaagtagcatcgcagacttaagcgtacaaagtgatcttgttcacaagtaatctgttgacagtgccaataaatgataaaaaaaaaattaacatgtcacaatgtaacggatgaccatatgcacaattccatgaattaaatctgtttcctgtgttagtcagtattcttaaataaaatttataattgaaaa

SEQ ID NO: 46457 - DNA, 515 bp, Homo Sapiens
tttataacaagttcttgttgactcagggcataatgagttcctgagacatgctcttttgggggctggggctttaggtagaagaatttcaaggaaaagaattctcagcagagctcaagattgtagaaactcagcagaagctggtaaaaacatggggagcccggaggacaggctgctgtccagggcagaggccatgaagaagtgcttccgtggccgacagtctggaaatgaatccatcatacattagtgccatagagtttagtaaccgtccagcaagtgtcatcacttttacagaaaacaaggtccagtaatagcaagtcttagtacatcctcacttttattataaatgggtgttttttcataatttttactgacgctcagtaaccatgcaaaattgtgtatagcattaatgtatctacatacctacacctatctatatataagctcatggtagaaaaccatagctaagtagcatcgcagacttaagcgtacaaagtgatcttgttcacaagtaatct

SEQ ID NO: 46458 - DNA, 644 bp, Homo Sapiens
acgagaccgtgcgcctctgggacgtgcagagcaagcagtgcatccggacggtggccctcaaaggcccagtcaccaatgccgccatcctgctggcgcccgtcagcatgctgagctcagacttcaggcccagcctgccgctgccccacttcaacaagcacctgctgggcgccgagcacggggacgagccgcgccacgggggcctcactctgcgcctgggcctccaccagcagggctcggagcccagctacctggaccgcacggagcagctgcaggccgtcctgtgcagcaccatggagaagagcgtgctcggcggccaggaccagctgcgcgtccgtgtgacggagctggaggacgaggtgcgcaacctgcgcaagatcaatcgggacctgttcgacttctccacgcgcttcatcacgcggccggccaagtgaggcccggagaccccggcccgaggcgcccaggcctgagccccatgcctcccagcaaccagggcccgcgggtgtggcccccaccagcccaggcctggactctcctcagttctgtgtcgtgttcgggtttttcctctgtgactgggccgtcttggtgtctcgtggcacgcgtcacagtggtgctagtctgtttttaacaaaagaggatgaaaagcc

SEQ ID NO: 46459 - DNA, 754 bp, Homo Sapiens
  misc_feature (713)..(722): n is a, c, g, or t
  misc_feature (724)..(724): n is a, c, g, or t
  misc_feature (726)..(726): n is a, c, g, or t
  misc_feature (729)..(732): n is a, c, g, or t
  misc_feature (734)..(734): n is a, c, g, or t
  misc_feature (736)..(740): n is a, c, g, or t
ggggaaggcaagaaacaggagaagatgctggattaaaagatgtcacctgtggaacataaaaaggacatcagcaaacaggatcagttaactattgcatttatatgtaccgtaggctttgtattcaaaaattatctatagctaagtacacaataagcaaaaacaaaaagaaaagaaaatttttgtagtagcgttttttaaatgtatactatagtaccagtaggggcttataataaaggactgtaatcttatttaggaagttgacttatagtacatgataaatgatagacaattgaggtaagttttttgaaattatgtgacattttacattaaattttttttacattttttgggcagcaatttaaatgttatgactatgtaaactacttctcttgttaggtaatttttttcacctagatttttttcccaattgagaaaaatatatactaaacaaaatagcaataaaacataatcactctatttgaagaaaatatcttgttttctgccaatagattttttaaaatgtagtcagcaaaatgggggtggggaagcagagcatgtcctagttcaatgttgactttttttttttttaaagaaaagcatttagacataaaattctttcactttggcagaagcatttgtttttcttgatgaaattattttttccatctgaagaaaaaaatactaggaaaaataaatcaagggtgatgcccgannnnnnnnnnananaannnnanannnnnccttggccggcccc

SEQ ID NO: 46460 - DNA, 762 bp, Homo Sapiens
acaaaggcagactgagcgccagagaggacgtttccaactcaaaaatgcaggctcaacagtaccagcagcagcgtcgaaaatttgcagctgccttcttggcattcattttcatactggcagctgtggatactgctgaagcagggaagaaagagaaaccagaaaaaaaagtgaagaagtctgactgtggagaatggcagtggagtgtgtgtgtgcccaccagtggagactgtgggctgggcacacgggagggcactcggactggagctgagtgcaagcaaaccatgaagacccagagatgtaagatcccctgcaactggaagaagcaatttggcgcggagtgcaaataccagttccaggcctggggagaatgtgacctgaacacagccctgaagaccagaactggaagtctgaagcgagccctgcacaatgccgaatgccagaagactgtcaccatctccaagccctgtggcaaactgaccaagcccaaacctcaagcagaatctaagaagaagaaaaaggaaggcaagaaacaggagaagatgctggattaaaagatgtcacctgtggaacataaaaaggacatcagcaaacaggatcagttaactattgcatttatatgtaccgtaggctttgtattcaaaaattatctatagctaagtacacaataagcaaaaacaaaaagaaaagaaaatttttgtagtagcgttttttaaatgtatactatagtaccagtaggggcttataataaaggactgtaatctt

SEQ ID NO: 46461 - DNA, 687 bp, Homo Sapiens
  misc_feature (41)..(41): n is a, c, g, or t
  misc_feature (620)..(684): n is a, c, g, or t
tccttgcaggaatcaaacagtcttccggtctgcagcacggnaaagcacataatctttctttgctgtgactgaaatgtatccctcgtttatcatcccctttgtttgtgattgctgctaaagtcagtagtatcgtttttttaaaaaaaaagtttggtgtttttaaccatgctgttccagcaaagatgataccttaaactcccactgcaagcccatgaacttcccagagagtggaacggcttgctcttctttctagaatgtccatgcacttgggttttaatcagcagttccctattattctgattttaagctgttcctgtgatgaacttagagacagcatcggtgtctgctgctgtgtccccaggtcttgtgtgggtggcacagatctgggcagttagatagtgctctgtgcctaaggtgaagccacactagggtgaagcctcacttccctgtttgagcaatgcagtgcctgctgcccgtgtgcatgaaggtacagccattcagataagtggaactattgagttacataaagaaaatagatttgcatttgtcaggcagacgtttatacaacaccacggtgcttttatacattgtgcttattttaataaaactgaaattcttannnnnnnnnnnnnnnnnnnnnnnnnnnnnnnnnnnnnnnnnnnnnnnnnnnnnnnnnnnnnnnnnaaa

SEQ ID NO: 46462 - DNA, 602 bp, Homo Sapiens
  misc_feature (539)..(539): n is a, c, g, or t
cagcgggaccccgcacgtgcccctcaatttcatagccccgggcggttcccagcatggccccttcacaggcatcgcatgcggaaagtccatgatgagctccgtgagcctgatggggggccggggcggggtgcccctctacgaccggaaccacgtcacaggggcctcgtccagcagctcgtccagcacgaaggccacgctgtacccgccgatcctgaacccgccgccctccccggccacggacccctccctgtacaacatggacatgttctactcttcaaacattccggccactgcgagaccgtacaggccctacatcattcgaggaatggcgcccccgacgacgccctgcagcaccgacgtgtgtgacagcgactacagcgccagccgctggaaggccagcaagtactacctggatttgaactcggactcagacccctatccacccccacccacgccccacagccagtacctgtcggcggaggacagctgcccgccctcgcccgccaccgagaggagctacttccatctcttcccgcccnctccgtccccctgcacggactcatcctgacctcggccgggccactctggcttctctgtgcccc

SEQ ID NO: 46463 - DNA, 1436 bp, Homo Sapiens
gttcatgttttcatcaatctaaggtgcaatttctaaatttgtaagagtaggtttaaaaaaaaaagtgcttcttatctttgttaacattgtacttttccttgatgttcttaaaaggtatttccctcagattactcatgtttatgttgtgagcatgtagaaacagtaatgctaatgcatggctagttgcctttttaagattgtgacaccaggcttaccttttaaagtttagtatatagagacaattttaatggaaataactactgtagactattgaagaatgatctctttgtgatttaagaagtggctggattggaacttttaatatgctaatgtggaaaattaattacctttatgaaggtggtttattacaaataagcacactaacccctcggaagttgttttacctactttaaaagttttaatggattgcacctctgtaaactattcctaaaatgtgtatgatatatttgaaaaggcttccattaatataatagctttgcttgcagccttccaatctatgttggtttacctgtagtgttttataaagtgtggtcagaggcccctatagaatgtattgtttgaaagtgtagtgatatatttgtgtttttatttcaagtaagtcattttaaccgaatgttcattcatattcatttataaaaagtacctgtatcaaaggaattttaacaaagagcaatcagtattattggaccaaatttggtgtttgttttcaccttgacgctcttcttttcattatttctaatgctacaagaatgctgtaaagtgtcttctaaaatgatgtagcctgacaagacatttttttcagtgtataaaactaggtagtattgtgcactgatttggaccattgtgaaatccctttctcagtgtaactgcatttctaataaaaatttattgagtgaaacaatctttggtacaatgactagtcatgcatcatcagtaattttacaagttcttgtagtaggtagggggtactactagggatatctgtggcatgattatgcattccgtagtattatttaattaatttggggttcattttgcttcctttcctttatgcttagattatcttactggttcaacatttttctgatatatgcagtattacagatattcagcaaaagtattaatgggcttctttaaattctatattatagtatttcagttccgtgtcttaacagtttgtgataatttctaaaactgtcttttcaacttatgtaatgatgttgacacttttggcttttatttctggtattagagtttgtattttcacagagtgctttgtagcaggcattacaattaatctgttttgtacataaatgtgccaacagcttgatggtggcgtttttgaaatgtagaacagagtgcttgcaaaatgtaataaatacacttgtgtactttgtgtacttattattaaaaaa

SEQ ID NO: 46464 - DNA, 719 bp, Homo Sapiens
  misc_feature (680)..(680): n is a, c, g, or t
  misc_feature (698)..(698): n is a, c, g, or t
ttaaagtttagtatacagagacaattttaatggaaataactactgtagactattgaagaatgatctctttgtgatttaagaagtggctggattggaacttttaatatgctaatgtggaaaattaattacctttatgaaggtggtttattacaaataagcacactaacccctcggaagttgttttacctactttaaaagttttaatggattgcacctctgtaaactattcctaaaatgtgtatgatatatttgaaaaggcttccattaatataatagctttgcttgcagccttccaatctatgttggtttacctgtagtgttttataaagtgtggtcagaggcccctatagaatgtattgtttgaaagtgtagtgatatatttgtgtttttatttcaagtaagtcattttaaccgaatgttcattcatattcatttataaaaagtacctgtatcaaaggaattttaacaaagagcaatcagtattattggaccaaatttggtgtttgttttcaccttgacgctcttcttttcattatttctaatgctacaagaatgctgtaaagtgtcttctaaaatgatgtagcctgacaagacatttttttcagtgtataaaactaggtagtattgtgcactgatttgaccattgtgaaatcctttctcaagtgtactgcatttctaantaaaatttattgagtganacaaaaaaaaaaaaaaaaaat

SEQ ID NO: 46465 - DNA, 1025 bp, Homo Sapiens
  misc_feature (597)..(597): n is a, c, g, or t
  misc_feature (608)..(609): n is a, c, g, or t
gaataatgagccttatgactataagtttgtgaaatggatgactaaacataagaaactatcaggccatccccgtttcagcattctgtaactcagagactaaatcacagtttgagaagtttgtgcgtttttgcttcattaaaaaagacagcacactggatgctgctgaagaaatcatcaaggcatggagtgtacagaagtcttgatttgtgcagaatggattaatgtttctgttagatgacctagtatggaattgttacttagtgctgccacctgctggatgttaaaaggtatttcagtacaactggaatttaaatatttccattgtttttccaaagcagttaacccaactcctaacaacattttcgggggatctgaccttttttttccagttgaaatgtattaacacaccttccacaatcattttataagagtcagcataacatagtggataagaaatgtgagatgtttaacctctcagtaactcggttctctcattataaaataggaataaaatcagtacctgtttcatatgaaggtcgtttctgagaattaaatggactaatgtatgcaaaaagcctgggcaaacaagtaaacaanctcatctggannctttaaaagaaaaaaagaaaaaaccaaaaaaaaaaaacaaaaaagaaaaaaaacagaaacaaagaaaaaaaacaagaaccgaacacaggacagggcagaaaaaaagggggggggcccaaaagataatgctcacagcagagggcaacaaaataatgccgccacaacaagatttgaacgaaaaaggagccccccacaaaagagaggacataacaacaaagggaggaggcaggcgtaaaaaacaggcagggagaggaaaaacacgtataggcgaatcactcgtggaagaacaccattctcgggggagagaaaaaagaggacaacaccccgccagagattagcgccagcgggataaacaagagagagataggggtacaacccggtcatacgcgagaaaaaaagggacgagaactatacaa

SEQ ID NO: 46466 - DNA, 577 bp, Homo Sapiens
aacatttgcatcatcaatacattgtctagagacaagactatcctgggtaggcagaaaccatagatcttttgtgtttacagctatggaaaccaactgtaccataaagatagttcactgagttttaaagccaagccacatcttatttttccaaggtttaatttagtgagagggcagcattagtgtggagtggcatgcttttgccctatcgtggaatttacacatcagaatgtgcaggatccaagtctgaaagtgttgccacccgtcacacaacatgggctttgtttgcttattccatgaagcagcagctatagaccttaccatggaaacatgaagagaccctgcacccctttccttaaggattgctgcaagagttacctgttgagcaggattgactggtgatgtttcattctgaccttgtcccaagctctccatctctagatctggggactgactgttgagctgatggggaaagaaaagctctcacacaaaccggaagccaaatgtcccctatctcttgaatgatcaagtcacttttgacaacatccaggtgaatatagttaaattcactagatcttga

SEQ ID NO: 46467 - DNA, 485 bp, Homo Sapiens
cgccgtgccatccggcctgaaaaccgtgctcctggggctgggctgggccaggatcgccaggtcccgctctggggccagctgctgcttttcctggtctttgtgatcgtcctcttcttcatttaccacttcatgcaggctgaagaaggcaaccccttctagagggagccatgagggtctgggcttcagagctaggtctttggggaagtcctggctgactgccttagcagtgggggtgggggtgggggcaggggcaggggctttatgtgtttttgcttggggggcgctgggcctagcccagagtagtgcttgctccccctgccttgtcccaccagggaggcagcagactcaggccctccatggtcctctttgtcattttgttgacatgcattcctccttttgtcatcttgttggggggaggggattaaccaaaggccaccctgactttgtttttgtggacacacaataaaagccccgtttatttgtaa

SEQ ID NO: 46468 - DNA, 430 bp, Homo Sapiens
tgcggccgccaacttttttacataattaaacatgatcctgagttatctgtattctgaactttcttaattgagaagaggcaagaaatcactgcagaatgaaggaacatcccttgaggtgacccagccaacctgtggccagaaggagggttgtaccttgaaaagacactgaaagcattttggtgtgtgaagtaagggtgggcagaggaggtagaaaatcaattcaattgtcgcatcattcatggttctttaatattgatgctcagtgcattggccttagaatatcccagcctctcttctggtttgctgagtgctgtgtaagtaagcatggtggaattgtttgggacatatatagtgatccttggtcactggtgtttcaaacattctggaaagtcacatcgatcacgaatattttttatttttaataaagcat

SEQ ID NO: 46469 - DNA, 614 bp, Homo Sapiens
  misc_feature (575)..(575): n is a, c, g, or t
atggtgctcactttaggatcagcagtgttgaccatttatgctgcatagctgtattatagccttattagttgtgtggttgacccttggggtatacaaatgtcagtctgagtggtgtcttactcctttgtttataagtgaatgattgtgcatgttttgtatgtcatagtatgtcgtcacataaaagggagggagcgaaaaaccattacattaagataatattggaccaaactacttacttgctctaaacagttacttgtaccccttaacctgtcttcaaaagttgcatatagttacagtagtgtataaattaaatattgtggaaaaacagtcttgtatttttctgtatgtgtgtatatatatataattatgtacttctggcaattctatctgtatttaaagatgtgacaatcttgacaccaattttaagaatagctgtgagaccgaattaaagataatccctaccaagtgaaaattgatgtgtgttaagagggtacagaattatcaactgatttggtcagttgcttccaatgctggttgatttccctcatttgtaaacattgacaggtatgtgacanatgggaaaaaaaatccaaataataaagtgacatattggt

SEQ ID NO: 46470 - DNA, 416 bp, Homo Sapiens
cacggtgcaccaccagcccctgccccggctggccctggcccaggccgcgcccgggatcccacaggccagcgccacggggccgtccgcggtgtgggtgtccctcggcatgccgcctccctatgccgcgcacctttcgggggttaagccgcgataaagaccttgcttagctagcagtgcgtattgtgtaaggtaactaggatttctacctcaaccgcgagacctatgcaaggacggtgtggaccaactcgcgcccgcggcatggtgcccgccggcctgccgggctcccacccctggacggcagaggcaaggacggacgggagctccactgtgaatcggcggcacgcgccgcaggaggctgggactggtccagtttgtactgtcgatagttttagataaagtatttatcattttttaaa

SEQ ID NO: 46471 - DNA, 804 bp, Homo Sapiens
aattaataaacgcacagccctatgtgaacagacaggaatttcttgtgcaatgtggagcaaatggaatggtctccttccgcaagtctttttaatcctcatatctggagtacaagggtagacctctggcttaccacatacactatgctaaagtcatcagccactgctactacatcttgccagaaggtttccctcgccaacaaacagttgaaatttaagggaagaagcaaaagctaaactgtctttgaccctaagatagatagaaagctatttatttgtcttcagtgttcaaggcatgactagtatttctaattagcctaataaattcccacactttctgaagtgaacactaatggtattgtcctactaaaactgtcattgtttctttttttttaactggtcagtcattcacaataagctatgagggtaaataaatatgtgttataacaagtaaaccgtagttgcaagaatataccatgaagattaaagtaggctgggtttcatttccatcttcccacacatctcattgaatttgatggttgacttaattggcaccataacttgtatgatattatacattaacctttatttatgtaaagtaaaatgccttatatattacagagtaagtgcgataatatgaaatagcctgtacattttaaaaatggttgtcaccaagttatattaatccacatttctgtaaacaaccttttttaagtaattttaaaaaaataaacactctggttactaatcgaaaaaaaaaagaaagaaaaaaaaaatttgtgggggatgggcctgaaaagttttaaa

SEQ ID NO: 46472 - DNA, 869 bp, Homo Sapiens
ccagagggcagcagggcctttacccagtggcctgttggctagcctgggcctccctggagagggttgacagtggaagggaacaggaggggcatttggcctgagacccctgcttttgggagaggctagcagggtggttcctgcccagcatgcccagctcctccctgggtgactcggagtctttcccatgtcagagcccccaaatgggggtagcaaggagcacctttctggaaccccctatagcatccaagtttctttctgggctctcttgccttttcccccctttcacagatggcacccctgggcatctgtccttgcctaggtgattttggaggttggtgccttcctgggaactagccaccagcttatctgcttcccttcccctggcatcacttcccataggcctggggtttctagactggggcctggccacccctttccccactccacgagtgagtcggcctccagagaagactggcaccattccaactagagtcaacccatgctgccctctgccccttcccactcagatctagatccctgctttcatttctggctagtgaagtagacttttgtgtttttgaggtttattagcaggtctggctcaggaacccaactaatgagtagcttttatattgggcccccccaatatatggctttgggggggctgaaaaagcaaatgtaaaccccctccctccggatccctattggggtggcccttttaacactcccgcaaaacttctgcgggggtgaaacagggagttgatgaaaaaaaattttttcatttcctaaccccaatacaaaccaagtctaccaatttgggggcgggcccccgcctcctcaaaagaaaatcccccctcccaaagggggga

SEQ ID NO: 46473 - DNA, 735 bp, Homo Sapiens
ctgtccattagctctcatgccgggtcagcaaaatgctttaatttttaactgcagaacatgtgactcggttgagtctttttgtcttttttttttttaaataaacaattgggggaattaatgtgggcaagttgccttatgttagaatgactaagttaaacctcttaatttgtatttgtccaaggcagacatgatataaggaatatgcactaccgtagtaactcccctggccgcagaaaccacactgcaagcctgtccggggtggggtgctgactgccatttgccacttttaaatgggcactgccgtggtaatgtgaatcccatcaatgcagtagatgggtggggaaatgaagatttccccccaaacctttaggcaaaagtgagtttttgtttggttgattttgggtttttttcccccctcctcttttggctttcacattttaaatcttaaatgttactattgcaggccgcaggcatgacaggcaatgagcaggtgaagaaccaatggaaaagtgttcaaaaactcctgtgttagctaacaggcttctgaatgtatcactgtggtccacagagaaggctggaggaggtagcaaggagatgctgtatcagctactacagccttaaaacaaagttggtgtctctttggactttaaaattgttcctatgcagcttattttatttttgtttaatcaaataaacgagggtttttccatggcaaaaaaaaaaaaaaaaaaaaaa

SEQ ID NO: 46474 - DNA, 480 bp, Homo Sapiens
cacgaggtatagccaggtcctgtttcaagacgtgactttcaccatgggtcaggtggtgtctcgagaaggccaaggaaggcaggagactctattccgatgtataagaagtatgccctcccacccggaccgggcctacaacagctgctatagcgcaggtgtcttccatttacaccaaggggatattctgagtgtcataattccccgggcaagggcgaaacttaacctctctccacatggaaccttcctggggtttgtgaaactgtgattgtgttataaaaagtggctcccagcttggaagaccagggtgggtacatactggagacagccaagagctgagtatataaaggagagggaatgtgcaggaacagaggcgtcttcctgggtttggctccccgttcctcacttttcccttttcattcccaccccctagactttgattttacggatatcttgcttctgttccccatggagctccgaatt

SEQ ID NO: 46475 - DNA, 1073 bp, Homo Sapiens
  misc_feature (547)..(549): n is a, c, g, or t
  misc_feature (581)..(581): n is a, c, g, or t
  misc_feature (583)..(583): n is a, c, g, or t
  misc_feature (588)..(598): n is a, c, g, or t
  misc_feature (600)..(600): n is a, c, g, or t
  misc_feature (611)..(617): n is a, c, g, or t
  misc_feature (642)..(642): n is a, c, g, or t
  misc_feature (766)..(766): n is a, c, g, or t
  misc_feature (768)..(769): n is a, c, g, or t
  misc_feature (776)..(776): n is a, c, g, or t
  misc_feature (808)..(808): n is a, c, g, or t
  misc_feature (884)..(884): n is a, c, g, or t
  misc_feature (980)..(983): n is a, c, g, or t
  misc_feature (1017)..(1017): n is a, c, g, or t
  misc_feature (1034)..(1034): n is a, c, g, or t
ccttctcccgggcctggatgactatggagcgcggtccatgagcagcgccgatgtggaagtggccagattctgagccgcctgactagagttagaatccctttgcccacgtccagctgaagccgacagtgaccaacgacaggtctgcccccctcctcagctgatggccacatctgcagtgctgcccatctggtggcttcccccgcccttcccatgtagcctgttctgtcatcatctgtgcgttcctgtgtagagaacatccaggccccggctgcctggtcttgccccacttgagtctggcctggactggatcccagctgttctaggcagggccgggcagagtggggcgcaggcccctgaagggcgagacccagtggctgggctgcccagggctgaggggccgcctcttgagggtacacgcctctggtcacatggccatggagccttgggtacccctgagttaagggaggacatttggccagctggtggctgggaggggagcctggctgccctgctgcttctcctgcctaataaacaggcttctcctgcnnnaaaaaaaaaaaaaaaaaaaaaaaaaaaaaaananaaaannnnnnnnnnnanaaaaaaaaaannnnnnnccccccagggttttttttttttggngggcgggggaaaaaaagagggtttttaaagggggccccccgggggcgaaatagtttttttttcccccccccaccactttttttttttgtttttaaaaaagaggggggtgatttgtttttctccnanncctctcncactctcccccccccccggggggggagtattntttttttttgtttatttttgcaacaaaagggcccgtcgccccgccccctacattaaataataagaaaagggggcgnggggcggatctgcggcccgcgcgccgcgcgaaaacaaacactaaatattaaccccacatctcacctcaggagaggggttgtgtgttgtgttttttnnnnttatgtctttattattctgcagaagagcggggangcaacggaacgcggcgncgatagcagccgcacagtccgacaaacgacggatctggt

SEQ ID NO: 46476 - DNA, 768 bp, Homo Sapiens
gagctcttcgaagcactgggcattgctcagcccaagggagtgctgctgtatggacctccaggcactgggaagacactgttggcccgggctgtggctcatcatacggactgtacctttattcgtgtctctggctctgaattggtacagaaattcataggggaaggggcaagaatggtgagggagctgtttgtcatggcacgggaacatgctccatctatcatcttcatggacgaaatcgactccatcggctcctcgcggctggaggggggttctggaggggacagtgaagtgcagcgcacgatgctggagttgctcaaccagctcgacggctttgaggccaccaagaacatcaaggttatcatggctactaataggattgatatcctggactcggcactgcttcgcccagggcgcattgacagaaaaattgaattcccaccccccaatgaggaggcccggctggacattttgaagattcattctcggaagatgaacctgacccgggggatcaacctgagaaaaattgctgagctcatgccaggagcatcaggggctgaagtgaagggcgtgtgcacagaagctggcatgtatgccctgcgagaacggcgagtccatgtcactcaggaggactttgagatggcagtagccaaggtcatgcagaaggacagtgagaaaaacatgtccatcaagaaattatggaagtgagtggacagcctttgtgtgtatctctccaataaagctctgtgggccaagtcctctaggaaaaaa

SEQ ID NO: 46477 - DNA, 617 bp, Homo Sapiens
cagtcctttgacaaggacaggtggggcagggagcaagacaggtaggctggaagaacagttattggcaagtatgcagagccgtgaacgtcatggcatgtccaaggaattaaatgggagttcatttgggctggggtggaggctgggatcagaccgtggtgggccttcaagctaaggagcttcctaggtgaaaggggagatgtgagccttctctggagggaagtttcatgattgcatctataatgaatatattgcctgttttgtgaatactgacacatgtccatacctaaaacactcctgagttaagtcccatccttcccacaaacagcttcctggctggtacccatgataacaattgagctgaacctggggacccctggttggggaacaggtgagttctatttgagacttccagccctagaaagctgcctccgtccagaaatgcctctcacaccaggagctcggccctctctttgtagctgtgactgtcaccctctcaggctttgtctcatccttcattctgaataagatggcagtgttctcctctggggcctgatccacctctacaccagcccaggaagccccatctgtgcctgccctcaggtggtccaccagtctcc

SEQ ID NO: 46478 - DNA, 736 bp, Homo Sapiens
ggctgccccatctccagtccctgcgcggcagggcacagtctgcagccccccagcctaggcagccgtcgggagcgagcaggagcgggaggtgggaccagcccgggccttggctagtctggggcctctgcctggctcccatggcccaaagcctgtcccaggagcaagatgctggctgactggcttgagtgggaggcatgctggtcccaggagcttccggggaagctctggcacagccgagagtcaaaagactacagcatccctgagagcagggagaggggccttttcctcgttttgcgttttcccctggagccagcaatgtgtcagtaacttgtctatgaaagaacctgaggtgtagccacatgtccagctgccttctgcgcacgcctggcctccctccaggctaccccttctatgggtgcgcatggtgctgctgttggttctgggcggggcctccactctgatggttccaccctgggaaagctggccttccatcctgccaaaccagatgacctcagtcccaccacctccaggaagcctctgtagatcttcattctgggttcttgtccattaaaaatacccaccatggcctgggcacagtggctcatgcctgtaatcacagcactttgggaggctgaggcaggaagatcacttgaggccaggagttcgagaccagcctggacagcatagcaaaaccttgcttctacagaaaataaagcttaataaataaagataccca

SEQ ID NO: 46479 - DNA, 636 bp, Homo Sapiens
gtatgtgcaatctgctatcatgagtttacaacatctgctcgtattacaccgtgtaatcattatttccatgcactttgccttcggaaatggctgtacattcaagatacttgtccaatgtgccatcagaaagtatacatcgaagatgatatcaaggataattcaaatgtatctaacaacaatggatttattccacccaatgaaactccagaggaagctgtaagagaagctgctgctgaatctgacagggaattgaacgaagatgacagtacagattgtgatgatgatgttcaaagagaaagaaatggagtgattcagcacacaggcgcagcagctgaagaatttaatgatgatactgactgatgaaaatagcatttattaatgattgaggtatttgtttaaaattcagttcatccaaaatggagtaatatccttcaccttcagtgtgtaaccaagcacaaaaacagtatcaatgttgaatctgtgaatggttttccgtttactgtgatgtgctactgtaaatatacctctttaattacttctggtctctttggtgacctgtttaaatttgtgtacattattgtacatagaataaaatgttttcacattttatgacaaaaaaaaataaaaaaaaaacgg

SEQ ID NO: 46480 - DNA, 440 bp, Homo Sapiens
  misc_feature (23)..(23): n is a, c, g, or t
  misc_feature (25)..(25): n is a, c, g, or t
gcaagctaatacagtggtttganangctgggagggttgaggggaagataaacttttaaaaagctcttatctttcatttcaatcagttaaaaatacttgctcagtgtaacaattttgcttctcagcttccactctaatattgttgtgccattaagcaatttagctaatcctgacatttcttagattcataatgttaggagcatttaatctgtattttacaagttaggaagcagaggatcagagatgggaaaggactagcccaaggccaacattaacaagccctctaacaaaaactttacaatacatttatgttgaatggaactccaagatctcacctctccatccaggaatggagtccatgtaatcaaagtgaacttaaaaataggacagtttcaacaagtcaggagattcacagcaactgatcaaagggagtccagtcaa

SEQ ID NO: 46481 - DNA, 1038 bp, Homo Sapiens
ggatgcggcgcgcgaggacccgagccaggcggggacaggacggcggggcgagccagaaaaaaagtaaccttcctgaagaggacatgtgattggaagttgtcaattgttgaagcattggtaactccagtctctaacgttttagaaaatcataacaagcggttctctaccctgtaaaggtgaactactgagttcttcattatgtctgatggagattatgattacctcatcaagtttttagctttgggagactctggtgtagggaagaccagtgtactttaccaatatacagatggtaaatttaactccaaatttatcacaacagtgggcattgatttcagggaaaaaagagtggtgtacagagccagtgggccggatggagccactggcagaggccagagaatccacctgcagttatgggacacagcagggcaggagaggtttcgtagcttaacgacagcsttcttcagagatgctatgggttttcttctactttttgatctgacaaatgagcaaagtttcctcaatgtcagaaactggataagccagcyacagatgcatgcatattgtgaaaacccagatatagtgctgtgtggaaacaagagtgatctggaggaccagagagtagtgaaagaggaggaagccatagcactcgcagagaaatatggaatcccctactttgaaactagtgctgccaatgggacaaacataagccaagcaattgagatgcttctggacctgataatgaagcgaatggaacggtgtgtggacaagtcctggattcctgaaggagtggtgcgatcaaatggtcatgcctctacggatcagttaagtkaagaaaaggagaaaggggcatgtggctgttgagaagtcaagtaagcgacaaagtagtwcaggtggcccatgcctgggatcttctctatgattgatamatggcacagtkagaaattaatgggcattgtgtacaaatkcytytmmcatcccatwaracwasaataaagmwccggtytaaattawttktgcrgcttktaatwtttttta

SEQ ID NO: 46482 - DNA, 783 bp, Homo Sapiens
gttttgcttttccattggtggaattgaaataattagtttttaattacataagatgcctgtttgctatttggtggaagatagatgttcatattgaagcagtcacatttgtactgtagttcaataaaagaaaaatgaagtattctgtagcctatatttttcatagagctcatgagcatttactgtacttgctgggtcttgccaagatcatttattccgctgcattgccaaagtgtcttcataccaaattaaaggtggttttaatatatgtttcatggaagttgtttataaaattcaaaggtatttcatttaggtgaaaagtcttatttattaaagtggtttgaataaagtagatcaaaacttccagagatcttaatggctatataggaagaaatatcactcaccataatttaaataaagaataaaaatacttgtattttgtggtggcaaatgtttggtagaactgtaattagaaaaatacaagtatatttgcgtgatggttacactagaagcccagactttacgactacacaatatattcatgtatctaaactgtacttgtaccccctaaatttatttttaacaaaaggaaaaataaaagtatcatgaaaaaacctatttttttttccactgtccttccactactcccataacaaacttatccatggttggtaaaattttacatatttctatccttggaaatgaaggcttcttttaaattccaaagaagtcatggaggcctgttgcatttgaatcgtatatgctagtgaggaaacagcatttcga

SEQ ID NO: 46483 - DNA, 596 bp, Homo Sapiens
  misc_feature (592)..(592): n is a, c, g, or t
aggagggacacatagtgggtcatcaccctttctcacacctgcttcccaatgagcactcagcagcatggctgagacctggggcttgacaggcctgcgctccttagattaggatgctctggtattcctggggccagttaaaatgggtcagtgaggggctctcctggcctcaatctccatctttagggtctccacagactaacattgaagtcttccagaaacctcgaggagctgggctagatacttcgagagtagccctgtcttgtcccctcctacccccagattagcaccacccctctcactcttgggttggatgctatgggaattacaacccatcactcccaatgcctccctttcctggaggagcctgctgcattctcctgctgagggatcccagagagggcaggtgcccaccccacaggccctttcctggaccatggagccaggtgaaacctgtctggccccttacccattgggttcttactccttcacaacggtcagcactcctctcccagcccccctgcccactgttctcaataaaatgtgagtggtgagaggaaaaaaaaaaaaaaaaaaaaaaaaaaaaaaaaaaaanaaaa

SEQ ID NO: 46484 - DNA, 500 bp, Homo Sapiens
cccaggctcgcagactcaacacagcaagggtgggagacagctgggcacaaagggggaattccgttcagcatgggctctaaacccacagaactgacaaagcccctgcttccccaccccctcctcaggctcctgcgagcacacccccacccccaaatccctccctgttctacactggggacagcagaattttctccccgtcttccccttcctgccattttccctcccttgaaaggttgacactggacaaccttggggcagctgagccctggccgcctcctggctggaaccatgagaaggaagctcagtacttcccacagtgtccctgttgataactgtttttattaactgaattgtttttttcatggaccaaacttttttttgtactgtccccttattgatgttacccagttttaataaaagaatcttctgaaggatgggtcctcctacctactgtgagagagctcttccctgagctcttcttccttcaataccattaaaaa

SEQ ID NO: 46485 - DNA, 634 bp, Homo Sapiens
ggatttttagacttttttcattaaaccttagaaaaaaattaccagtaatcctacaactactggtagtgttgttgtgcatttgcacaaaataggtataattttttcttattacatcccaagtttatgatgcattaagcgtttgcatattttgatatatttttgctttggtttaccatacattttagtggctacagaatgtagtctgcttaataaatgggaattcctagaatgtttaaataccatactatttaagacaaaatacaaaatatccagaaaaatccaggttgcgtggctggttagtaaaggactaaaacccaggttcttggctaaatgttttcgtttatactgtttatctttcccattgcttaagcacagcacaaactatgtaattatatataattacagttgacccttgaacaacatgggtttgaactgtgtgagtctccttacacacaggttttcttccacccctgagatggcaagaccagccccttgtcttcctcagcctgctcaacgtgaagatgatgaggatgaagacctttatgatgatccacttctacttattaaatagtaaatatattttttcttatgatttatttgcttttctctagcttcataagaatatagcatatgg

SEQ ID NO: 46486 - DNA, 979 bp, Homo Sapiens
  misc_feature (877)..(877): n is a, c, g, or t
  misc_feature (908)..(908): n is a, c, g, or t
  misc_feature (931)..(932): n is a, c, g, or t
  misc_feature (938)..(938): n is a, c, g, or t
ccactccttcagtgctcttgcaaagtttcatgaagtcttcaaaaccctagctgaaagtgatgaaggaaagttacatgtgctaagagttatgtttgaggtctggaggaaccatccacagatgattgctgtactagtggataagatgattcgtacacaaatagttgattgtgctgccgtagcaaattggatcttctcttcagaactatctcgtgactttaccagattgtttgtttgggaaattttgcactctacaattcgtaagatgaacaaacatgtcctgaagatccagaaagagctggaagaagctaaagagaaacttgctaggcaacacaaacggcgaagtgatgatgacgacagaagcagtgacaggaaagacggggttcttgaggaacaaatagaacgacttcaggaaaaagtggaatctgctcagagtgaacaaaagaatcttttcctcgttatatttcagcggtttatcatgatcttgaccgagcacctagtacgatgcgaaactgatgggaccagtgtattaacaccatggtataagaactgtatagagaggctgcagcagatcttcctacagcatcaccaaataatccagcagtacatggtgaccctggagaaccttctcttcactgctgaattagaccctcatatcttggccgtgttccagcagttctgtgccctgcaggcctaagggtcattttttcctcatgtcaaggttttttttgatatcttaaaataatttgtcttattttttgatggtttgaatgcttgctttcttgtagtatcctttcacttcttaaaggaaacaaaggggaagaagacagtgaatgaacatggcattactttttattgccctgaaaaacaaatacttccntaacggcagtaaatggtgactatgaccatgnatataattatataatgtggaccnngatacnaaaaaaaaaaaaaaaaaaaaaaaccttcaagggccattctt

SEQ ID NO: 46487 - DNA, 583 bp, Homo Sapiens
  misc_feature (558)..(563): n is a, c, g, or t
  misc_feature (570)..(570): n is a, c, g, or t
  misc_feature (572)..(572): n is a, c, g, or t
atcaaatccaaattattttcaaatcaagatgtttaaattataagtttttttgttttgttttccagtaagtataaatgaaaatattcatatgtaaaatatgttttgcttaatgtggacaatttacacacccaacacatactgtttccaaaattatttctatatgacacaaagtatgatacctttaaaaaggtgagcttatatattgtttattaacctggaaatagacaatttggctctcataccataagcatttaaaaacatatgaaatattttgatttctttatatggtggtgtgtttttatttctgaattttccatgtgctttaatatttgtttaagaatattttttatatctgttcaatttttatcattccccttatcattagaaagtttgacaaaaatacttgaatcttggacctctaaatatacttttagttgtgtttaacttgtttagtaaataactttttaagttgaaaaaaaaaaaaaaaaaggccacatgtgctcaacctgaaggtcggggccgttaaactatttaaaactctccccccccccacaaacnnnnnnccccccntntttttctttca

SEQ ID NO: 46488 - DNA, 660 bp, Homo Sapiens
  misc_feature (630)..(654): n is a, c, g, or t
ggcacaaactaagtttctatatgtgaagttagtgagtctttttgtgttactccaaaataaaggcaatgatttatttttttcccagtgccaatacaattttgagctaagcactcaaggtggatactttacattttaaagctggaatcagcaacagccctatgggaaaccagacaaagcattgacttttaaatgtagacttttaaaataaactgttttcttttggaactacaattagaatagttaatattcatccttaaaccattattatgtgtacattattgttgctattgtgataatagagaattttatttatttttatgccagcttatattgtgagaacacatttagtcagtttgggttttatcaatcctgttaatgcttgtccttggaacatctttcgcgtattcacggtttgtagttgaaaagtttactgtaaaaaaatcaaaaacaaaaaaatgtattgtttttacagaataaatttattggaatgtgtactgggagtaagatttgaggttgtaagcaaactaagttagtgtaatttggcttcatatatgtaacgtgaggtattaatgtaattcatatattaaagcaaaaattgttcacagcaagctgacaatagaatcgaaaaannnnnnnnnnnnnnnnnnnnnnnnncttgtt

SEQ ID NO: 46489 - DNA, 618 bp, Homo Sapiens
tatatgtttggttgtctaatattcttggatttgatatgaaccaacacatagtccttgttgtcattgacagaaccccagtttgtatgtacattattcatattcctctctgttgtgtttcggggggaaaagacattttagccttttttaaaagttactgatttaatttcatgttatttggttgcatgaagttgcccttaaccactaaggattatcaagatttttgcgcagacttatacatgtctaggatccttttatcaaggcagttatgatcatcgttttcctgccttgaccccaccatcatcaaacactcagttaaatataaattaacattttttagatgaccactcaacataatgcttaagaatggaatttcctctctgtgacagaacccaggaattaattcctaaatacataacgttggtatattgaagacgaaattaaaattgtccttcagttttgagggcatgtgtaaagtttaaccatattgtaaaatatctattccgtattagaaatagctagttgacagcttatacttctcaaaattcatattggtatgtacacaaactaagtttctatatgtggaagttagtgagtcttttttgtggtactccaaaataa

SEQ ID NO: 46490 - DNA, 695 bp, Homo Sapiens
gcaggtgtggtggtgtgcacctgtggtcccagctatttgggaggctgaggtgggagaatcacttgaacctgggaggcggaggttgcagtgagctgaaatcgcgtaccacactccagcctgggtgacagagcgagactgtgtttcaaagaaaaaaaaaaacaagcagcctttggctgggttggaatctgattttctgttgcgtgttccttgtagccatagatgtgattatgtccacaccgggctgccttaatctgtcctgctgggagagtgacttgtaagatgctgaattattcatgataatacagtgaatgttctgggtccatgtactcagataaacatgaagaaaataagcaaagaaaaatggagactgggaaagcaaagctgttttcatcctataattgaagtagtgtggagcattaactgtgtggatgattcagagttaaaagataaaaagacgccagagttctcgctgaagaatgtgagaattcctgtgcatggttttttctgatgactatctaaaaatggtgccctgatgtaggttgggggaacattcttaaaaacacgggtgctatgtgcctgtaatccagcacttgggaagctgagtgcgcagatcacctgaggtcaggagttcaagaccagccggacaatacagtgaaacctcgtctataccacagaggaaagcacaacaaaaaaaa

SEQ ID NO: 46491 - DNA, 593 bp, Homo Sapiens
gctgcttctgcagagactcaagaacaggctcctcccacccgcgtctccctagtccctggaggcctccccaggaccaccctcgccgacagcaaggcaggcggctgagcagcggcctggagcagcagagccaggctttgtagcgaggccaggtcttcggccgcatccggtacggagagtgcagatgcaggaaggcccggcctgccgctatttatagtgcagccagtccgctaaaaatacactgggcctgggcactgcccgccgggacatggcagcctggacgtggggctggggctgtgggcgctgctggcggggttgactcttccagtgagggcagaaccaggctggcaggaggggaggacggtgtacctgctgctcagagcccccaaggctctcctctgagagccaccaagcaggacagagcagctcttgtcccaggtccctcgggctgagcgccgtgtcaccaggagaatagtgctcacagcccaggcagggtgtgtggctcctggatgggctcgtggggcgggatgggacagggcacgggctcctcagaaaataaactgctttattggaaaaaaaaaaaaaaaaaatcttga

SEQ ID NO: 46492 - DNA, 2859 bp, Homo Sapiens
tcccccgacccggactcccccatgtatgacgactcctacgtgcccgggtttgaggactcggaggcggccccctgctgaggcttcctctgcagctgggcatcctgagctcttgcccagcgatggtatgggcctggacgtgtgacggcctcgaggatgctgagggcctggcggatggagaggaagcgctttgcgtcagagaagacaggcaaccgataaagtatctaattctcctctttgcttttatctcctgacccactgagacacaatcagctcacttaagcagtgagttcccggagctcagacagcagggagagtgcctggaaatgatgggtgcaagaagtgctggagcagcttctcagccccttggagctgacaactttccctcaagatgtcctggttcagccgactcctacaccagccgcccatctctggactcagacgtctccctggaggaggaccgggagagtgcccggcgtgaagtagagagccaggctcagcagcagctcgaaagggccaagcacaaacctgtggcatttgcggtgaggaccaatgtcagctactgtggcgtactggatgaggagtgcccagtccagggctctggagtcaactttgaggccaaagattttctgcacattaaagagaagtacagcaatgactggtggatcgggcggctagtgaaagagggcggggacatcgccttcatccccagcccccagcgcctggagagcatccggctcaaacaggagcagaaggccaggagatctgggaacccttccagcctgagtgacattggcaaccgacgctcccctccgccatctctagccaagcagaagcaaaagcaggcggaacatgttcccccatatgacgtggtgccctccatgcggcctgtggtgctggtgggaccctctctgaaaggttatgaggtcacagacatgatgcagaaggctctcttcgacttcctcaaacacagatttgatggcaggatctccatcacccgagtcacagccgacctctccctggcaaagcgatctgtgctcaacaatccgggcaagaggaccatcattgagcgctcctctgcccgctccagcattgcggaagtgcagagtgagatcgagcgcatatttgagctggccaaatccctgcagctagtagtgttggacgctgacaccatcaaccacccagcacagctggccaagacctcgctggcccccatcatcgtctttgtcaaagtgtcctcaccaaaggtactccagcgtctcattcgctcccgggggaagtcacggatgaagcacctgaccgtacagatgatggcatatgataagctggttcagtgcccaccggagtcatttgatgtgattctggatgagaaccagctggaggatgcctgtgagcacctggctgagtacctggaggtttactggcgggccacgcaccacccagcccctggccccggacttctgggtcctcccagtgccatccccggacttcagaaccagcagctgctgggggagcgtggcgaggagcactccccccttgagcgggacagcttgatgccccctgatgaggccagcgagagctcccgccaagcctggacaggatcttcacagcgtagctcccgccacctggaggaggactatgcagatgcctaccaggacctgtaccagcctcaccgccaacacacctcggggctgcctagtgctaacgggcatgacccccaagaccggcttctagcccaggactcagaacacaaccacagtgaccggaactggcagcgcaaccggccttggcccaaggatagctactgacagcctcctgctgccctaccctggcaggcacaggcgcagctggctggggggcccactccaggcagggtggcgttagactggcatcaggctggcactaggctcagcccccaaaaccccctgcccagccccagcttcagggctgcctgtggtcccaaggttctgggagaaacaggggaccccctcacctcctgggcagtgacccctactaggctcccattccaggtactagctgtgtgttctgcacccctggcaccttcctctcctcccacacaggaagctgccccactgggcagtgccctcaggccaggatccccttagcagggtccttcccaccagactcagggaagggatgccccattaaagtgacaaaagggtggggtgtgggcaccatggcatgaggaagaaacaaggtccctgagcaggcacaagtcctgacagtcaagggactgctttggcatccagggcctccagtcacctcactgccatacattagaaatgagacaatcaaagcccccccagggtggcacacccatccgtttgctggggtgtggcagccacatccaagactggagcagcaggctggccacgctcgggccagagagagctcacagctgaagctcttggagggaagggctctcctcaccctgccaggaagcttcttaacatgtgacaggaccagggaccaggagcatggtgaagccaagtggcagatgggagccaacctggatgggggtttggggaaggagggcatgtgtagcagagaacttaggggggcctccttgcctttctcattcttttgccctgcatcctgtcatttctgttcttgtccctcatacatctttggagaaccgggctccagactttgttccctgactcatagctgccgcttgttaggttagggttagatggggagagacagggcacagaggacctgtctccccggctactcttgccttatggctctagtgtgtgacctacagagcatgctccacaagcccctgcctcacctcactgtcatcactaataaacatcatgcacagtcaaaaaaaaaaaa

SEQ ID NO: 46493 - DNA, 502 bp, Homo Sapiens
aacgccatcacttgtggctttaacgccctggagcagatcctacagagcacagcgggcatatactgtgtaggagacgaggtgaccatggctgatctgtgcttggtgcctcaggtggcaaatgctgaaagattcaaggtggatctcaccccctaccctaccatcagctccatcaacaagaggctgctggtcttggaggccttccaggtgtctcacccctgccggcagccagatacacccactgagctgagggcctagctcccaaatcctgccccgttggcacagggccacaggagcagaagctgggtgggctgaagaggcctggaaacgagagtcttaattgaggagatgggagactcgaactctagccctggatctgccttcctgctgaaacttgttccacctcagtcccctcatctgtcacacgcatgtggggtggagtagggagatgcggggagcagggtgggcaggaatactgttatctatgtgacggggcagtcgtgag

SEQ ID NO: 46494 - DNA, 603 bp, Homo Sapiens
atcaatcttctgaaccctaaaggaaagccagcaaaccagctgcttgctctcaggactttttgcaattgttttgttggccaggcaggacaaaaactcatgatgtcccagagggaatcactgatgtcccatgcaatagaactgaaatcagggagcaataagaacattcacattgctctggctacattggccctgaactattctgtttgttttcataaagaccataacattgaagggaaagcccaatgtttgtcactaattagcacaatcttggaagtagtacaagacctagaagccacttttagacttcttgtggctcttggaacacttatcagtgatgattcaaatgctgtacaattagccaagtctttaggtgttgattctcaaataaaaaagtattcctcagtatcagaaccagctaaagtaagtgaatgctgtagatttatcctaaatttgctgtagcagtggggaagagggacggatatttttaattgattagtgtttttttcctcacatttgacatgactgataacagataattaaaaaaagagaatacggtggattaagtaaaattttacatcttgtaaagtggtggggaggggaaac

SEQ ID NO: 46495 - DNA, 798 bp, Homo Sapiens
  misc_feature (679)..(679): n is a, c, g, or t
  misc_feature (778)..(778): n is a, c, g, or t
  misc_feature (780)..(782): n is a, c, g, or t
  misc_feature (784)..(790): n is a, c, g, or t
tctctacgagctcctcagcgctctgcagggtgtggtgctgcagcaggacagctacattgaggaccagaaactggtgctgagcgagagggcgctcactcgcagcttgtcccgcccgagctccctcattgagcaggagaagcagcgcagcctggagaagcagcgccaggacctggccaacctgcagaagcagcaggcccagtacctcgaggagaagcgcaggcgcgagcgtgagtgggaagctcgtgagagggagctgcgggagcgggaggccctcctggcccagcgcgaggaggaggtgcagcaggggcagcaggacctggaaaaggagcgggaggagctccagcagaagaagggcacataccagtatgacctggagcgactgcgtgctgcccagaaacagcttgagagggaacaggagcagctgcgccgggaggcagagcggctcagccagcggcagacagaacgggacctgtgtcaggtttcccatccacataccaagctgatgaggatcccatcgttcttccccagtcctgaggagcccccctcgccatctgcaccttccatagccaaatcagggtcattggactcagaactttcagtgtccccaaaaaggaacagcatctctcggacacacaaagataaggggccttttcacatactgagttcaaccagccagacnaacaaaggaccagaaaggcagagccaggccccctgcgtccacctctgcctctacccgcctgtttgggttaacaaagccaaagggaaaagaaggagaaanannnannnnnnnaaactcga

SEQ ID NO: 46496 - DNA, 1055 bp, Homo Sapiens
ggaaaatttgcagctgccagtgctttccttgtggccctgccaaccagctcttccaggacgaactcagtccagcatggttttgatgtaaccatccatgcttttatttttgttaagtcttttgtgactgggacagttaattttagtagctgaagaacgtctagttgtttgcttgatatttgtgaacatttactgcatggatcacaaaacaatataccctgtatttcttacacgccacttatatgcagcaaggagtaaatgtgttactagattcgggtagtgcattttgtcactgaatctgaccttgagaatgtacattaattcttatattttacataatgtatgtkttgtttaagaaatgtataaaaaacctgaaaaaaatgagtaagaactggcagaagttaaaaccctttgtatcaaaagatctttattggtagagcactggttatcttctggatactaaaaagttgtattacaaagccaaacacttgcattcacaactttaaaaaaagatccaaggaactattcataatgatgaaattccaactacatacaaggaggagaaaataagaacccagtcataacagaggaattctataggagtstgcatcaattcattcttaaggttgcctactctctgttatgtgaatbagcgtctgtgtttcacccattgtctgtgtttagtccttgttcaccactagggcaaggaattcttaactaggcctctgtttaccaacttctctttctcctcctttccctcttattcctccttctcctcttccttcttatataatgctagtatattctcaaaattgcaaagctgtgagaatattaaaataatcatggctaatgttccaataatgaggtctttgtgcatttagttccgcatatgatggttttttttttacattaaagagtatatgtgttttaatgcagttagattgtaaaaaacaaaammaaagaaactaagaatcttactaaaatygatwatgtsagtawttgttttgtccaatatggkrgtattttttgcctctaagaatcyctagcrgaaaataaaa

SEQ ID NO: 46497 - DNA, 402 bp, Homo Sapiens
acttgaaataaatgtgcactctgcatctatcctgaaacactatttgtgattacggaatactttaattgattgctgaaaatattgaatggtcttcattttacagtgatgagtacatatgcatgtttcggggacttggcccttctgatgaggggccctcggtactctggataacgaagcttgtgcagagtggtaaccatgcttacacactaaactataatataaaggaaatgaagccatgttaatctgagagcagtgtcgccatagttgtgttgtttacaatactctataaatgggttcctgttgccctgtaattaaactgctgcccgtagaggcctttcagttccttttctgtccttccccttcttaacacaagctcaaattttccaacttgtttttattttg

SEQ ID NO: 46498 - DNA, 563 bp, Homo Sapiens
taaacacactgcaggagggactctgaaacctcaagctgtctacttacatcttttatctgtgtctgtgtatcatgaaaatgtctattcaaaatatcaaaacctttcaaatatcacgcagcttatattcagtttacataaaggccccaaataccatgtcagatctttttggtaaaagagttaatgaactatgagaattgggattacatcatgtattttgcctcatgtatttttatcacacttataggccaagtgtgataaataaacttacagacactgaattaatttcccctgctactttgaaaccagaaaataatgactggccattcgttacatctgtcttagttgaaaagcatattttttattaaattaattctgattgtatttgaaattattattcaattcacttatggcagaggaatatcaatcctaatgacttctaaaaatgtaactaattgaatcattatcttacatttactgtttaataagcatattttgaaaatgtatggctagagtgtcataataaaatggtatatctttctttagtaattactaaaaaaaaaaaa

SEQ ID NO: 46499 - DNA, 796 bp, Homo Sapiens
tctagcgaggtgacagcgtagaaccaggacctcataatacccaccctgacctgctgtaaaagacctggaacaaacaaaaatgattacacctacagcaggtgaagatgcacaccatgtcctcctcgcatctcttctacctggcgctgtgcctgctcaccttcaccagctctgccacggctggaccggagacgctctgcggggctgagctggtggatgctcttcagttcgtgtgtggagacaggggcttttatttcaacaagcccacagggtatggctccagcagtcggagggcgcctcagacaggcatcgtggatgagtgctgcttccggagctgtgatctaaggaggctggagatgtattgcgcacccctcaagcctgccaagtcagctcgctctgtccgtgcccagcgccacaccgacatgcccaagacccagaaggaagtacatttgaagaacgcaagtagagggagtgcaggaaacaagaactacaggatgtaggaagaccctcctgaggagtgaagagtgacatgccaccgcaggatcctttgctctgcacgagttacctgttaaactttggaacacctaccaaaaaataagtttgataacatttaaaagatgggcgtttcccccaatgaaatacacaagtaaacattccaacattgtctttaggagtgatttgcaccttgcaaaaatggtcctggagttggtagattgctgttgatcttttatcaataatgttctatagaaaagaaaaaaaaaatatatatatatatatatccttagtccctggcctctca

SEQ ID NO: 46500 - DNA, 838 bp, Homo Sapiens
gcttttctaggctacaattttctcccaggaagctttgatttttaccgtttcttccctgtattttctttctctactttgaggaaaccaaagtaaccttttgcacctgctctcttgtaatgatatagccagaaaaacgtgttgccttgaaccacttccctcatctctcctccaagacactgtggacttggtcaccagctcctcccttgttctctaagttccactgagctccatgtgccccctctaccatttgcagagttctgcacagttttctggctggagcctagaacaggcctcccaagttttaggacaaacagctcagttctagtctctctggggccacacagaaactctttttgggctcctttttctccctctggatcaaagtaggcaggaccatgggaccaggtcttggagctgagcctctcacctgtactcttccgaaaaatcctcttcctctgaggctggatcctagccttatcctctgatctccatggcttcctcctccctcctgccgactcctgggttgagctgttgcctcagtcccccaacagatgcttttctgtctctgcctccctcaccctgagccccttccttgctctgcacccccatatggtcatagcccagatcagctcctaacccttatcaccagctgcctcttctgtgggtgacccaggtccttgtttgctgttgatttctttccagaggggttgagcagggatcctggtttcaatgacggttggaaatagaaatttccagagaagagagtattgggtagatattttttctgaatacaaagtgatgtgtttaaatactgcaattaaagtgatactgaaacaca

SEQ ID NO: 46501 - DNA, 573 bp, Homo Sapiens
aatatattgacggaagaatagagaggaggcttgaaggaaccagcaatgagaaggccaggaaaagaaagagctgaaaatggagaaagcccaagagttagaacagttggatacaggagaagaaacagcggctccactacagacccagccccaggttcaatgtcctccgaagaatgaagtctttccctggtgatggtcccctgccctgtctttccagcatccactctcccttgtcctcctgggggcatatctcagtcaggcagcggcttcctgatgatggtcgttggggtggttgtcatgtgatgggtcccctccaggttactaaagggtgcatgtcccctgcttgaacactgaagggcaggtggtgggccatggccatggtccccagctgaggagcaggtgtccctgagaacccaaacttcccagagagtatgtgagaaccaaccaatgaaaacagtcccatcgcttctaacccgtaagttaacagtcagaaaattacatgaaagcagtttagcattggaaggaagctcagaactttaaactggcttgtcgccgcccaggatggacctggggtaa

SEQ ID NO: 46502 - DNA, 600 bp, Homo Sapiens
cactaggtcttcccgtcacctccacctctctccatgacccggctctgcttacccagacccgaagcacgtgaggatccgatcccagttcctccaaggggcctgggtgctggggaggggtcaggtagtccagtgcgtccacctgtatccacctggggccctagctgggcccagctcctggacagtgtcctatggctgggggcactaggactgacaatccaggcagtcttttccaccactggcccagccctgctgctgcttctggtcagcttcctcacctttgacctgctccataggcccgcaggtcacactctgccacagcgcaaacttctcaccaggggccagagtcagggggccggtgaaggtcctggacagcaggaggctctactcctgcaaatgggtacagtctcaggacaacttagcctccaggacgcactgctgctgctgctcatggggctgggcccgctcctgagagcctgtggcatgcccttgaccctgcttggcctggctttctgcctccatccttgggcctgagagcccctccccacaactcagtgtccttcaaatatacaatgaccacccttcttcaaaaaaaaaaaaaaa

SEQ ID NO: 46503 - DNA, 767 bp, Homo Sapiens
  misc_feature (698)..(698): n is a, c, g, or t
  misc_feature (706)..(706): n is a, c, g, or t
ttttttttttttttttttcttgtttgttaaatcaagctttattgataaaatggaattcagaatatcttactaggaacagcagcaggcccagccaatcatgatagcaaaaatgtggcagtttcctactatatgtaggaagctgctgcttatcaattagtaattaaatgtaaggacttgaaaagaggtgcaaagaaacaaggcatttagccccaagattgagattcttatgaatacactgtattattacctgcaatactcatggaaacaacgaaggaacatcctgaaagacagttaaatgaagggactggctttatcaacaatgccaactcccctaccaagaacatttaagatagttttcaataactccttggatgttcagctttgtaagattttgaggttattttccataatcatctgcacatttgagcgtgtagctgacatggctgctgctctccctgttccaaccccaagtccaaacacaacatgacttgaaagggctatatatctgttgcatcacacaataagccaaacatttcttgtaactttgatagtgatttaaagcagttcataattaaatatgagcattttgtacaaggacaattacactttacaaaaaaacaaaatcatacaacaaaaattgctggagtctgatttacaacacgaattatggtttgaaatcacgcttacataagtctcanatttacanaaaaaaaaaaaaaatcagttctgggctagctgttgtactgctgaagttctctgatgtatca

SEQ ID NO: 46504 - DNA, 726 bp, Homo Sapiens
gcacgattctaccaggccctccagctgcgtggtctccgcagaccaggctctgtgtgggctagaggaatgtcgcccattactcctcaggcctggccctcgggcctccgtgatgggagccccccaggaggggtccagatgctggaaggggccgctttctggggagtgaggtgagacatagcggcccaggcgctgccttcactcctggagtttccatttccagctggaatctgcagccacccccatttcctgttttccattcccccgttctggccgcgccccactgcccacctgaaggggtggtttccagccctccggagagtgggcttggccctaggccctccagctcagccagaaaaagcccagaaacccaggtgctggaccaggccctcagggaggggaccctgcggctagagtgggctaggccctggctttgcccgtcagatttgaacgaatgtgtgtcccttgagcccaaggagagcggcaggaggggtgggaccaggctgggaggacagagccagcagctgccatgccctcctgctccccccacccagccctagccctttagcctttcaccctgtgctctggaaaggctaccaaatactggccaaggtcaggaggagcaaaaaatgagccagcaccagcgccttggctttgtgttagcatttcctcctgaagtgttctgtttggcaataaaatgcactttgactgttcaaacacacacacaag

SEQ ID NO: 46505 - DNA, 769 bp, Homo Sapiens
attccgagctagagctcttcttcctacgtttgtagtcagcacactgggaaaccgggccagcgtggggctccctgccttctggactcctgaaggtcgtggatggatggaaggcacacagcccgtgccggctgatgggacgagggtcaggcatcctgtctgtggccttctggggcaccgattctaccaggccctccagctgcgtggtctccgcagaccaggctctgtgtgggctagaggaatgtcgcccattactcctcaggcctggccctcgggcctccgtgatgggagccccccaggaggggtcagatgctggaaggggccgctttctggggagtgaggtgagacatagcggcccaggcgctgccttcactcctggagtttccatttccagctggaatctgcagccacccccatttcctgttttccattcccccgttctggccgcgccccactgcccacctgaaggggtggtttccagccctccggagagtgggcttggccctaggccctccagctcagccagaaaaagcccagaaacccaggtgctggaccagggccctcagggaggggaccctgcggctagagtgggctaggccctggctttgcccgtcagatttgaacgaatgtgtgtcccttgagcccaaggagagcggcaagaaggggtgggaccaggctgggaggacagagccagcagctgccatggccctccctgctccccccaccccagccctagccctttagcctttcaccctgtgctctggaaagctac

SEQ ID NO: 46506 - DNA, 630 bp, Homo Sapiens
cattaatacagctcctaaaagttgtgtgggatttgcgttgcataaatagccatgtgaattccacaagaagcaccagggaaagtttagagatttgcggcaatggaccgaagaacgggccaggaagtcctccaatttcctttggtctttccaggagattggactacacattgtaaagactgactgggtttcaactagtcaaaaagcactttcttctgttttcaatccctgttcgatttgtgcttctgtgcttgtaggagagatggccagggtggcagccctcatgcaggttgaagtatatgtagcctcagcctgatattcttggtgcgaaggtaaaaaaaaaaaaataaataaaaccattggcctggttgagggcgtgaccaccaagacatatatgttgcgcccgtgttcatcctgtgtatttatactgtatatgtagagtctagatttatatactgcaatgtaaaatatatatatatttaccttttttaaagacaatggaaattccaagtagctaaaacttagcttcatttatttaatgccactttaaatgtcttaaatttgtttcctggtggacagccgggtaatgcttttagctgctcgcatgcttgtctttctgcatctccatcatct

SEQ ID NO: 46507 - DNA, 628 bp, Homo Sapiens
gaattatrttgattgtgtgcgataggttaggcgatttgatactttctaagtcttgtgaaaatgccattgtgtgctggaaacctggcaagatggaagatgatatagataaaattaaacccagtgaatcaaatgtgactattctatgggcgatttgattacagccagatgtgacatttggtacatgaggttttctatggatttctggcaaaasatgcttgcattgggcaatcaagttggcaaactttatgtttgggatttagaagtagaagatcctcataaagccaaatgtacaacactgactcatcataaatgtggtgctgctaattcgacaaaccagttttagcagggatagcagcattcttatagctgtttgtgatgatgccagtatttggcgctgggatcgacttcgataaaatacttttgcctaatcaaaattagagtgtgtttgttgtctgtrtaaaatagaattaatgtatcttgctagtaagggcacgtagagcatttagagttgtctttcagcattacaatcaggctgagctgaatgtagtgatgtttacattgtttacattctttgtactgtcttcctgctcagactctactgcttttaataaammtttatttttgtaaa

SEQ ID NO: 46508 - DNA, 728 bp, Homo Sapiens
aatgatgtttgggacaagctcagtgtcattgcagaagactctgagagcggcaagcagaatcctggtgacagctgcagcctcgggaccccgcctgggcaggggccccaaagctaggctctgagaaggaaacacactcggctgggcacagtgacgtactccatctcacatctgcctcagtgagggatcagggcagcaaacaagggccaagaccatctgagccagccccacatctagaactcccagaccctggacttagccaccagagagctacattttaaaggctgtcttggcaaaaatactccatttgggaactcactgccttataaaggctttcatgatgttttcagaagttggccactgagagtgtaattttcagccttttatatcactaaaataagatcatgttttaattgtgagaaacagggccgagcacagtggctcacgcctgtaataccagcaccttagaggtcgaggcaggcggatcacttgaggtcaggagttcaagaccagcctggccaatatggtgaaacccagtctctactaaaaatacaaaaattagctaggcatgatggcgcatgcctataatcccagctactcgagtgcctgaggcaggagaattgcatgaacccgggaggaggaggaggaggttgcagtgagccgagatagcggcactgcactccagcctgggtgacaagggagactccatccccaaaaaacatccagacaaa

SEQ ID NO: 46509 - DNA, 640 bp, Homo Sapiens
  misc_feature (629)..(629): n is a, c, g, or t
gtttgtttttgatgctgtaacagatgtcatcataaaaaataatctaaaagattgtggtctcttttaagttttgcagttcatggtaaaatgcattttcaaaccaaatgagtacttatatatggatctctgtagactagagtcttgcagcaacacagaatgtaatataaggcaaatgcatctgggacttgaccaaagttgttctgttttgtttttttaactgaaagtaacagaaggacctttcttaaatgtgacagatggtcctgcagtgtgaaactgaaggacagtgttaaagctgggctctagtatattgatgatttctgcataagtgtaaatatgcaaatgtatgtatacatgtatttatgactttagttttcgacattatttttaggttttaagagtggcaacttaggattttagggtgatggctttggaaataacataaatataccttgtactgaatgacagactattactacgtttgccagttttaaacagctttatttatgttcatgtcctgtaaatttttaagtacagtaattaatattaggaaacattacagcccttatctagattatatgtatacttgtattaataaaaatgttatttgtacaaacattgcacagactatnttaataacatg

SEQ ID NO: 46510 - DNA, 977 bp, Homo Sapiens
cggacgaggcaccaacaggttggagtatgaggcgcgaaaccagaagaaggaagccaaggagctggccttcctggaggctgccaggcagcaggcggcacagcccctgggggagcgcgatggtgacttctaacctggcagaggccctggccggccctccccctgctctgcttctgcgccttctgcgtttggacataggactctgcagggccgccctctctaactggcctggctctggaagggctggtgaggactctgcctccttgcctgcctacaaggtgcctggtttgcagcaggctctccgctctttccagcaaagctgctcagagagggtgtccagcacagtggagaggccggaagtgagacgggcagacggcacctgcagcctgaaacgcaccgctcctgcgtgcgcccccacctggtccccggatgcccccaccacctggacagaggccacactgactgcccacccagctgtggcgggaggtgcagagcagagggctttagggagcagtgactgcggtcacccctttagttctctgggtgtagaccacaccacctcccactgggcaccccccaacacggtgtcctgccacccagcgcctggctccaggaaaacacgcttgccttccttcccggcagcttcgccactctccttatggactctgttctgtttgtacatggctgacggaaatctctttggtacaaccgaataaagctggtggcagtgctgcgcggggctccagccctggctgggaaggaccaggaaccacttcgcaaggaaaccctcttggccctgccccaccatgcacccaaaaccgggaagggcagcggtaaaaaaaaaacacccacaaaatccacaaccgcgagccccgcgcagcgtcttttttcctttttccacacgaaaatatttattgggcgcccccacttgcgcagcccccgaatctataaacccccccccccagaaaacaactcctgtt

SEQ ID NO: 46511 - DNA, 887 bp, Homo Sapiens
  misc_feature (770)..(770): n is a, c, g, or t
ctgcaggaacagaatgccgtaagtctgtcccatgtggatgggaaagagttgtgaagcaaaggttatttgggaagacagcaggaagatttgatgtgtactttatcagcccacaaggactgaagttcagatccaaaagttcacttgctaattatcttcacaaaaatggagagacttctcttaagccagaagattttgattttactgtactttctaaaaggggtatcaagtcaagatataaagactgcagcatggcagccctgacatcccatctacaaaaccaaagtaacaattcaaactggaacctcaggacccgaagcaagtgcaaaaaggatgtgtttatgccgccaagtagtagttcagagttgcaggagagcagaggactctctaactttacttccactcatttgcttttgaaagaagatgagggtgttgatgatgttaacttcagaaaggttagaaagcccaaaggaaaggtgactattttgaaaggaatcccaattaagaaaactaaaaaaggatgtaggaagagctgttcaggttttgttcaaagtgatagcaaaagagaatctgtgtgtaataaagcagatgctgaaagtgaacctgttgcacaaaaaagtcagcttgatagaactgtctgcatttctgatgctggagcatgtggtgagaccctcagtgtgaccagtgaagaaaacagccttgtaaaaaaaaaagaaagatcattgagttcacgatcaaatttttgttctgaacaaaaacttctggcatcatanacaaattttgttcagccaaagactcagaacactacgagaagtatgacgatacctttttagaaatctgaagaaatccggaacaaaagtagaaagttgtgggaaagggaaagaacattt

SEQ ID NO: 46512 - DNA, 944 bp, Homo Sapiens
cgagaccgcgagacatctacgcagcgaaatcgagcctggccttgagggtccacaccgcgagggaagatgcgtgcgcccattccagagcctaagcctggagacctgattgagatttttcgccctttctacagacactgggccatctatgttggcgatggatatgtggttcatctggcccctccaagtgaggtcgcaggagctggtgcagccagtgtcatgtccgccctgactgacaaggccatcgtgaagaaggaattgctgtatgatgtggccgggagtgacaagtaccaggtcaacaacaaacatgatgacaagtactcgccgctgccctgcagcaaaatcatccagcgggcggaggagctggtggggcaggaggtgctctacaagctgaccagtgagaactgcgagcactttgtgaatgagctgcgctatggagtcgcccgcagtgaccaggtcagagatgtcatcatcgctgcaagcgttgcaggaatgggcttggcagccatgagccttattggagtcatgttctcaagaaacaagcgacaaaagcaataactgaaaaagactgtcctgtcagcgatgactttatacatcaagggggtcttgttttgctagagagtttggggtttggtttgtggatttcattgtgatttataataaggcttattttcacagaataaaataaagcaaaacgagggaggattttattgggggaagtgcagcaagaactgcctggtgtgaagtctgttcagggaacagccgggctgtcttcctgggtcagggattgtctttcactttctttttgcgtgctgtgttctttgcattgcaggaggcagagtccagcttcagttatctcaagtagaagggcgttttctgtcttccaggaaaccctgggcgggccggaaagggtgcacccgaaaggacttattacccccaggaaccgg

SEQ ID NO: 46513 - DNA, 813 bp, Homo Sapiens
tccggaattcccgggatcagggattgaaaatagtacagtgactctgtctcacccaaatgggaccacgtctgttaccagcatcctccatatcaaagaccctaagaatcaggtggggaaggaggtgatctgccaggtgctgcacctggggactgtgaccgactttaagcaaaccgtcaacaaaggctattggttttcagttccgctattgctaagcattgtttccctggtaattcttctcgtcctaatctcaatcttactgtactggaaacgtcaccggaatcaggaccgagagccctaaataagtcacacagcaccctgaaagtgattccctggtctacttgaatttgacacaagagaaaagcaggaggaaaaggggccattctccaaaggacctgaaagagcaaaagaggtgggagcgaaagccttaaggatcccacgactttttactgccatctgagctactcagtgtttgaatcccaagaggaagtcagtttacctctcaggtctgttgtaggacttgattttgtaaagcaatgccatgttatgtggttgaaagggcactggacttagttagtatcaggagcactgagctcacagactgacttgggctcctactggtggggamctctgttagtcactttacctcatccaaagtataaaggaattggaccaaataatttaccacatagctctaaaacttaatttaaaatgtaattccagaaaaaaaaagggaataagcaaagggggaagaattgaaagagagagagaagaaagaatacagagagcttaccttttgcctttctgttgatgtta

SEQ ID NO: 46514 - DNA, 788 bp, Homo Sapiens
ccagaaccctgactcttgagaatcaagaaaacacccagaaaggccttaatgacctcataggcactcttccaaaaagacaacagaactggaatgagaggcctgggtctgtctcctgccttagcaggcctatcaatttcttgtcaatctctttttttccttgctcacattaaaaggaagcatggagttctaatgctcccataaactatgtattttggcaagacacttcactactccaggtctcactttccccatctgtaaaacagggtttggactaggtgttccctggtattctgtgatctgcctcttgctgccattctttctctcctctgcttctctgtatttttcttctgttatccctgggggtgctcaggttcacttgattgtctgtatttctgtgtggttgtagcaaggactcagcctcatgtagcacgaataggggtgtggttcatggcgtgttgacccagcagagcactccctcccactaacttgttctgcatgtgtagagtctccccattttttttaacgcaaccctttcccctttttcctaccccacagctctgttccatgtaagttgccaacagtttcactgaacagtggggtatgtgatggttttggcatgacatcttcagtatgagggggacagtttgacttcactttgagggtgtgatgtctgtagctatgtggaaggtaaaaatagtggtgtgatcatgaaccaaaggaatttatgttttgtaacttgggtactttattttgcattttgttatactattaaataattttytcctgtt

SEQ ID NO: 46515 - DNA, 707 bp, Homo Sapiens
gaagaaggtgctttctgcttactgacttaggcaatacaccaagggcgagattttatatgcacatttctggatttttttatacggttttcattgacactcttccctcctcccacctgccaccaggcctcaccaaagcccactgccatggggccatctgggccattcagagactggagtgagatttgggtgtggagggggaggcgccaaggtggaggagcttcccactccaggactgttgatgaaagggacagattgaggaggaagtgggctctgaggctgcagggctggaagtccttgcccacttcccactctcctgccccaatctatctagtacttcccaggcaaataggcccctttgaggctcctgagtgccctcagatggtcaaaacccagttttccctctgggagcctaaaccaggctgcatcggaggccaggacccggatcattcactgtgataccctgccctccagagggtgcgctcagagacacgggcaagcatgcctcttcccttccctggagagaaagtgtgtgatttctctcccacctccttccccccaccagacctttgctgggcctaaaggtcttggccatggggacgccctcagtctagggatctggccacagactccctcctgtgaaccaacacagacacccaagcagagcaatcagttagtgaattgaatggaaataaacgctttagttataa

SEQ ID NO: 46516 - DNA, 867 bp, Homo Sapiens
gaactccatgaaagacactgtttctcctgttggctcacagggctgaaaggggcttttgtcctcctgggtcagggagaacgcggggaccccagaaaggtcagccttcctgaggatgggcaacccccaggtctgcagctccaggtacatatcacgcgcacagcctggcagcctggccctcctggtgcccactcccgccagcccctgcctcgaggactgatactgcagtgactgccgtcagctccgactgccgctgagaagggttgatcctgcatctgggtttgtttacagcaattcctggactcgggggtattttggtcacagggtggttttggtttagggggtttgtttgttgggttgttttttgttttttggttttttttaatgacaatgaagtgacactttgacatttcctaccttttgaggacttgatccttctccaggaagaaggtgctttctgcttactgacttaggcaatacaccaagggcgagattttatatgcacatttctggatttttttatacggttttcattgacactcttccctcctcccacctgccaccaggcctcaccaaagcccactgccatggggccatctgggccattcagagactggagtgagatttgggtgtgggaaggggaaagcgcccaaggtggaaagaactttcccacttccaggaatggtggatgaaaggggaccagaattgaaggaggaaagtgggcctccggaggctgccagggcctgggaagttccttggccccggttttcccaatccttcctgggcccccaattctattccaaggaactttcccccggggcaaaaatagggccccccctttagagggcctccctgaaaggggcccccccc

SEQ ID NO: 46517 - DNA, 565 bp, Homo Sapiens
  misc_feature (488)..(488): n is a, c, g, or t
  misc_feature (499)..(499): n is a, c, g, or t
gtgcgtttggtttgcttttttgggacttgcctgtgctcaaagcccagtgtctcatggcagaaacaagcaggaccgggctttgtctcttgggcccagtactgtaagagctgagtttcctttcctcagcacttaagaccatggttagctatggatgtagtaggacctcggaggtccccactctctcatctctgggacttgatacttcctcattagtttaagatatgtttgcatgagttgctagactattcatattacatattacctattacatatccccaagatgaattcagaaccagaatcttcttttaaaaatttgactacggagttaaggaggcaggagaagtttttattttcttgcctactgttttgctagagaattagcattgaaagttctggtgctatggttctctctgacgcacacacagaggccgttggagggcttctgaaaactcctgtgcatgcctgatgagttcctgctggcgacccanggaccacactntgagaaccactgttctagtataaaccagacatttaaaactccacttttaatctgtgactgtaattg

SEQ ID NO: 46518 - DNA, 582 bp, Homo Sapiens
catagctcaccgcagctttgagccgtcttcccactcagtctactaagcttggactataggccaagactatagagtggtccttctttccattcttttgggaccatgagaggccacccatgtttcctgcccctgctgggccccctgctgctcagaaggcatggtctgaggcttccaccttgggtcgtgagcctggcgtggtggtttctggccagcatgggggttgggatgctgtggctcaggccttctgcatggtttcccacactctcttctcctcctcaggactggatcatcgcgcctgaaggctacgccgcctactactgtgagggggagtgtgccttccctctgaactcctacatgaacgccaccaaccacgccatcgtgcagacgctggtccacttcatcaacccggaaacggtgcccaagccctgctgtgcgcccacgcagctcaatgccatctccgtcctctacttcgatgacagctccaacgtcatcctgaagaaatacagaaacatggtggtccgggcctgtggctgccactagctcctccgagaattcagaccctttggggccaagtttttctgg

SEQ ID NO: 46519 - DNA, 395 bp, Homo Sapiens
  misc_feature (385)..(385): n is a, c, g, or t
aacaggggcctctgcctcagtttgcccgggagccagccagggcccatcctaatttggagcacagtcttcccggtgcctagacatgccaaggcccctcccacgtggtacaccctctccgtttagtacctgaccacctgtttcaaaacgcaggtgtttctggtttagaaacttggaaggcggaatgtgttttcgtgtcttctaggaagggtctgctgaggaccagaccacgtaagcctgagtggatcctgactcagctgcagcccttacctgcctcgtgctgatgatctatgcatggcgttatgtagatcacgtgcggcagagacagccactgtcctgtgtgcgggtttttaaaacagctgccctggatgaaacggaataaaccagngatgctaaaa

SEQ ID NO: 46520 - DNA, 703 bp, Homo Sapiens
ttatttcctctgtcacttcaaaactccagcttgcccaataaggatttagaaccagagtgactgatatatatatatattttaattcagagttacatacatacagctaccattttatatgaaaaaagaaaaacatttcttcctggaactcactttttatataatgttttatatatattttttttcctttcaaatcagacgatgagactagaaggagaaatactttctgtcttattaaaattaataaattattggcctttacaagacttggatacattacagcagacatggaaatataattttaaaaaatttctctccaacctccttcaaattcagtcaccactgttatattaccttctccaggaaccctccagtggggaaggctgcgatattagatttccttgtatgcaaagtttttgttgaaagctgtgctcagaggaggtgagaggagaggaaggagaaaactgcatcataactttacagaattgaatctagagtcttccccgaaaagcccagaaacttctctgcagtatctggcttgtccatctggtctaaggtggctgcttcttccccagccatgagtcagtttgtgcccatgaataatacacgacctgttatttccatgactgctttactgtatttttaaggtcaatatactgtacatttggataataaaaataatattctccccaaaaaaaaaaaaaaa

SEQ ID NO: 46521 - DNA, 678 bp, Homo Sapiens
  misc_feature (632)..(632): n is a, c, g, or t
tgatgtgtagtcttgtggtagatttgtgcatactgtaagcaaattgcttagcttctctagacatcagtttccacatctgaaaaataagaagatgagagtacacggttgttatgaacaaatgacttaatgctttttaagcacgttgcatgacatctggaacacagaaagccctcaatacattgaagctcttaggattttcacgatgttcctgtctgctcaatgcatgctttctttattgttctgacagttgtgtggtaacaagctaatatgcttccagttgacttccagtctaccctggtgttagaaaccgtttcatctcttattgtaaatttgagtgcttgttgttttttatatttgtgatgactcttccagcagttgttgacaattgttagaggtttgacttttaaataattacttattttttctgattgtggttcagtttaactgaagaatatcctgagattgtaagaaaagcattttttacaaggtatcacttgtgatcatttatctttctaaattctatttttaatactgttccaccaaagtgatgcagtggttaccatgacaccctaatttcatgtgtttttgtatttatgaaaatagtttcattgtcatttattggcggtatacanagtaaaatgttatacatgtgaagttatacacataatatatgctaat

SEQ ID NO: 46522 - DNA, 755 bp, Homo Sapiens
aggaattggacagggcaagtaactccctgatttctggactgagtcaagatgaggaggaccctccgctgcccccgacgcccatgaacagcttggtggatgagtgccctctagatcaggggctgcctaaactctctgctgaggccgtcttcgagaagtgcagtcagatctcactgtcacagtctaccacagcctccctgtccaagaagtgactgttgagaggcgaggaggtagtgggtgaggctacctgactcacttcaaatgcatgttttgagatgtttggagattcagcaattctgtcttcattgctccaggatctggtatactgttctcataaaactgagaggagaaaaaaagtgaaagaaagcagctgctttaagaatggttttccaccttttccccctaatctctaccaatcagacacattttattatttaaatctgcacctctctctattttatttgccaggggcacgatgtgacatatctgcagtcccagcacagtgggacaaaaagaatttagaccccaaaagtgtcctcggcatggatcttgaacagaaccagtatctgtcatggaactgaacattcatcgatggtctccatgtattcatttattcacttgttcattcaagtatttattgaatacctgcctcaagctagagagaaaagagagtgcgctttggaaatttattccagttttcagcctacagcagattatcagctcggtgacttttctttctgccaccatttaggtgatgg

SEQ ID NO: 46523 - DNA, 461 bp, Homo Sapiens
tttgttcaaagctgttggcctctgcaaaggaaataccagttctgggcaatcagtgttaccgttcaccagttgccattgagggtttcagagagcctttttctaggcctacatgctttgtgaacaagtccctgtaattgttgtttgtatgtataattcaaagcaccaaaataagaaaagatgtagatttatttcatcatattatacagaccgaactgttgtataaatttatttactgctagtcttaagaactgctttctttcgtttgtttgtttcaatattttccttctctctcaatttttggttgaataaactagattacattcagttggcctaaggtggttgtgctcggagggtttcttgtttcttttccattttgtttttggatgatatttattaaatagcttctaagagtccggcggcatctgtcttgtccctattcctgcagcctgtgctgagggtag

SEQ ID NO: 46524 - DNA, 893 bp, Homo Sapiens
  misc_feature (720)..(720): n is a, c, g, or t
  misc_feature (763)..(763): n is a, c, g, or t
  misc_feature (840)..(840): n is a, c, g, or t
ccacgcgtccgagcaaaaacaaaaccaccaccaccccagagaaaaccatgtactaattggagtggggtacccccattcacaggttcccaggtcccctggctttggctgatttcaaaatatagagccctttcttgccagtacatccaagtttaaaattatcagcgaaatggtccatgtttttccaattacctgctgacacggttctaagctaagtgaaggggaagatctgagagcgtgctgtttgtggctgttgatgcatattcgtgatgtaacaggtcctggggcctcactttaccccatttgtaaaatggggctaatgtcacctgcctcttacctacctcagagggatttggtgaagcaaactgttaatcttcgaaaacgaccatttcacttcttggatatcaagtgctaacccagtatgttcttcttttttatgtaagggacagctttggagaaaggactgctctgtggagcagagtcctttctgctggtgaggacagcatttctgagcagggctttgttctctatgtgcattaggacttttatcatgcccttgttctgtgtgtagttacttgacagcatcaaatgccgcctcttcctaatgtccttcaagttttcatgaactagcaaccccaccttccaccatggttctgggcgcctgattttgctgtgactcccagacccagccactgtttctgccaccctgtaacaggccattanagctccccagtgttcagcctccttcactccctttggtttcccntgttgctatgtgtcacctggggccctacagacaggggcacacgccttaatggatgtggtgtacccattgagaatganaaatggggtagatggggaacggagaccatcaaggccacacccccctttcttaa

SEQ ID NO: 46525 - DNA, 736 bp, Homo Sapiens
ggggctgattttatggctaagaagttttcactggatgcgttaataacccatgttttaccttttgaaaaaataaatgaaggatttgacctgcttcactctgggaaaagtatccgtaccgtcctgacgttttgaggcaatagagatgccttcccctgtagcagtcttcagcctcctctaccctacaagatctggagcaacagctaggaaatatcattaattcagctcttcagagatgttatcaataaattacacatgggggctttccaaagaaatggaaattgatgggaaattatttttcaggaaaatttaaaattcaagtgagaagtaaataaagtgttgaacatcagctggggaattgaagccaacaaaccttccttcttaaccattctactgtgtcacctttgccattgaggaaaaatattcctgtgacttcttgcatttttggtatcttcataatctttagtcatcgaatcccagtggaggggacccttttacttgccctgaacatacacatgctgggccattgtgattgaagtcttctaactctgtctcagttttcactgtcgacatttttcctttttctaataaaaatgtaccaaatccctgggggtaaaagctaggggtaggtaaaaggatagactcacattttacaagttagtgaaaggtccaagaagttctaaatacagggaaaatttctttaggaaactccaaataaaatggcccccccattttaacc

SEQ ID NO: 46526 - DNA, 700 bp, Homo Sapiens
  misc_feature (583)..(583): n is a, c, g, or t
aggaactcaaataaaatgccccacattttactacagtaaatggcagtgtttttatgacttttatactatttctttatggtcgatatacaattgattttttaaaataatagcagatttcttgcttcatatgacaaagcctcaattactaattgtaaaaactgaactattcccagaatcatgttcaaaaaatctgtaatttttgctgatgaaagtgcttcattgactaaacagtattagtttgtggctataaatgattatttagatgatgactgaaaatgtgtataaagtaattaaaagtaatatggtggctttaagtgtagagatgggatggcaaatgctgtgaatgcagaatgtaaaattggtaactaagaaatggcacaaacaccttaagcaatatattttcctagtagatatatatatacacatacatatatacacatatacaaatgtatatttttgcaaaattgttttcaatctagaacttttctattaactaccatgtcttaaaatcaagtctataatcctagcattagtttaatattttgaatatgtaaagacctgtgttaatgctttgttaatgctnttcccactctcatttgttaatgctttcccactctcaggggaaggatttgcattttgagctttatctctaaatgtgacatgcaaagattattcctggtaaaagaggtagctgtctcca

SEQ ID NO: 46527 - DNA, 683 bp, Homo Sapiens
  misc_feature (674)..(674): n is a, c, g, or t
actatttattacaacctcttatatggaaacatcagtgcttcacctgaggaagtgtatgcagtggcaaaattagctggacttcatgatgcaattcttcgaatgccacatggatatgacacccaagtaggggaacgaggactcaagctttcaggaggagaaaagcaaagagtagcaattgcaagagccattttgaaggaccccccagtcatactctatgatgaagctacttcatcgttagattcgattactgaagagactattcttggtgccatgaaggatgtggtcaaacacagaacttctattttcattgcacacagattgtcaacagtggttgatgcagatgaaatcattgtcttggatcagggtaaggtagccgaacgtggtacccaccatggtttgcttgctaaccctcatagtatctattcagaaatgtggcatacacagagcagccgtgtgcagaaccatgataaccccaaatgggaagcaaagaaagaaaatatatccaaagaggaggaaagaaagaaactacaagaagaaattgtcaatagtgtgaaaggctgtggaaactgttcgtgctaagtcacataagacattttcttttttttgttgttttggactacatatttgcactgaagcagaattgttttattaaaaaaaatccatacattcccacnaaaaaaaat

SEQ ID NO: 46528 - DNA, 735 bp, Homo Sapiens
ggctctgaccctgcaggactgggcagccagcggtgcaccatctcctaccgagccccagagctcttctctgtgcagagtcactgtgtcatcgatgagcggactgatgtctggtccctaggctgcgtgctatatgccatgatgttggggaaggcccttatgacatggtgttccaaaagggtgacagtgtggcccttgctgtgcagaaccaactcagcatcccacaaagccccaggcattcttcagcattgcggcagctcctgaactcgatgatgaccgtggacccgcatcagcgtcctcacattcctctcctcctcagtcagctggaggcgctgcagcccccagctcctggccaacatactacccaaatctgaaaaagcagcatgttgagaagatggccccttgtgccttggaaagaggttcccatccctcattggaatcaccacccattccatccaggacttctcttacacttgagggtagcggggtcaggacaatcatctcagtcctgcatcttttcttctgctttcttccctccaagagcaaaacctgggcaaggggacttactgagtgggggtgggtgggggttgggaaaagggaaactggtgggatatggaaacatgggctctgagcaggactgttgagctcacataggtgttcttgactccaaattctggggagcaggagaaatgtgttaacgagaattcaggtggaagcaggttggtgtacaaccaaaga

SEQ ID NO: 46529 - DNA, 730 bp, Homo Sapiens
ggaggaacctctggcttgctcattaagtcctactgattttcactatcccctgaatttccccacttatttttgtctttcactatcgcaggccttagaagaggtctacctgcctccagtcttacctagtccagtctaccccctggagttagaatggccatcctgaagtgaaaagtaatgtcagattactcccttcagtgatttcttgtagaagtgccaatccctgaatgccaccaagatcttaatcttcacatctttaatcttatctctttgactcctctttacaccggagaacggctccagctgttctagctctctttcagttctttgaaccttcccaccttagggtctataaggttccctctgcccaaattgttctactctcccttcttcttcaacacatccttcagtttaagcacttgcttctctcagtttaaactccacttccttagggatgtctctgtgacctccctgtgctggattagcttccctactctatgctcttgtaaaacactatctacttcctttgtcataaactcatcattttcctataaacattaatattgtcctcctgctagaatgtaagctccgtgagagcaaggatcctcctgtttaccctgtacctccaatgtctggcacttgtaggtgctcaaatattcgttgaatgaatgaaaaatccatattgtaattgatgtcctctggccacatagttttaaaattaggtgattgatac

SEQ ID NO: 46530 - DNA, 630 bp, Homo Sapiens
  misc_feature (617)..(617): n is a, c, g, or t
aacaaaatgcttaactttatctcttaatttctaaaggtaaataacctaggttcagcttttgcttaaacattaaatatcttttccattttttaatgtttgtaagctagatatgccagctttgtttctacattgcaaccaaaaactgtttcttttcacttaattataaaaccagtaattcatttactcttgcccaaaactatacactgtatttctgttatagtaacaaaatagagttatgtagaattgtatggaactcaaatttaaaccatgctttcttgtagtactgattgaaacttacacgttttattctactcatagtgagcttattcttattttggattgattttccaaaaccacagcttcagcagcaacaatcagaatgtccaaatgctgtcctttcccttacagagaagaacaatggtaactaaaagctgcatataactagcaataactacattgaacggtgtgcattgttcatgattgttgtgttttaagacttgtatataaactgctttttccaaactctgtataacttttaaatggctggaactactcgtataaggactagactgtatttttgacatgctcctatttttgtaacttgaaaaaataaaatnttgccttgtgaca

SEQ ID NO: 46531 - DNA, 648 bp, Homo Sapiens
  misc_feature (610)..(610): n is a, c, g, or t
cgtggcgcctcagcccaatcgtaatcacctttaatctcttgctcaaaataacccaaagtcaagccagagggagcctcgctaaccaccaaggcggtcctgcggccccgcgcagccctgagggcgtccagtcctccacgcgtggaggagaatccggcctccagacacaatctccagggcccactggatgggcctccgctccttctcactcccagtcctctggtgcatgcccccttcctggctgaagaacctgcaccagccgcccctccgcctgggaagctccctcctgtcattcactccgagacgcagcagcgttgccccaagagccctccctgctctgcaccccgaattcactctcagcccccacctagtttaaatcctggcccttctctctccctgatgttctgcttggttatttacttttaattcatgttggagctcctcctgccactgcaagagcaggagctgtgtgtcctggtcactgctgtggcatcccagggccggcgcggtgcccagcagccaggactggacagactcgggccacgctgcgcacgggctgggatgcgcttgctctgcttcctcttccgttgaatgggagtaaagaccactcctnccagggagcttgtggtttctcacaaaaaaaaaaaaaaa

SEQ ID NO: 46532 - DNA, 562 bp, Homo Sapiens
tttttaactagttctgaaagtgtcaagaatagcttccctttccaccctacctaggttccctccttgctggcataaaggccaagcagtgaaatgaaccttgggttagagttatggtaggcaaaaagaaaaggagaatttaggaaataaatatgctataaacaaggtacagtacagtgagagttaacaatcctaggaatcctgcctgtcacaagctcccagttccctgtcattttatcttcatgattagaactgatcttccatttaactattacagaaagcagtaactattgcaactatctaatagttcacacaaaagaattaaaagcttaaaaataatttttaggaaacacaatattcaaaatctaaacacactgataaattattaagattaagattatttatgtgataaatgaaatctcctaccaatccatccagcctttaccagggaagaaaagcaattatttcatttcagatagaaatacaaaaaaaaaaaaaatacttttcttagaagccagatatggtttaaatgttttattatccataatgatctaaactaataaga

SEQ ID NO: 46533 - DNA, 542 bp, Homo Sapiens
gcgtcgacaaactgttagtccccaaccttgtggtcacatcagaggtcaacagcagaacagaggcagctcagggttgtccgctctgattagcagaacgacagccccttcctcctcctccctccttcccatccctactcattagctccctgctcctgggatgcctcccaagcagcccaggcctctagcctccatggctgatgacctcagctttcacactggtgaagtctgtgtacccatactgcagccccatcccatgggcgccctgaagacccactgaggaattccgtagggtcttgttcccacgaccggagtgctggctctcacagtgaattttgatgcatttaaaataagattctgatgccagactgttaaaataggcgctggttctgaagcaccgatggaaacagattgatgcagatggaaggaggaagggagactgggctcactgatttccagccgcaccagtgtgctgttttcagatgtgattgaggggtgtctgcgctgcctcaatgtcaaggctttataaagtggtaattttgaaa

SEQ ID NO: 46534 - DNA, 763 bp, Homo Sapiens
ataaaaatacccctgaaaaagtgatgcctcaaggtcttgtcatctcttttgctatgagaatgctttacatgattgagcaagtgcatgactgtgaaatcattcatggagacattaaaccagacaatttcatacttggaaacggatttttggaacaggatgatgaagatgatttatctgctggcttggcactgattgacctgggtcagagtatagatatgaaactttttccaaaaggaactatattcacagcaaagtgtgaaacatctggttttcagtgtgttgagatgctcagcaacaaaccatggaactaccagatcgattactttggggttgctgcaacagtatattgcatgctctttggcacttacatgaaagtgaaaaatgaaggaggagagtgtaagcctgaaggtctttttagaaggcttcctcatttggatatgtggaatgaattttttcatgttatgttgaatattccagattgtcatcatcttccatctttggatttgttaaggcaaaagctgaagaaagtatttcaacaacactatactaacaagattagggccctacgtaataggctaattgtactgctcttagaatgtaagcgttcacgaaaataaaatttggatatagacagtccttaaaaatcacactgtaaatatgaatctgctcactttaaacctggttttttttcatttattggttatgtaaatggttggtaaaaataaatcccatgggaatatttccatgtaaaaaaaaaaaaaaa

SEQ ID NO: 46535 - DNA, 739 bp, Homo Sapiens
  misc_feature (505)..(505): n is a, c, g, or t
tccaggccacctggtccacttccccctcaagttcctagaggatgagtctttgctgcccccgctgggtagcaaggagggcatgatccccctagaagtgtggacatagttgaggcccccgtcagggagaggtcaccagctgctgtgccccaccacgtctggctccctgccccttaaccccaaggactgagggcagtgccctttgagatctggggaggcaggcattcctgaagggaactagaggtgttacagaggacccttacgtgagaaatagctgaaaagggcactcccaaccctgggctggggaggaggagagagtcccagagctcatcccccctgctgcccagtgcaaaccacttctccatgctgcaaaggagaagcacagctcctgccagggtgagcagggtcaagcctcttattccaggagaagggggctctgccccaggcccctactacccattgttcccttcctcttcctgcccttgaaccccctccctgtcccagggcnctcccagcccattgctgccaaggtggagggaaggataaagccacttctggcttcagcccccaccaggggaaggaaggagggcacattaactccctccaccagcctgctgacagacactaacttggtatccgttcaataagcatttcatacaatacaaggtgtagaacaaggacacaaaaacaaaacaagacacaaaccaatacaaaaaaggggcggggcgccaagaagttcccc

SEQ ID NO: 46536 - DNA, 944 bp, Homo Sapiens
  misc_feature (645)..(645): n is a, c, g, or t
  misc_feature (660)..(660): n is a, c, g, or t
  misc_feature (677)..(677): n is a, c, g, or t
  misc_feature (702)..(702): n is a, c, g, or t
  misc_feature (732)..(732): n is a, c, g, or t
  misc_feature (775)..(775): n is a, c, g, or t
  misc_feature (890)..(890): n is a, c, g, or t
  misc_feature (896)..(896): n is a, c, g, or t
  misc_feature (927)..(927): n is a, c, g, or t
  misc_feature (930)..(930): n is a, c, g, or t
  misc_feature (941)..(941): n is a, c, g, or t
gtgtgtgatttttttttaagttgatgtgcagtctaattgttgtttcataaaagttggatctgttcctatgcccaggatgattttgtgaaccgtgaagtacgtgagactagaagacgcccaaacaagtcagataatagtaactacaatggttgctgatgttgagattattgttgaactataattaataatttggatggcagaatttatctcttttttgtaaactctcataactgaattgcttaagtataatttataaaatttcagtgcagttcattcttaatggaaaatctgaaacctaaattgcagatttaaaaggtactgtacaaccattatatctgtaaataacttagcacctttttgtcacttagaataatatgtactactacttgagtgagcgcttttggaagttatatcaagttctagtgtttgcttcttagtaactgaactgaatttacagttctgtcctagacattttgcactaaagtagccgaatccactctcatgtcttttcgttaatgtgctctgtaccactggtgagtgctccatagtttccttacctgctgctacagaatgttattttacatccctatggctattgcccaggctacaaaaaaaggaaagctatatttgtatgcacactaaccntttgactgctaatgnatgtttctgcttgctgngccttggtatggctgctttttttgngctaataaaaggatgtttggggggtctccntgggatatctggtggttttataccatttgcaccaattttcttntttggtaaattgggaaatgggttttggggggttttttaaaataaagccttttaaccttaacccaacccttttttttttaggttaaatggccgaaaggttaaatggaaccaggccnaaatantttggcctttattccaaaaaaaaggccttanccntttaaaatttnaaa

SEQ ID NO: 46537 - DNA, 772 bp, Homo Sapiens
  misc_feature (307)..(307): n is a, c, g, or t
gggacttataatttctgttgtttctaattaaagtccctgaagatcatataccaaagtgtttgagaacttcatccaaacctactttaaagcattatgtgcaattaagttgttatgacataattatattgcctaattgttgggtcttttttcttgagcttataatgtacctggaaaataaacctcttgagaaaaagaaaagttcatactgattattggaaaaggactatatatgtgagcaagattgtgttttagagaggaaacttgaaactccaagaaagcacttgatgtttttatatgcttgtagcanattgatgttctaactgtagttttatagaaagtattaatgcttttatgtattttcaaactttcatatgttaaatggaaattgttttaaatgtgtttgagtttatgtaagcatgtatacactgtgctaaaagtcacatgtttcagtttgtgtataatataatatgcaatttttggtttaaaattttgtctttaaatattagtggcttaccttttaaaaagaaaaatccccacctgaaactgcacctaagtctaaatttccctggggtccttttctgaatcccatttgtaacccggccacctaaattttgaatggttaaacgggccttttttaaaaggggcctttaaatatccaaaccccgggaaatttccttttaaaagattgaaaaaaacccccctttttaaaggttggaaaaaaaatatttaaccccccaaaaaaaaaaaggggggccccttttgaatattggcg

SEQ ID NO: 46538 - DNA, 597 bp, Homo Sapiens
  misc_feature (597)..(597): n is a, c, g, or t
aaatagaaattgcaaatacatacatgtatggaaacatattcagattgggaaaaacaatggacattagtttttaaaaagttacgtggaagcaagatttctatatttgtttttttaaaggaagcagtcattctttctactaaatccatttcaagctagttctctgaaaattttgccatttatctacagaaatttgattataaatatgttcctttttcaaagaaactttattctagaacaaaatagtctatatggtacttgatctacatttaagtggaaaaattagcagtatttgaaagctcagtttatgtcattgtcttaacttcagatacaaataactgaacagaaagttttaacctttaatatctcatgttctgttttttattcagtattttcctttatgctaattcaattatatacttctgaatggcaccttactttttggaaacaaatcttctgttatttacaaaataataatttttaaaaaacatttaaaaaaatccaaagctgctctcgataatagtcaacatttgcatatatatggaatttcttactttttttctcccaaactctatttaataaacttattttaatgtttgn

SEQ ID NO: 46539 - DNA, 773 bp, Homo Sapiens
ctggaatagttcctcatttggttcctctgctcagccaccaggaagttaaagttcagactgctgcacttagagctgtgggcaacattgttactggaactgatgagcaaacacaagtagttttgaactgtgatgctctttcacacttcccagcactcctgacacatcccaaagagaaaattaataaagaagcagtgtggttcctctccaacatcactgcaggaaatcagcagcaggtacaggcagtaattgatgccaatcttgtaccaatgataatacaccttttggataagggggattttggcactcaaaaagaagctgcttgggccataagtaacttaacaattagtggaaggaaagatcaagtggcttaccttatccaacaaaatgttatcccacctttttgcaacttgctgactgtaaaagatgcacaagttgtgcaagtagtactcgatggactaagtaatatattaaaaatggctgaagatgaggcagaaaccataggcaatcttatagaagaatgtggagggctggagaaaattgaacaacttcaaaatcatgaaaatgaagacatctacaaattggcctatgagatcattgatcagttcttctcttcagatgatattgatgaagaccctagccttgttccagaggcaattcaaggcggaacatttggtttcaattcatctgccaatgtaccaacagaagggttccagttttagaaagatgttgtggaagttaggtacaatgcagcactgagatatatatatatatat

SEQ ID NO: 46540 - DNA, 863 bp, Homo Sapiens
ttctggatagcagcctagacccagaaccaacccaaagtaagcttgttcgcctggagccattgactgaagctgaagctagtgaagctacactgttttatttatgtgaacttgctcctgcacctctggatagtgatatgccacttttagatagctaaatccccaggaagtggactttacatgtatatattcatcaaaatgatgaactatttattttaaagtatcatttggtactttttttgtaaattgctttgttttgtttaatcagatactgtggaataaaagcaccttttgcttttctcactaaccacacactcttgcagagctttcaggtgttactcagctgcatagttacgcagatgtaatgcacattattggcgtatctttaagttggattcaaatggccatttttctccaattttggtaaattggatatcttttttttacaaatacgaccattaacctcagttaaatttttgtttgttttcctgtttgatgctgtctatttgcattgagtgtaagtcatttgaactaatggtataactccsaaagctttctctgctccagttatttttattaaatatttttcacttggcttatttttaaaactgggaacataaagtgcctgtatcttktaaaacttcatttgtttcttttggttcagagaagttcatttatgttcaaagacgtttattcatgttcaacaggaaagacaaagtgtacgtgaatkctcgctgtctgatagggttccagctccatatatatagaaagatcgggggtgggatgggatggagtwagcccatccagttagttggactagttttaataaaggttttccggtttgtgtttttttgaacatwctgttt

SEQ ID NO: 46541 - DNA, 423 bp, Homo Sapiens
tgaagcttatattggagcagacattaaagacaaattaaaatgttatgactttgatgtgcatacaatgaagacactaaaaaacattatttcacctccgtgggatttcagggaatttgaagtagaaaaacagactgcagaagaaacggggcttacgccattggaaacctcaaggaaaactccagattccagaccttccttggaagaaacctttgaaattgaaatgaatgaaagtgacatgatgttagagacatctatgtcagaccacagcacgtgactccagtcagtggtcctggtcccactgtcccagtgtaggttagtattccttcacatcctctccatggcttaagaatgtcccacttcctaacgtgactccaaactgcatctctacatttaggaacagagacccgccttaagagactggat

SEQ ID NO: 46542 - DNA, 574 bp, Homo Sapiens
tttttccctattagccagaaagcagatactagttttggtaaatgacttctctaaagaaaacactatgatttgaaaagactagcacacaaggacaaatatggaattaaataattcttctgagtagacctgtgttctctgtttcaagtatggaactgcataatggttcagtttgtatataagataataacttttttattgaaaaacttgtgaaggggaaagtcttgctatatccttgagccaggaatcaaggtctccattgttatcctagccccatagatgtttttacttagccctaagtttctaaagttttatgtagggttaatatgcagtacagtaatgaggcaggaatttgaatattttcttcattattggaaatgagtcttgtaatttaaagacaaaagcttgttttgagaagtaatattcatatacctgctgtaactgtgaatgtcactgctcttttctggttgtgctttgccacaaattttattgtgaattgtaaagatttgaaactcttaaaattagccatttatattttgaaaaaaaggggtgtgattattttaaaaaaaaaaaaaaa

SEQ ID NO: 46543 - DNA, 692 bp, Homo Sapiens
ggctttgctctcccaggcccaacatcctccacctggatgtggacagtagggataggaggcggcgggagctggagccacctgagcagcaggagcctggtgagcggcaggagcccagcatgtcctggtggccagtgtcctctgctgagaagaagaaaaacatcaccctggactgcgcccggggcacggccaactgtgtggtgttcagctgcccactctacagctttgaccgcgcggctgtgctgcatgtctggggccgtctctggaacagcacctttctggaggagtactcagctgtgaagtccctggaagtgattgtccgggccaacatcacagtgaagtcctccataaagaacttgatgctccgagatgcctccacagtgatcccagtgatggtatacttggaccccatggctgtggtggcagaaggagtgccctggtgggtcatcctcctggctgtactggctgggctgctggtgctagcactgctggtgctgctcctgtggaagatgggattcttcaaacgggcgaagcaccccgaggccaccgtgccccagtaccatgcggtgaagattcctcgggaagaccgacagcagttcaaggaggagaagacgggcaccatcctgaggaacaactggggcagccccggcgggagggcccggatgcacaccccatctggctgctgacgggcatcc

SEQ ID NO: 46544 - DNA, 453 bp, Homo Sapiens
caatctttcatgtcttgtcatacaaatttataaaggtctgcactcctttatctgtaattgtaattccaaaatccaaaaagctctgaaaacaaggtttccataagcttggtgacaaaattcatttgcttgcaatctaatctgaactgaccttgaatctttttatcccatttagtgtgaatattcctttattttgctgcttgatgatgagagggagggctgctgccacagactgtggtgagggctggttaatgtagtatggtatatgcacaaaactacttttctaaaatctaaaatttcataattctgaaacaacttgccccaagggtttcagagaaaggactgtggacctctatcatctgctaagtaatttagaagatattatttgtcttaaaaaatgtgaaatgcttttatattctaatagtttttcactttgtgtattaaatggtttttaaa

SEQ ID NO: 46545 - DNA, 297 bp, Homo Sapiens
gctactgcatgatgttagttaccaagcctgccatgggtcctctcttgctagacacactccatagatccccccactgagctgtggatgggcaaaccccggtggaatcccaccctccccaacaccccactgagccctgggccccctcctcccttcctcacctccaccttctccctgccttctctcttctctcgtctgagcccccaggccttttccactttgagggaggtgcttcgaagaatgttgcccacacctaagtgttagaagcctatgtccgttcatccctgagaggtctgaaag

SEQ ID NO: 46546 - DNA, 1015 bp, Homo Sapiens
aaatattcttcattgatggaaagcagttacatattgaaatatgttgtttctaatgacatttctgtggtttttaactttttaatgaatttcacagaggacaattggtaatttgtatataaagaacttggcaagagaatttgcttaatgtaaatataaacagtcacaattagtatagacccatcgatatatttttgataatttttcatgtatggtaaagttaaaatgacaaattgatattctgatataaaactcaaagttttgaagtcagtgggaaaaaaggaggtttttagactttcttaaaagacgttaaaattttaggacagaattttcttgatgttgtttgatctaactttgcactctttgataataatgctttagataatgtgcgtaatccaaattggtattgtagcctctgctaacacagacagtatatgttttaaactttgatgtaaacctttttacacccaaacttgtggaagtatcacgggttaagttctctgcctctggttccttgttcctttattacctacaatgcacttgttattacagcatatgcccatatgacctgtcccccccacccccggggggtccccccctgttccccgctgcccccgccccggttcccggtatccgcctccgcctgccgcgtccctcgccccctcccgcttccgccccctgcgcctcggcgccgcgccgcgcggcgccgcgggggccggcccccccgccggggtttctctctggccggccccgccccacggggtgggttgcccgcggtcgggcccgcctcgcttgctccccgtgccggcgcgcccgtccagccgtcgcggcccgccccgccccggtcttcccgtcccccccattccctcgcccccccggttcccggagcgcggacgcgtcgcgctcgctttcgccccccctcacgtgagctggggcgcccccgcgcgggcgccgcgattaccgcgggtggccccgggccccagctggtggaccgttatgccctcccctgctcccgcca

SEQ ID NO: 46547 - DNA, 935 bp, Homo Sapiens
  misc_feature (792)..(792): n is a, c, g, or t
ctataaccagtatcagcagtatgcccagcagtggaaccagtactatcagaaccagggccagtggccgccatactacgggaactacgactacgggagctactccgggaacacacagggtggcacaagtacacagtagccagtgtgacccagaggctcccggaggcccctgccggcttcctccaccagcgcctgcctcggcccctcctctgcccccgccagatcccgtggtgctggggatggggtcatcccagggctgcctccctccagcccactgcctcccctctgaggggcttccttcccctccatagggccaggcatttttttctggattcaaacaggcaacaatgaccttttattttctgtttgtccccacctccccagccttccacctcctgttcttcctaccttcttcctttttgactaaataatccccacctcccttgatcatacagtgaggctacagtgactgaggggagaatcccctcctgttcactctcccaaccctgctccagcccctcagcttcccagaccctcatgcagttggttgtaaattctcccaggagctgttttactgtctacttttcaggattaaaaaaaaaatcaaaacttaaaaaaaaaaaagtttaaaaagcaaaatggggagggggaaggaagcagtgacttttttttggtaattatgcgctttttttttatttttagaatttgtctttttactgtgggtgggctggttgatatttcctcaagataagcatttcttccctgaattcaggtgacttgaggaagagcccccanaaccaaaccacaaccaaaacccaacccacggaatcttcttttaacccaaattttttataacatgcccccagtttccccctaaacttggcaaacaagccttctggggttcagtttaaaatggaaactggctttttggaaattgg

SEQ ID NO: 46548 - DNA, 844 bp, Homo Sapiens
  misc_feature (563)..(563): n is a, c, g, or t
tcaatgctgtgaataactccctgactccgcaatcaaccaaggttcccagcctttttgaatttcacggtccctcatggtgtctcactccagcagacagaggattgtgtcgtgccaatgagaacagattctactacaattcagtcattgggaaatgccgcccatttaagtacagtggatgtgggggaaatgaaaacaattttacttccaaacaagaatgtctgagggcatgtaaaaaaggtttcatccaaagaatatcaaaaggaggcctaattaaaaccaaaagaaaaagaaagaagcagagagtgaaaatagcatatgaagaaatttttgttaaaaatatgtgaatttgttatagcaatgtaacattaattctactaaatattttatatgaaatgtttcactatgattttctatttttcttctaaaatgcttttaattaatatgttcattaaattttctatgcttattgtacttgttatcaacacgtttgtatcagagttgcttttctaatcttgttaaattgcttattctaggtctgtaatttattaactggctactggganattacttattttctggatctatctgtattttcatttaactacaaattatcatactaccggctacatcaaatcagtcctttgattccatttggtgaccatctgtttgagaatatgatcatgtaaatgattatctcctttatagcctgtaaccagattaaggaatacagctctttaaaaatcaagaacttcctgagtttcacatataaaatggtgacaaacacctggcttctggataaagtttatccaaatttttgtattttatagaaatttctaattggaaa

SEQ ID NO: 46549 - DNA, 614 bp, Homo Sapiens
  misc_feature (543)..(543): n is a, c, g, or t
  misc_feature (576)..(576): n is a, c, g, or t
  misc_feature (614)..(614): n is a, c, g, or t
ggatttccagtaatcttcccctaaatattgtgggaaataattctgttttagtgaataagctaattaaagtctatccagaccaccatgtttttatttacagtgactatatatatccatgattttgacatagagtataattctgatgttacttatttcaatatgccttgtatatattagctgtttataagagagtcgctttttggttgaaaagtatttctaggctgagcaaggtagctcatgcctgtaatccaaacactttgggaggccaaggcaggaggatcacttgaggtcaggagttcaagagcagcctgggcaacatagtgagacctcatctctacaaaaaatatttattaaaaaaaaaaaaaaaagcccagcatggtggtgcacacctgtagttctagctactcaagaggctgaggtgggaggattgctttgaggccaggagtttgacctcctgagctgtgatcatgccaccacacttgagtgatagagtgagactttgtctcttaaaaaaaaaaaaaaggtatttctacaatttttccnaaagtctgtatttatttaaataattgaactatncaatactgttctgaaaataaaacctctctaggatattn

SEQ ID NO: 46550 - DNA, 593 bp, Homo Sapiens
cactgcaaaagaccaaggatgcagttgaatggaaaattactcagtgtatagaaaggaaaaaaaccagaaatttaaaatagatacagaaaagtacactggtaatatttttatttcctattggagagtgaatccccacagttgctttttgtgacttgattcaaatgaggcactcattattgttaccaaacttgtaaaagcattccatgtattcagtggaggcagaatgtataatattttttccttataatttagcatacaggaaaattatttattttttaagtagggtatcttaattatgctcatttcttcccctaaaccacattatctatatgattggaccctttagtgaaatcagaaaaataaagtaggcatgaataaatgttcaggacacacacatacactcacacacatcacagtatcaactctttcagtgagttttttttaactagataacacatgtaatacatagtagaatacatttcagaggcagaagtccctcggattatttttttatggatattagtggtcaagcagcttattatttaaaagggggggccaattatagcatcccttctgttggttaattttaaaat

SEQ ID NO: 46551 - DNA, 648 bp, Homo Sapiens
tgagatgatggcaggaaggtctccatttgatattgttgggagctccgataaccctgaccagaacacagaggattatctcttccaagttattttaggaaaaacaaattcgcataccacgttctctgtctgtaaaagctgcaagtgttctgaagagttttcttaataaggaccctaaggaacgattgggttgtcatcctcaaacaggatttgctgatattcagggacacccgttcttccgaaatgttgattgggatatgatggagcaaaaacaggtggtacctccctttaaaccaaatatttctggggaatttggtttggacaactttgattctcagtttactaatgaacctgtccagctcactccagatgacgatgacattgtgaggaagattgatcagtctgaatttgaaggttttgagtatatcaatcctcttttgatgtctgcagaagaatgtgtctgatcctcatttttcaaccatgtattctactcatgttgccatttaatgcatggataaacttgctgcaagcctggatacaattaaccattttatatttgccacctacaaaaaaacacccaatatcttctcttgtagactatatgaatcaattattacatctgttttacgatgaaaaaaaaattaatactac

SEQ ID NO: 46552 - DNA, 698 bp, Homo Sapiens
  misc_feature (660)..(660): n is a, c, g, or t
tttaaagctgactttgttgccatatcttgaaaagaatctagataggtgcttttaactggggtattaacttttttagaatgacacagctgaacagtgttaataatagtgtgtcaagattgcaaagtcgacatactcatttggtttaagcaggaatcctagaagcaaatggatggggataagaataggtcattttctattcaccatcctttactattaagggaaaggaaaagaacactagctaaggaagggaaagggaagtgatatcataaaagtagcaaccttcattttacattctgtctgtttttctttttttgctttgttttgtttgtgctaatttgggaattgtgtactccgaaacaagtagaaaagtgctgtttgagggattttattaaatctttttttaatggaatgtggtacaaattgttcatgttaccaaagcaatatttccctggaatttaattcaaagtttgtggcatacaacctgagccttttcttatataagacaagaatatgttcacatcttggtatgtggccatatttatagaatgctgaactcaatgtgcaagttgtactgtatgcagttttgtaaataagtgaaaataatttgttgtactttttattcaattctgtatagattataaaattatttttattaaatanatattttacagtaaaaaaaaaaaaaaaaaaaggacgcg

SEQ ID NO: 46553 - DNA, 633 bp, Homo Sapiens
agtgtctcctcctcgtgtagcagcttgagaagaggcttgggagtgcagcttctcaaaggagaccgatgcttgctcaggatgtcgacagctgtggcttccttgtttttgctagccatatttttaaatcagggttgaactgacaaaaataatttaaagacgtttacttcccttgaactttgaacctgtgaaatgctttaccttgtttacagtttggcaaagttgcagtttgttcttgtttttagtttagttttgttttggtgttttgatacctgtactgtgttcttcacagaccctttgtagcgtggtcaggtctgctgtaacatttcccaccaactctcttgctgtccacatcaacagctaaatcatttattcatatggatctctaccatccccatgccttgcccaggtccagttccatttctctcattcacaagatgctttgaaggttctgattttcaactgatcaaactaatgcaaaaaaaaaaaagtatgtattcttcactactgagtttcttctttggaaaccatcactattgagagatgggaaaaacctgaatgtataaagcatttatttgtcaataaactgccttttgtaaggggttttcacataaaaaaaaaaaaaaaaaaacgcgg

SEQ ID NO: 46554 - DNA, 660 bp, Homo Sapiens
  misc_feature (614)..(614): n is a, c, g, or t
tcaagtgaggagattaaggcttaaagaaaggaaaggacttgccagccaccacagggctcatgaggggcttgaacccatgtcgtgtgtctctaccacagctgactctcagctggctaatggagaaaatgtgaggaattacctgtcaaattagattgagctcagagtaaatagatgagcacatttataactctaaattagactttctatcaaatgggaccaaacatatggaaggggctgctgtcctgcctcaatttagccaagacttgtcttgtctcaaagccaagactcagcagtacatggattctgagaagtccagggtctgaattgttgtctctgattactggaaggacaggttaactgaatgtctgtgatcactaacaggtgatgggctttgtgcccactccagagatattgtgggagacaaattcttttaacagcctgtcctcccggcatcaggagtcattgaacaatcatggattgttgtgtttgggattttttttttttttggctttgtttttggtttttgtgtgtgtgtgtgtgtgctgcatgcacatgcgtccaagacttacgggtggtttaggggaaagtgctagcaacagtgtcaatgtcattgntaactatatttcatatttgaggtctcattgttttcaaataaacagt

SEQ ID NO: 46555 - DNA, 519 bp, Homo Sapiens
  misc_feature (490)..(490): n is a, c, g, or t
caggaccctgagggatagagagatgaactgctcagttaccatgggagaaggaccaagatcaaaggccttcaggaccccagcctctttccatcatccttcctccacctgtgggaagagaagctgatgcagccggtgctccacccatggaagaaaggctggctgtccttgggcccaagaaagtcaagcattatccacgtccaaaggtgacaagatgactcaaaggagacttcaagaacagtgtatgaaacactggaagaggtcacctaggaaaagcatgaaatttccattcctgaatgtttgaaaatagaagaggcttccaatcagtgtggaaagtgacaaatcccctatcaacactcccagcccttgctgggggctccttttctgactactgttagcactcagcctcccattcacatgtattatatttaagtgtaccagccttgccttctcaagtagattctaagctccttttaaggcagtaattgcattntatctgtctcatgatgcccccagagaact

SEQ ID NO: 46556 - DNA, 611 bp, Homo Sapiens
ggaacacctatgcttaaaatactgtaaatatgcagtgaggtttggcaaaatctattccatgtgtgatttgcttgtagaaacaattttgaaagccccttgaggaaaataaaaatcaagaagaacacttttctcccttttccatacaaattaaaacttaacagcatcaaattattgggaccagaaaccaagtaatgtataatgtggcttttgttgagttaaataagatgctatataatggagaagaatttgaaaatgcacaaaaaaatcaatctacattatcagaacctgcagtgaaattaaacttatgttaaataaaaccagtttgcaggtgcacaaactatgagggtcttgtatccacgtaacacaggtagttacaaaaacatgttattgtactgtgtaaagatgcatagtcatctcatttggttggctttgtaccttgtaccttttttagccttggcttttgttgaactagaaccctcagcacatactgtgttgtacttttgtaaatgattttttaaatggaattttgcacataatacattgtaatactgtatgataatcatgtgtgaaaataatttttgaaatatcaaaaaaaaaaaaaaaaaacgcgg

SEQ ID NO: 46557 - DNA, 686 bp, Homo Sapiens
  misc_feature (623)..(623): n is a, c, g, or t
  misc_feature (651)..(651): n is a, c, g, or t
gtttcagaacccaaatgtcctcaggtagtttggagcatctctatgagatgggattatgcagatggcctatggaaaatgcagctgcataattaacacattatcaaagtcctcttacaatttattttccgcagcatgtcagctaagtagacccaatggggagagaaaatgcctgctttttttttttttttttctgcactgccatattcacccccaaccatccaatctgtggataattggatgttagcggtactcttccacttccgggcctggagcttggcttgtatccaagtgtatggttgctttgcctaagaggaatccctctatttcacctgttctggaggcaccagaccttgaaaagaacatgctcaaaataaaatgttatctgttatttttgtaaactcaaagttaagatgatcaaagttctaaaattccaagaatgtgcttttagacggtctcaatctaaaagcacttcaaggggtcaaagggcaaccagcttgggtgctacctcagtgttgtagtttctgatactttatgtctttgctcaccctcatccccaaactacttgaaaagggcatttggcaccactctctgaaacaacacagtcactctagcaaggcccccanagggccctggttttacattacatttcanactttatttgctttggggttttgtttctgttgttg

SEQ ID NO: 46558 - DNA, 595 bp, Homo Sapiens
ggacccgcagcagagacgacgcctgcagcaaggagaccaggaaggggtgagacaaggaagaggatgtctgagctggagaaggccatggtggccctcatcgacgttttccaccaatattctggaagggagggagacaagcacaagctgaagaaatccgaactcaaggagctcatcaacaatgagctttcccatttcttagaggaaatcaaagagcaggaggttgtggacaaagtcatggaaacactggacaatgatggagacggcgaatgtgacttccaggaattcatggcctttgttgccatggttactactgcctgccacgagttctttgaacatgagtgagattagaaagcagccaaacctttcctgtaacagagacggtcatgcaagaaagcagacagcaagggcttgcagcctagtaggagctgagctttccagccgtgttgtagctaattaggaagcttgatttgctttgtgattgaaaaattgaaaacctctttccaaaggctgttttaacggcctgcatcattctttctgctatattaggcctgtgtgtaagctgactggccccagggactcttgttaacagtaactt

SEQ ID NO: 46559 - DNA, 597 bp, Homo Sapiens
ggcacgagggtctttacagaatcaaatgcaattttaaatctgagagctcgctttgagtgactgggttttgtgattgcctctgaagcctatgtatgccatggaggcactaacaaactctgaggtttccgaaatcagaagcgaaaaaatcagtgaataaaccatcatcttgccactaccccctcctgaagccacagcagggtttcaggttccaatcagaactgttggcaaggtgacatttccatgcataaatgcgatccacagaaggtcctggtggtatttgtaactttttgcaaggcatttttttatatatatttttgtgcacatttttttttacgtttctttagaaaacaaatgtatttcaaaatatatttatagtcgaacaattcatatatttgaagtggagccatatgaatgtcagtagtttatacttctctattatctcaaactactggcaatttgtaaagaaatatatatgatatataaatgtgattgcagcttttcaatgttagccacagtgtattttttcacttgtactaaaattgtatcaaatgtgacattatatgcactagcaataaaatgctaattgtttcatggtaa

SEQ ID NO: 46560 - DNA, 422 bp, Homo Sapiens
gccaccaatacaggggaatggttaaatacattatggccagcttaaacaatggaatagtttgtagaaatttaaaacaatggatcctgtgtgtgtgtactaccatagaatgggccccaagatgcatgattaagtgaggaaaaaagcccatggtatcctaatgtttggaatggagaaagtgtgtagatgtatgtgtgtgcatatgttttcacacagacgtatacacgtgtatatcatatgtccacctgcatatgcctaggatgtctctgggaggatatctagcagcccggcagcctgaattgcctctgggaagaggggtgggaatgacttttcaatgtacaccttttgtaccttttgaattttgtaccatgtacatgtattatctattaaaaaatagttcttaatttttaaaaaaaaaaaaaaag

SEQ ID NO: 46561 - DNA, 672 bp, Homo Sapiens
gaccggaccgaaggagtagaaagcctgctgcgggaagagtgttgcctcagctcaaaagcagaatcggatcctgaaggacctaatgactagaaacttccagctgactacactctgcaactgactgatttgaacgtctatagaatattacatctctttgacctgaaggacttgctttagcatttcttgtactacaagtctgatggagatggcacattgcataaagaaacgcgaacccagcagcactcctgccagcggcaattctgagtgctcatttccactttgccaagacattacatgggaaggcatgtgcgtttaagggcatccaattgtttctgtatcagaacagcagcaacatcccgggcaggcctttcctctggagttcacgtgtaggtcgtactgacacacaacatggcctaaatggaccatggaggaggaagggaccccaaatccaggccaaatgggagcagggttgtcctcaggaggaccccagctagaagactttctctggaacccacggtgcctctcactaaagtgccccaacgttggcacaacacctaccgaattgttgttgctgactctctatgcccatgattcaaccagaacaacattgattcgttaaaaggtgcatggataaacttgactctggaaacaacaaaaaaaaaaaaaaaaccc

SEQ ID NO: 46562 - DNA, 920 bp, Homo Sapiens
tttcctctacttgatgcttagtttgagaacagttttcacaactttagagggtctctctcagagtatgttatactgtaaccttgaagtttgagatgaaacaaggtgtcagaggttttgaatctttcaaaggaattgccttttacagattttttttttattccctaagaagggaaaaagagagggaagaactacactaatgttagagataaggtatgttttggctcaaaatgtgtcatgaacctaaaggtaacttgatgggcagaaatgtctcagccatgtgaaccaagaagtgggaccacagtgcaaggctgtgggtggcagcactagatatggtggtggcaggagtgtgacatgtaggcactccatgggggacagctggacggtgtctatcaaaagtgcaaatgcgtaagctctttgaactagcaatgctactcctaagaattgtacctgtgtacaaggtacttgtgtacaagagtttttgttgaaacattgtaatagcaaaaagttggagagtgccaccaatacaggggaatggttaaatacattatggccagcttaaacaatggaatagtttgtagaaatttaaaacaatggatcctgtgtgtgtgtactaccatagaatgggccccaagatgcatgattaagtgaggaaaaaagcccatggtatcctaatgtttggaatggagaaagtgtgtagatgtatgtgtgtgcatatgttttcacacagacgtatacacgtgtatatcatatgtccacctgcatatgcctaggatgtctctgggaggatatctagcagcccggcagcctgaawttgcctctgggaagaggggtgggaatgacttttcaatgtacaccttttgtaccttttgaattttgtacatgtacawgtatawcyataaaaaawagttcttaatttthaa

SEQ ID NO: 46563 - DNA, 1290 bp, Homo Sapiens
cttccacagttcggccccaggagccaacctgtgcctgggctctggcgtgcacggcggcgtggactggatgaggaagctggccttccgctaccggcgggtgaaggagatgtacaatacctacaagaacaacgttggtgggttgataggcactcccaaaagggagacctggctacagctccgagctgagctggaagctctcacagacctctggctgacccactccctgaaggcactaaacctcatcaactcccggcccaactgtgtcaatgtgctggtcaccaccactcaactaattcctgccctggccaaagtcctgctatatggcctggggtctgtgtttcctattgagaacatctacagtgcaaccaagacagggaaggagagctgcttcgagaggataatgcagagattcggcagaaaagctgtctacgtggtgatcggtgatggtgtggaagaggagcaaggagcgaaaaagcacaacatgcctttctggcggatatcctgccacgcagacctggaggcactgaggcacgccctggagctggagtatttatagcaggatcagcagcatctccacctgccatctcaccctcagaccccctcgccttccccacctccccaccgagaactccagagacccagatgttggacaccaggaaggggccccacagccgagacgacgtgtccagtgaccatctcagaagccgtccatcagtccaaatgggggttctgagaaggaaagtacccaacattggcttcggagtatttgactttggggaaaagggctggctcggagtctagactcttctgtaagactcacagaacaaaagcaaggaattgccaatttggggggtgcctggtgatgaggaggggatgggtttgtcttgtcttctttttaatttatggactagtctcattactccagaattatgctcttgtacctgtgtggctgggtttcttagtcgttggtttggtttggttttttgaactggtatgtagggtggttcacagttctaatgtaagcactctcttctccaagttgtgctttgtggggacaatcattctttgaacattagagaggaaggcagttcaagctgttgaaaagactattgcttatttttgtttttaaagacctacttgacgtcatgtggacagtgcacgtgccttacgctacatcttgttttctaggaagagggggatgctgggaaggaatgggtgctttgtgatggataaaaggcattaaataaaaccacgtttacattttgaaaaaaaaaaaaaaaaaaaaaaatt

SEQ ID NO: 46564 - DNA, 632 bp, Homo Sapiens
gccaaggccgtggtctccttgcgcccagattcagcgcagagccgcccaggaaaaggagcggagccaggaactcaggcgtctgcaggaggaggcccggaaggaggaggggcagcgactggcccggcgcttgcaggagctagagagggataagaacctcatgctggccaccttgcagcaggaaggtctcctctcccgttacaagcagcagcgactgttgacagttcttccttccctactggataagaagaaatctgtggtgtccagccccaggcctccagagtgttcagcttctgcacctgtagcagcagcagtgcccaccagggagtccataaaagggtccctctctgtcctgctcgatgacctgcaggacctgagtgaagccatttccaaagaggaagctgtttgtcaaggagacaaccttgacagatgctccagctccaatccccagatgagcagctaagcagctgacagttggagggaaagccagcctgggggctgggaggatcctggagaagtgggtggggacagaccagcccttccccatcctggggttgccctgggggataccagctgagtctgaattctgctctaaataaagacgactacagaaggacacaaacccccacccaagg

SEQ ID NO: 46565 - DNA, 529 bp, Homo Sapiens
aaactgctggatttctgcaagtcaaaagacattgttctggttgcctatagtgctctgggatcccatcgagaagaaccatgggtggacccgaactccccggtgctcttggaggacccagtcctttgtgccttggcaaaaaagcacaagcgaaccccagccctgattgccctgcgctaccagctgcagcgtggggttgtggtcctggccaagagctacaatgagcagcgcatcagacagaacgtgcaggtgtttgaattccagttgacttcagaggagatgaaagccatagatggcctaaacagaaatgtgcgatatttgacccttgatatttttgctggcccccctaattatccattttctgatgaatattaacatggagggcattgcatgaggtctgccagaaggccctgcgtgtggatggtgacacagaggatggctctatgctggtgactggacacatcgcctctggttaaatctctcctgcttggcgacttcagtaagctacagctaagcccatcggccggaaaag

SEQ ID NO: 46566 - DNA, 679 bp, Homo Sapiens
  misc_feature (641)..(641): n is a, c, g, or t
ggtctgcatatgtataggaaagggttaactcagcaggtcttgtttgcccagactctgtacatttccaagaaaggtctgcctttaggactggtccttggccagctcctggagaatgagctctcagcttttagaaaattctatctgctaagaatagttttgcatgtctcaggtcttgggccacaaaatatcagtttaatcagatggtttatgttaacaagtatgatttatggcaaacatagatctctaatctccatttctctctcatatatctatatttatctatccatatatatgtacctatatatatcaaatataaagatatgtttatagcaattgtatatacgtagagagataatatgtagtatgaagagagacatagatattattcttcattttagaatgttatcttggtatgtttaaaaggaaaaacttaagatgtgttgcaattgcagtatgagtttcaggtatgtacatgttatgtgtgtgtgtgagagacacacacaaacacatttcaaacatgttttatgtttaagctcaatattcaaacacagaaatataacatctattcttaatatgttttatgtaagtacagcagcagcattattaaatactgtatttctatggtgattgaaaattagtangcagagaattttgtatgggtcttaatatttttgtataa

SEQ ID NO: 46567 - DNA, 558 bp, Homo Sapiens
gggggactacaggcacgtgccaccacgcccagctaatttttgtatttttagcagagatggggtttcaccacattggccaggatgatctcgatctcaacctcgtgatccacccacctcggtctcccaaagcgctgggattacaggcgtgagccaccgcgccaagccaaggtctgcatttttctttagaactcagaacacccaatagtcctaggcccccatcctcgcatggcagcaagctaaataagcatcttcccactgcgagttggggcatgacccagcctatggtttgccatactccctctttttctccgttttttcattaattgtgaacctgacctgcatcaccctttcatgtcagtgctctccaaacctgcttgcttgcacccctctagtcgaaatattttgtgcttaccccaatatatgtgtgtgactattgaactctattcgtagactgcttgtactaatgtcatttgcatcataaaatattcatatccaataaacatattaaaaggatgagacccccaaaacccaacccacaagccaaaaacccttgtcggc

SEQ ID NO: 46568 - DNA, 795 bp, Homo Sapiens
gacccacgcgtccgcccacgcgtccggagaatagctctctgttgcagagaggggtcctggagaaatgggttaccccagttgtcttatttaaatggttacccatcagattttaattttatcttctctttgagagcttggtaataagaagcacttaaatcactccaaagaagactttaaaaagggagcagtgaaaaggtcttaataatttattgattgaattaagaaatactagctaattaagaatctgagtctaaacagcacagattttttctttctgcttttaaattgtgttttaaaaaaagagacagggggctgggcgtggtggctcacgcctgtggtcctagcactttgggaggccgaggcgggtggatcacgaggtaggagttaaagaccagcctggccaacatggcaaaaccctactaaagatacaaaaaaaaaaaaaaatttagccaggcgtggtggtgggtgcctgtagttcccaggtacttggaaggctgaggcaggagaatctcttgagcccagaaggcgaaggttgcgtgaaccgagatcgtgccattgtactctagcctgggtgacaagagcaggactccgtctcaaaaaaaaaaaacacacacaaaaaacacggtcaaccccgggcagcaaggtcccccgggggtgccaaagccgtttaacccgggccaagtgatcccccctggaccccaaaaagggggggaccgggtggaaaaatgctcggcccaaaactcagtttcgaaaacccttcggccctttgtctcagggcagcggggtcaaaaaaca

SEQ ID NO: 46569 - DNA, 897 bp, Homo Sapiens
ttttttgtgattagtgattatcagagcaaacatcatgtagatagcacaagtatttggagaaacgttgtttgttttgttaccaaaatgttggaaaaatttatttcaataccttttagatttcataaagtgcagtgtatataatgcctactgaaagactgtaaaatattgaaattttctttcaagcaaagtgtaaaaaaatatattgagcctgtaaattgctctgtgactagacttcattgtcgtcttaatatattcttgcatgtkcatatatatacacacatgtgtatatatatgtgtgtgattatgtgacctatgcaatacaaattatgggaatgggcagctttggagtatatatcccataattcttttttcaggaatagttgcagtatttacacagcagcatttcttctcaggcttttattgggtgctgttgcttgctatgtatgaagagaaatgtgtcagacaagtttagtgtgttctgaagaagggtgtgaacaacagtgttcatgggcttttagaatgcttttcacttttagtccttgtaactcagctgttcagtacctaaaacaaattcaaataatatgaacattatctcctactagaagtaacgttttcaagttttcatggcacattatgattgtaaatgtctctcatttttaacagtaagtctataggagtcccgtgaagattcctgaaatgtctgtagtaactgttagtcatgtttgaataagtgtagtatgaacaaagtattttattgcacagggttaacaaacagtatgttgccagcbgaggctactgctgttttattacaacattacctcttgtttttataaagtgtaccaagatttaaattgataactttattttacttgtaaaaaaaagtttcttttatcacca

SEQ ID NO: 46570 - DNA, 478 bp, Homo Sapiens
ggcacgaggtgtctgcatttggttcctggttggccaggtataaatgagctttacaaaagtgcaaattaaaaactgttacttctgtttacctccaccaaaacttgattttcccctagctattaatttaaggttgcctttcctgcagctgcaatattttgaataacacacagagtttgtgttgatttttgaatgtttgtttatatctaggggtaatgaaaaatgtaaatcccgtgtatccttattcactccacctgtatcatattatttcattttccccaaagtcctttaattctaactgaacaccagcagtatttttagaaatttttctttaacatacttggaagatgatttatccagctgaactgtctttagacgtaattattgtgaatgtctgttttattttctcatggtggttcacatggctctgatgttcagtttgtatttttggaattgctttacttagaaattaaaacagacc

SEQ ID NO: 46571 - DNA, 472 bp, Homo Sapiens
gcgtcgacgcttactgttggtggcaaaattgccaacataagttaatagaaagttggccaatttcaccccattttctgtggttagggctccacattgcaatgttcaatgccacgtgctgctgacaccgaccggagtactagccagcacaaaaggcagggtagcctgaattgctttctgctctttacacttcttttaaaataagcatttagtgctcagtccctactgagtactctttctctcccctcctctgaatttaattctttcaacttgcaatttgcaaggattacacatttcactgtgatgtatattgtgttgcaaaaaaaaaaaaaaaagtgtctttgtttaaaattacttggtttgtgaatccatcttgctttttccccattggaactagtcattaacccatctctgaactggtagaaaaacatctgaagagctagtctatcagcatctgacaggtgaattggatggt

SEQ ID NO: 46572 - DNA, 582 bp, Homo Sapiens
  misc_feature (451)..(451): n is a, c, g, or t
attgtccagttctggtcttttctgtgaattaccactgggccccttacctcaatgctttttgttgatgcccactctggttcccttgtttatctgagtctgttggtaccccaaatgaccccacacccatcttaaagtactttttttcaccttccctgtttagtactggccagatgagttttttctagagctctgtcactatctgaaaagaaagaggctatgggaaacatagaaatggtatgtattaataactgatcataggctgaggagaaaaaatgtagctggctgcaaacccagtgctgtgaggtgacttatatgaggttccagatcaaagacaggccgtgtgagccagtccaggagggtgtaagttctgaatggttccttgctgactttgggtgacacatgtaccacatactggctcagtttaagtcatggttctattgtagatttattnttatattagttaataaatgactttaaattgtcaccaattgaaaatcttgtcactcttttggttttctttatatagctcagccaaatcttgttttatgtcctgtcctcatctcttagctaaatctgtttgga

SEQ ID NO: 46573 - DNA, 763 bp, Homo Sapiens
ctggaagtatcaaaactccgctgtcagcttgctaaaaaaaaacaaagtgagacaaatcttcaagaggaattgaataaagttctaggtatcaaacactttgatccttcaaaggcttttcatcatgaaagtaaagaaaattttgccctgaagaccccattaaaagaaggcaatacaaactgttaccgagctcctatggagtgtcaagaatcatggaagtaaacatctgagaaacctgttgaagattatttcattcgtcttgttgttattgatgttgctgttattatatttgacatgggtattttataatgttgtatttaattttaactgccaatccttaaatatgtgaaaggaacattttttaccaaagtgtcttttgacattttattttttcttgcaaatacctcctccctaatgctcacctttatcacctcattctgaaccctttcgctggctttccagcttagaatgcatctcatcaacttaaaagtcagtatcatattattatcctcctgttctgaaaccttagtttcaagagtctaaaccccagattcttcagcttgatcctggaggtcttttctagtctgagcttctttagctaggctaaaacaccttggcttgttattgcctctactttgattctgataatgctcacttggtcctacctattatccttctacttgcccagttcaaataagaaataacgacaagcctaacttcatcgaaacctctctattttaaatcagtgttaataatttacaggctc

SEQ ID NO: 46574 - DNA, 625 bp, Homo Sapiens
cccacgcgtccgcggacgcgtggggtacgtagccacaggagccctgctatgaaaggaataaaacctacacacaaggttggagctttgcaattctttttggaaaagagctgggatcccacagccctagtatgaaagctgggggtggggaggggcctttgctgcccttggtttctgggggctggttggcatttgctggcctggcagggggtgaaggcaggagttgggggcaggtcaggaccaggacccagggagaggctgtgtccctgctggggtctcaggtccagctttactgtggctgtctggatccttcccaaggtacagctgtatataaacgtgtcccgagcttagattctgtatgcggtgacggcggggtgtggtggcctgtgaggggcccctggcccaggaggaggattgtgctgatgtagtgaccaagtgcaatatgggcgggcagtcgctgcagggagcaccacggccagaagtaacttattttgtactagtgtccgcataagaaaaagaatcggcagtattttctgtttttatgttttatttggcttgttttattttggattagtgaactaagttattgttaattatgtacaacatttatatatcgtctgtaaaaaat

SEQ ID NO: 46575 - DNA, 619 bp, Homo Sapiens
gcctgcatggttatgagtatcactgattttagggacgccccacagagctaaagcatttttttaatccgagaggacttttgtaactcatattagttaatcttctagctctgagatagcaacacagctcttagaattctgtaagtagcttgaggcctcctcctctactgtacatgttcttgctttcccaaaattgtaagtttggtttttcctatgaacaagactgtaattgatttttctctccctgaggaaaaaagttcggaataaatgagacatggatatgaaactacttagcacaatgcctggtacatattaggccctcagcaaatgtggctaccgtgtcattatttcatggtgagactcaaggcaaaacaagattcttaatttatgctccgtaaatgctagaggcttgggcaatacggtctgtcctgaaaaacaggactctgtgtctcattgcctctagaatccttaggtagcagtttctgttcactgtcttttcttttttaaaaatatctgctggacacaattacggccattacatgatgcaggtgattctacctattttttaaaaagaacaaaatttcttttatattgtgacagtacattttaataaaggaaaatt

SEQ ID NO: 46576 - DNA, 486 bp, Homo Sapiens
  misc_feature (290)..(291): n is a, c, g, or t
aattattttctatcttaaagaaacatagttacattttagaatgtcaattcagttaaatctttctcagtttttacctttagatggctcctggaaaggccagcgttccttttcccctctctgaattgaaagcacttgaccccatgctgcccctgcttccaggcctgtctcagttgtcatatattgtgagtccctggcaccattactgttttctaagccagtcttctaggtcttactttcaggatgctgcttcatggcatgaggatatagtttacatgtgttgtagttttttnntttttaaagctttgttctttaaaaatactttttaaaaagaaatctactggttagatttattgtctcacaaaaatgtttttagagattatttttttcacaaatgtttgctttctcatgctgatgatcaactgatttttgtctacaggtggttagcttctcacagtattttttcatttttagagtctatttaccaaa

SEQ ID NO: 46577 - DNA, 736 bp, Homo Sapiens
cccacgcgtccgcgccggcgctgcagagggaggcggcactggtctcgacgtggggcggccagcgatgaagccgttcaatacaaacaagtgagtttgactcatcagatgaagagcctattgaagatgaacagactccaattcatatatcatggctatctttgtcacgagtgaattgttctcagtttctcggtttatgtgctcttccaggttgtaaatttaaagatgttagaagaaatgtccaaaaagatacagaagaactaaagagctgtggtatacaagacatatttgttttctgcaccagaggggaactgtcaaaatatagagtcccaaaccttctggatctctaccagcaatgtggaattatcacccatcatcatccaatcgcagatggagggactcctgacatagccagctgctgtgaaataatggaagagcttacaacctgccttaaaaattaccgaaaaaccttaatacactgctatggaggacttgggagatcttgtcttgtagctgcttgtctcctactatacctgtctgacacaatatcaccagagcaagccatagacagcctgcgagacctaagaggatccggggcaatacagaccatcaagcaatacaattatcttcatgagtttcgggacaaattagctgcacatctatcatcaagagattcacaatcaagatctgtatcaagataaaggaattcaaatagcatatatatgaccatgtctgaaat

SEQ ID NO: 46578 - DNA, 561 bp, Homo Sapiens
cacgcgtccgctttgattgaaaataaggtctacacctttttaagtatattatttctgacatcgtaagaaataatttagttccttattctcatttatcttttatataatgtactgtaatattcaggtttaaagtaaaataagtatatgaattatattttggtaaaactgtttcatgaccagcttgattaatgtatattaacataccagacattgacagcgaacatttcatgaaatcagttatttacttaccaaaacaatgagttttagcttgaaagttactgctgctctattattaacaaaactaagttttaaaaattaattttaattctactgaagtttaatttctggttaaaggtatagtggatgctatttatgatccaagtttttacatcacatccattgatctgcctatcccttctttttactccaaagaggagatgatagaataatacattcagtatactaccaagaagcaaagttataatgtgtttcattttgctattggaattttttattgtaacattgtatgataacctgaaatgtttacttgtgccttttctt

SEQ ID NO: 46579 - DNA, 570 bp, Homo Sapiens
gggacctttcctccatccctgttgtccggagccagctcactgtcttccacactggtgctaactggcccaggcactggagtggaatagaatgcagctggaggctacgcatggcctctgcagcacacgcagctggagagggcttctgtccctgtcagcggcagagggcgttggggctggccggggcaccttgtccctgctatggtccacatgctcacgctgtccacctgccaggtggagtgtatgtggctgtggccctccctcgtggaggtgccgtgctttaaagaggccttagtgcccgggatgggcacagtgttttgaagggaggtgggagctcttgctctcctggtcactgcagaatgacagagaaggtgaagctccatgcatgtgtgcgcgggtgtatgtgcgctcagggtctctgtttaagtatcagctaaagatgtgcttcctccgtgtctgtcatacactgagaccaacaggctacagtgtccctgattcttggaaaagcctggagaagctggggagatgcggttcacaatgcctcggtataggaggctgtgttgagctgacatt

SEQ ID NO: 46580 - DNA, 667 bp, Homo Sapiens
  misc_feature (632)..(632): n is a, c, g, or t
gaggaatgaaaacaaagtgaagtacacttagaaaagggccaagtggacatcttggatgtcaagtgcctagttcagtatctttttttttttttttttttgagacagtgcctcactctgtcacccaggctggagtgtagtggcatgatctgggctcactgcaacctcctcctcctggattcaagcaattctcttgcttcagcctcccaagtagctgagactacaagcacccaccatcacacccagctaattttgtatttttcagtagagacggggtttcgccacattggccgtgttggtcttgaactcctggcctcaagcgatccgcctacctcagcctcccaaagtgctaggattacaggcataagccactgagcccagccctagttcagtatcttttatgtaaattacaaacatctgcaacattatgtatcatatgcagatacttattgcatttcttttattagtggtgaaggtgttctatgcatttattggctcttgaatttcctcatctatgaattgtcattcatacacctacttttctgcttcgtttttacatatgtctttgcctattaaagatattatccctctggtttatattttctctcattcttggattgccttttaaattttgntatgatgtttcattaataacaggggtttggtttcc

SEQ ID NO: 46581 - DNA, 598 bp, Homo Sapiens
  misc_feature (571)..(571): n is a, c, g, or t
tatggtcaaaagagcagttttaataactttaaaagtacttcagatagacgcagaaaattggtgagtggttgaccaagaacactgcacaaatataaaaaaagttctggaaatgcagaatggcgttagatttatatttggtttgttaattttatatcactgtttttcactgtttctgtggacaaataatggttgctttgctgaagtgttcttcctcaatcttgattgccctgtacctacccaaaagctgtagtcacacgtcctaaaggccaagcaaacccactgggatggtggggggtcttggagccaagctcttaggttcctcttatttggggcagtaccagtccataccagctgcgatttgtgagtggacctgtggtaagaagaatagaaaaggctctcagagataaggttttttacatgtgtaacaatcccaagatttcctagattaaaatcttaattgattttgaaattggatttttatttagaatcaaaattaggacaagaacagataacttcttcagatacatttgtgtaactttacagaatgtcatcaagctttggggctctctgnggcacatgatttatccataaaggagat

SEQ ID NO: 46582 - DNA, 1053 bp, Homo Sapiens
  misc_feature (724)..(724): n is a, c, g, or t
  misc_feature (919)..(919): n is a, c, g, or t
tttctatttactggaactttattgtgaggataagcaaagtaagataaaagaagacctggaagaacaagaagctttagaagatggtgtggcctgtgcagatgagaaggcggagtctgacggagaagagaaggaagaggtgaaggaacagctcggcaggccggccacgctgctgtggttgatccagaagctgtcccggattgcaaaactggaagctgcttattcgccgagaaaccccttaaagagaacatgcatctttaagttcctcggcgccgtagcaatggatcttgggatagacaaggtaaagccgtatctcccaatgatcatagctcctttgtttcgggaactcaacagcacctattcagagcaagatcctttgctgaagaatctatcccaggaaatcatagaattactcaaaaagctggttgggcttgagagcttctcattagcctttgcctctgtacagaaacaggctaatgagaaaagggcactccggaaaaagaggaaggccctggagtttgtaactaatcctgatattgctgccaagaaaaaaatgaagaaacacaaaaataaaagtgaagcaaagaagagaaagatagagttcctgcgtccaggatataaggccaagagacaaaaaagccatagcctgaaagatttagcaatggtggagtaatgtctccctgtgctgatacaagcatgaactttctggaatattctgctagtctgnaatacagcaggttgtctggggtagggggggagcgttttttttttttttttgagacaaggtctcactctgtcacccaaggtggagtgcagtgatgacatcacagctcactgcagcctcaacctgggttccagggatcctctcacctcagcctccccagtagttgtgcctcctaggcaccccaacctatgccccggnaaatttttgggatttttggatttttttggaaaaacaggaatttcccccatgttggccaggctgggtctcgaaaaccctggggctccacatggatcccgcctggctcccggccttcccaaaggtggcctggggat

SEQ ID NO: 46583 - DNA, 945 bp, Homo Sapiens
  misc_feature (738)..(738): n is a, c, g, or t
  misc_feature (746)..(746): n is a, c, g, or t
  misc_feature (792)..(793): n is a, c, g, or t
  misc_feature (796)..(796): n is a, c, g, or t
  misc_feature (798)..(801): n is a, c, g, or t
  misc_feature (803)..(875): n is a, c, g, or t
ccaaaacttagacccatgctggtcagagacggcagaaaacagagcctgcctaaccaggcccagccagttggtggggccaggccaggaccacacagtccccagactcagctggaagtctacctgctggacagcctccgccaagatctacaggacaaagggagggagcaagccctactcggatggggcacggactgtccaccttttctgatgtgtgttgtcagcctgtgctgtggcatagacatggatgcgaggaccactttggagactggggtggcctcaagagcacacagagaagggaagaaggggccatcacaggatgccagcccctgcctgggttgggggcactcagccacgaccagccccttcctgggtatttattctctatttattggggataggagaagaggcatcctgcctgggtgggacagccccttcagccccttctcccctccccgcctggccagggcagggccaccccactctacctccttagctttccctgtgccactttgactcagaggctgggagcatagcagaggggccaggcccaggcagagctgacgggaggccccagctctgaggggagggggtccgtggtagaggcctggggccggtagaggctccccagggctcccttatgtccaccacttcaggggatgggtgtggatgtaattagctctggggggcagttgggtagatggggtggggggctcctggtgggccttctgctgcccaggncacagccngcctttgggttccatcttgctaataaacactgggctctggggactnnganannnnannnnnnnnnnnnnnnnnnnnnnnnnnnnnnnnnnnnnnnnnnnnnnnnnnnnnnnnnnnnnnnnnnnnnnnnnaaacatccaagggcattctttttccggggtggcggggaaaaaagaggggtaattggaatgtgggcacctg

SEQ ID NO: 46584 - DNA, 682 bp, Homo Sapiens
  misc_feature (623)..(623): n is a, c, g, or t
  misc_feature (640)..(640): n is a, c, g, or t
  misc_feature (655)..(655): n is a, c, g, or t
gggcttcaaaagtggtatacctctagtttggagctgtgctgtaaaaacaagagtaacatttttatattaaagttaaataaagttacaactttgaagagagtttctgcaagacatgacacaaagctgctagcagaaaatcaaaacgctgattaaaagaagcacggtatgatgaccaaacataaaaagtgttttataattgttggtgttttaataacaactaatattattactctgatagttaaactaactcgagattctcagagtttatgcccctatgattggattggtttccaaaacaaatgctattatttctctaaagaagaaggagattggaattcaagtaaatacaactgttccactcaacatgccgacctaactataattgacaacatagaagaaatgaattttcttaggcggtataaatgcagttctgatcactggattggactgaagatggcaaaaaatcgaacaggacaatgggtagatggagctacatttaccaaatcgtttggcatgagagggagtgaaggatgtgcctacctcagcgatgatggtgcagcaacagctagatgttacaccgaaagaaatggatttgcaggaaaagaatacactagttatgtctnagatatgggaaataganatacattatagtgtnaacagcaagtacttttaataacaagtt

SEQ ID NO: 46585 - DNA, 671 bp, Homo Sapiens
catctgcctttggcttcaatcctaacatgaagtacactatacaggtggcttattcagccagttccatggcactggccatagcagcaggtcagagtgtggtttctgtagcaacacttctcatgaccatctgttttgtgtttatgatgattttttcaggtctgttggtcaatctcacaaccattgcatcttggctgtcatggcttcagtacttcagcattccacgatatggatttacggctttgcagcataatgaatttttgggacaaaacttctgcccaggactcaatgcaacaggaaacaatccttgtaactatgcaacatgtactggcgaagaatatttggtaaagcagggcatcgatctctcaccctggggcttgtggaagaatcacgtggccttggcttgtatgattgttattttcctcacaattgcctacctgaaattgttatttcttaaacaaatattcttaaatttccccttaattcagtatgatttatcctcacataaaaaagaagcactttgattgaagtattcaatcaagttttttggtgttttctgttcccttgccatcacactgttgcacagcagcaattgttttaaagagatacatttttagaaatcacaacaaactgaattaaacatgaaagaacccaagacatcatgtatcgcataa

SEQ ID NO: 46586 - DNA, 557 bp, Homo Sapiens
  misc_feature (37)..(37): n is a, c, g, or t
aggttgtttgacaggaggagaataaggctgaaactcnaacgtgaaggatcttgcagcttgtaaaagaatttccaaaaatgaaacccattcatcgtaaacaaaagcacaaacacttgtagcagtttataatgcttttggtttaatctcaattagtctttctcccctggactagaaatccagtatagtttgccattaatttattgaatctggttttggacaatgcttctgtagtgtagctgcacgtcctggtactgtatcctctgactttattttccatgtattacaaaaggaaaaaaaaattgagattacactggcataaactctagtttgcacagttcacagctactacttgtgcagtaattgctttatgcggctgtaatcccataacctgtgaagacagcacatcatctaaatcccattccaaataatatttggtggtagtgttagctgtgaatttaccccggtacagctggtatcactataaatataattccatgtattaatagtcacagaaagactgtaagtgagcactatttttatgaacggaccactatggg

SEQ ID NO: 46587 - DNA, 610 bp, Homo Sapiens
ttttttttttttttttttagagagatagagatatatttcttctgttgcatatttcagacttcacgctgagcttcaggcacaattactccaggttcttctgagagtcttgacagagtcttcttcccacgctgctcatgtgacctcacttccagtgcacacctggaaactctgcatgggtctcagtgggccctgaccctgcctttcccatccaggggcagggtatgctggaaagccctggagccgccccaccccacttctagggtcccctggctacaaaagaactgtcctgctagagcccagctctgcagcgcccccgatatcacctgttcttcgggccttagagcctggcagggcacttgcagccctgtggagcctcagccacgagcaccacaggcccagaatggggcatgaggccctggagagtgaggcaggcccagcctcgtgcagaacaatagcaggtgggctcagcaagccactgctccccacagacatggcccacttcctggggctgctctgagccctattgcacatcttctgttctagtttctctcccaaccacccattttcctttttaaattaaaaaaaaaaaaaaaaaagacgcttaacgccc

SEQ ID NO: 46588 - DNA, 942 bp, Homo Sapiens
  misc_feature (618)..(618): n is a, c, g, or t
  misc_feature (853)..(853): n is a, c, g, or t
  misc_feature (858)..(858): n is a, c, g, or t
  misc_feature (866)..(866): n is a, c, g, or t
  misc_feature (872)..(872): n is a, c, g, or t
  misc_feature (881)..(881): n is a, c, g, or t
tggcgtgtgcctgtaatgccagctactcgggaggctgaggcaggagaatcgcttgaacccaggaggtggaggttgcagtgagctgagatcacaccactgcactccaccctggtgacagagtgagactctgtctcaaaaaagcaaaaaatggacagcctcccaaaccagagtaggttcagagagactcttgtattaccatttaatgggtatatttaaatgaattaataaatatttaaacttcagttttctaatatagaatatcaatagatataaccaccataaacaaaagctattagggtcagtaattttttaagttgtaaagatatcttggccgggcatgagccaccgcgctctgcgaggtactttttctatttttacaatttttttttgttctaaaccagggttttttaaccttaacaccattgacattttgggctgggaaattctttgttgtgggggcctgtcctgtgcattttaggaggtttaagcagctctggcccctaccagtagtatatgccctttaccccctggggttgtgacaacgaaaaatgtctctagacattgccaaatgctctcttgggggacaaaatagccaccaatcaagaaccactgttctanaccagcagtctcaaagcatggtctccatggaccactgaggtcctaagaccctttgagggaggagtgtagatgaagtcacaactgttttcataaaaatcaaaggtacctgtccattttcacccgtgtcgacatttgtacttacgggggcatagggcaaagtggattaaaatttggctggggcccttaacaggaatggcaggggcccccacactggtattcccttcacctccccagnttaanccaacacnaaagcnagaagaaangctgtgagaactaaaggtctcccctttttaaagaaaacttttttaccatttattttttaac

SEQ ID NO: 46589 - DNA, 557 bp, Homo Sapiens
cctagggaaatgccttggttcccattatatcttgagctggctaacagatttcctcagcaggcctgggaagaagctcgacagtttttcttgaaaaaagagaaaaaataaatgttttggttgattctgtattcgagtacccttgttaatattttaaattgtccaaacaaacattctaattgttccttaagaactcattttcccatgtttatactcttcccacactgtagatatggcatgtactttacactatttataatgactgtagatacttgaatgttctacttgctaattttgcaagttgagtttatttcatttatgcagagtatcttggtgtttggtagtttccatcttatgataatatatacattgcatttgtgatatgggtgaaaggagacataaaattagcaagtctgttttgttcttgtaataaagtaacttattctgttttcattgttgacttttcatgttaaggaaatacgaatctgaaagaaaaatgttaactccagctcttgaagtatcttaaataaagacttaattaaagtttaaaaaaaaaaaaa

SEQ ID NO: 46590 - DNA, 581 bp, Homo Sapiens
aacatcagaatggtagctgagtggaggttgtctcgaggtgttgaagaacagacacaagctttctttgaaggctttaatgaaattcttccccagcaatatttgcaatactttgatgcaaaggaattagaggtccttttatgtggaatgcaagagattgatttgaatgactggcaaagacaagccatctaccgtcattatgcaaggaccagcaaacaaatcatgtggttttggcagtttgttaaagaaattgataatgagaagagaatgagacttctgcagtttgttactggaacctgccgattgccagtaggaggatttgctgatctcatggggagcaatggaccacagaaattctgcattgaaaaagttgggaaagaaaattggctacccagaagtcatacctgctttaatcgcctggacctgccaccatacaagagctatgagcaactgaaggaaaagctgttgtttgccatagaagaaacagaaggatttggacaagagtaacttctgagaacttgcaccatgaatgggcaagaacttatttgcaatggtttgtccttctctgccggttgcacatcttg

SEQ ID NO: 46591 - DNA, 783 bp, Homo Sapiens
  misc_feature (718)..(718): n is a, c, g, or t
  misc_feature (725)..(725): n is a, c, g, or t
  misc_feature (768)..(768): n is a, c, g, or t
cacggacttcccagcctctaggactgtgagcaataaatgtttgatgtttataagcccccagactgtggcgattttgttatagcagcctgaacagactaagacgggggtgttgcttccatcaaaggatgtactaagttgtggattatttgtgaaattgaattacaaccttttccttaaggtcttttaccacctcccccccaaaaaaatcccccaaaactgattcagattttcatactttaatgaaatattttataatttgcaaatttttaagtaatttatgaaaaacctagatcagtggatctcctctctggctgcccattagaatgtcctgtggagattaaacttttttttttcagtttatggaccaagagttttgatttatttagggtggagttcaggatcagaatggtttcagaagctcccaggtgattccggagtgagttggagctgcaagcccctgagctagattataagatgcttctgggaaagaaccacattttaggaatttgcttcccacccagtgccctgcatttaatcagcacctgatgacttggcaggacttgccccaccagggtctggctttgaagggtagtggacaccaggatcctttggattaatcctctgccacctctctcttttcctcaaccgagagtgaatttatgtaattgagtgaaagtctacgaatcataattgtaataaattaaggctgggcatttgnttgaaantagataggataaagccaaagggtttgaacaagttgtggatggnttgtaaaaattaatc

SEQ ID NO: 46592 - DNA, 573 bp, Homo Sapiens
cgcgtccggtaacttggttgtactttttgtaactgcaacaaagtttgatggtgtttatgaggaaaagtacagcaataatctcttctgtaacctttattaatagtaatgttgttgtagccctatcatactcactttttaagacacagtatcatgaaagtcctatttcagtaagacccatttacatacagtagatttttagcagagatcttttagtgtaacatacatattttagagaattgttggctagctgtacatgttttgaaaagctgtttagctagctataaggctataattggaaatttgtattttttatttacagcaaaacatttattcagtcatccagtttgctaccaaaatatgttttagataagtgtgtgtatgtttgtttagaagttagaaattgtaaacactggtcttatgtttcatttggattcattattgcattgtcttgttaccagaaacaaattttgccgagctttttttgccctatatttcccagcataatttgattagaaagtacaaaaagggccaggcgcggtggcttacgcctgtaatcccagcactttgggaggc

SEQ ID NO: 46593 - DNA, 743 bp, Homo Sapiens
  misc_feature (573)..(573): n is a, c, g, or t
cggtattaaaacgaacggggcggaaagaagccctcagtcgccggccgggaggcgagccgatgccgagctgctccacgtccaccatgccgggcatgatctgcaagaacccagacctcgagtttgactcgctacagccctgcttctacccggacgaagatgacttctacttcggcggccccgactcgacccccccgggggaggacatctggaagaagtttgagctgctgcccacgcccccgctgtcgcccagccgtggcttcgcggasacagctccgagcccccgagctgggtcacggagatgctgcttgagaacgagctgtggggcagcccggccgaggaggacgcgttcggcctggggggactgggtggcctcacccccaacccggtcatcctccaggactgcatgtggagcggcttctccgcccgcgagaagctggagcgcgccgtgagcgagaagctgcagcacggccgcgggccgccaaccgccggttccaccgcccagtccccgggagccggcgccgccagccctgcgggtcgcgggcacggcggggctgcgggarccggccgcgccgnggccgccctgcccgccgagctcgcccacccggccgccgagtgcgtggatcccgccgtggtcttcccctttcccgtgaacaagcgcgagccagcgcccgtgcccgcagccccggccagtgccccggcggcgggccctgcggtcgcctcgggggcgggtattgccgcccagc

SEQ ID NO: 46594 - DNA, 600 bp, Homo Sapiens
gcacgagctccgccagtgtgtgtgacaagcagcttaaactgcaccctggagaacggcgtgccttgtgtgattcaggagtcggccccggttcataatagtttcattgattggagtgcaacatgcgaaggccagttttccagcgcatactgtccattggaattgaacgattacaatgcctttccagaagaaaacatgaactatgccaatggcttcccctgtcctgcagatgttcagacagactttattgatcacaactctcagtctacctggaacaccccacccaacatgcctgctgcctggggacatgccagtttcatcagctctccgccctacctcacaagcacccgaagcttgtctccaatgtctggactttttggttccatctgggccccgcaaagcgatgtgtatgaaaattgctgccccatcaaccccaccacggaacattcgacccacatggaaaaccaagcggtcgtgtgcaaggaatactacccggggttcaacccgtttcgcgcctatatgaacctggacatatggactaccacagcgaataggaatgcaaatttcccactgtctagagactcgagttactgtgggaatgtg

SEQ ID NO: 46595 - DNA, 1083 bp, Homo Sapiens
  misc_feature (674)..(674): n is a, c, g, or t
  misc_feature (843)..(843): n is a, c, g, or t
  misc_feature (888)..(888): n is a, c, g, or t
  misc_feature (933)..(933): n is a, c, g, or t
  misc_feature (941)..(941): n is a, c, g, or t
  misc_feature (968)..(969): n is a, c, g, or t
  misc_feature (971)..(971): n is a, c, g, or t
  misc_feature (976)..(976): n is a, c, g, or t
  misc_feature (978)..(986): n is a, c, g, or t
tgaggggctctgagccactttgctcccatctaggggactgccccccatggaactcctttgaagtcacagcagccttcctttctgtttgctcttggggctgagaggtggctcaaacactcggggtccctatggctctgggtcaatctaggccaggctgcaccccatggacagggagtctcagggctcctgatcatgcccaggccctggcctggggcctccctccttggcagctttcccacccccacgcccctggcatcctcagttgctatgggatgcccctccagggcaccagctcagggctaagcgaaggaagataggagcagctcagagctgccaggctctgccttcctcacagacctggtggggcaggtcctgttcacagcagcaggagtgaaggcctggccatcggtggagagggcagctgtcagagggctgggggccagggcacaggattgaagagtttcacatatcatcacagcatacactgggaatttggtgggggcagaagaacccagggccactccctcaatatgaagggaaaccaagctgaatgtgaccaccggcacactgctgccatgtcccatgtccacctttctccccgggaataactggccctgagacccctagacccaaggaggcctgtccatgccaagcatccgggaagcatggctggncttatccacccatgggtcacgtcggttcccaggggcagcatgggagatctttgggggcaacagggagagtctgggtggggagacgggacttgtccaagcagaaggcaggaccctgggaaatgcataatgtaaagacatcaataataagaattatttttttttgtagggnaaaatcaatatgtacattctgaaatcattttctctgtaaatgggntggatttcattttcacctttaaaggatgctttaaaggagaagatnatatttantaataaaaaccggctacaaaagtctgnnanaaaanannnnnnnnnaaaaagggcgggcccgctctaaaaagtaatcccttcgaggggggcccaagctttacgcgcgaaccccgcttttttctttgggacaaagggggggtcc

SEQ ID NO: 46596 - DNA, 651 bp, Homo Sapiens
tgattataatgatgagatcaggcaagcacagcttccaggaggttaacatatttgaatggtggttcagaaaatgcagatgttccagtggttcgagggaaacccaccttgcgtacaagaggtgtaccagccccagcaataaccagggaaggggaggagttacagcccggccagttggagttgtagtaccacgagggacgccaactcccagaggagtcctgtccacccgagggccagtgagtcggggaagaggacttctcactcccagagcaagaggagtccccccaactgggtacagacctccaccgccacccccgacacaagagacttatggagaatatgactatgatgatggatatggcactgcttatgatgaacagagttatgattcctatgataacagctatagcaccccagcccaaagtggtgctgattactatgattacggacatggactcagtgaggagacttatgattcctacgggcaagaagagtggactaactcaagacacaaggcaccttcagcgaggacagcaaagggcgtctacagagaccagccatatggcagatactgattgtactgtctgatgttgtgaaatagccaatctccaccagtcctgtatactgttcaacagtaatttttttctatgaaca

SEQ ID NO: 46597 - DNA, 227 bp, Homo Sapiens
gcctactactactatacggctgcgagaagacgacagaagggaataaggctctgtgcatacgaatggggctttgaaaggcgttgccgcggcttccaaagcgatgcgctgtgcctcgcctcgcctcgccccgcccagagcgagactccgtctgaaaataagtacacaaataaatcataagataattcatcaagaaaaaaaaaaaaaaaaaaaaaaaaaagtcgtatcga

SEQ ID NO: 46598 - DNA, 580 bp, Homo Sapiens
attggtttggggggagatcctttcctacccaaagtcataaatatattctttactgccttgtggaaattttatagttttgcctttcacatttgtctttagtctgtcctgaactgatttttgtgaaaattatgagttagaaattcaacttaacatttttcatattcgaagtggttgtctctgcactatttactgaaaagttcatcctttccccagtgatttgtaacactgcctctttcataaattaaatttttgtgtatgtgtgtgggtcttttgatggtttctattctgactgacatcaatttgtctaatcttgtagcagtacagtacagtcctgattactgcaactttaggaaaaggtctgataaaaaccaagatgcctccacattttgtcataattgtaaccaatttcacctctgtctccagtatcaccacaaaattgttcttccttggagtgtcttggctattcttagccaactgttcctccatattacttctagaattagaccaacaatttataaatcaaacaaacccaagagcattgaaattttgattggatttgtattgaattttatagattaat

SEQ ID NO: 46599 - DNA, 869 bp, Homo Sapiens
aagctgaatacaaattggtttggggggagatcctttcctacccaaagtcataaatatattctttactgccttgtggaaattttatagttttgcctttcacatttgtctttagtctgtcctgaactgatttttgtgaaaattatgagttagaaattcaacttaacatttttcatattcgaagtggttgtctctgcactatttactgaaaagttcatcctttccccagtgatttgtaacactgcctctttcataaattaaatttttgtgtatgtgtgtgggtcttttgatggtttctattctgactgacatcaatttgtctaatcttgtagcagtacagtacagtcctgattactgcaactttaggaaaaggtctgataaaaaccaagatgcctccacattttgtcataattgtaaccaatttcacctctgtctccagtatcaccacaaaattgttcttccttggagtgtcttggctattcttagccaactgttcctccatattacttctagaattagaccaacaatttataaatcaaacaaacccaagagcattgaaattttgattggatttgtattgaatttatagattaatctggtaaaccatgtcatctttacaatgttgtcttccaatacatgaatatggtacagctcttcatttacttaggcctttgaaatatctttcaataaagtttataattttctccccggagacagaaagagccacgaaaaacgcacaacaacagcgaggaacaatcgcacccaaccgacaaaaacgaaacaagacagaaaacacccatcgccccccgaaaacaaccgcgacaaatagcagcacatgcgaccaaaggtaccccacctttttggacggccgc

SEQ ID NO: 46600 - DNA, 534 bp, Homo Sapiens
ttttttttttttttttagaggcaaagaacaattttttattatcaaaaaggtttctgcacattgttgtggcaatattgtatctgtttagaaaatgggcttttccaaaagcaaacaaagataggttcctcaggtgaccaaaactgaaaatcaatatttccatgtttcattaatcaaggcataaaatacaattaaagcaaaatattttacattaaaatcttggttgtgtatttttttaaaagaagggaaatagtttagtttggggtggaaattaccagtgatttctatttttattaaaccattcactacaacaaataagtataaaaattccaattccacttttatacctatttatttgttgtagtgaatggtttaataaatggcagatttatgtccagaagtcactctattttgtcgtgtattaggggaacacattttgacatttttcgtaccaatcatcaatcatattcccttatcttgaagtttttgccttatattcaaaaagttcagtttgaattctcctttgccaggtgtgag

SEQ ID NO: 46601 - DNA, 572 bp, Homo Sapiens
  misc_feature (117)..(117): n is a, c, g, or t
cccagatctctccagccccagagctgaaaacaccaagtgcctatttgagggtgtctgtctggagacttagagtttgtcatgtgtgtgtgtgtttggttaatgtgggtttatgggttntctttctttttttttttttttttttttagtctacattagggggaagtgagcgcctcccatgtgcagacagtgtgtctttatagatttttctaaggctttccccaatgatgtcggtaatttctgatgtttctgaagttcccaggactcacacacccgttcccatctcacttgcccacccagtgtgacaaccctcggtgtggatatacccccgtggactcatggctcttccccacccccactttctataaatgtaggcctagaatacgcttctctgttgcaaaactcagctaagttcctgcttccaccttgatgttgaaatatcttatgtaagagggcaggggatgtcgtgaagatggcaagaagaacacagtttcaaatttctggaaaagagcctgtggtggagatctaaagatgtttagggaagagctcgactaaagaacaatgaaataaatggt

SEQ ID NO: 46602 - DNA, 564 bp, Homo Sapiens
gcccatcatagaatgtaaaaaaaaaaatcatattttaatatttaagttcctcctacaatgggtatgttaaataactatatctatacttagatatagtgcattgtctgtgtcccttaaagtgttacaaagagtttctctcaaaaggtccttaaggagagtgagagatgagagaggtgccttctctgtattagactcacacacatcagtccagttgaagaattggtttaaacttttaaatgagaacagaaattataattagtacctgaccaattgtgcctagatattaaagtatgttctctttagtactttccgttcaattaaatatcagtatattagggatttttttctacaggtgtatattttgttgaagagtcactttcctcaaccatttttttgtactgggcctttaaaaaaataaatccatccaactttaacacaacatttctcagtgtagaaatcatgtcttcttaattgctgaaccttactgcaaaaacttgtgatgtaagaaatttgtatggtgtggcagtggtctattcctaaggaactaaatatcatatagttaat

SEQ ID NO: 46603 - DNA, 557 bp, Homo Sapiens
cgtccagcaaccacgaccacgacgacggcgcctcgggcacacccaaggagaagaaggccaagacctccaagaagaagaagcgctccaaggccaaggcggagcgagaggcgtcccctgccgacctccccatcgaccccaacgaacccacgtactgtctgtgcaaccaggtctcctatggggagatgatcggctgcgacaacgacgagtgccccatcgagtggttccacttctcgtgcgtggggctcaatcataaacccaagggcaagtggtactgtcccaagtgccggggggagaacgagaagaccatggacaaagccctggagaaatccaaaaaagagagggcttacaacaggtagtttgtggacaggcgcctggtgtgaggaggacaaaataaaccgtgtatttattacattgctgcctttgttgaggtgcaaggagtgtaaaatgtatatttttaaagaatgttagaaaaggaaccattcctttcatagggatggcagtgattctgtttgccttttgttttcattggtacacgtgtaacaagaaagtggtctgtg

SEQ ID NO: 46604 - DNA, 1001 bp, Homo Sapiens
  misc_feature (1001)..(1001): n is a, c, g, or t
tcccttctttaccttcatttcatcctgttggctgctgccaccaaatctgtctagaatcctgctttacaggatcatgtaaatgctcaaagatgtaatgtagttctttgttcctgctttctctttcagtattaaactctcctttgatattatgtggcttttatttcagtgccatacatgttattgttttcaacctagaaacctttatccctgcttatctgaaacttcccaacttccctgttctttaagacttttttttttttttttctttttgaaacagagtctcgctctgtcccccacgctggagggcagtgggacgatctcagctcactgcaagctccaactcccgggttcacgccattctcctgtctcagccttccaagtagctgggaataccaggtgcccgctaccgtgcccggctaatttttttgtatttttagtaaagacagggtttcaccatgttacccgggatggtcttgatctccctgacctcctgatccacccaccctcaccttcctaaagtgtttgggattacagggcgtcacccaactgcgccccgggccaaaaactttttttttccaccttaagccagggcggggccttctccatttcttctttctccctcccagaccggggagcttccccattaaaaaacaccgcaacgccccgggggccctcttaaacctctttcgtttgggggcgagatttgacctgcgcacgttccggggttctctttaaacggggcgaaggtcccccaacacaagccgttgtccttcccgacaccgtgattccccgaaactatccctctggggggcccgagaggaacatccttcctccggcgcctttgaaccggcgtttcacaaaataagcccctgggccccctacatgagcgaagtggagacccaaccaaaacaacccgtggcgccaaggaaaatccgcggttatctctacaaaacagaacaactctgtcgcttgtgacccaccccctgccttatctaaccccn

SEQ ID NO: 46605 - DNA, 613 bp, Homo Sapiens
cactactgctgcagctcacaaacacctctgcatattacacgtacctcctcctgctcctcaagagtgtggtctattttgccatcatcacctgctgtctgcttagaagaacggctttctgctgcaatggagagaaatcataacagacggtggcacaaggaggccatcttttcctcatcggttattgtccctagaagcgtcttctgaggatctagttgggctttctttctgggtttgggccatttcagttcttatgtgtgtactattctatcattattgtataacggttttcaaaccagtgggcacacagagaacctcactctgtaataacaatgaggaatagccacggcgatctccagcaccaatctctccatgttttccacagctcctccagccaacccaaatagcgcctgctatagtgtagacatcctgcggcttctagccttgtccctctcttagtgttctttaatcagataactgcctggaagcctttcattttacacgccctgaagcagtcttctttgctagttgaattatgtggtgtgtttttccgtaataagcaaaataaatttaaaaaaatgaaaaaaaaaaaaaaaaaaaaaaaaaaggagggggg

SEQ ID NO: 46606 - DNA, 434 bp, Homo Sapiens
cccccgggctgcaggctttgcacatggaggatacctagtaaagagcaagtagtctagtttcaagtgtagtatcttgtagggaaatgggagtagctaagcctggaaaggttgaatggggcataatcattaagactaggctaaaaattcgagactttattttttaggcattagggagccccttcccaagtgactatcttccttgaaactttgttttctttcaatgacatcacacgatactggttttattctggactatctatcctactcatgggtccaagggaaacttagtagagatgcgacttgcatggggctgtactcagacatgtggtcctaggtattataatgggattgtccccagattaacaggaagcattgttatcaaaggaagagttcaaactgagatagataagagaagcacaaagtataagatagaa

SEQ ID NO: 46607 - DNA, 517 bp, Homo Sapiens
atctgtctaattcacccttttcttttaaaagccccagtttcagaatgtgaatcagggatattcctgttactaaaatggaaatgtaattccaagtttcttttttaattttttaaatttatgtcattgtattggactatgcttatatttaaaactacttaatttagagttaactacctgcttaggccccagaacattacttatgcccttcagttaccaaaagatttgtgcaaggttttgtaccctggtaaatgatgccaaagtttgttttctgtggtgtttgtcaaatgttctatgtataattaactgtctgtaacatgctgtttccttcctctgcagatgtagctgctttcctaaatctgtctgtctttctttaggttagctgtatgtctgtaaaagtatgttcaattaaattactccatcagacacttgtctgtcttgcaatgtagaagcagctttgtagcaccttgttttgaggtttgctgcatttgttgctgcactttgtgcattctgaacatga

SEQ ID NO: 46608 - DNA, 614 bp, Homo Sapiens
  misc_feature (296)..(296): n is a, c, g, or t
  misc_feature (507)..(507): n is a, c, g, or t
  misc_feature (558)..(558): n is a, c, g, or t
ggggctgcactgcagccggctggacgaccacgccctcactggggccagtgactcccgagtcatcctctggaaggatgtgaccgaggcggagcaggcagaggagcaggccaggcaagaggagcaggtggtcaggcagcaagagctggacaacctgctgcatgagaagcggtacctgcgggcgctgggcctggccatctccctggatcggccccacaccgtgctgactgtcatccaggccatccggagggaccctgaggcctgcgagaagctggaagccaccatgctccgactgcggngcgaccagaaagaggccctgctgcgcttctgcgtcacgtggaacaccaactcgcggcactgccacgaggcccaggccgtgctgggtgtgctcttgaggcgagaggcccccgaggagctgctggcctacgaaggcgtgcgggcagcgcttgaggccctgctgccctacactgagcggcactttcagcggctcagcaggaccctccaggccgncgctttcttggacttcctgtggcacaacatgaagctccctgtgccggccgncggccccaccccctgggaaacccataaaggcgcactgccctaaaaaaaaaaaaaaa

SEQ ID NO: 46609 - DNA, 583 bp, Homo Sapiens
ggcacgagggctgaacttcatttctgtatcacctgacctctggatgccaaaacgtttattctgctttgtctgttgtagaattttagataaagctattaatggcaatatttttttgctaaacgtttttgttttttactgtcactagggcaataaaatttatactcaaccatataataacattttttaactactaaaggagtagtttttattttaaagtcttagcaatttctattacaacttttcttagacttaacacttatgataaatgactaacatagtaacagaatctttatgaaatatgaccttttctgaaaatacatacttttacatttctactttattgagacctattagatgtaagtgctagtagaatataagataaaagaggctgagaattaccatacaagggtattacaactgtaaaacaatttatctttgtttcattgttctgtcaataattgttaccaaagagataaaaataaaagcagaatgtatatcatcccatctgaaaaacactaattattgacatgtgcatctgtgcaataaacttaaaatgattattaaataatcaaatatatctaca

SEQ ID NO: 46610 - DNA, 528 bp, Homo Sapiens
agtgggccggtcaggctggggcctgggtcagagcggtgctgcccgtgccgcctgaagagctgcagccagaacaggtggctgagctgtggggccggggtgaccggatcgaatctctcagcgaccaggtgctgctgctggaggagaggctaggtgcctgctcctgtgaggacaacagcctgggcctcggcgtcaatcatcgataagaagcctctacagcacccctgccccctaatttatacagaaaccggacccactaatcctctgggattggccgactgtgagctgcagataaggctatcagccaccaaagagcaatgaacaatggaaacttcagagagctgaagaaagggggaggcctgtgttcttggcctgcccctgagtcttctggctgggggcaggttgcctgggcaagaactgcttcttcaattccttaacaaatgcaaccaccaacacccagatctctctctctctttattttcagtttttttgctgttatccagataattaataaaaaccaaccacgcaaaa

SEQ ID NO: 46611 - DNA, 676 bp, Homo Sapiens
  misc_feature (28)..(28): n is a, c, g, or t
  misc_feature (30)..(30): n is a, c, g, or t
tttttctcagcatctgcatgtgggcagngnattggatgggcagctcatctctgtcccacttggcatcagctggcgtcatgcaaagtcatgcaaaggctgggaccacgtgagatcattcactcatacatctggccgttgatgttggctgggaactcacctggggctgctggcctgaatgcttataggtggcctctccttgtggcctgggcctcctcacaacatggtgtctggattcccaggatgagcatcccaggatcgcaagagccacgtagaagctgcatcttgtttatacctttgccttggaagttgcatggcatcacctccaccatactccatcagttagagctgacacaaacctgccttggtttaaggggagaggaaatattgcctgggtcatttatgaaaaatacagtttgtcacatgaaacatttgcaaaattggtttttgttggattggagaaagtatcctagggaagggtgggtggagccaggaaacacgaggagttcaggtgaagcaccaagcttaaagcgtgggcacgtgtgccgacagaaagaacccacgtgtatatgaggggatcaaaaataaattggtactacttaccttacccatggcaagcactgtgctcagggctaaaacgggccttggctttaaggaacaccacaacttacggtgttgg

SEQ ID NO: 46612 - DNA, 988 bp, Homo Sapiens
gcgaattcggcacgaggacccgacatcgagccggccgcgctgccccagccacccgccacggagaagctcaccactgctcaggaggtgctggcccgggcccgcaacctgatttcacccaggatggagaaggccttgagtcaattggccctgcgctctgctgcgcccagcagccccgggtctcccaggccagcactgccggctaccccaccagccaccccgcctgcagcctctcccagtgctctgaagggggtgtcccaggatctgctggagcggatccgagccaaggaggcacagaagcagctggcacagatgacgcggtgcccggagcaggagcagcggctgcagcgcttagaacggctgcctgagctggcccgcgtgctgcggagcgtctttgtgtccgaacgcaagcctgcgctcagcatggaggtggcctgtgccaggatggtgggcagctgttgtactatcatgagccctggggaaatggagaagcacctgctgctcctctccgagctgctgccggactggctcagcctccaccgcatccgcaccgacacctacgtcaagctggacaaggccgcggacctggcccacatcactgcacgcctggcccaccagacacgtgctgaggaggggctgtgagcctgggggccactgtggacagacgtgggcttcagaagctcgctggcctgggcccaccagcattttcttttatgaacatgatacactttggtcttcctttccccagcgcccctgagggccagaggcagatgtgggctgcaggctgcacagcccgagggtctctggctggcgggcggtgggccccctcatggggctcacctggtggattcacattaaccggtttctggggggcaaaaaaaaaaaaaaaactcgagactagttccaacgccgagcggagaaggcagagaccgggagcgccaaaaaatagctgggggggcaccatgggctgggatcacccaccatcgaggga

SEQ ID NO: 46613 - DNA, 422 bp, Homo Sapiens
agctgggatgtatatattcctgcaaggaaagaaaaggaaatggcttcacattgctggatgggagcagtatgtgtgttgtttctgggtataatcttcctagctgcacttttcccatacatttctttctactaaaaatcatgaaagtttgaattatagttcctctcacaggattgaaagcaagtatcagaggagtcatccattcaaaacacagttcttccactgcagtatccgatatgttttgtatgtgcgctaggctgtcttttcattcagtctacaatacagttcaccagtgtggagaccttttgccctgcctgatttgttttgttttgttttactcactcttttcaatgacatttggttttggccagtatgaagagtaatggatgttggaataccttctgccagttaaaaaaaaaaaaaaa

SEQ ID NO: 46614 - DNA, 806 bp, Homo Sapiens
ggggggctgagtggaagcagatgcctgcacaagccaagtgtgtcttattgatctgtacaagctgatagaaggaccatctgctgaaatccagggctcctgagttggtgggtttgcttgtgaagcttctaggacaaggcgcagccagatggaagggagagggtccagggcttcctaaatgcagccgcatcacctgtcaactcgctgcagtttcagagacagtggaagctgctctttacctcaaaagcacaaagcagaattggcaacttcacttgtctcaagagctccaagatcctttggtctcgtgtcctttggcaccccgtaactggactggggacaaatttgttacgtgtttccaaggctacagacatggcgccatcctcacaggcctagctcatgtcatggatcaggtgctttgctggggggatacaatgacccatgtggtctgcgtcttctgccattggcttgaactgggcaccccctgaagtctccatctcagctgtatattctagtccaaattttcctggctcccctgctccctcccaggtcctgcacactgtctttttgccaacacctcagccctgtttgctatttcatgtctgcatggtacgagacaccccttcacggcatacactgccatggtatgtacatatgcatccacgtgtgtgtatgtgtagcatgtagctcattctgctcagcctctggcgccgttccacattgctcccagccccattgctgtcactgtcgtcccagatgtccttgccatgggcacagacaatctgccgctcctgggaaaaccctgggggctg

SEQ ID NO: 46615 - DNA, 633 bp, Homo Sapiens
taagactgggtcctttggagttactgcagttactgttggagattccaactctaatgtcaatcgttccttatcaggagaccaagacacattccaccccagtggggggtcccataccactcatggatctgaatcagatggacactcacatgggagtcaagaaggtggagcaaacacaacctctggtcctataaggacaccccaaattccagaatggctgatcatcttggcatccctcttggccttggctttgattcttgcagtttgcattgcagtcaacagtcgaagaaggtgtgggcagaagaaaaagctagtgatcaacagtggcaatggagctgtggaggacagaaagccaagtggactcaacggagaggccagcaagtctcaggaaatggtgcatttggtgaacaaggagtcgtcagaaactccagaccagtttatgacagctgatgagacaaggaacctgcagaatgtggacatgaagattggggtgtaacacctacaccattatcttggaaagaaacaaccgttggaaacataaccattacagggagctgggacacttaacagatgcaatgtgctactgattgtttcattgcgaatcttttttagcataaaattttctactcttttaaa

SEQ ID NO: 46616 - DNA, 621 bp, Homo Sapiens
agaattatggtcacagaatagaaagtaactattatgaacactgaaaatgtaaaaaaaatgtaacaaagaaaaatagttagaggaaggagaggaagtaaaggaacaatcattttctcatgattattattatttcagagtaaattgtgagttatttcacaattcaaaaagaatggactgttttaaaaaattagtaatagatttcaaaatgtccattttgtaaatcgtttctgaatactttgtcaacagttactcatcattaatggcttatacttcactaaaattccatggaaaaccaactagtagcctgtagagtcacataggagagaacaagtgaattctttgggtggcgcaagcatagatgttaggactgacaaaaaaaaaataataaaaataaacctgtgcattgatatgatcacaaatgatcagggaaagaggaaacagaaactctcatacgccattattacaagtgtaaattggttcaaccttttcgtcttaattgacacattgtaattgtatatatttatggaagcacagtttgatattttgatatacatacatggtatataacgatcaaattaggatatttaatgtacccatcatctcatgcatttatcatttctt

SEQ ID NO: 46617 - DNA, 893 bp, Homo Sapiens
  misc_feature (754)..(754): n is a, c, g, or t
  misc_feature (813)..(813): n is a, c, g, or t
ggcttgacggaagagttttgtgtggggaagtcagagctgagaggttatgggccaggaatccgggtcgatgaagtctcgtttcacagctctgtgaatctggacgaatttgagtctcatcgaatcctccgcttgcaaccacctcagggcgagctgactgtgatgcggtaccaactctccgatgacctcccctcaccgctccccttccggctcttcccctctgtgcagtgggaccgaggctcaggccggctccaggtttatctaaagttgcgatgtgacctgctctcaaagagccaagccctcaatgtcaggctgcacctccccctgcctcgaggggtggtcagcctgtctcaggagctgagcagcccagagcagaaggctgagctggcagagggagcccttcgctgggacctgcctcgggtgcaaggaggctctcaactctcaggccttttccagatggacgtcccagggcccccaggacctcccagccatgggctctccacctcggcctctcctctggggctgggccctgccagtctctccttcgagcttccccggcacacgtgctctggcctccaggtccgattcctcaggctggccttcaggccatgcggcaatgccaacccccacaagtgggtgcgacacctaagccacagcgacgcctatgtcattcggatctgaggctccccaaacgaggacacgacggccaaggtggcagtttgtcccacgggaggacagtcgtttctttttcagcctnctggccttcggactctgaatctgggcaggaagagtcctcagttcccaaaccaggagggngcaatgggcccaggctttctgttgtatctgatgcaggaaggactgcaagtggatcagaacttacaaacctaacttttatt

SEQ ID NO: 46618 - DNA, 1010 bp, Homo Sapiens
gtggatggatcttttccacaagataacaatggctctttgaatattaaaataagagatattcaggccaattcagttttggtgtcctggaaagcaagttctaaaattctcaaatctagtgttaaatggacagcctttgtcaagactgaaaattctcatgctgcgcaaagtgctcgaataccatctgatgtcaaggtatataatcttactcatctgaatccatcaactgagtataaaatttgtattgatattcccaccatctatcaaaaaaacagaaaaaaatgtgtaaatgtcaccaccaaaggtttgcaccctgatcaaaaagagtatgaaaagaataataccacaacacttatggcctgtcttggaggccttctggggattattggtgtgatatgtcttatcagctgcctctctccagaaatgaactgtgatggtggacacagctatgtgaggaattacttacagaaaccaacctttgcattaggtgagctttatcctcctctgataaatctctgggaagcaggaaaagaaaaaagtacatcactgaaagtaaaagcaactgttataggtttaccaacaaatatgtcctaaaaaccaccaaggaaacctactccaaaaatgaacaaaaaaaaaaaaagcgaaagactgcagttgtgctaaaaacaaaacaaaacaaacaawcaaacaaaaaagtaaaaaaagattactttcgagagagaagtttaagcttcaccaatgctgcycctgaccaatggaaatatgtacaacttcagcattttaagtaactggcttcaagggggtamtgtggmaaccaaataaaawaactccattttctaaaactttcatgtaacttttatgtctggactamagttcaagtggacaaaaamatttctgtattttttttaagtaaataagagwagttgaactgrgcaaaacccctmckgtgttgtatamamatattagcaagrgtttttgmgtkacmgawaamttgaatkgmasgggggtataaa

SEQ ID NO: 46619 - DNA, 623 bp, Homo Sapiens
gcctttctgaaggcaggaaggagttggcacagaggccccctgatccaattctgtgccaataacctcattctttgtctgagaaacagcccccagtcctcctccactacaacctccatgaccttgagacgcatcccaggaggtgacgaggcaggggctccaggaaaggaatcagagacaattcacagagcctccctccctgggctccttgccagctccctcttcccttactaggctctatggcccctgctcagtcagccccactccctgggcttcccagagagtgacagctgctcaggccctaacccttggctccaggagacacagggcccagcacccaggttgctgtcggcaggctgaagacactagaatcctgacctgtacattctgcccttgcctcttaccccttgcctcccagtggtatttgaataaagtatgtagctatatctgcccctattttcctgttctgcagccccccaaatccacatgtaactcattactgtctcctgttatttatctcagtagtcccctctcctagccactctagcccctattaactctgcattaagcattccacataataaaattaaaggttccggttaaaaaaaaaaaaaaaaaaaaaaacc

SEQ ID NO: 46620 - DNA, 652 bp, Homo Sapiens
ggcacgagggctgcctaggctggggtcccaggtggggcccagccaggaggtggggtgtggacccggccctggcggcggagtcagggtcccaagatcccacctgtatggtcgctggccagtgattctccttctgagccgtgtttcccctctccctccctctccacgtgggcagggcaggccccatcgctttcctctgataaccacatggacacatcctgaagtcagcccaggcgccctgagcatcttggggcacctggaccccatcacaatactccttcttccttcaggtccctgggtgaaggctttgctgaaaccgaccccccttttcacgtcccttctgcctctgccccgttggatgccctgactgggggcaggggaagagacagggcacagctggccacagggctcagccactgagcaggctgttccgggcctttggctttgcatcctggacggggagtgtcctgtcagggaccagatgtgtcctgcctcatccctagctccaatcccttccccacgtgaccggggattctggttgcaataaaacatgctgctgctggtggcggagctccctgtccctttgccccaggtttcctcccggaggcagacagtctcccagagctgagggcttgcctctggagaccccagcccc

SEQ ID NO: 46621 - DNA, 632 bp, Homo Sapiens
ggcacgaggccttccattacttcacaaacaagccttcagaatcagatgaatggaggacctttttatagccagaatccagtatctcttgctcctcctcctccctccatcctacaggtaactcctcagttacctttaatgggatttgtggccagagtccaagaaaatatttcagatacaccacctccaccgccacctgtggaagaaccagtctttgatgagtctcccccacctcctcctcctccagaagattacgaagaggaggaagctgctgtggttgagtatagtgatccttatgctgaagaggacccaccgtgggctccacgttcttacttggaaaaggttgtggcaatttatgactatacaaaagacaaggaagatgagctgtcctttcaggaaggagccattatttatgtcatcaagaagaatgacgatggttggtatgagggagttatgaatggagtgactgggctttttcctgggaattacgttgagtctatcatgcattattctgagtaaagctcagcagggctgtgcttgcctcacaggaatagtcaggtcttcccagattatctgaaggccctggggattccactccagtaaagtagaatgaaggatacaaatgataaaaatta

SEQ ID NO: 46622 - DNA, 885 bp, Homo Sapiens
ggccacttgggccttacttgtctctcctgctggagcctgggctggtcgggggtgagctgtgcagggagaaggctgggcccccttggtctcaggtgaggagggcccgttccctgcctcacctgagggggacctgagaaggcagtcttccctctgctgtttctaagactgcggtgttcaacctgtgcctggtgctctcagcataactttcccttctcctttccagggtagcatcacgcccacagactacaccctctccaagtgctacctcccacgtgaggatgtggttttgatcatctactgtggagtggtgggcttccttgtggtcctcacactcactcactttgggcttctagcctcaccttttctttctggtttgaacttgctcggaaagcgtaagacaagatgaagagcaggcgccattataaatatcaaagcccaagaaatggaactttgggcagagatcatgttagaatcaagtggatgatgagaccaattacaggccgtctctctgcacagcacagaaattctcaatcactgaaatgagtaactgcaaaataaatagttgattgtactgttctcatgctataaaagtggacaggtactctacaacaaatctgttttctcatttttatcaaatatatgtatcatcaaaggttgcatctgtacagtatgtaaatgctattaatgtcgtcactcacatgcacgacagtccttgttcccccaggaagggcctggtggccccagcacacacttgggattatgtgtatacataaataaatattggggctgttccctcttcctgtgaagtggttctcaaattcctatgtactgtaaagctgtaccctttaaagtacagatgtggcccggcacagtggctcacacttg

SEQ ID NO: 46623 - DNA, 381 bp, Homo Sapiens
gaggcttgggagaaagtaaatacttgatggctctgaagaatctgtgtgacttgggcattgtagatccatatccaccattatgtgacattaaaggatcatatacagcgcaatttgaacataccatcctgttgcgtccaacatgtaaagaagttgtcagcagaggagatgactattaaacttagtccaaagccacctcaacacctttattttctgagctttgttggaaaacatgataccagaattaatttgccacatgttgtctgttttaacagtggacccatgtaatacttttatccatgtttaaaaaagaaggaatttggacaaaggcaaaccgtctaatgtaattaaccaacgaaaaagctttccggacttttaaatgct

SEQ ID NO: 46624 - DNA, 879 bp, Homo Sapiens
  misc_feature (649)..(649): n is a, c, g, or t
  misc_feature (698)..(698): n is a, c, g, or t
agaaattccagaggggagaagaatgtaaaagtttggtggtgggtggcttggcattgcccctttttcccaccgattcggtggctggtgaaggtgggagatgtgaactccaattaagggactggagagaggtgaagaattttgcaggtgggagatttggatttgaatgtggacttgtaaatgacttgaccttgccatctgtgttcaaggtcacggtttgctgtggggttcctgggagagcttactcaccccggagtcttttctttctcttgctccaagaagagccctgttggtgctttaccaccgcttggagtctcccgaggacacaaacaggcagagagggacgtgtagggagagttctttcctgttttctgtgctttcctttttacaggactcccggaaggccactcatggccatgccaggagctttctcagaaacagtcataaacgatctcttgagtctctttcttgtcctcccagctgagctttcttattccaccctttctggtgtctataggaatgcatgagagaccctggacgtttttctgctctcttctggccctccatggagtcatgggcctcggcctcggcggctcctcaccctcacaatttatttcctcctcccgtgccagccccttcttttgtgtctganaccggttttaaaatgtgactctcccagagaagaagccgctggctgtatngaacttgacggcgcttttgtaaggtgccaccccccaactttaaggtagctaaaccaatttttaaaagattcaatggcttgttcatcctccagatgtagcctattgatgtacccttcccaacggagtgtctggaaatgggggggggccctgattttatgggattccctaattaaaacggcgg

SEQ ID NO: 46625 - DNA, 854 bp, Homo Sapiens
gtcattttaatggaaaatttattaagacaccaccaggagtttctgcccccacagaacctttattgtgtaagtttgctgatggaggacagaaaaagagacagaacccaaacaaatacatccctaatggaagaccatggcatagagaaggagaggctggaatgacacttacttacgacccaactacagctgctatacagaacggattttatccttcaccatacagtattgctacaaaccgaatgatcactcaaacttctattacaccctatattgcatctcctgtatctgcctaccaggtgcaaagtccttcgtggatgcaacctcaaccatatattctacagcaccctggtgccgtgttaactccctcaatggagcacaccatgtcactacagcccgcatcaatgatcagccctctggcccagcagatgagtcatctgtcactaggcagcaccggaacatacatgcctgcaacgtcagctatgcaaggagcctacttgccacagtatgcacatatgcagacgacagcggttcctgttgaggaggcaagtggtcaacagcaggtggctgtcgagacgtctaatgaccattctccatatacctttcaacctaataagtaactgtgagatgtacagaaaggtgtcttacatgaagaagggtgtgaaaggctgaacaatcatggatttttctgatcattgtgctttaggacatattgacagttttgcacaggttctgaaaaacgcgctttatatggaatcacttaaaactattttgctatagttctaaaaagtgcattaaaccctaaaatcattctagtagctgtccccgaaaggtttatttagtcacaaacacaaaaa

SEQ ID NO: 46626 - DNA, 641 bp, Homo Sapiens
  misc_feature (621)..(622): n is a, c, g, or t
cctaacagcataattgccttttcctatgtaaatattatgatggtggatcaagacataagtaaatgagcctttctgcctcacatcagccctgtgtataaagccattattctctgatgcactgtttgccccagtaactcactttaaaacctctctttccagtgttccctctctccctccagggccactgcttgaagaagaatatgtatgtttctatcttgtatgtctgtgtgcccctcctgccccgaaagtgctgactatggggaaatcttttagctgctgtttttagactccaaggagtggaaattatgtggaagaagcaaacctgatacaatttgcccaaggtaaacagtttgaaaagacaaatgggcctgccaaactgtacagtttcttccccaagagctgttaggtatcaaaatgttgtcctttcccccctccgtgcttttctggttgagatcatgtcattgatgaactgccaaagtcaggggaggagggcagagactttgtgtttacatctgcatttctacatgttttagacagagacaatttaaggcctgcactcttatttcactaaagaaaaactaatgtcagcacatgttgctaatgacagtggatttttttttnnaataaaaagtttacagatc

SEQ ID NO: 46627 - DNA, 1101 bp, Homo Sapiens
  misc_feature (398)..(398): n is a, c, g, or t
cagctaatgaaggtgaataacaacttgagtgacgagctgagaattatgcagaaaaagcttcaaacactccagagtgaaaattcgaacctcaggaaacaggccacaaccaatgtatatcaggtgcaaactggttctgagtacacagacacttccaaccactcttccttaaagagacgtccgtctgcccggggcagtaggcccatgtccatgtacgagaccggatcaggtcagaaaccatatctcccaatgggagaagcgagccgccccgaagagagcaggatgagactccagcccttccccgcgcacatcgggaggagtgcacttgtgacctcctcttcatctctgccttccttcccctccacactttcctggtcgagggacgaaagcgcccgaagatnccaggctggagaagcagaacagcacacctgagagtgactacgacaacactcccaacaacatggagccagatggcatggggtcaagccgaaagggacggcaaagaagtatggtgtggccaggggatggcttggtaccagacacagcagaaccccatgtggccccaagccccactctccctagcaccgaagatgtcatcaggaagactgaacagatcaccaaaaacatacaggagctcttaagagcagcccaagaaaataaacatgacagttatattccctgctcagagaggatacacgtagctgttacagaaatggcagcattattccccaaaaaacccaagtctgatatggtgaggacttcccttcgtttactgacgtccagtgcctaccgactgcagtcagagtgcaagaagaccctcccagggggaccccggctcacccacagacgttcagctggtcacgcagcaggtcatccagtgtgcgtwcgacatcgccaaggctgccaarcagctgggttaccatcaccaccaaagagaacaacaactgacaagggcagggcacscctcctctgttttctaggctttataaagtcaatctcaawtcagagcvractcttcarattctacaaaaaaaaatttawgacggttaaamttttwaaaaaaaycatwtattttkcwgtttytaacaatttcamtattaaccc

SEQ ID NO: 46628 - DNA, 775 bp, Homo Sapiens
catggtgtttccttctgggcagatcagccaggcctcggccttggccccggcccctccccaagtcctgccccaggctccagcccctgcccctgctccagccatggtatcagctctggcccaggccccagcccctgtcccagtcctagccccaggccctcctcaggctgtggccccacctgcccccaagcccacccaggctggggaaggaacgctgtcagaggccctgctgcagctgcagtttgatgatgaagacctgggggccttgcttggcaacagcacagacccagctgtgttcacagacctggcatccgtcgacaactccgagtttcagcagctgctgaaccagggcatacctgtggccccccacacaactgagcccatgctgatggagtaccctgaggctataactcgcctagtgacaggggcccagaggccccccgacccagctcctgctccactgggggccccggggctccccaatggcctcctttcaggagatgaagacttctcctccattgcggacatggacttctcagccctgctgagtcagatcagctcctaagggggtgacgcctgccctccccagagcactgggttgcaggggattgaagccctccaaaagcacttacggattctggtggggtgtgttccaactgcccccaactttgtggatgtcttccttggaggggggagccatattttattcttttattgtcagtatctgtatctctctctctttttggaggtgcttaagcagaagcattaacttctctgg

SEQ ID NO: 46629 - DNA, 683 bp, Homo Sapiens
ggggatggggatcttcagcgaaggaactctggccacccaaacaggacaagagcacgcctggggccaagcagacgggcaagtggagccacctctttcctccctccgcggatgaagcccagccacatttcagccgaggtccaaggcaggaggccatttacttgagacagattctctcctttttcctgtcccccatcttctcgtgggtccctctaacatctcccatggctctccccgcttctccgtggtcactggagtctcctccccatgtacccaaggaagatggagctcccccatcccacacgcactgcactgccattgtcttttggttgccatggtcaccaaacaggaagtggacattctaagggaggagtactgaagagtgacggacttctgaggctgtttcctgctgctcctctgacttggggcagcttgggtcttcttgggcacctctctgggaaaacccagggtgaggttcagcctgtgagggctgggatgggtttcgtgggcccaagggcagacctttctttgggactgtgtggaccaaggagcttccatctagtgacaagtgacccccagctatcgcctctagccttcccctgttggccactttccagggtggactctgtcttgttcactgcagtatcccaactgcaggtccagtgcaggcaataaatatgtgcctg

SEQ ID NO: 46630 - DNA, 755 bp, Homo Sapiens
cgcgagtgaaggaagacgaagtgcgtgacccgaccggctgtggtgttccagtccccactgaccagtaggagcagcagggcgtcggcttgtgagccatgaccatgcagttcatcagccaccgattcccagaagatcatgatcccaccattgaagatgcttataagatcaggatccgtatgatgatgagcctgccaatctggacatttggatacagctggacaggcagagtttacagccatgcgggaccagtatatgagggcaggagaagggtttatcatctgttactctatcacggatcgtcgaagtttccatgaagttcgtgagtttaaacagcttatttatcgagtccgacgtactgacgatacacctgtggttcttgtgggaaacaagtcagacctcaaacagctaagacaggtcaccaaggaagaaggattggccttggcccgagaattcagctgtcccttttttgagacatctgctgcataccgctactatattgatgatgttttccatgcccttgtacgggagatacgtaggaaagaaaaggaggcagtactggccatggagaaaaaatctaagcccaaaaacagtgtatggaagaggctaaaatcaccattccggaagaagaaagattcagtaacttgaagagaagatgtgaagtgtctatctgtgaactgcagtgctgtatcaaagcagtccagtaacctgcagtactgagtatggtgcttgctctttcacttaactgataagaggga

SEQ ID NO: 46631 - DNA, 668 bp, Homo Sapiens
ggaagtttgggttgatttttgtggtgttttgtttaatagagaattttttttttcctgttcccctgtcagctggtctgacagatttaagaactctcattcttaaaagactttggacttaaattctagcattttagactaggactgttctactgtgaagaaagttctgtctcctttagcccggtttgtttctccctgctcaggtctagaatcccaagcagtgttcttttctggtgaacactgtgagccgcagatgtgactttttttttaaagtcatctcttcagcaatccagaggttccttgacctcattatttgtcctatctctcccttatagtcctaagccaagacatttgacctttgacatttgacctttgcagtgtcatgtgagggcgtcagtatagaggcctttgcatctgggcctggcacccgctctctgcctctggaggctaaaccctgtctggatttctcttgggatctaacgtgggatcttctggacagacaaccgtgacatcagcagtgctggtggtgctgtgtgtggactgaacacctgcactttgcagaggacacgctgcatgggccccgcttgcggttcattcaggcctgctgcaggagctctgagaacaagaaagagtggacacccattcccctgcatcatctgtcttgcgtgcta

SEQ ID NO: 46632 - DNA, 908 bp, Homo Sapiens
tgaaataacttaatgttttaaatttatttatgtagatcacatcatttttatcgtatgcagtgcaaatatgtgaaatgtcttttggtttattccaacaattatttattttagaaagtaagtttaaagactttaaggacattcaaagtttaaaatagtgttcaaattgcaaaatttggcaatcttcatataaattggtttcttttctaacttttcaaaaactaacattaaatgtcaattataggaaaacatagttggaaatgtaatcatccaaagatcatttttaaaatgaaatttaattagcacatattgaacatttgacttaattgttaaaccccagttttgttttgtttttttaatcagatttttgcacactgattagtttttgtgttgtggcttttgttgctttattattcaaggtttttttttttttcttccccatgggggagattgtcttccaatgtttaactacgtttaaataaataaaaattgaattttattgttcatttatataaaatctgataccttgatgtaatttcacaatacagttccaatttttatggcttttataattacaatgatattttcttctataataaaatccaaagtaaacatttaaattgtagaactgatatttttcatttatatgaagtataagcctctactgggtctatattgtgaatcatcctgcctttcaaatttgtttcataattgttagatgaaaactatttttttggaaatgttactgaagttgattgagccaataaaaggctactttaattaaaaaaaaaaaaaaaaaaaaggcccggcccgctctaaaagtatcccccccaaagggggccccaagccttaccgcggtaaccccagccttttctttggtgacaaaaggggggctccccccaatacaggga

SEQ ID NO: 46633 - DNA, 871 bp, Homo Sapiens
  misc_feature (759)..(759): n is a, c, g, or t
  misc_feature (768)..(771): n is a, c, g, or t
aagctttgacaacatctttaaccggtggtacccagaagtgaatcatttctgcaagaaggtacccatcatcgtcgtgggctgcaagactgacctgcgcaaggacaaatcactggtgaacaagctccgaagaaacggattggagcctgtgacctaccacaggggccaggagatggcgaggtccgtgggcgcggtggcctacctcgagtgctcggctcggctccatgacaacgtccacgccgtcttccaggaggccgccgaggtggccctcagcagccgcggtcgcaacttctggcggcggattacccagggcttttgcgtggtgacctgagcggctcggggcgtcccagcgacgcgggaaggggcagggcgctgacctgctgctgagctggctgggctggacccggtccctaggctgtgaccgccgaactccactgcaacagacgggcgccaccaaagccaggccctgaggcctgggagtcctggactgagaaagggggttcctgggcccacctgctctgtgtagggctcgtcctgcggtgcccgagaatcactcgctaacccctatgcccggtcccggaccgacatcctggagccgcctgtgcagcctgatgccccctcgtggctgctcccagggctgcacctgccaggacctaatgttcttaggtccctctggccagaaaccacacccggccccttcccacctgtcatactggtaactgtaacaagaaaaacgacatcactttaaaaaaaaaaaaaaanaaaaaaaannnnaaactccgagggcatctatgtccggggggcgggagaaaagaaggtaatggaaattgcgccactgggtccaaaaccctggttctcctggcaccccatcttt

SEQ ID NO: 46634 - DNA, 574 bp, Homo Sapiens
ttagcggcaagaagccgttgaggcggtttcctgaatttccccatctgccacaggccatatttgtggcccgtgcagcttccaaatctcatacacaactgttcccgattcacgtttttctggaccaaggtgaagcaaatttgtggttgtagaaggagccttgttggtggagagtggaaggactgtggctgcaggtgggactttgttgtttggattcctcacagccttggctcctgagaaaggtgaggagggcagtccaagaggggccgctgacttctttcacaagtactatctgttcccctgtcctgtgaatggaagcaaagtgctggattgtccttggaggaaacttaagatgaatacatgcgtgtacctcactttacataagaaatgtattcctgaaaagctgcatttaaatcaagtcccaaattcattgacttaggggagttcagtatttaatgaaaccctatggagaatttatccctttacaatgtgaatagtcatctcctaatttgtttcttctgtctttatgtttttctataacctggattttttaaatcatattaaaattacagatgtg

SEQ ID NO: 46635 - DNA, 530 bp, Homo Sapiens
gcgtccgcctgaaggtattcccttattagggaagtgtcactgctgtcttctagtcaaacttgtaaagaaaaagattccagttcagtatttgcagcaagaagcttgaatgctgttctttttatcgcattgttacatcgactcattctccattttgctttggttttgtcttgacttgacttgactttgggggtaaagtctttcaccagcacacaagagtttgattgtacaaatatatcttctgcattaacatctctgcctgttgcttaagatcagttgcttttatactcagaatggaaatacctgatcttggctagttttgttataagatattgatttcatttagatttccctccacgaggtcagcaaactatcatgttcttatgtaaacttaggccaaggccagagttatcatagtccctaggttgctacggcttatcatgtgcttggtaaaaggtgatcgcaggttctcagacgagtttactttacatgagatggaatcaggcagagaggctgggatgatggagaaagct

SEQ ID NO: 46636 - DNA, 776 bp, Homo Sapiens
tgttcttatgtaaacttaggccaaggccagagttatcatagtccctaggttgctacggcttatcatgtgcttggtaaaaggtgatcgcaggttctcagacgagtttactttacatgagatggaatcaggcagagaggctgggatgatggagaaagctcgaggtgaagttttaaaaaaaaagttgtggaaaggaaagttccaaagaggtggtttctgaggaagtcagagcgcccagggccagagcagtcagtaatgggtgaatgaggttgtttggaaagtcggtgtgacagacacatggatgccatctacttctaggttgctggtgggtattaaatatgcacaatattccatagctcactgaggattttaaaattataagcataggattttatattttggggtgaaagaattatctggcacattaggtattggagtttaaaaaaaaagccaaatttcacagtcttaataactttttttaaaaaaaactaaaaggcgcttcatgtccagtgtgtggcccttctgaaacttatggtcatctctcccactgaaaccaaggtcttttcaaatgtggctaaatggggatgaggagacacgggtaggactttcttggtgtgtgtgcattctttaaagagccaagttgcttcggggaaacagccaggaaaatggtcaagattatttttagagggtattttattggggattttaagaactaataacatcttgagttatttttaattcagggggatgtggaaaaggttgcaattgtcaagtgtttt

SEQ ID NO: 46637 - DNA, 566 bp, Homo Sapiens
tgatttttagaaaatttgagaatgtaaatcagcctatccataatatagtttctctaaaactttatcttaaagagtcattttaaaataatataactattaaaaatgtaactgatatttaaatgttttgaaataaaacattttaaaatataaatactgtagtttaaaagaaagaaactgggggaaagaaaagtagagaaagaaataccaattccagtccaaagctttatttgccaggttttcttagaatgacttttaccagtttatgaattcttgtaaacagaatctataatggaaatactgaaagacttttgcctaaagtggcattattgaatgctgctgtgatgctactgtaatgtaataaattattaaattgttgcaaagtgctgtttttgccttaaaattttattttgtgtgtcttgaaaattatagtattaaaggtattgagattgtgcaaatgctgggcacgcttggcatgagataatctgtttttatttttacaaaattgtaatataactatgcaagtgtgtttattaaaagaacacaaactaaaaaaaaaaaaaaaaaaa

SEQ ID NO: 46638 - DNA, 863 bp, Homo Sapiens
  misc_feature (10)..(10): n is a, c, g, or t
  misc_feature (787)..(787): n is a, c, g, or t
tttatagatnactgccctttttgaaatacctggtattatttttcttactggaaaagttagtattaaaatctacagaactacatatttgtgcctccttggtaaatacaacacatctaattaaatgtagacagatatttcaaacatcagctgaattcacttaagtttttccaaaacctcagttaaactgtgaagctattggaatttttttttcctggaatttttcccctttgattcacagtggtcccatttatatctgcttctagcttagtgctatgtgtgagatatgtgtgtgtttggtgtttttgtttttttgtttttttttttttaaggtttgcaaattaaaaagggccagaaaaatttggcaccaggcaaacgaataaagataggattgggaaagaagttgctaagtgtgcttagttttaataagtaattccttctcttttttcagagaaggccttacagaaaattgttgtgcttagaattgctggatgcatttttaccctccacacaaacctaaaaattttgtgacccctttcacttacctgaaaagtagagaaatggattcagtataaggataaggagggaaggtggaccagaatgaaaactgtaaatatttttttaacctaatatcacttaaatcgaggcagaaagatatagacattcaatgaattatattcaatgcatttaaaataccactgtaattgacagagtaaaagtatagatacaaaaccttgggtaagaggctgacttttccaaataaacattttttaagaaaacatttcttctnccaaaggtctattttcttggaggaaaaaatggctggggccttcattttcattaccagggtttcattttggggcctt

SEQ ID NO: 46639 - DNA, 598 bp, Homo Sapiens
tggtttctgagaacattccctgatcctacatcatggtacagtagtagatcagcttactgccgttccactgcagtaatgtcaatggttggttatattctggggcttggagaccgtcatggtgaaaatattctctttgattctttgactggtgaatgcgtacatgtagatttcaattgtcttttcaataagggagaaacctttgaagttccagaaattgtgccatttcgcctgactcataatatggttaatggaatgggtcctatgggaacagagggtctttttcgaagagcatgtgaagttacaatgaggctgatgcgtgatcagcgagagcctttaatgagtgtcttaaagacttttctacatgatcctcttgtggaatggagtaaaccagtgaaagggcattccaaagcgccactgaatgaaactggagaagttgtcaatgaaaaggccaagacccatgttcttgacattgagcagcgactacaaggtgtaatcaagactcgaaatagagtgacaggactgccgttatctattgaaggacatgtgcattaccttatacaagaagctactgatgaaaacttactatgccagatgtatc

SEQ ID NO: 46640 - DNA, 618 bp, Homo Sapiens
ggaggatccggcagaaagacctgtgaatagctgggcctcagacttcaacacactggtgccagtgtatggcaaagcccactgggcaactatctctaaatgccagggggcagagcgttgtgacccagagcttcctaaaacttcatcctttgccgcatcaggacccttgattcctgaagagaacaaggagagggtacaagaactccctgattctggagccctcatgctagtccccaatcgccagcttactgctgattattttgagaaaacttggcttagccttaaagttgctcatcagcaagtgttgccttggcggggagaattccatcctgacaccctccagatggctcttcaagtagtgaacatccagaccatcgcaatgagtagggctgggtctcggccatggaaagcatacctcagtgctcaggatgatactggctgtctgttcttaacagaactgctattggagcctggaaactcagaaatgcagatctctgtgaaacaaaatgaagcaagaacggagacgctgaatagttttatttctgtattagaaactgtgattggaacaattgaagaaataaaatcataacagagtcttaaaaaaaaaaaaaaaaaaaaaaa

SEQ ID NO: 46641 - DNA, 592 bp, Homo Sapiens
gtccggttagagctttcagcacttgatactgatgaacctgatggacaaagtgaaccaattgaagagatcttggacatacagcttggtatcagttctcaaaatgatcagttgctaaatggaatggcagtggaaaatgggcatccagtacagcagcaccaaaaggagccaccaaagcagaagaaacagagtttaggtgaagaccatgtgattctggaggagcaaaaaacaattctgccggtaacttcttgctttagccagccactcccagtgtctattagcaatgcaagttgcctccccatcaccacatctgtcagtgctggcaacctcattctgaaaactcatgttatgtctgaagataaaaacgactttttaaaacctgttgcaaatgggaagatggttaacagctgaaaggaggttcatctttcaaatttgtgaccacaccatggaagcatttacactagctttttatatatataatatatattatataatgtatattttttttaaaaaaaagatattactgggggcatccatttcctgtggactctttgatacttcaagccctcttgcattagcattatgaaaaaaaaaa

SEQ ID NO: 46642 - DNA, 876 bp, Homo Sapiens
tgaccccaggatcgagtggaagaaattcaagatgaacaaaccacatatgtgttttttgacaacaaaattcagggagacttggcgggtcgtgcagaaatactggggaagacatccctgaagatctggaatgtgacacggagagactcagccctttatcgctgtgaggtcgttgctcgaaatgaccgcaaggaaattgatgagattgtgatcgagttaactgtgcaagtgaagccagtgacccctgtctgtagagtgccgaaggctgtaccagtaggcaagatggcaacactgcactgccaggagagtgagggccacccccggcctcactacagctggtatcgcaatgatgtaccactgcccacggattccagagccaatcccagatttcgcaattcttctttccacttaaactctgaaacaggcactttggtgttcactgctgttcacaaggacgactctgggcagtactactgcattgcttccaatgacgcaggctcagccaggtgtgaggagcaggagatggaagtctatgacctgaacattggcggaattattgggggggttctggttgtccttgctgtactggccctgatcacgttgggcatctgctgtgcatacagacgtggctacttcatcaacaataaacaggatggagaaagttacaagaacccagggaaaacagatggagtttactacctccgccctgaccaggaggggcaacttccaaaccaagttcattcgtttgggatccgaaacccccggggggggttgaaaaccgccaaaagccgcccgtgccccaatcccccttgcttaaaaaactcctgggcaaagggcacgggaagaaccttgaaagccccctccggaaacaaaaaacct

SEQ ID NO: 46643 - DNA, 848 bp, Homo Sapiens
  misc_feature (568)..(568): n is a, c, g, or t
tgtgggccatcggcgagtacctgtcggtgacctacgatcggaggtgcaccgtggagcagatcaacaagttcttcgaagccctggaggctctgctattcgaggtcacccagtgccgcccctctgctgccctgcccaggtgtcccccccaggtggtcaccgtgctgatgaccacgctgacgaagctggcctcccggagccaagatctgatccccagggcctctttattgctgtcaaagatgaggaccctggctcacagtccagccaccagctccacgcacagcgaggagggcgcggaagccatccgtacccgggccacagagctgctgaccctgctgaagatgcctagcgtggcccagtttgtgctcacacccagcacggaggtgtgcagcccccgctatcaccgcgatgccaacacggccctgcccctggccctgcgcacggtcagccggctggtggagagggaggccggcctcatgccagggtgaagggacagtggccagggacttcggtgcagattaagagcctgggcagccagcttgctactgaggccaggctgataggagctcangagggcgcgggagtcctgggagaggaggcagggcccacggtgggcttggcaccctcacagacaacgcggggctggcccccctgctcaccctctgggctttgtctccgagccttttgctcccaggcaacactgagctgaagctgaggggtgccatggagcggctctgattggaggcttgagcccctgtggctgggtcgggtggaggcttctgggtctggttcccagccttttggtttttggaaagttgaaggggcaaaaaaaacttgcagtaaaaagtaaa

SEQ ID NO: 46644 - DNA, 537 bp, Homo Sapiens
ctaggtagcgaggcctgggtggcgaattcggcacgaggacttatggagaacaggccaaaacccaaataagaaaacaaaccacagatgacatccttgtggcctcagcagagtgtcccagcgatgatgaggacattgacccctgtgagccgagctcaggtgggttagccaacccaacccgagcaggcggcagagagccgtatccaggctcagcagaagtgatccgggagtccagcagcaccacgggtatggtcgttgggatagtagccgctgccgccctgtgcatccttatcctcctctatgccatgtacaagtacagaaaccgggatgaaggctcataccatgtggacgagagtcgaaactacatcagtaactcagcacagtccaatggggctgttgtaaaggagaaacaacccagcagtgcgaaaagctccaacaaaaataagaaaaacaaggataaagagtattatgtctgatcccaagatcttaaatggacacttgtatagaaatagtcttcattttatctgagacataatataa

SEQ ID NO: 46645 - DNA, 550 bp, Homo Sapiens
agcgcatggatgagctctttgtgctgatccgggatggcttcctgctcccaactggcctcagctccctggcccagctgctgctgctggagatcattgagttccgggcggccggctggaagacaacgccagctgcccacaagtattactacagcgaagtctccgactaggcctccagatcagggcttcctcaccagcactggcctttcttctacccacctctaaagctggcagtggagtctctgcctcacccaaagacttttcccttccagactttgagtgtcttcccttctagactttcccatctcctggtgagatgtttcccacttatgccgtggtcctgccctgagcccctttccccaccacaacccaccacggccaggcagagaagggcaactcccaagagccactgcactgtgtaaccattagtgcaactactaccttggtgcctcagtttacccatctgtaaaatgggtaagcatagccactggtgggatattttgggatgtcaaggggtggaggcagagcacaagtcacaccagaaactgctttt

SEQ ID NO: 46646 - DNA, 809 bp, Homo Sapiens
ccacgcgtccgggaggaacctcagaacatgggtccgtggtcgtttgtttctccaaggtttgaaaagcagctggcctgcaagctccgtctggtgggccggccccctttgccagtacccgctgtaggaattggcacagttcacttgcaccagcatgaagatatcctcgccaagaccttcgcttgatgatgacttttgaagaaacactatttctctttaagaaaatggccattaaggccgggtggggtggcacatgcctgtaatcccagcactttgggaggccaaggctggtggatcacctgaggtcacgagttcgagaccagcctggccggcacggtgaagccccgcctctactaaaaatacaaaaaatagccgggtgtggtggtgggcacctgtgatcccagcttcctgggaggctgaggcaagagaatcgcttgaatctgggaggcggaggttgcagtgagccaggatcacaccattgctgtccagcctgggtgacagagcaagactgcgttcaaaaaaaaaaaaaaaacccattaaagaggctctttctcactcctcacccctctgtggggtacatgaaagactggatccctctagatgtgggattgatatacgtggattaatcggccaataggggaataaccaggggactggttattgaatatgggaagggaacccgccaaattttattcttggaaggggggggatgggtaaaaatatgggaaaaccccccaaaggaaaaaacccttttcccccaaaaaaaaaaaaaatggtgaaaagggcctggggggggcacattgggcgttcca

SEQ ID NO: 46647 - DNA, 587 bp, Homo Sapiens
tagtgggacccgaccctgtctccgtgggcgtcttgggccccggctctattctgggctgcgggcctgggaagggctcgccgggtgccaaatgagctgtcctaactctgcggggctgcagcttcctgcatgatgctggggagcttggcgcctgacccaggatctagaaggcactctgggcaggccgcgctccgcccacgaaggtacccaaccctctgggatagatgcaggaagcgatggttaagacccattttcacccaacttctcgccgcaggtctggcttaccacacgctcctccccattcccagtgagccgctttttgcagcaccaggcgaacacttacaccagtgctttgtaaaggaatcttattgtccaccccgtgtcttggcaaaagaacagtgatcacacagattcctacttgggctctttcctttaatcttcggaggctgagtttgcccaactcaggtttaaccaccaaggactctgagagctggcaggtctgagtaaccctggtaacaattctcttcaccttatcaaaacctgagctaaaaccaatgcatcagctgatgatgacagcagagagtggcagg

SEQ ID NO: 46648 - DNA, 610 bp, Homo Sapiens
cgatgggacagtactatctggccaaacaaccaacatagtgacacatagggcccaagaaatgttgcagaatcagtttattggtgaggacacccggctgaatattaattccagtcctgatgagcatgagcctttactgagacgagagcaacaagctggccatgatgaaggtgttctggatcgtcttgtggacaggagggaacggccactagaaggtggccgaactaattccaataacaacaacagcaatccatgttcagaacaagatgttcttgcacagggtgttccaagcacagcagcagatcctgggccatcaaagcccagaagagcacagaggcctaattctctggatctttcagccacaaatgtcctggatggcagcagtatacagataggtgagtcaacacaagatggcaaatcaggatcaggtgaaaagatcaagaaacgtgtgaaaactccctattctcttaagcggtggcgcccctccacctgggtcatctccactgaatcgctggactgtgaagtcaacaataatggcagtaacagggcagttcattccaaatccagcactgctgtttaccttgcagaaggaggcactgctacaaccatggtg

SEQ ID NO: 46649 - DNA, 695 bp, Homo Sapiens
  misc_feature (607)..(607): n is a, c, g, or t
  misc_feature (615)..(615): n is a, c, g, or t
  misc_feature (634)..(634): n is a, c, g, or t
  misc_feature (643)..(643): n is a, c, g, or t
  misc_feature (680)..(680): n is a, c, g, or t
  misc_feature (692)..(692): n is a, c, g, or t
ggatcgactggttgcaagtaaaacagatggaaaaatagtacagtatgaatgtgagggggatacttgccaggaagagaaaatagatgccttacagttagagtattcatatttactaacaagccagctggaatctcagcgaatctactgggaaaacaagatagttcggatagagaaggacacagcagaggaaattaacaacatgaagaccaagtttaaagaaacaattgagaagtgtgataatctagagcacaaactaaatgatctcctaaaagaaaagcagtctgtggaaagaaagtgcactcagctaaacacaaaagtggccaaactcaccaacgagctcaaagaggagcaggaaatgaacaagtgtttgcgagccaaccaagtcctcctgcagaacaagctaaaagaggaggagagggtgctgaaggagacctgtgaccaaaaagatctgcagatcaccgagatccaggagcagctgcgtgacgtcatgttctacctggagacacagcagaagatcaaccatctgcctgccgagacccggcaggaaatccaggagggacagatcaacatcgccatggcctcggcctcgagccctgcctcttcgggnggcagtgngaagttttgcctcaggaanggccgcagncagaggggcaagtgaccttcagagcacagacatcccntgagactgtctnctg

SEQ ID NO: 46650 - DNA, 860 bp, Homo Sapiens
  misc_feature (860)..(860): n is a, c, g, or t
tacagatagttcggatagagaaggaacagcagaggaaattaacaacatgaagaccaagtttaaagaaacaattgagaagtgtgataatctagagcacaaactaaatgatctcctaaaagaaaagcagtctgtggaaagaaagtgcactcagctaaacacaaaagtggccaaactcaccaacgagctcaaataggagcaggaaatgaacaagtgtttgcgagccaaccaagtcctcctgcagaacaagctaaaagaggaggagagggtgctgaaggagacctgtgaccaaaaagatctgcagatcaccgagatccaggagcagctgcgtgacgtcatgttctacctggagacacagcagaagatcaaccatctgcctgccgagacccggcaggaaatccaggagggacagatcaacatcgccatggcctcggcctcgagccctgcctcttcggggggcagtgggaagttgccctccaggaagggccgcagcaagaggggcaagtgaccttcagagcaacagacatccctgagactgttctccctgacactgtgagagtgtgctgggaccttcagctaaatgtgagggtgggcccctaataagtacaagcggagggatcaaaaaaaaaaaaaaaaaagggcggggcggctcctaaaagtatcccctcgaggggcccccaagcttttacgcggtaccccggctttttcttggtaaaaagggggcccccctataaggggatgcggaatttattaagccttagggcaattggccccgttcatttttaaaaaaccgtccagggaaatgggggaaaaactgggttaaactttggggggatccttctggggggaaaggaaaacctttn

SEQ ID NO: 46651 - DNA, 949 bp, Homo Sapiens
ggctggtaccggtccgatttcgggatcactggcggcgagtcctgtgatgagctggaggaggactggatcagggaatatccacctatcacttcagatcaacaaagacaactgtacaagaggaattttgacactggcctacaggaatacaagagcttacaatcagaacttgatgagatcaataaagaactctcccgtttggataaagaattggatgactatagagaagaaagtgaagagtacatggctgctgctgatgaatacaatagactgaagcaagtgaagggatctgcagattacaaaagtaagaagaatcattgcaagcagttaaagagcaaattgtcacacatcaagaagatggttggagactatgatagacagaaaacatagaaggctgatgccaagttgtttgagaaattaagtatctgacatctctgcaatcttctcagaaggcaaatgactttggaccataaccccggaagccaaacctctgtgagcatcacaaagttttggttgctttaacatcatcagtattgaagcattttataaatcgcttttgataatcaactgggctgaacactccaattaaggattttatgctttaaacattggttcttgtattaagaatgaaatactgtttgaggtttttaagccttaaaggaaggttctggtgtgaactaaactttcacaccccagacgatgtcttcatacctacatgtatttgtttgcataggtgatctcatttaatcctctcaaccacctttcagataactgttatttataatcactttttttccccataagggaaacttgggttcctgcaatgaaagtctctgaaagtggaaacctgcttggtttccctaccacacacctttttggtttaagatcctgggttttatgaaccttcaataaaataaataaaatttcccctggggccctttcaataattttc

SEQ ID NO: 46652 - DNA, 1087 bp, Homo Sapiens
ggcgcacaatggcgaggtgcgtaccgccaggctgctgagcgagcgcgacgcagccaagcagaggctggtggtgctggtcaaggacaatggcgatgcctccgcgctcggccaccgccacgctgcacgtgctcctggtggacggcttctcccagccctacctgcgggtcccggaggcggcccggaccatggccaacgtcgctcaccgtctacctggtggtggcgttggcctcggtgtcttcgctcttcctcctctcggtgctcctgttcgtggcggtgcggctgtgcaggaggagcagggcggccccggtgggtcgctgctcggtgcctgagggcccctttccacgacatctggtggacttgagcggcaccgggaccctatcccagagctaccagtatgaggtgtgcctgactggaggctccgggacaaatgagttcaagtttctgaaaccaattatccccaagctgctaccccagagcacaggcagggaagtggaagaaaatcgcccatttcagcaataatatgggtttctgataaagaatgtaaactaaatccgcgtctgtgaatacgtctctgattaggaacttattgcgaggttcccttaagggagtgtctttacatcatttcaaatatgtactcttgaagtcaagcaataaactttctatacataaaaataggatcctgattcagtattcaaagaacccttcacaaaggcatggaactgtctatgtggtaccgtctatgttcaaacaattatgctactatacagctattaaatgtacaacagagaacacacaaacaggggggccgccaaagaacgcacaggtgcaacgtacggtaccagctttgacggggcgcatatagagaggaaaataaacgacgaacggcccggtatacaagcgtacacgcgacaccgcactgaagagaggaagccctcattgcgggcagcgcgggaaactcacaacaagcccgcgaaaacacagcatgaggaacacgcacctgcgacagactcgagtataatccaacgggtagagaacgagaactgcaggaacacatataaactgaagccagtgagcagataatcgagga

SEQ ID NO: 46653 - DNA, 583 bp, Homo Sapiens
atcggaggacgaggcctacccataatccagagaggcttgcccagaggaggactacgtgggggacgtgccaccagaaccctacttaggggcgggatgtcactccgaggtcaaaacctgctccgaggtggacgagccgtagctccccgaatgggcttaagaagaggtggtgttcgaggtcgtggaggtcctgggagagggggcctagggcgtggagctatgggtcgtggcggaatcggtggtagaggtcggggtatgataggtcggggaagagggggctttggaggccgaggccgaggccgtggacgagggagaggtgcccttgctcgccctgtattgaccaaggagcagctggacaaccaattggatgcatatatgtcgaaaacaaaaggacacctggatgctgagttggatgcctacatggcgcagacagatcccgaaaccaatgattgaagcctgcccatcctcccatgagagactcttgttagtcaacacatctgtaaataaccttgagataacagatgagaagaaatctgattgatgctggatggacctatcacaataggctgtggacttacttgccacc

SEQ ID NO: 46654 - DNA, 1962 bp, Homo Sapiens
tcgacgaagggcgaccgcgaaactgggactttctcggagcgccggggccctaccagcgttcacagtccgccgctcccacccttctcacgtctgacggactctgctgacagcccttgccctgttggatgaataggcacctctggaagagccaactgtgtgagatggtgcagcccagtggtggcccggcagcagatcaggacgtactgggcgaagagtctcctctggggaagccagccatgctgcacctgccttcagaacagggcgctcctgagaccctccagcgctgcctggaggagaatcaagagctccgagatgccatccggcagagcaaccagattctgcgggagcgctgcgaggagcttctgcatttccaagccagccagagggaggagaaggagttcctcatgtgcaagttccaggaggccaggaaactggtggagagactcggcctggagaagctcgatctgaagaggcagaaggagcaggctctgcgggaggtggagcacctgaagagatgccagcagatggctgaggacaaggcctctgtgaaagcccaggtgacgtccttgctcggggagctgcaggagagccagagtcgcttggaggctgccactaaggaatgccaggctctggagggtcgggcccgggcggccagcgagcaggcgcggcagctggagagtgagcgcgaggcgctgcagcagcagcacagcgtgcaggtggaccagctgcgcatgcagggccagagcgtggaggccgcgctccgcatggagcgccaggccgcctcggaggagaagaggaagctggcccagttgcaggtggcctatcaccagctcttccaagaatacgacaaccacatcaagagcagcgtggtgggcagtgagcggaagcgaggaatgcagctggaagatctcaaacagcagctccagcaggccgaggaggccctggtggccaaacaggaggtgatcgataagctgaaggaggaggccgagcagcacaagattgtgatggagaccgttccggtgctgaaggcccaggcggatatctacaaggcggacttccaggctgagaggcaggcccgggagaagctggccgagaagaaggagctcctgcaggagcagctggagcagctgcagagggagtacagcaaactgaaggccagctgtcaggagtcggccaggatcgaggacatgaggaagcggcatgtcgaggtctcccaggcccccttgccccccgcccctgcctacctctcctctcccctggccctgcccagccagaggaggagcccccccgaggagccacctgacttctgctgtcccaagtgccagtatcaggcccctgatatggacaccctgcagatacatgtcatggagtgcattgagtagggccggccagtgcaaggccactgcctgccgaggacgtgcccgggaccgtgcagtctgcgctttcctctcccgcctgcctagcccaggatgaagggctgggtggccacaactgggatgccacctggagccccacccaggagctggccgcggcaccttacgcttcagctgttgatccgctggtcccctcttttggggtagatgcggccccgatcaggcctgactcgctgctctttttgttcccttctgtctgctcgaaccacttgcctcgggctaatccctccctcttcctccacccggcactggggaagtcaagaatggggcctggggctctcagggagaactgcttcccctggcagagctgggtggcagctcttcctcccaccgggaccgacccgcccgctgctgtgccctgggagtgctgccctcttaccatgcacacgggtgctctccttttgggctgcatgctattccattttgcagccagaccgatgtgtatttaaccagtcactattgatggacatttgggttgtttcccatctttttgttaccataaataatggcatagtaaaaaaaaaaaaaa

SEQ ID NO: 46655 - DNA, 809 bp, Homo Sapiens
  misc_feature (783)..(783): n is a, c, g, or t
cccttttggactaagacagtttcggtccggaattccgggacgctcgccttctggctctgccatgccctgctctgaagagacacccgccatttcacccagtaagcgggcccggcctgcggaggtgggcggcatgcagctccgctttgcccggctctccgagcacgccacggcccccacccggggctccgcgcgcgccgcgggctacgacctgtacagtgcctatgattacacaataccacctatggagaaagctgttgtgaaaacggacattcagatagcgctcccttctgggtgttatggaagagtggctccacggtcaggcttggctgcaaaacactttattgatgtaggagctggtgtcatagatgaagattatagaggaaatgttggtgttgtactgtttaattttggcaaagaaaagtttgaagtcaaaaaaggtgatcgaattgcacagctcatttgcgaacggattttttatccagaaatagaagaagttcaagccttggatgacaccgaaaggggttcaggaggttttggttccactggaaagaattaaaatttatgccaagaacagaaaacaagaagtcatacctttttcttaaaaaaaaaaaaaaagtttttgcttcaagtgttttggtgttttgcacttctgtaaacttactagctttaccttctaaaagtactgcattttttacttttttttatgatcaaggaaaagatcattaaaaaaaacacaaagaagtttttctttgtgtttggatcaaaaagaaacttgtttttccncaattgaggttgtatgtaaatctgct

SEQ ID NO: 46656 - DNA, 562 bp, Homo Sapiens
ggcacgaggccaggccatccctctgttgccatcagcttgattggcttccccgagggccagcagggctgggggctccggagagcagcaggaagcactcccagccaccagtgcctgtcacctctttcccctttgcccctgcttcatcccagctctgtgtgtggaggacaaagcttcttcctgcgtggctccaggaaaagatgtggctcacgtaggtggcacctgccaatagctttgtcaatcacagccccataggaacgtctggaattgcttgggagttggggagaactgtcaagaagagtgaagagagtgccaaagcggagatctgttcacctgggggccatggaggggggacccactaaagatcaagatcaaagattctccccatctcacagacaaggaaactgaggccagagggaggagagaattgctcatggctccagaactggtggcaagtttctctggactcttaggtttatttttaatatgaaatataaaaacagtttcaaatatcttattgagggagaagtaaaaacttatttaaacaaaaaaaaaaaaaaaaaaa

SEQ ID NO: 46657 - DNA, 679 bp, Homo Sapiens
ggagttatttactttcctccgcttcagaaggtttttcagactgagagcctaagcatactggatctgttgtttcttttgggtctcacctcatcagtgtgcatagtggcagaaattataaagaaggttgaaaggagcagggaaaagatccagaagcatgttagttcgacatcatcatcttttcttgaagtctggctctgggagaggagtggacagcagctggttgagatacatccccatctggagacaggactgccactgacagaagatgtgagctgtgtctaagtccagtcttgtgcccagccgtgtctgcgccttcactctttggaactctgcatacaacatcttagcaccatcttcctgcagctcttccttacctaaataaagaaacagcccaagggcagtatttctaaaagcactgtaacagcttttcattttctccacatatactacaaattctataaagaaagaaattaatttaaaaaaactaagatgtttttctcttctggcttcataaatgccttgctgtataattgaaaattgatactgaactgtcttttaatgatgacctaactttattcacccctcggatttactttttccctgaaatagattttttcactggtctacctgacctaaacctgtctgcatttaattctctaaacctaaatcgtgtcttaaa

SEQ ID NO: 46658 - DNA, 442 bp, Homo Sapiens
cacgaggcccagccgtgtctgcgccttcactctttggaactctgcatacaacatcttagcaccatcttcctgcagctcttccttacctaaataaagaaacagcccaagggcagtatttctaaaagcactgtaacagcttttcattttctccacatatactacaaattctataaagaaagaaattaatttaaaaaaactaagatgtttttctcttctggcttcataaatgccttgctgtataaattgaaatattgatactgaactgtctttttaatgatgacctaactttattcaacccatcggaatttactttttccctgaaataagatcttttccactggtctactacctgaccataaacatgtctgcatttgaattctctaaaccctaaatctgtgtctatgaaaaatacaaatgacgattaaatattattctctttact

SEQ ID NO: 46659 - DNA, 677 bp, Homo Sapiens
atgatcttccctgcgctggtgttcttgggcctgaagaacaatgactgctgtgggtgctgcggcaacgagggctgtgggaagcgatttgcgatgttcacctccacgatatttgctgtggttggattcttgggagctggatactcgtttatcatctcagccatttcaatcaacaagggtcctaaatgcctcatggccaatagtacatggggctaccccttccacgacggggattatctcaatgatgaggccttatggaacaagtgccgagagcctctcaatgtggttccctggaatctgaccctcttctccatcctgctggtcgtaggaggaatccagatggttctctgcgccatccaggtggtcaatggcctcctggggaccctctgtggggactgccagtgttgtggctgctgtgggggagatggacccgtttaaacctccgagatgagctgctcagactctacagcatgacgactacaatttcttttcataaaacttcttctcttcttggaattattaattcctatctgcttcctagctgataaagcttagaaaaggcagttattccttctttccaaccagctttgctcgagttagaattttgttattttcaaataaaaaatagtttggccacttaacaaatttgatttataaatctttcaaattagttccttttt

SEQ ID NO: 46660 - DNA, 587 bp, Homo Sapiens
aatttaaattccctcaaattaaggcacatccttggactaaggtcttccgaccccgaactccaccggaggcaattgcactgtgtagccgtctgctggagtatacaccaactgcccgactaacaccactggaagcttgtgcacattcattttttgatgaattacgggacccaaatgtcaaactaccaaatgggcgagacacacctgcactcttcaacttcaccactcaagaactgtcaagtaatccacctctggctaccatccttattcctcctcatgctcggattcaagcagctgcttcaacccccacaaatgccacagcagcgtcagatgctaatactggagaccgtggacagaccaataatgctgcttctgcatcagcttccaactccacctgaacagtcccgagcagccagctgcacaggaaaaaccaccagttacttgagtgtcactcagcaacactggtcacgtttggaaagaatattaaaaagagaaaaaaatcctgttcattttagtgttcaatttttttattattattgttgttcttatttaaccttgtaaaatatctataaatacaaaccaatttcatt

SEQ ID NO: 46661 - DNA, 682 bp, Homo Sapiens
  misc_feature (565)..(565): n is a, c, g, or t
ttttttttttttttttttgaaaccaagcatctatagaaaccaagaaagtcagcatgtaagcgtcactggaaaaactggtttaagcaaatagagccgtctgggatttgtaactgaggtgcaactgtcatgaggcccaggcagctctgtaacatcttctatagatgcccctggctaccctgttgttttcatctacctcagacccctatcatggggctctaccctgtgacaagagccaaacccattctccatggcctatggaagcctcactggagtttggggcctgctgcaatggggatgagatggttttttgtagaattatacttacgttccttggatgatctctagttgattttttaagttctgagttgatgctgttaaggtacccggggtagccattggttcttggatctgtgttagaatgagtgctttcccttcctactgatgtgattgtggattaggaattcgtgaccgagtgatttttggccagtggttgggtttaaaattctattaaaatttgtagtttgggctgggtgctgtggctcatacctataatcccagcactttngggaggccgaggggggcagatcacttgagcccaggagttcgagagcagcctgggcaacatgacgaaaccccgtctctacagagaatacaaaaattagccaggcatggtggcccatgc

SEQ ID NO: 46662 - DNA, 872 bp, Homo Sapiens
cagatcaagcactttggcatgcttcgccgctgggatgacagccaaaagtacctgtcagacaacgtccacctggtgtgcgaggagacagccaattacctggtcatttggtgcattgacctagaggtggaggagaaatgtgcactcatggagcaggtggcccaccagacaatcgtcatgcaatttatcctggagctggccaagagcctaaaggtggacccccgggcctgcttccggcagttcttcactaagattaagacagccgatcgccagtacatggagggcttcaacgacgagctggaagccttcaaggagcgtgtgcggggccgtgccaagctgcgcatcgagaaggccatgaaggagtacgaggaggaggagcgcaagaagcggctcggccccggcggcctggaccccgtcgaggtctacgagtccctccctgaggaactccagaagtgcttcgatgtgaaggacgtgcagatgctgcaggacgccatcagcaagatggaccccaccgacgcaaagtaccacatgcagcgctgcattgactctggcctctgggtccccaactctaaggccagcgaggccaaggagggagaggaggcaggtcctggggacccattactggaagctgttcccaagacgggcgatgagaaggatgtcagtgtgtgacctgccccagctaccaccgccacctgcttccaggccccctatgtgcccccttttcagaaaaacagatagaatgccattctccgcccggctccttggactttccctctaactttgccgctggctccggaccccacagccctggggggggggcccccggccccaagcccccttcccccttggggccccctcccttcccaccttggggc

SEQ ID NO: 46663 - DNA, 987 bp, Homo Sapiens
  misc_feature (34)..(35): n is a, c, g, or t
  misc_feature (631)..(631): n is a, c, g, or t
  misc_feature (787)..(787): n is a, c, g, or t
  misc_feature (797)..(797): n is a, c, g, or t
  misc_feature (873)..(873): n is a, c, g, or t
ggttaagagaccaggattccttcccttatagacnnctcctcaacagggcccaccacagcagtactcaggccaggaagactattacggggaccaatacagtcatggtggacaaggtcctccagaaggcatgaaccagcaatattaccctgatggtcataatgattacggttatcagcaaccgtcgtatcctgaacaaggctacgataggccttatgaggattcctcacaacattactacgaaggaggaaattcacagtatggccaacagcaagatgcataccagggaccacctccacaacagggatatccaccccagcagcagcagtacccagggcagcaaggttacccaggacagcagcagggctacggtccttcacagggtggtccaggtcctcagtatcctaactacccacagggacaaggtcagcagtatggaggatatagaccaacacagcctggaccaccacagccaccccagcagaggccttatggatatgaccagggacagtatggaaattaccagcagtgaaaaagtacttacattccagtagccagtatctattagcagccatattgtcacctcagcactgtggacacctccctgtgaagagatccttccattccatctagnttttggaaaaaccttgtggataagtggctgtttcatcagtaagcagcctttgtggtttagttattaaaggctttagtagctcaaaaatactcttgatttcacatttctactctagatggcaacattggacagaaaatgcaatgacataaccaattngtaatgattntgggaactggggtttcaaatggactggtacagactgaaaaggtgtgaacagctttgtatggttattgagggtaagnggaatttaatactctttcacaggattttttttggagaggggagaggggaaatgttccctttttatcagcagaaaatttgggatattaaaggcaatttcatgtgggggatatcca

SEQ ID NO: 46664 - DNA, 564 bp, Homo Sapiens
acagcagcattgtcgtcagccccaagatgaccaggaaccaggcctcctccgaggctcagcctgggcagaagcatggacaggaggaggctgcccaatcgccctaccgagctgttgtccagattttctgacagctgtccatcctgtgtctgggtcagccagaggttcctccaggcaggagctgagcatggggtgggcagtgaggtccctgtaccagcgactcctgccccggttcaaccctaccagcttgtggtaacttactgtcacatagctctgacgttttgttgtaataaatgttttcaggccgggcactgtggctcacgcctgtaatcccagcactttgggagaccgaggcaggtggatcacgaggtcaggagatagagaccatcctggccaacacggtgaaaccctgtctctactaaaaatacaaaaaattagccgggcgtggtggctgggcgcctgtagtcccagctactcgggaggctgatgcagaagaatggcgtgaacccggaaggcagagcttgcagtgagccgagatcacgccactgcactccagcctgggtgaca

SEQ ID NO: 46665 - DNA, 687 bp, Homo Sapiens
  misc_feature (547)..(547): n is a, c, g, or t
  misc_feature (549)..(549): n is a, c, g, or t
  misc_feature (616)..(616): n is a, c, g, or t
gccgctacaagaagacactcaagaattgggctgggaagaaacggtggatgccgccatttcccacctgttgaagacttgcctgtcgaagagttctaaggagcaggctttgaacctcaacagccagctgaacatacccaaagacacaagccaactgaagaaacatatcaccttgctctgcgatagattatccaaaggtggccgtctctgcctaagtaccgatgcagcagccccacagaccatggtcatgccaggtggttgtactacaatcccagagtcagacctagaagaaagatcagtagaacaagactctacagaactgtttaccaaccacagacatctcactgcagagacacccaggcctgaagtttcacccctccaaggagtctcggaataattcaagtagagttgtttggttgagaggaacatccccatctcaaggccgaacctgtgtgaacctcatgccaagcacagatatagggctggcgcaggtgcttcctaaagcttaccttcctggagatgacatgcatagaaagaggggttgggactntntacttcactaggagaacttgtaacaccatggggaagtcagctgaaacttgtctggtttgccaggaanaggagtagttgcctttggtcatccaatctgctatagtcacagaatacagtgtgacatagttttggggtgtt

SEQ ID NO: 46666 - DNA, 500 bp, Homo Sapiens
tttttagccattataatctagtggttggaaggaatgaagaagcttttttagtaataggtccagatatgagtgctaaaaataaagatgatagcatgttcttctgtcttccatagttattacaactatgagagcctcccaagtcatcttatcaactcaactcccttttttttgtcttaatgttgcacataagtttatacagagtggatgaccacactagcacagaagagaacaacatgtattaaagcaggtgattcctccccttggcgggagagctctctcaggtgtgaacatgccttctgtgggcggaaatcaggaagccaccagctgttaatggagagtgccttgcttttatttcagacagcagagttttccaaagtttctctgctcctctaacagcattgctctttagtgtgtgttaacctgtggtttgaaagaaatgctcttgtacattaacaatgtaaatttaaatgattaaattacattttatcaatggcaaaaaa

SEQ ID NO: 46667 - DNA, 712 bp, Homo Sapiens
ccacgcgtccgtaaaaattactactgttattcaacatgtgttccagaaccttattttggggagtaaagtcaattgggcagaggatcctgcccttaaggaaattgttctgcagcttgagaagaatgttgacatgatgtaataagaattcatttctgacatattttacatttctggcaatctcaactcttatttggaatacttctgtgcatttgtctgtccaccgtaattttagaaaagcatatccataacgtttacagttgtagtacagttgtggttagttatttgtagtgggattgaaagtaatttttttctttttatatttctatatttagtttgtttttttgttgttgttgttttttgagatggagtctcgctttgttgcccagactggagggcagtggcgcgatctcggctcactgcaacctctgcctcccgggttcaagcagttctgcctcagcctcccaagtagctgtgactaaaggtgcacgccgccatgcccagctaattttttgtattttagtagagacggggtttcaccgtgttgcccaggctgctctcagaactcctgagctcaggcagtccaccgcctcggcctaccgaagtgctaggattacagacgtaagccaccgagcctggtctagtttgcattttttttctatcagttttataagttaagaaataaaaggaattaatgttaaaaaaaaaaaaaaag

SEQ ID NO: 46668 - DNA, 556 bp, Homo Sapiens
gcacgagagctcttaaaaatgtaaatgttacatgtatattacttggcacaatttatttctacacataaagtttttaaaatgaattttaccgtaactataaaagggaacctataaatgtagtttcatctgtcgtcaattactgcagaaaattatgtgtatccacaacctagttattttaaaaattatgttgactaaatacaaagtttgttttctaaaatgtaaatatttgccacaatgtaaagcaaatcttagctatattttaaatcataaataacatgttcaagatacttaacaatttatttaaaatctaagattgctctaacgtctagtgaaaaaaatatttttaaaatttcagccaaataatgcattttatttataaaaatacagacagaaaattagggagaaacctctagttttgccaatagaaaatgcttcttccattgaataaaagttatttcaaattgaatttgtgcctttcacacgtaatgattaaatctgaattcttaataatatatcctatgctgattttcccaaaacatgacccatagtattaaat

SEQ ID NO: 46669 - DNA, 711 bp, Homo Sapiens
tcactctgggcctccctacccctcaacggtaacatcttcccatagcatcggcctcaactgtgtgacgaataaagcaaatgcggtgaacgtccggcatgaccagtcagggaggggcccccccaccgggagccctgctgaatccatcaagaggatgagtgtgatggtgaacagcagtgattctactctttctcttgggccattcattcaccagtccaatgaactgcctgtcaactcccacggcagtttttcccactcacacactcctctagacaaactcataggaaagaaaagaaagtgctcacccagctcgagcagcatcaacaacagcagcagcaaacccacaaaggttgccaaagtgccagccatgaacaatgtccacatgaaacacacaggcaccatcccaggggcacaaggactgatgaacagttccctccttcatcagccaaaggcacgtccctgacagctgaaaatagcacggggaggaataatgcggacacttttgaggacaagttacacctccactcagcactctggactccacgatgcctttgagtctgttttcccaacctctgtgggcctcaagggtagaaacctgccgggctgttgttttaacgaggatttccctgaagctatgtctctagcagtgagtactcataaaggacactggatcaagttcagccaccgaattgcttttatcaagtgttaaagtgg

SEQ ID NO: 46670 - DNA, 755 bp, Homo Sapiens
  misc_feature (109)..(109): n is a, c, g, or t
tcccttctggctttggattgaaagcatcctagaactcattaaaaaacacctgctccctctctggaatgatgggtgcatcatgggcttcatcagcaaggagcgagagckngccctgttgaaggaccagcagccggggaccttcctgctgcggttcagtgagagctcccgggaaggggccatcacattcacatgggtggagcggtcccagaacggaggcgaacctgacttccatgcggttgaaccctacacgaagaaagaactttctgctgttactttccctgacatcattcgcaattacaaagtcatggctgctgagaatattcctgagaatcccctgaagtatctgtatccaaatattgacaaagaccatgcctttggaaagtattactccaggccaaaggaagcaccagagccaatggaacttgatggccctaaaggaactggatatatcaagactgagttgatttctgtgtctgaagtgtaagtgaacacagaagagtgacatgtttacaaacctcaagccagccttgctcctggctggggcctgttgaagatgcttgtattttacttttccattgtaattgctatcgccatcacagctgaacttgttgagatccccgtgttactgcctatcagcattttactactttaaaaaaaaaaaaaaagccaaaaaccaaatttgtatttaaggtatataaattttcccaaaactgataccctttgaaaaagtataaataaaatgagcaaaagttgat

SEQ ID NO: 46671 - DNA, 577 bp, Homo Sapiens
cgaccacgcgtccgctttaatttggaagaatgtgccgaagacgcagatgaaattcagcatccagacgatgtgccccatcgaaggcgaagggaacattgcacgtttcttgttctctctgtttggccagaagcataatgctgtcaacgcaacccttatagatagctgggtagatattgcgatttttcagttaaaagagggaagcagtaaagaaaaagccgctgttttccgctccatgaactctgctcttgggaagagcccttggctcgctgggaatgaactcaccgtagcagacgtggtgctgtggtctgtactccagcagatcggaggctgcagtgtgacagtgccagccaatgtgcagaggtggatgaggtcttgtgaaaacctggctccttttaacacggccctcaagctccttaagtgaattgccgtaactgattttaaagggtttagattttaagaatggtgctctttcatgcctattatcagtaaggggacttgtattagagtcagagtctttttatttaggccagttgtcaagtgtcaataaaagcatcatgtaaaaaacaaaaaaaaaaag

SEQ ID NO: 46672 - DNA, 640 bp, Homo Sapiens
  misc_feature (592)..(592): n is a, c, g, or t
cgaagagaagctccatgaagaaattgacagggtgattgggccaagccgaatccctgccatcaaggataggcaagagatgccctacatggatgctgtggtgcatgagattcagcggttcatcaccctcgtgccctccaacctgccccatgaagcaacccgagacaccattttcagaggatacctcatccccaagggcacagtcgtagtgccaactctggactctgttttgtatgacaaccaagaatttcctgatccagaaaagtttaagccagaacacttcctgaatgaaaatggaaagttcaagtacagtgactatttcaagccattttccacaggaaaacgagtgtgtgctggagaaggcctggctcgcatggagttgtttcttttgttgtgtgccattttgcagcattttaatttgaagcctctcgttgacccaaaggatatcgacctcagccctatacatattgggtttggctgtatcccaccacgttacaaactctgtgtcattccccgctcatgagtgtgtggaggacaccctgaaccccccgctttcaaacaagatttcgaattgtttgaggtcaggatttctcanactgattcctttctttgcatatgagtatttgaaaataaatattttccc

SEQ ID NO: 46673 - DNA, 797 bp, Homo Sapiens
tatataccgcacttttttgaagagctctttccgaagaagtgccagaagagacagtagtctgcatacatcgctgcaggccacagagcagcttgggttggaaaagagaagatgaagggacatccttggggctgtgccgtgagatttgctggcataggtgacagggtgtgtctctgacagtggtaaatcgggtttccagagtttggtcaccaaaaatacaaaatacacacaatgaattggacgcagcaatctgaaatcatctctagtcttgctttcacttgtgagcagttgtcttctatgatcccaaagaagttttctaagtgaaaggaaatactagtgaatcacccacaaggaaaagccactgccacagaggaggcgggtccccttgtgcggcttagggccctgtcaggaaacacacggggacctctctctctagctccagcaggtggcacctcggtacccagcgggtagggcgataatttatatattttccacagtcagggaaggactctcacttatttgtttcaaattgcagtttttataaaacatttttaaaacacaaatggcatgtatgctaatgagatttacccgtgtgctatctgtatttcccttgtacagaacttttacatttttgaatattcctattacttttgattgtgtctgatgggaactgagttgttggcctttgtgaaatgaaatttttggctcttgagaaagaattcttatgaattggtatgcgaattttatatatttaaagagggagatctggggctgttatttttaaacactttttttcataa

SEQ ID NO: 46674 - DNA, 695 bp, Homo Sapiens
gctggtacgcctgcaggtaccggtccggaattcccgggtcgactactactactaaattcgcggccgcgtcgacctgtaagtggaatcatcttgtcatcttccagaaaactcatactgaatagaactttatgaatgcacagcatatggaaaggcatccacagaaagctgttctttacatgcaaaaagatagtagacaatacacaggaaaactgaatttagtaaccactctgaaaatttttagcagcaagtcatacctttttttaaaaagttcatacaggtgaggaaccatgttaaacgttgtaaagtcattttactaacataagattcacaaagaggaaacttcatgaaccagatgaatatagaatagacttctttgaaattcatagtttacagaattttaatgagagaaattattgagctaatgaatggcagaattaacaaaattacaaacattttatgtatcggaagcatataccttggagggaccatgctatgagggaaagtgtaaatctagaaatgagaaacccctagggaaaaaatatatataggagtgaacatcttatgaatgtaccaaataaaccacagctggactgttaacctcaccttagagcttcattctaaaaaaaaaaaaaaccaaaaaaaaagtccacgcggccgcgaatttaatagtagttggcggccgcttttaaggaacc

SEQ ID NO: 46675 - DNA, 584 bp, Homo Sapiens
gaggaactcagctctctggtggccagaaacaacgcattgccatagctcgtgcccttgttagacagcctcatattttgcttttggatgaagccacgtcagctctggatacagaaagtgaaaaggttgtccaagaagccctggacaaagccagagaaggccgcacctgcattgtgattgctcaccgcctgtccaccatccagaatgcagacttaatagtggtgtttcagaatggcagagtcaaggagcatggcacgcatcagcagctgctggcacagaaaggcatctatttttcaatggtcagtgtccaggctggaacaaagcgccagtgaactctgactgtatgagatgttaaatactttttaatatttgtttagatatgacatttattcaaagttaaaagcaaacacttacagaattatgaagaggtatctgtttaacatttcctcagtcaagttcagagtcttcagagacttcgtaattaaaggaacagagtgagagacatcatcaagtggagagaaatcatagtttaaactgcattataaattttataacagaattaaagtagattttaaaagataaaatgt

SEQ ID NO: 46676 - DNA, 539 bp, Homo Sapiens
tttggagtatatagaatcgtctatcctactttctataagcaagctgttagaactttactttcagttctactttcataacaacaaaaccttatttacagaaatatagcactaaagtaggagacaaaggaactcagctctctggtggccagaaacaacgcattgccatagctcgtgcccttgttagacagcctcatattttgcttttggatgaagccacgtcagctctggatacagaaagtgaaaaggttgtccaagaagccctggacaaagccagagaaggccgcacctgcattgtgattgctcaccgcctgtccaccatccagaatgcagacttaatagtggtgtttcagaatggcagagtcaaggagcatggcacgcatcagcagctgctggcacagaaaggcatctatttttcaatggtcagtgtccaggctggaacaaagcgccagtgaactctgactgtatgagatgttaaatactttttaatatttgtttagatatgacatttattcaaagttaaaagcaaacacttacagaat

SEQ ID NO: 46677 - DNA, 654 bp, Homo Sapiens
  misc_feature (563)..(563): n is a, c, g, or t
agcatgtgattccagattcctgcggtccagcctccaactttggttgccagctctttcttattctactacacaagccgccaactcaactgagagctaaagagactagaaaagagataagctgccaactcaactgagaacaagaaactagaagagatttatatataaagcttcttccttctcccagatgcaggatgttttcaaccagtaaattttattgctgttggtgccagagaagagtcctttcttctctacatccaggggccttttctccaataatgtgcctttaactctagggacctgcctcacggaccttagggacctcaacctgaaagatctcttcctttctggagctcctttaatcttcccagcaggtttttgccttagacgtgctggccccaggacagtgatgaagacagagcctgtctcagctctaggctgtggggatcaatgccatcagtccctgttattgagggattatcccttagccaacattcctatctgtgggtgggcgtggagagtgtatctttttttggggtgtgtgtgtatatgtgtgtgtggatggnggggggtgtttaatggttctgttcgtcacctcttttaaattaagttgtgccttaccatacttggaagctcccagtacagggtttggcttcc

SEQ ID NO: 46678 - DNA, 582 bp, Homo Sapiens
  misc_feature (526)..(526): n is a, c, g, or t
accacaatgagatcctaagatggcggtggctgcggcggttggcgctgcgtagctgaggtcgaaaaggcggccactggggccgaggcagccaggaaacgtgtgggcctctctgctgcggtctccgagggccgaccgctgccggcggcgggtcgtgggggctgactgtcgctctgcctttgacaggagaggctgcttcttgtagaggaaacagctttgaagtgtggagcgggaaaggagcagtttctgagctgcaaaaactagtttctaaacagagagttaattgttaaatccagtatggccacaggaggaggtccctttgaagatggcatgaatgatcaggatttaccaaactggagtaatgagaatgttgatgacaggctcaacaatatggattggggtgcccaacagaagaaagcaaatagatcatcagaaaagaataagaaaaagtttggtgtagaaagtgataaaagagtaaccaatgatatttctccggagtcgtcaccaggagttggaaggcgaagaacanagactccacatacgttcccacacagtagatacatgagtcagatgtctgtcccagag

SEQ ID NO: 46679 - DNA, 997 bp, Homo Sapiens
  misc_feature (770)..(770): n is a, c, g, or t
  misc_feature (851)..(852): n is a, c, g, or t
  misc_feature (854)..(863): n is a, c, g, or t
  misc_feature (866)..(871): n is a, c, g, or t
  misc_feature (874)..(874): n is a, c, g, or t
  misc_feature (889)..(889): n is a, c, g, or t
ctagttctagatcgcgagcggccgccctttttttttttttttttttttttggtccttctccattccatggaaccttgtagggtgttgggattgggcctcccctcgccacccgccacatggctttgtttttttctctcttttgtatgtggaaaaatgtatttttgtaccatatctcatacctggagagaaaccttttttctatcttcagggctgtagaatatattagcgtaacacttcactgaatgtgacgtaaaagcattctgatgaaaactggttctgttataattaagactcagtgtttaaaatatcttaatcagtgttaatttcccagtgtttcagtatcacagtaaatacttgttttactgagaacagaaaataatccagaaaaggaaaaggaccagccctctctagattgctggaattgtatggatgtgttggggttggtttagtgatctcttccttgacaccctagcaaagatgcttttgtggagtgcaaacctttcataaatatactttccaggctgggtgcagtggctcaagcttgtaatcccagcactttgggaggccaaggcgggtggatcacttgcggtcgggagttcgagaccagcctgaccaacatagtgaaatcccgtctctactcgaaattaccaaaaaaaaaaaaaaaaaatagccaggtgggggggggggtttcttggaatccccagctactcaggaggcttaaggggggaaaaatgaatggacccttggagcaaaaggttccctggactganaatcccccccttgtacttccctttgagggcaccgaattgaaaccccttttcaaaagaaaaaaaaaaaaggggggggggttnntnnnnnnnnnnttnnnnnnttngggtgtgtggtaggngtgtattcgtgcgcgagtcttccgcgttgtcgggacatatgcgcccgctggaaacaccacaaaattccgtattttccacttcgtccccccgtaccacaattcggaaat

SEQ ID NO: 46680 - DNA, 577 bp, Homo Sapiens
  misc_feature (458)..(458): n is a, c, g, or t
gcacgagggcagtgacaatagttttatattaaaagaaaaaatacagttttcatacagcaaaatctatacaatatcattgttttatttaatataaagatcgctacccaccttccttccatggttcccaccctccacgttattttccctttctgcagcggttgcactacaggtagctactgtgtattatggacaaatgagaaatgaattctttttctggctgtccatctattttatttcaaataaggaaaagtgtatttggattttgtgtaaatacatctagtgatgacattttttcaatgtttttaaaaaccgtgtacagtactacatgtggtagagcgttttctcaaattgtctattgtagcaaaaatgtttttgtcgtaaacctgttttgtctcctttttttgttctcttgccacttctctcctcttcctcttgcccctggttccctcctctcctcncacccccacaaccagtaccaatgtacatagtaattgtaatgttttagactttacagaaactttcctgtattctgtatataaaaaacaaaaatacttaaaaaaaaaaaaaaaaaaaaaaa

SEQ ID NO: 46681 - DNA, 552 bp, Homo Sapiens
  misc_feature (546)..(547): n is a, c, g, or t
gaaaaacatgggtagtagaaatgtatagaaaatgtatgaggtctcttaaccattgtgttaaacttgcattaagcttcttttttagcaatatcgatgtcagtgttacctcttctttcctttttatttattctttttgagacagagtctcattctgtcgcccagactggttggagtgcgatgatgcgatcgcggctaactgcaaccgctgcctcccgggtacaagtgattctcgtgccttgggctcccgagtagctgggatttttagtggagaacaggtttcaccatattggccaggctggtcttgaactcgcaacctcaggtgatccacccacctcagcctccccaaggtgttgggattacaggcatgagccaccgtacctggccccttttgttgttttgaggggcaggcagtaagaagcagggatttcttcaaatgctagtaagcacaaagagagggagaagtttttgtaagtaacgaacagggccgggcatggtggcgtgagaggccgaggtgggcggatcacgaggtcaggagttcgagaacanncctgg

SEQ ID NO: 46682 - DNA, 954 bp, Homo Sapiens
tcttgtgttccaggtataagaagagatttcataagtttgatgcagaccagaaaggctttattaccattgttgatgttcagcgtgtattagagagtatcaatgtccaaatggatgaaaatacactccatgaaattctaaatgaagttgatttgaataaaaatggacaggttgaactcaatgaatttttgcagctgatgagtgctattcaaaaaggaagggtatctggaagccggcttgctatactaatgaaaactgcagaagagaacctcgacagaagagttccaattccagtggaccgtagttgtggaggattgtgagtctgggcagtaaatccacagccaacaaacatagaaacgacaaatcaccatgtaacaaccagagatgactgaaaccactctgaaataatgaatgtggatagctgccttttttaacactagaacaaattccaaaactttaaggtgttggtgcatttgccagctttatttgctgtacttctatttgtatttgccattcagcctagcttttaagcatatttttttctttttcctcattttcaatgcacattagcttttgcatctgctttgtgacctgtcagatggtgaccccttctccctcttgttgatgtcccttattctaaaatgagcccccaaaaacctaaccctttttgcaaaaaattgaaaaaaaagctgggagacatttttggggacatgctataccccatacgcattgtgtccattaaaaaaacaggcgtgcctaattgaacatgatccgggctatcctggaagaaaattaacgctttgaaaccacatgtatgggggtccccaaaaaaagaagttaccctcattgaaaaatcgaaacggggtttctgggaacaatttctccaagcccccccccctcccacaaagcttggccttaaccttccccccgtggaagagaaaatttcccacctcttgg

SEQ ID NO: 46683 - DNA, 712 bp, Homo Sapiens
gttcaggggtctttacattgtaaagaaattgactgaaagtatgtttattatgctataaatgaagttgtttataacagcgaaaaaggttctcctttaaaaaaaaaacttatctgtagtactgaatatataaacttttcctgaaacaattattcaaactctgcatctttgatatcaatgtctctagcagtagtagagccatattttaaaaagagctttactaaatacagatcataacattcagctgttttaagtgtattaacgcatttcggtaaatttacagacttgttcaaccacaaccacagtctgattttagaacatttccatcaacttcaaagatccctggtgccatttgtagtcctccaacccatctccgatctatcttgtttctatgacttgccttttctggctatttcatataaatgggatcatatgacatgtggtttcctatatctgacttttttcatttagcataacgtttttgaggctcatccatgttgtagtactccatgccatgttgtgggctacataatattccattgtatggatataccacattttgcttatcagttaatggacatttaggtttggtctacttttgtggcattaatagtgctgctgtgaacaatcatgtacaagtcttgtatcagagccacttttgataaaatagtttctaaaacatttcatcttgaattttattaaggtgatatgtaag

SEQ ID NO: 46684 - DNA, 539 bp, Homo Sapiens
atggatccccatgttccagcaaacgcacaagcaggtccacgagatccagtcttgcatgggacgcctggagacggcagacaagcagtctgtgcacatagtagaaaacgaaatccaagcaagcatagaccagatattcagccgtctagaacgtctggagattttgtccagcaaggagccccctaacaaaaggcaaaatgccagacttcgggttgaccagttaaagtatgatgtccagcacctgcagactgcgctcagaaacttccagcatcggcgccatgcaagggagcagcaggagagacagcgagaagagcttctgtctcgaaccttcaccactaacgactctgacaccaccataccaatggacgaatcactgcagtttaactcctccctccagaaagttcacaacggcatggatgacctcattttagatgggcacaatattttagatggactgaggacccagagactgaccttgaaggggactcagaagaagatccttgacattgccaacttgctgggctttgccaacacagtgatgc

SEQ ID NO: 46685 - DNA, 587 bp, Homo Sapiens
ccggcctcctgcctcccgaaggcctgcacgggcccagcctcagcctcacagcggactctccacgcccagctagctctcgccttactgcggcctccccagtccaaagctcctgcctttcggccgcttctgcaggcccagctcctgcctgccagtggcctctttaggcccagctcattcctcacaacggcctttccaggccccgtttttcacttctggcagcctcttggcctctaatttttttatcttttgtgtataaatcccaaaatatggaattttagaatatttccatcattatgtaaatattttggtaggtaatttatttggagtgagtttctgcaccaagcccgaattttttattttattttccttattatttggtgttaaacaggtttaatgacagtgatggcaactttttggcacaataaaaaatatccccatgaaaaaaaaaaaaaaaaaactcgagggggggcccggtacccaattcgccctatagtgagtcgtattacaattcacttgcccgcgtgtttcaaacgtcggacttggaaaaccctgcggtacccaactaaatcgccttggcagacatcccc

SEQ ID NO: 46686 - DNA, 657 bp, Homo Sapiens
cgtccgccggaacacgtgggactgcggcttgcagatcctgaagaaggaggggctcaaggcattctacaagggcactgtcccccgcctgggccgggtctgcctggatgtggccatagtgtttgtcatctatgatgaagtggtgaagctgctcaacaaagtgtggaagacggactaagcctagagaggccgcaaggggaccgccccaggcaccgccagagtgtcctgctacctttgtctcacgattccagtgcagtagtgccaaaaggccccttcccacgtccctcgagctctgtagcctggtctgtgcattgtggctgtcaaatccatgtgtcccccctgtggtctgtgtgtgacaccaccactgtgtcccagtgtctggcccagccatggctggatgtgcatctggcctatgaccctgtgcctgtgtttcatgttctgtgtcacgtgaccctgtgccccgcctcccggggtgcccgtgtggcctgggtcctcggccctgtagccctggcccggtcccagtccggtgccttccaccctgccctggcctaccacagctgcctccgggcctcggcctggcttcaccgcattccaggggctgcagccccctgcttctcccgccattggccttaactggccctcgggccctctctccgcccc

SEQ ID NO: 46687 - DNA, 545 bp, Homo Sapiens
gctccaatcagggatgaggggctcaacctcttctgtcctcaaagaggccaaacgcagtgccacagtcggtagccttcacttttagatgtcctattcatgtaaaaaagaaggtgcccccaccaggcttacatcagcaataagcaattctaatgcaacgatggtgtccacattttaccccagtgtgtgcccatgtatgcctttgtgcccgtgtaattattgttagcgcccctttcacttagaggggtgatgataaactgtggccaccttgattacaacccacatttcctgctttggggagcttccaagtaacaggccatttcttacctccctccaggaacagtgggcactgcccaccacctcgtgtctgctcataggatgacgctggagatccccacacttactctaccctcttggcaaattggcattccggtggtggtttttgtttcctttaacacattaaataaatgagtatataggatgtgaggggaggggtgagaacaactagctgtagcatgtgtaggctatatactttaccattcgacttc

SEQ ID NO: 46688 - DNA, 845 bp, Homo Sapiens
cagcattccttaaatatatttaaaaaacaatacaaggaatgcctaacatttcagctcatacttcttaaagaagatatagtatgttgtattctcttcttagagctttcttaaagaatccacaatccaattaccccactgtcaattcatatttgaacttaccaaaacaaaggaggattacgtatatgttttttaaattcaaaaaagaatatgaaattatacctttagtatccctttgagacatatagtttaaagaaaactttttttaaaacaaaagtaggaatatatagtaagattgtagttacaatgagtatatgcacttttgatgctaggttttgcttttctccccccagtcatatctcatgatttccacagttgttgtattggtgtggagttttctgaattggctataagctgattacatattagaggtttatttttatgattctatataaacgtgcacgagtaatttaaaacctgcattgggattgattggaatattgtcctaaattaattaaatcttgcactgttttgaatgcatctgctatttatacatctgcaagtgggtatgtcataaggagtcagattatctttaatttaaaatgaatactttagttttacctttttgtttaatttggtttaattttgtgttttataaaatgttttcaagagttatagcaaattgatttctaattttttattggctatttacaactggatgtaaatggtaagttccagtttgtgtgagattcttaaaaaattaaagcacttattctgaatttttggcttggatttaattatttttatttagcatataggtgaaaagtgttatattcagtatgctagta

SEQ ID NO: 46689 - DNA, 724 bp, Homo Sapiens
ccaagtctcagcggattgcaaagttcgcctttgactatgccaccaagaaggggcggggcaaggtcactgctgtccacaaggccaacatcatgaaacttggggatgggttgttcctgcagtgctgtgaggaagttgctgaactgtaccccaaaatcaaatttgagacaatgatcatagacaactgctgcatgcagctggtgcagaatccttaccagtttgatgtgcttgtgatgcccaatctctatgggaacattattgacaatctggctgctggcctggttgggggagctggtgtggtccctggtgagagctatagtgcagaatacgcagtctttgagacgggtgcccggcacccatttgcccaggcagtgggcaggaatatagccaatcccacggccatgctgctgtcggcttccaacatgctgcggcatcttaatcttgagtatcactccagcatgatcgcagatgcggtgaagaaggtgatcaaagttggcaaggtgcggactcgagacatgggcggctacagcaccacaaccgacttcatcaagtctgtcatcggtcacctgcagactaaaggttcgaacctctgacatgggtggctatgctacttgccatgacttcactgaggctgtcattgctgccttgccccacccataggccctgtccatacccatgtaaggtgttcaataaagaacatgaaccaactcttaaaaaaaaaaaaaaa

SEQ ID NO: 46690 - DNA, 1089 bp, Homo Sapiens
  misc_feature (888)..(888): n is a, c, g, or t
cttaaaaatgtattgtttcccaggcacggtggttcacacctgtaatcccagcattttgggaggccgaggcaggcggatcattaggtcaaaagattgagaccatcctgaccaacatggtgaaaccccgtctctactaaaagtacaaaaattagctgggtgtggtggcgcatgcctctagtcccagctacctgggaggctgaggcaggagaattgcttgaacccaggaggcagaggttgcagtgagccaagatcatgctactgcactacagcctggcaacaaagcgagactctgtctaaaatatatatatatatatatattgtttactactcaccacagatctgcaggagttcactgatctctaggatctgccttaactccaacttacatgttttggtcactattacaaactgtcatcccagaatgatgctgcagaggctagggctaggacacagaccagtgtttccatgtgggaattccctcccagtatttcttaggaaatgtatgttttttgaatccataatccctagaaaaatcagttgaggaaatgagaagtattgtaattattctgtgaatagtaacacttaccattatggagacatcactagtttgaaagaatccaacttcatcaaatattaacgtacccgattgaaggctacaagaactgagacaggagcattagcagagagaaaccgcccccatctccttagccctaatttttggttgttggtgatgccattacatctggtatatccgggcatatcacctgctaatggggaagtccttgcaaacaaaaggatttgaaaaaacaacctaaccatactttatacaaaatccttatgggggttcccaaaaaaaaaaactttgggaaggccaaaaagacaacaggnatagagctccaggggttctattgtcccggggggcgggaaaaaaaaagggaatgggaaagtgggcccatgggcccataaacctggtttgcccgggaccccagctttttgttgggacaaaaagggggagaaaaatttgcggggtcctcccctcgataagggaaacccccaaaataaaatttcgccataaaccacacggggtta

SEQ ID NO: 46691 - DNA, 672 bp, Homo Sapiens
atgacagccaggttcctgctggctagaccagcctattcagcgcttgctaggggatgggtggtccacgcactcgctaatacagttctccaggtgtggaatgatgtcaatacgattgcttggccttttccccctgtgccttgctcggtgctctggtttcctcagcaacactccttgtaaggggcagagacagggtccaccaactccccaagatgaagaagccccttcaggccagtcgtggtggctcatgcctgtaatcccagcactttgcaaggccgaggagggtggatcacttgaggtcaggagttcgagaccagcctgaccaacatggcgaaaccccatctctactaaaaatacaaaaattagcttggcatggtggtgcgtgcctgtaatcccagctactcgggaggctggggcaggagaatgcttgaacttgggagatggaggctgcagcgagccaagatcgtgccactgcactccagcctgggcaagagtttttttaagactcttaaaaaaagagcctgggcaatttttttaagactctgtcttaaaaaaaactaaaaagaaaaaaagaagccccttcactctacaggggacaggagaccataggatttggaccccaaagggatgtgaactgatctgatgtctgtcctttgaacactttctctccctgcc

SEQ ID NO: 46692 - DNA, 479 bp, Homo Sapiens
tggcatcgctccttggggtgcatgggggtgccccgggcacagtggaacgtgtctgcgaaggcggccaggttctgcagcgaccccagtaccctgtgggtgggtgggtgtgacagcaggagcattgccatcttggacaaacatggccattttaagttctccgtgattaaaaaccagcccaaaacatcagcctaatggctcatgtcagtatgagcagaaacatttcaaccatgagataaacccccatctgaccagaaacatgccaatcctgagaataacctcccctccagccagagatattccaactctgcaataaaactctccttcacacagaaacattcgcagcctgcggtaggctcccccttcctaaacccttaaatgcccttagtctgtaagagaatgtccctgaccgaaatcggccagaagcccctctcaggtttattcccaaaataaacctgtctctgttgaaaaaaaaaaaaaaa

SEQ ID NO: 46693 - DNA, 691 bp, Homo Sapiens
gcacatcccaggacaggagcccctgaccgcgtccatgctggctgcggcgcccctgcatgagcaaaagcagatgattggcccagagacggaaagtacaaagactagtaaaatacatccttgcccttaaggagctaagtacccaaaacctgtaatccatcttgagtcaccagagtacggttgctcagaaacagcagtggtgcggtggaaagggcatcaaccctgcgatccggacaagtcactccatccctctgatcatgcgtgcccacctaccacatgaggatatcacttcatagacttgctggaagggttcattgtgttagcctgttccctgagctctcttcgtgatcaagaagactgatcagataaatcaagagacttgcccaaaattacctaggaaatctgtagcagcagcagaaccaaactccggtccttgctaaatctagataccaggctagcttttctatggacccagaattaacccatacaaatgtacaagcctttccagaccagctggggtgagatgaactgaaaatggcagcaacatcaatacctcagcttcttcagcaacttcatcaagtaaggctgccatgaggaagtgggcctaaaggagagttttctagaaacacagaagggggcaaaggagtggcttgaaactgcaacaaagtgcagacaaacaaacaaacacacaaag

SEQ ID NO: 46694 - DNA, 523 bp, Homo Sapiens
cggcacgaggagaaactacaaatggttatactgattagtgtctagcctagagtggtaaccatgctttactaattcagttatgaaatacattatttataatgcattagctgtattagctgttgcttttttgatgttcaggataactatgttatctcatttctgcatttaattaatagctcgagtattaaaagcccactcccttcaagaaaagctttgattttccccagtcatgaaagcccttgtttcaaattctttaatctctgaacctagtatcataagaatttcctcttttgataacatctgtactttcatattctgctcactatcaaatgtattgttaacacttagtaagtttgaaaatgaaggggttttatctgcatttgacattgaaccttgaagtactttaagtactccaaggggaaaattaaagtggaagtttcttcggatcttgtttagaaaaaactataaataaaaaattgatgctaccaaattgtgccttcctaaataacatttttgagagcat

SEQ ID NO: 46695 - DNA, 712 bp, Homo Sapiens
aaatgcaagaacgggacactttgctaaaggcgctgttggaaatagcttcttgcttggagaaagcccttcaagtgtttcaccaaatccacgatcatgtgaacccaaaagcatttttcagtgttcttcgcatatatttgtctggctggaaaggcaacccccagctatcagacggtctggtgtatgaagggttctgggaagacccaaaggagtttgcagggggcagtgcaggccaaagcagcgtctttcagtgctttgacgtcctgctgggcatccagcagactgctggtggaggacatgctgctcagttcctccaggacatgagaagatatatgccaccagctcacaggaacttcctgtgctcattagagtcaaatccctcagtccgtgagtttgtcctttcaaaaggtgatgctggcctgcgggaagcttatgacgcctgtgtgaaagctctggtctccctgaggagctaccatctgcaaatcgtgactaagtacatcctgattcctgcaagccagcagccaaaggagaataagacctctgaagacccttcaaaactggaagccaaaggaactggaggcactgatttaatgaatttcctgaagactgtaagaagtacaactgagaaatcccttttgaaggaaggttaatgtaacccaacaagagcacattttatcatagcagagacatctgtatgcattcctgtcattaccca

SEQ ID NO: 46696 - DNA, 606 bp, Homo Sapiens
cagcctgggtgacagagcgagactctgtctcaaataaataaattatttcacagaggatagcaagctccagaaggttctattacctttaaaaaagagtagttttgcccctcccagcaacctggtatgggtgccctaagaccagtctgaactcacactgtctgaaaggccacccaggatccaaatcgggccatcttcattgccatgagtgttcggacaggctctgcgtgccaggcaacagtgggcagacaaagggctccctggctactgggaagatacagaaccatcctgtgaaaatcatttcagcactggagaccttctttgctattacttctttcattaacaatgacctctaatttaaattgggccctgctggtttgttgatgaattgagcaactgagaacgtggcgggcactaaactgacagttccttccttcatggagcctgcttcatgtggaggaaacaggaaataaagcaaaagaagagggtcaggcttggtggctcatgcctataatcctggcattttaggaggctgaggttggagaatcgcttgaggccagaagtgcaagaccagcctgcgcaaacagcaagaccctgtctacaaaaaaa

SEQ ID NO: 46697 - DNA, 698 bp, Homo Sapiens
  misc_feature (661)..(661): n is a, c, g, or t
tctatatgaatatgaagtatttgtcttttgtgcctggcttatttcactgagcacaatattctccacttcattcatgttaaaaatgatggaaattctgtcatttgcaacatgaatgaagtggagaatattgcaaatgacagaatttccatcatttttaaagactgggtaataatccattatgtatatgtataccacatttcctttatccatttatctgttgctattaatatatagtgctgcaatgaacatgggagtgccactctcttggacaaactgatttcaaaacatttgggcaaatacctagaagtggtattactgaatctaacatgtcttctatttgacttttggccctatggtagtaggacatcacagaagttggggtttgggaaagttagcttaagatcatacataagtaaatgtatttgaacttggattatttaaccttctgattgcaaagtcttaaatattctctatcaaaattaaattttattaaaaattttaaattaaatattctattctcttcagttatagtttaaaaaatatatattcctatctttgtaggtggaaccgtcccaaaatgtcccttgctcagaagaaggatcgggtagctcaaaagaaggcaagcttcctcagagctcaggagcgggctgctgagagctanacccagcaattttctatgattttttcagatatagata

SEQ ID NO: 46698 - DNA, 582 bp, Homo Sapiens
ccacgcgtccgcggacgcgtgggtacaagaagagaactccagtagccttattctgtcagggacgaattgtttaccccatgataatgtaggatatcataaattcttcttcaaaggttttagcctgtaatttgttaagtacattgagttctgagatcctctccaaagaaccaatgtatcagtatgttcagctcacctgttctttgttcttcattttaacttttaatttcctcattctttatgtctccttgcccctagtttcagtaaacaatcccctcctagcctctgtcacctgctctgacctgagtcacctttagtcacctggtccgtaaccatctttcctgtctaaacttctcaccccaccactctggcttatacccctgctctctttaaaatagccagtcagaattagcttagattgtgcggtccaaccctagcccataggggaacaacacagcagtagggggtacctgcatcagggataagaacccattcccctcccttgttccggtgtgctctcgccattgcaccatccatgagacgcactcttgtatagaagtaaaattgccttgctgagaaaaaaaa

SEQ ID NO: 46699 - DNA, 499 bp, Homo Sapiens
ggctgttaaagaaaatatcttcaagaaggattatttcagtgtccctttttaaaactcgatgatggctttcagtttatttaagtctcctgtttttcagctccagttaaaactgacaataggcagctatcaaaaatggaaaaaatcttgtgctctttctggaatattagaggaatcagttaataatagtaaagtggtattaacccaatacttgatttgcagtttttaaagcagtttttaaattgagagaaaaggggctgggcccagctgaggcgggtggatctcctgaggtcaggagtttgagaccagcctggccaacatagtgaaaccccgtctctactaaaaatacaaaaatcagccgggtgtggtgggacgtgcctgtaaccccagctactctggaggctgaggcaggaaaatcgcttgaacccagggggaggaggttgcagtgagccgagatggcgccgttgcactccagcttgggtgacagagcgagactccgtct

SEQ ID NO: 46700 - DNA, 599 bp, Homo Sapiens
cctgattggctatcttggggccatgtccccttcttgctgccacaggatgaataaagtgttgagattgtctatggagaaagctgtgtgtctgtttttatctcccctctcaggaccagtcagccactggtcaatcaggctgatcatggaacattaggaattctccaattaagggagaaaaagtccagggacttagttatatcttcagaccagtgcagctgggacacacaaagttctcctgtctcaccatctgatatggtttggatgctcgtcccctccaaatctcatgttgaaatgtaattcccagtgttggaagtggagcctggtgggaagtatttggatcatgagagaggatccttcatgaatggctcagcaccatctccttggtgatgagtgagttctcactcaattcacatagatatggttgtttaaaagagtctgagacctctcccctctttctcgccatgtgatatgcctgctcccccttcaccttccgcctttactgtaagcttcctgaggccctcaccagaagctgagcaaatgttggtgccatgccagtacagcctgcagaattgtgagccaaaataaaatgtcttttcttt

SEQ ID NO: 46701 - DNA, 605 bp, Homo Sapiens
tggctctgaagggcttgactgtacaacagtgggatgctctctatacagatcttccaaacagacaacttaaagttcaggttgcagacaggagagttattagcactaccgatgctgaaagacaagcagttacacccccaggattacaggaggcaatcaatgacctggtgaagaagtacaagctttctcgagcttttgtccggccctctggtacagaagatgtcgtccgagtatatgcagaagcagactcacaagaaagtgcagatcaccttgcacatgaagtgagcttggcagtatttcagctggctggaggaattggagaaaggccccaaccaggtttctgaagataattttcatattcctgagaaactggactttttacaagtctttacaaaactgtcaataataatggcagtactaagagatttataatcataatgtttacaatgcagcctactggattgtctctagatctgtttttcttaaacactaacagaataattctttataaatagtaactaacatcttgacaaagaggataaactgattttggttcttgtcatggaagataaaaagtcagtatcatgagcatactatttcatgtccct

SEQ ID NO: 46702 - DNA, 901 bp, Homo Sapiens
agcaggctggtaccggtccggaattcccgggatcagagctgggcactctgcggcccccgctgctgcaactctccaccctgggaactgccccgcccactttggccctgcactaccaccctcaccccttcctcaacagtgtctacattgggccagcaggaccttttagcatcttccctagcagccggttgaagcggagaccaagccactgtgagctggacctggctgaggggcaccagccccagaaggtggcccggcgcgtgttcaccaacagccgggagcgctggcggcagcagaacgttaacggcgccttcgccgagctgaggaagctgctgccgacgcacccgcccgaccggaagctgagcaagaacgaggtgctccgcctagccatgaagtacatcggcttcctggtgcggctgctgcgcgaccaagccgcagctctggccgcasccacccctcccgggcctcgcaaacggccggtgcaccgggtcccagacgacggcgcccgccggggatccggacgcagggccgaggcggcagcgcgctcgcagcccgcgcccccggccgaccccgacggcagccccggtggagcggcccggcccatcaagatggagcaaaccgctttgagcccagaggtgcggtgaccgcacgcggcagcacctctgagccggaggcaccagggactcggcccagggccgtcaaggaaagggcagtggacgtgctgcgcatgttcgggagcgaactcccccgaagaaggaccagtgaagacgtcaggggcaaggtctcgggggtccggaagggtgatcatcgacccccaagggacccgcagacccttaaaaaaatcacccacaaccctctggaagtggccttgcccggtccccttcccaggggcgaggtcggcaaa

SEQ ID NO: 46703 - DNA, 673 bp, Homo Sapiens
cgcacagactcacgtggagtgaatctgaaccgtcagtacctgaagcctgatgccgtcctgcacccggccatctatggggccaaagctgtgcttctctaccaccatgtgcactctcgtctgaactcccagagttcctctgagcaccagcccagttcctgtctccctcctgatgctcctgtttctgacctggagaaagccaacaatctccaaaatgaagctcagtgtgggcactcagctgacaggcataacgctgaagcctggaaacaaacagagccagcagaacagaagctcaacagtgtgtggattatgccacaacagtctgcggggcttgaagagtcagcccctgataccatcccccccaaagagagtggcgttgcttactatgtggacctgcatggacatgcttccaaaaggggctgcttcatgtacggaaacagctttagtgatgagagcacccaggtggaaaacatgctatatccaaagctcatctccttgaattcagcccacttcgacttccagggctgcaatttctcagagaagaatatgtatgcccgagaccgtagagatggccagtctaaagagggaagcggccgtgttgcaatctacaaagcctcagggataatccacagctacacacttgaatgcaactacaacactggacgctcagtaaaca

SEQ ID NO: 46704 - DNA, 828 bp, Homo Sapiens
gctggcttccacaggtccctgactgtcctcagagtggaacatgctcaacctcccgcccactgctctctctctgcccagatttcaggggtgccggtccccaaggcctgcccccttctttaagactgaactcaagtctccttggaaggccccggtgaagctcccagagactggttttcttgggatgcaggcagaaggggaccctccctggccaacacccaggagcccagcagaagcacccacacgtagaaagaggctcactacagccagaagtgcagagtcagagtcctgggaccatcttgttctgcaaggtgaccccaggctccccaggacaggggagagtgatcgtcctcattcagactctagctggggcctctgtactggcttctccctgggtggggttgcctgttacatagctgtgcctcagagaaagggtcctgcattttctggaatgttctctgtgcttacccctctgtgtgcccctccattgctcctctacaagcaattaggtgattcaaaagagcaacttaggctgggtgcagtgactcacacccgtaatcccggcactttgggaggccgaggcgggcagggacaggagttcaagaccagcctggccaacattggtgaaaccctgtctctacaaaaaatacaaaaattaaccagacattgtggcatgtgcctgtaatcccagctactcaggaggctgacacaggagaattggttgaaccaggaggcggaggctgcagtgagctgagattgtgccactgcactcccaggctggggccaccagaaacggagaactctgctcttcacaacaccacaaacaaaaca

SEQ ID NO: 46705 - DNA, 640 bp, Homo Sapiens
  misc_feature (555)..(555): n is a, c, g, or t
  misc_feature (574)..(574): n is a, c, g, or t
atgaaccctaaaaatgaataagctaatgaactagttcatggaattatttctgatggtcttttgacctgatgctgccatactgcagtgttaccagctccccctagaaaacggaactgtttaaaaacacagcaagttacagaaaccattttattctacagccattggggtacttcagtttatgggatgtttttggaaacttctgctttgggagggatgaagatcattgataaatgttatttgctttctgagttttggggtcatttcattgcttatcaatgaagggcagacagaggagagaatatctcaagtcttttctgataaaaggcttgcttgagggagcttataacttgcacctagagggtttacccactttgtggatttgatttatccaccaaccacagcaaccaataatgtcaagattctaggagtttatgaaagaggctagtatgttttcattttgagtcagacattcttttctcattctcaaatctgttttaaatgctccaatttaaaaatgccaatgaaaatttataatgcttctgtagtaaccatatngcagttactttgaatttangaaaacaagtttgtatgatgaaatattgtgcagaatctgtaaataggtagcttaaaaaaaaaaaaa

SEQ ID NO: 46706 - DNA, 846 bp, Homo Sapiens
tagatctgaaatgtggaaatggtttctcacaatttaaaggaaaaacccactttgcacccatgatcccatcattttggttgagattttagaataaaaaatatagtgttgagatccgtacttttgtaatcagaccaccaagcatgcctgtggcaaggcagagaggaaaggtctggagccagtgtattgcagtttcatgctacctttacctgctaatcataaaaattatgttttcaaaagtagatgatactagccttacacccaaaaacatgttctgaattagatgccccctcacccaatttttattaagctttctaaattccagccacattgctgtacatcaacattggtttcattcaacagacatttttttggcctgaagatacaaggttcagaaagaggccatccctgccctcaaataactttcatactggtgtatgatgaactgaccattaatagtttaagtgcttacaagctatgtttctgttcaaaaaaaaaatagtttggtataataaatgctataaaccaatacacatttctgacttgggggcagagacagactggctgatgttgtatagtttgtagccctggagtaagaagttgacattaatttcggcctatatgtggaaaagacctataacattgggtgaactgagccagctggccatagaacacaagaacatattccaggaaataaatatagctgggaggttgggaaaggctgttattactgagagagaaaacaggtgagttgggattgagaactcctgattttcatccctggtttagaatcttggccaaagtagtggtagagttaatctttgccttgtggaaaagcattacctatgg

SEQ ID NO: 46707 - DNA, 865 bp, Homo Sapiens
gaatcatttgaatcagtgtttatgttagtwatgttaaaagatcgtatgtaacagctgtgtsagttgtttaagcaatacaagatgacaaactttaaacaagattctttttttgcagcagcacttctaaaagattgaaaacaccaagaagatagatagaatattcactatttctcatattgatgcaattgtggtgctctttttcatttgaracatcttctcctaaaatatacactttaagaaatagtcatttctgtttttgcattaaagtaaattaaagcagaaaacacatgctcrgkkkkggggtaacttcagtttatagatttcatacttatgttgtctttcctgggtacagatttattactgaacaagtacgtgtaagtaaaatgtcattggtgagcaggacacaagataaaaggtgaacaccacatatggtgtgaattgtaaatgcttataccacaaacttgaaaatgtgtcatgtagagccatggaaaatgtctagttgtttttatgtagtacacacattttaatggtgctaacaacctgggctcttttgttcatagagttattctgaaaaraatttcataaaagcacactgcctaaagataggtagaataggctgtagcttgatttactgtggaataaaaaccaaaaaaaaaaaggtcttaattgtttcagtctttaattatgtckataaacttagaaaaaggcatttacatttgaatctagactaatttgtttagtaacattcttcctcatattcaatgactgtatgtttcagtccttatttagagactgcctgctttttaattcatatagckctttggttckattctttgktttgtttaataatwtgktgktytmwtgc

SEQ ID NO: 46708 - DNA, 665 bp, Homo Sapiens
cacgcgtccgatgaaatacaactttgttcacaagtaacatgattgtctttgtagagaattctaaataacaaaaaccctgctgacattaataagcaattacagcaggattgcaggatacagtcctcaggtagatgataaaaaggaattggacatcaagtcattaaaagacacggagaaaccctaaatgcttattgttaagtgaaaaccaatctgaaaaggctttctattttgtatgattgcaattatatgacattttgggagaggcaaaactattgagccagtgaaaggaccagtggttgctgagagttgaggggaaaggagggatggcaggtagagaggtgatttttaaggcagtgaaagtactctctagggtactgtaatttgtcaaaacgcagagaatggaaaacagtgaacggaaaacacagagtaaaccctaatgtcaactctggacttcagttaataataatgtatcactgttggctcattaattgtaacaaatgaaccataatgatgcaagatgttaatgattggggagcctgtggaagatgggaggggaaagggttatatgagaattctctatactttttgctcaactttctgtaaccctaaagctactctaaaaaatgaagtgtatcaagtaaataaataaccaaccaaccaaaaaa

SEQ ID NO: 46709 - DNA, 883 bp, Homo Sapiens
  misc_feature (417)..(420): n is a, c, g, or t
  misc_feature (883)..(883): n is a, c, g, or t
ggggcactcaaaaactatgttaaatgatccactaactttttttttttcttggcccatgattaatggaatgtatgtaactagttagggttcctttcttagatctagaggaagtacagccacccactgacatctgaatttatatacctgttgagttttgagtgcacccaaacactcgataaaccaggtgaagaaatttagcttccatgttctacttcagctaaaacagctacatacaacctagtacacttgaagtcagacagacatttcagttgcttacctccagtactgagccttgctttgggaaactaaaagatttagaccaagtcactgccagtttttgcctttgttgcattttgtacagtttttatatttttgatatcttgtaaataaagacaaccagcttttccaggttccttnnnncaacaaacacaacaatacacatccaaataaccatatcacacccatataccacccccttaccccaccaacccccccctcccccccacctatactgcatccacctccttcccccaattcaaacctccgttaccgaaccccccctctcccgccccccacttttccccaacctatatccccgctccacccaatcccccccacccctttaatatcgcccgcccccccgccctataactccccctaagctctccccccgcctcatacccacgcccacttgcgatacccacttccatacgctacaccccctccccgcagccaaaaacctgcctccccacatgaaaatatctaaggacacagcccacggcatatgtccgtaaacccagacaccctactctcccaccagttaacctaccccgccctatacttcatgatccaccatcacagcacccccgacctatgctctcan

SEQ ID NO: 46710 - DNA, 701 bp, Homo Sapiens
tttgaacttctacagttatcatatgaaattgaattaagaaagcatcgggacatatatcgtcaacttgaaaatttggttcaagaacttagtcaaagtaacatgatgctctacaagcaattagaaatgttaacagatccatcagtttctcaacagataaatccaaggaataccattgatactaaggattattctactcataggctttaccaagttttggagggagagaataagaaaaaagaattgtttctaactcatggaaaccttgaggaagtggctgagaaattgaaacagaatatttctttagtacaagatcagttggcagtatctgctcaagaacattctttctttctgtccaaacggaataaggatgtggacatgctttgtgatactttgtatcaaggaggaaatcagcttttgcttagtgatcaggagttaacagagcagtttcataaagttgaatctcaactgaataagctaaatcatctcctcactgatattcttgctgatgtgaagacaaaaagaaaaactttggcaaataataaattacatcaaatggaaagagaattctatgtatattttttaaaagatgaagattatctgaaagatattgtggagaatttagaaactcaatcaaagattaaggctgttagtcttgaagattgaaaattactgaaaactgaatctttattacgtgtcctctt

SEQ ID NO: 46711 - DNA, 640 bp, Homo Sapiens
atttgaatgaggaatgcttcccacatccttgaaagaaaaactgtggcttacgttttgaagtattctgagaatgaagtattaagatccaatttctataagcaagatcagacttgttaagtatgccgcaagtaagagctaattcattcattccatgtgtgccactaaataaagagattgagcaagtgccactgtgtggaacatttttcttttttttaatattggactttccaattttgaaattatggataaagtcctaaattttctatagtggcttcttttctgtctgcatatttgttaaaattgtggatctaaaagccatatcctgtctttggtggtggcctggtaggaatggcttgtcctagttcttcaaaggtaagattgaccaaagcaagttctcattggtggtctgtgtttacatcttccgtgtcaagatattttaaagcatgaaaataaagccattcttgccctttttcgtgtgtttgaaaaaaaacaaaaaaagacaaaaaaaaaaaacaaaaaaaaaaaaacaaaaaaataaaaaaaacaaaaataaaaaaaagagggacagagaaaaaaactacgggggaaaaaaagggaggggggggacgaataaattgaagggggggaaagaaggggcaaa

SEQ ID NO: 46712 - DNA, 666 bp, Homo Sapiens
cggggatttggccggaagatactcctcacagacactggaggacacacacaggagagaaaccttacgcatgcatcgagtgtgggcgaaactttagccacaagtccactctcagcttacatcagaggatacactcgggggagaagccttatgcatgcgtggagtgtgggcaaagctttaggagaaagtcacagctcatcatacaccagaagatacactcggggaaaagctttagaggtgcaaggagtgaggatgtgattttagcaacaagtcagccatcagccacaccagcggaaatgcttagggagaagccttgtttgtaaggtaatgtggacagagctgtacgtggacatcattacttgtcacgtgtcagaggacacactcgggagaaaccttcatggagtgagagtaaggtgttggctggaagtggccccttaagagatacttggagtcaaatctatccactgtacgcccaccccactcttgttctaagagctttggggacagtcttttgaccccttacattcctttagatgtgaagatgacagagatctaacttctgagagcagaggtgtcaagtgacggtccccttggaggaatggtctttgcatctgactacttccttctgcaactgtgttcttccattagcttccatgacactctcctgct

SEQ ID NO: 46713 - DNA, 573 bp, Homo Sapiens
caccaaatggaatctcctcatctcttgcttgttagcgatgtgtctgattcagggcatctgtctttttgttacttttttgtccgtgtcctctcatttgggttttgtaactgcaattttcaaaccaaagtttaaaatcaccttttcttcctgttttgctgtagtcactggtgttcctcacccaccagctgtaactcagtttgtgtgaggtacagccacagaagatgtcatgtactgtatattacctggtgatagttgcttttcaccccccgagttcagtttctaggagccaatgaaacttcccctcacctcctcatctttccaagttgttctttgaattgaggagtttgaaggcataaacagttacttggggatttgcgaaaatcctacttagttactgcgtttacagttctttggcccagtctctgacccttcccaagtatttgtgcaatgattgtgtttactgctggatttttgaaggttttttttttaagaaagtgccatttcattatttgattatcaccaaattatctggaaataattgggacattgtaacttatctatttatagttatga

SEQ ID NO: 46714 - DNA, 448 bp, Homo Sapiens
ttccccatcacctgggcgctggaggtggctttggccctgtagcagatgatggctatggagtttcctacatgattgcaggcgagaacacgatcttcttccacatctccagcaagttctcaagctcagagacgaacgcccagcgctttggaaaccacatccgcaaagccctgctggacattgctgatcttttccaagttcccaaggcctacagctgaagcccttaggtacctgtgttttgtttgggaactcggaggccctccccctcccccagctcagaccacagaggtggcaagagaagggctgaagctggaagactgttcatgagggacttgtgtgacctgctttgaaatgtgtgactctgctgagtgacgtaggctctgagatagctgtccacgcccacgtgtttgcttggaataaatacttgcctcagaaccttaaaaaaaaaaaa

SEQ ID NO: 46715 - DNA, 806 bp, Homo Sapiens
  misc_feature (799)..(799): n is a, c, g, or t
ccacgcgtccggccatacctcaaagatattgtagatttgattcgagaccaccacaataaagcagatattgctacaaagtgagtcacacaaattgttttgtttccttgtgaatatgaagttatattggctgggtgtgatggctcatgcctataatcccagtactttaggagacggaggcgggagggtcacttgagcccaggaattgtgagatcaacctgggcatatagggagatcctgtctctatttaaaaaaagaagctatgtttacactacactatagtctatttaaagtgtgaaatggcgttatgtccttaattttaaaactcttgatgctggctgggttcggtggctcatacctgtaatcccatcactttgggaggccaagacaggttgattacttgaattcaggagttcaagaccagcctggacaacatggcaaaacacgtctttaaaaaaagaaaagaaaaaagaaaaacagaaagaaaaagaagaaaaactacttgctgcccttacttgaagctcaattatttaaaacaaagaaaaaatataaaaatcttttattgctgaaaatgctaatgatcacctgagccttcagggagtcttagtctttttgctggtgaagggtcttgccttgatgttgttggctgctgcctgataagggcgatggttgctgaatattgaagtggttgtaacaatttcttaaaagaaaacaatgaaatttgccacattaactgactcttccttccacgaaagatttcagtgtaccatgcgatactgtttgataagcattttacccatangtagaac

SEQ ID NO: 46716 - DNA, 524 bp, Homo Sapiens
ggactctgaggaatcctatccatatgtagcagtggatgaaatctgtaagtacagacctgagaattctgttgctaatgacactggcttcacagtggtcgcacctggaaaggagaaggccctgatgaaagcagtcgcaactgtggggcccatctccgttgctatggatgcaggccattcgtccttccagttctacaaatcaggcatttattttgaaccagactgcagcagcaaaaacctggatcatggtgttctggtggttggctacggctttgaaggagcaaattcgaataacagcaagtattggctcgtcaaaaacagctggggtccagaatggggctcgaatggctatgtaaaaatagccaaagacaagaacaaccactgtggaatcgccacagcagccagctaccccaatgtgtgagctgatggatggtgaggaggaaggacttaaggacagcatgtctggggaaattttatcttgaaactgaccaaacgcttattgtgtaagataaaccagttgaatcatt

SEQ ID NO: 46717 - DNA, 655 bp, Homo Sapiens
caggaggagataaggaagctcgaggaagagaaaaaacaactggaaggagaaatatagatttttataaaatgaaagctgcctctgaagcactgcagactcagctgagcaccgatacaaagaaagacaaacatcgtaagaagcaatagtttctcttactattctgagagccttattctacatcccatcttcctgtgagttggtctttgtagcatttaactctaattgcagttctcattataaaaactggcttgcttattgtatattatccccaactaaagcgtgaactcctagcagggcgtggtggctcatgcctgtaatctcatcactgtgggaggccgaggtgggtcgactacctgaggttaggagttcgagaccatcctgaccaacatgatgaaacgctgtctctactaaaaatacaaaaattatctacgcgtggtggctgggacctgtaatcacagctacttgggaggctgaggcaggagaatcacttgaaccctgaaggtggaggttgcagtgagcaaagatctaaccagtacactccagcctgggtgacaagaacaaaactgcatctcaaaaaaaaaaaaaaaaaagggcccctctatttataagggggccctttaagagaaaaaaaaaaattttttttaaaacggtttaa

SEQ ID NO: 46718 - DNA, 421 bp, Homo Sapiens
gaagggggtggtgtgggagtggccctttaactctatttggctatctgaggatgtacaaaattctcatttaattttctggtcagcaagttccccacacagaaatcactctgaggtttacagaagaactgtaatattattttaaaatgcgattttctgtcattagttctagatatgtacttcatggttaaattctaaatctgaaaatgctagtgggagatatcaagaaattttctttttgattactagtacctgtattctaacagagagtttgaattttttgcccgtgttatcagaatgatggaaattgatcattttcagttgttcattgtgtattcaatccagcgaactgctgtatgtatagaggagctgaggtgctgtctaatgggaaatgtgatttgattgatttatttgcttagagtaa

SEQ ID NO: 46719 - DNA, 692 bp, Homo Sapiens
ccccgcgtccggaacattgggaaatggttaaagaagtgatggtgcattgtgtggtagaatattatgcatatgtttaaagaatcatattttctaagattatttggaagcatgtttggtaatgtcaagtggagtaccccagatacattttagacatttatcgtcatcatctgctctgagtggaaggccgttcagagaggctagaggttcttattctggctataaattatgtgagtaaaattgtgctaaccagttaaaagtactgtacacccatgctcaatatatagtcctggaaatagcaattgaaacatgtcttctcacaagagaaaatgacagttttaatgatgtatttgatgaatttaaactttaagtcaggtgctgcaaattggaaagaagacttgtggtgttttaagttgctgtggacacttttaagaaacttagaacccatggaacccttgtttatcgccatgcaaattacaatcttgaatgagtgttttttaaaaataaagtattagaaaaatgtgtagtaaagatgtaaaattaaaaaatggaattctccattaactgtggattttactaaatagaattactggtgaagcagatttatctatcgagactatctggtatgcgttatgtatgtagtctgttgctgctgaaagatgtctgtgtgcctgtatcaacatgtgacttcatgt

SEQ ID NO: 46720 - DNA, 695 bp, Homo Sapiens
  misc_feature (645)..(645): n is a, c, g, or t
  misc_feature (669)..(669): n is a, c, g, or t
gccgtggggacattacaggaggccaaatagagggatgctaggtgtctgggatcggggtggggacaggtagaccaggtgctcagcccaggcacaacttcagcaggggatggcgctaggggacttggggatttctggtcaaccccacaagcaccactctgggcacaagcagggcactctgttcccctcccccttaagccaacaaccacagtgccaccaagctcacacctgtccttctcaggctggcatctcccccaccctgtgccccttttcatggtaccaggcccgcactgggggcaattgacttcctccaatccccactcctccgagacccaggagacaaacagcccttccttggggaaacttgggaatcattctggcttaaacaacacctcctcctgctgctcactcccgctgagcccactctactgccccagctccgtttctaccaccgcatcctcactgggctcactgcaggcatgctgaacaaggggcctccaaccttctgccctcctgccaaaagatctggggagtgtgaggagagggtggcatcaggagctgctcaggcttggcggagggagcggcatgggcgatgtcactcagccccttcccggtccgcccgcttccctccttcatgatttccattanagtctgttgttttgtgactgctanaaaaaaaaaaaaaaaaatgcggcatt

SEQ ID NO: 46721 - DNA, 583 bp, Homo Sapiens
gagaaggaagccaggacagcgcagtccccagtcccgaacggccagggagaggaggtggcctagcgctggcggggctcaccccaatccgtctgccttttgatgccgtactgtaagctccgtccatctctgctggttgcgcagccacctcgggatactgcacacggagaggagggaaaataagcgaggcaccgccgcaccacgcgggagacctacggagacccacagcgcccgagccctggaagagcactactggatgtcagcggagaaatggctttgagctcagcctggcgctcggttctgcctctgtggctcctctggagcgctgcctgctcccgcgccgcgtccggggacgacaacgcttttccttttgacattgaagggagctcagcggttggcaggcaagacccgcctgagacgagcgaaccccgcgtggctctgggacgcctgccgcctgcggccgagaaatgcaatgctggattctttcacaccctgtcgggagaatgtgtgccctgcgactgtaatggcaattccaacgagtgtttggacggctcaggatactgtgtgcactgccagcggaacacaa

SEQ ID NO: 46722 - DNA, 668 bp, Homo Sapiens
  misc_feature (15)..(15): n is a, c, g, or t
  misc_feature (20)..(20): n is a, c, g, or t
tgtcgtgctcaccgncgatncggtggcccaggcgctgtgggaggagcaggtcttgcagaggagaagaggacaggctcgccctgagccaggcccactcgctggtgcaggcggaggccccgagatgaaaccctgaggcccccgagtcctggcaaactgcttgcctggggtggtgcagttctgagtgtgcctcacctgcagaacagctgagacagatgatgtgcaaagtgttttctcactggatttgcacaagtttggggagcctttctgccccccgtctttgttctttattagctgaagctaattcagagccacctgggtccgggagttggggacagcagaacgacttgacacatgttcatcactggcagagctggtcatgagccttttatataagcctttttcatcgggcctcagaggccctccttaaggaggtaccacattggtcagctgacttgcaaactcttctaaggccacttagattttctttttcaagtttgggttgtggcctggcatggtgatgtctgtaatcccagcagtttgcaaactgaggcaagagaatcgcttgaggccaggagtttgaggccagctagagtgacatagcaagactccgatgctacaaaaaagaataataatagtaattaactaaataaaatttgagctgaaatgtt

SEQ ID NO: 46723 - DNA, 865 bp, Homo Sapiens
  misc_feature (660)..(660): n is a, c, g, or t
  misc_feature (738)..(738): n is a, c, g, or t
  misc_feature (800)..(800): n is a, c, g, or t
  misc_feature (839)..(839): n is a, c, g, or t
  misc_feature (864)..(864): n is a, c, g, or t
aatgcagttgtctctgcctttcaagtcactttgattgaaacattttaagcagaacaaatatagccaataatttaaaataatcaccccaaaaccatttctcaaacctgctaaaactttgagcatgtgaataattttctcctcttcacattcttcttatgtgggaaggaagtgaatttgaaatattaaaatctgccctttggaataggctactttggccgtttataacttgatttctactcggggaggaaggtacattcccaatagctttccaattgggatatcctgtgatatgattggcaggctgtccgagtagttacacttaataaaatttgggttcgaaagcagattcctggaagttcaaaaataactaaaacagccccggataggttagaaagtgaacttaaatcattctcagaattagaaaataagaagttattttttatcttcaaagataaaaagggggccgggcacggtggctcacgcctgtaatcccagcactttggaaagccgaggcaagtggatcacgaggtcgagagattgagaccatcctggccaacatggtggaaccccgtctctactaaaactacaaaaattagccaagatcacgccattgcactccagcctggagacagtgagacgccgtctcaaaaaaaaaaaaanaaagataaaaagagttttgagcaagctcaaagacccgtgtgccagcagtcagatgccccgttgggtgcacaggctaangcagcccggcccaatctggaaaccagtcaggcttttgccagcccctaatctaactgattggnacatgttggtggatacccccaactttgggaatttcctanggttaagagaacctctagaatttgna

SEQ ID NO: 46724 - DNA, 500 bp, Homo Sapiens
agttcctggagtttgagtttcgaccggacgggaagttaagatatgccaacaacagcaattacaagaatgatgtcatgatcagaaaagaggcttatgtacataaaagcgtgatggaggaactgaagagaataattgacgacagtgaaattaccaaagaggatgatgcattgtggcctcctcctgaccgagtgggccggcaggagcttgaaatcgtcattggagatgaacacatttcttttacaacatcaaaaattggttcccttattgatgtcaatcaatccaaggatccagaaggcttacgagtattttattatcttgtccaggacctgaagtgtttggtcttcagtcttattggattacacttcaagattaaaccaatctagactgaatattggtgtggacatggggggtgggtgggagtagaaaattttgtgtatatcagggcagtatttttttatgaactataaatgattgtctttaataaatatgtgataaaatcc

SEQ ID NO: 46725 - DNA, 623 bp, Homo Sapiens
cctgaaatgcatgcaaaggttcagagaaattattgaccagtttgaggagaacatgcctgtattaagggccgaggtggaagagctccaagcccagacccgggaaccccgagaggtcatatttgaggatgttctgcttcggagacccaagtgcaccccagacatggatgtcatcctcaacattcctgtggaagagccactacccttctagatggcagtgccatgggccgccctcccctcctgctctcttcccagcacctggagccttggatcatttacttccaggaccggatctccattcagaccctgatctacagtctccctgctccctctgcccttcctccctctttctttccctccctccctccctcccttcttccccccttcccttccctcctccttccttcctcctctccctccctccctcctttctttcttcctgtggttttttcctctcttcttcccttctttctggttggtgctgctgggccacgtgggaatttctgattaaatctgctattccttttttaccaataaagctggatttacatttaaaaaaaaaaaaaaaaaggggccccctcctttctgaggcgtccctttaaaaggggaggccgcattttccttcc

SEQ ID NO: 46726 - DNA, 733 bp, Homo Sapiens
caagactaaaagcattaatttatcatacgcataaagaaaaatttggtgatgcattgccttggctaattatgatatgctaacatataacacacatgtctgtgaaatgaaatgactggcatattgcatggagacactgcttttttttcctccttttttgattatgaatgtttgcttgatgtttcatagtatttgcatgaaatattagctgaggatcgtcacctaactaaaaagatctgggaatggtggaagcatggtgggctatgggaactaactgggctaactattatacatttaccttttaacagtagctgacgagactaaactcaatacagtggatgaccagaaagcaggttctcccagcagagatgtgggtccttccctgggtctgaagaagtcaagctcattggagagtctgcagaccgcagttgccgaggtgactttgaatggggatattcctttccatcgtccacggccgcggataatcagaggcaggggatgcaatgagagcttcagagctgccatcgacaaatcttatgataaacccgcggtagatgatgatgatgaaggcatggagaccttggaagaagacacagaagaaagttcaagatcagggagagagtctgtatccacagccagtgatcagccttcccactctctggagagacaaatgaatggaaaccaagagaaaggtgataagactgatagaaaaaaggataaaactggaaaaaaaaaa

SEQ ID NO: 46727 - DNA, 524 bp, Homo Sapiens
cctttataatgaatagttcgggtgcgttttgtttactcctaaaaggtttctttgcgtattttctaaatgtaatatctcggggaaaatattagaaaagcacgtattagctgaagaatgtaacttgtagtccagctctgcagcttccttaaacttaagaaaaagattgggccagtgacaagaatttaaagacaatgtccaagttgacaattatttttctatagtccatacaaattaaataatctggcaactctggcaaatcgccttgtaaaatgcgtctcattttttaacttgctttcgttttgaaccgcccttgtaatcgcctgaaatcgctagttctttatgcggtggctgccgctgtgttccgttattttcagtaggtgtcatatttatttgtattgcctttgttctgttcgccgctggttttaaaccagcttgctgtgtgcatctcagacgtcggttggtacgtcctccgctgttcttcaggaaagcgatagcctcacctatttgaaacaagccctctttca

SEQ ID NO: 46728 - DNA, 514 bp, Homo Sapiens
atattgggttgacagggttatctatatttttgttcttgatttttgagtttcatcatcttgcattaaattgttccacctggatttggggttcatctctgtgccctaaggatctgctatgaccaatcctctttttgtaggtgggtctctggcttaagtattgataggcttcagcggtttgtgtctctgtcttagcttgtatcaagccagtagtagctcacttcctttgtaaattcctgcttcagtctgggatccgtaggagtatgtgagaacttctgaaacgtctccaactcttaacagtcaagatatctatatcatttggatagagttctggttttccaactactagacttaaagaaattctggccgggtgcggtggctcacgcctgtaatcccagcactttggggggctgaggcgggtggatcacgaggtcaggagattgagaccatcctggctaacacggtgaaaccccacctctactaaaaatacaaaaacttagctgggcgtggtggcggg

SEQ ID NO: 46729 - DNA, 742 bp, Homo Sapiens
  misc_feature (727)..(727): n is a, c, g, or t
agggctgggtccggtccggattcccgggatagagcagccagagtgtgaaggacgtggtgcggttcttcaaccgcaacttcccggaagccatgctcaaggagcggcaccacacaaaggtgcagtaccagctcaagtcggagcacatctcgctggcccaggtgttcagcaagatggagcaggtgtctggcgtgctgggcatcgaggactactcggtcagccagaccacactggacaatgtgttcgtgaactttgccaagaagcagagtgacaacctggagcagcaggagacggagccgccatccgcactgcagtcccctctcggctgcttgctcagcctgctccggccccggtctgcccccacggagctccgggcacttgtggcagacgagcccgaggacctggacacggaggacgagggcctcatcagcttcgaggaggagcgggcccagctgtccttcaacacggacacgctctgctgaccacccagagctgggccagggaggacacgctccactgaccacccagagctgggccagggactcaacaatggggacagaagtcccccagtgcctgccagggcctggagtggaggttcaggaccaaggggcttctggtcctccagcccctgtactcggccatgccctgcggtcactgcggttgccgcccctaattgtgccaaaggctgacccggcccgggctgcgtacacccttgccctgctttgccttnaagcctcggggtctg

SEQ ID NO: 46730 - DNA, 494 bp, Homo Sapiens
  misc_feature (439)..(439): n is a, c, g, or t
  misc_feature (478)..(478): n is a, c, g, or t
  misc_feature (486)..(486): n is a, c, g, or t
cggaacgaggagctccgcggacactcccacacgtgtccccgtctgcgaggagtcccggggtgtggggcatggggtggggctgcacctcccagaggcctctcccacccttcccttcccctctcccttctgcctttccaggactagaaccgggaacctggagccctccgggaacgccggccctggggcagcagagccaggatggagccctcctgagctggcatctcagacagcacccgggcccgccacccctcaccaagagagatggccatggggctcagggcctctttaccatgtgcagtgaccatttctcagagcaggacttgcaaagaggctttaatttcaaaagtgaaggaaggaggccaggcgccgtggctcacgcctgtaatcccagcactttgggaggctgaggtgggcagatcacctaggtcaagagtttcanaccagacgggccaacatggtgaaaccccatctctactanaaatacanaaaaaaaa

SEQ ID NO: 46731 - DNA, 936 bp, Homo Sapiens
  misc_feature (504)..(504): n is a, c, g, or t
  misc_feature (608)..(608): n is a, c, g, or t
tttacctgaagaggatctatagatggcaagtaagcatatgaaaagctgttaaactccataagtcatcagggaatgcaaattgaaaccacagcgaggctatgacttacttatctcaatggctaaagaaaaaatagtgaaaataccaaatactgatgaggatacaaactggatattttatacattgctgacaggaatgtaaaatggtacagccactctgggaaagagtttatgaatttcttatcaagttaaacataattttttaatcaagttaaacataagacccagcagttgtgctcctggacattcattccagagaaatgaaaacctatattgtacttgtactcaaatattcataggagctttatttgtaatagccccaaactggaaacaacccagatgtcctacaacaggtacatggttaaacaaaccatccataacttggaatactgctctggaatgaaaaggaactaactgttgatacaagaacttggttgtacctcaggngtattatggtgaacaaaaaaaaaccagtctaaatggcacatactgtatgatcgcatttatatacattcttgagtgacaaattattgaatgaagacagataatgngtccagggaagggactgaggggggtgggtttgttttactattaaggatggcccaggggttctttgtgctgtggaccgtctattgatatgatgttacgaggtggtatacattggttatgggttagcccatggttttacctggcctgaggggtgggcccacttccacaatggatgcttgtaaattgggatctgaaaaagctggggtaaaaggagtatattattgtcaaggctttggtggaagttggtttagtaaaacccccccctggggaaactgggtaggtacaagaacctctccttttttgactgcctatgtattttttttcaaaaaa

SEQ ID NO: 46732 - DNA, 538 bp, Homo Sapiens
  misc_feature (35)..(35): n is a, c, g, or t
gaaaatgtgatttccgggtgattggtgctgagtantgacacacagactctagtgctacatgatgccggtgttgaccttccttcaagaggaccaaatgatttcagaatttagttttagcagctgaaaatttatttctccctgtaaacgttaaaaacagttttccaaataacatcaacaacacagcaaaaccattgtttcttattctttctaaactacaacgaacacaagaattgaatagtaagatgttaattttttttactataaacatttttagagaagtaaaacatgctgaaaactacacaaattataagcatacaactggactcattatcacagtgaatgcactgtgtgatcgccacataggtaaaaactggaatggtcgtaggcctctccatctgtacccttttccatcatgtcctattccctgtcactacacactaaaactttcctgacttacaataccatgggttatttatgcttgtttttgaatgaaaataaataagttatacagtaaaaaaaaaaaaaaaaaaaaaagaac

SEQ ID NO: 46733 - DNA, 600 bp, Homo Sapiens
agaagtcctgggacttcatgaagacgcatgacagcgtgaccgttctcttattcaactcttctcggaggagcctggtgttggtgaagcagttccggccagctgtgtatgcgggtgaggtggagcgccgcttcccagggtccctagcagctgtagaccaggacgggcctcgggagctacagccagccctgcccggctcagcgggggtgacagttgagctgtgtgccggcctcgtggaccagcctgggctctcgctggaggaagtggcttgcaaggaggcttgggaggagtgtggctaccacttggccccctctgatctgcgccgggtcgccacatactggtctggagtgggactgactggctccagacagaccatgttctacacagaggtgacagatgcccagcgtagcggtccaggtgggggcctggtggaggagggtgagctcattgaggtggtgcacctgcccctggaaggcgcccaggcctttgcagacgacccggacatccccaagaccctcggcgtcatctttggtgtctcatggttcctcagccaggtggcccccaacctggatctccagtgagactccagggttctagacagag

SEQ ID NO: 46734 - DNA, 879 bp, Homo Sapiens
cggaattatggcggcggtggatatccgagacaatctgctgggaatttcttgggttgacagctcttggatccctattttgaacagtggtagtgtcctggattacttttcagaaagaagtaatcctttttatgacagaacatgtaataatgaagtggtcaaaatgcagaggctaacattagaacacttgaatcagatggttggaatcgagtacatccttttgcatgctcaagagcccattcttttcatcattcggaagcaacagcggcagtcccctgcccaagttatcccactagctgattactatatcattgctggagtgatctatcaggcaccagacttgggatcagttataaactctagagtgcttactgcagtgcatggtattcagtcagcttttgatgaagctatgtcatactgtcgatatcatccttccaaagggtattggtggcacttcaaagatcatgaagagcaagataaagtcagacctaaagccaaaaggaaagaagaaccaagctctatttttcagagacaacgtgtggatgctttacttttagacctcagacaaaaatttccacccaaatttgtgcagctaaagcctggagaaaagcctgttccagtggatcaaacaaagaaagaggcagaacctataccagaaactgtaaaacctgaggagaaggagaccacaaagaatgtacaacagacagtgagtgctaaaggcccccctgaaaaacggatgagacttcagtgagtactggacaaaagagaagcctggaagactcctcatgctagttatcatacctcagtactgtggctcttgagctttgaagtactttattgtaaccttcttatttgtatggaatgcgcttattttttgaaagg

SEQ ID NO: 46735 - DNA, 722 bp, Homo Sapiens
  misc_feature (570)..(570): n is a, c, g, or t
  misc_feature (700)..(700): n is a, c, g, or t
aaaaaggaccctgaagaacgccccacttttgagtacttgcagagcttcctggaagactactttaccgcgacagagccccagtaccaacctggtgaaaacctgtaaggcccgggtctgcggagagaggccttgtcccagaggctgccccacccctccccattagctttcaattccgtagccagctgctccccagcagcggaaccgcccaggatcagattgcatgtgactctgaagctgacgaacttccatggccctcattaatgacacttgtccccaaatccgaacctcctctgtgaagcattcgagacagaaccttgttatttctcagactttggaaaatgcattgtatcgatgttatgtaaaaggccaaacctctgttcagtgtaaatagttactccagtgccaacaatcctagtgctttccttttttaaaaatgcaaatcctatgtgattttaactctgtcttcacctgattcaactaaaaaaaaaaagtattattttccaaaagtggcctctttgtctaaaacaataaaatttttttcatgttttagcaaaaaaaaaaaaaaaaaanaaaaaaaaaaccatgtcggccgcctcggcccagtcgactctagactcgagcaagcttatgcatgcggccgcatttcgagctcacttggccaattcgccctatagtgagtcgtattacaatcactggccgncgttttacaacgtcgtgactgg

SEQ ID NO: 46736 - DNA, 813 bp, Homo Sapiens
caactgaagcaaggaatgccttaattgaacaagttgcagatttggatgatgaatttgctgacttggttttagaagaatttagtgagaattttgatttgttaccagctgaaaagctacagactgcaatacatagagtgacactagctcagacagcagtgcctgtgctttgtggaagtgccctgaaaaacaaagggatacagcccttgttagatgctgttactatgtacttaccttcacctgaagagcgtaactatgaatttctgcagtggtataaggatgacttatgtgcattggcatttaaagttctccatgacaagcagcgaggaccactggtttttatgcgcatttactcaggcactataaaaccccagttggccattcataatattaatggaaactgcacggagagaataagtcgtctgcttttgccgtttgctgaccaacatgtagaaatcccttcattgactgctggtaacattgctttgactgttgggcttaaacatactgccactggagacaccattgtctcatccaagtccagtgcattagctgcagctcgtagagccgaacgggagggagaaaagaagcacagacaaaacaatgaagcagagagacttttattggctggagtggagattccagaacctgttttcttctgtaccatagaacccccatcactgtctaagcagccagatttggaacatgcgttgaaatgtcttcagcgtgaagatcccagtttgaaagtgaggctagatcctgactctggacaaactgttctgtgtgggtatggggggagttacatatagagattat

SEQ ID NO: 46737 - DNA, 747 bp, Homo Sapiens
ccgcctggtggtgcacgcctgtggtcccagctactcgggaagctgaagtgagatcacctgtgcccaggaggtcgaagctgcagtgagctgtgattgcaccactgcactccagcctgggtgacagagtgagactttgtctcaaataaacaaaaagagacatatacaaaatatattagaaagttgggttaatatcctacaaacaaagtattacatagtttgcacaggattatgtgtgtaaaaagttttaaattcagtatagcttttatttctgcagaactaaaagtagtgcataaaaataaaagtgggatgagcatatctttttaatttgctatgcagtaaaaagtatctcagtcaacatataggaaaccagtgccatttctgtatcatttgacaccgaaggggtattgttttttgttttgttttgtttttcttttgaagaaagacttttatgtcttttattctattcttccgatttggggtttaaattacccccaataagtttgcagaatattctgattactactgcttaggtgatatatttcatatgagaactatctttacacaatgggaaaaaatatggtaaccacttcattcatcagagaagttgtgttttgtttacttgtattttgtttgctaaatgaaattggttatttagactcatggcatgctttttctcaaatggagatttaaaagtcatttccaatgtccttctaacttctggccaattcccagtaggctatagaataa

SEQ ID NO: 46738 - DNA, 695 bp, Homo Sapiens
  misc_feature (695)..(695): n is a, c, g, or t
ctgggcccaacatatccatttttaaaccctttcccccaaatacactgcgtcctggttcctgtttagctgttctgaaatacggtgtgtaagtaagtcagaacccagctaccagtgattattgcgagggcaatgggacctcataaataaggttttctgtgatgtgacgccagtttacataagagaatatcactccggtggtcggtttctgactgtcacgctaagggcaactgtaaactggaataataatgcactcgcaaccaggtaaacttagatacactagtttgtttaaaattatagatttactgtacatgacttgtaatatactataatttgtatttgtaaagagatggtctatattttgtaattactgtattgtatttgaactgcagcaatatccatgggtcctaataattgtagttccccactaaaatctagaaattattagtatttttactcgggctatccagaagtagaagaaatagagccaattctcatttattcagcgaaaatcctctggggttaaaattttaagtttgaaagaacttgacactacagaaatttttctaaaatattttgagtcactataaacctatcatctttccacaagatataccagatgactatttgcagtcttttctttgggcaagagttccatgattttgatactgtacctttggatccaccatgggttgcan

SEQ ID NO: 46739 - DNA, 804 bp, Homo Sapiens
gcagaagagaaagggtcatttacatcaggaaagaggtcttgtatctgggagtagagagctaaccatggagcacagtggctggtgggtgacttagtctgatggtttgtggaccatagaagtcttcacctctggtttgaggtgcagggctgtcttttgtactggagggtgtggggatattttctgatagttgccatttcttgaaaaattcccttgatgtaccttacacagagcagaaataacattaacatggatcagaggtactgggcttcatctgttccattggaccttggctagggaatatcatttcactggcatcaaacctgcttagcttatgaaaagatggtaatatgtcatttctataaatgtttctatatatgaaacataaagtggcaggagatacaatatcacaccccttccccccaaggactgtgaatattgggatttactgtccttgccattacctagtggttacagccctatcactaaaatttacatcgtttctcagttgggatttgggcttgctaacttactgtatagaaagtttaacttttcctcacccctgtatagaaaatgccttggcctctcaagagagggcagagggggggccaggtgcagtggctcaccgcctgtaatcccagcagtttgggaggcaaggcaagtggatcatgtgaggtcaacgagttcgagaccagctggcaacatggttgaaaccccgtctcttacaaaacataccaaaattacctggccatggtggcatgcttcccggtagtccaagctactcgcggaaggctgaggcaggagaat

SEQ ID NO: 46740 - DNA, 811 bp, Homo Sapiens
  misc_feature (808)..(808): n is a, c, g, or t
aaatctctccctctctggtatgtttctgttttgtggattagactgctaaataagcgaagagttaattttgaagttcaggtcaacaaattcctgtttggagacgggctgttcctgaataccaggttgttatctgtctattacagccccttcacttctgggctcctggccctttgcgaagtacttcagaaagcctagagagaagagagggccctcaaatcccattccagcccctaaatgaaagtggcatcacaaggagaaaagtggaggtagaaatgtaccatgggggacgttgccccattgcctttcttcccctgactactgggcttcctctatcagcttttaacgtctggaagtagctgagtctccagtcactggtggccttccccaagtgagctcagcagcatgtgctaataggtgccaatactgtgctggctccagtgggattcctctctgcaaagctgctggcttagcttgactgtttccctattcctctccttagaactttcatagccagtcaagcatagaattgcatccattcttctgaaataggtactgtgcctaatttttcattggcttggccaagattctgttacctgtaattatgtcatatgggctgactggtgtaggtttggtaggcctcactgctctccagaggctagtgttcctatcccaggatggctgttgggattaggagtggaatgaggaatagtttaggaccacaagagatttggcctccttggaacatgtaggaaggcctcaaggatgtaattctagcccagggaagaaaatccttttcagcagacgcttncct

SEQ ID NO: 46741 - DNA, 915 bp, Homo Sapiens
  misc_feature (27)..(27): n is a, c, g, or t
  misc_feature (823)..(825): n is a, c, g, or t
  misc_feature (877)..(877): n is a, c, g, or t
  misc_feature (890)..(890): n is a, c, g, or t
  misc_feature (894)..(894): n is a, c, g, or t
  misc_feature (915)..(915): n is a, c, g, or t
tcttaattttggacaatttgggtaagnaacaagtcacacataaattgacagaaatgtagttcttcattcaatggttagcagtcattaaaggtactttccctttgtttgtggtgataatcagtattagtagttttcatattatttggcttccatattaatcatttttatattttcttctccttcttaccatgtttacttatatcatgcatcttttagaatcccagggagctaatttctggtccctgtgttgctatcaaatctgtatcttgcagaaagaataatttatttcaaacaagggacatacaatagaaagataagacctactgaggtctttttcccatcattttattatgaaaaatgttcaaacatacagtaaaattgaaagaattttatagtaaatactgaccacggggattctacatcttactctacttgttttattattttcctatccagcgtactttttgatggatttcaaaataaattgcagttgctgatatacttccccctagtacttcaactgcagattattaactagagtttagtatttatttagtttttaaatttttttgatttaagatttacctgcaataaaatgtacaaatcttaagtataaatttactgagttcttgcagacatatacacctgtgtaacccaaaccctttccaaaatttagaccattgcaatcatcttcagaaagtttcctaaatccctctcccagtctatcccctccccacccctcaggtataactactgttctcattcttttatatcaaaggttaaatttacctgttctgaacttcatatgagtgaaattatacannnatgtatgcttctttcacttagcataatgggttttgagatttatttcatgtgntgcatgtgtcagngatncatttcttttattgctgagan

SEQ ID NO: 46742 - DNA, 785 bp, Homo Sapiens
  misc_feature (776)..(777): n is a, c, g, or t
gcaggagcagtgcttcgccgtggaggccctggagcgactgattcacccccagctctgtgagctgtgcatagaggcgctggagcggcacgtcatccaggctgtcaacaccagccccgagcggggaggcgaggaggccctgcatgccttcctgctcgtgcactccaagctgctggcattctactctagccacagtgccagctccctgcgcccggccgacctgcttgccctcatcctcctggttcaggacctctaccccagcgagagcacagcagaggacgacattcagccttccccgcggagggcccggagcagccagaacatccccgtgcagcaggcctggagccctcactccacgggcccaactggggggagctctgcagagacggagacagacagcttctccctccctgaggagtacttcacaccagctccttcccctggcgatcagagctcaggtgaggaccggaggaaagcaggaggaaacaatagctagctgcgagcgacaggcagcccaggacatctgtcttaggctccagtggacccccgtgcctcctaaggcttgagtgcaggtacccgtgttcctagagcacaggacgctgtctgcggctccccatcttccctgccagctccagcctgaactcaaggactgttaagaccactccactgatccctaaagctgttgatgacaagttgattcatttaaaacttctgtacatgcattctcagactcatcttttttgtaattaaaattaaaaaataaggtaaaatttaaaaannaaatataa

SEQ ID NO: 46743 - DNA, 514 bp, Homo Sapiens
  misc_feature (354)..(354): n is a, c, g, or t
  misc_feature (382)..(382): n is a, c, g, or t
cgggggcagcaaaaagggactcctgccactcagcagctgaagtatcaacaccagcccttgacccttgagtcctggctttggctgacccttctttgggtctcagtttctttctctgcaaacaagttgccatctggtttgccttccagcactaaagtaatggaactttgatgatgcctttgctgggcattatgtgtccatgccagggatgccacagggggccccagtccaggtggcctaacagcatctcagggaatgtccatctggagctggcaagacccctgcagacctcatagagcctcatctggtggccacagcagccaagcctagagccctccggatcccatccaggcgcanagaggaataggagggacatggaaccatntgcctctggctgtgtcacagggtgaagccccaaaatggggttcagcgtgggaggccacgtggattcttggctttgtacaggaagatctacaagagcaagccaacagagtaaagtggaaggaagtttattcag

SEQ ID NO: 46744 - DNA, 550 bp, Homo Sapiens
gagggtccatccaagggcacctcaggcacaaagtccaccaagcactcagtgttaagcaaatctatggttgttctcacgaagggaaaatacatcatcctacaagatctgtaaaagcctcttctgtgctgcgtctcaactcagtgagcaacctacagtgtatacatctccttgagaacagtggaagatcaaagaacttttcttataacctgcaatcagctactcagccaaaaaacaaaacaaaaccttgactgcctatggaggaagactgtgttcgggggagctggcatagctagtgcagagttcagattttctgctgataatcttttacaccttgggaaaactttaatatccgtacctgaaggctgattcacctaaaaatgtgttaactgaaagaaaatgtcagaatgtttcctttctgctcttacacagcattgttttgtccaatcaacacagcctgcactgaaaggacctgcatagactatgtctgtgcaaagtgcctgagtgtctgctttcacctcagtctgtacagttggaaatgagaattcataat

SEQ ID NO: 46745 - DNA, 704 bp, Homo Sapiens
cgcggcggttgaattgctgcgcccagcgaggcaaccgcctccgaacgccaggtgggggcgaggcgtctcggagtctcagagacaccaaggcccctgcgacaaggtggctgcagctaggccgggggcgtcaggacgacggagcgggttcgggtcggtgacacgcagacctgagggagctgggcccgccttttccgcccgcgccccaggcccttgcagatcgagatttgcgtcctagagtgggaaaaaagcagaggccagggcgccgattttatttggagagaagcaagcatctttgcctctttggagtaggaaattcagacttgaaaaagtggtgtgtggttgactctgtttctcgccatgtcttctcacaagactttcaccattaagcgattcctggccaagaaacaaaagcaaaatcgtcccatcccccagtggattcagatgaaacctggtagtaaaatcaggtacaactccaaaaggaggcattggagaagaaccaagctgggtctataaggaattgcacatgagatggcacacatatttatgctgtatcaagttcacgatcatcttacgatatcaagctgaaaatgtcaccactacctggacagttgcacatgttttactgggaatatttttttctgtttttctgtatgctctgtgctagtagggtggattcagtaataaatatgtgaaagcttttgttt

SEQ ID NO: 46746 - DNA, 687 bp, Homo Sapiens
  misc_feature (596)..(596): n is a, c, g, or t
  misc_feature (657)..(657): n is a, c, g, or t
gctaatatgaataccaattataacttttagaaacaagaataaagcctaaaagagaatgaaatataagaaatgttcgttcccacccctaataacatttggaagtgaatattcccattttcttccacccacagggattgggattgatttttaatttcctaggaaacaatactagactacccaaaaagatgttgccagaatccaaaaggaactatgctcgtaaaagaaatgcagttttctcctacctaaaaaaaagaaagtaaagtgtgttctgttcttatctttttaatgactaagctttaaacagtttattttgggtaagactagaactttcagccatttgttctaatatctgtgttattagatgcaatagaatttatgaaaagaagaatgacaaaggtatctgattagaaaatttgatcttacgcatgaatccatgtcatggccagccactgtcacatagtgggtgccattctcaacatattggtttgctaactttaagcattagggatttagcacactaaaatacttttaattatattaggtttggtaactaaggagtaaataaatcataatttatcatttgccaaggccaacanacaacactattgtgctgtttgctctcaatgaagttgaataaacaggaggcttggcatatcncctttatgttaatcccagctagagattagt

SEQ ID NO: 46747 - DNA, 568 bp, Homo Sapiens
atctcaaaaacaaacaaacaaaaaactagcgggtgaaatgattcagtgacctaaggacagccagagcactaagctgctgggaacccatctgtgctgaaatgtagatttcccaggaaactcaggcttgggacaggcgcctacctgctcctcgggcaccaggtgattaggagaggtcgaatctcatttccacgtgagtgaggataaagactgggctgccaaggaggactcctcataaacattgacaaattgctctgccccgcctgtgatcccagacgactcctgcagtctgggatcctgagtgtcctgtgggttcatctcggatgggcgctgcataaacagcctgcagggaacgtctgggagaaccagcttcacaacagatataataaggaagaagtttgaaatattgcaagaattgcgaaagtgtgacacacagatacaaagtgggcacatgctcgtgggaaaatgttgccaatagacttgcttgactctggagttaccccgaaccttcaatttgtttaaaaaaaaaaaaaggcaatatcttgacgtgcaataaagtgaactgcaataa

SEQ ID NO: 46748 - DNA, 575 bp, Homo Sapiens
  misc_feature (575)..(575): n is a, c, g, or t
gggggctatgaaggagtcctcttaagtttgatagaaatgaatttcttgtaacattcttttttaaaagtggaagtcattaacagtgattattatatcacttatatcctgctaagatacacataaatcccattttgtactagtacctgtggattacagtcagttaaaatgaaatgcaacactgaagtctataacatgaaatgattattaaattgtttattaatttagagctataagaggaacttattttttctaatacggaagcattgcctaataattaagaacaaaaattgccaaaaatttctaccactttttactagattttaaaaagctactttcttttatattgcctatataagcaaaaaaccaaccactgtattaaagcaaactaagcctgcatttatatctgaattattacctccatattttaccaaacatttgaatgtcccccttcccccttttttgttttctgcttttatgactgtatttattcctttactgtaaaagaatatgaagaactcatacatgttgaaagctcctttgttgactgggtcaaagtgaaggaatttcaatctccn

SEQ ID NO: 46749 - DNA, 894 bp, Homo Sapiens
  misc_feature (864)..(864): n is a, c, g, or t
accaatcattttaattattattcttcataacaattttaggaggaccagagctactgactatggctaccaaaaagactctacccatattacagatgggcaaattaaggcataagaaaactaagaaatatgcacaatagcagttgaaacaagaagccacagacctaggatttcatgatttcatttcaactgtttgccttctacttttaagttgctgatgaactcttaatcaaatagcataagtttctgggacctcagttttatcattttcaaaatggagggaataatacctaagccttcctgccgcaacagttttttatgctaatcagggaggtcattttggtaaaatacttcttgaagccgagcctcaagatgaaggcaaagcacgaaatgttattttttaattattatttatatatgtatttataaatatatttaagataattataatatactatatttatgggaaccccttcatcctctgagtgtgaccaggcatcctccacaatagcagacagtgttttctgggataagtaagtttgatttcattaatacagggcattttggtccaagttgtgcttatcccatagccaggaaactctgcattctagtacttgggagacctgtaatcatataataaatgtacattaattaccttgagccagtaattggtccgatctttgactcttttgccattaaacttacctgggcattcttgtttcaattccacctgcaatcaagtcctacaagctaaaattagatgaactcaactttgacaaccatgagaccactggtatcaaaactttcttttctgggatgtaatcaatgttttcttctagggtctaaaaaattgtgatcagaaccatnatgggtacattatttatccaacaataaggg

SEQ ID NO: 46750 - DNA, 652 bp, Homo Sapiens
caccggcagcgtccaggtgcggggccgggaaccacacaccccactgggccggccacagtctggacccgcacgtcctgttcaaaagcagactcgggaactgcctgaatgtggtttgggacacgagacctcatcatattgatgagcgaacaaacaagaacatttcctccctcccctcctttgaattgaaatggcacattaagacttgtcacggcttctcactgggactggagacctcgttccttcaccccgcgtgtcgccagcctctgggtccagccagagcccctggcttctccgccacccacacccttcccaccctgctgtggggccctgcctttgtggggagcagccagccctctgcccctgcccagggctccccaactataggcctgggacccccgcccagcttggggggctgctcgtacgagtgtagacactgggcccattggacgtgctgttaactactatcttcatttcccacttcccctctctgattgggggtgtatattttacatctttttttctttttattttcgaaggctttgttttggtttcttaggttaagatgctctcgagcgttgagcaggcacagctctgtcgaggtccctgtcccccacctgtggttctggcctctgaggttgggggactacttgtt

SEQ ID NO: 46751 - DNA, 885 bp, Homo Sapiens
acggaaagtggccgagcccatgatgacatcatggggagccagcagagttcctgcccatggtcttgagctgaatgagagaataaaatgccaatcccaagggaagaggaggagcaggggtgcccaggcccctgatacccagccgcctccagctatgcagtggtccccagtctggagcagagcattggggagtgtctagccatgacgagaagattccctctgcatcactggctgaaccccaggagatggtattgaaccagacccccaaacacagactcctgcctgccctctgcccgatgctgcctcctccatgctcttgagcaggtggagccatggtgctctgtggtggcgcatgattcactgagcaaacagcactttacagaagaaaatctttatttgtaatatgtgtgtccagcgggattgacactcaaaaaacgtctcacttagaaactcttcccttccttacctttgtatctccttttacatcatgagagatcaaaaatccattttgccttacatatgctaagaagcgtggcattctttctgttcataagacagactcatgacttttaagacaggacaagcaggccagaggctctttcttatcacagatctccatgggaattagtgcgatgctaacatggccattaacgcatgactcctatgactgttgagcctgtttcatgcaaaggtcgtcagtggacacctggacaaacatcccttttggtcagcctgaaaagacggttgggatcgcatgacgcagggaaggagaatgaccaacaggtatctcattcctttaggtaaccccggggtggccacgaaccagcctgcactggcgggtgacgctagccctcacaagggacccaaggcagggagtgggacagacag

SEQ ID NO: 46752 - DNA, 490 bp, Homo Sapiens
ggggacccggacttggccaagatcctggaggaggtccgctacattgccaaccgcttccgctgccaggacgaaagcgaggcggtctgcagcgagtggaagttcgccgcctgtgtggtggaccgcctgtgcctcatggccttctcggtcttcaccatcatctgcaccatcggcatcctgatgtcggctcccaacttcgtggaggccgtgtccaaagactttgcgtaaccacgcctggttctgtacatgtggaaaactcacagatgggcaaggcctttggcttggcgagatttgggggtgctaatccaggacagcattacacgccacaactccagtgttcccttctggctgtcagtcgtgttgcttacggtttctttgttactttaggtagtagaatctcagcactttgtttcatattctcagatgggctgatagatatccttggcacatccgtaccatcggtcagcagggccactgagtagtcattttgccc

SEQ ID NO: 46753 - DNA, 451 bp, Homo Sapiens
cggcggcctgctgcgctcggcgggcgtgggcttcgtcgccaagctgctggagggcacgggctccgaggcgtccagcacgcgccgcgggggcagcctgggccagaccgctaggagcggccccgccgctctggagcccggcccttccgagagcctcactgcctccagccctctcaagttaaacgaactgaactaggcctggtggaaggaggcgcactttcctcctggcagaatgctagctctgagccagttcagtacctggaggaggagcaggggcgtggagggcgtggagggcgtgggagcgtgggaggcgggagtggagtggaagaagagggagagatggagcaaagtgagggccgagtgagagcgtgctccagcctggctcccacaggcagctttaaccattaaaactgaagtctgaaatttcgaaacacacaaaccaaaaaaaaaaaaa

SEQ ID NO: 46754 - DNA, 417 bp, Homo Sapiens
cgccacagaaagagaagtgacagcacccggggccacgaccctcagtggagctctggtcacagttagcaggaatccccttgaagaaacctcagccctctctgttgagacaccaagttacgtcaaagtctcaggagcagctccggtctccatagaggctgggtcagcagtgggcaaaacaacttcctttgctgggagctctgcttcctcctacagcccctcggaagccgccctcaagaacttcaccccttcagagacaccgaccatggacatcgcaaccaaggggcccttccccaccagcagggaccctcttccttctgtccctccgactacaaccaacagcagccgagggacgaacagcaccttagccaagatcacaacctcagcgaagaccacgatgaagcccccaacagccacgcc

SEQ ID NO: 46755 - DNA, 803 bp, Homo Sapiens
gttgatgaaggaggcagagcttcgaggcagtccctcactggccatgtggctggtcaatggcttccagttgctctacgtgggtgatgccctctggcacgaggaggccgtcctcaccaccatggatatcacacatgacgggtttggcttcatgctggcgtttggggacatggcctgggtgcccttcacctacagcctgcaggcccagttcctgctgcaccacccgcagcccctggggttgcccatggcctctgtcatctgcctcatcaatgctactggttactacatcttccgtggggcgaattcccagaaaaacactttccgaaagaatccttctgaccccagagtggctgggcttgagaccatctctacagccacagggcggaaactgctggtgtctgggtggtggggtatggtccgccatcccaactatcttggagacctcatcatggctctggcttggtccttgccctgcggggtgtcacacctgctgccctacttctacctcctctacttcaccgcgctgctggtgcaccgtgaggcccgggatgagcggcagtgcctgcagaagtacggcctggcctggcaggagtactgccggcgtgtgccttaccgcatcatgccctacatctactgaagcggctccaccaccccaggtgggggcatgtgcccactcatccaccagcacacccaggaccaggagcctcgacacacttgggactcaagggcttgaccccaccagccctgaggatgaacaactcagagaagaggtggttagagcaaggacacaaatgaaaccagtgacc

SEQ ID NO: 46756 - DNA, 777 bp, Homo Sapiens
  misc_feature (5)..(5): n is a, c, g, or t
aaatncatttataagtgaaccgtattaaaacttttaaggaaccattcattgtgaggtaaactgatccagaataggggtcagcaaactatgactcatggccacagtctcactgactgtttttgtatggtccatgatctagaatttaaaaaaattttaaagggttgaaaaaagtgaaaagaatattttcaacatgaaaattatatgaaatttaagttttggtgtctgtaaataaagttttgttggcttcagccacacagtgatttacaccttgattgtgctgcttccaggctgtagcagcagagttgagcagttgtgacaggagaccatgtggcctgcagagcccaaatatctactgtctgatcctacacagaaaatgtgtgtgatccctgctatggagcagaggttatcaaactaaagcccatggaccaaatcctatctgctgcttgtttttgtaaatagagttttatcaaaccacagccatgcttacttgtttagctattgactatggctgctttagacaactgtgacagactatatggctcgcaaaactgcaaatatttcctatcctttaacagaaagtttgccaacctctgctctagagtagagaaaaatgtataaaagattttaattttatgagggcaatacaactgtcacatcagaaacaagaaaacaaatgataaaggaactcatttatcaatagaggtgaaaggaaattattaaactatattgaaaaataaagatgtcaataaaaggagaaatgataaaaaaaaaaaaaaa

SEQ ID NO: 46757 - DNA, 613 bp, Homo Sapiens
ccggagagagcaaatcgaagcgtgggaggcacccccattgctctcctccaggggcagaacatggggaggggactagatgggcaaggggcagcactgcctgctgcttccttcccctgtttacagcaataagcacgtcctcctcccccactcccacttccaggattgtggtttggattgaaaccaagtttacaagtagacacccctgggggggcgggcagtggacaaggatggcaaggggtgggcattggggtgccaggcaggcatgtacagactctatatctctatatataatgtacagacagacagagtcccttccctctttaaccccctgacctttcttgacttccccttcagcttcagaccccttccccaccaggctaggccccccacacctgggggaccccctggcccctcttttgtcttctgtgaagacaggacctatgcaacgcacagacacttttggagaccgtaaaacaacaacgccccctcccttccagccctgagccgggaaccatctcccaggaccttgccctgctcaccctatgtggtcccacctatcctcctgggcctttttcaagtgctttggctgtgactttcatactctgctcttagt

SEQ ID NO: 46758 - DNA, 630 bp, Homo Sapiens
ccacgcgtccggagaccaacccagaaaccaccacctctcacgccaaagctcacaccttcagcctccaacatgaaggtctccgcagcacttctgtggctgctgctcatagcagctgccttcagcccccaggggctcactgggccagcttctgtcccaaccacctgctgctttaacctggccaataggaagataccccttcagcgactagagagctacaggagaatcaccagtggcaaatgtccccagaaagctgtgatcttcaagaccaaactggccaaggatatctgtgccgaccccaagaagaagtgggtgcaggattccatgaagtatctggaccaaaaatctccaactccaaagccataaataatcaccatttttgaaaccaaaccagagcctgagtgttgcctaatttgttttcccttcttacaatgcattctgaggtaacctcattatcagtccaaagggcatgggttttattatatatatatatatttttttttaaaaaaaaacgtattgcatttaatttattgaggctttaaaacttatcctccatgaatatcagttatttttaaactgtaaagctttgtgcagattctttaccccctgggagccccaattcgatcccctgtc

SEQ ID NO: 46759 - DNA, 476 bp, Homo Sapiens
catttcccttatattatccatcattccttaaggacaattattcttaataatgcttatagaaaatgttctctaattaaacatgccaaaaggaaaaagtaagagaaagagggagcaagaagaaaatggaagaaaaagggaaaaaagctaaccggataaccaatttgttataagttggttttcaacaaagaaatttagcagccaagtaaggtttcaagggaatattaacttggtatcagggctacttttttttttttttttttttacttgcatgtcatccttaatgtctaacatgaaaaatcagcaaagagtatggtttttatcaagaatttgtgttgggagtaaaaactgctttatagctcccaaattaggaagagaagagcagaaatcctctggggcatttaaccatctggcagaattgttgctgcacccttatcccagttataagacagtcaaaatgactatttcctaaatattgg

SEQ ID NO: 46760 - DNA, 895 bp, Homo Sapiens
gggaaatatgtctgagtttattgagagaacattcaattgatggcactggctgggctcccacaagaacattaaaggatgtcgtttggggattaaactctttgtttactgatcttttgaattttgatgatccactgaatattgaagctgcagaacatcatttgcgggacaaggaggacttccggaataaagtggatgactacatcaaacgttatgccagatgataaaaggggacgattgcaggcccatggactgtgttacagtttgtctctaacatgaaacagcaagaggtagccccctctcccgtcctcatgctccctctcagtcccctggattgccccagtcctgtgaccatgttgccctgaagaagaccatcttcatgactgctcattgtagatggagaattcaacataaatacagcaagaaaatgtgttgggcttctgaagagttgtctgcttaccttaacatgtttacttttttgaacttgtactgtataggctgtggtgaaattcttaagaagttgtaatgaactcaaaattgaggccagagcttgctttcccttttcccaaacaaaatggttttctgcacaagcgatgctaatgatgtgtcagtgtaactcgcagatggcataagataccggttcagactgtgatggctgcaaaatctcttagcgttcctttcacgaaatgtgggcctgcctaaatgttgttgagctccagaatgcgtgagtctcaccggagcattcttgttgaacggggattttcattaggcagctattctgggacactcgtgattggcgaccagcgcaaagtgtgcaacacactatgggttcccgggttacagcacccaacattggtccaatttgaaaataaaagtatggctctggcagcggagaccc

SEQ ID NO: 46761 - DNA, 705 bp, Homo Sapiens
ttagaaaaccaaagtgtgggtagaaaccccaaatgtccaaaagcccttttctggtgggtgacccagtgcatccaacagaaacagccgctgcccgaacctgtgtgaagctttacgcgcacacggacaaaatgcccaaactggagcccttgcaaaaacacggcttgtggcattggcatacttgcccttacaggtggagtatcttcgtcacacatctaaatgagaaatcagtgacaacaagtctttgaaatggtgctatggatttaccattccttattatcactaatcatctaaacaactcactggaaatccaattaacaattttacaacataagatagaatggagacctgaataattctgtgtaatataaatggtttataactgcttttgtacctagctaggctgctattattactataatgagtaaatcataaagccttcatcactcccacatttttcttacggtcggagcatcagaacaagcgtctagactccttgggaccgtgagttcctagagcttggctgggtctaggctgttctgtgcctccaaggactgtctggcaatgacttgtattggccaccaactgtagatgtatatatggtgcccttctgatgctaagactccagaccttttgtttttgctttgcattttctgattttataccaactgtgtggactaagatgcattaaaataaacatcagagtaa

SEQ ID NO: 46762 - DNA, 833 bp, Homo Sapiens
  misc_feature (525)..(525): n is a, c, g, or t
  misc_feature (701)..(701): n is a, c, g, or t
cagaaggggcacagtgccttttagccctcgccattacttgctcttaggagtgcattttttgtagctgtgggtttttgactatctctgctgctttctccagcccctaccctcgtgactacaagggaaaacgtgcggcgctcacgagagagcctttatgggatttttaaaaaatggggattgtgggaaaatggctccagcagtcacagtttttcagtttctcacaatcccataaaaacagagcaaccaggtaacaaaactaaagcatgggcaacatttacagaccactggatggtgaagaattcccatgaacccctggttcacaccgtaaggacacactactcagcatgggcaacatttacagactactggatggtgaagaattcccatgaacccctggttcacactgtaaggacagactactcagcatgggcaacatttacagaccactggatgatgaagaattcccatgaactcctggttccaactgtaaggacacactactcagcttgagcctgaagccgcctncttacatactgtaagtttagcctataggtttctccatacgtagtgaacagtcatctaattggatgtgtggacactgtaacctactcttgaatcagtcacaggcagcagcacttcaaactctggttcaataagccagacacgagctgtagccaccctgctgtttgcaggcctacctntgccttctgtgcctcactcccttttctgtccgtaagctttggcacacagtggcacttgagtcttctgagcctattctgtttgaggcgttcctgattctgaacatctttgtcactaacttgtaaattaaaaaa

SEQ ID NO: 46763 - DNA, 529 bp, Homo Sapiens
ggaccatgggggcagccaaagtgactggggaagtactggacattctaactcgcctgccagagagtgtggaaagactcacaggcgtgagcatctcccaggtgaatcacaagcctttgagaacagcctgagccttcagccctcacagatgcccagcctcatagctgaagttgcctgaatgatcctcctgttgcatgtaacccactggcctccctgagcatgtccattgacagtgaggtcccacccctcatctctccttgccaaatagtttgtgccttgtcttgaagggggttgctccccttgccaacctcacactgctatgattgccaactccagcggtcccatgtcagccttctgatgatcccactccaccccacctcaacttatttaacttcctaattaaatcagactgtttgagcctgttgtctagaatattttcctgaccaagactgagggatgggctggaggttttcaactttgctaccccaaataaattgctgtaagtaagtactaataaaaaaaaaaaaaaaaa

SEQ ID NO: 46764 - DNA, 582 bp, Homo Sapiens
aatttgttaaagttttccaggaatttcaaaatatttctgggcaagatatggtagatgccattaatgaatgttatgatggatactttcaggagctgctggttgcaattgttctctgtgttcgagacaaaccagcctattttgcttatagattatatagtgcaattcatgactttggtttccataataaaactgtaatcaggattctcattgccagaagtgaaatagacctgctgaccataaggaaacgatacaaagagcgatatggaaaatccctatttcatgatatcagaaattttgcttcagggcattataagaaagcactgcttgccatctgtgctggtgatgctgaggactactaaaatgaagaggacttggagtactgtgcactcctctttctagacacttccaaatagagattttctcacaaatttgtactgttcatggcactattaacaaaactatacaatcatattttctcttctatctttgaaattattctaagccaaagaaaactatgaatgaaagtatatgatactgaatttgcctactatcctgaatttgcctactatctaatcagcaatt

SEQ ID NO: 46765 - DNA, 717 bp, Homo Sapiens
  misc_feature (629)..(629): n is a, c, g, or t
  misc_feature (685)..(687): n is a, c, g, or t
  misc_feature (689)..(689): n is a, c, g, or t
  misc_feature (693)..(694): n is a, c, g, or t
  misc_feature (696)..(696): n is a, c, g, or t
  misc_feature (700)..(702): n is a, c, g, or t
ggggtgactgacttcccagactctcctctgtccctcaggagcagccgtgtcctctcccaggccctaggacactgccagagactgtgggacatacaggcataagtgatgtgtgtgtttctgcttctgttttaaaaatccagggtcattacacacagcatggaaattagcacaaaatgctgtgcaaacgtcagatgctcccaaaccagcaaagggatgggcttgcttcacatcagatgcgggcacgccttacccctgccttccgtgtccccaccccagggtcaagggttcctcagaccagccatgcctcctcctcctgccgcctccttttctagatggggaggggattccgtcacaagaagagccgcccctcggccgtgtgcaggaagccccatgtcgctttgccgagatcagccctgggaggatccccttctctagctcagatcatgccgtgtggccagaaggctgcggacacaactgacctgcttctcgaggtggttgatgttttaaacaggaagctccacggagttcagccctgtgtgcatttcctcatgtatgtaaacgccaagactgaatgtgagaggtgttggccgcgggccttaagtctgagcagatccatctggaatgttcgnggtgtgctgtctggatgtggtgcgctaaaaacacggaataaagatcagtggcaaannngnccanncncccnnncccaaacatggtggg

SEQ ID NO: 46766 - DNA, 560 bp, Homo Sapiens
tgaaattgaaaaagtacaaaccacaaatgaaaaaagtagaaacgaaaaaaaaaaactaggaaatgaatgacgttggctttcgtataaggaatttagaaaaagaataaccaattattccaaatgaaggtgtaagaaagggaataagaagaagaagagttgctcatgaggaaaaaccaaaacttgaaaattcaataaagccaatgaagctcattcttgaaaatattaattacagtyataaatcctaactacattgagcaagagaaagaaagagcaggcacgcatttccatatgggagtkagccagcagacagcccagcagatcctacacacattttcacaaactaaccccagaacaggctgcaaacctataccaatatactagaaaatgcagattaaatggatgaaatattcaaaactggagtttacataatgaacgtaagagtaatcagagaatctgactcattttaaatgtgtgtgtatgtgtgtgtatatatatgtgtgtgtgtgtgtgtgtgtgtttttttaaaaaacattgactgttataaaaatgttcccatcgta

SEQ ID NO: 46767 - DNA, 952 bp, Homo Sapiens
ttacttcccagccccaccttctagttctgacttcgggcgagagggatcccctgagtccctcctggaattagcttgtatagtgaaaggcccatccaaggttgtctaaagaccaatgtgaaggtgacagaaaggacttttgagttctaattaatctgttacagcttcaagcaagaaagtcagtatagcctgaaagacaagagaaacgggatggtttataggagttcccatttggttgaaagctagaagccctaattgaccttaaagtaacatgctatgggatggtgggattgtcccctctgacagcacatatgaaatagttcatctatataatagaaacgcacacacacgaaagagaatcttctgacttaaatacaactttcatggagttcttcaccacttatctgtctctgttaaaatctgaaaatctagcccatggctaaaatctattatatgtgttctccatatttcttgtataagccagtccccagcatctgatgttttgagaagtgcatggagtttcctaaactttgcacagaagaatatcctggggccgggcatggtggctcacgcctgtaatcccagcactttgggaggccgaggcaggtggatcataggtcaaaagatcgagacatcctggcaatatggtgaaacctcgtctctactaaaaaatacaaaaaattagcttgtgcgtggtggcacgtgtctgtagtccagctactcgggagggtgaggccggagaatcggttgaacccaggaggagacgtgctatgaggcaagatcgtgccttggactcaagccggcgacagaaggagattcggctccacataattatattaaagatctctggccggggtcagcgcgaatccagccatggcaggtgaggggggcacttagggattaaccactcgccacttgacctgttttaaaaaaggggctaataccaggcggattc

SEQ ID NO: 46768 - DNA, 917 bp, Homo Sapiens
ccacgcgtccgggcaattagagaaagtccattgatgtcattttgtttataatattgcagttcatactgaatgaccacttgatatgactaattcagggaatatatatttttctatgaaagctatgaatgttactatcacggcttttccttatttttacttgtatgtagcagcatttacagaaatgccaaaaatgtgcctcattaagaggcaggtcttaatcagttagataaaaataaaatgtatagcttaagatcaaaacagtcatatttttagatacagtgaaatcttttatgtttctctacagcaccttaaaaattagaacttgaatactttgagtaaacttactacaatctcatcccaacaaactttaatggtagcatgtttggcctatttcattgtggcctgtactaggattagaaaatttggtcgtggtataacaaagaagtgtatttacaataggatttaatttgttgttaatatgtatttgttgaaattaaaattgccagattaaatgaatatactgtcgcatctttttaacatagtaacgtgttactggaaaaattaagttgttgaaagtaagttgttttcccatttaaaaatatctgaatatatgatttgcatgtgtaaatctgaaaaactaaactacagaaacctagggttttctatttcttttttaagtcaaatgcattttttttttttgttatacagatgaaccaagtgtctaaaatacttgagaaatttgtggttgcatgcctgttttaaaaaaaaggctttttggttttttagcataagccagaatattctaacctacctagtctgtgggcttttgctccctttggagtatacttttcctctaaattactgatcccccaatatgttgatacaccggtgaagaaagggaaaaatttcctaataaa

SEQ ID NO: 46769 - DNA, 763 bp, Homo Sapiens
gagcggatgatttgtgcagccagtcttagaggaaatacatcattttaacattattcccacaaaatgttaaagctcaatggttgactatgagagtcaaacaattactatttgaaaatctcttatgacatttttataatctactctgtttttatttgcatgattatgcttatgtgatgaaccatccatgattctgatattgtatttctttccagtattaacatgtgtattgtgtggccaactctgatttgtacaccgtattattgttgtaatgattcaactgttcctacatttaattgcagtttaattattatgccttttggggttaaatgatgtgaagtgtttccacctactgataaatagcatatgaaaacatgactaaaagactgatttaagaaacttgttatttttaaaaatatgaatttcaaaagaaatgttctcaaagacacatgcatttattttaaattcaaaaaattcttatgaatttattattgcttgtactttaactttttttattgtagacaatcctaagtgaataatgtctcatgggagaacacatgatatgtgcttgtatttgtgtaatctgatcatgcactcaatggttggaaaaggcactccagtgctaagaaaataaccagaagccaatatatcgattcttatatctcggtttatgttaccaacttgaatatggtgtaatgcataactttttccagtaaattaactgggttatttttggttcaaaaaaaggaaaaaactctccaacgct

SEQ ID NO: 46770 - DNA, 643 bp, Homo Sapiens
gaacaaacctgggagacaaacatccgtaagcagtcagtcgccaatgccttcatcatctgtggcaccttgtacaccgtcagcagctacacctcagcagatgctaccgtcaactttgcttatgacacaggcacaggtatcagcaagaccctgaccatcccattcaagaaccgctataagtacagcagcatgattgactacaaccccctggagaagaagctctttgcctgggacaacttgaacatggtcacttatgacatcaagctctccaagatgtgaaaagcctccaagctgtacaggcaatggcagaaggagatgctcagggctcctggggggagcaggctgaagggagagccagccagccagggcccaggcagctttgactgctttccaagttttcattaatccagaaggatgaacatggtcaccatctaactattcaggaattgtagtctgagggcgtagacaatttcatataataaatatcctttatcttctgtcagcatttatgggatgtttaatgacatagttcaagttttcttgtgatttggggcaaaagctgtaaggcataatagtttcttcctgaaaaccattgctcttgcatgttacatggttaccacaagccacaataaaaagcataacttct

SEQ ID NO: 46771 - DNA, 804 bp, Homo Sapiens
  misc_feature (642)..(642): n is a, c, g, or t
  misc_feature (785)..(786): n is a, c, g, or t
  misc_feature (788)..(788): n is a, c, g, or t
  misc_feature (790)..(793): n is a, c, g, or t
  misc_feature (795)..(800): n is a, c, g, or t
atttctctatatacagaaatgaaatgacacttctgggaggcagtagaagcaggaagtcaatgaattgagtagagggtcccattccctcaggctgtcattgatcagtgacaatttataaaaacaaactgcaaagtctgtggcaagtggctgcctgcttcctagaaggagcccatgaaggttaaactctgtggtcggtatttgcaagcgccgggcgtggtggctcacgcctgtaatcctagcaccttgggaggccaaggcaggcggatcacccgaggtcaggagtttgaggatttgcaagcaaaaggtcctctcctgagtctttcccagatacccagcagtgcagaggctagctgtggaaggttgcagtgggacaggaatgtattgtatgccttgccttacttgtcaccattgagatttccagagaaatgggcataacgtctcttaacaacaacagcagaaagcaaaatacattaacttaaggttgacaacaaaagattatcaagtaccatgttttccaaccaaccagttattcgtggtaataataaaataaaggtgggaaaatgttataatttttaaggaaactgtgtactttaaaaatcttctttatgaatatccaatgttactgtaatcctgctccattanatgcagcattgttgtcaggtgctgcctcttgcttgggaacagcattgggcttttaaatgtctgcagaatctctgcgttcgaagggaattgagaatgaacttcctggtactgtaatgaaaaataaggtctgcttcaacacagannanannnnannnnnnaaag

SEQ ID NO: 46772 - DNA, 603 bp, Homo Sapiens
ccatgaaatgacaagcattggactgctacttggtgtttctgctgcaaaactaggcaccatggatatgtctattactcggcttcttagcattcgcattcctgctctcttacccccaacgtccacagagctggatgttcctcacaatgtccaagtggctgcagtggttggcattggccttgtatatcaagggacagctcacagacatactgcagaagtcctgttggctgagataggacggcctcctggtcctgaaatggaatactgcactgacagagagtcatactccttagctgctggcttggccctgggcatggtctgcttggggcatggcagcaatttgataggtatgtctgatctcaatgtgcctgagcagctctatcagtacatggttggaggacataggcgctttcaaacaggaatgcatagggagaaacataaatcaccaagttatcaaatcaaagaaggagataccataaatgtggatgtgacttgtccaggtgctactctagctttggctatgatctacttaaaaaccaataacagtgtcttctaggaagcccagacacatggagaagttctgagtgttttggccgatagtcccag

SEQ ID NO: 46773 - DNA, 582 bp, Homo Sapiens
tttatgctatattactatctgtggttacggtggagacattgacattattactggagtcaagcccttataagtcaaaagcatctatgtgtcgtaaaacattcctcaaacattttttcatgcaaatacacacttctttccccaaacatcatgtagcacatcaatatgtagggagacattcttatgcatcatttggtttgttttataaccaattcattaaatgtaattcataaaatgtactatgaaaaaaattatacgctatgggatactggcaaaagtgcacatatttcataaccaaattagtagcaccagtcttaatttgatgtttttcaacttttattcattgagatgttttgaagcaattaggatatggtgtgtttactgtactttttgttttgatccgtttgtataaatgatagcaatatcttggacacatctgaaaacaaaatgtttttgtctaccaaagaaaaatgttgaaaaataagcaaatgtatacctagcaatcacttttacttttgtaaattctgtctcttagaaaaatacataatctaatcaaaaaaaaaaaaaaaggccaaatggcctcaa

SEQ ID NO: 46774 - DNA, 500 bp, Homo Sapiens
ttttgttatagacattttgcaggttttagccagactcagtctctgggtctgtggtgaaatgtctatagatggactttattttttaccctccggaaaacgtgatgtagtacggaccaaattccttctaataaatattttggtgtagattcctactgtggggctgtaacacatgtagacactgtgtacacactaggttttaattcatagacatactgcctgcaccaagtgaattatttattattatttacacatgccagaattatctgcccatcattccacagggcacagattgaccactgctcaccatgctgagtaggaggaactgaagcattggtgcacttctactagattccgttctgtcttagtggccaacaatcaactgattataattgggtagtatctttctattttgaccacttgtcttaacactcccctgtgcttttaaatgaaattccaattcatgtatgtaaacatgtttaataaaatttacttttcatgtc

SEQ ID NO: 46775 - DNA, 739 bp, Homo Sapiens
cacgaggcgattctttctgggtgaagaatgaattattgccaaacctagagaaagaaggtatgcagatttgccttcatgagagaaactttgttcctggcaagagcattgtggaaaatatcatcacctgcattgagaagagttacaagtccatctttgttttgtctcccaactttgtccagagtgaatggtgccattatgaactctactttgcccatcacaatctctttcatgaaggatctaatagcttaatcctgatcttgctggaacccattccgcagtactccattcctagcagttatcacaagctcaaaagtctcatggccaggaggacttatttggaatggcccaaggaaaagagcaaacgtggccttttttgggctaacttaagggcagccattaatattaagctgacagagcaagcaaagaaatagattacacatcaagtgaaaaatattcctcctgttgatattgctgcttttggaagttccaacaatgactttattttgcatcagcatagatgtaaacacaattgtgagtgtatgatgtaggtaaaaatatataccttcgggtcgcagttcaccatttatatgtggtattaaaaattaatgaaatgatataactttgatttaaacagttctgacacataagggatccacttgtttctttgctataactgagttctgaatttatcatgaagtcaagggaagcacctgtttttcttcagtgatgtgtgttctag

SEQ ID NO: 46776 - DNA, 429 bp, Homo Sapiens
gccgtctggaaaaaaggttcctgccttacgctgaaaggctgaagtggggcgcgcgaagggcggcgaagcggagacggcggctctccgggatccagctccgcccctggccagtgtgcggcccgggggctccctgtgcccgcgtgaggcgagagaacaggggacttgagtctcgaacagcggctgtttttactttatttatcttaggccctcagctccctgacgtcctgagcctccctgtgacgctctggccttctctgcacctcagagtgcagaaccacagacggcttcggctgtgcctagggcaacagccaacctaggaacccgccggcctttcggggaaaacacaaagaaaaagacgtctaaatcaaactgtcaactgttcaagataattatcttgggaaacatagggttttgctggacttgcactaa

SEQ ID NO: 46777 - DNA, 788 bp, Homo Sapiens
  misc_feature (664)..(664): n is a, c, g, or t
  misc_feature (667)..(667): n is a, c, g, or t
ggcctggagggacagaaggggaggatggttaactcctgccgcatcctttttcttgtgttcacgtggcattctctaacccagggcagtggttccttcccaggccatgcacagaggctgggtgcctgccagacccacggagggttcgcgaaggaaggggcatcctccttcttgagctgcaagctttagctgaggcagtaagtcacacagtagttagttcagcctgggctggcacataagtccccagtgtccctgttgagaggggaaagttgcctgctggttgaaaaactggcttttcctttctcgctgcctaatttcactctcagagtgaggcaggtaactggggctccactgggtcactctgagagggttgtggctctggttcttattaaaccagggccaggtgcagggctcacacctgtaatcccagcactttgggaaggtcacttgagctcaggagttcaagaccagcctgggcaacatagtgagaccttgtctctggaaaacaattagctgggcatggtggtacacacctgtagtcccagctacttgggaggctgaggcgggaggatggctttaccccaggaggttgaggctccctgggaaccctgatgggacccctgcactccagcctggggggacagggtgaagaccctggtctcctaanggnacaaaatatttccccaaaacatttgttcattgtcgggccgccttcgggcccttcgaaaaaacttttctaaaaccatttcgttttgggcgggccggccccccgtagggtaaagggaaacctg

SEQ ID NO: 46778 - DNA, 540 bp, Homo Sapiens
ggcacgaggacagttctgaatatgctgctcatccccacctgtcttcaacagctccccattaccctcaggacaatgtctgaactctccagcttcgcgtgagaagtccccttccatcccagagggtgggcttcagggcgcacagcatgagaggctctgtgcccccatcaccctcgtttccagtgaattagtgtcatgtcagcatcagctcagggcttcatcgtggggctctcagttccgatttcccaggctgaattgggagtgagatgcctgcatgctgggttctgcacagctggcctcccgcgttgggcaacattgctggctggaagggaggagcgccctctagggagggacatggccccggtgcggctgcagctcacccagccccaggggcagaagagacccaaccacttctattttttgaggctatgaatatagtacctggaaaaatgccaagacatgattatttttttaaaaagcgtactttaaatgtttgtgttaataaattaaaacatgcacaaaaaaaaaaaaaaaaaaacactt

SEQ ID NO: 46779 - DNA, 799 bp, Homo Sapiens
gtccggccttcctggaggtctctttcacggagccacctggagacgacaagccgagggagagcgcctgcctccctgagaagctgaaagagaaggagaggcacagacactcctcatcttcatccaagaagagccacgaccgagagcgagccaagaaagagaaggccgagaagaaagagaagggcgaagattacaaggagggcggtagcaggaaggactccggccagtacgaaaaggacttcctggaggcggatgcttacggagtttcttacaacatgaaagctgacatagaagatgagctagataaaaccattgaattgttttctaccgaaaagaaagataaaaatgattccgagagagaaccttccaagaaaatagaaaaggaactaaagccttatggatctagtgccatcaacatcctaaaagagaagaagaagagagagaaacacagggagaaatggagagacgagaaggagaggcaccgggacaggcatgcggatgggctgctgcggcatcacagggacgagctcctgcggcatcacagggacgagcagaagcccgccaccagggacaaggacagcccgccccgcgtgctcaaagacaagtccagggacgagggcccgaggctcggcgatgccaaacaggagaagaagaagaagaagacaggtcgggctaagcggcggatgcagtacaaccggcgctttgtcaacgttgtgcccacctttggcaagaagaagggcccccatgccaactcttaagtcttttgtaattctggctttctctaataaaaagccacttagtt

SEQ ID NO: 46780 - DNA, 781 bp, Homo Sapiens
  misc_feature (16)..(16): n is a, c, g, or t
  misc_feature (778)..(778): n is a, c, g, or t
agccaaagtacaaagnagcgccgaggatttcaggagaagatagaagctcacctgggaacagaacaggaaacaatggccaaatccaactatggcagtttttgctagaacttcttactgataaggacgctcgagactgcatttcttgggttggtgatgaaggtgaatttaagctaaatcagcctgaactggttgcacagaaatggggacagcgtaaaaataagcctacgatgaactatgagaaactcagtcgtgcattaagatattattacgatggggacatgatttgtaaagttcaaggcaagagatttgtgtacaagtttgtctgtgacttgaagactcttattggatacagtgcagcggagttgaaccgtttggtcacagaatgtgaacagaagaaacttgcaaagatgcagctccatggaattgcccagccagtcacagcagtagctctggctactgcttctctgcaaacggaaaaggataattgagccccaggacattctgagactccaaagtctttcttaaaatgtttagagcaagtatagctcttacctttattactgaatttgaatcttcttttatttctaggctgtacagtctgatgcatgatttttttataaatatttcatactcttgtgaatttggatctttttactttgagcatatattttagaatatggtgtatgttaaaggatctccacaatgtctgcagtgtgaaggcaggttcattgtggaatagtttaacagtcaggaaggctaaactggtcagtattaatgngta

SEQ ID NO: 46781 - DNA, 739 bp, Homo Sapiens
ctctataggattccccccgctcaaggcagtttctcacagaaaaggaaaaggagattgaactgactgaggagctgcatctataatgtatggtctcagaggccactgcacttaaaggtgaggtctagagacccatgtctgcagattgagggttcggaggctcaggtcagacactgcttggcattgctgggctgtcacaaaactgggatctgaggacctgttctcggccaaggtgagcagcctggactctgtcagccagagggctggctgtgtgctgaagtttagtctctagagctgagtctgggctgggtgtggtggctcatggctgtaatccctgagcttcgggaggctgagatgggaggctgaggccaggtgttcaaaacctgcctggacaacagagcaagaccccatccctacaaaaaatttaaaaaatagtcaagcatggtggtgtgtgcctgtaggcccagctactggggaggctgagatgggaggatcacttgagcccaggagtttgaggctgcggtgagctgtgatcatgccactgcactccacctgagcaacagagcaagaccctgtctcttaaaaaaaaaagaaaaaatagaactgcctctgttaatgagatgtgaggccttgtcagcatatgtattgtggatggttggcagtaggtccgaaacccgaccttccagtgagggccccgggttatgccagcaaatggcgggtcaccatcatgcataaaaaaaag

SEQ ID NO: 46782 - DNA, 571 bp, Homo Sapiens
ttatttgcaaaactcttcagccatattacttctgccaggaaagctaggaaatatgaaatacctcatttcagacttaagaaggtggagaatattaaaatatggttatcactgcgttcctatctaaagagacgggggccacagcgttcagttgatgtggttgtatcctcggttttcctactgacactttcgattgctttcatttgttgtgctcaggttctccaaggacataaaactttcctgaatgatgcttataactgggagtttttgatctgggaaacagctttactactttttttattgcgtctggcctcactggggtctgaaaccaataagaaatacagcaatgtttcaatattacttacagaacagattaatttatatcttaagatggaaaaaaagccaaataagaaagaacagcttactctagtaaacaatgtattaaagctgtccaccaagttgttgaaagagctggacacaccatttagactctatggactgacaatgaatcccttaatctacaatatcacaagagtagttatcctttctgctgtctcaggtgttataagtgatc

SEQ ID NO: 46783 - DNA, 914 bp, Homo Sapiens
ctcccgcagccgcagccgccgtgctcagcgcgagccccggagcccttgagcgcgaggcgcggagcccccggagcccccaaaccgcagacacatccccgcgccccagagccccggcctgcgcgcccagccgggcccgcgcgatgccctcagaccggcctttcaagcagcggcggagcttcgccgaccgctgtaaggaggtacagcagatccgcgaccagcaccccagcaaaatcccggtgatcatcgagcgctacaagggtgagaagcagctgcccgtcctggacaagaccaagtttttggtcccggaccatgtcaacatgagcgagttggtcaagatcatccggcgccgcctgcagctgaaccccacgcaggccttcttcctgctggtgaaccagcacagcatggtgagtgtgtccacgcccatcgcggacatctacgagcaggagaaagacgaggacggcttcctctatatggtctacgcctcccaggaaaccttcggcttctgagccagcagtaggggggctcggcctgggagtcggggggccccggtcaggccctgcccagagagctcctggttcctgaactgagctgcctctaccgtggtgggctgggcaggcatgtgcccccctagtcagagggcaccaacccacctactctgcccctgggtggatcctgggccgctcgtgttaaggctttccctcggtcaggctgctcgctgacatccctacccttctctcttctactctccctcccctctattgctcgacgccctttctaacccactttactcaatttctctttctacttccaaatttttcatctcttatcatcctcccccaaccctctccattctttcttcctcatacccattttctccctccactttttctctccctcctctcctcttccttttc

SEQ ID NO: 46784 - DNA, 823 bp, Homo Sapiens
tgagactctggaactgacaccatgagtcacccaatggcttcttgaaacggtccctttctgcggaggtagcatagcacagtgacgtttattccgggtcacttgattgcttttcctatccacttaccttaatattgctcccatgtcttaggacatattagaattattagaagatctctgggaaacaaaaggcgcatgggaggccaagatttagagtgttgatgcattccgccgtaccctatgcccagcctgtccctaaaggcagagtgcttcttattcggcagggcttcgtgagaatgccgccaagttatccaaaaccaaaggatgagagaggcttccaagagagggaagactgtccaagttcaaggagaaggggtttggttccctgtctgccagggacagaaagttctttccacatgtgtctcctggtcccgagagctttcaaaaggggatgtattctgctccaagaaagaatcacctcccagtaaagtagccatgaagggctcctgtataaaatatgcacacttcccctgccctgagtttgtggagggaaaggctgtcggaagtagggactcttaggagagcccgtgtgccctgtttggttcagctgtcaggcgtgtgccacacacatcccacctcatcttctggtcccataattctccatggatgggctgcttttagctccagttttccagtagaatgcttgagttttccttttttccgtacctcctggaggatgaaactcataacctgtcatcatcagtactcactgtgtttttcactttgacttgaagtccaatgaagttacaaaagttaaacatggact

SEQ ID NO: 46785 - DNA, 683 bp, Homo Sapiens
  misc_feature (630)..(630): n is a, c, g, or t
  misc_feature (649)..(677): n is a, c, g, or t
  misc_feature (679)..(680): n is a, c, g, or t
ggatagtggagtactttattaggacataatgtgaagtgatatttctgaaaacacatttcttgaaatagttttaaaactgataataaaggaaaagaaactgtacttagtttggagcagtggacaaaagctgattcagaaaacatgaccatattctgcctacatgaagcatctgggaagaaagggaaagtcacacctcctcttgagattttaaccattatgataaaaggtatgctttaatttgttaaaaaaaaaagtatgaaaggggataatgtgaatacaaaaaagaagcctagagattgaaaataataataatagaacatgttattaggagatggtacttaatgtcatgttggagttggagttttcaaggttacctctatataaaattggattattttctgttagatataatgtgacaaattaaatgactttatcccaaggtacagtgaggtaaacaaaaatctattcttagatatccttagatttggttaactgaggctgtagaagcagcgaattgtctagccatttaagttatttttgtaaaattcagcataaacatcaatctctaatttctatctagaagtgactttaagacattacaagaacattgccaattttggaaaatgccanataaaatactgtagactcnnnnnnnnnnnnnnnnnnnnnnnnnnnnncnntgt

SEQ ID NO: 46786 - DNA, 750 bp, Homo Sapiens
attccaggtgcatccaggcctgtggccaggagagaggccaggtgacaggggccctgctcctctctgtggttggaggaaagatgagtgaagggatcaacttctctgacaacctaggccggtgtgtggtgatggtgggcatgcccttccccaacatcaggtctgcagagctgcaggagaagatggcctacttggatcaaaccctccccagagcccccggccaggcacccccagggaaggctctggtggagaacctgtgcatgaaggccgtcaaccagtccataggcagggccatcaggcaccagaaggattttgccagcgtagtgctcctggaccagcgatatgcccggccccctgtcctggccaagctgccggcctggatccgagcccgtgtggaggtcaaagctacctttggccccgccattgctgctgtgcagaaggtcagtcctacctttttctttctgagagcctccccaccccgagatcacatttctcactgccttctgtctgcccagtttcaccgggagaagtcggcctcttcctgatgggcaaccacaccactgcctggcgccgtgcccttcctttgtcctgcccgctggagacagtgtttgtcgtgggcgtggtctgcggggatcctgttacaaaggtgaaacccaggaggagagtgtggagtccagagcgctgccaggacccaggcacaggcgttagctcccgtaggagaaaatgggggaatcctgaatgaacagtgggtcc

SEQ ID NO: 46787 - DNA, 792 bp, Homo Sapiens
  misc_feature (732)..(734): n is a, c, g, or t
  misc_feature (736)..(737): n is a, c, g, or t
  misc_feature (740)..(742): n is a, c, g, or t
  misc_feature (744)..(745): n is a, c, g, or t
  misc_feature (747)..(790): n is a, c, g, or t
gtggactggagcacatgcctgtaggccctgatgccattctcagatacgttcgcagggttggtgatcccccccagccacttcctgaggagccaatggaagttcagggagcagaaagagcttcccctgagcctcagcgggagaatgcttccccagcccctggaacaacagcagaagaggccatgtcccgaggtccacctcctgctcctgaggggggctcccgggatgaacaggatggagcttcagctgagacagaaccttgggcagctgcagtccccccagaatgggtccctattatccagcaggacattcagagccagcggaaggtgaaaccgcagccccctctgagtgatgcctacctcagtggtatgcctgccaagagacgcaagacgatgcagggtgagggcccccagctgcttctctcagaggctgtgagccgggcagctaaggcagccggagctcggcccctgacgagccccgagagcctgagccgggacctggaggcaccagaggttcaggagagctacaggcagcagctccggtctgatatacaaaaacgactgcaggaagaccccaactacagtccccagcgcttccccaatgcccagcgggcctttgctgatgatccttagctctttgctctatggcccttcctcatcaggggaccgtttcccccctcttccttcacagtatttaagaaataaaagtcggatttttctggctgctttctctctnnnannaannnannannnnnnnnnnnnnnnnnnnnnnnnnnnnnnnnnnnnnnnnnnnnaa

SEQ ID NO: 46788 - DNA, 623 bp, Homo Sapiens
ctctcaaacaatttgttttttttacattgcattctgagtactgaagagcatcttgaaatgtatggaagtggtttctatgctatttgataatcagtaatgttcagctgtcatgatagtactttactggttgcagacccatctctcttttatattaaagcactagtgcagtttataattgtgcctacttttaaaatctttcagtaaaaaagtacataatgaatacagaaatcataactgacagggatacagtaataatgaaatgctactatcacttattttaatatacaatataaagcaggcaaataccattgctttttgagtgcctttttaactttatactaatgacttaatagagctttaaaagaaagaaattggctgggcatggtggctcacacctgtaatcccagcactttgggaggccgaggtgggcggatcacctgaggtcaggagttcgagaccagcctggccaacgtggtgaaaccctgtctctactaaaaatacaaaatttagccgggcatggtggcgcactcctgtaatccaactacttgggaggctgaggcaggagaattgcttgaatctgggaggcagagattgcagtgagccgagatcgcaccactgcactc

SEQ ID NO: 46789 - DNA, 713 bp, Homo Sapiens
  misc_feature (361)..(361): n is a, c, g, or t
catggtggagttctacttcctttcccatacgtgtcgccagccgactccccgttccgccacatcttcatgggccgtggagaccacacgctgggcgccctgctggaccacctgcggctgctgcgctccaacagctccgggacccccggggccacctcctccactggcttccaggagagccgtttccggcgtcagctagccctgctcacctggacgctgcaaggggcagccaatacgcttagcggggatgtctggaacattgataacaacttctgaggccctggggatcctcacatccccgtcccccagtcaagagctcctctgctcctcgcttgaatgattcagggtcagggaggtggctcanagtccacctctcattgctgatcaatttctcattacccctacacatctctccacggagcccagaccccagcacagatatccacacaccccagccctgcagtgtagctgaccctaatgtgacggtcatactgtcggttaatcagagagtagcatcccttcaatcacagccccttcccctttctggggtcctccatacctagagaccactctgggaggtttgctaggccctgggacctggccagctctgttagtgggagagatcgctggcaccatagccttatggccaacaggtggtctgtggtgaaaggggcgtggagtttaatatcaataaacctgtggccctcttggcctca

SEQ ID NO: 46790 - DNA, 939 bp, Homo Sapiens
gggaagtttcttactcatatcacaatatgttttatttaaatggatgcagcttacatgcagagtttatataaataatcacataacaagccaattccttagtcattttctgtattaaaaaactcagagatctagagagctttggattgaaatatttccttggtgatttggatgcaaacctgatttctgtgttcacaccatggccagagatgggactgttagcaccacctgcttctttaatgtcgtccatatgatcagcatcagcaccagaaactccaggtgtcccaaacttaaagtgaaagccatagagtccttggtgactcccatgttctgtgctggttctagaacatgctggtaaatatcagagtttctatgcttatggctgataagtagacatttttaaaaatcataaaaactgtattttctatatagttcagctaagtttatgaaaaagatgcagactcagtattggagcattgctatcgctccatgatgtgtttaaaaattatttttaaatgacaaaattttatatctacatatatatatatcttgtaacacatgatgtttgaaatgcttaattctaggccaattaaaaatgctttacctcaatagttatttttatgtgagaaaggtcaacatggtctggcacttaaaaaaaagaaacagtatttctcataactgtatcactctgatcagggaacggaattagcagttttgaaaacaacaacagaagacacaaacaacacacaaacaaaagggggggggagaaaagcaccacggggacgagtcgccccgttttgtaaagggccaagggagggaaaagagacgggggaaaacgcgagggaagcgcggcctggagaccttggggcatggagccccgacccgagaaagtggaggctggggatactacacatccgaagcgacagaacgacatgggccaaa

SEQ ID NO: 46791 - DNA, 517 bp, Homo Sapiens
agaaaaaagagaaggcatagatctaaagtaaatggtctccaaagaggaagaaaagccaacactagacctttgaaaagaagaagaaaaagaggtccaagaattcccaaagatgaaaatattaattttaaacaatctgaacttcctgtgacctgtggtgaggtgaagggcactctatataaggagcgattcaaacaaggaacctcaaagaagtgtatacagagtgaggataaaaagtggttcactcccagggaatttgaaattgaaggagaccgcggagcatccaagaactggaagctaagtatacgctgcggtggatataccctgaaagtcctgatggagaacaaatttctgccagaaccaccaagcacaagaaaaaaggtgatgatcaagtgatcttctgccaatgtctcgtctattatgttgttgattttctatctctgtggacttacagtctttaaattgacccatcatcataaaatttgattttataaaaaaaaaaaaaaaaaatggtggagcg

SEQ ID NO: 46792 - DNA, 824 bp, Homo Sapiens
ggacctggattggccaaaaaatgcatgggctggtggtgctgccccttttaacagcagcctgccagagcctggcgtccgtccgccacatggctgagactacagaagcctgcatcactgcctacttcaaagaaagccctctcaatcagaattcaggatggggacccattctggtatcccttcaggttcccgagctcaccatggaagagttcctgcaggagtgcctcaccttgggcagttacttgactctttacgtctacttgcttcagtgtttaaacagcgaacagactttaaggaatgaaatgaaagtgctgctcatcttaagcaagtggctggaacaggtgtacccaagctccgtggaggaagaggcaaagctgtttttgtggtggcaccaagtccttcagctctccctcattcagacagagcagaatgactccgtcctgacagaatctgtcattcgaattctgctcttggttcagagcaggcagaacctcgtggctgaggagagactcagctctgggatcctgggggcaattgggtttggccggaagtcgcctttgtctaacaggttccgagtggttgcccgaagcatggctgccttccctttcagttcaggctccctatgaagatcatattcgtttgatggctgttttgaattcatctgactcccatattcgcaggcttgaatgcttttgatctattcattaagtaccgcttgttgatacttatcaactttgatccatcaattctatgattcagctcttctttaatgggaaattgctgtttctttaactttcttcaattgttttagcgcctctatcatcggc

SEQ ID NO: 46793 - DNA, 620 bp, Homo Sapiens
gtgtacctgttcatcggcacgtccttcctcctggccggcttcgtgtcgctcttccgcatccgcaccatcatgaagcacgacggcaccaagaccgaaaagctggagcggctcatggtgcgcatcggcgtcttctccgtgctctacacagtgcccgccaccatcgtcatcgcttgctacttctacgagcaggccttccgcgagcactgggagcgctcgtgggtgagccagcactgcaagagcctggccatcccgtgcccggcgcactacacgccgcgcatgtcgcccgacttcacggtctacatgatcaaatacctcatgacgctcatcgtgggcatcacgtcgggcttctggatctggtcgggcaagacgctgcactcgtggaggaagttctacactcgcctcaccaacagccgacacggtgagaccaccgtgtgagggacgcccccaggccggaaccgcgcggggctttcctccgcccggggtggggcccctacagactccgttttttattttttaaataaaaaacaatcgaaaccaaaaaaaaaaaaaaaaaactcgagggggggcccgggtcccccaattcgcccttttaggtgaggtcgtattaccaaattcaactg

SEQ ID NO: 46794 - DNA, 600 bp, Homo Sapiens
  misc_feature (2)..(2): n is a, c, g, or t
  misc_feature (4)..(8): n is a, c, g, or t
  misc_feature (10)..(12): n is a, c, g, or t
  misc_feature (15)..(17): n is a, c, g, or t
  misc_feature (398)..(398): n is a, c, g, or t
  misc_feature (418)..(418): n is a, c, g, or t
  misc_feature (455)..(455): n is a, c, g, or t
  misc_feature (483)..(483): n is a, c, g, or t
  misc_feature (499)..(499): n is a, c, g, or t
  misc_feature (509)..(510): n is a, c, g, or t
  misc_feature (530)..(533): n is a, c, g, or t
  misc_feature (540)..(540): n is a, c, g, or t
  misc_feature (556)..(556): n is a, c, g, or t
  misc_feature (565)..(565): n is a, c, g, or t
  misc_feature (574)..(574): n is a, c, g, or t
  misc_feature (576)..(577): n is a, c, g, or t
  misc_feature (579)..(579): n is a, c, g, or t
  misc_feature (581)..(598): n is a, c, g, or t
tntnnnnntnnnttnnntactctgtggggtctattttataagggcactaaccccattcatgagagcagagcccccatggcctaatcacctttccaaggccccaccttctatctaagacaatcacgctgggaataggtttcaacatatgaattgggggaggacacatttggaccacagcatgaacctttagaacagggtttctcagccttagcactacggacatttggggctggataaatatgtgttggtacagaatgggggtatcctgtgcattgtaggatctttagcagtaccctagcctcaactcactagatgccaatgaaataccttgcttcttcaccagttatgataaccaagaatgtctccattgttaaatgtccccttaggagcaaaattgnccctggttgagaaacattgntttagacaaattgttaagagtatcatgtactacactnctgaaacttaacgtgatcatcaccactnacagatgattcacagngagagattgnngggatcttggctcactaggnnnncccgggnaaaaataaatgggggntcagttggnttacccgtntnntntnnnnnnnnnnnnnnnnnncc

SEQ ID NO: 46795 - DNA, 1094 bp, Homo Sapiens
agcggtgtctcaaacatagggaggataagaagagtgttcttctggtaaagctaaaattctggaccactgaagctaaaagccctatgcaagtatgaaattaagtacttgagctataggacaaaccttgggcatttaaccatttactgtctggctttgcccttaaaatagggttgcaattaaaatgtgattggcttaggtaatcccaaaaactaacaaataacaaaggtgcataatttatttatctactttttaggtgctctgagttgaggcaaagtagagcggcaacattaagtgctatgctagtcacttagctgacgtaaccagcttggttaagcagcttatgaaaccatataaagaattcttttgaggatggaattctgtccacaaaataattttgtgagcccagatatcattaggatcacacagaattaaatatagaaaaatgaaaccatcattatattctttcgtgtttcttcttttattataaacaaggggattattctttagttctcagaggtagggacaaaacacatcaggttttcagaaggaaaaaacatttaaaaacccaccatcacatgagagaatcacttgaacccaggaggcagaggttgcagtgagctgagatcgcatcattggcactgcagtctgagtgacagagtgagactccatctcattaaaaaaaacgaaaacaaaaacaaaaaaaacaaacatcatcaccgaagatggcaacatcttttcttgaaagaatggcttaagaagagctccaggtcctactcttggactgcgaatgtaatgcaccacgtcggtgaaaccaaactcaagaggtaccaccttgagagagataaaggggccagagggtttgggcccacaacacggagaaaaggggctggagccccatacagctaacccataaaacctatggggacaggacggcgtccacaaggagaaaggggggcgcaaccgccgcgacctctcgacaagagaaacacgtgtgcaagcagcaccagatgaaggcggaacacaccgggacctgagagacaaagagcggacacaagggctgatgagaaacgcggaaacgggcgaaggaccacaga

SEQ ID NO: 46796 - DNA, 466 bp, Homo Sapiens
  misc_feature (360)..(360): n is a, c, g, or t
  misc_feature (425)..(425): n is a, c, g, or t
  misc_feature (443)..(443): n is a, c, g, or t
gtcaacgcttggcttcaaaacttcaaaggatgggctgactctctttgaggagcactgcagctggtgactttaagttacagccagtgctcattgaccactctgaaaatctcagggcccttaagaattatgcaaaatctattctttctgcgctctagaaatggaacatcactgtctgggtgacagcacatctgttaatagcatggtttactgaatattttaatcccactattgagacctactgctcagaaaaaaaaaaaaaccgattcttttaaaaagattgttggttggccaggcatagtggctcatacttgtaatccctgcactttgggaggccgaggatcacctgaggtcaggagttcnagaccaagcctggccaaaatgattgaaaccccatctctaataaaaattccaaaaaatttagccangcatggtgggtagtaccnggtaaatttcagctactccgggg

SEQ ID NO: 46797 - DNA, 553 bp, Homo Sapiens
ccctagttctacggctcctgatggatctgagaagatggacgtggaggatgaaaatctgtctgattattttgaactgatgtttgttgctatggagatgctgcctatatgttgatgttgcggacgttaagtcactagcccacagccttgtattccatactcagagaccctgctacttacttgacatctcaacttgaaagtccaattaatatgcacttcaaactttaataggcttcaaacagaatttctttcattatctctgcaaaacagcttctctcatcatcttgaaattagtgaatggcattttactgttttagttggagtcatttctgtggttttctttcacatcctacataacaatccatcagtaagttctatgagctcttctttgaaaacaaacagaatccaactgtttcattcccacttctgctctggccaagccactgccaacactcacctttattattgtagcaccctcattgcctagttctggcccacagatttccaataaaaggtgaataaaatcaggtcactcttctgctgaaaaaaaaaaaaa

SEQ ID NO: 46798 - DNA, 594 bp, Homo Sapiens
agatgatatttggccaaacccattacagtactacttggttcccgatatggatgatgaagaaggagaaggagaagaagatgatgatgatgatgaagaggaggaaggattagaagatattgacgaagaaggggatgaggatgaaggtgaagaagatgaagatgatgatgaaggggaggaaggagaggaggatgaaggagaagatgactaaatagaacactgatggattccaaccttcctttttttaaattttctccagtccctgggagcaagttgcagtctttttttttttttttttttttttcccctcttgtgctcagtcgccctgttcttgaggtctcttttctctactccatggttctcaatttatttggggggaaataccttgagcagaatacaatgggaaaagagtctctacccctttctgttcgaagttcatttttatcccttcctgtctgaacaaaaactgtatggaatcaacaccaccgagctctgtgggaaaaaagaaaaacctgctcccttcgctctgctggaagctggagggtgctaggcccctgtgtagtagtgcatagaattctagcttttttcctcctttct

SEQ ID NO: 46799 - DNA, 563 bp, Homo Sapiens
ctgaaatttgaatctcatatacttttgtgacaaaacattcttcctcttttgttcttctcctaccatctaaaaatgtagaaaacattcttagcctatgagttgcacaaaaacaggcagtggccagatttggcccatagaccatagtttgctgacttctgccctaaatcatcctccatttctttccttctgtgtccttgttactgacaaagccactttccctaaaatggggtctttccctgtttggtgccatgaagccaatatgcaaaaccgaaagtgagcctcaagcagtgcaggctttatttggtggccatggaattgagaagtgagagcttggctcacaaatcaacttttctgctcgtgagacccaggaagtcacagatacagggcatctttagtgaaggggctgagcattaaaagcaaggggaggagtggccaggtgcaatggctcactcccataaacccagaactttgggaggccaaaatgagaggattgctgagaccaggagttcgagaccatcctggtcaacatagtgatacacccccatctctacaaaaataaaaat

SEQ ID NO: 46800 - DNA, 495 bp, Homo Sapiens
cgcgtccggctttaggagagcaccttcatggagaaaaaagtttagaccaaaggacattcgtggcttagctgctgggtcagcagagactctccctgcaaacttccgggtgacttcttctatgtcttccccctctatgcagccaaagaagatgcagatggacggtatgtgatgggtcacactaacctgtcacttgttgggagcatgagcagctttctgtctggaacattaataatgatctaaaacggcctatttaatatgttacaaggcacttgagtatggttgcatgtccaaatataaatgtttttaaattaactctaacatttgtttataaaagtttaaccataataatagaatttttaaaacacgcttgtctggttgaatcttagcatatttttccaactaataaagctcagtattcgtctgtgttctcagagagagactgaggcatacttgtaaatatgtgtctgtgacaggccgtgctagaaagctctttca

SEQ ID NO: 46801 - DNA, 917 bp, Homo Sapiens
  misc_feature (917)..(917): n is a, c, g, or t
agaacaaaaatgaacagtatggaaaaagcccacaaagaaactgtggaacaacttcaggccaaaaacagagaactactcaaacaggtcgcggcattatcaaagggtaaaaaatttgacaaaagtggaagcatactaacatctccttgagaaagtcatttgtttagcatttcttcttacaatgtaaattgtggggaaaaaaaaattctgtgaagcccttaaattctgtgtagtagaaaaatatttttgcacaccaaatgaattggtgtgtttcctgttcacttttgtaattgatatacagcattttttaagttgtaaaacattcaaataaaacttcaactggtttgaagtaactttttaattatttgatatccaggaactttttttgccagcaatagtattaaacagttgtaaaggagtgcatgagtagtgctctttatgaaacgcaacatgcaataatagagtaggtatggtttcagaagtcaggagcagcagggtttatgttgtttgttttacactatgctaatttcagacaaacagttttcaatttaagaaatacaaaaattttaaacttcgaaaaaatggcgacactggttttgggaattgtgtttcacttgcatcagatgaattaggacgacaatcacgggctttattaaatgactcagatcttgtaaattgttttaacagttcctcatacattgtgaccctagctttccatactggctagaataaggcatgcacagatctaggtcaaacggtccgctgacaccaagattgctaagccttggccagttatccagaagcgacgaacaactgaaacggtacatgtggttaacataacctagaaagcaatgagataaacacctataaatgtggagggacagcaccacacgtgtcttctcttttctcttctgctattn

SEQ ID NO: 46802 - DNA, 586 bp, Homo Sapiens
cggccgccaacttttttttggtaaggcattattttttaatgcaggtatgccactactgggaaaaaaaaaaaaaacaggttttaaagctagaaatgaaaagctacttaactatcttaaaggataagttactttattatacactagaaacatacacaatagctgaaaaacttaaaaaatctcacactgctgaatgtctctgctggctgaagtgtaagtaaaagatcatagtagtgccgctgttgagtgatacagcaacttgtcattaaagatgtgtgtgcagacatggattctgagttaatatctcatctgtagaagtatatatttgtcccttgctttgggattggtttctggacaccactcccccacccttgctggccatttgccaaggacaccaaaacccaaggatgttgaattcccttttataaaatggcgctgtatctgcatacaacttacacacatcctcccatatactttaaatcatttccagatttcttatacttcatacaatgtgaatgctatgtaaatagttgttacattgtgtacttatatttgtactattgtattaaatattctcaaatatttcctc

SEQ ID NO: 46803 - DNA, 446 bp, Homo Sapiens
gggattctgggctgcgggcctgggaagggctcgccgggtgccaaatgagctgtcctaactctgcggggctgcagcttcctgcatgatgctggggagcttggcgcctgacccaggatctagaaggcactctgggcaggccgcgctccgcccacgaaggtttaaccaccaaggactctgagagctggcaggtctgagtaaccctggtaacaattctcttcaccttatcaaaacctgagctaaaaccaatgcatcagctgatgatgacagcagagagtggcagggctgaggacccaaagtcatttcccaggctggcggagaataaactgccagggagaagaatgagaagacaggagacaaactgtttggaaagctaaatcttccctcttaatgaataaaggtttttgccttgccaaacacacccacaaaaaaaaaaaaaaaaaccttgt

SEQ ID NO: 46804 - DNA, 905 bp, Homo Sapiens
atcatattaaaagtgaattcttctagaggcttgtgtacactactggttgttttagttgggccttttatatgaaagttatactgtacttatctttttgttgttgtttaggtttgttgactaccatttctggcttcctttctttggttttggattaaatccaacagtttatttgtaagccctgcagcagatttctttgataatttagcttttactgaatctcttgcaatgaagaaagctatttcatcagtgatttatcactttcaattcattgtgtgagctggaaatattattttatatgagagctatagcaaaataatctgtataaacaaggaatgtgttagcttaaactggatcattttactttttggcatcatgcatctgtactgtaccaaaagtgtttatatgtctgcaaattaaaggtatatattttcataatttctttctcacttttagcattttatatttgaacatgggcttgttatttcactgaagtgcctgtcatttgtttgtttttagggttaaatgtgggtaacctgtagtattctgctatactaaaggttatattaaatgaattcattactcaattaaacattggggtaaattattaaatgtgtgtgtaattatagacctatatatagtagaaaagagagtatggcctaaatgtttgatgtaagttcatatgaaaaatttgcacccatgtatggggccatgggatattaattttattataagattttaatatcctttataaaatttttcctttttcctaccggaatttattaacaaaatccctccggtttagctggggtttgccaataaccttggccaataaattttttaaaaaccaaaaattaccttctccacaaaaaagaaactttggaatggccaaacccacccaaagttct

SEQ ID NO: 46805 - DNA, 622 bp, Homo Sapiens
aaaaagttcaaatggttccagattccagtgtcaaaggagtgatgcattacactccagccaggtccatccctgctccgtatgttggctgtgagtggtggtttccatttaaaccaagtttctcatttcttcacctttttttctctaagaatttggattcgtagacattgacatcccgaagaactgtcaaggaagcaagatatgctttcttcatctgcaaaagaaatactaacaacaattttcttatacagtttggcagaaagatgttaacataaaaagtttatatacctcaaaaatcactaaactttccagatctctgtcctattatttgtaacacaaggggcattggataaaatgatttctagggttccttttgcttcccaaattctctgattctaaagcagtttttagaatcattagctctttggaaacatatatgcatacatgtttgttaagcctattgaactaggtaggacatataaacaatttaattttagtgtcattgtttaatcacagacttagtgtttgaaaactgtgttttaaaaacagaaacagattgatgggtaacaggtaaaatatgacatgtatagcttacatgttattatttgttaaattttctttgtat

SEQ ID NO: 46806 - DNA, 702 bp, Homo Sapiens
  misc_feature (634)..(634): n is a, c, g, or t
gacctggattcagactgatggtcttgtgatgtccatgaggttctgccacatgcccttgagggctctgagtccagagttaactgccctgctgacatcctgttaggtttcctagcttaacatgtggaaggaaaagcatatcaagcatatcgggcggcaccatcccaccacagtgaaaacttatgttaggggagtgagtcttttccacttacagtaggacccctttgcctcaatcaaaagtgaccctacagtttgaaagaaaaaaaaacgttgaaaaaaggaaggtttctttagctttagcttcttggcccaggaatttttcctggcattcaggttctgtgctgaaaccacaagggagggggaggttcccatttcattagcagtaagcttctgctgtgccataccaccaggctgcctgcctctaggaaaaccctgttccttttgatagaatctaaaaggggtaccagtgggtcccttgtagcaatacagactggatagtaatggccattagggcagaaagtagtctgagcagtgggagattttagttaacagctatttctgcttccaaactctgataacggttgtgaaattactgactgacttcctttggcagtgcggcaagaaaacaatatatatngaattgtgataccatcgtggtttagtaaaaatctaagctttgaacctgggcaccaacacaacaacaaa

SEQ ID NO: 46807 - DNA, 566 bp, Homo Sapiens
aaacaacaacacaaaaagtctttgttttgacctgacacgatggctcagaacagggggaggactcaaggcacaggactagtttcctgccttaaagagcctttacaggaaattgactgcaaacagtattggtgaccctgccaaggaggcaaacctagggtgatgtcattgttcgaagctgtcaccgccaagcctctggccttggggcgaggagagttggtgggattaaaaaatgagtgtgtgtatgtgtgtgtgtgtttagcagtctctaaagaggcgagtcaagggaaaatcctagcgggagaaaaatcacaaggggtggggggtgtctcagaaatattcttagctgggttcaactttcctcgtttttctaagtttaaaaaatcctctcttactatttttgctcatcaaaatgctgctgctttttcagagacagccttttttgagccattccctatttagtgttttgggtaattggctgttacagtatggaatttgtggcccaaaggcagcgtggtaagttagacactaggtgcacggtgccccattgttatgaagtgtggaaactg

SEQ ID NO: 46808 - DNA, 744 bp, Homo Sapiens
  misc_feature (734)..(734): n is a, c, g, or t
  misc_feature (737)..(737): n is a, c, g, or t
  misc_feature (740)..(741): n is a, c, g, or t
  misc_feature (744)..(744): n is a, c, g, or t
tctagcgaggtgacagcgtagaaccaggggagctccatggtgccgatgccaatccctcctcctcagagttctctgctccagcaaactccacctgcctccgggtatcagtcaccagacatgaaggcctggcagcaaggagcgataggaaacaacaatgtgttcagtcaagctgtccagaaccagcccacgcctgcacagccaggagtatacaacaacatgagcatcaccgtttccatggcaggtggaaatacgaatgttcagaacatgaacccaatgatggcccagatgcagatgagctctttgcagatgccaggaatgaacactgtgtgccctgagcagataaatgatcccgcactgagacacacaggcctctactgcaaccagctctcatccactgaccttctcaaaacagaagcagatggaacccagcaggtgcaacaggttcaggtgtttgctgacgtccagtgtacagtgaatctggtaggcggggacccttacctgaaccagcctggtccactgggaactcaaaagcccacgtcaggaccacagaccccccaggcccagcagaagagcctccttcagcagctactgactgaataaccacttttaaaggaatgtgaaatttaaataatagacatacagagatatacaaatatattatatatttttctgagatttttgatatctcaatctgcagccattcttcaggtcgtagcatttggaagcaaaaatanaanaannaan

SEQ ID NO: 46809 - DNA, 776 bp, Homo Sapiens
  misc_feature (624)..(624): n is a, c, g, or t
ggggccggtgtgaaccgactattttgtgtccttgagacatttgtgttgtggttccttgtccttgtccctggcgttataactgtccactgcaagagtctggctctcccttctctgtgacccggcatgactgggcgcctggagcagtttcactctgtgaggagtgagggaaccctggggctcaccctctcagaggaagggcacagagaggaagggaagaattggggggcagccggagtgagtggcagcctccctgcttccttctgcattcccaagccggcagctactgcccagggcccgcagtgttggctgctgcctgccacagcctctgtgactgcagtggagcggcgaattccctgtggcctgccacgccttcggcatcagaggatggagtggtcgaggctagtggagtcccaggaccgctggctgctctgcctgagcatcagggagggggcaggaaagaccaagctgggtttgcacatctgtctgcaggctgtctctccaggcacggggtgtcaggagggagagacagcctgggtatgggcaagaaatgactgtaaatatttcagcccacattatttatacgaacaatgtacagttgtgtgactgtgaaataaatgtcctcanatcccaaaaaaaaaaaaaagggccgccgtcgggatctagaacaagtccgtgtcggggcttctactgtgggaggtcggaatcaccgagagaccgaagtggctgttacccgtttaaaggccttgggcccacctaaggcaccctttggggggccc

SEQ ID NO: 46810 - DNA, 660 bp, Homo Sapiens
cttcgacggtgtatgagcaacagaggatactgtatgagccttaaaaaataaatctcaattcatacactggagcagcaaaaaactgagctggaaaggaaacagaatccacaagtcattatacatatagctgttgtcaaatagtataaccttggtgtcttctttgagttgcctggacagtatttatgaaacaaaaaactaaatgccccccatttggggacggggggaggggttcagacctctaacctggattcagagccttagaggccgagagggaatctggaatctggtattactgagatcctaggtaaaagaaccagcctggcagtctttcccacctcattggtccgtgcttttatttttaaacccaaaagaaagaaaaaaacacaccctcttatgtaggaatttcccttttacaaataatttgacctggtagaaataaacttgcctgcctgctcttaaatgccagacagttggaagcaaatgccgagggaaaggtgcccagagccatgcttgataggactttgaatattttctccttacttaaagtacgttgcttgtatttagactataagatgctatggaggtctatcccatgccatgccaatgtgaattgctttgcttcagtaacaatcagaagaccagtcccacagagaataactt

SEQ ID NO: 46811 - DNA, 815 bp, Homo Sapiens
aatcaagaagtggtggactttgaaaagttggatgactacgcctctgcctttcaaggtcatgatgttggattctgttgcctgggtaccaccagagggaaagctggggcggtaaggaaggcatatgctcttttccctttttgctggccagtaatatcaaggattcttttcttgctcactctttttctttgtgcctgttgcaatgcttaaatgtgaataagcctttattgtttaagattctatatgctgcactaacctttggtatccttttaatagtactgataagttcgtctttcaaagtaatccttgagttcaggccccagtgctggagacgtcgtaaatatttacatgattttgcctattgtgattatcgctatcactacatcccctgactaagggaaaccatgatgtctgagtaaaactaattggtttatgctgttaacaatcagctgtttttccccttaataaatgtttgaaatttgaaatgttctgtctcacttgagtgatttgcttcaacttattttcatgtcaagctttaaacttctggaatagaacatcagaacacaggcacgattcaaccagcctccagcgatgactcagccttcagcgatgattcaaccccactaatgattcagtctttactgacgcaaaagtcttttaacgcacattttattttctttttaatggtgttctaaattgagtcacctcctgtacaaagtcatagtttactacatagttaaaaatcagagtttactaccctggattctgggcaaatgttagggcgggtacatcttatttaatttatactttgactatag

SEQ ID NO: 46812 - DNA, 587 bp, Homo Sapiens
  misc_feature (12)..(12): n is a, c, g, or t
  misc_feature (116)..(116): n is a, c, g, or t
tactggctcaanacaagggccaacctattacttcacacacctcaatacaaaagtgcctgggaacgtcgatgaggtattaaaggaaaccactggtcttgtcagtcatgtacacacangaaaaaaaaaccagtcatttttatttttattttttgagacagagtttcgctcttgttgcccaggctggagtgcaatggtgcaatttcagctcactgcaatctctgccacccggattcaagcaattctcctgtctcagcctcccgagtagctggaattgctgacacccatcaccacgcccagctaattttatgtatttttagtagagatggggtttcaccatgttggtcaggctggtcttgaactcctgacctcaggtgatccacccacgtcaggctcccaaagtgctgagattacaggcatgaaccactgtgcccagccgaaaacaaccaagaattttttaacaataaaatgaccagcaagtaaacttgaaacaaaaatggacaaatatctaaaatatttttaaatgtatgtattttaattggcaaataatacttgtatatattgtttacaaaaaaaaaaaaaaaaaggcc

SEQ ID NO: 46813 - DNA, 780 bp, Homo Sapiens
ggccgacatatgtgcctatggaagttcatttaccaccagagatggtaaaacttcaggagattttcaagacattttacctaggcaaacatagtggcaggaaacttcagtggcagtcaaccctaggacactgtgtgttaaaagcagaatttaaagagggtaaaaaggaactccaggtctctctttttcaaacactggtgctgctaatgtttaatgagggagaggagttcagtttagaagagatcaagcaggcaactggaatagaggatggagagttaaggagaacactgcagtcattagcctgtggcaaagctagagttctggcgaaaaatccaaagggcaaagacattgaagatggtgacaagttcatttgtaatgatgatttcaaacataaacttttcaggataaagatcaatcaaatccagatgaaagaaacggttgaagaacaagcaagcactacagaaagagtatttcaagacagacagtatcaaattgatgctgcaattgttcgaattatgaagatgagaaagacacttagccacaatctccttgtttcagaagtgtacaaccagttgaaatttccagtaaagcctgctgatcttaagaagagaatagaatctttaattgaccgggactacatggaaagagataaagaaaatccaaaccagtacaactatattgcatagaatgttggccttgcagcatttggtgtcatatgcagtagccagtggataaactaacctgttgattcaatattatttgactccttttttactaccgatg

SEQ ID NO: 46814 - DNA, 1017 bp, Homo Sapiens
  misc_feature (701)..(701): n is a, c, g, or t
tggagtgggacttacctgcacgccccaggggtctttcaggattcaggatgacttttcttttacaatggtttcctctcggcagagcccgggttgtgggggatctgtgtgggttctcaacgcagatccatcctggggtctcccgggcagggatggctgacctcgagtcccctcccttcccgagaacctgctctgtcccgagggcagctaacaagggctgagccccaggtacaggttgcctcctccacggcaggaatttttaccaaaaccacaagcaaaaaacaaaacagaccaccacgaccaacaacaaagatggggggtagggttttgtaaaggttctgttaggttcatatttttatatcattttgcccataaatgcggaatttgccgtgggaatttgaagacaaatgatctatgtttttatggttttctagggaaggtgttctgggggccgggctctctccagctgtgggaggcctgctccctctggggggcaccctgggcagggtgggggggccttgggaggcgcttcttgccaaatgcagacgaggggtgagcctgccagcgtttgcgacgtccccgcacgacaggctcatactttctgaggatcgtgcatagcataggacgtctgaacctttgtacaaatgtgtagatgacatcttgctacagcttttattttgtgaattaaagatgcatttgatggntaaaaaaaaaaaaaaaaaaaaaaaaaaactccaggcatctatggtcgggggcgggagaaagaggtaattgaaatggccacatgggtcattacctggttttcctgaacccaagcctttccttgttacaaaagtggggaggaatcttgccgcggtctccccctaatagagggagtccggtattaaattttctcgatacaggcccagggttataacccctgcaatttaaattggaaatcccgggctgtccaggtaacccccggggggacattttataacccgcggcccctaaaagtggagagcggggggctcttttttt

SEQ ID NO: 46815 - DNA, 784 bp, Homo Sapiens
catttattcaaggacctaagaaatggaaaaatcaattgaggtgatttttccatcatgaaaaaaatttctttaaagtcatctgtctgattctgtaaaaatttcacattctttatgtgaacaaaaagctgaaagaaattcagggaaagaattaagatgtgatatcaatgccaacccaatgtttggttcttgctagttgtgttccccctccttattccatccatttcatagtaataagaaaaaaaagaattttacatggagatttttaggtaaattttgaattacagtatatgataaaaaccttaacgttcaaactccaggtataatgaaatttaattgaaaattactatagcagtttaagtcaattgtagtttgaaagcagttttaatattttatcttccacaaaaaggtaggaaagtttctgtgctgaacttaaatatataaaggaacacgtccaacatatttagttaaaaatccaaaagtcagaggataatttccaaatgtgtacttaaatagaaaaaattacaagatttcattggtggcaataaaggtgtctgccacctttcggtaacaccaacaaaaaaaaacggccaaactcgggttccccttagaaaccccctatacctctcggggactcaggagaaagggtctacaggctaccctaacctggacaccgcggtactcccggggaccgcggtgcggtgcaaatcgcacgggtctcaccacggtgggctctccacaggaccaccggcaaccggccaataacccaaatctcaccggacaagcg

SEQ ID NO: 46816 - DNA, 782 bp, Homo Sapiens
ttggagtggggctagtgccccaaggcggcttggagacctctcagcctgagggcgaagcaggagtcggggtggagagcaactccgatggggcctccccggagccctgcaccgtcacccctggtgccgtgaagctggagaaggagaagctggagcaaaacccggaggagtcccaggacatcaaagctctgcagaaagaactcgagcaatttgccaagctcctgaagcagaagaggatcaccctgggatatacacaggccgatgtggggctcaccctgggggttctatttgggaaggtattcagccaaacgaccatctgccgctttgaggctctgcagcttagcttcaagaacatgtgtaagctgcggcccttgctgcagaagtgggtggaggaagctgacaacaatgaaaatcttcaggagatatgcaaagcagaaaccctcgtgcaggcccgaaagagaaagcgaaccagtatcgagaaccgagtgagaggcaacctggagaatttgttcctgcagtgcccgaaacccacactgcagcagatcagccacatcgcccagcagcttgggctcgagaaggatgtggtccgagtgtggttctgtaaccggcgccagaagggcaagcgatcaagcagcgactatgcacaacgagaggattttgaggctgctgggtctcctttctcagggggaccagtgtcctttcctctggccccagggccccattttggtaccccaggctatgggagccctcacttcactgcactgtactcctcggtccctttccct

SEQ ID NO: 46817 - DNA, 809 bp, Homo Sapiens
acgtccgcagcaacccagagcccacgggctatgactggagcacgacctcaggcaccttcccgacctccgcagtggcccagggctcccagctggtcatccacgcagtggacagtctgttcaataccaccttcgtctgcacagtcaccaatgccgtgggcatgggccgcgctgagcaggtcatctttgtccgagagacccccaacacagcaggcgcaggggccacaggcggcatcatcgggggcatcatcgccgccatcattgctactgctgtggctgccacgggcatccttatctgccggcagcagcggaaggagcagacgctgcagggggcagaggaggacgaagacctggagggacctccctcctacaagccaccgaccccaaaagcgaagctggaggcacaggagatgccctcccagctcttcactctgggggcctcggagcacagcccactcaagaccccctactttgatgctggcgcctcatgcactgagcaggaaatgcctcgataccatgagctgcccaccttggaagaacggtcaggacccttgcaccctggagccacaagcctggggtcccccatcccggtgcctccagggccacctgctgtggaagacgtttccctggatctagaggatgaggagggggaggaggaggaagagtatctggacaagatcaaccccatctatgatgctctgtcctatagcagcccctctgattcctaccagggcaaaggctttgtcatgtcccgggccatgtatgtgtgagctgccatgcgcctggcgtctcacatctcacctgttgatccc

SEQ ID NO: 46818 - DNA, 502 bp, Homo Sapiens
cctacacacaagcacatgtgcacacatgcacacacatgcatgcaagcacacgcacacacacacatgcacacacactcacatggacacacacatacacacacatgcacacacatacatgcacacacatgcacatggacacacatacatgcacacacatacatgcaggtgtgcagacttggctccaggcgtgtgtttgatagtattattctatgatatttccctcatctccatagaataccagcttctgaatcctcaatcagcctttactgcaagaagaaaagaaaaacctctctcattccaggtctgtggtgcagatgggaagagtatagtcaaaacccattaaggccttagtcaaatgccagccgaattagaacgcaatgaacgttagacaaaacaacccaactggccaggcgggggaggcgcagagcgtataaatataaagttagatacttataaagaataaagactctaataaaatattttatataaaacttttaaaaaa

SEQ ID NO: 46819 - DNA, 721 bp, Homo Sapiens
  misc_feature (689)..(689): n is a, c, g, or t
  misc_feature (692)..(692): n is a, c, g, or t
tgcttacataataaaaacaaaaacaagtgtctgaattgtatagtgtctttacatgaaagaactttaaacagtggccttatggtagaaaattttataccagatttttctttttctgatgacattttggcttataactcgaagttttcttaagtttctgaagatcaaggcctatataattcatacatttcatattataagaaggcaagagacaaggtgcttcaaatattccatcaggtagttgtgagtgcactgaatttttagtaatatgttcattcagtttttttccacaactatttgctcttttccaatttcaaaatgctattgtggaaaatatgtaaagattttgtaatctatagtccatcttatttttccctcagggcaagcttgtgcatatcatatttttaaaggctttttaaaaatctgacaaacaaaatctcatatttgaaaattgtactttactactacagcattacacattttgcaagcacatcttatagagtgtttacttttagttcagttgatatgtattgcatacctactatgtgtaagagcaaatggatgggatttttaaatgaaatttttaggccccaataccttatttctttatgttttctgtgttctgcttaacagtacatatacattcccaattacatttttgtgaaatggttatttgtaataaaataaaatgntgntgctctttctgcttaaaaaaaaaaaaaaa

SEQ ID NO: 46820 - DNA, 734 bp, Homo Sapiens
gcgtccgaaatggctgccccgaggaggcccgcaccgcgtagccagtgaaggttggggagcaagcttatgcgggaaagagggagggggactccaggaaaagccgttgagaggaccatcacaacctgagcagcacaggttccagttacagccatcccttgtcataacttttgaactgtatttggaaaaatactggccaggaaagaaaaatgataaaatttttcctcatggtgaataaacaagggcagactcgactttctaagtactatgaacatgtggatattaataagcgtacacttctggaaacagaagtcataaagagctgtctctctcgatccaatgaacaatgctctttcattgaatataaggattttaagctgatatatcggcagtatgcagctctcttcattgtggttggagttaatgacactgagaacgagatggctatttatgaattcattcataactttgtggaagttttagatgagtatttcagccgagtgagtgaattagatataatgtttaatttggataaagtacacatcattttggatgagatggtgttaaatggctgcattgtggaaactaacagggcaagaattcttgcccctctactaattcttgataagatgtcagaaagctgaaaggaagtctcttcgagacaatatggatttatcagaaatgcgagtaccgtggaatacatctcaacatgttaacccagaagaatctggaagacc

SEQ ID NO: 46821 - DNA, 970 bp, Homo Sapiens
ggatgccccgaggaggcccgcaccgcgtaccagtgaaggttggggagcaagcttatgcgggadagakggagggggactccaggaaaagccgttgagaggaccatcacaacctgagcagcacaggttccagttacagccatcccttgtcataacttttgaactgtatttggaaaaatactggccaggaaagaaaaatgataaaatttttcctcatggtgaataaacaagggcagactcgactttctaagtactatgaacatgtggatattaataagcgtacacttctggaaacagaagtcataaagagctgtctctctcgatccaatgaacaatgctctttcattgaatataaggattttaagctgatatatcggcagtatgcagctctcttcattgtggttggagttaatgacactgagaacgagatggctatttatgaattcattcataactttgtggaagttttagatgagtatttcagccgagtgagtgaattagatgtatcctttttcaatactgttttccacagtacttggcaaatgcactctggtccttatcagacaaggtcttgctctgtcacccaggctggagtgcagaggtgcgatcatggctcactgcaccctggatctcctgggctcaagtgatcctcctacctcggcctcccaagtagctgggactacaggaaccaattgatgaacttcccaaaatatgctcagccctggagcccagcagacttgcttttctccagacagttcatcattcaaaggagctgcctccaccacccccatctactgaatagccaggggagggcacaaatgaacagcacagtatgggagamacaccaactactcttcaaatcagtgcgtacctgctctacgcgtgaaggkacagaaaacctccacggccttttcagtwtttggtgcytttaagaggctaaggaytagtttwtttggctagackggatgcgcag

SEQ ID NO: 46822 - DNA, 718 bp, Homo Sapiens
  misc_feature (660)..(660): n is a, c, g, or t
atgaagcattacttgtgtggctgctgtgcagccttcaacaatgtcgcaatcacatttcccattcagaaggtcctctttcgacaacagctgtatggcatcaaaacccgggatgcaatacttcagttgagaagggatggatttcgaaatttgtatcgtggaatccttcccccattgatgcagaagacaactacgcttgcacttatgtttggtctgtatgaggatttatcctgccttctccacaagcatgtcagtgctccagagtttgcaaccagtggcgtggcggcagtgcttgcagggacaacagaagcaattttcactccactggaaagagttcagacattgcttcaagaccacaagcatcatgacaaatttaccaacacttaccaggctttcaaggcactgaaatgtcatggaattggagagtattatcgaggcttggtgcccattcttttccggaatggactcagcaatgtcttgtttttcggccttcgaggtcccattaaggagcatctgcctaccgcaacgactcacagtgctcatctggtcaatgattttatctgtggaggtctattgggtgccatgttgggattcttgttttttccaattaatgttgtaaaaactcgcatacagtctcagattggtggggaatttcagtctttncccaaggttttccaaaaaatctggctggaacgggacagaaaactgataaatcttttca

SEQ ID NO: 46823 - DNA, 719 bp, Homo Sapiens
tatgttatagttggtttaaactggcttcaagcagtcattaaaaggtggtggtcagaactatcatccaaaacagaaattataaatgatgggtgagtatacctttaaagataaactcatgctgaaattttcttcaggaaagcagcttgattaaactaggtaataattttatcccattatcatcagtgtatggtatttattctttttatattcagagagatactaacttaagagactgttcatttgtgaaaaccacacctggaaattgaattccagagcctactaacctcccgtatctcttcttctggcacaaccctacccttcattttagaagaaaaacacaatagtggtttaattctcatattcattatgagtaagggaggaaaaagagatgcccacagtgtaataaggaatggaggcaccctgcggggtcctttacctagacattaacctgagagtccggtgttgatgtttacacttctaaaaactgtattattactgccttgatgtgaaaattcgtgggtattctaccagagtatagccagattatcatgaaaccacagaaaaatatctcccaacagtttccttaaagtccataattttgggccaggcacggtggctgatgcctgtctgtaatcccagcactttgggaggccaagaagggcaaatcacttgagctcacaagtttgagacagcctgggcaacatgatgacattcccgtc

SEQ ID NO: 46824 - DNA, 595 bp, Homo Sapiens
ggtttctctatgcccttcaaaaacatcagagcagcacatcctggaagatcctatcttttgtaagtttaagaagcagcctcttgtcacaggttgactcctaggtagtgtgcctagtgaccaagagggctgctaagaaagctttctgaccacttgtggctgtcattggactgatttgcccagatgacatcaattgggaatttgaggcatgacctataaagatcagttgcttgcaagagtctcaggaaaataattgtggagttaagaaacttgaagcgatttttaaaaattacctaacccaaccttctcatttgaaaaattaaaaaataaataggccagatatggcagctcatgcctgtaatcccagcgctgtgggagcctgaggcgggtgggtctcttgaggccaggagttcaagaccagcctggacaacatggtgaaaccctgtctctactaaaaacacaaaaattagctgagtgtggtggcaggcgcctgtaatcccagctactcaggaggctaaggtgggaggattacttgaaccggggaggcataggttgtagtgagccaagatcgtgtcactgcactccagcctgggtgaca

SEQ ID NO: 46825 - DNA, 713 bp, Homo Sapiens
gagtgggggcggtgggagcgatgagggtctgagacggtgggagcggttgtgtgaagatggagtttcccggaggaaatgacaattacctgacgatcacagggccttcgcaccccttcctgtcaggggccgagacattccatacaccaagcttgggtgatgaggaatttgaaatcccacctatctccttggattctgatccctcatggctgtctcagatgtggttggccacttgatgacctggcagacccttcctcttcacaggatggcagtttttcagcccagtatggggtccagacattggacatgcctgtgggcatgacccatggcttgatggagcagggcggggggctcctgagtgggggcttgaccatggtaaggggcaagacattgtcaggcttaccccagctaatgggcatggcattaggggagacaaagttactctattccctactacacttgggtattacttgtttctcttcttgtggctaaaggctcaccaacaaagacttaatttcacctgaataaatgaaatttaccatgtaggtagattttacttgaaaaataatttaaaatgtacaaagtctgggttgacaattatttatgtggtctctgggaaaaagtgtttctgcttttattatggccttcacatcctaggattcaaattcgaatgtgatagctggcacacggagggatttattcaaaaatgggctgaa

SEQ ID NO: 46826 - DNA, 335 bp, Homo Sapiens
ctatatcgcatgggacagtaattttaaaaacgtttctactccaattaagaatatatatgatgttattatatatgcttatgaaacagatttatgagaaaagttttttttaaataaattatttaatcctagctctttgttattcaccagctttttaaaaaagtgtttgaaaattatacattctcgactttggggattagtttattcttgtggcatcattataaggcttaattgtggaaagctaagtacttgcttctattccttccaatgagagattataacataaactattaaaattattctgctaatatacctagatttttatttttaggtctctg

SEQ ID NO: 46827 - DNA, 756 bp, Homo Sapiens
aacgtctcctaggtattcattctgtattttgcaagcctcaaaacatacgtgaagttggctttgaatacatgaatagggaacttctctggcatggttttgctgaatttctgatttttctcttaccacttatcaatgtccagaagttgaaagccaagctgtcttcatggtgtattcctcttactggtgcacctaatagtgacaatacattagccaccagtggcaaagaatgcgctctatgtggagagtggcccaccatgcctcacaccataggatgtgagcatattttctgttatttctgtgctaagagtagtttcttatttgacgtgtactttacttgtcctaagtgtggcacagaagtacacagtctgcagccactgaaatcaggaatcgagatgtcagaagtaaatgctctttagaaactaaaattgcttcctttgaggaaaaaaatgcaccgtgtttaaattcttaatattagtcatcctaagtataccatttatgtatcctttataaggaatgtgctcctagccactgtcttctcctttccaggcatgactgaaatctaatcactggaaaccatgtrattctaaatatattatgtaaatgttaatgtattatgttttttaaatcattgcattcaatttttaatgtcaagaataatggacagcttttgtcaggtgactactaacaatgctccttcattttactacttcttaaaacaaggttggattctaaagataaagattttggagactctgg

SEQ ID NO: 46828 - DNA, 582 bp, Homo Sapiens
  misc_feature (493)..(493): n is a, c, g, or t
cttcacctgtagtaactgcaagcaagtcatcgggactggaagcttcttccctaaggggaggacttctactgcgtgacttgccatgagaccaagtttgccaagcattgcgtgaagtgcaacaaggccatcacatctggaggaatcacttaccaggatcagccctggcatgccgattgctttgtgtgtgttacctgctctaagaagctggctgggcagcgtttcaccgctgtggaggaccagtattactgcgtggattgctacaagaactttgtggccaagaagtgtgctggatgcaagaaccccatcactgggaaaaggactgtgtcaagagtgagccacccagtctctaaagctaggaagcccccagtgtgccacgggaaacgcttgcctctcaccctgtttcccagcgccaacctccggggcaggcatccgggtggagagaggacttgtccctcgtgggtggtggttctttatagaaaaaatcgaagcttancagctcctcgagccccgggtttggtaaaggctccagtgtggtggcctatgaaagacaatcctggcacgactactgcttccactgcaaaa

SEQ ID NO: 46829 - DNA, 643 bp, Homo Sapiens
ctaaacttgagtgtattgatttattattacatctactaccaacattttcttaagcatagccttctaaattttttcaggagattagaataaaggtatacatgctactcggtcttctggtaattctagtgataaacctttggatgagacaggtcctaatcagcactgaattcttcaataggaggctgtgttacaggagctacagatttttccctggattagcttaggtcattgcctttactttaaaaaaaaaaaaaaaagtctatgcatcttgttaccttgaatacaagggtggtcttgataatatttgacagcactaaccaacttaccaagccatctaagtgcttctgagacttttcagtttgcacaatttctttctccttttcaacagttacccagcgcttctgccctactcttttgtaagctgacacagttgttgttggtacaatcttgttctatcaccagcatcaaatttgcttaatactgcttggtgacattccctcagctgtcattcacagcaaaccaccctgtgccatgataacaatgtttattagctttggcccacctaattggaaaacatctttttgatttaaaacaccctacttctaagtattaatttgggacttcaaaggggccaaaaaaaccc

SEQ ID NO: 46830 - DNA, 567 bp, Homo Sapiens
caactgtagatcttctatgagaaagtggggaagtgaatgtaaaattttattcactacaaactgagttctttgttcctttattaagtcaaaatttctccaggaaaatttcatatttttatgaaacagcaagttttatgttctttattgttaaactctcacaactgataaaattatcccgaaatgacataaccaaaatgcttctcctctcattagtctaccatgactatgatatcttatgtaaatatgtgactaacaaaaaaaaaatgaatgggccataaatactgaggaccatatttgcgtgtttccaaagtgaggggttctgcgtcctatcaaggagatgtaaactactgactacactaccgatgatgctggctttttgctccattgccttttcaagtcttcaacgtaaaagagcaatcgcagttcggtttcacatgtattgttctataatccaggcaataaatgctaattagtaatgctcaaggatccgaccattcagagtaattatcataatttacttcttccttgttaaagacattccttgctgattagaaaaaaaaaaaaaaa

SEQ ID NO: 46831 - DNA, 1020 bp, Homo Sapiens
gaaagagtctccaaagtttaaaaaacctttgaaaaatatacagcttgatattatttacataaaatatgaatccaggttccaatatcaaacaaacattgctatgtcagaaacacagtggaaggcaggaacgtaactcactgccttttagatgcaaagactaatagacacgttctcctatctcgactatctttgttacctgttatcctcaaacataaattattaggcacctgagaggttggaagactaccgaaaatgaacttcataccttctgtatgattattatcttaaaaagttaccgcatttttaatctcttttataactttacttcatctacaactaacttcactttcattatcccaaatgatcaggtattaattacatgaactgttaatgtatacacagacctaaaaatcaaacaaaaatgtattgcccagttgtgtaggatatatatttgaaccccatgacatttcctagtgctttgtgagcaatccaaatttcacttaaaagagaggtgtcaattctgcccatgctctggactatgtttttaaaaaacatacaaaaaagactgacaataattgatctcttataaattaatcaagaaacctaagattaaaaattctaaattacaattttatttgtatttaaaaatacattggaaattctgcatattcccatgatcaaccttattttcaatgcacattacttaaattttgatgacacagttgattctgacaagtcctttttcaagctgaacaccaaaatagggaaactcctgtacatttccatgggccctgttcccattgatgtatactgcttccttactaacagtgagggatgactttcatcagttttttatcacctgaacagtcttccggccataatgatagtaactataagctgatgcagctgtggtgaaagctgtaaaacaccatagtatctgaagataaatgctgttagcatagttgataactggagckgcaaagaagctgbcaccagaatwactggactcygttttyacct

SEQ ID NO: 46832 - DNA, 912 bp, Homo Sapiens
cacgcgtacgaccacgcgtccggttctcgaagaggccagttgggctgaatctccttcctcccactggctcctgatatcttgctgtatttgtcttctttctgatttttccctaggggttggggtgggttgacttaggggccggcttttgtgttctccctctctctctctttctttctgtatgtatgtatggactggttaaagtgagttgggcagctgactttatggtatgggtggctgactttgttcaacattaaagacaaaccaacaaatgtacagctgcacacagaacaccttgagtgtgaacttgaatggcaactagaggcttacttttgaacttcaggtatgtaactcaacaagtaacataaaaacactatttttcagtaagcttttttattcttctaaaagatgacttagaaatcaaactataagaacatgaaatcggtgctgtaccaaagccttatatgaacatattctacactctgtataacctgtctgtgaggagctccctgctctatcaccctcttctcaaaagcctgggaatgccagcgcgtgccaagcctgggctgggtcttggggactgtgggacaagggcacctgggaagtaaagatgacggtgaggatgggggacaccctttcctggctggcctgagcagacctgcaaggaaacccagatgtgtgtggtgcgcgcacctgcatattatatggtgtgccatacctggtactagtgaggccatttacctgtgttaccccccataaatgaaacggaaaaagctcaacggtgcccaggcacgggatgactacgaacacctgaagggaggcagtggccgaacgagcagacgcaaaaggggaaacaccccggaccgccctcacccaggaagaggataacacaaacaacagagcacaccacaaaaa

SEQ ID NO: 46833 - DNA, 750 bp, Homo Sapiens
catcagcctgggctgcagcgcgctgccgccgcggggccggcagccatggccaaggacatcctgggtgaagcagggctacactttgatgaactgaacaagctgagggtgttggacccagaggttacccagcagaccatagagctgaaggaagagtgcaaagactttgtggacaaaattggccagtttcagaaaatagttggtggtttaattgagcttgttgatcaacttgcaaaagaagcagaaaatgaaaagatgaaggccatcggtgctcggaacttgctcaaatctatagcaaagcagagagaagctcaacagcagcaacttcaagccctaatagcagaaaagaaaatgcagctagaaaggtatcgggttgaatatgaagctttgtgtaaagtagaagcagaacaaaatgaatttattgaccaatttatttttcagaaatgaactgaaaatttcgcttttatagtaggaaggcaaaacaaaaaaaagcctctcaaaaccaaaaaaacctctgtagcattccagcggcttgaccaatgacctatgtcacaagaggtggcgtgtaaggaatgcagccccctgaagacagcactacaagtctgggggagccagttttaacatcagtgcacagctgctgctggtggccctgcagtgtacgttctcacctcttatgcttagttggaactaagcagtttgtaaactttcatccttttttttgtaaattcacaaagctttggaaggagaacaata

SEQ ID NO: 46834 - DNA, 689 bp, Homo Sapiens
  misc_feature (18)..(18): n is a, c, g, or t
  misc_feature (663)..(663): n is a, c, g, or t
ttaaattgtaaaccaggnctcagcagtctcacaacacatggaccagaggtgacacacagccatttcctttgccatgtggcccagttgctgctgccatgcctccatttccacactggatgcctacggcagtgagatttcactgccggggtaagagttcagcctggatgattttatagctctgttcctagcacttctcatcatccttccagcccagaatcagcggtcattctgcatattcccaccaaccctctacccccaaacacttcagtgtacctcattttaagagttgctgatccctgattctaggacgtttttacccatagttcttgtctttccaaaatctgaaattcttttttttgctcagaactgggtagccaagggttattttatttttatctttaaaataatcaaggcagtcgctagagtttctccttgtgaatagatcactctagcattttaatgaaaaagaaaaaaatctttctggggtatgttgtatcatagtaatggctcagtaaccacatattttgtcctttccatgtcactgattccttcatatgagactatttggcttgactaccctgtatattgtgtagaaatcaaagttcttatctgtacatttctggtccaatacctgtcttattagttgtccttccccactaaagnttgcaaaacagaaaaaaaaaaaaaaa

SEQ ID NO: 46835 - DNA, 977 bp, Homo Sapiens
gccaggaagctgagcagctgcgggagaaagctgggcagttggatgctgaggcggcctggactccgggagccccctgtgccacctgccaccgctgacccattcctcctggcagagagtgatgaggccaaagtgcagcgggcagcagccggggttgggggcagcttgcgggcccaggtggagcgattgcgggtggagctgcagcgggagcggcggcggggtgaggagcagcgggacagctttgagggggagcggctggcctggcaggcagagaaggagcaggtgatccgctaccagaagcagctgcagcacaactacatccagatgtaccggcgcaaccggcagctagagcaggagctgcagcagctcagcctggagctggaggcccgggagctcgctgaccttgggcctggccgagcaggcccccgtgcatctgcctggaggagatcactgctactgagatctagggccctcagcaaccagctctgtagggagctcttgccagaggggcagcagctgcagatccaacttaggcccagggtccacggatggcccaaaggctgagggcccaaagccacttgtctcctaggatccagggctctgggcttctgccaggaactcagggtggccctattgacttggaggaacaagatcagacgctcaaaagtccccgtgtacactggttacccagagggtcttggtaactaccaattattccgcacgtgccagtgtcatgcaacctgttcacggcgcttccagccactcaggccgggagccggccacgacggggtccctccttgagttgccccgggccaaggcggctacggcgatgtgccagcggtccggagtttgtcccatggtgtgaggcggctcggtgggtccgagtaggcggcgcactcgcgtgggcgggcgctcagaggccacgcgtgttgtgtggggcgccccgcgcggggggtttcggtgtttccacagaggtcgcc

SEQ ID NO: 46836 - DNA, 551 bp, Homo Sapiens
ttacaggtgtgagccactacgcccagcccccatggagctatttttatttaaaacacatacattataactctattgatctgattacaaaagtgcctattttgttaaaatgttttattgtgataaaaattcaaaaattattaatgttagccaacaaaattcaagcaaaacataaatgtgtaaagtaaaaagtgaaagatttttccttagtccctctcaccactcccattctccaagaataacttaatttggtgtgtgtcttcccagatgttgttctgtttgtgtttatatattaatatacacatatatacatatatgaatacccacacatttgtatataggttttttttaaatgaaatgggatattatatgtactgttttgcaacttttttcactttgcattgtattctggacctcctcttgcattaatacatggaaatttacctcatttaaaaaatgactgcataacatttcatggtatggttgtatcacaatttaatgattcacctattgatgcaaatttgtctccaatcattcactattataaataatgc

SEQ ID NO: 46837 - DNA, 621 bp, Homo Sapiens
tcctatctctcccccgccccccaccgccccaccacacacatatttttaaagtttttccttttttaagaatatttttgtaagaccaatacctgggatgagaagaatcctgagactgcctggaggtgaggtagaaaattagaaatacttcctaattcttctcaaggctgttggtaactttatttcagataattggagagtaaaatgttaaaacctgttgagaggaattgatggtttctgagaaatactaggtacattcatcctcacagattgcaaaggtgatttgggtgggggtttagtaattttctgcttaaaaaatgagtatcttgtaaccattacctatatgctaaatattcttgaacaattagtagatccagaaagaaaaaaaaaatatgctttctctgtgtgtgtacctgttgtatgtcctaaacttattagaaaattttatatacttttttacatgttggggggcagaaggtaaagccatgttttgacttggtgaaaatggggttgtcaaacagcccattaagctccctggtatttcaccttcctgtccatctctcccctccctccggtatacctttatccctttgaaagggtgcttgtacaatttgatatattttt

SEQ ID NO: 46838 - DNA, 546 bp, Homo Sapiens
ctgcagctggagagaaggccagtggaccacagctgtgcggcctctcaggctacctagcagcaaggcccaggtgaagccagggcagctgtgcagtgtggctggctggggttatgtctcaatgagcactttagcaaccacactgcaggaagtgttgctgacagtgcagaaggactgccagtgtgaacgtctcttccatggcaattacagcagagccactgagatttgtgtgggggatccaaagaagacacagaccggtttcaagggggactccggggggcccctcgtgtgtaaggacgtagcccaaggtattctctcctatggaaacaaaaaagggacacctccaggagtctacatcaaggtctcacacttcctgccctggataaagagaacaatgaagcgcctctaacagcaggcatgagactaaccttcctctgggcctgaccatctctgggacagaggcaagaatccccaaggggtgggcagtcggggttgcaggactgtaataaatggatctctggtgtaaatatgaaaaaaaaaaaaaaaaaa

SEQ ID NO: 46839 - DNA, 512 bp, Homo Sapiens
tttgatgctcagcagtttgcagggacctggctccttgtggctgtgggctccgcttgccgtttcctgcaggagcagggccaccgggccgaggccaccacactgcatgtggctccccagggcacagccatggctgtcagtaccttccgaaagctggatgggatctgctggcaggtgcgccagctctatggagacacaggggtcctcggccgcttcctgcttcaagcccgaggcgcccgaggggctgtgcacgtggttgtcgctgagaccgactaccagagtttcgctgtcctgtacctggagcgggcggggcagctgtcagtgaagctctacgcccgctcgctccctgtgagcgactcggtcctgagtgggtttgagcagcgggtccaggaggcccacctgactgaggaccagatcttctacttccccaagtacggcttctgcgaggctgcagaccagttccacgtcctggacgaagtgaggaggtgaggccggcacacagctccagtgctgag

SEQ ID NO: 46840 - DNA, 918 bp, Homo Sapiens
tccggagttcattaaaaattttctgccacatctaagaacattttggtgctagcctggcaaactatttgtgcttttacctgaattggaattttgaaaaggagagttttcacgttctgtaagcagaagtacaagatgggcatatcatgagacctccgttacaccgcagtgttagggattcaaggcagccgccaactgagaaaacgcctctgcttctccagaaaataacttgctctcttttcagcactgaatctcaactgaagcacttgccagaggcagccggttaagtgtttacctttaattttccataatataaagttgttgcgttttgtatttcagaccattgccctcttgaacatttaccgtaaccctcaaaactcttcccagtctgctgacggtttgcgctgtaagttcatacaagttccttccccggttccctgggcttgcgtgtcagagctcagtgtccactccatctggtctgccgtgctagtgtcaaggaccgcgtttcactagaggtggcaaggagctttcgtcccactgaccccatggaaacctcttttggagatttgaactcccaccgtgtgttaaaagggaaaaagtaactggaaagggtgccctttaaaacagtctagagctgggccgggcgcggtggctcacgcctgttatcccagcactttgggaggccgaggcgggtggatcatgaggtcaggagttcaagaccaatctggscaacatggtgaaaccccatctctactaaaagatacaaaaattagctgggcgtggtggcagawgcytgcaatcccagctctwrgggaggtgargsagaaatcscttgaaccgggagggggaggtgsagtaaatgaratstccgctsmmtccascttggcgaaaaattaaatcgtytcmaaaaaaaaaaaaaaa

SEQ ID NO: 46841 - DNA, 642 bp, Homo Sapiens
gtgcaacaaagcgagcttgcatcccaaaaaaaagcaaagaagcggaagcaaaagcaacgcaaatgagtgatgcattgaccgttcgtaattcttggatgcaaaagtagaacccaagctacttaataacaatcatggtggcatgggcaccagcaagtcagggtggacaacagccatagttctggagcatggtcctcaagactaccttttgtatgcagagtattaacactttaactcttagatccttggaacataaggaagagaggctggaacaaaaaggggttggcatttggaggtggagaggtagtgtaaggcacaactgtttatcaactggtatctaagtatttcaggccagacacgtggctcacacctctaatcccagcactttgggaggctgagccaggaggattgcttgagtctaggagttcaagaccggtctgggcaacatggtgaaaccctgtctctacaaaaaatacaaaaattagccaggtgtggtggggcacgcctatggtcccagctactggggaggctgagatgggaggatccacctgagcccttgggggtcgaggctgtagcgagtcatgattgcaccactgcactccagctgggtgataaagtgagaccctgtttaaaaaaaaaaaaaaa

SEQ ID NO: 46842 - DNA, 752 bp, Homo Sapiens
  misc_feature (637)..(637): n is a, c, g, or t
ccagactctaatacgactcactatagggaaagctggtacgcctgcaggtaccggtccggaattcccgggtcgacccacgcgtccggcccttcgcctgcgccgagtgtggcaaggccttccgccagcggcctacgctcacgcagcatctccgcgtacacacgggcgagaaaccctttgcctgccccgagtgtggccagcgcttcagccagcgcctcaagctcacgcgtcatcagaggacacacaccggcgaaaagccctaccactgcggtgagtgcggcctgggcttcacgcaggtctcgcggctcaccgagcaccagcgcatccacacgggcgaacggcccttcgcctgccccgagtgcggccagagctttcggcagcacgccaacctcacccagcaccggcgcatccacacgggtgaacggccctacgcatgccctgagtgtggcaaggccttccgccagcggcccacgctcacgcagcatctgcgcacccaccgacgagagaagcccttcgcctgccaggactgtggccgccgcttccaccagagcaccaagctcattcagcaccagcgcgtccacagcgccgagtagctccagccgggacgcactgtgtccgccatggtcagaacacctacctnccctggttatggtgaggctggcgattacataagtataagcaggtccgcccagggcttggctactgtaggtgtccaataaacagtagatggaaactggggaaaaaaaaaaaaaaaa

SEQ ID NO: 46843 - DNA, 946 bp, Homo Sapiens
gaaagggctagaaccatttcaaggagaggatagtcattgcttaagtacaaggattttgaagaaaacgaatgtggagattaggccactggactcagaaataaaatccagaataatgtaaaccacattctgaagctgtcactcatatctgagtctcaccttgtgttgcagatagtcgccatgtcctcagcacaggaacagatggctgtcttaatgtcattgatgtgcagacaggaatgctcatctcctccatgacatcagatgagccccagaggtatagtttgtgagttactgggggcgaagacatttacagacatgttcatgatcacttcatttgggcttacattggccagttcaacatatccttccttcatgatgaagaacggactatttctaaatcattcttgcaggtgctttgtctgggatggaaattccgttttatctggcagtcagtctggtgaactgctcgttgggacctccttggagcaaaaatcacgtgagagacatacagggccacacaggtaagcagctacttgcagttgccttgatctttgttctcaagataatgaactcaagcctgcctttttccatccagggaacatactctttaagggcaaaataaagccatggatttttccatggtcgtaaacatgttcctggagcctcttgatggacaagtgatctgcatctgtaggttactcagatgaacattatgttaccgcatggatccaaaagagagcttattcaatggagattaaagatcgaagcaaaatcctacaggacacccgcctaagtctagcactgaaacacacacgaaacaaatgtggcaaccagaaaaccaacacgaaggcggcacaagaacaggaagaaaaaggcggaaggacaccaaccgcgcacaccaacgcagaaacaaagcagccggacacaagcacgaaacccaggcccaacg

SEQ ID NO: 46844 - DNA, 871 bp, Homo Sapiens
  misc_feature (43)..(43): n is a, c, g, or t
  misc_feature (753)..(753): n is a, c, g, or t
  misc_feature (778)..(778): n is a, c, g, or t
  misc_feature (822)..(822): n is a, c, g, or t
  misc_feature (850)..(850): n is a, c, g, or t
acactgttagtttccggcaccaaagaaggcacagtgaatattntgggacctcacaacggccaccttaatgcaccagattccatgccattcagggattgtatgtgacactgcttttagcccagatagtcgccatgtcctcagcacaggaacagatggctgtcttaatgtcattgatgtgcagacaggaatgctcatctcctccatgacatcagatgagccccagaggtatagtttgtgagttactgggggcgaagacatttacagacatgttcatgatcacttcatttgggcttacattggccagttcaacatatccttccttcatgatgaagaaaggactatttctaaatcattcttgcaggtgctttgtctgggatggaaattccgttttatctggcagtcagtctggtgaactgctcgtttgggacctccttggagcaaaaatcagtgagagaatacagggccacacaggtgctgtgacatgtatatggatgaatgaacagtgtagcagtatcatcacaggaggggaagacagacaaattatattctggaaattgcagtattaagtgccttttcctctcctgaatattaaattgaactctatttaatgcatttttaaaccaaacttttaaacggactggtgaatgtgcaatgttagtaattagaagttttaccacatggaaaaatttgtgggttttaaactttctaaatcatggtgacttcattgaaagccattagttgccattctcttanggcagaaaaaatgcggctgtgttangaaaaacatgttacactgtaaaggcagatgatcgtccccatatngatgattgtcagaaagacagggactaangtagcagaagaatagcttaaa

SEQ ID NO: 46845 - DNA, 753 bp, Homo Sapiens
gggatatgtgagggagtagagacagagaggttagcactggataataattagtaaggccaaaggagaaaatttcatagaaaatattgttgttgtcataatgagtacagcatgaaaggcttcctctacaagacactagtcaaagagttgagagctgcggtttctaatctttgtccattactcccttactccctatgagactgtggacctgtcacttggcctctctggtcttcagttttctcaccagtaaaacaaggaacttgaaccaaatgacctctagtgttccccttgggtttaaatgtctataaatgttcaatgactagaatgtattgcgtttttctttattctttttgctttgagaaaagagaatgtgatttaagagtaataatttgaataccaattatccacattaaaattgtgtcctctatgtgtaaggcatagcacatttagcacacatacataagcacactaagcaccttacaaatatcctcatttattctttacataatcttttgaaattgattatgtaatacacactgtttttgaacaattggtgacttccagctgtttaaaacaaactacagtatggtgcttgagtactgacttaggaggtcagcattggtttcactaggagcttctcaaagcacgctgccaaacatgctccagtctcattgtcaaggccttagaccaggcaatcattacggcagtgggttcttcacttcagcagcagcaaaacgatctggccggggggcttgg

SEQ ID NO: 46846 - DNA, 571 bp, Homo Sapiens
  misc_feature (277)..(278): n is a, c, g, or t
agaccccacaccagggcaccctaagaggggaaaaaagtgaattcaaagcaaaaataactatttgactataatataggccacaaaaaatcttgatataactcctagttataattttgatgcaaccaagttattttttatatattttgttatttattcttttaataatggaatttttttaaaaagtattttgtaactgaggaattttgataatttggggattttgttttcccttggtctaatggagagaaagacattttggttttctttttccattttnngttccttttgtttcaggcacggataacagcaaatggaattctgtatttattattatttaagtgtagcgcagatgtgtgtgcttgggcgtgtttctcgtgtcgcgtttgcgtgtcggctcttgcggtggagtcctgttgctgtgagggagtgctggccgcaggcagcctcgagtcaccgccaggctcacaagctgtgccacccgtccctccgacagctccaatactgtgaccctccttcctcaggaagcgcgttgaacccacagcactccgtggtgtgtttgcagggtgatttc

SEQ ID NO: 46847 - DNA, 589 bp, Homo Sapiens
  misc_feature (539)..(539): n is a, c, g, or t
ggcctgggtggcgaattccgacgagggggtcagtgcatctcagtgacaaccaaggaaggtgggcatggctggagaggaggaaaaggaaggagccccaggtgtcagggcagtaggctgggagtcagtgtggcaaagcgggggcaggacacagatacagtggcaggggcccagggctgggacatgagagaaggcagcgaggcggcagagggagaagagaggactcaggtggaggtggggtgggtcagctgtcagcatccctcagaggagaaatgtggagagctggaggccagcagtcactcacactcgctctgtcctcctgtccagtggatacagccctgggcgctctgctggcccaaggatgtccccactgcccctccatggcctttggccttcttcccattcatatttatttatttattgacttttatgaagtttccccttccatccgatccctactgcccatgttgtcctgaccatccctcccagccatccagctgtctgtctgtctgccacaaggaaataaaaatggcaagcagcanataaaaaaaaaaaaaaaaaaaaaaaaaaaaaaaaaaaaaaaaaaaaaaaa

SEQ ID NO: 46848 - DNA, 663 bp, Homo Sapiens
gcgaattcggcacgaggctcctcaggcatgtggccgagtgctgccagtgaccgagactcacccgtgcccttgcggcctcctggcccggtgcagctgccctcagggacagggtgggtgctctcagatgccatgggttgagctctactgagagccaaggcccctagaatagttgcggggcactctgatcgttcactttggtccctttggctatggaacaggctgggtcacagggaactgccagtgaggctggaggctggaggtggagatggggtcaggaacatctggcagagggaggtcccagtctgtgtctccatcaggcttaagccagagctatctggtgctggtgtgccagcccctcccccagcctgcctagaaaggggtggctgcctgagggagtcacttgtatggtccccagggtgggagccccatcctgttctatggaataaagcgtcgcctctctgcctcgaaccagtcaaatggagtattgcggctgcacgtcacactagggtggccacccccgccattgcgagccacatgtctgcactgagaaactgcatttcagtagcatttgtcatccagccggaagttaaagcacacttactttattcacctatttttataataaacgttcttgctgctgtgaaaaaaaaaaaaaaaaaaaaa

SEQ ID NO: 46849 - DNA, 873 bp, Homo Sapiens
  misc_feature (728)..(729): n is a, c, g, or t
  misc_feature (761)..(761): n is a, c, g, or t
  misc_feature (767)..(767): n is a, c, g, or t
  misc_feature (777)..(777): n is a, c, g, or t
cctggagcccgcagcccccagggcctgggacgagatcctgaaggagctagacgagtgctacgagcgcttcagtcgcgagacagacggggcgcagaagcggcggatgctgcactgtgtgcagcgcgcgctgatccgcagccaggagctgggcgacgagaagatccagatcgtgagccagatggtggagctggtggagaaccgcacgcggcaggtggacagccacgtggagctgttcgaggcgcagcaggagctgggcgacacagcgggcaacagcggcaaggctggcgcggacaggcccaaaggcgaggcggcagcgcaggctgacaagcccaacagcaagcgctcacggcggcagcgcaacaacgagaaccgtgagaacgcgtccagcaaccacgaccacgacgacggcgcctcgggcacacccaaggagaagaaggccaagacctccaagaagaagaagcgctccaaggccaaggcggagcgagaggcgtcccctgccgacctccccatcgaccccaacgaacccacgtactgtctgtgcaaccaggtctcctatggggagatgatcggctgcgacaacgacgagtgccccatcgagtggttccacttctcgtgcgtggggctcaatcataaacccaagggcaagtggtactgtcccaagtgccggggggagaacgagaagaccatggacaaagccctggagaaatccaaaaaagagagggcttacnnacaggggtagtttgtggacagggcgcctgggntgtganggaggacaanataaaaaccgtggtattttattacattgggctgcccttttgttgaaaggtgccaaggaagtggtaaaaaatggtataattttttttaaaagaaatg

SEQ ID NO: 46850 - DNA, 546 bp, Homo Sapiens
ttttaagttgtcatgtgacagaaacttttcctttgtccatcgaggtgtttcataagttttttggtgtgttttctgggtcgtctatgtgtcatatggttttacttttctctcctttttcgttttcagaacatttttctgtctgttttggattcactgcttccattttacagaatgtcactctttagactctcagtccatcatgccatcgggtactcttgttgcagtgtaatttttattacatgcggttatttccctaacgatgtgctattcacgttcatcttcaaactcattttccatcagccagtgtctactatttagtgccctggctctatttcggtcctcctccccgggctttccctggctgctgtgctggccaaaagcatgggctttattctctccattggctgctgctccaccttagaggtgtgacctcactagcgttgactgagcgagtctgttgtggagaagaactttttgtagtaatttactaggaaaaattctgaacaagtaaaatatgaaggaaactctaaaaaaaaaaaaaaaaaa

SEQ ID NO: 46851 - DNA, 573 bp, Homo Sapiens
tctgtttattgaacctctttattaaacctctaacttactgataagatgtttatgaagtatggcatattttgatttttttaattgtaataaatattcttaaagttaccacatcccacaaaatggcccttggtggcagcaatagagcaaaggttacctttttgtatggtgaagggaggccttcctatggctgtacaattacatcgattcttccaaatttcatatttcatacatggcactttggcataccgaaaaaacatgaaatttttcattaaaatgccatgaatcaagccagggccgttggcttatgcctgtaatcccagcactttgcaggccgaggtagacagatggcttgagctcaggagttcgtgaccagcctgggcaaccctgtctctacaaaaaatacaaaaattaaccaggcatggtggcatgcacctgtagtcccagctacttggggtgctgaggcgggaggattacttgagcccaggaggattacttcaacctgggaggttgaggctgcagtgagctgtgtttcgccactgcacaccagcctgggtgacagtgtgagacccagcc

SEQ ID NO: 46852 - DNA, 1024 bp, Homo Sapiens
  misc_feature (712)..(712): n is a, c, g, or t
ctctccttaagtgatttcttctgttttctgtttccttttttaaacattagtgttcatagcttccaagagacatgctgactttcatttcttgaggtactctgcacatacgcaccacatctctatctggcctttgcatggagtgaccatagctccttctctcttacattgaatgtagagaatgtagccattgtagcagcttgtgttgtcacgcttcttcttttgagcaactttcttacactgaagaaaggcagaatgagtgcttcagaatgtgatttcctactaacctgttccttggataggctttttagtatagtatttttttttgtcattttctccatcaacaaccagggagactgcacctgatggaaaagatatatgactgcttcatgacattcctaaactatcttttttttattccacatctacgtttttggtggagtcccttttgcatcattgttttaaggatgataaaaaaaaataacaactagggacaatacagaacccattccatttatctttctacagggctgacattgtggcacattcttagagttaccacaccccatgagggaagctctaaatagccaacacccatctgttttttgtaaaaacagcatagcttatacatggacatgtctctgccttaacttttcctaactcccactctaggctattgtttgcatgtctacctacttttagccattatgcgagnaaagaaaaaaatgaccatagaaaatgccaccatgaggtgcccaaatttcaaataataattaacatttagttatatttataatttccagatgacaaagtatttcatcaaataacttcatttgatgttcccatgatcagaaagaatccctatctctatttttacagtaatttcaagagggccaataactttgtaaacagaaaaggtaactttgtcacagtcataactagtaattatgagagccctggtttcataacccagtctttctactcaaaatcctgtgatgtttgaaaataaccaattgtcctctccaaa

SEQ ID NO: 46853 - DNA, 627 bp, Homo Sapiens
cacgcgtccggggacatagaaggatctgaaacaggtctcctaaaatatatcaacagctcgtcaagattctctaaagtcctaagaaaaatctatgattggcaaagaggatttagattgcactaagaaacacaggaaggtccatgtttcattagtatatccaaaatgtcctcaaagtacaccaaatctaccccatgctgcagtctcctgaggagtgctgggtgaatctgctttgaatataacctagggcatttagttaataaagctccatataatcttatgcctgcttgttggattttgttttcttgttttttgtttttaattatctatgagagaaatgaattaacaagaacaacatagcatggagagttagttcatagtttataaaaccacatccctggccgggcgtggtggctcacacctgtaattccagaattttggaaggtagagaggcgagcgagcggatcacttgaggtcaggaattcgagaccaacctggccaacatggtgaaacaccctctctactaataacacaaaaattagctgggcttggtagcgcatgcctgtaatcccaactactagggaggctgaggcaggagaattgcttgaacgccggggtcggaggttgcag

SEQ ID NO: 46854 - DNA, 655 bp, Homo Sapiens
  misc_feature (572)..(572): n is a, c, g, or t
  misc_feature (608)..(608): n is a, c, g, or t
  misc_feature (625)..(625): n is a, c, g, or t
atttttagtagagacgggttcaccatgttgcccaggagggtctcgaactcctggcctcaagtgatccaccggcctcggcctcccaaagtgctgggatgacaggcatgaatcactgtgctcagccaccatctggagttttaaaaggctcccatgtgagtccctgtgatggccaggccaggggacccctgccagttctctgtggaagcaaggctggggtcttgggttcctgtatggtggaagctgggtgagccaaggacagggctggctcctctgcccccgctgacgcttcccttgccgttggctttggatgtctttgctgcagtcttctctctggctcaggtgtgggtgggaggggcccacaggaagctcagccttctcctcccaaggtttgagtccctccaaagggcagtgggtggaggaccgggagctttgggtgaccagccactcaaaggaactttctggtcccttcagtatcttcaaggtttggaaactgcaaatgtccccttgatggggaatccgtgtgtgtgtgtgtgtgtgtgtgtgtgtgtgtgtgtgtgtgtgttttctcctanacccgtgacctgagatgtgtgatttttagtcattanatggaagtgtctgccanaaaaaaaaaaaaaaaaaaaaaaaaacactt

SEQ ID NO: 46855 - DNA, 551 bp, Homo Sapiens
ttttttttttttttttttgaaaaagtcatggagggaaaaaagactgaagagggaaagttgctgaaacaacacttgataggccgtaagaagggatctgatgaacaaatggagaggctggctttaagtaggaatagaaacagtccaattccagtactaggaaggcagagtaatgggcaatgggggcaaagtagtggtggtggtggatggaaacaagtggaagttttctaattgctcccattttcccagcaaaataggaaacggggtcacataggacaatctctagtgcttgtaaatctaaggaaataaaaagacaaagatggtgataacataataatttgtgctgttgctcttcctaaaatgtgctctaatttttcagaatccgacctatccactaaagtccagctccagtctagcctgcttcaaagcatgatctctttttttcagttaaattcagattgtgtgaactattcatctggctcttggcatgttgattatctttaaaaaaaaaaaaaaaaaaaaaagcctacagccgcggccgctcccctcgtgcc

SEQ ID NO: 46856 - DNA, 496 bp, Homo Sapiens
ccgggacgtggtgcttcatcagcaccgggcgagggggcaacgggactagctcttcgcataactggggcaaccttttcttcgcctctgcctttgccttcctggggctcttggcgctgacagtcaccttttcctgcaacctggccaccattaaggccctggtgtcccgctgccgggccaaggccacggcatctcagtccagtgcccagtggggccgcatcacgaccgagacggccattcagcttatggggatcatgtgcgtgcgtgtcggtctgctggtctccgctcctgataatgatgttgaaaatgatcttcaatcagacatcagttgagcactgcaagacacacacggagaagcagaaagaatgcaacttcttcttaatagctgtcgcctggcttcactgaaccagatctggatcctgggttacctgctgtaagaaagatccttcttcgaaagtttgccagatgagaaaaagaagactcagagagcaagaggaat

SEQ ID NO: 46857 - DNA, 714 bp, Homo Sapiens
  misc_feature (604)..(604): n is a, c, g, or t
aggctggtaccggcccggagttccgggatatcggaaagctttaagggagataaaataaaaactcaggagtttccacaaattcttacactcattggcaggaacccagtaggatacccactggcctggcaatttctgaggaaaaactggaacaaacttgtacaaaagtttgaacttggctcatcttccatagcccacatggtaatgggtacaacaaatcaattctccacaagaacacggcttgaagaggtaaaaggattcttcagctctttgaaagaaaatggttctcagctccgttgtgtccaacagacaattgaaaccattgaagaaaacatcggttggatggataagaattttgataaaatcagagtgtggctgcaaagtgaaaagcttgaacgtatgtaaaaattcctcccttgcccggttcctgttatctctaatcaccaacatttgttgagtgtattttcaaactagagatggctgttttggctccaactggagatacttttttcccttcaactcattttttgactatccctgtgaaaagaatagctgttagtttttcatgaatgggctttttcatgaatgggctatcgctaccatgtgntttgttcatcacaggtgttgccctgcaacgtaaacccaagtgttgggttccctgccacagaagaataaagtaccttattcttctcaaaaaaaaaaaaaaaaaaaaaaaag

SEQ ID NO: 46858 - DNA, 621 bp, Homo Sapiens
gtgttctggtggcatgtgtggttgaggagacatttaatttccctgcagcagaattcttgcagtcagttgttgaggcaagtggcgtggtggatgcaaccctgattcttcacctttctcattattgtggggtagcagcgcctctggcaagccagacagacctgcagtgtttttctgggagttaattctggagacccagtatggaacccactcctagcccttgtgacaatattgcaagcatccagttccctgttttacagtccttttaaatgtggctagctacagtagtttgtgtttcctgcaactaatcactcatacatctgtatctaaagcactccacctgggtcatgtactatacttaaaattataaggcaatattaattcacaaaactacctactcgttttatttaaccctcagaagaactgaaaacaaaagctataccaggcttgctctagagcgtgggcttgggaatggaaaggcagagtgcacctattgaattccatcatcagtttttctataccatggagttacttaccatgtgtatacataacactgattaaaaattttaaaaaaaaggttaaaacaaaaactgagccagattctgacatttaaatcagaattat

SEQ ID NO: 46859 - DNA, 393 bp, Homo Sapiens
  misc_feature (197)..(197): n is a, c, g, or t
  misc_feature (297)..(297): n is a, c, g, or t
  misc_feature (322)..(322): n is a, c, g, or t
  misc_feature (350)..(350): n is a, c, g, or t
tctgtactatcatttactcggtaggctgaggtggtaggatagcttaaactctcgggctagagactgcaggaacatgtgaatacgctagtgcaattccagcctgggcaacactggaaagggtaggaagagtagtctttgggtccctaaagatcacctgataacaagtttgacttttctgagcactcttgtggagtttnttgtggagggaataccatgggcattggcaatgtaaagttgatctaaaaaatctcgttttccgccgtggcggtggctcacggctctaatcccatcactttnggaggccgagacgggcggatcacgnaggtcaggaggtcgagaccatcctgggntaacaactgtgaaaccctgtctcctacttaaaaaaataccaac

SEQ ID NO: 46860 - DNA, 503 bp, Homo Sapiens
taaaataattcttttctaggtatttctgattgcaaaattctggatgggttcatccaagctgacctttgctgttttttcccttcccaacaaggcctcactttttggagccaccttagctggtgcctaggcagaggggcagtcagcagtggttatcaggatcctggctctatgggttgccttcctcctggtctgtaaagcccctgcaggcagggacttcttagatagctgcttccttagggcatggcatgtagtgggtggttaatgaatggaagagagggaatgagtgatcaagggagggaggagggagtggagtggagatttctcatcctttcctgttaatttatgacatcctcctgcctatgagtccttgactctggagttttacaaagcagtcacatttcaaataaaagtctgggaaagcaacacatcatcgccaacttttaattttgctaaataaggatattagaaaaagaatagaaaattgcagtcccttactgtttaaa

SEQ ID NO: 46861 - DNA, 440 bp, Homo Sapiens
aaaaaaaggttgttgctgtagcccatgctgtttatcaagcaatgctcagcttgaagaatattcctgttttggagactgcctataagttaatattgggagaaatgacttgtgccctaaacaacctcctgcacagtctgcaacttcctgaggcctgttctgaaataaaacatgaggcttttaagaatcatgtgttcaatgtagacaatgcaaaatttgtagttaaatttgacctcagtgccctgactacaattggaaatgccaaaaactcgagtctttaattgtaatgactttgttttatccacagttaagccttttctcattacatatttatgtatttcactgtcatgtcaacatgtctgcagaatcactgtatgtaacaaacagccatatttaagacatgcctggataaataaaattggtaggaatgttttcttgccctt

SEQ ID NO: 46862 - DNA, 401 bp, Homo Sapiens
  misc_feature (376)..(377): n is a, c, g, or t
ctcagcctccaaagaagccagcctctccccagttcctgaaatcctgggtgttgcctgccagtcgccatgagaacttcctaccttctgctgtttactctctgcttacttttgtctgagatggcctcaggtggtaactttctcacaggccttggccacagatctgatcattacaattgcgtcagcagtggagggcaatgtctctattctgcctgcccgatctttaccaaaattcaaggcacctgttacagagggaaggccaagtgctgcaagtgagctgggagtgaccagaagaaatgacgcagaagtgaaatgaactttttataagcattcttttaataaaggaaaattgcttttgaagtatacctcctttgggccnnaaaaaaaaaaaaaaaaaaaaaaag

SEQ ID NO: 46863 - DNA, 725 bp, Homo Sapiens
  misc_feature (674)..(674): n is a, c, g, or t
tgagaaaatgagctctcctgctttgtaacagcttgtggctcagggaaaaaaatgacagccattgcacaagtttcctttgaatgtagttttctttcccataaatgatactttgagaatacagttaaggggttattagttttctatttcatgcttggcctgtgtgtgagaataacacaagctgtcactgcaaatcagtagctaaaaatgctttgtctggttaatgtgaacatttaatatttggctcaattaaaaattaaccgatgaaagtacatgtcattggaatttgaaaataccttttgtacggaatacttaaagggcatcacccatgactaaaccagtgcttttaaaatatggagaatatggggaaatttaatatgagttgggatacttgactctttttttaaaacctctctacctgtttggcacaacagggtattgataaagagtgggctcattgttatggcaaaggattcacttgcatctctgtgtttttaagtgggtaattgtttttttgcactcagtcacatgattaaagcagacagaacaagagatcagttattcatttataccatacttttaaaaaaatattgagccaggccctggggaagtgggaagtgagagccagagcggcgtggctgatagtctagggcagtgctatccaatcttttggcttncctgggccacattggaagaagaagaattgtcttgggccacacgtaaaatat

SEQ ID NO: 46864 - DNA, 610 bp, Homo Sapiens
gtgtctacgatgtggcctctccctgacaaggatttaattttgaatttttctttatggcgtgggagaggccacagcccggactccatcgactcccccggctcttagactaaaatcatgcccaagttcaaacaacgaagacgaaagctaaaagccaaagccgaaagattattcaaaaaaaaagaagcctctcactttcagtccaggctggtcttgaactcctcacctcaggtgatccacccatctcagcctcccaaagtgctgagattacaggcgtgagccaccacgcccggccagagatccacatctatatttataacacatttatggatgaaaattaaacaggtgtccgggtgcggttactcatgcctgtaatccgagcacttgtggaggccgaggcaggcggattacttgaggtcaggacttcgaaaccagcctggccaacatggtgaaatcccatctctactaaaaatacaaaattagccaggtgtggtgtcacgcacctgtagtcccagttacttgaacctgggaggcagaggttgcagtgagccgagattgcaacactgccactccagcctgggtgacagagcaagagaccctgtctcaaaaaaaa

SEQ ID NO: 46865 - DNA, 723 bp, Homo Sapiens
cgcgtccgcaactttcaatcttcagatgtttcgttgaatctatttagagcttcaccatggcaatatgtatttcccttaaaacactgcaaacaaatatactaggagtgtgcccttttaatctttactagttattgtgagattgctgtgtaagctaataaacacatttgtaaatacattgtttgcaggacgaaaacttctgagttacagctcaggaaaagcctgctgaatttatgttgtaagcattacttaacacagtataaagatgaaaagacaacaaaaatatcttcatacttcctcatcccctcattggaacaaaaccttaaactgggagaaccttagtcccctctctttcctcttcctcctccacttcccacttattgtcaccttgtaatattcagagagcacttggattatggatctgaatagagaaatgcttacagataatcattagcccacataccagtaacttatacttaaagatgggatggagttgtaaagtgcttttataatacaatataattgttaaaggcaagggttgactctttgttttattttgacatggcatgtcctgaaataaatattgattcaatatggcagatgggtcatattctttatttggaagaagttgtgacttctgacatgggtggggattgtcttcctacactggtgcatttgattctttttatggatttttaagaaagtaaccagttatactgcttttaa

SEQ ID NO: 46866 - DNA, 586 bp, Homo Sapiens
cagctttcaggatagaagaagttcccctcagaggcccactgcctcccaaatgctccttaaccaggcttagatctgaatcgattttctgcctcccgaggctccatcaaaaaaagttcagtaggtgtagactttccactgcagcgactgagcctaggggactttgccagtgacaaagccggaagtcctgtataccagctgtatgccctttgcaaccactcaggcagcgtccactatggccactacacagccctgtgccggtgccagactggttggcatgtctacaatgactctcgtgtctcccctgtcagtgaaaaccaggtggcatccagcgagggctacgtgctgttctaccaactgatgcaggagccaccccggtgcctgtgacacctctaagctctggcacctgtgaagccctttaaacacccttaagccccaggctccccgtttacctcagagacgtctatttttgtgtctttttaatcggggaggggggagggggtggttgtagctccattattttttttattaaaaaatacccttccacctggaggctcccttgtctcccagccccatgtacaaagctcac

SEQ ID NO: 46867 - DNA, 528 bp, Homo Sapiens
ctgatataaacagtgggatcccaggaattgatgaggtcatgaagactaccaaaatcatcattgggtgttttgtggccatcacactcatggctgcagtgatgctggtcattttctacaagatgaggaagcagcaccatcggcaaaaccatcacgccccaacaaggactgttgaaattattaatgtggatgatgagattacgggagacacacccatggaaagccacctgcccatgcctgctatcgagcatgagcacctaaatcactataactcatacaaatctcccttcaaccacacaacaacagttaacacaataaattcaatacacagttcagtgcatgaaccgttattgatccgaatgaactctaaagacaatgtacaagagactcaaatctaaaacatttacagagttacaaaaaacaatcaaaaaaaaagacagtttattaaaaatgacacaaatgactgggctaaatctactgtttcaaaaaagtgtctttacaaaaaaacaaaaaaaaaaaaaaaaaacgcgg

SEQ ID NO: 46868 - DNA, 662 bp, Homo Sapiens
agcagatgaagatgtatttcgtaaacctggcttgcctcctcctgcatctaaacctttgagacctaccactaagatttttagctcaaagagtacttcacgaattgctggtctttctaaatctttggaaacttcttcagcactttcaccgtctctaaaaaataagtcaaaggggatacagtcgattttgaaagtaccacagccagttcccctcatagctcagaagccagttggtgaaatgaagaattcgtgcaatgttcttcatcctcagtctccgaataattccaacaggcaaggttgcaaagttccatttggtgaaagcaaatattttccatcttcctctccagtaaacattcttttgtcatcacagtctgtctctgacaccttcgttaaagaggtcttaaaatggaaatatgaaatgtttttgaactttggtcagtgtgggccccctgcaagtctttgtcagtccatctcaagacctgtgcctgtcagatttcacaattatggagattattttaatgtttttttccctttgatggtattgaatacttttgaaacagtggcacaagaatggctcaactctccaaatagagagaatttctatcagttgcaagtacgaaaatttcctgccgattatataaaatactgggagtttgcagtttatc

SEQ ID NO: 46869 - DNA, 1041 bp, Homo Sapiens
ctctttttcagtgacctaaaaatggcttatttccgaggaatgaaaggctgccatcgttggctgtggatgtggaaaacctttcctagcttagagcatttgtatctacaatacattttaaagtcagagttcgtgttccctgttttaatcacatgactacctgtcccagtacacgaaagggcgctggttggcattcttcttaatgtatttagtaaagatcataagacatcctttaagagtttaaatgtctctgaaacaggcatacaggctctagtcaagaatgaattagagtgaaggaaagctgtgtgacacctggcattcctctctgttcatggagcttctttgaggcttgaagtttgattttactatctagacctctctggctaatacctattcttcaaccacctcggttactctgacataggaatttacttcttttccttgagtggaaaacactttagaaaataataacaaacattattataaactaatatatgtgagagtacttagttgaaacaaaaaggaattttagtagacagtattatattatctttgaaaatcaaggagaagtttatgcaactgaaaatgtttacacactgtgctgcaatctactgtttgtgaatgtcagtgtattatcaggaaacatgtctatacgatcgcagagttgtatttcctcacaaacttctttacgaagagtgaaatacgtttttgtacctctcagtttcagtcagggacatattttgtgcaatatttctgtgattgtgcctatgcgtgatgaatgaatgcatttcaatcatacattgcctaaatcataacttgatgatgcttgggaaagaatcaacagttaaaacttcatgaagttctaatgtctgtgttccaaaacacatcacattattaggktgtagggacatacgtrgkgtgctccctggggtggggrgtttctagttactaracmtctccattttwagcacttggsagctcmtgatmcttttataaaaggrrwtaamagggagcagcawacgattttgccatggaawaamaatt

SEQ ID NO: 46870 - DNA, 665 bp, Homo Sapiens
cacctacagcttggtgactgttcacaaattgaactcatctaactagcctccagaataagaaacaggcctttatacagcccccaccagcctcccaatccccttttcagtcaccttctctgcagtgataaccactattctatattctgacagcatagtttcacttgttcttttaacttcacataaatgggatcagacagtattgaatcctttgtgtctgcttccttcactcaatattttcctgagatttttctatattgtttattctaaatgcccattgtacgactgtaacacaatttgtttatccattttactgttcttgggcatttgggtagttctcactgtggatgctaagaagagtgttgctataaacattcaggtctttaggtaagcatatacctggctttctgttggctatttatacctagaaatagagttgctggcttataaggtatgcatatttttagtgtcttagtagacattgcagtttgtaccaatttacccacccaccaatgtgaatatctaatattgcctgcctgtctgtcacgtgtgtactggtatagcattgtggtattaatttgcattttccagtgcctaatgaaataaagcaccttttactatgaacaaaaacaagaaaaataaaacaaaacgagaagaaatgaaaacat

SEQ ID NO: 46871 - DNA, 836 bp, Homo Sapiens
gccaccccagcagccctacatcgcggggcagcagcccatgtaccagcagatggcaccctctggcggtcccccccagcagcagccccccgtggcccagcaaccgcaggcacaggggccgccggcacagggcagcgaggcccagctcatttcattcgactgacccaggccatgctcacgtccggagtaacactacatacagttcacctgaaacgcctcgtctctaactgccgtcgtcctgcctccctgtcctctactgccggtagtgtcccttctctgcgagtgagggggggccttcaccccaagcccacctcccttgtcctcagcctactgcagtccctgagttagtctctgctttctttccccagggctgggccatggggagggaaggactttctcccaggggaagcccccagccctgtgggtcatggtctgtgagaggtggcaggaatggggaccctcaccccccaagcagcctgtgccctctggccgcactgtgagctggctgtggtgtctgggtgtggcctggggctccctctgcaggggcctctctcggcagccacagccaagggtggaggcttcaggtctccagcttctctgcttctcagctgccatctccagtgccccagaatggtacagcgataataaaacgtgtactttccagaacagacccaagagccgctcaaccacacacggcccaacacagccacacgagcacccaacccacagacagcacaagagagcaacggcacgcacacacacaaccaccgcgcacacaccagcgccagacacacaccgacgcggagagcggcggcaccccacaccgacacgcaggccgc

SEQ ID NO: 46872 - DNA, 908 bp, Homo Sapiens
tgccctgctggatttcagacttgcatggggcctttagccacttcgttttggccaacttctcccacttgaaatgggtgtatttagccaatgcctgtacctccgttgtatctaggaagtaactaactagcctttgattttacaggctcatacgtggaagggacttgccttgtttcagatgagactttggagtatggacttttgacttaatgctgaaatgagttaagactttgggggactgttgggaaggcatgattgatttttaaatgagaggacatgagatttgggaggggccagggagagaatgatatggtttggctgtgtccccatccaaatatcaccttaaattgtagctcccataattgtgggagggacctggtgggagataattgaatcataggggcagtttctcccatactgttctggtggtagtgaataagtctcacgagatctgatggtttaataaggggtttccccttttgcttggctctcattctctcttgtctgctgccatgtaagatgtgccttttgccttccaccatgattgtgagggctcccagccacatgggaactgtgagttcattaaacctcttttttcttcctaaattaccccagtctcgggtatggctttatccagcagtgggaaaacggactaatacacccactccctctaccttcgcttattttccccatggtggaaaaagccctgaatgaaacctttgggggccctccccgaatgcacaacgtcaaggggcgggtgcctatcactttatcctacccacctccggtgacctttgaacaaaaccgcctttaaccctggccaaggcctctggttgtccccctaaggcgcaaaaggggggataataatgggccaacctcccccagggggggtggtacaaaattactaaccc

SEQ ID NO: 46873 - DNA, 588 bp, Homo Sapiens
ccgtcgaccccgcgtccgcccacgcgtccgcaaaaggacatccaagagcagtgtcccagcctttagattaagttcatccctgcaaggatctgcagttactttgaagacatcaaaaatggcactgtccccttcagcaacggccaagaggatcaacagaacttctttgtcttcgggtgccactgtaagaagcttttccataaactcccggctagccagttctctagggaacttgaatgctgcaacagatgatccagagaacaaaaagacctcctcatcctctaaggcaggcttcacagccagcccgtttaccaacctcttgaatggcagctcccagccaactaccagaaattaccctgagctcaacaataatcagtacaacagaagcagcaacagcaacgggggcaacctgaacagccccccaggcccccacagcgccaagacagaggagcacaccaccatcctccgaccctcctacaccgggctttcttcttcttcagcgagattcctgagccgttctatcccttcccttcagtctgaatatgttcattactaaggccttgccactccagtgaaagctgttcttctctt

SEQ ID NO: 46874 - DNA, 757 bp, Homo Sapiens
  misc_feature (593)..(593): n is a, c, g, or t
  misc_feature (675)..(675): n is a, c, g, or t
  misc_feature (722)..(722): n is a, c, g, or t
gggagaattttttttttttgagagggagtttcattcttgttgcccaggctggagtgcagtgacgcgatttcagcccaccgcaacctccacctccagggttcaaatgattctcctgcctcagcctcccgagtagctgggattacaggcgcccaccaccacacccagctaattttgtatttttagtagagacggggtttctccatgttggtcaggcagtctcaaactccccacctcaggtgatccacccgcgtcggcctcccaaagtgctgggattacaggcatgagccacctcacccagcctacatacaattttaaccctttaaagcttatatataagccaaactcagaaatgaacattaagatctgataaatgtcttaaaatcgctttccaaaaggattgaacacccttacccgatatataaatgagaaaacatttcactgtacagtctcaggcaataattataggaaaaatagctcactgcagttttaatttgcatgattaagactgatcattttttcatgtttctttacgtttatgtattttaattttttctgcacacataatgcttattgtaaaaactccaaacttcacnactatttgagagtgctcaaagtgaaagcctcctgtaatctttacacccagagggatctacagttaattatttgttatatatntcccccaaacttttttctacacaatattttaacgaaaaatgttacangttatacaccactttttggaatataaatttagtaa

SEQ ID NO: 46875 - DNA, 1075 bp, Homo Sapiens
ggtggcgatttcggcacgaggctgctctctctcccggtttcagatccgcatttgctaccagcggcggccgcggcggagccaggccggtcctcagcgcccagcaccgccgctcccggcaacccggagcgcgcaccgcaggccggcggccgagctcgcgcatcccagccatcactcttccacctgctccttagagaagggaagatgagtgagtcgagctcgaagtccagccagcccttggcctccaagcaggaaaaggacggcactgagaagcggggccggggcaggccgcgcaagcagcctccggtgagtcccgggacagcgctggtagggagtcagaaggagcccagcgaagtgccaacacctaagagacctcggggccgaccaaagggaagcaaaaaaaactggagaaggaggaagaggagggcatctcgcaggagtcctcggaggaggagcagtgacccatgcgtgccgcctgctcctcactggaggagcagcttccttctgggactggacagctttgctccgctcccaccgcccccgccccttccccaggcccaccatcaccaccgcctctggccgccacccccatcttccacctgtgccctcaccaccacactacacaggcacaccagccgctgcaggggctcccatgggcctgagtggggagcaagttttccccctgggctcggttcccagctcccgcggcccaccacggataaacccttgccctcttgggacaggctaacatcccactttaccccaccccgcacctggtggcgtcccccctccctgggggggggggggagcttgctcccctggggcttttggttgggggggcgcccgcctccgctcccttcgttgatcccccctgggcctccccatagggggccccgtggccaggctcccctgtggccgaggagggggggcgggccccctcgggtttctgacgccccgcttattgccccgtcccggggcaacccaaaagagcgcacccaacggcgtgcgcgggggcgcgccgcgggacccgcgacgccatgcgcccccaggacgcgtcgtaccacccccgcccgcgcag

SEQ ID NO: 46876 - DNA, 549 bp, Homo Sapiens
gacggtgcctgcaggccctgcagcgacgctgagctgctcctggccgcatgcaccagcgacttcggtgagtgtccccgccatggggggagcctggagcctgccttcccctgaatgcctaccgcagccacatgcctccccacagtaattcacgggatcatccatggggtcacccatgacgtggagctgcaggagtctgtcatcactgtggtggccgcccgtgtcctccgccagacaccgccgctgttccaggcggggcgatccggggaccaggggctgacctccattcgtaccccactgcgctgtggcgtccacccgggcccaggcaccttcctcttcatgggctggagccgctttggggaggcccggctgggctgtgccccacgattccaggagttccgccgtgcctacgaggctgcccgtgctgcccacctccacccctgcgaggtggcgctgcactgaggggctgggtgctggggaggggctggtaggagggagggtgggggccactgctttggaggtgatgggactatcaataagaactctgttcac

SEQ ID NO: 46877 - DNA, 1077 bp, Homo Sapiens
  misc_feature (654)..(655): n is a, c, g, or t
  misc_feature (657)..(658): n is a, c, g, or t
  misc_feature (660)..(660): n is a, c, g, or t
  misc_feature (662)..(673): n is a, c, g, or t
  misc_feature (676)..(676): n is a, c, g, or t
  misc_feature (679)..(679): n is a, c, g, or t
  misc_feature (701)..(701): n is a, c, g, or t
  misc_feature (722)..(722): n is a, c, g, or t
  misc_feature (745)..(745): n is a, c, g, or t
caccatccactgcaacacaccaagcctcctgcagttgcggtcggccctcctccacgctgacttccgggtctcactctcccacgcctgtaagaacgctgtgaagacggatgcccctgcctctgccctctgggacatcatgcgttgctgggagaaggaatgtccggtgaaacgggagcgactatcagagactagcccagcgttccgcattctcagtgtggagcccaggctgcaggccaacttcaccatccgggaagatgccaaccccagctcccgacagcgaggactcaagcgcttccaggctaacccggaggccaactggggtccccggcctcgtgcccggccagggggcaaggcggccgacgaagctatggaggagagacgcaggctgcttcagaacaagcggaaggagccgccggaagatgtggcccagcgggctgcccggctcaagacatttccttgcaagaggtttaaggagggcacctgtcaacgcggggaccagtgctgctactcccacagccccccgacacccagggtttctgctgatgctgcccctgactgtccagagacctccaaccagaccccccctggacctggggctgccgctgggccaggcatagactgaaccaataaagagatgtcacgtcaccttcaaannannanannnnnnnnnnnnaanaanaaaaaaaaaaaaaaaaaaaaanaaaaaaaaaaaaaaaaaaaanaaaaaaaaaaaaaaaaaaaaaanaaaaagggggggcccgccccaaagtatccccccaggggggccagctttaccgcgtccccgctttttttggtacaaggggggcccccaaagggggggccgtattttaacacttaggcccctgggccccccttttttccaacgcctcgggcttgggaaaaaccgtcacactttggggtatattttgtgggaggggaacccctcctcttggggggcgggacaaaatatcgtggacaacctcccctcccaggagattttacacgccctccaggggacaaaaataaaagccttcttgggtcgtaataatgtggcgcacaacatggcgtgcttattgg

SEQ ID NO: 46878 - DNA, 509 bp, Homo Sapiens
gggatgccgcccaggacgtggcggcaggggaggacgaggtggacgtgggcgtggtgggcgcccaaaccgtggcagcaggaccgacaagtcaagtgcttctgctcctgatgtggatgacccagaggcattcccagctctggcttaactggatgccataagacaaccctggttcctttgtgaacccttctgttcaaagcttttgcatgcttaaggattccaaacgactaagaaattaaaaaaaaaaagactgtcattcataccattcacacctaaagactgaattttatctgttttaaaaatgaacttctcccgctacacagaagtaacaaatatggtagtcagttttgtatttagaaatgtattggtagcagggatgttttcataattttcagagattatgcattcttcatgaatacttttgtattgctgcttgcaaatatgcatttccaaacttgaaatataggtgtgaacagtgtgtaccagtaaaaaaaaaaaaaaaaaaaaaaaag

SEQ ID NO: 46879 - DNA, 787 bp, Homo Sapiens
  misc_feature (734)..(734): n is a, c, g, or t
  misc_feature (779)..(780): n is a, c, g, or t
  misc_feature (787)..(787): n is a, c, g, or t
aacagcggtcggtccgattcccgggatggaagtctgtcattaataaggtatttctaaataaacacattatgtaaggaagtgccaaaatagttatcaatgtgagactcttaggaaactaactagatctcaattgagagcacataacaatagatgataccaaatactttttgtttttaacacagctatccagtaaggctatcatgatgtgtgctaaaattttatttacttgaattttgaaaactgagctgtgttagggattaaactataattctgttcttaaaagaaaatttatctgcaaatgtgcaagttctgagatattagctaatgaattagttgtttggggttacttctttgtttctaagtataagaatgtgaagaatatttgaaaactcaatgaaataattctcagctgccaaatgttgcactcttttatatattctttttccacttttgatctatttatatatatgtatgtgtttttaaaatatgtgtatattttatcagatttggttttgccttaaatattatccccaattgcttcagtcattcatttgttcagtatatatattttgaattctagttttcataatctattagaagatggggatataaaagaagtataaggcaatcatatattcattcaaaagatatttatttagcaactgctatgtgcctttcgttgttccagatatgcagagacaatgataaataaaacatataatctcttccataanggtattattttttaatcagggagatacacctatcagatgtttaannatacacn

SEQ ID NO: 46880 - DNA, 726 bp, Homo Sapiens
cgcaacatcaaggaggctcgtgagaagctggagatggagatggaagctgcacgccatgagcaccaggtcatgctaatgagacaggatttgatgaggcgccaagaagaacttcggaggatggaagagctgcacaaccaagaggtgcaaaaacgaaagcaactggagctcaggcaggaggaagagcgcaggcgccgtgaagaagagatgcggcggcagcaagaagaaatgatgcggcgacagcaggaaggattcaagggaaccttccctgatgcgagagagcaggagattcggatgggtcagatggctatgggaggtgctatgggcataaacaacagaggtgccatgccccctgctcctgtgccagctggtaccccagctcctccaggacctgccactatgatgccggatggaactttgggattgaccccaccaacaactgaacgctttggtcaggctgctacaatggaaggaattggggcaattggtggaactcctcctgcattcaaccgtgcagctcctggagctgaatttgccccaaacaaacgtcgccgatactaataagttgcagtgtctagtttctcaaaacccttaaaagaaggaccctttttggactagccagaattctaccctggaaaagtgttagggattccttccaatagttagatctaccctgcctgtactactctagggagtatgctggaggcagagggcaagggaggggtggta

SEQ ID NO: 46881 - DNA, 676 bp, Homo Sapiens
  misc_feature (532)..(532): n is a, c, g, or t
  misc_feature (585)..(585): n is a, c, g, or t
  misc_feature (645)..(645): n is a, c, g, or t
cgggcaagccgactcacagtcctgagagaatatgcctacgatgtcccaacgagcgtggaaggaagcgtgcagaacggcttacctaaaagccggctgggcaataacgaaggacactcgaggagccgaagagcttatttagcctacagagagagacagtacaacccaccccagcaagacagcagcgatgcttgtagcacacttcccaaaagtagcagaaattttgaaaagccagtttcaaccactagtaaaaaagatgcgttaaggaagccagctgtggttgaacttgaaaatcagcaaaaatcttatggcctcaacttggccattcagaatggaccaattaaaagcaatgggcaggagggacccttgctcggtaccgatagcactggcaatgttaggactggattatggaaacacgaaactactgtgtaacattgctgggcttcctaggcagaaattcatataaactgtgatactcacattccttgaagctatgagcatttaaaaactgtttacagccaccatagggattcanaagaatttggaataaactttgaagttttggattttacttatttttatccccanattgttgctattttttaggatctgaaacaaatctttctaaaacattgttttagttgtcanagcaccaacaggacattttgggatgtgaaat

SEQ ID NO: 46882 - DNA, 491 bp, Homo Sapiens
  misc_feature (469)..(469): n is a, c, g, or t
tttttttttttttctcaaaaacttaggctctccgagggattggtggaggctgtggtacagtgagggagcagagttctctgccacgttggaaatcagcctcagacaggagcaggccttgggttccctatggtggtggaggcgagctgagagatgttgaggcagtgagagcgattgatagactgctacccagcattggagagatgactctctagatgtcctgggctggcattctagcttctgacatgccagtcaaacccatagattcacacgcctgaagggaccatcagtggtaagatttatcctcctgacttcagacaaagccacatccaagccatctcaggcatttaaggatctatcctatttttgaagtctccaaaaaggatcccttggtctctcagtttaatgtcataaactctgtaagtcaggaaatttaactttagagcaagctcagattctttctatggttcanagacccctcgtgccgaattctt

SEQ ID NO: 46883 - DNA, 632 bp, Homo Sapiens
gaagaatttcataggagactaaaagtgtatcatgcttggaaatctaagaacaagaagagaaatactgaaacagagcaacgtgctccaaagtctgttactgattatgctcagcaaaacccagcagctcagattcctgccaggcagcgggagattgaaatgaaccgacagcaacgcttcttccgcatcccattcatccgccctgccgaccagtacaaagaccctcagagtaagaaaaaaggctggtggtatgcccattttgatggaccatggattgcccggcaaatggaactccatcctgacaagccacccatcctacttgtggctggtaaggacgacatggagatgtgtgagctgaatcttgaggagactggcctgactcggaagcgtggtgctgagatcttgccaagacagtttgaagaaatctgggaacgctgtggaggcatccagtaccttcagaatgcgattgagagcagacaggctcggcccacctatgcaacagccatgctgcagagtctgttaaagtagatgttgcacactagccttacagctgggagcctttgccatggtacttaggtagggtgtgtgcccccagatttaaccattccataatcatgttagagttacttctataa

SEQ ID NO: 46884 - DNA, 880 bp, Homo Sapiens
  misc_feature (675)..(675): n is a, c, g, or t
  misc_feature (841)..(861): n is a, c, g, or t
  misc_feature (865)..(867): n is a, c, g, or t
  misc_feature (869)..(874): n is a, c, g, or t
atttccgggatgacaggttaagctgtgtgattttggagttagcactcagctggtgaattctatagccaagacgtatgttggaacaaatgcttatatggcgcctgaaaggatttcaggggagcagtatggaattcattctgatgtctggagcttaggaatctcttttatggagcttgctcttgggaggtttccatatcctcagattcagaaaaaccagggatctttaatgcctctccagcttctgcagtgcattgttgatgaggattcgcccgtccttccagttggagagttctcggagccatttgtacatttcatcactcagtgtatgcgaaaacagccaaaagaaaggccagcacctgaagaattgatgggccacccgttcatcgtgcagttcaatgatggaaatgccgccgtggtgtccatgtgggtgtgccgggcgctggaggagaggcggagccagcaggggcccccgtgaggctgccgcagggcactgaaagcccaggaccagtaaccaaggagaacaacccacccgtcgcccttctccgtatgctgcctgcgccagaagagctttgctgggccctggcttccctgccctcgccttcacctctgtcagcaggtggccttgcctggggagccccatgtgtggcccaccccaccaggccatccccatacctntctggtttgaaggcgctgacactggcagagaggtaaagggtggggcattgagaatggaggctcccagggtccctgcccacttctgttttcctaatgttttctctataaagggtcaggcccgtcagcatcactggatgggaattaaaagtattaatgggctttgtgnnnnnnnnnnnnnnnnnnnnnaaannnannnnnnaaaaag

SEQ ID NO: 46885 - DNA, 784 bp, Homo Sapiens
ggcacttcaagtaagaacagaaaacagagggttctttttaaaataaattctacaataaacttttatagcaagaccatcatattcaaatgaaaaagtaaaaataatcaaatgtgttcttttaaattaataggagttattttattttgtaattacataatgctccattttttttttcctaaatcactttcaggtttgactttacacataaaaaacaatcaggtggtgcaggccagtatggaaaagtaataggtgtcctggagcctctggacccagaggactacactaaattggaattttcagatgaaacattcggatcaaatattccaaagcagtttgtgcctgctgtagaaaaggtaaatttttaaaaaagtgtttttgcatttttacttactaaaaacagtttatcaggtattaaatcatactttgtcttccatcatgttgtctatcacagtttgttttagttacagtcctgtttctctgattgttaagctttccatctgatttagaatctctaattcattaagcagaagagctgtaaatccatgctgtgacaatgatgggaaattattatgtttctgaatcataattatatttttcttaataaattgaaactactgtattgattgtaatcaatttgtagtagttcttagggatttataagagttttatgtgtactattgcagcagaatgatcattctttagattccccaaaccctgggtgcgtactggtctcctggccaactactgaattaatatgcctttggttaaaatcaaggaattaaga

SEQ ID NO: 46886 - DNA, 863 bp, Homo Sapiens
tctgtcatggaaaccccagccagaaaagaaatatcactgtcagagcctgccaaacctgggtctgcccacgtacaatcacgaacaccacaaggtgggttgtacaacagaccatgcctgcatagactgaagtacttcttacgtcctccggttcatcacctcttctttcagacgctaataccggataaagacacaagagagaacaagggtcaaaaattagaacccatccctcatcgaagactaagaatggtaacaaataccattgaagagaattttcctctggggactgtgcagtttttgatggactttgtgtcaccccagcattacccaccaagagaaatcgtggctcacatcatccagaaaatcttgctcagtggctctgagactgtggatgtcctaaaggaggcctacatgcttctcatgaaaattcaacagctacatccagccaatgccaagacagtggagtgggactggaaactgctcacctatgtcatggaggaagagggacaaactctgcctgggcgagtccttttcctgcgttatgtcgttcagaccctagaagatgactttcagcagaccctgaggaggcaacggcagcacctgcagcaatccattgcaaacatggtgctttcctgtgacaagcagccccacaatgtcagggatgttatcaagtggctggtcacagcaataactgaagatggattgactcagccccccaatggaaatcaaacgtcttcaggaaaaggaatcttcgaagccagcagtagccaccctttcttcccagccccaaccttgaaaaagaacccccaatcaagctgaattggtgtggcccaggcttcaagaaggaatgcctcctcccataagca

SEQ ID NO: 46887 - DNA, 676 bp, Homo Sapiens
aaacaaagatccgaattcagaggcctcaggtaatgacgacatcattttaaggcatggagctgagaagtctgggagtgaggagatcccagtccggctaagcttggtggagcattttcccattgagagccttccatgggaactcaatgttcccattgtaagtacaggaaacaagccctgtacttaccaaggagaaagaggagagacagcagtgctgggagattctcaaatagaaacccgtggacgctccaatgggcttgtcatgatatcaggctaggctttcctgctcatttttcaaagacgctccagatttgagggtactctgactgcaacatctttcaccccattgatcgccaggattgatttggttgatctggctgagcaggcgggtgtccccgtcctccctcactgccccatatgtgtccctcctaaagctgcatgctcagttgaagaggacgagaggacgaccttctctgatagaggaggaccacgcttcagtcaaaggcatacaagtatctatctggacttccctgctagcacttccaaacaagctcagagatgttcctcccctcatctgcccgggttcagtaccatggacagcgccctcgacccgctgtttacaaccatgaccccttggacactggactgcatgcactttacatatcacaaaatgctctca

SEQ ID NO: 46888 - DNA, 704 bp, Homo Sapiens
ccctttttaattagaaattaaaacagttaatttaattaaagagtagggttttttttcagtattcttggttaatatttaatttcaactatttatgagatgtatctttgctctctcttgctctcttatttgtaccggtttttgtatataaaattcatgtttccaatctctctctccctgatcggtgacagtcactagcttatcttgaacagatatttaattttgctaacactcagctctgccctccccgatcccctggctccccagcacacattcctttgaaataaggtttcaatatacatctacatactatatatatatttggcaacttgtatttgtgtgtatatatatatatatatgtttatgtatatatgtgattctgataaaatagacattgctattctgttttttatatgtaaaaacaaaacaagaaaaaatagagaattctacatactaaatctctctccttttttaattttaatatttgttatcatttatttattggtgctactgtttatccgtaataattgtggggaaaagatattaacatcacgtctttgtctctagtgcagtttttcgagatattccgtagtacatatctatttttacacaaacgacaagaaatacagatatatcttaaacaaaaaaaagctttggtttacagaattggattctgatctcaaaaaaaaaacgcacacaaaagacgg

SEQ ID NO: 46889 - DNA, 1016 bp, Homo Sapiens
ccagcctggcctcctgcctctactgggaaggctacttcggggctgggaagtcgtccttactcctgtgggagcctcgcaacccgtgccaagtccaggtcctggtggggcagctcctctgtctcgagcgccctgcagaccctgcccttgtttggggcaggagtagctgagctcacaaggcagcaaggcccgagcagctgagcagggccggggaactggccaagctgaggtgcccaggagaagaaagaggtgaccccagggcacaggagctacctgtgtggacaggactaacactcagaagcctgggggcctggctggctgagggcagttcgcagccaccctgaggagtctgaggtcctgagcactgccaggagggacaaaggagcctgtgaacccaggacaagcatggtcccacatccctgggcctgctgctgagaacctggccttcagtgtaccgcgtctaccctgggattcaggaaaaggcctggggtgacccggcaccccctgcagcttgtagcccgccggggcaagtggcacgtttatttaacttttagtaaagtcaaggaaaaatgcggcgggaaaaaaaaaaacaacaaaaaactccaaggccattctatgttccgggtgccggaacaaaaaagggtaaatgaaaaatgggccccatgggctccattagacttggattttcctggaaccccaagcctttttctttgggaacaaaaacgcggggtaaaaaaatcctggccgggggtactctcccttaatagggggggagggcccgcaactataaaacttttcggaaaaaagaccccaaggctttaaaccccttgacccttatacataggaaatacggggctgggcaaggtaaccccggcgggaaaatttttaaccccccgccctataatggaaaccctgggcccttctcttttttttggggggatctaccaaaaggaggatcctttccttggggagaaagacccctcttctttttttccgggcccaagacaaaaactgtgccc

SEQ ID NO: 46890 - DNA, 598 bp, Homo Sapiens
ggatactacatgctttttgtatcacacagtatatgatggggcatgtgccatagtgcaggcttggggagctttaagcctcagttatataacccacgaaaaacagagcctcctagatgtaacattcctgatcaaggtacaattctttaaaattcactaatgattgaggtccatatttagtggtactctgaaattggtcactttcctattacacggagtgtgctaaaactaaaaagcattttgaaacatacagaatgttctattgtcattgggaaatttttctttctaacccagtggaggttagaaagaagttatattctggtagcaaattaactttacatcctttttcctacttgttatggttgtttggaccgataagtgtgcttaatcctgaggcaaagtagtgaatatgttttatatgttatgaagaaaagaattgttgtaagtttttgattctactcttatatgctggactgcattcacacatggcatgaaataagtcaggttctttacaaatggtattttgatagatactggattgtgtttgtgccatatttgtgccattcttttaagaacaatgttgcaacacattcatttggat

SEQ ID NO: 46891 - DNA, 601 bp, Homo Sapiens
  misc_feature (537)..(537): n is a, c, g, or t
  misc_feature (595)..(596): n is a, c, g, or t
  misc_feature (599)..(599): n is a, c, g, or t
ccacgagcaagctgtctgtggccgagatcaccaatgcctgcttcgagccagccaatcaaatggtcaagtgtgaccctcgccacggcaagtacatggcctgctgcatgttgtacaggggggacgtggtccccaaagacgtcaacgcggccatcgccaccatcaagaccaagcgcaccatccagtttgtggattggtgcccgactggatttaaggtgggcattaactaccagccccccacagtggtccccgggggagacctggccaaggtgcagcgggccgtgtgcatgctgagcaacaccacggccattgcggaggcctgggcccgcctggaccataagttcgatctcatgtatgccaagcgggcctttgtgcactggtacgtgggcgaaggcatggaagagggagagttctctgaggcccgcgaggacctggcagctctagagaaggattatgaagaggtgggcgtggattccgtggaagctgaggctgaagaaggcgaagaatactgatgggagggtgtggtgggttctcccctgncacccccgggatggctgcttccaagttgtttgcaattaaaggttctgtataaaaccannaanaa

SEQ ID NO: 46892 - DNA, 805 bp, Homo Sapiens
tgcagggtaccccatcatgtgccatctggagtcagtgcaggagctcatcaacgagaagctcatcagaaccaaggggctgtggggccccgtccatgagctgggccgcaaccagcagcggcaggagtgggagttcccaccacacaccaccgaggccacctgcaacctgtggtgtgtgtatgtgcatgagacggtcttgggcattcctcgaagccgtgccaatattgctctgtggcccccagttcgggagaagagagtcagaatctacctgagcaagggtcccaatgtgaaaaactggaatgcatggaccgcactggaaacgtatttacagctccaggaagcctttggttgggagccattcatccgtctcttcaccgagtacaggaaccagaccaacttgcccacagaaaatgttgacaaaatgaatctgtgggtcaagatgttctcccaccaagtgcagaagaacctggctccgttctttgaggcctgggcctggcccatccagaaggaagtggctaccagcctggcctatctgcctgaatggaaggaaaatattatgaaattgtacctcctcacacagatgccccactgaaattgaagtcaagaaatgcaaaaaggaactgacacatctcagcaaagaaaactgaagggatttggttataagtggagaggatctcagcatatttctggaagatagaaagtggatgaagcatgataatgaaagagtgaagaacctttcagataaaatgtaagctgatctgaacaacataaccccaaagagacttgcgcacctgaaaagcttgtctac

SEQ ID NO: 46893 - DNA, 692 bp, Homo Sapiens
  misc_feature (657)..(657): n is a, c, g, or t
  misc_feature (659)..(661): n is a, c, g, or t
  misc_feature (663)..(663): n is a, c, g, or t
  misc_feature (670)..(670): n is a, c, g, or t
  misc_feature (673)..(674): n is a, c, g, or t
gggtagaggtggtcaaatattttaaaacatatactactcagcaatttttaaatgacctttctttattatagccctttgaatcctaagataggttgattttgtatcaattcatcagagtgtattctctcacctaaatagttctgaagagtcaggaacaatcctttttattctgtttttcctttcctagatgccaaggtaattgcagccctcattcatttcacaagacgagcaatcactgatttataaatgcttagctatagaatggcttatgactacccaaaacagtgccccatcaacaaatggggaaaattgccttttgagctcaggaataatttataaattggggactaccttttagttctttagcatattctatttcttattgttttatataatttttaaatcatttgcttcctccttatgtttaacagcagaggggtaatcaccttaaaatgtcatcaaaaatagatctactagaaggcagcatcacattcccatcttacttatggactcctacccctggttcatgtcttatatgcctgtaatggttataaagcctaccttcaggaaagctatggttgactaattactaatggatgggttttaaacatgtccctctacaataaattaaaatctttattgtaaaactttaaaacnannnanaaaaaanaannaaaaaaaaaaccctgtcg

SEQ ID NO: 46894 - DNA, 712 bp, Homo Sapiens
agtctggcaggctatttctgaccaggccttgtgaatttttgtgcaactatcaaagaatccagggtgagcttatgtagaggtggtcaaatattttaaaacatatactactcagcaatttttaaatgacctttctttattatagccctttgaatcctaagataggttgattttgtatcaattcatcagagtgtattctctcacctaaatagttctgaagagtcaggaacaatcctttttattctgtttttcctttcctagatgccaaggtaattgcagccctcattcatttcacaagacgagcaatcactgatttataaatgcttaactatagaatggcttatgactacccaaaacagtgccccatcaacaaatggggaaaattgccttttgagctcaggaataatttataaattggggactaccttttagttctttagcatattctatttcttattgttttatataatttttaaatcatttgcttcctccttatgtttaacagcagaggggtaatcaccttaaaatgtcatcaaaaatagatctactagaaggcagcatcacattcccatcttacttatggactcctacccctggttcatgtcttatatgcctgtaatggttataaagcctaccttcaggaaagctatggggtgactaattactaatggatgggttttaaacatgtccctctacaataaattaaaatctttat

SEQ ID NO: 46895 - DNA, 620 bp, Homo Sapiens
ggcgcgcactcgcgtggccttcgcgaaggtgtcgctgccaagaaacgtgtcctgcgcgctacgccgtctgtttctagggcaacgccggcgtctcttagcaaccgcgcgcggcctaggtgggtccccccggcacccccagacctgccatggcgaccgcgagtcctagcgtctttctactcatggtcaacgggcaggtggagagcgcccagtttccagagtatgatgacctctactgcaagtactgctttgtgtacggccaggactgggcccccacagcgggtctggaggaggggatctcacagatcacatccaagagccaagatgtgcggcaagcactggtgtggaacttccccattgatgtcacctttaaaagcaccaacccctacggctggccacagatcgtgctcagcgtgtatggaccagatgtgttcgggaacgatgtggttcgaggctatggggccgtgcacgtgcccttctcacctggccggcacaaaaggaccatccccatgtttgtcccagaatctacgtctaaactgcagaagtttacaaggtgagttttgtacccataaccccagcccctcctgatctactggatgaatggatgtcccattctacccctc

SEQ ID NO: 46896 - DNA, 860 bp, Homo Sapiens
gtctgtttctagggcaacgccggcgtctcttagcaaccgcgcgcggcctaggtgggtccccccggcacccccagacctgccatggcgaccgcgagtcctagcgtctttctactcatggtcaacgggcaggtggagagcgcccagtttccagagtatgatgacctctactgcaagtactgcttgtgtacggccaggactgggcccccacagcgggtctggaggaggggatctcacagatcacatccaagagccaagatgtgcggcaagcactggtgtggaacttccccattgatgtcacctttaaaagcaccaacccctacggctggccacagatcgtgctcagcgtgtatggaccagatgtgttcgggaacgatgtggttcgaggctatggggccgtgcacgtgcccttctcacctggcggcacaaaaggaccatccccatgtttgtcccagaatctacgtctaaactgcagaagtttacaagtttgtgcctggtcgcctcctcagatctgcaagctgctccaccactgaggacaaatagaaacaggtcccctgggagtgctgagtcacggggctccttcagccctgttccagcagcagaaggccgggcgattttaccctgtgccctgtgaaaaatcttgtgtctgaggagcagagggaaaaactcttgtcagatgggacaaatgctccatgacattatgtgacctttcacaggtgggcaaccagaggatttccaccaaaaaaaaaccggcgtcatgtcggggcgcacaacaacggtatgaatgcccttggcatactgttcccggacccgttctggacaagggaacttggcggccctaagggcgtaattcgaaccgtact

SEQ ID NO: 46897 - DNA, 713 bp, Homo Sapiens
ggatcagactagcactgagagtgctaccaatgaaaataacaccaatcctgagcctcagttccaaacagaagccactgggccttcagctcatgaagaaacatccaccagggactctgctcttcaggacacagatgacagtgatgatgacccagtcctgatcccaggtgcaaggtatcgagcaggacctggtgatagatttaatatcagaggaacaacaataggtgatagaataatgagacgctctgctgtggcccgtattcaggagttcttcagacggagaaaagaaaggaaagaaatggaagaatcggatactttgaacattagaaggccgctagtaaaaatggtttataaaggccatcgcaagctccaggacaatgataaaagaagccaatttctggggtgctaactttgtaatgagtggttctgactgtggccacattttcatctgggatcggcacactgtgagcatttgatgcttctggaagctgataatcatgtggtaaactgctggagcacatccgttgtgagccaattttagcctcatctggcatagattatgacatagagatctggtcaccattagaagagtcaggatttttaaccgaaaattgctgacagagtataactcgaaagaatccatgctggagaaactagacaccccttcaggtccaggctctttactgttgacgatgttggttcacttatcaatatcg

SEQ ID NO: 46898 - DNA, 451 bp, Homo Sapiens
aatgcctggggtgcagctgaagctgagccactggtgtttcttcacagtatctctgtcgggagggtgtattattcctttttatagggatctctataatgacgtgagaatcttgaaaatataagtgttatcctagatgggaggtgttaaaggtttttgccttgggaattttgtcatatttgttgcacagcaaggaaggactttcagaaaagcagggatgtggtgaggaagagcaggcaatagagagcagggaggaaaggctaagtagcatctggaccttgagaagtctaagggagccaaaatgagattttctattaaaaatgtctatcctcagccgggcgtggtagctcacgcctgtaatcccagcactttgggggggtcgagatgggcagatcacctgaggtcaggagttcgagaccagcctgaccaatatggagaaccccgtctctactaa

SEQ ID NO: 46899 - DNA, 586 bp, Homo Sapiens
  misc_feature (551)..(578): n is a, c, g, or t
ggtgttctcttctcacccaaggcaactcttaagaaagaacagtatgtggaatgttgcatgtaaaagatttttgcatactcaaaaaattgctctgacataacaggggcatgcatttaggggatatatggataaactagggaggaaactgacagttattgatggactcacatatcccatagtgaggtaggcattacatatattatttcagaatacctggtatgtttttgcctacaaatcttttatttgattttgaagaaagctattgtataatgtttgaagaccagtccctgtaagtaggactaatgtgtggtggtggcccatagtcttctggatattggtttgtttttgtcatagatttcattaataaatttatttctgccctcaactatatatacaactgagtaagccatttaagaattctgactccttggctgggcatggtggctcatgcctgtaatcccagtactttgggaggccaaggcagccagatcacttgaaggtcaggagtttgagaccaacctggccaacatggtgaaactctgtctctagcnnnnnnnnnnnnnnnnnnnnnnnnnnnnccttgtcg

SEQ ID NO: 46900 - DNA, 746 bp, Homo Sapiens
gttgagtagttgttcttataaattagtatctgtggaacacaatcctttatatatcaacatcacagtggatttctggtttggtgcatgaccctggatcttttggtgatgtttggaagaactgattctttgtttgcaataattttggcctagagacttcaaatagtagcacacattaagaacctgttacagctcattgttgagctgaatttttcctttttgtattttcttagcagagctcctggtgatgtagagtataaaacagttgtaacaagacagctttcttagtcattttgatcatgagggttaaatattgtaatatggatacttgaaggactttatataaaaggatgactcaaaggataaaatgaacgctatttgaggactctggttgaaggagatttatttaaatttgaagtaatatattatgggataaaaggccacaggaaataagactgctgaatgtctgagagaaccagagttgttctcgtccaaggtagaaaggtacgaagatacaatactgttattcatttatcctgtacaatcatctgtgaagtggtggtgtcaggtgagaaggcgtccacaaaagaggggagaaaaggcgacgaatcaggacacagtgaacttgggaatgaagaggtagcaggagggtggagtgtcggctgcaaaggcagcagtagctgagctggttgcaggtgctgatagccttcaggggaggacctgcccaggtatgccttccagtgatgccc

SEQ ID NO: 46901 - DNA, 786 bp, Homo Sapiens
agagaaagttagcaggtgccaatccagcagtcattacttgtgatgagctactcctgggtcatgagaaggcccctgccttcagagactatgtggctgtggcacgaggaagcaaagatcacaacattcgtgcccaagaaccagagagtgggctttcagaagagactcaagtgaagtgcctgatggaccaggcaacagaccccaacatccttggcagaacctgggaaggatgggagccctggatgtgaggtctgtgggagtctgcagatagaaagcattacattgtttaaagaatctactatactttggttggcagcattccatgagctgattttcctgaaacactaaagagaaatgtcttttgtgctacagtttcgtagcatgagtttaaatcaagattatgatgagtaaatgtgtatgggttaaatcaaagataaggttatagtaacatcaaagattaggtgaggtttatagaaagatagatatccaggcttaccaaagtattaagtcaagaatataatatgtgatcagctttcaaagcatttacaagtgctgcaagttagtgaaacagctgtctccgtaaatggaggaaatgtggggaagccttggaatgcccttctggttctggcacattggaaagcacactcagaaggcttcatcaccaagattttgggagagtaaagctaagtatagttgatgtaacattgtagaagcagcataggaacaataagaacaataggtaaagctataattatggcttatatttagaaatgactgcatttgatattt

SEQ ID NO: 46902 - DNA, 534 bp, Homo Sapiens
  misc_feature (23)..(23): n is a, c, g, or t
acataaccagttttccctctagngttggaacagattatagtttagtagctcaccaaataaagtacgtagcttgtatttaccagctatggtatataaaaatatgaatcattaaatgctagtataaagcagttagtcttaaaaaaaaaaaaagatccacaaaagggatgagtgggagataagattgaagcaaaattatagaaagttgtataccaggctgagggctttctgtgtcacttcacaggaagtaggtaaacaccgaaatttagtcagtgtcattattagagttgtgctttcataaaaagaatctctcaagtgtgacaaggctaaattagaaagaagagactggaggtagaggccagttaggagatccttgtaataatccacagttgatggaatgaggatctatagtagccaggctggaggtaacaaagagggacaggagggcaggagtactctactttaaagtagaatgaataggaccaacaaatgacttaaagggatttaaagaaaggagacattaaaaaaaaaaaaaaa

SEQ ID NO: 46903 - DNA, 710 bp, Homo Sapiens
  misc_feature (566)..(566): n is a, c, g, or t
  misc_feature (609)..(609): n is a, c, g, or t
ttttttttttttttttttgaattctgcaactccctactttatttacattttaaaataagcaatatattcatacggtttaaaatccaaagtttacaaaagggtatagggtgacatctccttccctcccacctgtgcgccccaaccctgcaggtgctgttctgagggaatcacactgtgcttgcacaaaaattattagcttataagacaccagccttccccttgctttcctcacttgatgtatcttggagcttgttccttattcttgattatagttgtatggtattgcactatctggagctaacacctgtgacccacactcatgttttaaaagtttctgcattagtcaaaaatatttaaaaggagattcaacttcacaacccatatgtctagcttctcttgaaaacacgtaagaactggccatgacagcctgtgtttctatgtaactatgagccagagccaaggagcggggggaccaggagaggtgtgcccctgccatgctgccatttgttatcacccgcctgtcaaatcacaggtttatttcaaggcaagaaccatgttcataggtngtattctaaatggagtggcgtgcccttactgaaggactagatnaggcaaataaagactagttgctgctattcattcattcagctaacatttattgagcccttaatgaacacataagagttttgacttcacggcagttcatactg

SEQ ID NO: 46904 - DNA, 618 bp, Homo Sapiens
gcgtgggcggcaggtccctagcctgcaacatttatgtcgcatgtcaatccgaagagtgatgcccacccaagaagttcaggagctgccgattccttccaagcttttggagtttctctcgtatcgtatttagaagattctgccttccctagtagtagggactgacagaatacacttaacacaaacctcaagctttactgacttcaattatctgtttttaaagacgtagaagatttatttaatttgatatgttcttgtactgcattttgatcagttgagcttttaaaatattatttatagacaatagaagtatttctgaacatatcaaatataaatttttttaaagatctaactgtgaaaacatacatacctgtacatatttagatataagctgctatatgttgaatggacccttttgcttttctgatttttagttctgacatgtatatattgcttcagtagagccacaatatgtatctttgctgtaaagtgcaaggaaattttaaattctgggacactgagttagatggtaaatactgacttacgaaagttgaattgggtgaggcgggcaaatcacctgaggtcagcagtttgagactagcctggcaaacatgatgaaac

SEQ ID NO: 46905 - DNA, 581 bp, Homo Sapiens
ggctgaactgctctacagagtgaggcgatttgacctgctcaaacgtatcttgaagatggacagaaaagctgttggagacccacctgctcaggaaccctcaccttgtttcggactatagagtgctgatggcagagattggtgaggatttggataaatctgatgtgtcctcattaattttcctcatgaaggattacatgggccgaggcaagataagcaaggagaagagtttcttggaccttgtggttgagttggagaaactaaatctggttgccccagatcaactggatttattagaaaaatgcctaaagaacatccacagaatagacctgaagacaaaaatccagaagtacaagcagtctgttcaaggagcagggacaagttacaggaatgttctccaagcagcaatccaaaagagtctcaaggatccttcaaataacttcaggatgataacaccctatgcccattgtcctgatctgaaaattcttggaaattgttccatgtgattaacatggaactgcctctacttaatcattctgaatgattaaatcgtttcattttctaaatgtgttataatgtgttta

SEQ ID NO: 46906 - DNA, 878 bp, Homo Sapiens
cgctgcccacgatcatttatggaccaaccattggctgaacatttcagcccttttcgtgtacagcacatggacctatcgaactcagttatagaagtgtccaccctccacggcatactgtctcagtgttccaagttgcagaatctaagcctggaaggcctgcggctttcggatcccattgtcaatactctcgcaaaaaactcaaatttagtgcgacttaacctttctgggtgttctggattctctgaatttgccctgcagactttgctaagcagctgttccagactggatgagctgaacctctcctggtgttttgatttcactgaaaagcatgtacaggtggctgttgcgcatgtgtcagagaccatcacccagctgaatcttagcggctacagaaagaatctccagaaatcagatctctctactttagttagaagatgccccaatcttgtccatctagacttaagtgatagtgtcatgctaaagaatgactgctttcaggaatttttccagctcaactacctccaacacctatcactcagtcggtgctatgatataatacctgaaactttactattagtgacaagagctggggttaggatccggttggactctgacatcggatgccctcaaacatacagaacttcccaaactcaagtccagccataagctatttgccaacatgtagagtaatctgtatattgtatgtgattctacttttatagacttgttttaaaaccataaacccatttttattaacacaaaaaaaaaaaaacccgggcttcttgtgggggggggaaaaagggttgaagggccagggcccgtgttcccgcccccttttggccaggggaaccgcggcccaaggggggtaacaaacgcga

SEQ ID NO: 46907 - DNA, 853 bp, Homo Sapiens
  misc_feature (668)..(668): n is a, c, g, or t
  misc_feature (758)..(758): n is a, c, g, or t
  misc_feature (768)..(768): n is a, c, g, or t
  misc_feature (785)..(785): n is a, c, g, or t
gtcaaaacataagcaaatgtcgtcgtgtgttgatggctcaacattttgatgaagtatggaactcagaagcatgtaacaaaatgtgcgataactgctgtaaagacagtgcatttgaaagaaagaacataacagagtactgcagagatctaatcaagatcctgaagcaggcagaggaactgaatgaaaaactcactccattgaaactgattgattcttggatgggaaagggtgcagcaaaactgagagtagcaggtgttgtggctcccacacttcctcgtgaagatctggagaagattattgcacactttctaatacagcagtatcttaaagaagactacagttttacagcttatgctaccatttcgtatttgaaaataggacctaaagctaaccttctgaacaatgaggcacatgctattactatgcaagtgacaaagtccacgcagaactctttcagggctgaatcgtctcaaacttgtcattctgaacaaggtgataaaaagatggaggaaaaaaattcaggcaacttccagaagaaggctgcaaacatgcttcagcagtctggttctaagaatacaggagctaagaaaagaaaaatcgatgatgcctgatatgaatgttactaaattttctaattaaagatgggttatgcatgtatatgccattanttttggaagttagacaatagtttttaaaagaatttcatagatattttatatgtatggatctaaattttcagagcttatctctgaagatcnaacttttganaatgttggaaaattagngatcatgaattaaataattttcagttttaaaacaagggaaaaatttttaggttaaaacctttaaatgt

SEQ ID NO: 46908 - DNA, 801 bp, Homo Sapiens
gttattgagcagctgggaacaccatcagcagagttcatgaagaaacttcagccaacgtgtgaggaattatgtcgaaaacagaccaaagtatcctggaatcaaatttgaagaactctttccagattggatattcccatcagaatctgagcgagacaaaataaaaacaagtcaagccagagatctgttatcaaaaatgttagtgattgatcctgacaagcggatctctgtagacgaagctctgcgtcacccatacatcactgtttggtatgaccccgccgaagcagaagccccaccacctcaaattcatgatgcccagttggaagaaagagaacatgcaattgaagaatggaaagagctaatttacaaagaagtcatggattgggaagaaagaagcaagaatggtgtagtaaaagatcagccttcagatgcagcagtaagtagcaacgccactccttctcagtcttcatcgatcaatgacatttcatccatgtccactgagcagacgctggcctcagacacagacagcagtcttgatgcctcgacgggaccccttgaaggctgtcgatgataggttagaaatagcaaacctgtcagcattgaaggaactctcacctccgtgggcctgaaatgcttgggaattgatggaaccaaatagaaaaactccatgttctgcatgtaagaaacacaatgccttgccctactcagacctgataggattgcctgcttagatgatacaatgaggcagaatatgtcttgaagaaaaaaattgcagccacacttctagagattttgtcaagatca

SEQ ID NO: 46909 - DNA, 691 bp, Homo Sapiens
  misc_feature (564)..(564): n is a, c, g, or t
  misc_feature (650)..(650): n is a, c, g, or t
ggggaaacaaacaccaaaaatgacccaaatgaactcaacaatcttatcaagaaaaactctgatgtgataacatggacccctcgaccgggagccacccttgatctgggaagaatgctgaaggatcgaacagacagcaagggcatcatagagcctccataggggacaaaaatttacaaggattcctgggattttgaaccttatttggaaatcttgaatgctgctctaggagatgaaatatttcttcactcatcctggataaaagaatacttcacttgggctggatttaaagattacaaccttgtggtcaggatgattgagacagatgaggacttcaatccttttcctggaggatatgactatttggttgactttttagatttatccttcccaaaagaaagaccacaacgagaacatccctatgaggaaatccatagccgggtggatgtcatcagacacgtggtgaagaatggtctactctgggatgagttgtatataggattccaaacacggctccagcgggatcctgacatataccatcacctgttttggatcattttcaaatanactcccctcacacacccactgaagtcattctgatgtgctgtgagcagatgggctgcgatttgcattctctcagaagaccatgaccnatagaacaatctctgtgaacagctactgataatcgatcatc

SEQ ID NO: 46910 - DNA, 736 bp, Homo Sapiens
agagccacaggagaagcagatgtagagtttgtgacacatgaagatgcagtagctgccatgtctaaagataaaaataacatgcaacatcgatatattgaactcttcttgaattctactcctggaggcggctctggcatgggaggttctggaatgggaggctacggaagagatggaatggataatcagggaggctatggatcagttggaagaatgggaatggggaacaattacagtggaggatatggtactcctgatggtttgggtggttatggccgtggtggtggaggcagtggaggttactatgggcaaggcggcatgagtggaggtggatggcgtgggatgtactgaaagcaaaaacaccaacatacaagtcttgacaacagcatctggtctactagactttcttacagatttaatttcttttgtattttaagaactttataatgactgaaggaatgtgttttcaaaatattatttggtaaagcaacagattgtgatgggaaaatgttttctgtaggtttatttgttgcatactttgacttaaaaataaatttttatattcaaaccactgatgttgatactttttatatactagttactcctaaagatgtgctgccttcataagatttgggttgatgtattttactattagttctacaagaagtagtgtggtgtaattttagaggataatggttcacctctgcgtaaactgcaagtcttaagcagacatctggaa

SEQ ID NO: 46911 - DNA, 681 bp, Homo Sapiens
cgccaaaagaaatcttcgtggcaaatggtacacaagggaagctgacctgcaagttcaagtctactagtacgactggcgggttgacctcagtctcctggagcttccagccagagggggccgacactactgtgtcgtttttccactactcccaagggcaagtgtaccttgggaattatccaccatttaaagacagaatcagctgggctggagaccttgacaagaaagatgcatcaatcaacatagaaaatatgcagtttatacacaatggcacctatatctgtgatgtcaaaaaccctcctgacatcgttgtccagcctggacacattaggctctatgtcgtagaaaaagagaatttgcctgtgtttccagtttgggtagtggtgggcatagttactgctgtggtcctaggtctcactctgctcatcagcatgattctggctgtcctctatagaaggaaaaactctaaacgggattacactggggcccagtcatatatgcacagttagaccactccggcggacatcacagtgacaagattaacaagtcagagtctgtggtgtatgcggatatccgaacagaattaagagaatacctagaacatatcctcagcaagaaacaaaaccaaactggactctcgtgcagacaatgtagcccattaccacatgtagccttggagacccg

SEQ ID NO: 46912 - DNA, 617 bp, Homo Sapiens
ttctccccatcagctgcccacctcgttccccagccctcacccctcacccctcaccatccttcctcaggacttggctaaacaacatgcatctcatttcttcttggagtggggagatgcgggaagctgacccagtggtcctctaggcaggcagggtgctcctggtgtctgcccaccactgtccccttgctgatggcatgggggtccgaccaggcactgacaccgcaggcagaggttgctcggggccttgggtcgggtttaccaatcagccaggacgcccggggccaccagctcagctaccacttccccttccctctgcaccctctggaaccctggcccaattcctcagaccccagagtggcctgggacccaagctgccgcagctgagtggccccagcggacacctcctcaggcttaaatctcaggcttcacattgcaatgacgattgcagttttattttttgagatgacacacctactgcttcttttctaggataaatctaattactgtttactggtggagtcatatgcatagatacggcttctgtcggggggagagtttattatgggagaaattttttggttgggaattatcactctccaaagcgggaaattgaggcc

SEQ ID NO: 46913 - DNA, 539 bp, Homo Sapiens
ccaagaattcggcacgaggccctggggttctaagatgcgcccagcccatgctgggtgaaggcggaagccgaacagggccctttccaatgaatctgccggaaaggaaccaatctttcagtggcagctgattttacaaataatgttgagatacgaatagcaaggtgcttccctcccatctttctacctggtaagaaaaatttaggattttaactcccctaaatgacatttagagaactcgtgttatgcctaattcttcttcctcctcgtgttgtttctgctgttggctctgctttgagctcaagataataataaatatttaggatcagtgtaaagacttggtgttgccgctagattttagcagccctactatactgattctggcctgtaacccctgagaaagccgattttacacggctgggtagaatttgtagaaaagatccacagggcaagcatgctgtatatcagagtgcgtatagcaccattcttcctaattttcagatcaagcttcacagcaaatattaaagattatttagatttga

SEQ ID NO: 46914 - DNA, 600 bp, Homo Sapiens
  misc_feature (3)..(3): n is a, c, g, or t
  misc_feature (73)..(73): n is a, c, g, or t
  misc_feature (547)..(547): n is a, c, g, or t
acnttcggcacgacgggatttttacctccgtaacaaacacaagaaataaacagaatggtccttaacagagttngggggagagagcaagatgggttccttggagaagctgatttgccaagatgcacatcgctattaacagccagagtcataaatgaaatgaaattgaagaattcattcaaatgctcttttccctataacctcttttctcaccaaaaaggagataaatttgaaaacagataaatgtaacaaccagtcaaagaagcaggggaaaagtaagctcctccaaagttgcttgcagtgctggaaatagatctcatttttaggttttctcttcgttccagataccaaataaatgggacagagaataaaatttttgttaaaatatgtgctcatctcctaagtagctcttcagagtctgacccgtaagtaaaaacacacagaattgtgtttgactgggggaggtgaatcacaaaaaagttacgaggagtttaagagttaaatattatttgatcgtggctgtcaaatttagtgaacaacatagattggntttggagttggtagtaggtatggttctcataccagaattctcttaaaaaaaat

SEQ ID NO: 46915 - DNA, 858 bp, Homo Sapiens
tttagaagatgcctgaaaacttcatgcctcctgttcccatcacatcaccaatcatgaacccgttgggtgacccccagtcacaaatgctgcagcaacagccttcagctccagtaccactgtcaagccagtcttcattcccacagccacatcttccaggtggccagcccttccatggcgtacagcaacctcttggtcaaacaggcatgccaccatctttttcaaagcccaatattgaaggtgccccaggggctcctattggaaataccttccagcatgtgcagtctttgccaacaaaaaaaattaccaagaaacctattccagatgagcacctcattctaaagaccacatttgaggatcttattcagcgctgcctttcttcagcaacagaccctcaaaccaagaggaagctagatgatgccagcaaacgtttggagtttctgtatgataaacttagggaacagacactttcaccaacaatcaccagtggtttacacaacattgcaaggagcattgaaactcgaaactactcagaaggattgaccatgcatacccacatagttagcaccagcaacttcagtgagacctctgctttcatgccagttctcaaagttgttctcacccaggccaataagctgggtgtctaaaaggacagcttctcttccactcaatattgccatttttccaaagaaacatgtttaaaaaaaaaaattataagacatggactagtcctcattagcatgtttgcatagcaaccagtcaagagcatttacactatttctgctgatatactcacccttagaactgctcagaaccctgggggctttattttttggttttaatcttttgttgcccattgaa

SEQ ID NO: 46916 - DNA, 796 bp, Homo Sapiens
  misc_feature (590)..(590): n is a, c, g, or t
  misc_feature (761)..(761): n is a, c, g, or t
ggcagtgatgtgtgagctatgcaaacaaaatccaagattctgctggtgaataactatgccagcaaccttgtaagctatctgtgcaggatatttgcactatttccacatggaatcaatctttaacaacctctgagccttggtgtacagaccacctttcacaaaacgaaatgctatgactgtatcttgatatctcgaactttcaaaatatattttcagtacacccagttgccaaagttttgctgtctcttagagaaagaactatgaaatcaactgacaagaaacacattcttattgacaattgtgtataactggattgcagactgttcttactgtaactacttcctgattaggaatatgaccatttgactgttcaatgattatttgtatttacagtttccagagtttgtcattataataggaacaatctttgctgtatacttttaaaaaatactctgctatttctcttgctggaactgttgaaagaaaatatatagaatgatctattgctcatcagctttattttttaaacatacgacttattttgttgaaattgtcaaagactgtatttagatctcataatgctttgttanatgtttacaagtaaatagtttgaattcagtaaatattattggttggtgtattgatcaatgcatgttacccattcaacattttataaactaccaatttcttttatgttaactaaaatgcttttgttaaaaagtatttgttcattatttgggctacccccttttgatatgcanacaacctcatcagctgcctaacttatccatctttg

SEQ ID NO: 46917 - DNA, 722 bp, Homo Sapiens
aggggctcgttcgggtggtgggtcggccccaacctcaactgcagtatgtagatgctcttggctatgtcagtctttttcccttgctgctgcgactgctggaccccacctcatcccgccttgggcccctgctggacattctagccgacagccgccatctctggagcccctttggtttacgctcccttgcagcctccagctccttttatggccagcgcaattcagagcatgatcccccctactggcggggtgctgtgtggctcaatgtcaactacctggctttgggagcactccaccactatgggcatctggagggtcctcaccaggctcgggctgccaaactccacggtgagctccgtgccaacgtggtaggcaatgtatggcgccagtaccaggctacaggctttctttgggagcagtacagtgaccgcgatgggcgaggcatgggctgccgccctttccacggctggaccagccttgtcttactggccatggctgaagactactgaagggagggagaggaggggagccaagacactcatgccactctggctctgaagggacaaaggcttctggcttttgccccagccccttggataccagtaattcaaaccttcctcatgtcatctcaaggtgtctccttgctgtcatccacatagcctggggtgaatgtgaatccagagtccaattttcttaactaattgggaaaaccaccaaacaacaag

SEQ ID NO: 46918 - DNA, 626 bp, Homo Sapiens
  misc_feature (567)..(625): n is a, c, g, or t
aagctccagcggcggccacggcggcagttccagcggcggctacggtggtggcagttccggcggcggcggcggcggctacgggggcggcagctccggcggcggcagcagctccggcggcggatacggcggcggcagctccagcggaggccacaagtcctcctcttccgggtccgtgggcgagtcttcatctaagggaccaagatactaacaaaaccagagtaatcaagacaattattgaagaggtggcgcccgacggtagagttctttcatctatggttgaatcagaaaccaagaaacactactattaaactgcatcaagaggagagagtctcccttcacacagaccattatttacagatgcatggaaaacaaagtctccaagaaaacacttctgtcttgatggtctatggaaatagaccttgaaaataaggtgtctacaaggtgttttgtggtttctgtatttcttcttttcactttaccagaaagtgttctttaatggaaagaaaaacaactttctgttctcatttactaatgaatttcaataaactttcttactgatgcaaactnnnnnnnnnnnnnnnnnnnnnnnnnnnnnnnnnnnnnnnnnnnnnnnnnnnnnnnnnnng

SEQ ID NO: 46919 - DNA, 711 bp, Homo Sapiens
gcggccgcgggtgtaggctgtattaaacttgttccgtacacgtcctgggagagagatgtttttagaacggcctcgtgttcggtttgatggcgtgtatatcagtaaaaccacatatattcgtcaaggggaacagtctcttgatggtttctatagagcctggcaccaagtggaatattacaggtacataagattctttcctgatggccatgtgatgatgttgacaacccctgaagagcctcagtccattgttccacgtttaagaactaggaataccaggactgatgcaattctactgggtcactatcgcttgtcacaagacacagacaatcagaccaaagtatttgctgtaataactaagaaaaaagaagaaaaaccacttgactataaatacagatattttcgtcgtgtccctgtacaagaagcagatcagagttttcatgtggggctacagctatgttccagtggtcaccagaggttcaacaaactcatctggatacatcattcttgtcacattacttacaaatcaactggtgagactgcagtcagtgcttttgagattgacaagatgtacacccccttgttcttcgccagagtaaggagctacacagctttctcagaaaggcctctgtagagcctcaagtccagtcctctatcacttttgcatgaattaaagtatatagcgcaaaagaaaaaaaaaaaaaaacctcgtgc

SEQ ID NO: 46920 - DNA, 572 bp, Homo Sapiens
  misc_feature (430)..(434): n is a, c, g, or t
  misc_feature (436)..(436): n is a, c, g, or t
  misc_feature (438)..(469): n is a, c, g, or t
  misc_feature (471)..(471): n is a, c, g, or t
  misc_feature (473)..(473): n is a, c, g, or t
  misc_feature (482)..(483): n is a, c, g, or t
  misc_feature (489)..(500): n is a, c, g, or t
  misc_feature (502)..(504): n is a, c, g, or t
  misc_feature (509)..(509): n is a, c, g, or t
  misc_feature (517)..(519): n is a, c, g, or t
  misc_feature (545)..(545): n is a, c, g, or t
atagcgatatcctgttttacccttgatcaattaaatcagaatctctggggataaggcccaggtacagtgatttttaaaagtacttcaatgaccctaatatgcatctaagtgagttctatccttaaatgtggtttctctcaatttgtaggtaaatacaatattttgttgttgtttgaatgtaaatatcaggcttttgatctgttctagtttaattttctgataatagtagtcccagaattttcaaatgcaattctttaagattgcaatgaagttagaactcttacgttactgtttatgtccacaaaatgtttagaaaagtttgaaaaggattttgaaaaagattaacagtgttaatatttcttatattgttgggtttatgcataatataatttggttaatatgtatcataaataaaagtattttaagatcnnnnnanannnnnnnnnnnnnnnnnnnnnnnnnnnnnnnnananaaaaaaaannaaaaannnnnnnnnnnnannnttttnggggggannnctctcggggggggccggacccaattnccctaaagagggggtttaaattccagg

SEQ ID NO: 46921 - DNA, 662 bp, Homo Sapiens
gcacacaacaggctgtgtgtggaaatggccaccaccattctccttccccaccccaccacaaaaagagaagctgtgtctttagacaaccctgaggtatctgtgttacaatcgttctgtgtttgatatttgtgtaaagtatgcatgcagtcttgtactgtgacctaagaacaaaactgtaactgcattagaaaccatgaaaaaattagatattgttttgtgacttttagacagtggtaaatatagaaccatgaattctggtcacattccatttctctccaacatgaaggatcaaaaaatgtttttcaatgtgttctttgttccactggaaacttagagtcatgagtttatgagctgatttggtcaccttcctctgcctttgttcactgtgagttctgatgtcttagtgacttagttcttagaagctcacgccttagtttgaaacagattctccacggtggtccccaaaacactgtctgcatatccataagaattgagcgctatgggtgttaacgtgcatgaggatcagtttgcagcagcaagtacaaaaggagaagaggaacatccgttgaatgagtktkttttgtacataacttcagatacttgtgaacatgccttatatttgtccaacaactgtsagaataaagaacattctaaaatgagaa

SEQ ID NO: 46922 - DNA, 1111 bp, Homo Sapiens
gcctggattggaggtgtgacaggtggcatttttggcccgaagtccctaggcaggacgggtggctgtagcctgcgcgtttgtgtaaattaacctccctttttagttctgtgaagggagaacgtgattagtttaaaatcacctgcgtgaaagaggctcttgattagtttaaaatcacccacgtgaaaggggctcttgattagcttaaaatcacctgggtgtttcgttttatctcagttggcctctgaatgtttatcctacagcttcctgcaagctccagtctaccttctaagggaataacggggctcgtctttctacgttactttatgtgggagtagttgtaaaacagaatgagggagaccgcggggattgtgcggaaatgtagccaccgtttacatgtcgggaggctgaggtgggaggatcgcttgagcccaggagtttgacaccagcatgggcaatatggtaagaccccattatctacaaaaaaaaaaaaaaggaaaagccggggcgtgggggtgggtgccggtgggccccagaggcatcggaacgcataaggggggcaggatggctggagcccaaggcagcttggacaccagctggggcaatatgggtaggaccccaatattctcccaaaaagacaacaaaacacccggaggcaacacaaaagcagggagagggagcaaaacacgcgtcaacagaagcggggccactgtgacaaaacgttggtcctagaccccacgttctctgcacaacagggaagaaccagcgaggaccaccaaggagagccgcagacaattagaaacgcagtaactcgagagactacagcgaggacagaaaagacaaaagaaggacgacacaaagagaaagcaggagcataaaccaacgtgtaccaaacaacaagcggagaggaaacggacgaacaaaacccacgcatacataaacaacgccaactctaaactcatctacacagccaaccgacaccgtagacagacgaatcgacaacacagacctacgcaccgacaaatacacgcaagcagagacgcacgaaacgccacacgcacaacgcagaaaacgcgacggcagaaccaactacgcgaagacacaccgcaaacca

SEQ ID NO: 46923 - DNA, 1046 bp, Homo Sapiens
  misc_feature (930)..(931): n is a, c, g, or t
  misc_feature (934)..(934): n is a, c, g, or t
ggtccggaattcccgggattctctatcattctcagagtcctgaagcattttttgcccattgcccaggaatcaaggtggttatacccagaagccctttccaggccaaaggacttcttttgtcatgcatagaggataaaaatccttgtatattttttgaacctaaaatactttacagggcagcagcggaagaagtccctatagaaccatacaacatcccactgtcccaggccgaagtcatacaggaagggagtgatgttactctagttgcctggggcactcaggttcatgtgatccgagaggtagcttccatggcaaaagaaaagcttggagtgtcttgtgaagtcattgatctgaggactataataccttgggatgtggacacaatttgtaagtctgtgatcaaaacagggcgactgctaatcagtcacgaggctcccttgacaggcggctttgcatcggaaatcagctctacagttcaggaggaatgtttcttgaacctagaggctcctatatcaagagtatgtggttatgacacaccatttcctcacatttttgaaccattctacatcccagacaaatggaagtgttatgatgcccttcgaaaaatgatcaactattgaccatatagaaaagctggaagattatgactagatatggaaatattttttctgaatttttttttatatttcctccgacttacctctttttgaaaagagagtttttattaagtgaaccatcacgatattggctgaaaagttctacattctattattggattggaacacacatggattgatgattttcattaagagtttcagattaactttgaaaaatattccacatgggtaatcttataaattctgtttaaattacatctgaaaatattaggggtggggatatattccaataaagtaaaatcaaattggcccnncangagagggcgcgcacggaacagacacaagggccggggaggcgggcgggaccgcgcagagacacagaaaggcgagccccccgggggggcgggcccctcagagaatcccccccgg

SEQ ID NO: 46924 - DNA, 729 bp, Homo Sapiens
ccacagcgatgtcatgatgacacagtcggaccccttgatgtctcaggccagcaccgctgtgtctgcccagaattcccgccggaacgtgatgcttcgcaatgatccgatgatgtcctttgctgcccagcctaaccagggaagtttggtcaatcagaacttgctccaccaccagcaccaaacccagggcgctcttggtggcagccgtgccttgtcgaattctgtcagcaacatgggcttgagtgagtccagcagccttgggtcagccaaacaccagcagcagtctcctgtcagccagtctatgcaaaccctctcggactctctctcaggctcctccttgtactcaactagtgcaaacctgcccgtcatgggccatgagaagttccccagcgacttggacctggacatgttcaatgggagcttggaatgtgacatggagtccattatccgtagtgaactcatggatgctgatgggttggattttaactttgattccctcatctccacacagaatgttgttggtttgaacgtggggaacttcactggtgctaagcaggcctcatctcagagctgggtgccaggctgaaggatcactgaggaaggggaagtgggcaaagcagaccctcaaactgacacaagacctacagagaaaaccctttgccaaatctgctctcagcaagtggacagtgataccgtttacagcttaacacctttgtgaatcccacgccattt

SEQ ID NO: 46925 - DNA, 859 bp, Homo Sapiens
  misc_feature (634)..(634): n is a, c, g, or t
  misc_feature (691)..(691): n is a, c, g, or t
  misc_feature (712)..(712): n is a, c, g, or t
  misc_feature (796)..(796): n is a, c, g, or t
  misc_feature (827)..(827): n is a, c, g, or t
  misc_feature (832)..(832): n is a, c, g, or t
  misc_feature (838)..(838): n is a, c, g, or t
ggcatttcaagcttaggctggcgttacttttgctgtctagtcaggactaatcacggtgtttcagtgcggagtgccaagagtcctatcctgacgtcaggctctgggtgtcaacctctgacttattctgcagatgctctgtgtgtgtgtgtgtgtgtgtgtgtgtgtgtgtgtgtgtgtgtgtgtgtgttcggggagagggtggtagcacagggcttgggatatcggcggtgtgggaaatgcgaagcatttctcatcatcatcatctctgctacagtcatgtttctgcatgtcagcgagcgacactgtccctgcctcaaggtggaggttttatcagccaaagtgtttttttcatgtatcgtttgttccattcatccactctgtgccttggcagccctttgaaaggcttggtttgctcccaggctggctgtttctcaagggacctttaaagggggaccctggttaagtccttgggggcagaaaaggtatcctacttgggggcacctcttctttccaaaaaaaagaaccttgctcctccccatttttccattaaaaacaaaggccttccctggtggtggtggtctcctgggaaaaaactcttcccataaatgggaaatgcttttgtttgccacctgtnttcccccaaggggaagattgggcttgcccatttaaaaaaccctgaaaggaacccccncctttgggggggaacccaatncactggttcctttttccccgctgggttgccccttaataaatatccgcccccctgggaaaaaaaatttccctttggggcagaganaggcgagaaaagcaaaactcccgccagagcnccttntacctnaaggggcgctcaagagttcgc

SEQ ID NO: 46926 - DNA, 948 bp, Homo Sapiens
  misc_feature (50)..(50): n is a, c, g, or t
  misc_feature (601)..(601): n is a, c, g, or t
  misc_feature (664)..(664): n is a, c, g, or t
taaaattcttctagaagccaagccttcccttctgatcattatgctattgnagtacaactacaacttcacggacttaacattgaagaaagtatgcggatgataaagccaagagagggggaagaaaccttaagaatagaggatatccttgaagtaattgagaaggaaggagactcaattgcagtgatcctgttcagtggggtgcatttttacactggacagcactttaatattcctgccatcacaaaagctggacaagcgaagggttgttatgttggctttgatctagcacatgcagttggaaatgttgaactctacttacatgactggggagttgattttgcctgctggtgttcctacaagtatttaaatgcaggagcaggaggaattgctggtgccttcattcatgaaaagcatgcccatacgattaaacctgcattagtgggatggtttggccatgaactcagcaccagatttaagatggataacaaactgcagttaatccctggggtctgtggattccgaatttcaaatcctcccattttgttggtctgttccttgcatgctagtttagagatctttaagcagcgacaatgaaggcatntgcggaaaaatctgttttgctaactggctatctggaatacctgatcaagcataactatggcanagataaagcagcaaccaggaaaccagttgggaccataattactccgtctcatgtagaggagcggggggtcccagctaaacaatacattttctggttcaaacaaaagatgtttttccaggaactagaaaaagagggagtgttttgtgacaagcggaatccaaatggcatttcgagtggctccagttcctctctataaattctttccctggagtgttataaaatttaccaatccgggtcattttttattcttggactttggagaaaaccaaaaataagccagggtt

SEQ ID NO: 46927 - DNA, 519 bp, Homo Sapiens
gctgttgggtctttcagctccttgggtggtagggaggacacaggctggggaggtggcagtgttgggtggagtccagctcagggccccaccctctcccctgcagggtacctgtcagtaaacctaggggtggggtgaggacacctgagggcctcccgtgtggccagcattgctgttgctgacttattgcccaatgagggggctgtgcttaggtaggggctgctatccactctggaaattaagtcagaaagatgagtgtaatctggtacccaggatctatagggtcccagagacggacattccttacctcaaatgctgcctgataaactggctctctttaatgccaatatggggatagtgaaaagcaaacaaactttaaaactttttatttatagaagtaatgcatgagtatttgagaaaaaaaatggagaaaaaagtattggaagacaagagcaccatagggacaataatgcttatcatttgggaatgacgaatgttttcagtctctttccctttgctcag

SEQ ID NO: 46928 - DNA, 597 bp, Homo Sapiens
actctatgaacagcacatggtgagccccatggttcatgtctatagaagtccatcctttggtccaaagcatctggaagaggaagaagagaggaatgagaaagaaggaagtgatgcaaaacatctccaaagaagtcttttggaacaggaaaatcattcaccactcacagggtcaaatatgaaatacaaaaccacgaaccaatcaacagaatttttatccttccaagatgccagctcattgtacagaaacattttagaaaaagaaagggaacttcagcaactgggaatcacagaatacctaaggaaaaacattgctcagctccagcctgatatggaggcacattatcctggagcccacgaagagctgaagttaatggaaacattaatgtactcacgtccaaggaaggtattagtggaacagacaaaaaatgagtattttgaacttaaagctaatttacatgctgaacctgactatttagaagtcctggagcagcaaacatagatggagagtttgagggctttcgcagaaatgctgtgattctgttttaagtccataccttgtaaataagtgccttacgtgagtgtgtcatcaatcagaac

SEQ ID NO: 46929 - DNA, 835 bp, Homo Sapiens
gggcctgccaggactcctgtctctgggtgaggccgcatccttcaaggcccatgtgggctgtgcgtttctcagaccctccttctgtccctacacctgctccttggaccccccagtctgtggccaccctgaagaatgtgcagaaacacttgtgtggcctgtccctgtctctctgacagccttccatttgtgaagtgccctgtggccccctccccagcacctctgtctgccatgcgcttcttcctcccaggctaccctgagcctttcctggcccagtcctcaccacagtccacagaagccacaaacaggctcatagccaagctgtgacctggtcctgaccatctggggcacgagggcctgggctggccctgctaggctggagaagccctgtcacctgtgcacatcttgctggtggaggcatggcccactgtgcaggacccacctcgggggctttcggcttcccacactgatgattctccccagcatccagaccggggcctggcgctacgtactcaggcccccagctctcgtgtcctggaggaagagctagctccagacatgggttgatcacctagaaggagctctggctaaggcacagtatatctagaaaatcaaccatgtattcgcggtttcccaagaaaaaacaacaaacaccacagcagcacacccatgtgtgcgcacggtcgacagccgtgaaaagaggcgtcgaaacgcacagaggtgggacccggagcgcggagggacagacacgccggccaaacgcggcccagagagagccggggcacgacaaagggcgggactccccatgaaagcgcccgcgggacacagcgttggcaca

SEQ ID NO: 46930 - DNA, 1098 bp, Homo Sapiens
ggattgtggatgcactaagcattgtctgccagcttcgtatggatagaggtggaatggtgcaaaccagtgagcagtatgaatttgtgcaccatgctctgtgcctgtatgagagcagactttcagcagagactgtccagtgagtcattgaagacttgtcagaccatcaatctcttggggtgattaatcaaattacccacccaaggcttctagaaggagcttcctgcaatggaaggaaggagaagctctgaagcccatgtatggcatggattgtggaagactgggcaacatatttaagatttccagctccttgtgtatatgaatgcatttgtaagcatcccccaaattattctgaaggttttttgatgatggaggtatgataggtttatcacacagcctaaggcagattttgttttgtctgtactgactctatctgccacacagaatgtatgtatgtaatattcagtaataaatgtcatcaggtgatgactggatgagctgctgaagacattcgtattatgtgttagatgctttaatgtttgcmaaatctgtcttgtgaatggactgtcagctgttaaactgttcctgttttgaagtgctattacctttctcagttaccagaatcttgctgctaaagttgcaagtgattgataatggatttttaacagagaagtctttgtttttgaaaaacaaaaatcaaaaacagtaactattttatatggaaatgtgtcttgataatattacctattaaatgtgtatttatagtcctcctatcaaacaattacagagcacaatgattgtcattgggtatatatgtatttactctctattattgggcataaaggtggcttctgctccagaactctatccactgtatttccacatcgtgagtyattttactttaaaagggggaaaacaaatttgtagccactctgragtatcmagagtttthactacytgtctctctttttctaagaagggattttkaatatkctatctacckggawctcycycycacaaaaggkawwgcctcaggawkatatatctgtccmttttcggggtccttataaggmattccwgkakkccttcattctgraactt

SEQ ID NO: 46931 - DNA, 576 bp, Homo Sapiens
aaggtctgagtaccctgtagttgacctcttccctgcatgctgaccttccttgctcaccctttaaaaagtcagtggtctggtgagatccctcttgggaaaggctatatattgggttggctcccttcccctgtttcccagttgggagagtatttgggacccctttatgttgctctgatgggtttaaagtttcagtagctatatgtcccctggaagaggaaatggtggtggtaggggaagtggtgtggaaagtggagaaggtaaaagggacagcctttcctcgtgtttcttttgacatatggcctttcatggattctgagaacatggtcttcacactaattcattcatcttctaagcctacttcccctcctaacctatctgatggagtcattacaagcacgtgattagtatatgtaaagcatggctgactcacaggagatgctcaaaaactattagcaatttcattatcaaaaattgtttttttcaggtttggggctaaattaatctgtttctctgtctaaaccctgttatgtatccataattccaataaaaattcttcttgctaaaaaaaaaaaaaaa

SEQ ID NO: 46932 - DNA, 953 bp, Homo Sapiens
  misc_feature (56)..(56): n is a, c, g, or t
tccgggcacccacgtgcacgccgcaggkkgggrggcccagggtgdrrggcaccagnggcacccggtcctcttggtcatgactgctgcggcttctgagcagtggtggaggtggggcaggcactgctccccccacgctcacctcccacgtggcctggacttgtggctgcctcccgctggccgggcctcccccatgaggccgagtgcctggtgccgtgttgggaggacagagctggcccatccccgcccggtccccaccgctgtcgctgataccatctggcacttcctcccagccttcctgaggcagccaagtacgcttggctttggtgtgtattggagccacggcacgtttaactggcagaaggaagatgtgaaaatattttgaatcctttgtacacaaagagaaaatgaatcttttcagttatttccaagccaggaaactcgctccgtcacatgaagttagagcaggcctcagtcagctgggcgcaggggctcacgcctgggatcccagcatttggtaggccaaggcaggacgatcactttgcccaggagttcaagaccagcctgggcaacaagcgagacgccctatttaagaaataatataaaatcagaaaaaataactggccgcagttctctgggtgcttgaagtacgtggcgcctggaattggctgtaccagcgtctcccatggaggcctctgctgttagcagccgccccgccctggagatgtttttatcccattttcaaatgaagcctttgatgtttgagacgctgaggaacgctggggaactcgtccmccamgtgacmsgcmsasctgcmttggggggmggggcmccggggaggggmtctggggytcgtggggcmcgasasamcsamsttgcgstggtgcmggggcgtggcttktgcmgaggagtttktgyttkccacgggmcmccgcckggmgccccccctgtggmcc

SEQ ID NO: 46933 - DNA, 708 bp, Homo Sapiens
  misc_feature (662)..(662): n is a, c, g, or t
  misc_feature (686)..(687): n is a, c, g, or t
gctggtccactgtgcctgaattccaaagagaggaaggtataatgaggtatgtctgaccacccattcccatcatggcctgagctagtgtttcaggtttactttagaatgctcttggccaagtggaagggtcgattcagttggttgtgtgcttagaattttatttttgacttacatagactatcagctgcttcatgtcacatctcatgcttctcttatgttgcccagttttctcagtgcttccgactgcatgtttttgtactatatgaaaagccttctttctagaagactaccaattaaatatttctttagaaaaatgtaaaaaaaaaaaaaaaaaaggacgcggccgcaagcttattccctttagtgagggttaattttagcttggcactggccgtcgttttacaacgtcgtgactgggaaaaccctggcgttacccaacttaatcgccttgcagcacatccccctttcgccagctggcgtaatagcgaagaggcccgcaccgatcgcccttcccaacagttgcgcagcctgaatggcgaatgggacgcgccctgtagcggcgcattaagcgcggcgggtgtgggtggttacgcgcagcgtgaccgctacacttgccagcgccctagcgcccgctcctttcgctttcttcccttcctttctcngcacgttcgccggctttccccgtnncagctctaatcgggggctccc

SEQ ID NO: 46934 - DNA, 1030 bp, Homo Sapiens
  misc_feature (558)..(558): n is a, c, g, or t
atccctgctcagtgtattttgttcttgtaagaagtcatgggtaactgagagtatcacatactatctgtggcttcacacgtggaagatgggaggctctggaaggaagaggggattgctgaccccttggcctctccccactccttctctctgtctcttccctctctccagggggtgacatccgttcaccacctaggaggggagctccttggaccawacagcagacgttgtctgggtgacaraaatggagatgttcagcagaacagccgtgccatgagcataggactgacatcttccccctgtggtgtctccttctgcaggtgccttattaagtggctggaggttcgtaaagtgtgtcccctgtgcaacatgccagttctacagctggcccagttgcacagtaagcaggaccgtggaccccctcaggggccccttcctggggcagagaacattgtatagcttaccgcaaggatcagactgttgctggacacgacgtctgtgtggagccaggaggaacacatgtggtgtctgtatggctgctctctacctaggacaccagcngccacttcttttgcctcaagaagaactcttgggccagccaaactgggaactaggtgtctgggtcttgtgacaaccaaagcactttgacactaccccctgccgagagaagaggagtggatgagcctgcgggtttgcctcaagaaacttcatgagggtctcttactaactccattacactctctctcctggagcctcawctccatgtcaagcaggagggtaaagaagggaactaagagcaggtctttcaagccacacccccacctgcggatggatgggtttctctgtaggccatgcaggcytttgtcgcagcaaamcttcccagcarcccttgagccaartaaaaacagcaccamcagccaccagtggttggtgaggcgtacccmcaargctcatgttgtwtgctttgaaaaggcatctkgcttkgagtrcatttcctcgtcmccawtccccycaggttaaaaactgccataaa

SEQ ID NO: 46935 - DNA, 462 bp, Homo Sapiens
atcaacgaatcagagcctaccacaaacatccaaattcggcttgcagacggcgggaggctggtgcagaaatttaaccacagccacaggatcagcgacatccgactcttcatcgtggatgcccggccagccatggctgccaccagctttatcctcatgactactttcccgaacaaagagctggctgatgagagccagaccctgaaggaagccaacctgctcaatgctgtcatcgtgcagcggttaacataaccgcccagccagctgcctggcctccctcctgtgtttcccatggccagtggccatgccccatggggatcgcccctcctgcccccttgtgcatacccagcagtccagtgcaacgtctcctccatagctctgggttcttagatcttggttggacgtttgttttctccttagttgcatttcctgggtttttgtgatgatcaatggactttaatgaaa

SEQ ID NO: 46936 - DNA, 603 bp, Homo Sapiens
attttagtgaggattctacacgtagattgttcaaatttccttttctgtggaataataaaacttcaaatctacattatcttctttttactattctagaagattcactttataaaatgtgcatcttaaggagacatactgatatttctcaatctgtgagtaatggactaattgctattaaatttgggagctttacatatgccacaacagaaaaagtcagaagaagcatctacagttgtttagatgcacagttttatgatgatgaaactgtaacagtagttcttaaagacactgtaggacgtgaaggaagagatagactcttggtccagctgcctttgtctttagtatataacagtgaagattctgcagaatatcagttcactgggacttattctacaaggctagatgaacagtgtagtgctattcccacccgtaccatgcattttgagaagcactggagattactggaaagtatgaaagcacagtatgttgctgggaatggttttcgaaaagtgtcctgtgtgttaagctcaaatcttcgtcatgtgagagtatttgaaatggacatagatgatgaatgggagctcgatgagtcttcagatgaag

SEQ ID NO: 46937 - DNA, 517 bp, Homo Sapiens
tggccccccgaccttgtagaaaaacccctaccctcacaataccttatttaagtaactttaaattatgccgttacttttcatatttgcactaagatatttccaggctgcatttgtatatttagattttttggttaagctttgacactggaatgagttgaaaaaatgtgccattttgcattttcatctactcatttaaagtattttattcttattcaaagaaatatctgagctctttgcactacctgttatcagtagtgcctttacttcaggcttgataatacttaggtgtgattataaaatcatgaagcaggtaaagggaggggcaagcccccaaactgctgtggggacattttataatctatatgctgcacccacttaatctactgtggtgttttgtttattagttttgcataatttcagcttctatatattgtatgtatatattttttaaaaatctatattttgggaaaaaaacatacacaatgtgtctttctttttggacatttacctttttgaa

SEQ ID NO: 46938 - DNA, 569 bp, Homo Sapiens
  misc_feature (540)..(540): n is a, c, g, or t
gtcacttcagcctccaagctactttggcttctgcctggctcaggagacctggattctggtccctgctgtccctgcctggctgagcgacccagggcaggtcccgtccctgtctgggtgggcctcaggccatctggccgcctagcgagggtcctgctttcttcctgctgtcttgggaccaggcttctgctcctcctcagccagcggcagaagcagggctgatgctcagggaccccccaaccctcaaaccttgcctccgaggctgggcctgagctgggtgccccgtcgccctcccaggccactaggctctgactcttccagcacccatggatgtgccagaggcctctgggttggtttgcatgtcatttgcatatcgtttgcatgccctcatcccacccattctcagggcagtatgggaagccccaaggtgacctggccaagtagcaataatttgggtccagggtcacctattgcccccagaggcctctgaaccccaggctgggaccccagcacagaggcaataaaggcagtggtcccttccanaaaaaaaaaaaaaaaaaaacacataatgg

SEQ ID NO: 46939 - DNA, 528 bp, Homo Sapiens
  misc_feature (168)..(168): n is a, c, g, or t
  misc_feature (181)..(181): n is a, c, g, or t
  misc_feature (312)..(312): n is a, c, g, or t
  misc_feature (328)..(328): n is a, c, g, or t
  misc_feature (348)..(348): n is a, c, g, or t
  misc_feature (377)..(377): n is a, c, g, or t
  misc_feature (447)..(447): n is a, c, g, or t
  misc_feature (454)..(454): n is a, c, g, or t
tttttttttttttttttttttttttttttttttaagaatatactttgatttaatatgtatgttagtaaaactccacgtgttgtaaccattattatgtttttgtttttaaaatggggatgtaatactaataaccactacctataaaataaagcacacaattgttccggngattttacaaatntttttttccaggtgtaaagtctacaaaaattccaaaaaattagagaacactgaaaacatattaaagtttgacatccaactttatagtatttccatgttaccctgaaagataacttaaaaaatatggccttnttagaacaggccactntgctattataaaaaattggngacagcaagaaattgtatcactgatatgnggaatttttgtaaatagttttctctccaaatcattagaaaaatgttcaaaaataaaaacaaaataaaatntgggggnggtccctaaactattttgaaggcaggtagcttagtctaagctaaaatatttttttcattcatagcaataatccc

SEQ ID NO: 46940 - DNA, 742 bp, Homo Sapiens
ggcatccaggaaggaccttgctttggaccctacacacttcggctctctggacacttgcgacacctcaaggtgttctctgtagctcaatctgcaaacatgccaggcctcagggatcctctgctgggtgcctccttgccttgggaccatggccaccccagagccatccgatcgatggatgggatgcactctcagaccaagcagcaggaattcaaagctgcttgctgtaactgtgtgagattgtgaagtggtctgaattctggaatcacaaaccaagccatgctggtgggccattaatggttggaaaacactttcatccggggctttgccagagcgtgctttcaagtgtcctggaaagtctgctgcttctccaagctttcagacaagaatgtgcactctctgcttaggttttgcttgggaaactcaacttctttcctctggagacggggcatctccctctgatttccttctgctatgacaaaacctttaatctgcaccttacaactcggggacaaatggggacaggaaggatcaagttgtagagagaaaaagaaaacaagagatatacattgtgatatattagggacactttcacagtcctgtcctctggatcacagacactgcacagacctttaggaatggcaggttcaagttccacttcttggtggggatgagaagggaaaaagaactagagggaccaagagaatgagaagacatgaatgatctgggaaagtctcactttggg

SEQ ID NO: 46941 - DNA, 789 bp, Homo Sapiens
  misc_feature (162)..(162): n is a, c, g, or t
agaagaaacttaaggaatgacttgctagtggctgagattccatcactaacactatgtctctcttgtgaaagagctgaattctgaggttgggagtgaaacagagagtaatgtggattctgaatttgcacggactcagtttgaggatcttgttccctcaccaanctctgaaaaggcttttctagcgcaaatccatgcccgaaaacctgggtacattcacagtggagctaccacaagtaccatgcgtggcgacatggttacggaggatgcagatccctatgtgcagcctgaagatgaaaactatgaaaatgactctgtccggcagctggagaatgagctccagatggaggaatacctgaaacagaagctgcaagatgaagcttatcaggtcagcttgcaaggttgaatgcaatatccttttatcacactcctctcaagcaagctatagtcagacagatgatgaaagtaacatgaaaactggtgatgatggagagccctgtggtcacacagaggaggaagacagcagcctggcagcaggctcaccgaagagaggagacaccaaaccaagaagtcctgaagaaccccacccctaagatgtgtctgatgacttagtgcgctactttggtctcgaatgtggggaaggtggtgtcgaaggacgtgttaaacaggcacccaataattgtaaataacagttaaagaaaagtacaataattagttttatatctcggactcattttgtcgttgctgccacccatcatttctttctcatgtcggacaacacgaagagggggg

SEQ ID NO: 46942 - DNA, 865 bp, Homo Sapiens
gcctcatcttgcctcaagggcattgcttagagatttccagaatgtcattacttaatggaaaatttatagggtctgcttccttttgggacagcttggctctgcaccctggccgcctgtgtccttgtggctgggctgctcctgcccctgcctgccatcacttacctggcgtgtgcttggtgcgcagcatcagctatatgtttctggagctgctttctaggagaaatctaatcatagaaaccaaactgaatggcattccttggcctcactctttgtaccctccatcttggaatccaggcttccacagtgcctttaggcctcccctccccttgaccccatcacacttgtccccattggtcactttggacttgctggtcctgctgcacggaagccctctccagcctactccacatgtgagtggggttaaaccccactgacttgtttccttgtctgtgaatgctgtccttctaccaatacttgtgtccagtcacttggtgtgtcctgtaatctatctgtggtctggaccaagactggtacactggacccaaggttccagcaagctgatatgggcttgtcatttgtccctgtgtcttctcctatctcactggcctcctatctccacagcctagtccatggagttgctttatgtagcaaattctccgtttggagcttttaaaataggattatttgccagaactgcatttacaaaaaaagtttgtgtaatcctggtttaaataaattactcaaagtaattcactggcagctagggtgcctagtgtgtgctaggcataaagctgcttctgaacccactaaaagttcatcccagaatgatatctccactgagttcttaggtttattactagagatg

SEQ ID NO: 46943 - DNA, 603 bp, Homo Sapiens
tgaggggaagctctgggtggcctgttacaatggaggaagagtgattcgtttagatcctgtgacagggaaaagacttcaaactgtgaagttgcctgttgataaaacaacttcatgctgctttggagggaagaattactctgaaatgtatgtgacctgcgcccgggatgggatggaccccgagggtcttttgaggcaacctgaagctggtggaattttcaagataactggtctgggggtcaaaggaattgctccctactcctatgcgggatgaggacaggtcttctttcctgccagagggagctctgaagacaactagagaattctgggcctgaaatttcaatctagttagaaagaaaaatgaggcaatgattttattaacagcgttaagttttaatttacaacttttaaaaggcagagcatttttaacaaggggtgacaggtggttttgataacacacttataaggctttctgtaaaaggtactatagaagggcgaagaatcgttcaactgtcaatcagcctcttgattctttgtaaattgccagggtgggtgggtacatatctcttcttgattctgcatttcatacttaactatattaaagct

SEQ ID NO: 46944 - DNA, 774 bp, Homo Sapiens
  misc_feature (596)..(596): n is a, c, g, or t
  misc_feature (649)..(650): n is a, c, g, or t
  misc_feature (674)..(674): n is a, c, g, or t
  misc_feature (687)..(687): n is a, c, g, or t
  misc_feature (706)..(706): n is a, c, g, or t
  misc_feature (736)..(736): n is a, c, g, or t
  misc_feature (760)..(760): n is a, c, g, or t
  misc_feature (769)..(769): n is a, c, g, or t
  misc_feature (771)..(771): n is a, c, g, or t
tgaccactgtggaatgtactggagagactggcttctcagctgaggaatgcatttccatcagtgaagaatcaaccggacctgttgctagcaggcaatctccatttctcagtgacagaagcatgtttgagatgccgtgggaaaccaaatatataataataaaaatataaaaaggtgatgttcaacagaagtgaagacaaaacaatatgcatcaggagaacaagagtaaacccagctcccactctcagtgggctgcagttgcccaaccacaggaagaaagggaaggaggtagagggaagaaacagaagcagtgttccattttcttcctcaccaatgacattcttttcttttctcctttcgtactcctccctgagagtcccctcccttctcccacactcgtttccctttgctcatgactcctgtagggaagtttcttcaaacaaaacccagctcctgagtctccagatgttgttctgtcagttgccaaaggactttgctgaccactgcatggggatccaaccaattcaattaatgtcttcatattgaagaagagatgtaccttcaattgaaaacctcgtttttcttttggttgcattttngcaaaaaagggaaaaaggaaacccccaaattggggggaaaaaaaaaaaagaannaaaaaaccctgttttcccggtggngccaaaaaagccnccccaataatggtaatggncctgggggttaataaaaaaaggaactgggnggctttggtttccggtaaaccaanaatggcccnanccc

SEQ ID NO: 46945 - DNA, 686 bp, Homo Sapiens
  misc_feature (565)..(565): n is a, c, g, or t
gctacgtgttcactgaatgagactgcccaaggcttaccagagattagatgctacagaatgagagtggaattgtaatattagagatagagccgtggggaatctggagttccaacccagtcaacatggagaaatccttgttaacttcagttatctagctgagataacacaaaagataggtttgaggaacaaggaccatgctctaatataaggcctactctagacccaggctaagactagtaaaagaaggccccaattaattcttacagggtagaccaaatttggacaatgagtctcaccgagatagagaagcctgggaaatatcctgagctttcagcagatcagcataccaaaggttaaatccaaacctatacaagttcaaggagtcaactattaactgacttatatgtactagaataaaaatcactgctcctcagaagaaattaacagaaccatatttgcaatatatcccatgttgaacttttaattaccagacatgcaaagaatcaggaacatatgatctatagagcagaaaagagcatgcagtagaaatcacctctgaggagtnctatttggtttaaacagaaaaaaaaaaaaaaaaactcgagggggggcccggtacccattttcgcctatagggaggtggattacaattcactggccgtcggtttacaacggtgtgaactggg

SEQ ID NO: 46946 - DNA, 1057 bp, Homo Sapiens
gaagattggagaaggcttgtattagtcccaagccacagaagccatgggataaagatgcctgggagawcccccgggagtccatcaagttggtgaaaaggcttggcgctgggcagtttggggaagtctggatgggttacwawaacaamagtaccaaggtggctgtgaaaaccctgaagccaggaactawgtctgtgcaagccttcctggaagaagccaacctcatgaagaccctgcagcatgacaagctcgtgaggctctacgctgtggtcaccagggaggagcccatttacatcawcaccgagtacatggccaagggcagtttgctggatttcctgaagagcgatgaaggtggcaaagtgctgcttccaaagctcattgacttttctgctcagattgcagagggaatggcatacatcgagcggaagaactacattcaccgggacctgcgagcagctaatgttctggtctccgagtcactcatgtgcaaaattgcagattttggccttgctagagtaattgaagataatgagtacacagcaagggaaggtgctaagttccctattaagtggacggctccagaagcaatacaactttggatgtttcactattaagtctgatgtgtggtcctttggaatcctcctatacgaaattgtcacctatgggaaaattccctacccagggagaactaatgccgacgtgatgaccgccctgtcccagggctacaggatgccccgtgtggagaactgcccagatgagctctatgacattatgaaaatgtgctggaaagaaaaggcagaagagagaccaacgtttgactacttacagagcgtcctggatgatttctacacagccacggaagggcaataccagcagcagccttagagcacagggagaccgktccatttggcaggggtggctgcctcatttagagaggaaaagtaamcatcactggttkcwcttatgwtttatgtgcggggatctctgcggtcctggatcygaaawaragctaaatamhcaaggaramaccyctaawgggaaatwtctgttctcttgwtgg

SEQ ID NO: 46947 - DNA, 693 bp, Homo Sapiens
ggaaaggatgagcgcctggtcactgtacgtctgcatccgtgccctccacctgacttcttccgcccgtgccgcttgctgccaaccaagaacaatgtgcgctctgcctggtaccgagggcagagtcctgcaggggatggtagcccagagcctcctaccccccgctataacacatgggtcctgcaagatacagttctcgagtcccatttgcagctgctgtcaaccattctgagttcagcccagggcctgaaggatggcgtggcacttctgaaggtctggctgcggcagcgggagctggacaagggccagggtgggtttactgggttccttgtctccatgctggttgtcttccttgtgtctacacgcaagatccataccaccatgagtggctaccaggtcctgagaagtgtcttgcagtttctggccactacagacctgacagtcaacgggatcagtttatgtctcagctcagatccctctttgccggccctggctgacttccaccaggccttctccgttgtcttcctggattcctcaggccatctcaacctctgtgctgatgtcactgcctctacttaccaccaggtacagcatgaggcacggctgtctatgatgttgctggacagcagagctgacgacgggttccacctgctgttgatgactcccaaacccatgatccgggcttttgaccatgtc

SEQ ID NO: 46948 - DNA, 581 bp, Homo Sapiens
gataaagaatagttttcttcctcttctccttgggccagttaataattggtccatggctacactgcaacttccgtccagtgctgtgatgcccatgacacctgcaaaataagttctgcctgggcattttgtagatattaacaggtgaattcccgactcttttggtttgaatgacagttctcattccttctatggctgcaagtatgcatcagtgcttcccacttacctgatttgtctgtcggtggccccatatggaaaccctgcgtgtctgttggcataatagtttacaaatggttttttcagtcctatccaaatttattgaaccaacaaaaataattacttctgccctgagataagcagattaagtttgttcattctctgctttattctctccatgtggcaacattctgtcagcctctttcatagtgtgcaaacattttatcattctaaatggtgactctctgcccttggacccatttattattcacagatggggagaacctatctgcatggacctctgtggaccacagcgtacctgcccctttctgccctcctgctccagccccacttctgaaagtatcagc

SEQ ID NO: 46949 - DNA, 569 bp, Homo Sapiens
aatcaactattgaacaagatcaatgaaccaccaaagccagctcccagacaagtttccctgccagttaccaaatctactgacaatgcatttgagaaccctttctttaaagattcttttggttcatcacaagcctctgtggcttcttctcaacctgtatcttctgagatgtatagggatccatttggaaatccttttgcctaaattctgaacttggtctgcagaccatccagaggaataaaaaggttggccttagtagtcaaaaacaaagctgatagccagacacgttctgatttctgcccttgttccagctttgacgtattatctgttgccttatttctcattgcctcttctacttgtaaaatgcttttcactttctgtctaggttaaagctaaactgaatctatggctttaaataaattaagatcctaaactctctagcttaagtgtaaatgaagtacagtagtttccctactgaaccctgcctcttgtgtccctggaaccttctagaacacctgccttctaccctctggttgggagatgcagccaccacatcccttcatatcatactg

SEQ ID NO: 46950 - DNA, 744 bp, Homo Sapiens
acagcccctgacctccctcaccagtggaggctgggtagtgctggccatcccaaaagggctctgtcctgggagtctggtgtgtctcctacatgcaatttccacggacccagctctgtggagggcatgactgctggccagaagctagtggtcctggggccctatggttcgactgagtccacactcccctggagcctggctggcctctgcaaacaaacataattttggggaccttccttcctgtttcttcccaccctgtcttctcccctaggtggttcctgagcccccacccccaatcccagtgctacacctgaggttctggagctcagaatctgacagcctctcccccattctgtgtgtgtcggggggacagagggaaccatttaagaaaagataccaaagtagaagtcaaaagaaagacatgttggctataggcgtggtggctcatgcctataatcccagcactttgggaagccggggtaggaggatcaccagaggccaggaggtccacaccagcctgggcaacacagcaagacaccgcatctacagaaaaattttaaaattagctgggcgtggtggtgtgtacctgtaggcctagctgctcaggaggctgaagcaggaggatcacttgagcctgagttcaacactgcagtgagctatggtggcaccactgcactccagcctgggtgacagagcaagaccctgtctctaaaataaattttaaaaagacataaaaaaaaaaaaaaa

SEQ ID NO: 46951 - DNA, 577 bp, Homo Sapiens
tccggaattcccgggtcgagactacgttgttttaagaacctggaggactaatttacccaaaggagcctgtgcccttttactaacctctgtggatcacgatcgcgcacctgtggtgggtgtgagggttaatgtgctcttgtccaggtatttgattgaaccctgtgggccaggaaaatccaaactcacctacatgtgcagagttgacttaaggggccacatgccagaatggtacacaaaatcttttggacatttgtgtgcagctgaagttgtaaagatccgggattccttcagtaaccagaacactgaaaccaaagacaccaaatctaggtgatcactgaagcaacgcaaccgcttccaccaccatggtgtttgtttctagaacttttgccagtccttgaagaatgggttctgtgtctaatcctgaaacaaagaaaactacaagctggagtgtaggaattgactatagcaatttgatacatttttaaagctgctttctgtttgttgagggtctgtattcatagaccttgactggaatatgtaagactgtgcaaaaaaaaaaaaaaaatttatgtgtatt

SEQ ID NO: 46952 - DNA, 696 bp, Homo Sapiens
  misc_feature (473)..(473): n is a, c, g, or t
  misc_feature (566)..(566): n is a, c, g, or t
ctgggcaacagagcgaggtcccgtttcttaaaaaacatgtatgtgtgtggcgtgtgtatatatatgtatatatattttttcattgtattattacggagactttcaaacatatatagaaagagcataatgaagcctgcatgtgcccagcttcaataattaccaatatcttgccagttttgtttcgtttctccttttattctctgtattgagcaagtcttagacatcatacgtttcacgcgtaagtaccttattctacatcattaaccagtaaggactttttaattaaccacaataccactatcacacctaataatagtaattccttatggatcttttctttagacctatttttgaaggcataaaagcagttgagtttctggagaatttttggatggtgattaatgacttgactggctgctcttcccagagctgtggcagctctcccgtagaagatggggtttgtattggcccancaagatctccaacagccagtgtgtgtttccatctcttgtaggttcatcaatggtgagcaccagcctgaatgcagaagcgctccagtatctccnaaggtaccttcaggcagccaggtgtgacactgctttaaactgcctttttcttaatgggctaaacccagaatggtttcctaggaaatcacagggcttctgaagcacagctgcatttaaaacaaaaggaagt

SEQ ID NO: 46953 - DNA, 679 bp, Homo Sapiens
tgaataaccccaaaattgacctggcacagtcacttcacaagttgtctaccgcctgtccaggaagggttccatcaatggtgagcaccagcctgaatgcagaagcgctccagtatctccaagggtaccttcaggcagccagtgtgacactgctttaaactgcatttttctaatgggctaaacccagatggtttcctaggaaatcacaggcttctgagcacagctgcattaaaacaaaggaagttctccttttgaacttgtcacgaattccatcttgtaaaggatattaaatgttgctttaacctgaaccttgagcaaattagttggtttgtgtgatcatacagttatgtgggtggcttctagtttgcaacttcaagggacaagtattaatagttcagtgtatggcgttggtttgtgttgagcgtttgcacggtttggataatcttaaattttgacggacactgtggagactttctgttactaaatccttttgttttgaagctgttgctatttgtatttctcttgtcctttatattttttgtctgtttatttacgcttttattggaaatgtgaataagtaaagaattacttgtgttacttgccaagcagtgcacatttcatagtttcaaatctgtaatcagcaataaaaatcctaaaatatgtacctaaaaaaaaaaaaaaa

SEQ ID NO: 46954 - DNA, 666 bp, Homo Sapiens
  misc_feature (329)..(329): n is a, c, g, or t
  misc_feature (343)..(343): n is a, c, g, or t
  misc_feature (598)..(598): n is a, c, g, or t
tagagatacaaaatgtttaaatgtagcacaaaaattgtgactctactaataataacgtacagaagaataactccacagtagaagttaggcatccatggctgcaggttttctaagaaatgggacgtgtgggtgacctactgcactgcccactgccctctggagggaaccatggggtaattatgagtcattggccaagaagggccaggggtccacgcagcttccgccctgaggagttgcactgtgcagtacagccaggcggccacaggagccactgtggcagggaatgcatgtgtcagtgtgtcaggcgtggtcagtaaaaggagttgtanaaggtaaaccgganaaaaactcagaatttaatccctcggagtaatctttggcctctcctccttccgtgtgtgatgtttctttgtttttaattttttgaccttctgctttttgattcgggattttggagccagaatgccttggccccgccatgaggtctgacttgtgctggctactttacccttggtgcctccatttccttcactggaaaatgggtgattgtgcagagtacagtgagtcaaaccattgagagtggtgcctggcacacagnattatttaagtatttttgcacttaatttcatgtaacataaagcactaataagtaaaaaaaaaaaaaaa

SEQ ID NO: 46955 - DNA, 489 bp, Homo Sapiens
gcgtcgaccattgctttcgtgtccacaagacctggaacatagacgatgctcaataaatattatttgaaggagtgaatgatggtgacatggttcttaggagttaaaatgagaaaacccaaggagccgaaagcatgtctctacggggaaaggttagagagcactgactcaaaccatcgtctccaattatgcagttttaatgaggaagcaagcccaaccttgaacattatttaagccagagttatcccaataagcattttcctaccatgagtggtagattaagtagcattgagtcatgtagtgaaagtaatgtcccttcttcataccatttcaatgcctctggtaagtcaagagaaagtctttgataatagcctatttttaacacctctcacccttgtttgtaagaaagagcagacctcagattcagagactttagcaagcaaagatatccagtaaagaaatgaaataatggccgggcacagtggctcacgc

SEQ ID NO: 46956 - DNA, 773 bp, Homo Sapiens
  misc_feature (3)..(3): n is a, c, g, or t
  misc_feature (10)..(10): n is a, c, g, or t
cgnggccagnaattcggcacgagcggcacgaggccagatgccaccccgttccaggaaggtttgaggaccttcgaccagctggacgccatatctagtttgcccacacccagtgacatctttgtgtcctactctactttcccaggttttgtttcctggagggaccccaagagtggctcctggtacgttgagaccctggacgacatctttgagcagtgggctcactctgaagacctgcagtccctcctgcttagggtcgctaatgctgtttcggtgaaagggatttataaacagatgcctggttgctttaatttcctccggaaaaaacttttctttaaaacatcataaggccagggcccctcaccctgccttatcttgcaccccaaagctttcctgccccaggcctgaaagaggctgaggcctggactttcctgcaactcaaggactttgcagccggcacagggtctgctctttctctgccagtgacagacaggctcttagcagcttccagattgacgacaagtgctgaacagtggaggaagagggacagatgaatgccgtggattgcacgtggcctcttgagcagtggctggtccagggctagtgacttgtgtcccatgatccctgtgttgtctctagagcagggattaacctctgcactactgacatgtggggccaggtcaccctttgctgtgaggctgtcctgtacattgtgggatgttcagcactgtcccttgcctcaatgccagtaacgcgtcttcctgagtggtgccaaa

SEQ ID NO: 46957 - DNA, 732 bp, Homo Sapiens
  misc_feature (19)..(19): n is a, c, g, or t
  misc_feature (30)..(30): n is a, c, g, or t
  misc_feature (661)..(661): n is a, c, g, or t
ttaaacatttactgctggnttctgacccantaataatggattcataaatgaggattttattgtttggatgcgtactgcagcattacctacttttcgcaagttgtatcgtcttatagaaaggaaaagtgatttacatccaacattaccagctggccgatactctttgaatgtcacatacaattaccctgtacattattttgatggacgaaaacggatgatcttgagcactatttcatggatgggaggaaaaaatccatttttggggattgcttacatcgctgttggatccatctccttccttctgggagttgtactgctagtaattaatcataaatatagaaacagtagtaatacagctgacattaccatttaattttatattatgaaagcaaatcatctgcatgtgcatcaaggccagtcctattcaacctagctttcgaatgctgatatctggttagtatgtcattttgaagttggcacataacttttctaaaaaaaagcagtctttgttgtttgcttcttccctacggatgacttctaaaaatatatgacgggtataaaaaaattagctatattgatcatatcaacactgtaactgctgaaatggcattctaatgtttgctttttattcggacaggccacatgatgcatagagcctctntcatgtgacttgtgtctactgcttaaatctttatgctgtgttgatgatattatattgacatatgaagctgt

SEQ ID NO: 46958 - DNA, 630 bp, Homo Sapiens
  misc_feature (574)..(574): n is a, c, g, or t
ttttttttttttttttttgagatagcacattacaaagagtttgacagatcctttaagatgaagatctgttgatgtacttcctgtttatggtggctcccagcttcactggtgatgaggacacaggcgcctgaaacccagaggcagggtggatctgcaccacttctctgaccttgccagggctgaccttcatcattctaagggaactttttttctttttttcccctccctaagcagtggttctcaatttggggctattttactccagaaggggcttttggcaatgtttggagacatttttggttgttacagcaagacttggagctaccagcctctagtgggtagaggccaaggatgctgctgaacattctacaatgcactggactgtccccacaaaagaatgttctgtcctgaattgttgatagtgccaaggttaagaaaccctcccataagggatgttttctaggcttaaacagtggcctgtatgtgtctttctccttatttctttatttcaagaaaagaaaaacgctgccaaagcaaaagccatgcagtatgttcataataaattaccttttanaacaaatcccaggcctactcttcccgaaaatgggaaagacaaaaaaaactcgttcc

SEQ ID NO: 46959 - DNA, 586 bp, Homo Sapiens
cagtatgagtggcagcccgggcctagatctgagtctggcccctgcagagaggaaggaggcgcagccctaccttctttctggggaagagtcagaaaggctgattagcaagaggtgcggcagagagaggaaggcagggaggtgctgtctgctgcctccacctgttccccaacaggatagcaaggaaaaacccctctttctgtccatgccagaactatccttctgatggggtgctttgtttagagatggggtggcccaatccccaatcagttttacatctgagggagttcaggtatctgttgtgactggtgaagccctgtacctcctgggtattgaagaacctggacttgaagcaggaggtatctgcaaggaatgtataaagttccacatggaagctgggttgcctcccacaagtccccagtagagtggatctgtagttacccgccctgcctccctttcagggtggtcatgaggtcccagagagaccatgcatctgaagatgatttaaaacatgaaagtgtattgttgtcactgtggtaatttccttgccagtttctgagatatcaaaataaagtttgtgtttcctgaa

SEQ ID NO: 46960 - DNA, 909 bp, Homo Sapiens
  misc_feature (1)..(2): n is a, c, g, or t
  misc_feature (815)..(815): n is a, c, g, or t
  misc_feature (818)..(867): n is a, c, g, or t
nnttgaacaggcggtacggtccggattcccgggattggtctgggaagatacctggaggttttgattggggtctcggtggccttcgtcctgctgctcttcctcctcctcttcctcctcctccgacgtcagcgtcacagcaaacacaggacatctgaccagagaaagactgatttccagcgtcctgcaggggctgcggagacagagcccaaggacaggggcctgctgaggaggtccagcccagctgctgacgtccaggaagaaaacctctatgctgccgtgaaggacacacagtctgaggacagggtggagctggacagtcagagcccacacgatgaagacccccaggcagtgacgtatgccccggtgaaacactccagtcctaggagagaaatggcctctcctccctcctcactgtctggggaattcctggacacaaaggacagacaggtggaagaggacaggcagatggacactgaggctgctgcatctgaagcctcccaggatgtgacctacgcccagctgcacagcttgacccttagacggaaggcaactgagcctcctccatcccaggaaggggaacctccagctgagcccagcatctacgccactctggccatccactagcccggggggtacgcagaccccacactcagcagaaggagactcaggactgctgaaggcacgggagctgcccccagtggacaccagtgaaccccagtcagcctggacccctacacagacatgaggagagctgggaactgtgggatcactgatcaagagactatatctccatttgaatagcacgactctcacanaannnnnnnnnnnnnnnnnnnnnnnnnnnnnnnnnnnnnnnnnnnnnnnnnnaaaaaaggccaaaccgggcatcactttgaagcaggatacggc

SEQ ID NO: 46961 - DNA, 690 bp, Homo Sapiens
  misc_feature (546)..(546): n is a, c, g, or t
  misc_feature (600)..(600): n is a, c, g, or t
  misc_feature (624)..(624): n is a, c, g, or t
  misc_feature (683)..(683): n is a, c, g, or t
  misc_feature (685)..(685): n is a, c, g, or t
tgtggtggctcacgcttgtaatcccaacactttgggaggccggggtgggccaatcggtttgagctcaggagttcgagaccagcctgggcaacatggcaaaacccgatctctacaaaaaattagctgggcatggtggtgcgtgcctgtagtcccaactacttgggaaactgaggtgaggccatcgcttgaacctaggaggttgaggttgcagtgagccgtgatgccgctgcactacagcctgggcaagagggtgagaccctgtttaaaaaaaaaattatgatggctgagtctgtgtcaaagaaaattaacttattttttggtgttaactaaattatctttaggtaattacattttatatagattgtgatgatatatggcagtagttttcctattactactacttttttttcttgtttttcctttgtgtttttgtaataccagtggagccttttcttaaaatgaaactaggcaaacctaagacaattatgcttaaggaaaaaaaaaggtggggaatcttactcagaactggtttttgaaacggatcanatggaatggctcaaagcaggtgtgatggcttcctctgtaatcccaacactttgngaggctgaggtaggaggatcgttngagcacaggagttcaagatgaagcctgagcaacatagtgagaccctggctctatcaacnancaccc

SEQ ID NO: 46962 - DNA, 833 bp, Homo Sapiens
  misc_feature (3)..(3): n is a, c, g, or t
ggnagtgttatgtgcagtgtgctcaagaggcaaggttacggcgagggtttccgctggctctcccagtatattgactgatgtttggacggtgaaaataaaagagttttacttctctggactgatcctattcacagcttcctcatgaacttttctaatagaacaaggaaagctctccaaccatgtctggcgttgagaagccaagagtctctgtcaactctctcattgcccagtggtgacatgtgctcttctccacactgttgggaggtaatgctgccccacgtgctggtgcaggtcagtatcctgggacttggaagctggcaggatttgccgggtaaagctgtatgccatcatggggcacctgaaaagaaaaacacgtctcaccactgtggttgattcaaaagaaagtgattctattttttaaagaaagcgttgttaatgtaattggtatccctcctaactttttgagttcacaatttacttggtccagagttttctattcttttttttttttttaactaatgaatgacatttagatactctataaaattatgaacagatatggaggccagagctcattttgggaaacttactcctgctgagttagcaggttgggtgagagaaagctccctgagctcaactgtctttttgactgcccttggaataggtgggataacctttggcccaggagaactaaaaaaggggccgaaacccccgccttgtcattggggggaagtttccacttgggggaagcttagggtcatttctaaataaggaaaagtggtaacaaaattgtcacctgggggggggggtaatttttagaaagggttcttttg

SEQ ID NO: 46963 - DNA, 542 bp, Homo Sapiens
tttgaagagtacaaacattggcaatcacgttgaaacaagtgcaagggagggcgtgaggtcttgcaggcatctgtctttttactggagagatttaaagaattctcttgctgtttggattattcctctacagattgtcatttttaaaccctttgttctctctcatttggacttgctgaattctctgctcagtgattaacttaagatttgctcatgtgggttcatgcacagtaaattctgcctttattgactacctgatgtggtttaatctttttctttacctccatggttttttaaaagttaaattagctttctgaaagggtttttaatctccatttttttaaagttgtttgcttatacttcgggtaaccttgatatttgtattttaatagtacataatctttatgaaaaatagtttgggaatgtaaatgaattattatttggcttggggagattagggcctacattgtttatcgcaattacttgtatcattgatacgggatttctttgtaaagcatcctctacctctcagctgctgaaagcta

SEQ ID NO: 46964 - DNA, 709 bp, Homo Sapiens
cttttttgtttttttgtttttttgaggtgggagaggatgtgtgaaaatcttttccagggaaatgggttcgctgcagaggtaaggatgtgttcctgtatcgatctgcagacacccagaaggtgggtgcacactgcatgcttgggggtgccaagggattcgagacctccaacatacttgtctgaaggtggtgattctggccatggcccctctgccaagcctgtgtgcgatgcccttggtgctttagtgcaagaagcctaggctcagaagcacagcagcgccatctttccgtttcaggggttgtgatgaaggccaaggaaaaacatttatctttactattttacctacgtataaagttttagttcattgggtgtgcgaaacaccctttttatcacttttaaatttgcactttattttttttcttccatgcttgttctctggacatttggggatgtgagtgttagagctggtgagagaggagtcaggcggccttcccaccgatggtcctggcctccacctgccctctcttccctgcctgatcaccgctttccaatttgcccttcagagaacttaagtcaaggagagttgaaattcacaggccagggcacatcttttatttatttcattatgttggccaacagaacttgattgtaaataataataaagaaatctgttatatacttttcaaaaaaaacctcgtgccgaattcttg

SEQ ID NO: 46965 - DNA, 534 bp, Homo Sapiens
tgaagaaaatcctaactttcagttagaggttagtgacggggttcaggacaccctacacaaaatacagcactttgacatattgaatattttaagctgaaggcatttgaggaaattgcagaagcaggaaggtgactctgacctgcctgctgttctccccagaagcagccataaaacctgggaaggattttctgaccttcccctgaagtagatcataagactgtcatgtaagaggtgctctcctggcacccagagaaaaggagcatccttacctccaaaagcacagggacacaaagaggaatctaaacaaacaggcctctcagtttcccccagtttattacatttagcttgttcacactttgccctatgacatttctacatcactggctgctcttcatcaaacctactataaaaaacattcaagttcaactgtttctttgggcctttatttccttatggaggccctcgtgtcgtgtaaaacttatattaaataaatgtgcatgcttttaaaaaaaaaaaaaaaaaaaaaggccacat

SEQ ID NO: 46966 - DNA, 1116 bp, Homo Sapiens
  misc_feature (939)..(941): n is a, c, g, or t
  misc_feature (943)..(946): n is a, c, g, or t
  misc_feature (948)..(948): n is a, c, g, or t
  misc_feature (952)..(952): n is a, c, g, or t
  misc_feature (954)..(956): n is a, c, g, or t
  misc_feature (960)..(960): n is a, c, g, or t
  misc_feature (962)..(962): n is a, c, g, or t
  misc_feature (967)..(975): n is a, c, g, or t
  misc_feature (977)..(978): n is a, c, g, or t
cccacgcgtccgcacctcgtggcgtaggggagaggtaacaccgagaagaggcagcggcggtggcgccaagacgattggtgccaaacagggcagaacgcaactcagctctggggtgggttcctgtccagaggggtagagaagagtggctgagggcgcgccctgatctcagcgggaagagtgcgaccccgagggcgcgctagtttgtgaatagcacaatggaagaagctggactttgtgggttaagagagaaagcagatatgttgtgtaactctgaatcacatgatattcttcaacatcaagactcaaattgcagtgccacaagtaataaacatttattggaagatgaagaaggccgtgactttataacaaagaacaggagttgggtgagcccagtgcactgcacacaagagtcaagaagggagcttcctgagcaagaagtagcccctccgtctggtcagcaagctttacaatgcaacaggaacaaagaaaaagtcttaggaaaagaagttttattattgatgcaagccctaaacactctttcgactccagaggagaagctggcagctctctgtaagaaatatgctgatcttggaaattcacctcttctatagaagagtttgttttgaaactatacgatttgaaacaaaattctttttttggagactatggaaacattctcaacagggaaaccctactagactttgtaaagcaaataatggaaaagatacagaactttttgaagaatcatgggaaatttttataattaaataaatgctaaaattctggttttgtgaaacatttatggggatttatcacttgacaagtttttgtacacttttcaaatagtgtttaagcagcaaactcccctgttgtaaatgcaccaaaaccaatattttagtttaataatcaactcccaagaattaaaagctgttaccattnnntnnnnanaaanannncccncnccccnnnnnnnnnannaggggcgggcccgcctctaaaatatcccttcggagggccccagctttacccgttacccggttttttttggacaagggggtcccctatagggggccccttttataagctgggccctggccccgctcttttacaccggct

SEQ ID NO: 46967 - DNA, 561 bp, Homo Sapiens
caataacctgaccttagaaaattgtgagagccaagttgacttcaggaactgaaacatcagcacaaagaagcaatcatcaaataattctgaacacaaatttaatatttttttttctgaatgagaaacatgagggaaattgtggagttagcctcctgtggagttagcctcctgtggtaaaggaattgaagaaaatataacaccttacaccctttttcatcttgacattaaaagttctggctaactttggaatccattagagaaaaatccttgtcaccagattcattacaattcaaatcgaagagttgtgaactgttatcccattgaaaagaccgagccttgtatgtatgttatggatacataaaatgcacgcaagccattatctctccatgggaagctaagttataaaaataggtgcttggtgtacaaaactttttatatcaaaaggctttgcacatttctatatgagtgggtttactggtaaattatgttattttttacaactaattttgtactctcagaatgtttgtcatatgcttcttgcaatgcatattttttaatctc

SEQ ID NO: 46968 - DNA, 608 bp, Homo Sapiens
  misc_feature (588)..(590): n is a, c, g, or t
tcaactggaggcggcccactttgacgaaaagaaggagatcaacaaacggaagcagctgatcctggaggggaaggaccctgacctggaggccaagcgcaaggctgagctggccaagatcaagcagaagaaccggcgcttcaaggagaaggtggaggagacgctgaagcgacagaaggctggcagggctggccacaaggggcgtccacccaggacaccgtctgggtcccactcaggcccagtcccctcccagggcctggtctgagccccacacggccatctgcccagtccttgactcgtccatggagctgagggtcggaggaaccttccttgggggcagcagcccttcccgggggcctacccagtgccccacagcagaacccgtgggcgctcgtgttgtgcgggccctgctcctctgccccgaaaccactggctggccccttccctgagccctggccaagattcaggctgcaggggaagaaagaacatgaccgggaggttgtgaccccaacccaaggtcaccccccaggggtgccgcatacaggaggtgcttaataaacgggtcttttgaaaaaaaaaaaaaaaaaaaannnaaaaaaaaaaaaaaaaaa

SEQ ID NO: 46969 - DNA, 784 bp, Homo Sapiens
ctgccagcaccggctcatgtgaggctcgcggcacagcgttctctgggctccccagaagccagcctttcgctcccggacccggcagcccgagcaggagccgtgggaccgggcgccagcaccctctgcggcgtgtcatgggcccgcgccgccggagccgaaagcccgaggccccgaggaggcgcagcccgagcccgaccccgacccccggcccctcccggcggggcccctccttaggcgcttcctcccatcaacacagtcggcggagacaaggttggctaaaggagatccgaaagcttcagaagagcacacacctcttgataaggaagctgcccttcagccgcctggcaagagaaatatgtgttaaattcactcgtggtgtggacttcaattggcaagcccaggccctattggccctacaagaggcagcagaagcatttctagttcatctctttgaggacgcctatctcctcaccttacatgcaggccgagttactctcttcccaaaggatgtgcaactggcccggaggatccggggccttgaggagggactcggctgagctcctgcacccagtgtttctgtcagtctttcctgctcagccaggggggatgataccggggactctccagagccatgactagatccaatggattctgcgatgctgtctggactttgctgtctctgaacagtatgtgtgtgttgctttaaatatttttcttttttttgagaaggagaagactgcatgactttcctctgtaacagaggtaatatatgagacaatcaaca

SEQ ID NO: 46970 - DNA, 1047 bp, Homo Sapiens
  misc_feature (729)..(729): n is a, c, g, or t
  misc_feature (741)..(742): n is a, c, g, or t
  misc_feature (773)..(773): n is a, c, g, or t
ccacgcgtccgatcctgaagcccaacttccacaggactggcagtggtgtggccatgtggctcagccagcccatggggcagacctgcagaagcaaggtggccagcaaaagcaggctgcatggcccactgatatgggcccatccacccatagtaaggtgccccatgctgaggcatcactacaaagcacaagctggcaggggcctcagcttggaggagttaagggtggctggcatttacaagaaggtggcccagaccattggcatctctgaggatgcaaggaggaggaaccagtccacccaggccctgcaggccaaggtgcagaggctgaaggaggaccgctcctcactcatcctcttccccaggaagcccttggcccccaagaagggagacagttctgctgaagaactcgaactggatactcagctgacaggaccagaaatgcccatcggcaatgtctacaaggagaaagccagagtcatcactgagtaggaggaaaacttccaggccttgttagtctctgtatggcccatgcaaatgcccagctcttcggcatataggcacaaagagccaaggaagctgtagaagaggacgcttaaaaaaaaaaaacaggggtaggctcgagccgctgcatcagcttcgcgctgggtctctcggtcccgcagccatgaggaggacgctgcccagactcactacccgccctctcggtcccgcagccacgaggaggacgctngccagactcacnntaccgccggctccctccccccgcgtccctgntggtggtgggcgaaaaatgacctgtttgtgcatcagatgccctttggagacataacaactgggagatgtgaagatagggaaatttgaaatgtaaagactgggaaacctccgccagaaccagaacctcttgaacaagcgtggcccttccaggaattgccaagttgcctggattgaaagtggttgttccccatttttttttatgtaacaatgaagaaagtttcgctaaaaatggccttccccaccccccggaaaaaaaattcccgggaaaaaaaaa

SEQ ID NO: 46971 - DNA, 593 bp, Homo Sapiens
aatttgaacttcattttggggggtattttggtactgtgatggggtcatcaaattattaatctgaaaatagcaacccagaatgtaaaaaagaaaaaactggggggaaaaagaccaggtctacagtgatagagcaaagcatcaaagaatctttaagggaggtttaaaaaaaaaaaaaaaaaaaaagattggttgcctctgcctttgtgatcctgagtccagaatggtacacaatgtgattttatggtgatgtcactcacctagacaaccagaggctggcattgaggctaacctccaacacagtgcatctcagatgcctcagtaggcatcagtatgtcactctggtccctttaaagagcaatcctggaagaagcaggagggagggtggctttgctgttgttgggacatggcaatctagaccggtagcagcgctcgctgacagcttgggaggaaacctgagatctgtgttttttaaattgatcgttcttcatgggggtaagaaaagctggtctggagttgctgaatgttgcattaattgtgctgtttgcttgtagttgaataaaaatagaaacctgaatgaaaaaaaaaaaaaaaag

SEQ ID NO: 46972 - DNA, 728 bp, Homo Sapiens
cgggatctaaagaagaaaaaccaagggcacgggaattaagaatcagtcgtgggtttgatttggcctcattcaatccacatggcatcagcactttcatagacaacgaattcaagaatacagtggaaatttttaaatttgaagaagcagaaaattctctgttgcatctgaaaacagtcaaacatgagcttcttccaagtgtgaatgacatcacagctgttggaccggcacatttctatgccacaaatgaccactacttctctgatcctttcttaaagtatttagaaacatacttgaacttacactgggcaaatgttgtttactacagtccaaatgaagttaaagtggtagcagaaggatttgattcagcaaatgggatcaatatttcacctgatgataagtatatctatgttgctgacatattggctcatgaaattcatgttttggaaaaacacactaatatgaatttaactcagttgaaggtacttgagctggatacactggtggataatttatctattgatccttcctcgggggacatctgggtaggctgtcatcctaatggccagaagctcttcgtgtatgacccgaacaatcctccctcgtcagaggttctccgcatccagaacattctatctgagaagcctacagtgactacagtttatgccaacaatgggtctgttctccaaggaagttctgtagcctcagtgtatgatgggaagctgctcata

SEQ ID NO: 46973 - DNA, 503 bp, Homo Sapiens
  misc_feature (110)..(110): n is a, c, g, or t
  misc_feature (163)..(163): n is a, c, g, or t
  misc_feature (238)..(238): n is a, c, g, or t
  misc_feature (269)..(269): n is a, c, g, or t
  misc_feature (287)..(287): n is a, c, g, or t
  misc_feature (480)..(480): n is a, c, g, or t
  misc_feature (491)..(491): n is a, c, g, or t
  misc_feature (503)..(503): n is a, c, g, or t
ttgtggtgttgtcggtctgctggtctccgctcctgataatgatgttgaaaatgatcttcaatcagacatcagttgagcactgcaagacacacacggagaagcagaaagantgcaacttcttcttaatagctgttcgcctggcttcactgaaccagatcttggntccttgggtttacctgctgttaagaaagatccttcttcgaaagttttgccagatcaggtaccacacaaacaactntgcatccagctccacctccttaccctgccangtgttcctcaaccttgantgtggagcgaccagtttggaaagatgagaaaaaagaagactcagagagcaagaggaattttggggaaattaaaacctgcctttctgccaggatcacatcactggaagctccatgactctctttttgtaaaagaaaaaaaaatcacagaaacacccacctcccaaactattctcttttacttcttcccccaagnccaccccaaantataactgttan

SEQ ID NO: 46974 - DNA, 805 bp, Homo Sapiens
aatggtgccacatacagatatccgccaggcatcgtgggtgtggctccaggaggacttcctgcagccatggaagggatcatccctggaggcatcccagtgactcacaacctcccgacagtggcacatccttcccaagcgccctctcccaaccagcccacaaaacacggggacaatcgagagcaccccaacgagcaatagcagagaatgccagaaggtaatcactcagatacacttgggaccaagagacagtgaaaaatagatgaactaagagaaaaagaatcggatggtctttgtaactgattctggacatatgcatcattgatgttgcagtgttgaaactacaagagctagaaaactgaagatgtcgtctgcttacggaagcgctgaaagactaggatgtgatttattaacgaccaacttctgttattgtgtgttaagtttttcatctgtgcatcaaatcacaaaaagaataaatagagctttttcctttatcagtcccttgggcacagcaggtcctgaacaccctgctctacaatgttgcatcaagagttcaaacaacaaaataaaaaatattaagaggaaatccccatcctgtgacttgagtcccttaagtctacaggggctggtgacctctttttgctaataggaaaatcacattactacaaaatggggagaaaactgtttgcctgtggtagacacctgcacgcataggattgaagacagtacaggctgctgtacagagaagcgcctctcacatctgaactgcatactgagcgggcaagtcggttgtaagttcagtaaaacc

SEQ ID NO: 46975 - DNA, 613 bp, Homo Sapiens
  misc_feature (613)..(613): n is a, c, g, or t
ggctccttatctgagctcttcaccagaggctaaatatgatgcattccttgtaaccaatatggttccaatgtatcctgctttcaaacgggtctggaattatttccaaagggtattggtgaagaaatatgcttcggaaagaaatggagttaacgtgataagtggaccaatcttcgactatgactatgatggcttacatgacacagaagacaaaataaaacagtacgtggaaggcagttccattcctgttccaactcactactacagcatcatcaccagctgtctggatttcactcagcctgccgacaagtgtgacggccctctctctgtgtcctccttcatcctgcctcaccggcctgacaacgaggagagctgcaatagctcagaggacgaatcaaaatgggtagaagaactcatgaagatgcacacagctagggtgcgtgacattgaacatctcaccagcctggacttcttccgaaagaccagccgcagctacccagaaatcctgacactcaagacatacctgcatacatatgagagcgagatttaactttctgagcatctgcagtacagtcttatcaactggttgtatatttttatattgttttgtaattan

SEQ ID NO: 46976 - DNA, 682 bp, Homo Sapiens
caattctgtttgtgtaactccccgactagtggatgggagagtcccattgctaaaattcagctactcagataaattcagaatgggtcaaggcacctgcctgtttttgttggtgcacagagattgacttgattcagagagacaattcactccatccctatggcagaggaatgggttagccctaatgtagaatgtcattgtttttaaaactgttttatatcttaagagtgccttattaaagtatagatgtatgtcttaaaatgtgggtgataggaattttaaagatttatataatgcatcaaaagccttagaataagaaaagctttttttaaattgctttatctgtatatctgaactcttgaaacttatagctaaaacactaggatttatctgcagtgttcagggagataattctgcctttaattgtctaaaacaaaaacaaaaccagccaacctatgttacacgtgagattaaaaccaattttttccccattttttctccttttttctcttgctgcccacattgtgcctttattttatgagccccagttttctgggcttagtttaaaaaaaaaatcaagtctaaacattgcatttagaaagcttttgttcttggataaaaagtcatacactttaaaaaaaaaaaaaaactttttccaggaaaatatattgaaatcatgctgctg

SEQ ID NO: 46977 - DNA, 690 bp, Homo Sapiens
ggccacaaagatcagagagaaccaagaaagtgttgattgacacagggccattgtatttcaagccaacaacgatgcaactgaggtggttctgaacaagctccacgctccattgctgacaaggtttgttagaatccgccctcagacctggcactcaggtatcgccctccggctggagctcttcggctgccgggtcacagatgctccctgctccaacatgctggggatgctctcaggcctcattgcagactcccagatctccgcctcttccacccaggaatacctctggagccccagtgcagcccgcctggtcagcagccgctcgggctggttccctcgaatccctcaggcccagcccggtgaggagtggcttcaggtagatctgggaacacccaagacagtgaaaggtgtcatcatccagggagcccgcggaggagacagtatcactgctgtggaagccagagcatttgtgcgcaagttcaaagtctcctacagcctaaacggcaaggactgggaatacattcaggaccccaggacccagcagccaaaggtaggctgttcttggaggcctctgtaacgttaccctcaacagggaggctaagtgtggtacagggagtcgagactgatgatgtcccatctaaacagtcgtcatccaagtcctgaaatccattaaaacaaatatcgtttgagaaa

SEQ ID NO: 46978 - DNA, 735 bp, Homo Sapiens
ccggtggattggggtccaccgagcctccatggcttctcttaatcccactgaatttcctttaaaagaaacacttcttatattgaacatattgagaccatttgctcatctgctttgccataaacatccctgtctcgattcctgcttctcctcccccacccctcggggctcctgaatatcagtcactgttcgtcactcaaatgaatttgctaaatacaacactgatactagattccacagggaaatgggcagactgaaccagtccaggtggtgaattttccaagaacatagtttaagttgattaaaaatgcttttagaatgcaggagcctacttctagctgtattttttgtatgcttaaataaaaataaaaattcataaccaaagagaatcccacattagcttgttagtaatgctctgaccaagccgagatgcccattctcttagtgatggcggcgttagggtttgagagaagggaatttggctcaacttcagttgagagggtgcagtccagacagcttgactgcttttaaatgaccaaagatgacctgtggtaagcaacctgggcatcttaggaagcagtccctggagaaggcatgttcccagaaaggtctctggagggacaaactcactcagtaaaacataatgtatcatgaagaaaactgattctctatgacatgaaatgaaaattttaatgcattgttataattactaatgtacgctgctgcaggacattaata

SEQ ID NO: 46979 - DNA, 510 bp, Homo Sapiens
gtgatggacgcggtcccagcgcggcgctggaaggagttcgtgcgcacgctggggctgcgcgaggcagagatcgaagccgtggaggtggagatcggccgcttccgagaccagcagtacgagatgctcaagcgctggcgccagcagcagcccgcgggcctcggagccgtttacgcggccctggagcgcatggggctggacggctgcgtggaagacttgcgcagccgcctgcagcgcggcccgtgacacggcgcccacttgccacctaggcgctctggtggcccttgcagaagccctaagtacggttacttatgcgtgtagacattttatgtcacttattaagccgctggcacggccctgcgtagcagcaccagccggccccacccctgctcgcccctatcgctccagccaaggcgaagaagcacgaacgaatgtcgagagggggtgaagacatttctcaacttctcggccggagtttggctgagatcgcggtattaaatctgtgaaagaaaa

SEQ ID NO: 46980 - DNA, 582 bp, Homo Sapiens
  misc_feature (213)..(215): n is a, c, g, or t
  misc_feature (273)..(274): n is a, c, g, or t
tttttctataacattaatgtcaggttttatgacccactgcagagaaataaatagtttaaagtgtttttggactactggcatttaaatggaaagccagccttaaggtcgtgtgttaggtcatgtaaagcctgaagctgtcctaggtcagcgtcagattccgagtcatgtttgcctagtccgcacatgactgcagtacttgaataagtgcctacnnnagacatttctcattttcccagaactatgatttgtaggtaaagaaatggaactgtggtnnatccaacatcatgtcatatatgctaaggtaaaatctggcactaaataagaaaaatggtttaactcttaaatggaatgaaacttttaaaaaatctgattttttcagctcttaaatagggaagttaggctggagacagtaggctcagtcatctcttaagcattcatggaaaaacctactatgtgtagtcattttgctagggtcatggggcctacagagacatatcagacagtagtaggagatgataggttcataaataataacaataacagcaccatggccacatgtgctcgagctgcaggtcgcggccg

SEQ ID NO: 46981 - DNA, 621 bp, Homo Sapiens
cactcgtgctgttaagagatttgtttatgtttatattatactcaaaaacaatttcttcatctattcctgtactaatggtttctctttgcagttcacagagaatttggggctctcttcatgccttgaaattttggggtccatagtgaatattttgttatttatttgtttggctcattctttatatagtaatggaaacataagtctaggagttagaaatgaattttttagaccttagtaaaaccatttaaccataaaatggacaactgagaattctcccagctgcctgaaagcgtcgccaactgtggttatcctgcaagctgctacctgcaacttggacgttgtttccacgtgctctgctggctacgattcttgcattctgggtttggcttttttctgtgtcatcaactatggttatcctctaaataggcatttaatgaaacattgtacaaattgtcactcatttgatgacacctgggaataacattagcaggctgatgtcctgcaccattatgtttactaatcacatgttctgtgtgctgtgacgactgtcaaagagtatctggccatggcggacactcagcatttgttgattgaataaatgttagctcttctcattgtgaa

SEQ ID NO: 46982 - DNA, 681 bp, Homo Sapiens
tccaatatgcagccaaggttgaaaaccccctttaaaaggctcggcatccagtgtggaagaccagcacactcacgtcaggagaccttacctggagccaggatgcccctgatcatctctgataactttaaaaggaaggcctcagaagcagccccagaagcaaaagtttctctctgaccttctcctgccctcttgtttctggcttttcattctcccccaaggctacccatagaaactagaatccctcttccccaaggcaggtcatcagaaaccagaaccggttttacccaaagccagccataaaacctaaaaatagtcctctcactccccattcccctttctgtgtaaaaactggttggaaagaaatgatctgacctaccgtgtttgactgtcgtaagatacccattccagagagggtcccaccccgtgcccagaaggaaggaatcctgcacagagaggccaagaagaatctagacagccttgctgggtttcccctctcagtctattactattagatcatacccttcttgtccaatcatatttctacacagtccataatctgttgaacctaaacataaaaatggacaattcccctgtatcttggggtcttcattctgagggctcacatacaattatgatcaaataaatttgtttgctttttctcctgttaaaaaaaaaaaaaaa

SEQ ID NO: 46983 - DNA, 821 bp, Homo Sapiens
  misc_feature (757)..(757): n is a, c, g, or t
gaagctttcctatggtcctgaagaaaaagatatgattgtgatgagagacagctttggaatcagacatccttctggacatttagaacataaaacgattgatcttgtggcttatggggacatcaatggcttttcagccatggctaaaaccgtggggttacccaccgccatggcagccaaaatgttgcttgatggtgaaattggagccaaaggcctaatggggcccttttcaaaggagatctatggaccaatattggagcgaattaaagcagaaggcattatatatactacacagagtacaattaaaccataattgggaattatattttgtttttttcttcccaggcaatacacctctgaacatgtgtgtgataaatgggtttgctaatgtgctgttttaaagtataaagcataatatgttttggttaacacaatgtactttttgaactataaatctttattttaatatggaaatgtttggaacaggagatgcaagccactaacagagaactttaataattctaccctgtattttataaatacgtatgtgaaagtgatgatcatgctatttgttaatttattgtgccactttttttcttttgttttttttttgttgttgttgttttttgagatggagtctcgctctgtcacccaggctggagtgcagtggcgcgatctcggctcactgcaagctccgcctcctgggtcacgccatctcctgctcagcctccagtactgggactacagcaccgcaccgccngctaattttgtatttcatagaacgggttcacagtagcagagtcattttcttatgactttgctaa

SEQ ID NO: 46984 - DNA, 601 bp, Homo Sapiens
tggtggcctgggtgtacggagctgaccgcttcatggacgacattgcctgtatgatcgggtaccgaccttgcccctggatgaaatggtgctggtccttcttcaccccgctggtctgcatgggcatcttcatcttcaacgttgtgtactacgagccgctggtctacaacaacacctacgtgtacccgtggtggggtgaggccatgggctgggccttcgccctgtcctccatgctgtgcgtgccgctgcacctcctgggctgcctcctcagggccaagggcaccatggctgagcgctggcagcacctgacccagcccatctggggcctccaccacttggagtaccgagctcaggacgcagatgtcaggggcctgaccaccctgaccccagtgtccgagagcagcaaggtcgtcgtggtggagagtgtcatgtgacaactcagctcacatcaccagctcacctctggtagccatagcagcccctgcttcagccccaccgcacccctccagggggcctgcctttccctgacacttttggggtctgcctgggggaggaggggagaaagcaccatgagtgctcactaaaacaactttttccattttta

SEQ ID NO: 46985 - DNA, 894 bp, Homo Sapiens
  misc_feature (505)..(505): n is a, c, g, or t
  misc_feature (521)..(521): n is a, c, g, or t
ggagagagtgagcgaatgcacatggcaggcggtcatgtcccttgggcctgtgaggtgaggaagggtccctgagccctgtggggatagagactcttccaccattctgacatgatccgagttagcaggcagcactgtccagatggaaatggggatgggagacagaccatctctctcagcgggtccagccatgagccagcagactgtttcccattggcccccatctttcagagtgggatgatctttctaacaaagaaacccacacaggaatttggtgtgtgtgtgcatgtgtgtattacctttcaggatggaagccggtggggtgtggagcgaggggctggcatggttggcctcgcccagctcctgtaccctgtgtgtgcctagagcatgcacctgctccctctgttgggctgagactcagaggacactgggcaggtggtggggggtaggagggtcgtggctgtgttgggtggggccacatcaggtgtgtggcacagagggggagggnggaggtggagtggcantgtgttccacccagcagtccctgtgtttgacctcttcgtacactctctgttgtattagctctcagaatgaaaacgagatacttttccccaatctatgtacgttgttcttaagaatgtacacttggccaggtgcagtggctcacgcctgtaatcccagcactttgggaggccaatgtgggtggatcccctgaagtcagggagtttaagaccagccctggtcaacatgggcgaacccccatctctagtaaaaaaacaaaaactaccctgcggtgtggttggtggggcaccctggcaatccccggccaccaaggggaaaattgaggcgccgcaaaaatccgctctgacaccccagaagcgcgggaaccatccaacc

SEQ ID NO: 46986 - DNA, 959 bp, Homo Sapiens
  misc_feature (951)..(951): n is a, c, g, or t
ggtgtttaaagggccctctgctggctgagtggcaatactacaacaaacttcaaggcaagtttggctgaaaacagttgacaacaaagggcccccatacacttatccctcaaattttaagtgatatgaaatacttgtcatgtctttggccaaatcagaagatattcatcctgcttcaagtcagcttcagaaatgttttaaaagggactttagctctggaactcaaaatcaatttattaagagccatattctttaaaaaaaaaaagctggataatattatctgtaatatttcagtcctttacaagccaaatacatgtgtcaatgtttctagtatttcaaagaagcaattatgtaaagttgttcaatgtgacataatagtattataatggttaagtagcttaatgattaggcaaatagatgaaaagattaggggcttccacactgcatagattacaccgcacatagccacgcatacacacacagacacacagatgtggggtaccactgaacttcaaaagcccaaaatgaatagaaaccaccattttctggtaggcagaaaaaaaacaaaacaaaactgtggtttctctttctggctttggagagtgtacaggtacacagggattttccaaattattttatttatttaagcttaattgtgctgtcctcatgaaaaagaagtggtcaggttttctggtccgagatggcagggtttttcagcatttggtttggtgtggattttacaagataaagttttttcccattgtgtggaacaacaaaacacaaattagacaaggagagataaaagaggggagatgtaatctaataagagaggtcacaaatagagtatcattaagtgatagtgaccgcagggaagtaagacaagagacacatgtaacatatgatgtggtcatgacatatgataaaaatattgtgtgagtatttagttatatcaanaaaaagga

SEQ ID NO: 46987 - DNA, 782 bp, Homo Sapiens
gggtactgaattctacataaatgtaaagtctttaatctgaggaccctgccccatgaattgtgcaggctgcattgaaacgccttggtgatctcatatttaggaagaaagttaaagagttggtcagatggatagttcataatgggtggttccattctgagagcccattgccccagctttggttttagttgtgtcataatctctgatcattaatcctactgactgagtggactatttcagttaataaaacaatatgattaatagagagagctgtcattgagtcccaaaatggattgccagttttaaaataattattataaaatgtatgctaaccccaaaataatactaggcatgaggtgacctctctgatttggtcaccttgtagaaccttggagggtgtcagggcatctctttgagtatcagttatgattattcagaagtatagatgtatcaaatgatagaaatgacaaggattgcaggcgtgagtcaccgcgcccggccaagcccttggcattttatctggaatagcatctgtaaactgaagtgtttgacccctgttttcttctctcctctttcatctggttctgattcgttggctggcagctgcacctgtggggggacctctcatgcagacttgcacatatgcaggggagtattggcactgaaagatctttgctgggacctttctttctcttcagaaaaataaattttccaaaagggaagcaatggctgtggaataggcactttgcttccttctcttaaaggattggagaaagtccccggcc

SEQ ID NO: 46988 - DNA, 522 bp, Homo Sapiens
ctggtcaatgcatcctacaccaaactgcaggaatgggaaaaggacagcacaggatgccctccaaggatgagctggtccagagatacaacaggatgaataccatcccccagacccgatccattcagtcacggttcctgcagagtcggaatctaaactgtatagcactttgtgaagtgattacatctaaggacctccagaagcatgggaacatctgggtgtgccctgtgtccgaccatgtctgaacaagattcttctttgtatatgaggatggtcaggtgggcgatgccaacattaatactcaggaccccaagatacagaaggaaatcatgcgtgtgatcggaactcaggtttacacaaactgagggggccccagccctcgtaccacccctgttaccccaggatccatctgccctcataaaagtgttcaggtacagcagctgaggctgccctgaggaatcaaggggccattaccaaggggcaggaaaaggatatgtaagaggtggccttcatggtagagcttga

SEQ ID NO: 46989 - DNA, 547 bp, Homo Sapiens
ggatatcattgttttcaagccattcagaaaccaatgtgaattgaacacctagtatgagctctctgagggaagagccaagtcatgcattttttatcttaaggggtcttcaatacctctagcccaaaacagtatctccatcaggattcttctctgatagtgttcatttcttttttctcaatggatgccttaaaaaaaaaaatcctacaaggaaacctgtactcctcaaatacaccactcaggtgaccattaaatcatttacattggccctccctgtctccaggggggttgagcatggccatctcataggtgcccctggagttggggctggggtttggggtggcctacctcaagaactaaaacacttcatcctttcccgcctacctcacccagagccacgtcttccagacaggggcaacatagaaggaatttgttctcaagcttatggataccggctgcctcgaagggggtccccggtcccaaatcttcctatagtgagtcgtttacaattcactggccgtcgatttacaaccttctgaactgggaaaac

SEQ ID NO: 46990 - DNA, 945 bp, Homo Sapiens
gtttgcttgtagaaaaatggtaggcttccccaaggcatctgcagggaactttggcagcttggggcaccctgaattagcaaaaatggggggtgatgaggtgctgaagaaggatacttaacagcttagtgaggaggcaagagctcctctgggaccaccacttcttcaggagagggcctgtgggcttgcttttggaaggcctcaggcagacacgtgccctctgggtgatgtctgtctgctgccaggatggagcagaggagcgccacacatggaggaaagcccctgtaacgttacctaccttaaactccactcatcaaatctgagaaaagtatccactggtccccagggtttcagtcatgcttttgggggtcattgggtattagagaagtaagtatcttttctgagagagggggagtcaccccccctactggggattcctctgggctttattcactcccagccctggccctgacctttgtgggcctccctaatgcccagggcatggatggcttcagaggagtttttgaatcgaagcccagggtccttgttgatgtttcttctccgagccacacttggaggaaagttgcaggtgggttgggcagggagcaggcatggttctgctttgctgtttgtcttcctagttaaggctctttataaagagcttcttcttcatgttttaagcactttatgaagaataaaacattcatgtactgcaaaaaaaaaaaaaaaaaaaccggcccgaggggaatattgtcctccatggcccctcccaaaggacctaggagaataggtgagcctttccaaagggagagaccgaatccttcccttctttttttttttaaagggcaggaaggggtatgcctttggggctttcccccttccggtgtgcccccgaagaaagaaaaaactgaagccaaggcaaaagtggataattcaccctggaaccaa

SEQ ID NO: 46991 - DNA, 583 bp, Homo Sapiens
tgggcgcagctgagcttaattacagagcagcgaggggagtgagagcagaccgcccttgtgtgggccacacacatgctgtgccccatgcccttccctgcgcatgtggtcctcctcctcctcaccgtggccaccctgggcccgggcccctgggagggtttccctcgcggtgacactcacagagtggcacatgtgagcttcacctgcacccctacccagagagacagcaggggtgacccccaggcgcacacacccccctcgtgaatgcacccgtcccgcagctgcaggttgcaccgcacgctgtacgcccggggactggccgccggcctgaaaagagcagccaccctccacaagatgcctgggtgacttgtttctcgttattgttgttgctttttttccttcttcccccggacccccagcaaaattttaaaaaagaactcaataagaagcagagcccaagcttcctatgactggttctcagagaagccagtcaaatctccccttgttgagaacattttgacagcataaaattgctgccggaatgtgactttagcgaaaagtgaaaaaaaaaaaaaaaaaaacgcgg

SEQ ID NO: 46992 - DNA, 635 bp, Homo Sapiens
gcttttgtcaataccagaaaggattttcaaaaagattttgtaaaatattgtgttgaagaagaagaaaaagctgcagagatgcataaaatgaaatctacaacccaggcaaatcggatgagtgtagatgctgtagaaattgaaacactcagaaaaacagttgaggactatttctgcttttgctatgggaaagctttaggcaaatccacagtggtacctgtaccatatgagaagatgctgcgagaccagtcggctgtggtagtgcaggggcttccggaaggtgttgcctttaaacaccccgagaactatgatcttgcaaccctgaaatggattttggagaacaaagcagggatttcattcatcattaagagaccttttttagagccaaagaagcatgtaggtggtcgtgtgatggtaacagatgctgacaggtcaatactatctccaggtggaagttgtggccccatcaaagtgaaaactgaacccacagaagattctggcatttccctggaaatggcagctgtgacagtaaaggaagaatcagaagatcctgattattatcaatataacattcaaggaagccaccattcttcagagggcaatgaaggcacagaaatggaagtaccagcagaagatga

SEQ ID NO: 46993 - DNA, 958 bp, Homo Sapiens
  misc_feature (747)..(747): n is a, c, g, or t
  misc_feature (770)..(770): n is a, c, g, or t
cactctgtcctcgaaagcctgagctttcattcaactccctatttccatgcaaagacgctgggcaaaccacatgttctgtctgagcctcagttttcctatccataaaatgaaggtagccaggcctgcctcaaagagcattcaggaggctctgagaggacatgagagtattttgcaaagtgagggcaaggcccagtgtggagtgatattgttattccaagattccactgcaaaagtggctgctttggatgccagcccaggatgagtagttcctgttctcagggaggtcatccgctgagcatcccttctgcacagatgtctctgattcttgtccttgcaggtggaggacagggcctgctcccctaagctgggaagcctggaatgacctcttgcacaagcctaaattccaggaatcttccccaaatcccagatcctctgcaatctacctgcacccctgacccacccaggagttggaccgggagttgggaagcctaggtcttagtcctacactccttctaatttgctgtgtaaccttaccattaatctctctgggtctcagttttctcatctgtattggaggtagcagtgctagctctgccttcaggcatgcaatatgccagaactacagacaacagcccacaggatgcaaaagtgctttgccatcttaaaaatgccagatcactcagagcctatgaatgtggatatcaacaccaggtctctagcaccgctggatgaaagggagaaggctanaggctgagggaggaaagagcagntaacaaacaaaggcagtagctcatcacttgggtagcaggtacccatttttaggaccctacactcaaatgtgcaaaataaattttctatcatttttgcttaaaaaaaaaaaaaaaaaattccagcattctatgtccggtggcggagaaagaaggaatggaatggccccaggggtcataacctgttcccg

SEQ ID NO: 46994 - DNA, 618 bp, Homo Sapiens
caagacctaaacgaaaaggcacgagcacttaaacaaattctcagtaagatcccagatgagatcaatgacagagtgaggtttctgcagacaatcaaggatatagctagtgcaataaaagaacttcttgatacagtgaataatgtcttcaagaaatatcaataccagaaccgcagggcacttgaacaccaaaagaaagaatttgtaaagtactccaaaagtttcagtgatactctgaaaacgtattttaaagatggcaaggaataaatgtgttcgtaagtgccaaccgactaattcatcaaaccaacttaatacttcagaccttcaaaactgtggcctgaaagttgtatatgttaagagatgtacttctcagtggcagtattgaactgcctttatctgtaaattttaaagtttgactgtataaattatcagtccctcctgaagggatctaatccaggatgttgaatgggattattgccatcttacaccatatttttgtaaaatgtagcttaatcataatctcacactgaagaatttgcatcacttttgctattatcattcttttaagaattataagccaaaagaatttacgccttaatgtgtcattatataacattcctt

SEQ ID NO: 46995 - DNA, 900 bp, Homo Sapiens
agagtttctgaggagggcaggatggggcaaagaggggaggaagatgccaatagcttagacttcccacctgccagcttgctatgtttgatctgccaggagcaaggagtcaacggtgaatctggttctcctgtcgggtaggatgacaggggttgcttgattttagatcaatttcttatcagactcaaataaacatttcttttgaagatcatcttattcttcacagttatcatcttgagctatgatgaagctagtgacttctctccaggtttaggcgaaaaaaaaatccatgaattaggataaagttgggaaggaacattttatacaaaaaaaaaaggagcttaaagggaagacttcacacactcacagagaaaccacacggttatcccccccaggctggtgggggatcatggaggaaggagaacttacacctctgagcatttggaaaatacttttactggcattggactggattcccaggtaaggctgagcagatatctatgcccagggatggacaggaaattcctctgaaatagctggcaagtctggagtttcaaaaggacttagtagtcctttcctcagagaactggttctctaagatgggggctttctcataggtaagtttccctttcatagatgttttttccttcaacttcctgcaatccagtagctattggtagtcttacattggggtattcggtgcccaagaagtccacctttgggttctgggccatttccggggcttttactaagttccttggctcgggttcacgggttccccaagggcctctcggccagaaccaggcaggacaattcacaatacattggggaggaccagggccaaggcaaaatcttctggacggaaagggagcgggagaacaaaggcacaaggagcggaacggg

SEQ ID NO: 46996 - DNA, 795 bp, Homo Sapiens
atattttggagagggaagttggctcactgttgtagaggacctgaacaaggtgttcccacccgaggtcgctgtgtttgagccatcagaagcagagatctcccacacccaaaaggccacactggtgtgcctggccacaggcttcttccctgaccacgtggagctgagctggtgggtgaatgggaaggaggtgcacagtggggtcagcacggacccgcagcccctcaaggagcagcccgccctcaatgactccagatactgcctgagcagccgcctgagggtctcggccaccttctggcagaacccccgcaaccacttccgctgtcaagtccagttctacgggctctcggagaatgacgagtggacccaggatagggccaaacccgtcacccagatcgtcagcgccgaggcctggggtagagcagactgtggctttacctcggtgtcctaccagcaaggggtcctgtctgccaccatcctctatgagatcctgctagggaaggccaccctgtatgctgtgctggtcagcgcccttgtgttgatggccatggtcaagagaaaggatttctgaaggcagccctggaagtggagttaggagcttctaacccgtcatggtttcaatacacattcttcttttgccagcgcttctgaagagctgctctcacctctctgcatcccaatagatatccccctatgtgcatgcacacctgcacactcacggctgaaatctccctaacccagggggaccttagcatgcctaagtgactaaaccaataaaaatgttctggtctggcctga

SEQ ID NO: 46997 - DNA, 451 bp, Homo Sapiens
cgatacctcagatagaataatgggtcgtgaccttccaaagctcaatcttacccaacaaaatcctattctttcatatttaatttctcttattagggaaaatttaaattcaatgtaatttttttctcggggggatgataatgaaaaaaaactggagaaattctggcgtagcacaaacattgcaaagtgaggagcactaaacagtaggttccttctcttcagaaagctgatatgtgggttgtgtgctattgagggcaggggctgaagcggtgttgtatcatagcttgtctcttgcctcgtttctctccatgcttagccatctttccccctttccaggtcacccaaaggtcagctcttaaagatacactgttcctcaacttgaatgtggactgtgttcctatttctgcttcacttatttgccaagggcatgcagggtgacaagtttatttggaaa

SEQ ID NO: 46998 - DNA, 1015 bp, Homo Sapiens
cttcgagcaagagatggccacggctgcttccagctcctccctggagaagagctacgagctgcctgacggccaggtcatcaccattggcaatgagcggttccgctgccctgaggcactcttccagccttccttcctgggcatggagtcctgtggcatccacgaaactaccttcaactccatcatgaagtgtgacgtggacatccgcaaagacctgtacgccaacacagtgctgtctggcggcaccaccatgtaccctggcattgccgacaggatgcagaaggagatcactgccctggcacccagcacaatgaagatcaagatcattgctcctcctgagcgcaagtactccgtgtggatcggcggctccatcctggcctcgctgtccaccttccagcagatgtggatcagcaagcaggagtatgacgagtccggcccctccatcgtccaccgcaaatgcttctaggcggactatgacttagttgcgttacaccctttcttgacaaaacctaacttgcgcagaaaacaagatgagattggcatggctttatttgtttttttgttttgttttggttttttttttttttttggcttgactcaggatttaaaaactggaacggtgaaggtgacagcagtcggttggagcgagcatcccccaaagttcacaatgtggccgaggactttgattgcacattgttgtttttttaatagccattccaaatatgagatgcattgttacaggaaagtcccttgccatcctaaaagccacccccactctctctaaagagaatggcccagtcctctcccaagtcacacaggggaaggtgatagcattggctttcggggaaattatgtaatgcaaaaatttttttaaatcttcggcctaaataccttttttaatttgggttttattttgaatggaggaagcctttcctgcccccccctttccccctttttttgtccccccaacttgagaaggattgaaaagctttttggccccccctcggaaaaggggttg

SEQ ID NO: 46999 - DNA, 583 bp, Homo Sapiens
cagctggctctcacactgatagacaccaaccgctctcgggcctgccacccctgttctccgatgtgtaagggctcccgctgctggggagagagttctgaggattgtcagagcctgacgcgcactgtctgtgccggtggctgtgcccgctgcaaggggccactgcccactgactgctgccatgagcagtgtgctgccggctgcacgggccccaagcactctgactgcctggcctgcctccacttcaaccacagtggcatctgtgagctgcactgcccagccctggtcacctacaacacagacacgtttgagtccatgcccaatcccgagggccggtatacattcggcgccagctgtgtgactgcctgtccctacaactacctttctacggacgtgggatcctgcaccctcgtctgccccctgcacaaccaagaggtgacagcagaggatggaacacagcggtgtgagaagtgcagcaagccctgtgcccgagtgtgctatggtctgggcatggagcacttgcgagaggtgagggcagttaccagtgccaatatccaggagtttgctggctgcaagaagatctttg

SEQ ID NO: 47000 - DNA, 581 bp, Homo Sapiens
gtctctaagggaagcgttacttgaggctcggttgggaagagatggtcagctctcaaaaaaggcacaaacaattgaaggatggataccatggcatatgttaaaagcgtgttgaaaggaaaataagaaagccaggaatctcaggatgaatcagtctagatcgagatcagatggtggcagtgaagaagccttacctcaagaccataatcatcatgaaaatgagagaagatggcagcaagagcgtctccacagagaagaggcctattatcagtttattaatgaactcaatgatgaagattatcggcttatgagagaccataatcttttaggcacccctggagaaataacatcagaagaactgcaacagcggttagatggcgtcaaggaacaactagcatctcagcctgacttgagagatggaacgaattacagagactcagaagtccctagagaaagttcacatgaagattctcttctagaatggttgaacacctttcggcgcacaggaaatgcaactcgaagtggacaaaatgggaaccaaacttggagagctgtgagtcgaacaaacccgaacaatggagagt

SEQ ID NO: 47001 - DNA, 764 bp, Homo Sapiens
gtcacttgagcagaggagttcaaggccaacttgggcaacatagtgagaccccgtctctaagacaaataataaacatcaaaattaaaattaaaaaaaacccaacccagtgttcccttcagaatcctgagtggtttgtttcatcttcctctattctggcttgtgtcatcttcctctcttgtaatggataaaaactccaaatgaagacaaaaatgaggaatttgtcaaaaaaattgaattgccaacaaagccatctttggttgatcaaacggtacagacgtttcagttagacaagagggctaagtttctgagacccattgtacaggattattaatattattcatttttagccctcataataaggtattataaatgtcaagattgctaaaagaatacgtttttaaatgtcttcattataaaaaataagtatgtgaggtgatggacatattaatcagcttaatataatcattttatagtatatgtagctatatcaaaacatcacatttataacccataactacatgcaattattatttgtcaattaaaaatacaaatctaggccaaggtgggaggatcccttgagcccaggagtttgacagcagcttgggcaacatagggagactccatctctacaaaaaaaaaaaaacccgcaccacaccgcgcacccacaccggggggggaaaccgccaaacacttgcccgggcgcgggggggggcccctgcccggaatcccaacacggtccgggaaacccgagggggggaggagcc

SEQ ID NO: 47002 - DNA, 658 bp, Homo Sapiens
ggaaagtgcgtcatcctaaggaacatcgacaacccagccctggctgacatctacacagagcacgcccatcaggtggtggtggccaagtatgcgcccagcggattctacattgcctccggagatgtgtctgggaagctgaggatctgggataccacgcagaaggagcacctgttgaagtatgagtaccagcctttcgctgggaagatcaaagacattgcttggactgaagacagtaagaggatcgccgtggtcggggaaggaagggagaagtttggagcagtcttcctctgggatagtggctcttctgtgggcgagattacaggacacaacaaagtcatcaacagcgtggacatcaagcagagccggccataccggctggccacgggaagcgatgataactgcgcggcattctttgagggacccccattcaagttcaagttcacagttggcgaccacagccgcttgtcaactgtgtgcgattctctcctgatgggaacagatttgccacagccagtgctgacggccagatatacatctatgacgggaagactggggagaaggtgtgcgcgctgggcggaagcaaggcccacgacggtgggatttacgcaattagttggagtcccgacagcacccatttgctttctgcttctggggacaa

SEQ ID NO: 47003 - DNA, 640 bp, Homo Sapiens
ggcatgatttaaggtggctgttggaattgttgatgggtgacaaaataaacactaatggtttttggaagaaaccagccttaaacctgatttataaaccttatcaaatccgaatattagatcctttcattatcagaacagcagcttatgaactgcttcattttccaaaagtgtttcccaaaaatcagaaacctaaacacccaacaacaggaattattgccatcacattggcgttttacatatgtcacgaagttcacctagctggttttaaatacaacttttctgacctcaagagtcctttgcactactatgggaatgccaccatgtctttgatgaataagaacgcgtatcacaatgtgactgcagagcagctctttttgaaggacattatagaaaaaaacctcgtaatcaacttgactcaagattgactctacagactcagaagatgatgctaacagtgttagttttatttttgtactgcaatttttagtttaaaatatgttggatgcactcgtcaaataattatgtatactgtctgttgctgcctggtgattcataaccaccagcttaatttctgtgaatactgtatatttaacttatgaaaaccaagaaatgtaaagataacaggaaaataagttttgat

SEQ ID NO: 47004 - DNA, 552 bp, Homo Sapiens
  misc_feature (1)..(7): n is a, c, g, or t
  misc_feature (9)..(13): n is a, c, g, or t
  misc_feature (15)..(16): n is a, c, g, or t
  misc_feature (21)..(21): n is a, c, g, or t
  misc_feature (57)..(57): n is a, c, g, or t
  misc_feature (78)..(78): n is a, c, g, or t
  misc_feature (235)..(235): n is a, c, g, or t
  misc_feature (406)..(406): n is a, c, g, or t
  misc_feature (423)..(423): n is a, c, g, or t
  misc_feature (470)..(470): n is a, c, g, or t
  misc_feature (499)..(500): n is a, c, g, or t
  misc_feature (504)..(504): n is a, c, g, or t
  misc_feature (507)..(507): n is a, c, g, or t
  misc_feature (519)..(519): n is a, c, g, or t
  misc_feature (536)..(551): n is a, c, g, or t
nnnnnnncnnnnntnngggtnggggtcgcctagaatgattctgcctttcaagcatgncagagagtattggtggatctnttggtatctttgatgagttcaagaacatgttcagaagagctaacccttctttggagaatatttctggagaaatctccttgtacaaaaattcttcttctgggtattctgaaaattattgaaagtgatactactatagcccttcacagtatctaacctnccctttactgcacgctccaaatttaagcaacggtgtttcatcacaaaagtatcctgggattttaaacagtaaggccatgggtttattgagaagagcacgagtttcacggagcaagaaagaggctgatagagagagttttccccatcggctgctttcatcttgggacatagncccagtccacctgccgntggtgggggaaaactgctggccacacctatcagaaggtttcagtgtnccctgtggtttaatgtggagtgtttccannaagntgngagtagattcancttggttacgtactcannnnnnnnnnnnnnnnc

SEQ ID NO: 47005 - DNA, 816 bp, Homo Sapiens
ctgaagatgcctcctgctaagacaggttgcggaggggagtcagtggctgaaagggtgatttcaggatagattgtcctggcaaataaggaggggtcctctgcatgaataagcagtgtaccctgccaaaggaagctggcaggaggtgattcctgctgaagcctgacagtacatgtccaccctgaactcatggccttggatgcagaccggccaactgtacacagttgagcgaggaagtggcgacagcacggtttgaatctggctgataaaacagatgttcgggggaagggctcttattttctcccagttataggatcgggggtgggggaagaaaacctaattccctatctgccaaatgtttctgttggtaatgtcctggcaacagtgagatgcccccaagaatggagtggttgaaagttctagctatcgactcagccctggatgtaaattctgaattctgtgtgaccttgggcaagttacttaacctctctgagtacccttggcctcatctgtaaaatgaggataatgatacctacttttggcggggtgcaggggcttgtgcctgtagtcccggcactttgggaggctgaggcaggtggatcacttgagatcatgagtttgagaccagcctggccaacacggtgaaaccccgtctctactaaaaatacaaaaattagctgggcgtagttgtgggtgcctgtaatcccagaatcgcttgaacccagggagcagaggttgcagtgagccaagatcatgccattgtactccagcctgggccacaagagtgaaactctatctcaaaaaaaaaaaaaaaaggcc

SEQ ID NO: 47006 - DNA, 776 bp, Homo Sapiens
  misc_feature (648)..(648): n is a, c, g, or t
tacatttatggaagaactgactgacacagcagaaataatcagaaaagcaacatcacagtccttggttatcttggatgaactaggaagagggacgagcactcatgatggaattgccattgcctatgctacacttgagtatttcatcagagatgtgaaatccttaaccctgtttgtcacccattatccgccagtttgtgaactagaaaaaaattactcacaccaggtggggaattaccacatgggattcttggtcagtgaggatgaaagcaaactggatccaggcacagcagaacaagtccctgattttgtcaccttcctttaccaaataactagaggaattgcagcaaggagttatggattaaatgtggctaaactagcagatgttcctggagaaattttgaagaaagcagctcacaagtcaaaagagctggaaggattaataaatacgaaaagaaagagactcaagtattttgcaaagttatggacgatgcataatgcacaagacctgcagaagtggacagaggagttcaacatggaagaaacacagacttctcttcttcattaaaatgaagactacatttgtgaacaaaaaatggagaattaaaaataccaactgtacaaaataactctccagtaacagcctatctntgtgtgacatgtgagcataaaattatgaccatggtatattcctattggaaacagagaggtttttctgaagacagtctttttcaagtttctgtcttcctaacttttctacgtataaacactcttgaata

SEQ ID NO: 47007 - DNA, 593 bp, Homo Sapiens
agttgctcgctgggcagacccaggtcgcgctcccactgccgagcccgcgagatgctccccagagctgcctggagcttggtgctgaggaaaggtggaggtggaagacgagggatgcacagctcagaaggcaccacccgtggtggggggaagatgtccccctacaccaactgctatgcccagcgctactaccccatgccagaagagcccttctgcacagaactcaacgctgaggagcaggccctgaaggagaaggagaagggaagctggacccaactgacccacgccgaaaaggtggccttgtaccggctccagttcaatgagacctttgcggagatgaaccgtcgctccaatgagtggaagacagtgatgggttgtgtcttcttcttcattggattcgcagctctggtgatttggtggcagcgggtctacgtatttcctccaaagccgatcaccttgacggacgagcggaaagcccagcagctgcagcgcatgctggacatgaaggtgaatcctgtgcagggcctggcctcccgctgggactatgagaagaagcagtggaagaagtgacttgcatccccagctgtctccctgag

SEQ ID NO: 47008 - DNA, 785 bp, Homo Sapiens
aggaatctcagaaaaccaggagatactggatacaaaataccaaggggaggcttatttgaatacgtaactgcagccaactattttggagaaatcatggagtggtgtggctatgccctggccagctggtctgtccaaggcgcggcttttgctttcttcacgttttgttttttatctggtagagcaaaagagcatcatgagtggtacctccggaaatttgaagagtatccaaagttcagaaaaattataattccatttttgttttaagtgcgtttttcatgaaattatcttcaacttgaagctttccaatggcgcttctctatggactttgtaaataagttatatctttgtaattttcctgctactttatcattttcaagatgtcctctaggaattttttttctagtaattttgcaatctacctaataagtacctaaatacgctgaaatggaggttgaatatcctactgtgtaacaggtcagaatttcaagctctgggtaataactgctgatattttttctaatttcaaatttacctcttttggctatgtcttgccaagtgtgtatgagactagactttacaactgtctttgatggcattttcagaacaataaatgtcacaatcccttctatagccccctacagtgatctcttcaaggtcaactgcagtgttgcttccctccccctatagggctggaatctgtctaggagccctctctcggaggccacagaggctgggggtagccattgtgcagtcatggcccgggggaaacttgccaaccttcgtgt

SEQ ID NO: 47009 - DNA, 631 bp, Homo Sapiens
atttcagaataggtacccaggcactccagctgatttcaatcctggttctttagcatgttctcagcttcagaattacgatcctgacagagccctaacagattatatcactcggctagaggcactgcaaagacgacttggaactatacagtcaggttcaactactcaatttcatgctggcatgagaagataatcctttgaaacatcattaattgaagtgattttaaatagatttccttttgtaaatcaatggttcttttgtgcttttgtattgtgaatattcaatgggaccaatatgaacacagcttatgattgtatacaaatcccttgccagcacatgaaaacaaactggaatttgtatatataagcattgtgtatgtattcatgcacaataattattgaattacctgtatatttgtggaatgctaatttaaaacattaaattataaaccttgtgtatttatcaaatgggtgaaaagattaaacttttacgcattacaatactgctgaatgtgtagctcgaggtgtcctgcacttttcttataaggctactgaagttacatgttttgcctaatatattctactggtgatgaagacagataatatcacttgtagagacctatttttgtataat

SEQ ID NO: 47010 - DNA, 822 bp, Homo Sapiens
ttgggtggtcctgttgcgtggagatctcctctggtcctttcaaagggaaacgctgttgaaccttgtgcctctatttatgcttaatccatttgagtgcctcacacaaaaaacgtagagtatagaaatccaccttaaagcccctcgccccaacttctccaccaacgccttctgggctttcttcagaggtcacttctacccttgaagctgtcggcaaaagcgagcagtaataacattctagtagactctcgatggtggtctccgctcttgcccgaaggacctctgaagtacgctggagctgtgttgtacaggtgctgtgagacctaccctattcagaattaaacctcactgcaaatttcctcccatcacgaagctaacaacactaatatacgtatttagcacctctgaggctttgccatggagacccatttctgtagggctaaggaaacatttagacgtggtgactgactttcatttggacttggcgaagtgtatctgagaaacacctcggctgtggtctctctgctttaaatcctaacaggacttcctagagcgttgacagaaattctactcgtggacgttgggaagaaagattgtaggtggcttggggaatgtgggtggcttagaggatctaaaccgattcacttcctggttgagaagcaacgagggcttgctctaaatcgtttagaggataacaggatctagagatgctctctgcttgacaacaaaagtcagggtgcagtcggtccacccttgactgctcttggcttggtctctaccctcactacctcagttctcaataacttagtgaatcactgccctcct

SEQ ID NO: 47011 - DNA, 842 bp, Homo Sapiens
gcaacgagggcttgctctaaatcgtttagaggataacaggatctagagatgctctctgcttgacaacaaaagtcagggtgcagtcggtccacccttgactgctcttggcttggtctctaccctcactacctcagttctcaataacttagtgaatcactgccctcctcaaagccatttccactcagctctttccagagaattctcagttttatgagacgggaaactttatttcacgagaaagcctcattgtcagaagtatcttcattcaatgggcacaatatgctgtgtatctcaccaggtagctgtcaggggccaccgagagtgtcgttaaaaatgggcatcgttgtaataaaggaggaaagtgcgacttttgaaatgtttggaaggtttatttctcatgcacattccagggaaaagcagagagtaaattagagacgggataggaaggccgtgggagaactcgatcctagcctgtgtcagctggatgtgtttacgtggagaggcgtggccactttttaagtcacctgaagcagtttagcctttggatagaggaacctgcctgaatttatggcattagtggtggcatttttttgtgtacaagatgtgggtgatggagggggctgtttctttttccgtgtgggtggttaataatagtcagtctcggagggcgatgctcgtaggatatttcaggggagtcaagggtgggatggtcatcgcgctttcagaagggagacccccggaaatgtttcacggaaaacaaatggtcagctttccttctgagagaaccaaaaattccatgggttccccggggccaaggggaaatgaattttgggcctttaaat

SEQ ID NO: 47012 - DNA, 494 bp, Homo Sapiens
cgggcagaaacaagaggtgcacattacagggataccagggatttgagtctgcagtctctctgattttccatgagtgcttatcttcttgggggaggtgggggcggtgtgtgaacatccacacagcctcctgctcctcctcatctactggggcgctcagtcacccaggtttggaatgcttctgaggtgatacttaatgttacagttcatggtcaccgtgctccatgtacgtgaggtcatgtgtattgtgtattgtcactgtctctcttcccagttatttttttcagtcaggtgctagggaattctccttttcttactatgtcatggctgtcctccccactccatggggctttcagaaagacaggtagaacataagagtctagagagaccttgggtgtcacccaggccattgaggctccatctgggcttgaaagagccctcacctgcagtaaaggtgcctctgaggccaaggaggaattatggcataagaagggaac

SEQ ID NO: 47013 - DNA, 616 bp, Homo Sapiens
gtatcggccattatggccgggatctgactataatgaggcaatggagtataccgaaaagtgtgtggcctttagaatcttacagggttgggttctaatgccagctcagctacttcctgcgcttatggtttagggtcccatatgctcttaagtttttttcttcaaaagtaaaagaggactgataacatgcttagggttgtgagaattaaatgtaaataagttttcagtacatatttcttccctcaccttatttacagtaatgctaggttgtttataggctcaggaatgatgagacctagtgtcagtatagtacagatacatgtaaaactgatcaagagtgataacactaatttgctttaaatggctttacaccatagtgaatgagttattttatttataatttgctttgttccagaaagtattttaggcagattacaaatattttataatagaagtagcatagattaaaaagtgatggagggaggccgggcacggtggctcatacctataatcccagcacttcgggaggccgaggcaggtagatcatctgaggtcagcagtttgagaccagcctggccaacattagtgaaacccgtctctgctaaaatacaaaacaagc

SEQ ID NO: 47014 - DNA, 863 bp, Homo Sapiens
agtcccaggagaggggacaatgaagggacaggcctggagttactaggacaggcctttgtgctgagtagcaatgtatacaccatttgggctatcagaggtacccctgggcaggagcctctacatccccttccccctcctctctccatgactcttgacatcctagcttcttctaaggggggagggaaaggggggagatttttatatatatatacatatatatatatcaagttttaaattattgatagttcatctggattaccaaaatcactctgcagccctgcccgaggctagtaggctgcaaccctggtccccacccctaacctcctgctccccctcaagccaactatgcagcccacaagaaggccctgcgggcccccccattgcccagcactgtctcatagaaggctctggtggtacctctgggccccaggagcatcagccccttgatcatctggggtttgtcatcaccatattttctccctgctgttcccaccatgcccttctgccatcttctgggagaaggaaaccaaaggatctaaaactggggtttgggggaaggtttcagcctctccccactccccttgccccacaccctttactccccagcccagagagacgctgcttttaccaggaaagactattgaaagatgttttattttatttttctctgacctttccatccttgaaaaaatgggggaaaaaagaagaaaaaagaccaaatcgaccataaaagaccaaaaaaaaaaaaaaaaaaaactccagggcatctaatgtccggggggcgggaaaaaagaagggaaatgaaaatgggcaccatgggctcataagcttggttttctctggaacccaagcttttaccttga

SEQ ID NO: 47015 - DNA, 775 bp, Homo Sapiens
ttcagaagtacagtaattctgctcttggtcatgtgaactgcacgataaaggaactcaggcgcctcttcttagttgatgatttagttgattctctgaagtttgcagtgttgatgtgggtatttacctatgttggtgccttgtttaatggtctgacactactgattttggctctcatttcactcttcagtgttcctgttatttatgaacggcatcaggcacagatagatcattatctaggacttgcaaataagaatgttaaagatgctatggctaaaatccaagcaaaaatccctggattgaagcgcaaagctgaatgaaaacgcccaaaataattagtaggagttcatctttaaaggggatattcatttgattatacgggggagggtcagggaagaacgaaccttgacgttgcagtgcagtttcacagatcgttgttagatctttatttttagccatgcactgttgtgaggaaaaattacctgtcttgactgccatgtgttcatcatcttaagtattgtaagctgctatgtatggatttaaaccgtaatcatatctttttcctatctgaggcactggtggaataaaaaacctgtatattttactttgttgcagatagtcttgccgcatcttggcaagttgcagagatggtggagctagaaaaaaaaaaaaaaaagcccttttcagtttgtgcactgtgtatggtccgtgtagattgatgcagattttctgaaatgaaatgtttgtttagacgagatcataccggtaaagcaggaat

SEQ ID NO: 47016 - DNA, 603 bp, Homo Sapiens
agagtgacttccacagccagatggctgtgcacaagctggccaagagcatccctctgcgcagacaggtaacagtgtctgctgactccagtgcatccatgaactctggggttcttctggttcggccatcacggctctcctccagtgggactcccatgctagcaggggtctctgagtatgagcttcccgaagaccctcgctgggagctgcctcgggacagactggtcttaggcaaacccctgggagagggctgctttgggcaggtggtgttggcagaggctatcgggctggacaaggacaaacccaaccgtgtgaccaaagtggctgtgaagatgttgaagtcggacgcaacagagaaagacttgtcagacctgatctcagaaatggagatgatgaagatgatcgggaagcataagaatatcatcaacctgctgggggcctgcacgcaggatggtcccttgtatgtcatcgtggagtatgcctccaagggcaacctgcgggagtacctgcaggcccggaggcccccagggctggaatactgctacaaccccagccacaacccagaggagcagctctcctccaaggacctggtgtcctgcgcctacc

SEQ ID NO: 47017 - DNA, 591 bp, Homo Sapiens
tacgaatgtatatagcgaccagagcattcttaattcccgccgcagacctggcgcccccgccttggctcctgggggcagccagccctggctgggagagcgggagctggcagaggagccactgccaaactcaaggctcctctggcccagcttggatggctgagggtggtcacacccctgagccttcagcactgtgctggccaccccggcctctgagtaagactcgtgcctccccctgctgccctgggctcaggctgctaccctctggggcccaaagctgtcccttctcagtgcttgtcagcgctgggtctggggcctctgtatgccctaggcctgtgccaaagtggccagagattgggctgcctgtgatacccatcagcccactgccccggccggcccagataggtctgcctctgccttccagctcccacagcctggtccctgatactgggctctgtcctgcagacacctctttcagaaacgcccaagcccagcccctaggagggggtggggcatccctggtcaaccctcaaacattccggactcccctcataacaatagacacatgtgcccagcaaaaaaaaaaaaaaaaaa

SEQ ID NO: 47018 - DNA, 836 bp, Homo Sapiens
  misc_feature (789)..(789): n is a, c, g, or t
  misc_feature (807)..(807): n is a, c, g, or t
  misc_feature (836)..(836): n is a, c, g, or t
accttttccccctaatctctaccaatcagacacattttattatttaaatctgcacctctctctattttatttgccaggggcacgatgtgacatatctgcagtcccagcacagtgggacaaaaagaatttagaccccaaaagtgtcctcggcatggatcttgaacagaaccagtatctgtcatggaactgaacattcatcgatggtctccatgtattcatttattcacttgttcattcaagtatttattgaatacctgcctcaagctagagagaaaagagagtgcgctttggaaatttattccagttttcagcctacagcagattatcagctcggtgacttttctttctgccaccatttaggtgatggtgtttgattcagagatggctgaatttctattcttagcttattgtgactgtttcagatctagtttgggaacagattagaggccattgtcttctgtcctgatcaggtggcctggctgtttctttggatccctctgtcccagagccacccagaaccctgactcttgagaatcaagaaaacacccagaaaggccttaatgacctcataggcactcttccaaaaagacaacagaactggaatgagaggcctgggtctgtctcctgccttagcaggcctatcaatttcttgtcaatctctttttttccttgctcacattaaaaggaagcatggagttctaatgctcccataaactatgtattttggcaagacacttcactactccaggtctcactttccccatctggtaaaacagggtttgggactanggtgttccctgggtattnctgtgatctgccctcttggctgccattcn

SEQ ID NO: 47019 - DNA, 1260 bp, Homo Sapiens
ggaaaaactactatcttgtttaagttaaaacaggatgaattcatgcagcccattccaacaattggttttaacgtggaaactgtagaatataaaaatctaaaattcactatttgggatgtaggtggaaaacacaaattaagaccattgtggaaacattattacctcaatactcaagctgttgtgtttgttgtagatagcagtcatagagacagaattagtgaagcacacagcgaacttgcaaagttgttaacggaaaaagaactccgagatgctctgctcctgatttttgctaacaaacaggatgttgctggagcactgtcagtagaagaaatcactgaactactcagtctccataaattatgctgcggccgtagctggtatattcagggctgtgatgctcgaagtggtatgggactgtatgaagggttggactggctctcacggcaacttgtagctgcctggagtattggatgttgcttgattttaaaggtaccagccgtccgcaagctttgcggctacaaatgcacttcgcccaccacatgccctaaacaattccatcactcccccacctaccgctatgtcaacctcgcctccctatatcctatatcgccaaccaggcctcctctataatccggcgcccctacccatcctcccttccccaatcatttcttccccaacatttcatccctacacatccccccaacttttttttccctaccctacataccgtcaaactacataaaaaaccccccttcggtatctccaccgacgatccttaatcaccttttcctccccgcgtcactattctttgccctaccatccgttttcgtatctatacccccgtgtctgtgaatcaagagtataatatcccgtacgctacttcctacccaaccgcgctaattccatccaatggcgaggtgcgaccctcccccccccaattactccccgtttccctctcccctcgtcaataacaaacccccatgccccccatccctgtatttcctatcgcccccgatgcttccccatatcaacccctccgcccctattattgataattccctccctctattacccgcctgccaatacttttctctaccttcgacccactctaacctgtttctcccgcgctttcctaatgcatataatcccctccacgcccatttgttacccgcgttctcactctcatcccaaccccctcgttgtatttcctgcactaatctctacccacccccctcgtattcctcccctccttactaaccc

SEQ ID NO: 47020 - DNA, 1031 bp, Homo Sapiens
  misc_feature (797)..(797): n is a, c, g, or t
  misc_feature (844)..(844): n is a, c, g, or t
  misc_feature (943)..(943): n is a, c, g, or t
cagcaacaagaagatatgactattttgttgtcagaggtttctgcagcctgcctccactgtgaaaagactttgcagcaggatgattgtagagttgtcttggcaaaacaggaaattacaaggttactggaaacattgcagaaacagcagcagcagtttacagaagttgcagatcacattcagttggatgccagcatccctgtcacttttacaaaggataatcgagttcacattggaccaaaaatggaaattcgggtcgttacgttaggattggatggtgctggaaactactatcttgtttaagttaaaacaggatgaattcatgcagcccattccaacaattggttttaacgtggaaactgtagaatataaaaatctaaaattcactatttgggatgtaggtggaaaacacaaattaagaccattgtggaaacattattacctcaatactcaagctgttgtgtttgttgtagatagcagtcatagagacagaattagtgaagcacacagcgaacttgcaaagttgttaacggaaaaagaactccgagatgctctgctcctgatttttgctaacaaacaggatgttgctggagcactgtcagtagaagaaatcactgaactactcagtctccataaattatgctgtggccgtagctggtatattcagggctgtgatgctcgaagtggtatgggactgtatgaagggttggactggctctcacggcaacttgtagctgctggagtattggatgttgcttgattttaaaggcagcaggttgtttggaagtttttgtggttanaaagtaactttgcacatagtatggttttaacaaattatacatctcanaagatgggtaatttaggatgcatatatatatatatatatatataaagggaatctttggaattgggaatttcagtacttttgcttttaaaaaaattttgntgggcagaaattaaaatttctaatttggagcaggatttagatttggaatttaaaataagaaaaccttatttggaatattacaattcct

SEQ ID NO: 47021 - DNA, 860 bp, Homo Sapiens
caccaaattctctgacctgatccagctggttgacttttaccagctgaacaaaggagtcctgccttgcaaactcaagcaccactgcatccgagtggccttatgaccgcagatgtcctctcggctgaagactggaggaagtgaacactggagtgaagaagcggtctgtgcgttggtgaagaacacacatcgattctgcacctggggacccagagcgagatgggtttgttcggtgccagccgaccaagattgactagtttgttggacttaaacgacgatttgctgctgtgaacccagcagggtcgcctccctctgcgtcggccaaattggggagggcatggaagatccagcggaaagttgaaaataaactggaatgatcatcttggcttgggccgcttaggaacaagaaccggagagaagtgattggaaatgaactcttgccctggaataatcttgacaattaaaactgatatgtttaaaaaaaaaaaaaacaaaaaaaaaagggcagaaaaaaaaaaagataaccacaaaaaggggcacaaaagagaaaaagaagaaacacaaagataacacaaggaggcgagggggcgcggcgccaaaaagcagaccccgaagagagagccgcataggcacaagaggccacagccagataccaacggacaacaagctgggcaaacaaatggcgacacgaccgacggaaaaaaccacgaggagacacagccaacccagacgacaaacccgagacacgccgcccacaagacagggaaccacaagcaccccgaccgggaggcacactcaaaggacgccgcacccacccacacaggcaggagagcgccgaccgcggcaacaagagcacccagacc

SEQ ID NO: 47022 - DNA, 566 bp, Homo Sapiens
  misc_feature (176)..(176): n is a, c, g, or t
ctagcaaccctaacagtaagaaatcttgttggcaaatcagatgcagctgttttaactatccctgcctgtgactttcaagctactcaccctgtaatggatcttaaagcattccccaaagataacatgctttgggtggaatggactactccaagggaatctgtaaagaaatatatacnttgagtggtgtgtgttatcagataaagcaccctgtatcacagactggcaacaagaagatggtaccgtgcatcgcacctatttaagagggaacttagcagagagcaaatgctatttgataacagttactccagtatatgctgatggaccaggaagccctgaatccataaaggcataccttaaacaagctccaccttccaaaggacctactgttcggacaaaaaaagtagggaaaaacgaagctgtcttagagtgggaccaacttcctgttgatgttcagaatggatttatcagaaattatactatattttatagaaccatcattggaaatgaaactgctgtgaatgtggattcttcccacacagaatatacattgtcctctttgactagtg

SEQ ID NO: 47023 - DNA, 876 bp, Homo Sapiens
caactacacgaacagcttcgggggtgagtggagtgcaccggacaccatgaagagatactccatgtacctgacacccaaaggtggggtccggacatcataccagccctcgtctcctggccgcttcaccaaggagaccacccagaagaatttcaacaatctctatggcaccaaaggtaactacacctcccgggtctgggagtactcctccagcattcagaactctgacaatgacctgcccgtcgtccaaggcagctcctccttctccctgaaaggctatccctccctcatgcggagccaaagccccaaggcccagccccagacttggaaatctggcaagcagactatgctggtggtttaagcaaggtctgagcatccctcaagtcctgctgtggaccacacaaaggcaaggagctgaccaggaggtgtcagttccctgagagacagggccaaaggcagtgtacccttgagtctcactaccggccattctacgtcaacaaaggcaacgggattgggtccaacgaagccccatgagctcctggcggaaggaacgaggcgccacacccctgctcttcctcctgaccctgctgctcttgccttctaagctactgtgcttgtctgggtgggagggagcctggtcctgcacctgccctctgcagccctctgccagcctcttgggggcagttccggcctctccgacttcccactggccacactccatccagactcctttcctgccttgtgacctcagatggtcaccatcattcctgtgctcagagggccaacccaatcacagcggtgaagacaaggttgggcctgcctaaaccgccaggctcctctctcggggctggatctggggctagcatgaataccgacagg

SEQ ID NO: 47024 - DNA, 918 bp, Homo Sapiens
  misc_feature (782)..(782): n is a, c, g, or t
agggctggcaggccctggacccaacgccccaggagaagagcgaagggacgtactgctgtggcccagttccagttcgtgccatcaaggagggcgacctgagcaccaagtacgatgcgccctttgtctttgcggaggtcaatgccgacgtggtagactggatccagcaggacgatgggtctgtgcacaaatccatcaaccgttccctgatcgttgggctgaagatcagcactaagagcgtgggccgagacgagcgggaggatatcacccacacctacaaatacccagaggggtcctcagaggagagggaggccttcacaagggcgaaccacctgaacaaactggccgagaaggaggagacagggatggccatgcggatccgtgtgggccagagcatgaacatgggcagtgactttgacgtctttgcccacatcaccaacaacaccgctgaggagtacgtctgccgcctcctgctctgtgcccgcaccgtcagctacaatgggatcttggggcccgagtgtggcaccaagtacctgctcaacctcaacctggagcctttctctgagaagagcgttcctctttgcatcctctatgagaaataccgtgactgccttacggagtccacctcatcaaggtgcgggcccctcctcgtggagccagttatcaacagctacctgctggctgagagggacctctacctggagaatccagaaatcaagatccggtattctttggggagcccaagcaaaaacgcaaagctggtgggctgaagtggcccttgcagnaccccgctcccttgtggggccttggaaagcctgcaccctttcccttggggaaggggggccccggcctgaactgaaggaagcacaaaaaacgggtgggaaaattccccagaaccccccgctggtaggcgacgggggt

SEQ ID NO: 47025 - DNA, 714 bp, Homo Sapiens
gctcccgggcccgaggaggaaaaggattgccaaggctccaggcacccctcaaagcagcgcctgcctcctccctcctgggtcttccctctccctgcctcagcctcctccctcagccgctcccaaccatgagagccgaggtgggaggcatgggaaacagtgcagtgactcaccccctgcccccgcaccaaccacccatattcaggagaagaggacagacacggcacctctgagtcacccctctcctgtggagcgggcgtccgaggggccctggcatctgactcaggccacaccatggaatcactgcatccaaggccattcctgccctctctgagtctcagtttttccatttgttcagtggagagaattaaccattgatacctcctggctgggtgaggcggctcacacctgtaatcccagcactttgggaggccgaggcaggcggatcacctgaaatcaggagttcaagatcagcctggctaacatggcgaaaccccgtctctactaaaaatacaaaaattagcctggcgtggtggcgcatgcctgtaatcccagctactcaggaggctaaggcaggagaatcgcttgaacccgggaggtggaggttgccgtgagctgagattgcgtcactgaactccggcctgggtgacagaaggaggctctgccttaaaacacacaaaaaaaaaacctcctggaactgttcgagggatgaattga

SEQ ID NO: 47026 - DNA, 1043 bp, Homo Sapiens
  misc_feature (811)..(811): n is a, c, g, or t
  misc_feature (936)..(937): n is a, c, g, or t
  misc_feature (970)..(970): n is a, c, g, or t
  misc_feature (978)..(978): n is a, c, g, or t
cccacgcgtccggcagcctgccccttctacaccacgagcagatgggccttctccgggatgaggccctggcagaggtgaaggacatggagcagctgctggcccttgggaaggaggcccgggcctgtccctattacgggagccgccttgccatccctgcagcccagctggtggtgctgccctatcagatgctgctgcatgcggccactcggcaggccgcgggcatccggctgcaggaccaggtggtgatcatcgacgaggcgcacaacctgatcgacaccatcacgggcatgcacagcgtggaggtcagcggctcccagctctgccaggcccattcccagctgctgcagtacgtggagcgatacgggaagcgtttgaaggccaagaacctgatgtacctgaagcagatcctgtatttgctggagaaattcgtggctgtgctaggggggaacattaagcaaaatcccaatacacagagtctgtcacagacagggacggagctgaagaccatcaacgactttctcttccagagccagatcgacaacatcaacctgttcaaggtgcagcgatactgtgagaagagcatgatcagcagaaagctctttggattcactgaacggtacggagcagtgttctcatcccgggagcagcccaaactggctgggtttcagcaattcctgcagagcctgcagcccaggacgactgaagctcttgcagcccctgcagacgagagtcaggccagcaccctgcgaccagcttctccactgatgcacatccaagggcttcctggcagctctcactacggcccaccagngacggcaggggtcatccctgagccgccaagggcagcctcagtcagaagcacccctgaagtttttgctcctgaaatccagctgtgcactttgccccaattggtgaagggaatgcccgggcagtggnncctttgcggggggggtacccatggcagcccggntgtctggnacttccgggcagcagctgctgggccccttggtgcccgggggtggggaacttgaaaaccccccggg

SEQ ID NO: 47027 - DNA, 743 bp, Homo Sapiens
  misc_feature (726)..(726): n is a, c, g, or t
tgcagcaaaagtttcagtcagatctcagacctcattaaacaccagagaatccacactgggggaaaaaccatataaatgcagtgagtgcaggaaggctttcagtcagtgctcagctcttaccctacaccagagaatccacactgggaagaaaccaaatccatgtgatgagtgtggcaaaagctttagtcggcgttctgatctcattaaccatcaaaaaatacacactggtgaaaagccgtataagtgtgatgcatgtgggaaagccttcagcacatgtactgatcttattgaacaccagaaaacccatgctgaggagaaaccctaccagtgtgttcagtgcagcagaagttgtagccaactctctgaacttactattcatgaggaagtccattgtggagaagacagtcaaaatgtgatgaatgtgagaaaacctttagtgtgtacaccaactctattcagtaccagagacactgtaccagaaaaaaatctaatgaatgctgttgattattgatgagtatgaaaaaggttttaatcagtgttcaactcttatgctacattaaaaccacactggatccggatacgtgtggtggctcacgcctgtaatcccaacactttgggaggcagatgtggaagcatcatttgagcccaggagtttgaggctgcagtgagctatgattccaccattgcactcccgtctgggcaacagagcaagaccctgtctatttnaaaaaaaaaaaaaaaaa

SEQ ID NO: 47028 - DNA, 706 bp, Homo Sapiens
  misc_feature (302)..(302): n is a, c, g, or t
  misc_feature (453)..(453): n is a, c, g, or t
cctgagcagcgctctcggttgcagtacccactggaaggacttaggcgctcgcgtggacaccgcaagcccctcagtagcctcggcccaagaggcctgctttccactcgctagccccgccgggggtccgtgtcctgtctcggtggccggacccgggcccgagcccgagcagtagccggcgccatgtcggtggtgggcatagacctgggcttccagagctgctacgtcgctgtggcccgcgccggcggcatcgagactatcgctaatgagtatagcgaccgctgcacgccggcttgcatttcttntggtcctaagaatcgttcaactggagcagcagctaaaagccaggtaatttctaatgcaaagaacacagtccaaggatttaaaagattccatggccgagcattctctgatccatttgtggaggcagaaaaatctaaccttgcatatgatatngtgcagttgcctacaggattaacaggtataaaggtgacatatatggaggaagagcagaatggaccagtggatggacaaggagacaacccaggcccccaggctgctgagcaggtacagacacagctgtgccttcggattcagacaagaagcttcctgaaatggacattgattgattccaacacttgtttctattaaacagactattataaaaaaaaaaaaaaaaaacgcggggctttttcgggggggaaagggc

SEQ ID NO: 47029 - DNA, 401 bp, Homo Sapiens
tttgagaattaaattatatatttttaatatgactgtgaccttgactgataataaagatgtaataagaattgcaagctaaatgtttccctttgcaactcatgctttgtgttttgttttgatgacctactcgctcgtaatgttttgtaaggcacttcagagagaagacagatgcatcatcctggcctccatcaaataacactatccaaggtggcacctcttctgcaatgtttaaccctgctgttgtccatttgggtttgttttttacagtctcttttgtaccacagtggatacatttgcttcatgagtgcaggaaccatgttcactgctgcattcttacccctagccctgggtccacctagcctgtaagtgccccctgagggtatcaaagcacgcggacttcc

SEQ ID NO: 47030 - DNA, 666 bp, Homo Sapiens
caagcagttcccctgctttgaaagaagatggtcagcccgctgcctccccagcggccacagctcctttgagtgtggggggtcacagccaggatgtattcctgacaataaggatccttttattttcatttctgcataatgaaagagcctttcgatttattagaagtggtttttcctccctacatctttaaattcttggttctctttagtcctcatcccttgaatggacttgtcagctacctccccaggaggagttcagaagcttctgttggccatcacttgagtagatgacaagctgtaaggtatctgctgctaacgtggctgcttctccgagagcacattgaggtccagacagatccaaaccttggccctaaaaaatgtgtgctgtaaagttacttgatgtatatttattataattatttatggttgcatttaacaaacttttcattcaatctgatgctatttacaccatgctgtgtaaaggaagctcactaaaggaaaaaagtcacaccaataaataaccttcatctaattttgatttaccttaagagttgtgtgatcatctactcttgctgagcaagttcaaaggctggcatgcttggatggctctgatatttaagtgctgccaagtggctaggaattaaagtgtttctaattataaaaaaaaaa

SEQ ID NO: 47031 - DNA, 424 bp, Homo Sapiens
  misc_feature (13)..(13): n is a, c, g, or t
cttaaccccaagnagcagcaagcagtgcaaagatgtgtcccgcctgcgctcggtgctcatgtccctgaagcagacgccactgtcccgctaggtgcctgctaggtgcatggccacagagcatgggctgggcctgggcacaggaggagcagctgctttggtcggggtggagactcgcagcagctgctacccacagcctattccactcctccccatctccaggcgctgggaggggggccctcaccccgtcacgcctcgctccctcctggccctctggtccagcccctcacgcctcctctcagtctactcaattgtgactgtccctcctgatgtattttttttcttggcttaaagggtgtgttgttgactctttttacacttatttattatcattctcacttctctggaagccaaaaaaaaaaaaaaa

SEQ ID NO: 47032 - DNA, 876 bp, Homo Sapiens
  misc_feature (586)..(586): n is a, c, g, or t
gccagtcatcaaatcccagccagtgcccaagaacaacaagggacccgtcaaggtcgtggtgggaaagacctttgactccattgtgatggaccccaagaaggacgtcctcatcgagttctacgcaccatggtgcgggcactgcaagcagctagagcccgtgtacaacagcctggccaagaagtacaagggccaaaagggcctggtcatcgccaagatggacgccactgccaacgacgtccccagcgaccgctataaggtggagggcttccccaccatctacttcgcccccagtggggacaaaaagaacccagttaaatttgagggtggagacagagatctggagcatttgagcaagtttatagaagaacatgccacaaaactgagcaggaccaaggaagagctttgaaggcctgaggtctgcggaaggtgggaggaggcagacaccctgcgtggcccatggtcggggcgtccacgccgaggccggcaacaaacgacagtatctcggattccttttttttttttttaattttttatactttggtgtttcacttcatgctctgaatactgaataaccatgaatgactgnaatagtttagtccagatttttacagaggatacatctatttttatcattaattttggggttttgaaaaattttttttttacaccttctaaatttctttatttctcaaagcagataaattcttctgtggggaaaaggttttcctttttttaaattaaaagttttaaaaattcctttgccaaaatcatggtggattttgcctctttgccttttttcgttggccggagaaatttggttggcggtaaattttggccttccggggaatggtggtttctggaattgctttccgggtg

SEQ ID NO: 47033 - DNA, 576 bp, Homo Sapiens
actctttgtatttacttggaaattcagttatgtggatccattttggagatgaatttcatctcatgagttgctgtggcatttaaacaacaggaaatgtgtccctaaatggaaacaaatataatcccacaaaaccaacaattttatttgcctctactacgtcaggcagaattcttcaattaagttgaactacatttgttgatcccttttctcatcttacccctttatgccacctactgaaaagaaaaacaaatagctaggtttggtttcctgttttttgtctatgtcccagctgacattcagtcaaatgttgggatacttctaatttggtggtgtttctttgtacatttttcagtgcaactgtttagtcatgtgttttcatctaagaaattatcttttgaatatttaagccttgatccttttattctgaaaccattaatattccttcttggctgggtgcagtagtttacgcctgtaatcccagcactgtgggaggccgaggcggatggatcacctgaggtcgggaattcgagaccagcctgaccaacatggagaaactccatctctactaaaaataca

SEQ ID NO: 47034 - DNA, 828 bp, Homo Sapiens
aagggggggggggggggggaagaggaagtgatagtggacggcgcgccgccctcggcacgaggatcttttgaccccttaccaggaaagccttacaaagaaacagagccgcccaagggcggaaaagaaaaatgtgccagaaaagcacacgagagaggctcagaaacaagcctcagaaaaagtttccaacaaaggcaagaggaagcataagaatgaagatgataaccgagccagtgagagcaagaaacccaaaacggaggacaagaattcagcaggccataagccatccagcaacagagagtcatctaagcagagtgctgcaaaagaaaaggatttgttgccttctcccgctgggcctgttccttcaaaagatccaaaaacagagcatggctctcggaagaggactattagtcagtcttcttccttaaagtcaagcagtaacagcaacaaggagacgagtggcagcagcaaaaacagttcctccacatcaaagcagaagaagaccgaagggaagacttccagtagctccaaggaggttaaggaaaaggctccaagtagctcctctaactgtcctccatctgcaccaactcttgattcttctaagcctcggagaacaaagcttgtctttgatgacagaaattattcagcagaccattattttacagaagcaaaaagctaaagcacaaggcagatgcattgtctgataggtttgagaagctgtatactatcttgatggtgtggtacttttcattgaatggggggatgcataagaaaaaatgctcacgaatccaatccccttcccaggattccagacggggatcctcaaacctt

SEQ ID NO: 47035 - DNA, 412 bp, Homo Sapiens
  misc_feature (409)..(409): n is a, c, g, or t
  misc_feature (411)..(411): n is a, c, g, or t
aattcgcggccgcgtcgactacggctgcgagaagacgacagaagggaagacttccagtagctccaaggaggttaaggtaaagtgttgggggcctggggcttttgaaaatcattcaacttgccatgtgacttttccagggtgacactgtgctttgaaattattgtaacatctcagtaaatatataggcctatgtcttttaccctctatatgtaataatcctgataaatgaatacagtgatataagactgtgaaggcggtaagtcagctggtcacatacatattgaaagaaaaaccctgggtacagtggctcatacctgtagtcccagctattgggaggctaagatggaaggatcattgaggatttgatccagccgggcaagtggtgagacccgtctgtaaaagaacaaangng

SEQ ID NO: 47036 - DNA, 518 bp, Homo Sapiens
acatcaccacagccccagatggtgactactggagactgctgcccccaggtatccacattgtcattgcccaagcccctggctacgccaaagtcatcaagaaagtcatcatccccgcccggatgaagagggctggccgtgtggacttcattctgcaacctctggggatgggacccaagaactttattcatgggctgcggaggactgggccccacgacccgctgggaggtgccagctctttgggggaggccacggagcccgacccgctccgggcgcgcaggcagccctcggccgacgggagtaagccctggtggtggtcctacttcacatcgctgagcacccacaggccacgctggctgctcaagtactagccccggccccagcacccgccaggatgtggagaccgaggcccatctccacatcccgggctcctggctcttgattttgtctgccacagacatcccacaaagccgctgccattttattaaagtgttttgatccacttttcactgtaaaaaaaa

SEQ ID NO: 47037 - DNA, 635 bp, Homo Sapiens
atttttttacaatatctgagtaagtagctttctctttgatcactgcctcttgattttttcctggatcattaagaggcttgaagaatactatgtagttgaaccagaggagtagtgtatgtcacatcctcacttactccttaagccctttctcatggtcttggccctaaaacatattttcagggcttgtgacccagtgatcagtggtcacccttaaagtattacagatacgtgcctgttttacatgagaggtaactgtttatgtgtataagtcatcttaataaaataacatgaaatttattagctgaattgggtagatactgcttttctaagttgaacctaacttaagctgatgcagaaactgagtcagaaaagttgctataattttaaaatataagaagtaaaagtgaaatcttatgtagcatctttatctcattttggtttgtcagtataagtttctgatttcctttaagctctttacttttagaaacgtgaatttacaatcccttatccaaaactgctggggccagatgattttccaaattcagaactttttggatttctgaaaaatttacatatagactgtatcccattacatcccagcagcatctctctataataataaaaaaaaaaaaaaa

SEQ ID NO: 47038 - DNA, 711 bp, Homo Sapiens
  misc_feature (711)..(711): n is a, c, g, or t
ggggagaaaattatatcttgtcaagcatttatcatgatactgctgaccagaagtgactgctgtgtagctgtaatttgtcatgtaattgaagactgagaaaatgttgggtccagtcgtgcttgattggaaattgttgtttctaaatctatatgagaattgacaataagtatttttattataactcagcccatacatatatactatgtatgcagtgcatctgcatagaacagttccttatccttggccttctgttttattgtttttttctttgctgttttccctttgcttctaatattacagttttgtattttgtaaacaaaaatcaaataatgcatatcagaatctttatatggaagaaatcctttattgcctttcctttgtttccttgtaaaggcaccctgttctgttatggtttttcattatataaaattattatatctatatatgacatatgctaaaatttcttggagagtgttaatcttttctgtgactaaatagcaataataagtggaaaattagaaattatttccaggtattatatttgtcacaggccattgtaaataccaagtatattgtgtctgccataattttttaaaatacattcattgtcttcagtcatacagcaagacacatgagacatagattagaaaacatgttgtacaattttaatttacaactggtgggaaataaaaatcaccttaattttcaaan

SEQ ID NO: 47039 - DNA, 584 bp, Homo Sapiens
ctttctctaccacagcaaacacattctccaccatgtcagtctaaagagtctaaaggggccgggagaagcgtgagcgaggggcagattctagtcgggagcccatgccctggaaatccatctttcttcatctttcccattgaccactttgggtttgacctgcacatctgcagtgagggcagaattcaacaagcacaactcactggtctttcagtcaacgtgctagaatccgatgacttattaatctctaattttttggcgcctctttcattgaatgagaattgctttcgtatagttcacattagaaaaatgcctaatatactaaagtaaaccaaacgttgtcacttttctcttgttcttgaaacattgcaaccaaaaaggtcagcacaaaggccttcacctacgtgaagacctcctggtaggatctgtccatgggatggagaaccactctgtccagatctggggttgggtcatgacaccagctaccaattttagaatattatttcttggtttctttatgaaaaatgggtgctagtggtaattgctttgtggcttagtaaactactctgtggatgatttccaaacat

SEQ ID NO: 47040 - DNA, 726 bp, Homo Sapiens
  misc_feature (611)..(611): n is a, c, g, or t
ctgcgatgtcgcgtgcatgtgacgtgtatatttagtacagtaagacagttgcagaaggatggccctgatggtgacagtgataatcctaagcctagatgctcactggctgggcacaagtacaggatctcactggaacctcactaggtatctgttgtcctccttttatagttgagaaacagaaagcttaagtaatttgcccaagatcatgtaactaataactggcagggatttgagtcaggatctccaaagctacatctcttcctaaagctagttttaaaatttcatttctcatatatggagtagcccacaaaggctgtatgcagggtagtcttcagaaagcttacatcttcaccaaggcacatgaaactgcagaaagaagcaatgttaggcgttcctgataataattatctgcctggatgacagcagtcctgctttatggtcacagaccccagctttctgccagaacatggctcaggactcctgaaaatcatcccattcgggagcaagtgggtttaaatttccttttcatgaaaggaaagattagctttcatgcaaacacttggtccatttggccatttaataaagaagactgaagtctcatgttccataanttatcaggctaaaagtcctttgttgttcataaaacatgggtgaaccccggcttcaatcaagcaatctgggataatacctgctgtcggtatttacttttttggatgaccaccctcc

SEQ ID NO: 47041 - DNA, 772 bp, Homo Sapiens
atggttcaagcaatggagtactgggtcacagggattcctcctttcccccccaaatattaactccagaaactaggcctgactggggacacctgagagtagtatagtagtgcaaaatggaagactgatttttgactctattataatcagcttcagagattccttaaaccttcctaatttcctgctccagggcagtaaacacaaatatttcttcaaggggtgatgaaaacctcggaagttttaatttgaggttatctgctacgaaacagtatttctaaaaggctaaagtgataagtctcttgcttttttttgatcctgctcttatattcttttttttcctcagagaaatcaggagggtagttagaggtataaaacaggaggaaatattatggaaaatgaaaatagggaaaataattgaatcattttagaagtagctaatttcttttctcaaaagagtgtcccttcttcacacctactcactttacaactttgctcctaactgtgggttgaaaactctagctaaagaaagttatcaaatcttaacatgcattcctactattatgatagtttttaaggtttcaattcaatcttctgaacggcataagtcctattttagccttacctcctgcatttgcaatacgtaatactgatcagtgggcacagttcttcagctacattgagaccctgaaatgaacaattatattctgactcgacatcttgtccccaatccttccaaaaatattgatggtgatttgtgctaccatttactcgttta

SEQ ID NO: 47042 - DNA, 502 bp, Homo Sapiens
atccaacctttatgctagaatagaaagtgcctgttattttgttcattctcctcctcgtccagtgtacagctgtagtgatggggaaacaggaaatcaattactaggttgccactaagtctacaaactattgaagaccagaatttacataaatcgtatgcagtcccacatctgacaggcttgcaaaaccttccacatttccatgagtaagcctatccaaatagtactacttctcaattgcaaatcataacaacctcttgtgtggccgtcagagctgactaagcagaaactatgatcctctgaatttagtatttttcctgtttgccaaaaatgatgtgtcattagtgacgaagttattcttaaagttcctttaacaaaactgtgatttatatcaaataacaatggcttggagggggtatggaaaattgattattcttcctaacaaatctattaattttattaaacttggtctccctccctttttcttggatgtttataaaattta

SEQ ID NO: 47043 - DNA, 498 bp, Homo Sapiens
attattccaatgcaaggtgagatttgggtggggacccatccaaactatgtcagtatgttttgacttctggcttgattgctaggttgcatagaggacaaacatggaaattaatgaagtaccttaatatctggcttcagatcttagacaggatcagagggccagctcaaatttgcaaggaggggaggtagatcccaccattttatgggtgaatggcaaaatcaaacagaaattatgtgggatgggagatactgatgcaggcatctttggaaacattctacttagctaattttatgctaggctttaggtcaagaaggagagagagagctgacatgctgtggtacacacttattgtcccagcgacttggaaagctgaggcaggaggattgcttgatcccaggagtttgaggtagtgtgcgatgatcgttcttgtgaatagccactagccactgaactccagcttgggcaacattgagacaccctgtctcttaatttaaaaaa

SEQ ID NO: 47044 - DNA, 791 bp, Homo Sapiens
cagtgctgctcgggggcttctcctccaggtccctggagttcctggtccctggagctccgcacttggcggcgcaacctgcgtgaggcagcgcgactctggcgactggccggccatgccttcccgggctgaggactatgaagtgttgtacaccattggcacaggctcctacggccgctgccagaagatccggaggaagagtgatggcaagatattagtttggaaagaacttgactatggctccatgacagaagctgagaaacagatgcttgtttctgaagtgaatttgcttcgtgaactgaaacatccaaacatcgttcgttactatgatcggattattgaccggaccaatacaacactgtacattgtaatggaatattgtgaaggaggggatctggctagtgtaattacaaagggaaccaaggaaaggcaatacttagatgaagagtttgttcttcgagtgatgactcagttgactctggccctgaaggaatgccacagacgaagtgatggtggtcataccgtattgcatcgggatctgaaaccagccaatgttttcctggatggcaagcaaaacgtcaagcttggagactttgggctagctagaatattaaaccacgacacgagttttgcaaaaacatttgttggcacaccttattacatgtctcctgaacaaatgaatcgcatgtcctacaatgagaaatcagatatctggtcattgggctgcttgctgtatgagttatgtgcattaatgcctccatttacagcttttagccagaaagaactcgctggga

SEQ ID NO: 47045 - DNA, 582 bp, Homo Sapiens
tatttggatgcttaaggcctgtatggaatatcattggtgaaggcatattccactgattacaaattgcagcagcaagatacttgggaagtgccatttgaggagatctcagagctgcagtggctgggtagtggagcccaaggagcggtcttcttgggcaagttccgggcggaagaggtggccatcaagaaagtgagagaacagaatgagacggatatcaagcatttgaggaagttgaagcaccctaacatcatcgcattcaagggtgtttgtactcaggccccatgttattgtattatcatggaatactgtgcccatggacaactctacgaggtcttacgagctggcaggaagatcacccctcgattgctagtagactggtccacaggaattgcaagtggaatgaattatttgcacctccataaaattattcatcgtgatctcaaatcacctaatgttttagtgacccacacagatgcggtaaaaatttcagattttggtacatctaaggaactcagtgacaaaagtaccaagatgtcatttgctggcacggtcgcatggatggcgccagaggtgatacggaat

SEQ ID NO: 47046 - DNA, 714 bp, Homo Sapiens
gggtctgggcggctgctggcagcgccatggagacggtacagctgaggaacccgccgcgccggcagctgaaaaagttggatgaagatagtttaaccaaacaaccagaagaagtatttgatgtcttagagaaacttggagaaggggcctatggcagcgtatacaaagctattcataaagagaccggccagattgttgctattaagcaagttcctgtggaatcagacctccaggagataatcaaagaaatctctataatgcagcaatgtgacagccctcatgtagtcaaatattatggcagttattttaagaacacagacttatggatcgttatggagtactgtggggctggttctgtatctgatatcattcgattacgaaataaaacgttaacagaagatgaaatagctacaatattacaatcaactcttaagggacttgaataccttcattttatgagaaaaatacaccgagatatcaaggcaggaaatattttgctaaatacagaaggacatgcaaaacttgcagattttggggtagcaggtcaacttacagataccatggccaagcggaatacagtgataggaacaccattttggatggctccagaagtgattcaggaaattggatacaactgtgtagcagacatctggtccctgggaataactgccatagaaatggctgaaggaaagcccccttatgctgatatccatccaa

SEQ ID NO: 47047 - DNA, 913 bp, Homo Sapiens
  misc_feature (840)..(840): n is a, c, g, or t
taaaataattaccttggcgattggggcatgcagtttggtcttctgggaactggcttccagctgtttggctatgaggaaaactgcagtccaatcctctacagcatctctttgaagtttatgtacaagttaataaagaagcagcagatgataaaagtgtagcaaaagcagcacaggagttcttccaacgattggaactgggcgatgtgcaagcactttcactgtggcaaaaatttcgggacttgagcattgaagagtacattcgggtttacaagcgtctgggagtatattttgatgaatattcaggagaatcattttatcgtgaaaaatctcaagaggtcttaaagttgctggagagtaaaggactcctactgaaaacaataaaaggaacggctgtagtagatctctctgggaatggcgacccctcctcaatttgtactgtaatgcgaagtgatgggacttctctctatgcaaccagagatcttgcagctgctatagatcgaatggacaagtataattttgatacaatgatatatgtgacagataaaggacaaaaaaagcattttcagcaagtattccaaatgctgaagatcatgggatatgactgggcagaaaggtgccagcacgtgccctttggagtagtacagggaatgaagactcgaagaggagatgtcactttcctggaagatgttttaaatgagattcaattaaggatgctacagaacatggcttcaattaagacaactaaagaactcaagaacccacaagagactgcagagaggttcgggctcgcagcactcattattcagtacttcaaaggtttactcttatctgactacaagnttagctggggatcgtgttttccagagtcgcggggacacaggagtcttcctaagtacaaacacgcccgtcttca

SEQ ID NO: 47048 - DNA, 749 bp, Homo Sapiens
cttttattatacatatcctgattttgtgtgtgtgtgtgtgtgtgtttattttgaaataactttattcgcagcctaacactttgcactgcattcagcatgacttagaatttacttttggtgttgtccagctgctgccaaaaattgggtagaatcagattggtattctttgttggtgcctggaatcgtagccagtggtacaaaggtgatgttgttccttgctgagacttcgtggaagaaggcaaaactttgatcatctgcccttgcacttgggcagtgttgaaggtgattggagtacaagtgccaatttgcaggaacaattgtaaacacctttgatacaaatgccatcatcccatttttactgattagaaaaactttgctattaataggtgcaaagtccatttcaggtataattggtaaggaactgagtgcactcatgggaagaaaccttgttttgttttttgttcgcttttcttcttatccccttttctcagttttatggctggagacatgatttattgcagccatccatcttgggggctcatccatcacacccgggttgctaggagattgtggcagcagctgtttgctctgaatcagacagaaaagttgtcaatcatcaaaggcaggtgaatagcattagaaacacgctattgtcagacggaataattaatcaaagagagaaaagataattaaaaagatatgacccttgcaagtacttgctctgggttgcctgtaaaaaaaaaaaaaaa

SEQ ID NO: 47049 - DNA, 666 bp, Homo Sapiens
gcgtccgtaccctcggagctggagaagtatgagcaggcatgtaatgagttcacgacccatgtcatgaacctgctgagggagcagagccgcaccaggcccgtggcccccaaagagatggaacgcatggtgagcatcatccatcgaaagttcagcgccatccagatgcagctgaagcagagcacctgcgaggctgtgatgatcctgcgctcccgtttcctggatgccagacgaaagcgccgtaacttcagcaaacaggccactgaggtcctaaatgagtatttctactcccacctgagtaacccatatcctagtgaggaggccaaggaggagcttgccaagaagtgtggcatcaccgtgtctcaggtctccaactggtttggcaacaagaggattcgctataagaaaaacatcggaaagttccaagaggaggcaaacatctatgctgtcaagaccgccgtgtcagtcacccaggggggccacagccgcaccagctccccgacacccccttcctctgcaggctctggcggctctttcaatctctcaggatctggagacatgtttctggggatgcctgggctcaacggagattcctattctgcttcccaggtggaatcactccgacactcgatggggccagggggctatggggataacctcggggggagg

SEQ ID NO: 47050 - DNA, 544 bp, Homo Sapiens
gctcgagagagaccacgggctcctggacttgcctgttcaaccttgtggccatcatcagcaacctggggctgtgcaccttcctggtgtttggacaggctcagagggtggacctgagctctatccatgaggacctctagctcccaaccccacagcctctccaaggacccaggcgccagcagccccgggacacaggggactcagtgtgtgggacttggtcactccatgtcagacacacgagcagagaggaacacaaaccactgtggagcctgaagctccttaagaagagtccacaacagctggtgggagggtggggtgggcctgggtccagaccaggctcgctgctctctgggcctcagtttccccacctgccagcgggctcggccctgtcctcctcacaggctggtgtggccgtcagggtgggtggggttattgttagtagagcgcagcctcattcccaccacgatctgttccgcgtggttcccgccaaacctccctcggtcgccgtgttctccgcaagcctcctgcaggcacgtactatgtgtta

SEQ ID NO: 47051 - DNA, 939 bp, Homo Sapiens
  misc_feature (733)..(733): n is a, c, g, or t
agctggacgtggaaaatgccaagctgtacctggacttcatcgtactcgggattttcttcatctccctccgcctcattgcctattttgtcctcaggtacaaaatccgggcagagaggtaaaacacctgaatgccaggaaacaggaagattagacactgtggccgagggcacgtctagaatcgaggaggcaagcctgtgcccgaccgacgacacagagactcttctgatccaacccctagaaccgcgttgggtttgtgggtgtctcgtgctcagccactctgcccagctgggttggatcttctctccattcccctttctagctttaactaggaagatgtaggcagattggtggtttttttttttttaacatacagaattttaaataccacaactggggcagaatttaaagctgcaacacagctggtgatgagaggcttcctcagtccagtcgctccttagcaccaggcaccgtgggtcctggatggggaactgcaagcagcctctcagctgatggctgcgcagtcagatgtctggtggcagagagtccgagcatggagcgattccattttatgactgttgtttttcacattttcatctttctaaggtgtgtctcttttccaatgagaagtcatttttgcaagccaaaagtcgatcaatcgcattcattttaagaaattatacctttttagtacttgctgaagaatgattcagggtaaatcacatactttgtttanagaggcgaggggtttaaccgagtcacccagcctggtctcatacatagacagcacttgtggaaggattgaatgcagggttccaggtgggagggaagaagtgggacaccatctccccttgacccatggagacattttttaaaaactatatccaaaaattgggggaaaaagacattggggccaaccttcctttcaaagtcctttccttt

SEQ ID NO: 47052 - DNA, 923 bp, Homo Sapiens
  misc_feature (757)..(757): n is a, c, g, or t
  misc_feature (860)..(860): n is a, c, g, or t
  misc_feature (881)..(881): n is a, c, g, or t
  misc_feature (896)..(896): n is a, c, g, or t
  misc_feature (921)..(921): n is a, c, g, or t
cgctcaccctgaagtggagctgacctacgccgacttccgtgggatgaaaaggtgcatggttcatccgaggctttttggattctggtggaggatgtggacagcgaggtgattctgcaccatgagtattttctcctcaaggccaagtacgcccaggacgagcacctcattacattcttcgtgcctgtctttgaaccgctgccccctcagtacttcatccgagtggtgtctgaccgctggctctcttgtgagacccagctgcctgtctccttccggcacctgatcttgccggagaagtacccccctccaaccgaacttttggacctgcagcccttgcccgtgtctgctctgagaaacagtgcctttgagagtctttaccaagataaatttcctttcttcaatcccatccagacccaggtgtttaacactgtatacaacagtgacgacaacgtgtttgtgggggcccccacgggcagcgggaagactatttgtgcagagtttgccatcctgcgaatgctgctgcagagctcggaggggcgctgtgtgtacatcacccccatggaggccctggcagagcaggtatgacgtggcgctgtgtcatgtgaatttcccaagaagcatttcatctgtgattccgtatgaaggctttctaagccctgaaatttgcagggtcatttcctcagtttgtgtattaaagaaaagctgccccagccaagcgtggtggctcacgcctgttatcccagcacttttggaggccganggcggcagatctccggagatcaggagttcgagaccagcctggccaacatggtgaaaacctgtctctactaaaatacaggaattagctggcgtggtggtgtgcnccctgtaatcccagcttcttngaaaggctgagcagnagaatcgcttgaacccgggaggcgngg

SEQ ID NO: 47053 - DNA, 762 bp, Homo Sapiens
  misc_feature (720)..(720): n is a, c, g, or t
gggaagttgccttccccacctggcccccaagagctcctcgacagtcccccagccctgtatgctgagcccttagactccctgcgcattgctccatgcccttcccaggactccctatactcagaccccttggacagcacgtctgctcaggcaggagagggagtacaacggaagaaacctctctattgggacttgtatgagcatgcgcagcagcagttgctgaaggccaagctgacagaccccaaagaggatcccatctatgatgaacctgagggcctggccccagtccctccccagggcctttatgatctgcctcgggagcccaaggatgcatggtggtgccaagctcgggtgaaggaggagggctatgagctcccctacaaccctgccactgatgactacgctgtgccaccccctcggagcacaaagcccctccttgctcccaagccccagggcccagccttccctgaacctggtactgcaactggcagtggcatcaaaagccacaactcagccctgtacagccaggtccagaagagcggggcctcagggagctgggactgtgggctctctagagtagggactgacaagactggggtcaagtcagagggctctacctgagaaggacggcaaggctgaggtggctaagggggaccatggggaggtggcactagggatcacagaagatggttagaaccagcagaagccagagggtgggagggngcatgctgtgtgagaccaggggaccagagggatgggagagtc

SEQ ID NO: 47054 - DNA, 721 bp, Homo Sapiens
cgaaactatagagaagaagatcttattctgcaatgtagacaatgtgatagatggatgcatgcagttgtcagaacttaaatactgaggaagaagtggaaaatgtagcagacatggttttgatgtagcatgtgcagaccctatatgcctgcgtctaatgtgccttcctcagactgctgtgaatcttcacttgtagcacaaattgtcacaaaagtaaaagagctagacccacccaagacttatacccaggatggtgtgtgttctgactgaatcagggatgactcagttacagagcctcacagttacagttccaagaagaaaacggtcaaaaccaaaattgaaattgaacgattataaatcagaatagcgtggccgtccttcagacccctccagacatccaatcagagcattcaagggatggtgaaatggatgatagtcgagaaggagaacttatggattgtgatggaaaatcagaatctagtcctgagcgggaagctgtggatgatgaaataagggagtggaaggaacagatggtgtccagaagagaaaaaggaaaccatacagaccaggtatggtggattatggtgcggcaagaagtcgaactggggcagggaaaaccaaaagatctgtgatcagaaaaagattcctcaggctctatttacgagcagttaccttgcagagatgatggtggagtgagcagttatcagatactttagttgatgac

SEQ ID NO: 47055 - DNA, 703 bp, Homo Sapiens
  misc_feature (9)..(9): n is a, c, g, or t
  misc_feature (640)..(640): n is a, c, g, or t
ccagcagtncaccacagtggcatcccaatacaattattcaaagaatgcaaatgatgtcatcacaatggatcccaaagacattggtcaaaagatgcaaatgatacactactgctgcagctcacaaacacctctgcatattacatgtacctccttctgctcctcaagagtgtggtctattttgccatcatcacctgctgtctgcttggaagaacggctttctgctgcaatggagagaaatcataacagacggtggcacaaggaggccatcttttcctcatcggttattgtccctagaagcgtctactgaggatctagttgggctttctttctgggtttgggccatttcagttctcatgtgtgtactattctatcattattgtataatggttttcaaaccagtgggcacacagagaacctcagtctgtaataacaatgaggaatagccatggcgatctccagcaccaatctctccatgttttccacagctcctccagccaacccaaatagcgcctgctatagtgtagacagcctgcggcttctagccttgtccctctcttagtgttctttaatcagataactgcctggaagcctttcattttacacgccctgaagcagtcttctttgctagttgaattatgtnggtgtgtttttcccgtaataagcaaaataaatttaaaaaaatgaaaagtcaaaaaaaaaaaaa

SEQ ID NO: 47056 - DNA, 542 bp, Homo Sapiens
ctctatttcagtgactgtcacaaagatcaagctagattttccaaagcttacctcttagactcaactcagctaattatcagctgatttggcagatcactgtaggaatcactaaaataactccttatgcaactttaaaaatctagcatagcattttaaatattatatgagatgttatagcttcataaatttcctattccatttactttcatcatacttgaaatcagatcactgaaaaacctatgcaaaacatattctaagtgctattttttggtgggtacagattcacaatgtcactttgtttgcatatcatattttattattattagagcaatggctttatctgaaacatgaaagataaacttttttggctgggtgcagtggctcacgcctgtaatcccagcactttgggaggccgaggtggatggatcacgaggtcaggagatcgaaaccatcctggctaacacggtgaaacctcgtctctactaaaaatacaaaaaaattagccgggcatggtggcgggcacctgtagtcccagctactcg

SEQ ID NO: 47057 - DNA, 531 bp, Homo Sapiens
aatgtttgagtttaaaaaagaactttctgaaaaaatccactttttgttcattttcaaacctaatgattatatgtattttatatgtgtgtgtatgtgtacacacatgtataatatatacagaaacctcgatatataattgtatagattttaaaagttttatttttttacatctatggtagtttttgaggtgcctattataaagtattacggaagtttgctgtttttaaagtaaatgtcttttagtgtgatttattaagttgtagtcaccatagtgatagcccataaataattgctggaaaattgtattttataacagtagaaaacatatagtcagtgaagtaaatattttaaaggaaacattatatagatttgataaatgttgtttataattaagagtttcttatggaaaagagattcagaatgataacctcttttagagaacaaataagtgacttatttttttaaagctagatgactttgaaatgctatactgtcctgcttgtacaacatggtttggggtgaaggccacat

SEQ ID NO: 47058 - DNA, 615 bp, Homo Sapiens
cgcgtccgggagaagcaaaatttctgtcaatgacttcatcataaaagcttcagctttggcatgtttaaaagttcccgaagcaaattcttcttggatggacacagttataagacaaaatcatgttgttgatgtcagtgttgcggtcagtactcctgcaggactcatcacacctattgtgtttaatgcacatataaaaggagtggaaaccattgctaatgatgttgtttctttagcaaccaaagcaagagagggtaaactacagccacatgaattccagggtggcacttttacgatctccaatttaggaatgtttggaattaagaatttctctgctattattaacccacctcaagcatgtattttggcaattggtgcttcagaggataaactggtccctgcagataatgaaaaagggtttgatgtggctagcatgatgtctgttacactcagttgtgatcaccgggtggtggatggagcagttggagcccagtggcttgctgagtttagaaagtaccttgaaaaacctatcactatgttgttgtaactaactcaagaatttctaaactctcccaggtcacactgattcattcttaacaagatatttatatgttatta

SEQ ID NO: 47059 - DNA, 765 bp, Homo Sapiens
ctgaaagatgaaatgagggcagaaaatgaatctaaatctttggtttaaatgataaagtctttacacattgtagagaattaaataagcagttggtcatacttttatttatcttcaggatcttttgctctctgataaaagtagaaagctttagggaatagattgtgtagaaagtaaatccgacttcaagattcagttcctttttgataatttattgttttaaatcctaaatatctgaagcagtaatgccatgactcaccaaacatatctttgtgaaatgatttccagagattgggagaaaaaaatactaatagttgattttgctttaagtgttttttatttctcacaacattccaaatgtttgttttaggagatacaagagtttatcattttttcttttaattgctaagaagacttgttacaactttcaaaaaaagtcctcatggaacctgataaataagaagttcagtgtcttatttcattacgagctatctaaatatttttgtcagattcagaatatgtaactgaatgtatgtaattcttttttgtagcagccaagaataatttaagtttcacaactaatactgatatgcctttatcatattttttgctaaccagccaaatctgtattcccatgaatcatccttaatgtttgtactagtaagaggactataggtggtgcaaaactgaaccaaaaattgcaactaataagaaggcataatgaggcccgggccagtgggtcagcctgtattcccgacttgggaactg

SEQ ID NO: 47060 - DNA, 445 bp, Homo Sapiens
tttttttttttttttttttttttttgctgtttctataaagctgtgtgatggatattataactgttatatacacatacatataattttgttttcctttttaagagaggattcttttcatcctaaatcttttacctttcaatctttgtatctattattacacgtgctgctgaagggagcatggtttttatctatgatacttagttaacatatatattacatttatagctatgtagtagttcccctaaattcttgtaaaaataaatttttatttgatatttcatatatatttgaaatgtgagaattcagatgtaattttttaccttgttttggcatgtttgtatgttactttaaagaggatgtgtgttctaaaggaggacatgagctgtgtgttttcaagagaacaatagagtgcgtctcttggggaaacataataaaaatgaacttt

SEQ ID NO: 47061 - DNA, 617 bp, Homo Sapiens
cttgcgatatgctgtggtgcttaatgccacctggctggtgaacagtgctgcccacctcttcggatatcgtccttatgacaagaacattagcccccgggagaatatcctggtttcacttggagctgtgggtgagggcttccacaactaccaccactcctttccctatgactactctgccagtgagtaccgctggcacatcaacttcaccacattcttcattgattgcatggccgccctcggtctggcctatgaccggaagaaagtctccaaggccgccatcttggccaggattaaaagaaccggagatggaaactacaagagtggctgagtttggggtccctcaggttcctttttcaaaaaccagccaggcagaggttttaatgtctgtttattaactactgaataatgctaccaggatgctaaagatgatgatgttaacccattccagtacagtattcttttaaaattcaaaagtattgaaagccaacaactctgcctttatgatgctaagctgatattatttcttctcttatcctctctctcttctaggcccattgtcctccttttcactttattgctatcgccctcctttcccttattgcctcccaggcaagcag

SEQ ID NO: 47062 - DNA, 920 bp, Homo Sapiens
tccggaattctccggatattaaagtggccatactacccaaagcaatttatagattcaatgctattcctatcaaactatcaattacatttttcacagaactagaaaaaacttaaaattcatatggaaccaaaaagcctgagtagtcaaggcaatcctaaacaaaaagaacaaaggtggaggcatcacattacctaacttcaaactacagggctaccatgaccaaaacagcatggtactggtacaaaagcagacacacagaccagtgggacagaatagagagcccaaaaataaggccacaaacctacagccatctgatcttcaacaaagttgacaaaaacaagcaatggggaaaggtctccctattcaataaatggtgctgggataactggctggccatatgcagaagatcgtaactggaccccttttactatgtacaaaaattaagatggtttaaagagttaaaacccaaaattataaaaatcctgaagataacttaggcaataccattctggacataggaactggcaaatatttcatgatgaagacaccaaaagcaattgtaacaaaagcaaaaatggacaaattggatttaagagctttttcatagcaaaataaacaacagggcagacaatctaccaaatgacagaaaatttttgcaaactatgcatctgacaaggggctaatatctagcatctataaggaatttaaacacagttacaggaaaaaaaaaacccactccattaaaaaatgggcaaaagacatggaacagacactttttcaaaaaagacatacatacagccaaactagcgtgtttaaagaaaacctcaattatcactggatcattagaaaaaaagcaaaatcaaaaccatgaatgaaatatcatctgcccagtcagggatggctacaaaaaagttaaaaaa

SEQ ID NO: 47063 - DNA, 577 bp, Homo Sapiens
  misc_feature (279)..(279): n is a, c, g, or t
ggggcaggcagggaggcaaggactggagctaccttgcttgttgggggactgggtacagttggcaagctgtgtttccatcagctccctgtcctcctttcttccctcgttattgatctatagacattaggaagggagtgagacggctcctccaccatcctcagccagtgcaacccattccctctgcttctctctctctctctctctctccctccctctccttccctaccctctcaccatctttcttggcctctctgagggtctctctgtgcatctttttangaatctcgctctcactctctacgtagccactctccttcccccatttctgcgtccacccctgaactcctgagcgacagaagccccaggcctccaccagccttgaacccttgcaaaggggcaggacaaggggacccctctcactcctgctgctgcccatgctctgccctcccttctggttgctctgagggttcggagcttccctctgggactaaaggagtgtcctttaccctcccagcctccaggctctggcagaaataaactccaacccgactggaaaaaaaaaaaaaaaaaaacgcgg

SEQ ID NO: 47064 - DNA, 614 bp, Homo Sapiens
gtccctgtgctggttagacacggagcgctgcacaccgaaagcccaaattgggagctctgcctgccggcaactttgctgatggggtgattgctgcttctggggggtaaggaaacaagttacagaaattaccgcgttctgtgtgaagggactgagggtgtggtgtcattggcagagggtcattttaggagagctgccccagcccctcgaacgcctggcttggggtgtcattctgcctggcggccaggcctccagcttcccctgccccgggcctggggctgtcactggccctgatccgaacacctccagattccggcttctacatgggacagacggggacgcacaggccaccttccttctggcagggactcttatttattcccattgctctagggctttcggtttccccttcttccggtaggccgcgtagaggcatgcaccgggtaggtttccgcggtgaccccgcggcggcctgagggacgctccctgccccatcccggctgttgggctgggccgctttgcctctgcttcgccctgtgctgtgttctccagctttgtagcagcagccttgacaaacccaggcgcactgtaccaaggcaatgtaacttttgattttc

SEQ ID NO: 47065 - DNA, 826 bp, Homo Sapiens
agagaccgttccatactctgaatgagaagcccgccctgcccgtcatccgagacaagtacaaagacctgacgggagaggtggaggaaaatgagagatatgcatatgaatggcagagatgcctggggagtgccctgaatgtcattaagaaggcaaatgataccttaaatggaatcagtagtagttctgtttgcacagaagtaattcagtcagctcaaggcatggaatatttattaggtgttgttgaagtgtacagggtaaccaagcgtgtggagctggggataaaagccactgcagtgtgcagtgagaaactccagcagttgctgaaggacatcgataaagtatggaataacctaatcggcttcatgtcactcgccacactcacaccagatgaaaactcgctggatttttcctcctgtatgttacggcctgggattaaaaatgctcaggagcttgcctgtggagtgtgcctcttgaatgtggactcgaggagccggaaagaagagaagcctgcagaagaacatcctaaaaaagcattcaactcagaaacagacagtttcaagctggcctatggagggcaccagtatcacgccagctgtgccaacttctggatcaactgtgtcgaaccaaagcctcctggcctcgtcctgcctgacctggctctgaacaactcctctgtgaagcattgacttttttttttctgtgacacccccacggggtgacagggaccaattaatagaatgccagcacttgcacagtttcgctttccctgaatcgatatgaagaaccaccgccaagggaacgggggcccccgttcattccccagggg

SEQ ID NO: 47066 - DNA, 588 bp, Homo Sapiens
tggagtgaaaaaggcagggtgtgctcgcagactgtgctataaactgcaatttctatttggggtcctcacggagaagaacaccaggaaagacagacaggaccagtgccatgggccagctttgctgctttcctttctcaagagatgaaggaaaaatcagtgagttggaaagctcgtcctctgcagtcctacagagatacagcaaggatatacccagttggtcaagtggtgaaaagaacggaggggagcccgatgacgctgaactagtaaggctcagtaagaggctggtggagaacgcggtgctcaaggctgtccagcagtatctggaggaaacacagaataaaaacaagccgggggaggggagctctgtgaaaaccgaagcagctgatcagaatggcaatgacaatgagaacaacaggaaatgagcccggaacgcaggcccccatgtctctgtgcaaagcctccctgcttccctctgctgagtctagggactgacttgcagcgtgctgtttaagttaagtttctctggtgcaatctgtgaagattgcctaatacttttcatgatcgatgtgttcgcattgctgaaacaca

SEQ ID NO: 47067 - DNA, 737 bp, Homo Sapiens
  misc_feature (639)..(639): n is a, c, g, or t
  misc_feature (654)..(654): n is a, c, g, or t
  misc_feature (698)..(698): n is a, c, g, or t
  misc_feature (722)..(722): n is a, c, g, or t
tcgtgttccagtgggggactggtttggcatcatgtggacgacggttgtgccctgggagactcttccattgtttttcacagcaaaggaaccaagcagagtgacaggtctagagaattctaaagcaatgtgtgttcttgctggctcagaccactcagcttcattaacagatgcaggagaggtgtatgtttggggaagcaacaagcatgggcaactggctaatgaggctgctttccttcctgtgccccagaaaatagaagcacattgtttccagaatgaaaaggtcactgccatctggagtggatggacacacctggttgctcagacaggtctcttgtggctcagagcataatttggcaataattggtggagtgtgttactcttggggctggaatgagcatggcatgtgcggagatggcactgaagccaacgtctgggccccaaagccggtgcaggctctgctgtcatcgtcaggactccttgtgggctgtggggctggccacttccttggccctctgcaagctgcaagctcaccctgcattggtccaggaccccaaggtcacctacctttccccagatgccatcgaggacactgaatctcaggaagccatggaccaaagagagaaactggaaggaaagacnatccggaaacttcancccaagccaatctgactggtccaaaattggggaactgtgatagngaatcttaataaagttggcttttnccccccaaaaaaaaa

SEQ ID NO: 47068 - DNA, 796 bp, Homo Sapiens
  misc_feature (508)..(508): n is a, c, g, or t
  misc_feature (669)..(669): n is a, c, g, or t
gggagttcacacaggagagaagccatacaaatgtgagacatgtgggaagggctttagtcagagttcgcatctccaagaccatcagcaagtccatactggagagaatccctacaaatgtgatgtgtgtgggaaaggcttcagttggagttcacatcttcaagcccatcagagagtccacacaggagagaaaccatacaaatgtgaagaatgtaggaaaggcttcatctggaactcatatcttcatgttcatcagaggatccacacgggagagaaaccctataaatgtggcatgtgtggtaagagcttcagtcagacttcacatcttcaagcccatcagagagtccatactggagagaaaccatacaaatgttttgtgtgtggtaagggctttagtaagagttcgttgtcttcagattcatcagagagtccatgatggtgatgaatctattaatcatgatgagtgtgataggggtgctcttcaagacttagacttcccattttcctcagnaaatccacacagcacagaatatttataaaatgtcatgttttaagaattcatgagctgagttttttatagttatctgaattcccattgagaaaacctatttttgtatgaatatgaccagttttcagcagagcccaaaatgtcacagttgtcaagagaacccncaacagaagaaccctataaagaatgatacaatatggtttcaatcagaacctttcacatccaaataagcaattattgcaggagatgaaggcctttccaaaatgattaaagtaagagtcccgaaatttc

SEQ ID NO: 47069 - DNA, 721 bp, Homo Sapiens
gcctgggtggcgccgaggaggaggcagtggctcgccacgggcaggagcatgttgaggtctatcacgcccattataaaccactggagttcacggtggctggacgagatgcatcccagtgttatgtaaagatggtgtgcctgagggagcccccacagctggtgctgggcctgcatttccttggccccaacgcaggcgaagttactcaaggatttgctctggggatcaagtgtggggcttcctatgcgcaggtgatgcggaccgtgggtatccatcccacatgctctgaggaggtagtcaagctgcgcatctccaagcgctcaggcctggaccccacggtgacaggctgctgagggtaagcgccatccctgcaggccagggcacacggtgcgcccgccgccagctcctcggaggccagacccaggatggctgcaggccaggtttggggggcctcaaccctctcctggagcgcctgtgagatggtcagcgtggagcgcaagtgctggacaggtggcccgtgtgccccacagggatggctcaggggactgtccacctcacccctgcacctctcagcctctgccgccgggcacccccccccaggctcctggtgccagatgatgacgacctgggtggaaacctaccctgtgggcacccatgtccgagccccctggcatttctgcaatgcaaataaagagggtactttttctgaaaaaaaaaagcaata

SEQ ID NO: 47070 - DNA, 480 bp, Homo Sapiens
gcggccgccaactcaatctcattctgacttggtgagttctagtgaacatcaagtagacctcaaggtggacccttctcagccttcgaatgtcagtcacaaactgtggacagccgctggttccggccatcagatacttcctttccatgaaagcagcaaggattcttgtaaaaatgatttggacacctcccacactgagtccccaaccccccatgactcaaattcacaccgccctcaactgcaggcgtttataacagaagcaaagctaaatctaccgacaaggacaatgaccagacaagatggggaaactggagatggagccaaagaaaatattgtttacctctaattgtgttgtcatttttccaaacaaaacaaaacactggcacttttgggagaaactttttgtctccattccttatgtatgtgtgattgtctgtgtccaaattgctttaagaataatatttaatatttcctggaagctca

SEQ ID NO: 47071 - DNA, 943 bp, Homo Sapiens
acaacctcaaagttcaagaaaggcagaacagagtttgtaccactgtagcaatagctattgttgcagaaacatgttcaccctttacagtactccctgccttaatgaatgaatacagagttcctgaactgaatgttcaaaatggagtgttaaaatcgctttccttcttgtttgaatatattggtgaaatgggaaaagactacatttatgccgtaacaccgttacttgaagatgctttaatggatagagaccttgtacacagacagacggctagtgcagtggtacagcacatgtcacttggggtttatggatttggttgtgaagattcgctgaatcacttgttgaactatgtatggcccaatgtatttgagacatctcctcatgtaattcaggcagttatgggagccctagagggcctgagagttgctattggaccatgtagaatgttgcaatattgtttacagggtctgtttcacccagcccggaaagtcagagatgtatattggaaaatttacaactccatctacattggttcccaggacgctctcatagcacattacccaagaatctacaacgatgataagaacacctatattcgttatgaacttgactatatcttataattttattgtttattttgtgtttaatgcacagctacttcacaccttaaacttgctttgatttggtgatgtaaacttttaaacattgcagatcagtgtagaactggtcatagaggaagagctagaaatccagtagcatgatttttaaataacctgtctttgtttttgatgttaaacagtaaatgccagtagtgaccaagaacacagtgattatatacactatactggagggatttcatttttaattcatctttatgaagatttagaactcattccttgtgtttaaagggaatgtttaattgagaaayaaamatttgtgtacaaaa

SEQ ID NO: 47072 - DNA, 609 bp, Homo Sapiens
gcacgagagattgcggtgagccgggattgcgccagtgcactccagctgggcgacagagcgagattccatctcgaaaaaaaaaaaaaacaaaaaactattgctgcagtcattcagatggaaatggggaaagaataatattaactgatttcaaaaaggacttgaagatgtgaatcatctattttgctgaagaaatcttaactctttgaaattactttttgttgctgttgtcatactcttaggtgccaaactgcggtaaattttttatcagtgaagtggaagcatgtgttttgttgttttgggaatttttatcaagtatcttcagagaagattatttcctgctttatcttcaaaaactggaaaggaagggtcaaagaaaagacagtagctggccggtcatggtggctcatgcctgtaatcccaacactttgggaggctgaggtgggcagatcacctgaggttgggagttcgaggccagcctgaccaacgtggagaaatgccatctctactaaagatgcaaggattggccgggcatggtggcgcgtgcctgtgatcccagctgctcaagaggctgaggcaggagaatcgcttggacctgggaggtggaagttg

SEQ ID NO: 47073 - DNA, 765 bp, Homo Sapiens
tggccggaactcttaaattattgatcggaaaaagcatatatttaaacttgctcagggagaatatgttgcacccgagaagattgagaacatctacatccggagccaacctgtggcgcaaatctatgtccatggggacagcttaaaggcctttttggtaggcattgttgtgcctgaccctgaagttatgccctcctgggcccagaagagaggaattgaaggaacatatgcagatctctgcacaaataaggatctgaagaaagccattttggaagatatggtgaggttaggaaaagaaagtggactccattcttttgagcaggttaaagccattcacatccattctgacatgttctcagttcaaaatggcttgctgacaccaacactaaaagctaagagacctgagctgagagagtacttcaaaaaacaaatagaagagctttactcaatctccatgtgaagttcaaggaaagttcttctcagtgtaatgaactgtctagcaatattatagttattcttgaaagtaatgagtcaaaatgacacagctgaaaatgaataagcatctgattttatgactgagccttttcctgtcccaagaggtctttaacaatattttctctatcatcaatgagtatattttatttttattataaaaatgatattgtggtggtctgctaaaaatatcacaaatggcaatgtaaaatcaagacattttctcaagaactgtgtaccactaaaagtaatatattgtaatgttcacagaactat

SEQ ID NO: 47074 - DNA, 739 bp, Homo Sapiens
tttccaaggcccctaaaaactgcacaaaatagatgctgctttctataatctattttaataataataaacaatgattctgttaccttgactgggggtggaacactacattctttttagagtctgattttatggattggaatattgggatatctttctttcctttatttatttgaaataattagtgtagtgattacaaaacagtcataaatttttaaaggccttttttctctctttttttttttttagaatagtatttttttttaagtcctttatgtaacatccagataatgtgatactgtctctttgaagcaccctgtaaaccttttagagatttgaagttgggtcttgactcttaatgcatgtggacagtcgcgagcgtttatgctgtcggtgtgtctgtgttggacaaaacaatctgtaatctacagcaaagtacattctacattccgttcatggggcacacccaggggaataagaataaaatgctattatgactaagttgtaaacctatgcacatcccttgcattttgggcaactttataaaaaaaaagaaactgatttttattaataataatcatgtagtgaaaaaaaaaaaaaaaaaaaaaactcgaggggggggccccgtacccaattcggcctatagggagtcgttttacaattaaattggcccgtcttttaccaacggtcgtgcctgggaaaacccctggggttaccccaacttaaatcccctttggagaaa

SEQ ID NO: 47075 - DNA, 731 bp, Homo Sapiens
cagtgtgctggaaagccaagaagaaattccagcaagcgcggaagccttacgatgtgcgggacgtcattgagcagtactcgcagggccacctcaacctcatggtgcgcatcaaggagctgcagaggaggctggaccagtccattgggaagccctcactgttcatctccgtctcagaaaagagcaaggatcgcggcagcaacacgatcggcgcccgcctgaaccgagtagaagacaaggtgacgcagctggaccagaggctggcactcatcaccgacatgcttcaccagctgctctccttgcacggtggcagcacccccggcagcggcggccccccccagagagggcggggcccacatcacccagccctgcggcagtggcggctccgtcgaccctgagctcttcctgcccagcaacaccctgcccacctacgagcagctgaccgtgcccaggaggggccccgatgaggggtcctgaggaggggatggggctgggggatgggcctgagtgagaggggaggccaagagtggccccacctggccctctctgaaggaggccacctcctaaaaggcccagagagaagagccccactctcagaggccccaataccccatggaccatgctgtctggcacagcctgcacttgggggctcagcaaggccacctcttcctggccggtgtgggggccccgtctcaggtctgagttgttaccccaagcgccctggcccccacatg

SEQ ID NO: 47076 - DNA, 731 bp, Homo Sapiens
cgaggtgaaggactacctgtggcagatgttgagtgccacccagtacctgcacaaccagcacatcctgcacctggacctgaggtccgagaacatgatcatcaccgaatacaacctgctcaaggtcgtggacctgggcaatgcacagagcctcagccaggagaaggtgctgccctcagacaagttcaaggactacctagagaccatggctccagagctcctggagggccaggggctgttccacagacagacatctgggccatcggtgtgacagccttcatcatgctgagcgccgagtacccggtgagcagcgagggtgcacgcgacctgcagagaggactgcgcaaggggctggtccggctgagccgctgctacgcggggctgtccgggggcgccgtggccttcctgcgcagcactctgtgcgcccagccctggggccggccctgcgcgtcagctgcctgcagtgcccgtggctaacagaggagggcccggcctgttcgcggcccgcgcccgtgaccttccctaccgcgcggctgcgcgtcttcgtgcgcaatcgcgagaagagacgcgcgctgctgtacaagaggcacaacctggcccaggtgcgctgagggtcgccccggcacacccttggtctcccccgctgggggtcgctgcagacgcgccaataaaaacgcacagccgggcgagaaaaaaaacaaaaaaacaaaaaaaaaaaggggcggccgcaaaaa

SEQ ID NO: 47077 - DNA, 883 bp, Homo Sapiens
  misc_feature (658)..(658): n is a, c, g, or t
  misc_feature (706)..(706): n is a, c, g, or t
  misc_feature (732)..(732): n is a, c, g, or t
  misc_feature (797)..(797): n is a, c, g, or t
  misc_feature (816)..(816): n is a, c, g, or t
gatcccagcctctgagctgagttggttttatgaaaagctaggaagcaacctttcgcctgtgcagcggtccagcacttaactctaatacatcagcatgcgttaattcagctggttgggaaatgacaccaggaagcccagtgcagagggtcccttactgactgtttcgtggccctattaatggtcagactgttccagcatgaggttcttagaatgacaggtgtttggatgggtgggggccttgtgatggggggtaggctggcccatgtgtgatcttgtggggtggagggaagagaatagcatgatcccacttccccatgctgtgggaaggggtgcagttcgtccccaagaacgacactgcctgtcaggtggtctgcaaagatgataaccttgactactaaaaacgtctccatggcgggggtaacaagatgataatctacttaattttagaacacctttttcacctaactaaaataatgtttaaagagttttgtataaaaatgtaaggaagcgttgttacctgttgaattttgtattatgtgaatcagtgagatgttagtagaataagccttaaaaaaaaaaaaatcggttgggtgcagtggcacacggctgtaatcccagcactttgggaggccaaggttggcagatcacctgaggtcangagttcaagaacagtctggccaacatagcaaaaccctgtctctactanaatacaaaaattatctggggcatggntggtgcatgccctgtaatcccagctattccgaaagctgagggcagaagatcacttggaccccggnaggccggaaggtttccggngaaccttgagaattgcacccattttccatcccagccctggggcaacctttgaagtggaaaagtccgt

SEQ ID NO: 47078 - DNA, 695 bp, Homo Sapiens
aaaaagaccaagttagcttgtgaaaaatgaattcaagaatgtggatgagtttcttagttcagaattgctcaggaattgggacattatgtaggtaagattctggaaagggcaaaaggatgaaaaacaagagaaggcctaacccatctgctacttgattatcttaatgaagcaaatctagagatttattaaagtaactcttgcttattgagcaccatatttaacacaaactatttagctttaaggcaacagttatcatcataatttgcttaaatttttaggagtttactcataaagctttgctttcagtgagataaggccggatgggcaaagagtaaactaccctgcaaatatatgcggataatttaattggtttcatattacaggaatctagagggccaattactttttcagtaataaaaaaataaaagggccagatgcagtggctcatgcctgtaatcccagcactttgggagtccaaggcagagagatcgcttgagctcagcagtttgaaaccaacttgggcaaaatgagaaaacacccatctctaaagaaatatataaattagacagaaatggtgtcatgtgcatgtagtacttgtattcccagctacctcaggaggctgaggtgtgaagatcatttgagcctggagaggtcaaggctgattgagccatgatggtgccagtgtacttcagcct

SEQ ID NO: 47079 - DNA, 760 bp, Homo Sapiens
  misc_feature (718)..(718): n is a, c, g, or t
  misc_feature (744)..(744): n is a, c, g, or t
attattttagaaaatgtgactggcttaggacggggataatatgtgaacagaaatctatctcatgagaaagtgctactgttgtcaaaattaccttatctgagtgaatggtattttttttatcttttccacacatgcgtgggaaaggtatgatttctgcatgtaattgcagtttaacccttatttctaggttgatcataggtcccagtttacccaggaaaattccagtttatacctgttgtacctgtgtaattattggtagcactccctttcactcttacaatgtcttggtttggatgatatatggtgaagtttttgttgaaactaaattatgaagtctgatatatttggataaaaataaagaattgcttttcttaaaaaaaaaaaaaaaaaacgcgggcggccgcaagcttattccctttagtgagggttaattttagcttggcactggccgtcgttttacaacgtcgtgactgggaaaaccctggcgttacccaacttaatcgccttgcagcacatccccctttcgccagctggcgtaatagcgaagaggcccgcaccgatcgcccttcccaacagttgcgcagcctgaatggcgaatgggacgcgccctgtagcggcgcattaagcgcggcgggtgtggtggttacgcgcagcgtgaccgctacacttgccagcgccctagcgcccgctcctttcgctttcttcccttcctttctcngcacgttcgccggctttccccgtcangctctaaatcgggggc

SEQ ID NO: 47080 - DNA, 711 bp, Homo Sapiens
cggggagagccccaggatggactctactgcatcggaactcctctaccaagtcggggaaggtcctggttgtgtgggacgaaacctctaacaaagtgaggaactatcgcatttttgagaaggactctaagttctacctggagggcgaggtcctgtttgtgagtgtgggcagcatggtggagcactaccacacccacgtgctgcccagccaccagagcctgctgctgcggcacccctacggctacactgggcctgggtgatggcagtccatgtggctgccaggccaaggcagtcacaggggccctgaccccaggccacacagacggacatgggcccacatgggagggtgagcaggagcaaggctgtgcttgcctagggcctctgtgatggacatctcgtaggacccagccagtctcatccagcaggttgggttctagggctgaaccaggcgccaggctccagaggacgaagggactctgttgccccacactaacttgccctgtcccaatcccagaaacccaggaccaagctgtgcctgggctccaaggacaggaacactggtccccccatcacactcacccctaagtgggctgggagccaggcagggccaggcagctgggtgggggccggggctggccctgggacccccaggaacgctaagacacaggctccagtaggggctgttgcctccaataaagcagccagtgagctttg

SEQ ID NO: 47081 - DNA, 583 bp, Homo Sapiens
  misc_feature (473)..(473): n is a, c, g, or t
  misc_feature (486)..(486): n is a, c, g, or t
  misc_feature (545)..(545): n is a, c, g, or t
  misc_feature (562)..(562): n is a, c, g, or t
gtgcgcaggccgtggcccgccttgaccacagtgcttctggccctgctcgtctgcctaggggcgctggtcgacgcctaccccatcaaacccgaggctcccggcgaagacgcctcgccggaggagctgaaccgctactacgcctccctgcgccactacctcaacctggtcacccggcagcggtatgggaaaagagacggcccggacaggcttctttccaaaacgttcttccccgacggcgaggaccgccccgtcaggtcgcggtaaaagcgcccgttaccacacatcctgcatccgagagcgcggcctggccctaccctggcaacatcacttaacgacgtctcccaggctcgcctccccagatccaattccttccccttcgcttccgcaggtcggagggcccagacctgtggtgaggacccctgaggcctcctgggagatctgccaaccacgcccacgtcatttgcatacgcacntccgaccccaganacccggattctgcctcccgacggcggcgtctggccagggtttcgggtgcggcccttcgnccgcgtctcggtgcccncgccccctgggcttggagggc

SEQ ID NO: 47082 - DNA, 1027 bp, Homo Sapiens
  misc_feature (757)..(757): n is a, c, g, or t
ggcctgggtggcgattccgagacgaggcactatcctgtggtgtgttgccccacttcgggtcctcagatgtgtagcaagcggccagcccgagggagagccacacttgggagccagcgaaaacgccggaagtcagtgacaccagatcccaaggagaagcagacatgtggtgaggaagttcaagggttccagagatggagcagacttgaaggagaatataaagaactgctgggacactgggcagtttatgctattcaacatcagactgcgggttcgggctgaatactgccagcatgagactgctctgcagggcaatgtcttctctaacaagcaggacccacttgagcgccagtttgagcgctttaaccaggccaacaccatcctcaagtcccgggacctgggctccatcatctgtgacatcaagttctctgagctcacctacctcgatgcattctggcgtgactacatcaatggctctttattagaggcacttaaaggtgtcttcatcacagactccctcaagcaagctgtgggccatgaagccatcaagctgctggtaaatgtagacgaggaggactatgagctgggccgacagaaactcctgaggaacttgatgctgcaagcattgccctgacctattccctcttctcactttggggactgttcccatcacccacctctggagcttacactgttctggggtttgttctctacccttccaaccaatcacacccctgcctttttttttttttttttttanagaaaaagacaaaagaaagtggaagtggtattccccacccctccctgcacccatgtgcctggggcttcccctttatttccctttccatttacccccgtatgtgtctctacagctaccttaccactgagccgtaagacaaatggtatagggaagaaagcaagtctacagcacatagtcttttgtttaaggggaattgatgttgaaacccctttttttttgggatggcactaaaggaagttaatccaaatactttctgggctttttatggaa

SEQ ID NO: 47083 - DNA, 835 bp, Homo Sapiens
  misc_feature (10)..(10): n is a, c, g, or t
  misc_feature (12)..(12): n is a, c, g, or t
  misc_feature (18)..(18): n is a, c, g, or t
  misc_feature (651)..(651): n is a, c, g, or t
  misc_feature (805)..(805): n is a, c, g, or t
gaaagtgtgnanagttgntgggcagcaaacctgctgtttacatcagggtgaccacattaagcccagtattccagttggcaccagaagattggacttggaatgaggcctacagggttcaccaggatgtaagaggagagaggaatccacaggaccaccagagaggagagggaaccagatatgcagatcagagatagaggaagtggaaccagagagctgggagggaccaaggttgtaagggtggctaagtcccaccataacagctaaggggacctgggagatgatggctcatttccacccagccccaggatttccagagcgcacatccacaggcctggacctgggatgaagatgaatgaagaacatggatgcacgtggatgtagtttggctcaggtgtccctgcagttggcaaggagtcagtactcagtccctgagtgtggctgaaatttgaggtcctggctgagccaaggagtaatggaccagatctacctcagtattcaagttcagtggggacaccagtggcttcaaacttcctggtttcatgatatcttgagacgccttacaaatgatggaggattccaaagagtttttgtttatttgggttaatatttgttggtatttatggcatttgagattgaaactaagaaatgttntaatttattacctttacaacatttatttacattacatacatacatttacaacatttattaatttatattaaaatagcatgaataagccaattataggttaatataagtagaatgtttgtgaaaaataagtatggtattcaaagcaaataaattntattgtgaagtgtggcattgattaactttt

SEQ ID NO: 47084 - DNA, 435 bp, Homo Sapiens
  misc_feature (259)..(259): n is a, c, g, or t
  misc_feature (339)..(339): n is a, c, g, or t
  misc_feature (367)..(367): n is a, c, g, or t
catactccttaccctttaacactacacatgcacttcataagaacaagcatgctgtcttacccaagtacagctatcaagttcagaaatttaacattgccataatactttacagtccatatttcaatttcttttgctgttttattggtaatttttttcagctccacgatccagcctaggatcatatgttgtattgccataaccctctaatctggagcagttcctcagcttttctttgttttttataatagtaatatatttnaataatacaggacagctaaaggatagagtatccttctatttgggtttttctgatgtttcctcatggttagattggggtantgcagtgagggttgaaatgctgtaagtnatatgtattgcaggtatacatccagatgcatagaatgtccatttgtcccttattggtgatgctaattt

SEQ ID NO: 47085 - DNA, 492 bp, Homo Sapiens
gagaaaacccctgaatgtgctgagtctggaatgacttttttctggaaatcacagatgattacatatcagagaagacacactggggagaaaccctccagatgcagtgactgtgggaaggcattctgccagcatgtatactttactgggcatcagaatccatataggaaagacaccttgtatatatgctgattgtgggaaggcctattcccagaagtcagtcctcattgtctatgggaaaactcacattgaatagaaatagtgacaacttctcaactgtagaatagactaatatgttcctcagtatacatgattacccttccacagaatgatctgcttaggccctcagaatattttcaacatcacaaatatggaatcaatttgctcaccctcaaactgtctcagccctcttcacagaataaatgtatctggaagaattagcactactttggtgttgtttggtcattaaatgctttatagaaaaaaaaaaaaaaa

SEQ ID NO: 47086 - DNA, 888 bp, Homo Sapiens
gtgcgaggaggctgtgagtccgggcgctgcgaccgctgtcagaaaaagatccggatctaccacagtctgaccgggctgcattgtgtatggtgccacctagagatccacgatgactgcctgcaagcggtgggccatgagtgtgactgtgggctgctccgggatcacatcctgcctccatcttccatctatcccagtgtcctggcctctggaccggatcgtaaaaatagcaaaacaagccagaagaccatggatgatttaaatttgagcacctctgaggctctgcggattgaccctgttcctaacacccacccacttctcgtctttgtcaatcctaagagtggcgggaagcaggggcagagggtgctctggaagttccagtatatattaaaccctcgacaggtgttcaacctcctaaaggatggtcctgagatagggctccgattattcaaggatgttcctgatagccggatttcggtgtgtggtggagacggcacagtaggctggattctagagaccattgacaaagctaacttgccagttttgcctcctgttgctgtgttgcccctgggtactggaaatgatctggctcgatgcctaagatggggaggaggttatgaaggacagaatctggcaaagatcctcaaggattagagatgagtaaagtggtacatatggatcgatggtctgtggaggtgatacctcaacaaactgaagaacaaatgtgaccccagtcccctttcacatcatcaataaactacttctctatagccgtgggatgccctttattgctcatccggatcccgatcatgcgagagaactatccggagaagtcagcaacagaatgacgaacacagcgaatggtacatccgaattcgcacatttgaatcc

SEQ ID NO: 47087 - DNA, 476 bp, Homo Sapiens
  misc_feature (10)..(10): n is a, c, g, or t
  misc_feature (17)..(17): n is a, c, g, or t
  misc_feature (405)..(405): n is a, c, g, or t
aggcctgtgnggatganacagccaacccacacaagcacagtaagccttgcacgaaagctgcttgttggagttggatggaatctaagtagctattcgtttcgagtatctgcctcctctccgattttagttacctcaggttcaaggaagtttgagtaacaagaaagaattagtagcaacggtatggtctgcggagagccagagttcaggttcagatctgggctttgcacttactagttgtgtcaccgcgggcagttactaacctctcagtgcctgttccctcgtttgcaaaatgaggatgatactagtacctatcttgtagaattgtgagcatgtgaatgagttaacatacataaagcacttagaataatgtctattatatataaaatgctctgttactgattagtnttatcatccatatcattatattaacctgtgttgtgatactggaattttccaatgagaaaaaaaaaaaaaaa

SEQ ID NO: 47088 - DNA, 532 bp, Homo Sapiens
  misc_feature (467)..(467): n is a, c, g, or t
  misc_feature (495)..(495): n is a, c, g, or t
ggctcaataaatcagtagaaaaacagttcaaggcttttcggagaggttttcatatggtgaccaatgaatctcccttaaagtacttattcagaccagaagaaattgaattgcttatatgtggaagccggaatctagatttccaagcactagaagaaactacagaatatgacggtggctataccagggactctgttctgattagggagttctgggaaatcgttcattcatttacagatgaacagaaaagactcttcttgcagtttacaacgggcacagacagagcacctgtgggaggactaggaaaattaaagatgattatagccaaaaatggcccagacacagaaaggttacctacatctcatacttgctttaatgtgcttttacttccggaatactcaagcaaagaaaaacttaaagagagattgttgaaggccatcacgtatgccaaaggatttggcatgctgtanaacaaaacaaaacaaaataaaaccaaanaaaaaaaaaaaaaaaaaaaaaaaaacatgtcgggcgc

SEQ ID NO: 47089 - DNA, 1031 bp, Homo Sapiens
aagaaaccactggatggagaatatttcacccttcagatccgtgggcgtgagcgcttcgagatgttccgagagctgaatgaggccttggaactcaaggatgcccaggctgggaaggagccaggggggagcagggctcactccagccacctgaagtccaaaaagggtcagtctacctcccgccataaaaaactcatgttcaagacagaagggcctgactcagactgacattctccacttcttgttccccactgacagcctcccacccccatctctccctcccctgccattttgggttttgggtctttgaacccttgcttgcaataggtgtgcgtcagaagcacccaggacttccatttgctttgtcccggggctccactgaacaagttggcctgcactggtgttttgttgtggggaggaggatggggagtaggacataccagcttagattttaaggtttttactgtgagggatgtttgggagatgtaagaaatgttcttgcagttaagggttagtttacaatcagccacattctaggtaggggcccacttcaccgtactaaccagggaagctgtccctcactgttgaattttctctaacttcaaggcccatatctgtgaaatgctggcatttgcacctacctcacagagtgcattgtgagggttaatgaaataatgtacatctggccttgaaaccacctttttatacatggggtctagaacttgacccccttgagggtgcttgttccctctccctgttggtcggtgggttggtagtttctacagttgggcagctggttaggtagaagggagttgtccaatctctgctggcccagccaaaccctgtctgaaaacctcttggggaaccttagaacctaaaaggaaatcttaaccccatcccaaaaccttggaaggattcacatctctttggaaaatgaaggatcctggaatccccccaaaaaatttggttttattgctccaggggtccaaaattccctctttttccctttaattgttatctctcttttttccccc

SEQ ID NO: 47090 - DNA, 421 bp, Homo Sapiens
gggttccctgattcttggtccagaaccctttctctcatgtctctgctccagaaatgaacttcttttgaaggaggtgactctgggcctctcttgaagattcagattagatcctggagctcttaacactgtgctttgctgcccagatcttctatgttaactacagtatttccttcctaggaagaggtttaacatggaaaacctgagaaaggctaacacattaaacatgtatgttagtaaatcctggaggagggaaggaaggccattgactggtgacatggcggtggcatcagtcatagtaaatactgataccaactgattgcttcccatgtgcctggccctgttgtaagctggtgaagtgtgatagtttaagtattctttaccactactctaagaagtaggtactgggccaggcgcagtggct

SEQ ID NO: 47091 - DNA, 552 bp, Homo Sapiens
gaaatccttcaggaatcagaagcttttttgcctcagagcatacctgaagagagatacaagatgaagagcaagcccctaggaatctgcctgataatcgattgcattggcaatgagacagagcttcttcgagacaccttcacttccctgggctatgaagtccagaaattcttgcatctcagtatgcatggtatatcccagattcttggccaatttgcctgtatgcccgagcaccgagactacgacagctttgtgtgtgtcctggtgagccgaggaggctcccagagtgtgtatggtgtggatcagactcactcagggctccccctgcatcacatcaggaggatgttcatgggagattcatgcccttatctagcagggaagccaaagatgtttttttattcagaactatgtggtgtcagagggccagctggaggacagcagcctcttggaggtggatgggccagcgatgaagaatgtggaattcaaggctcagaagcgagggctgtgcacagttcaccgagaagctgacttcttctggagcctgtgtactgcgga

SEQ ID NO: 47092 - DNA, 667 bp, Homo Sapiens
cggacgcgtgggtcgacccacgcgtccgggagtgagaagcagaagaaggaagagatcttgaagaccacgtgctttatctgtggcttggaaagagacaagtttgacaacaagactgtcacctttgaagagcacatcaaggaagaacacaacatgtggcactatctgtgcttcatcgtcctggtgaaagtaaaggactccaccgaatatactgggcctgagagttacgtggcagaaatgatcaaggaaagaaaccttgactggttccccaggatgagagccatgtcattggtcagcagtgattctgaaggagaacagaatgagctgagaaacctgcaggagaagctggagtccaccatgaaacttgtcacgaacctttctggccagctgtcggaattaaaggatcagatgacagaacaaaggaagcagaaacaaagaattggtcttctaggacatcctcctcacatgaatgtcaacccacaacaaccagcataagcaaatgaaagaaaggaattgtatttaccttttataattattattagtgtgggtatggctaatgagttctgattcacccacgaaggttacatttatgctgaatacatttgtaaatactcagttttatactgtatgtatatgattgctactctaaaggtttggatatatgtattga

SEQ ID NO: 47093 - DNA, 724 bp, Homo Sapiens
  misc_feature (624)..(624): n is a, c, g, or t
  misc_feature (639)..(639): n is a, c, g, or t
acttacatgattcattttaacatctgagaaaagctttgaaccctgggacgtggctagtcataaccttaccagatttttacacatgtatctatgcattttctggacccgttcaacttttcctttgaatcctctctctgtgttacccagtaactcatctgtcaccaagccttggggattcttccatctgattgtgatgtgagttgcacagctatgaaggctgtacactgcacgaatggaagaggcacctgtcccagaaaaagcatcatggctatctgtgggtagtatgatgggtgtttttagcaggtaggaggcaaatatcttgaaaggggttgtgaagaggtgttttttctaattggcatgaaggtgtcatacagatttgcaaagtttaatggtgccttcatttgggatgctactctagtattccagacctgaagaatcacaataattttctacctggtctctccttgttctgataatgaaaattatgataaggatgataaaagcacttacttcgtgtccgactcttctgagcacctacttacatgcattactgcatgcacttcttacaataattctatgagataggtactattatccccatttcttttttaaatgaagaaaggnagaaaggccgggccnccggtggctcacgcctgtggtcccaaggtgctgagattgcaggtgtgagccaccctgcccagccgtcaaaagagtcttaatatat

SEQ ID NO: 47094 - DNA, 502 bp, Homo Sapiens
gctggtttcgaacttctaacctcaggtgatcctcctgcctcggcctcccaaagtactggaattacaggcatgagccactgcacctggcctgattcttctcttctttctaggtttcaactgcagcagagattgtaacaaaccactgggcccagccgcataatgatgttactcttttgccttgggcctgccctcagaaggcactgtcacatattcatgggcccaacgccaaggtgatatgtgtctccagcctggaccctgcccacagggggcattgtgacatatctcttggcccatcagatgtttgattgttatcccctcccctcttctaccctgtgtttgcctataaaagacacagtcatatgttcctgggcccagcacctaggtgttgtcttactggaatgtgtccacatggggattgtgatatgtcacgtggcccagtacttaacttgatgtgactctcctctcatgcctaggccttgtagagaatccccttccccttttg

SEQ ID NO: 47095 - DNA, 431 bp, Homo Sapiens
gtgaggaagctgggcgctgttttcgagttcaggtgaattagcctcaatcccccgtgttcacttggctcccatagccctcttgatggatcacgtaaaactgaaaggcagcggggagcagacaaagatgaggtctacactgtccttcatggggattaaagctatggttatattagcaccaaacttctacaaaccaagctcagggccccaaccctagaagggcccaaatgagagaatggtacttagggatggaaaacgggcctggctagagcttcgggtgtgtgtgtctgtctgtgtgtatgcatacatatgtgtgtatatatggttttgtcaggtgtgtaaatttgcaaattgtttcctttatatatgtatgtatatatatatatgaaaatatatatatatatgaaaaataaagcttaattgtcccagaaatc

SEQ ID NO: 47096 - DNA, 500 bp, Homo Sapiens
catgatggaggaattttaaaagaattgaacaaataaaatagtcagagctcaaaaattgagtactgcttcgtttctcccaaataaccatcaccagacaaacaggtgtgtgtgtgggtgggggaggtggcctggtggtacttcatgatcttggaagaaggaaggcgcccctccttcttagctgattgatgatgagatagaaagatagaaacagccccatcactatgagatggaaacacttctttccttcatctgacttccctctccttcattcccaaccaagtttgaccccgccgcagtggagattgtggcagatgggtcagatagcatgtgtcctgtcgctgtcacaactttttaataagggctgggggtcctcttgaagagcccaggaactgcagtccctcctctatgccttcccctgaacacagtgcgccctcactaataaattctgagggctgacactgcctgagccggctggtctttgccctcaatttcattgagat

SEQ ID NO: 47097 - DNA, 1014 bp, Homo Sapiens
ccacgcgtccggctttttaaagagattatttgtttagatgtaggcattttaattttttaaaaattcctctaccagaactaagcactttgttaatttggggggaaagaatagatatggggaaataaacttaaaaaaaaatcaggaatttaaaaaaacgagcaatttgaagagaatcttttggattttaagcagtccgaaataatagcaattcatgggctgtgtgtgtgtgtatgtgtgtgtgtgtgtgtgtatgtttaattatgttaccttttcatcccctttaggagcgttttcagattttggttgctaagacctgaatcccatattgagatctcgagtagaatccttggtgtggtttctggtgtctgctcagctgtcccctcattctactaatgtgatgctttcattatgtccctgtggattagaatagtgtcagttatttcttaagtaactcagtacccagaacagccagttttactgtgattcagagccacagtctaactgagcaccttttaaacccctccctcttctgccccctaccacttttctgctgttgcctctctttgacacctgttttagtcagttgggaggaagggaaaaatcaagtttaattccctttatctgggttaattcatttggttcaaatagttgacggaattgggtttctgaatgtctgtgaatttcagaggtctctgctagccttggtatcattttctagcaataactgagagccagttaattttaagaaatttcacacatttagccaatctttctagatgtctctgaaggtaagatcatttaatatcctttgatatgcttacgaagtaagtgaaatccctgattatttccagaacccaccaccaggagtgggatcctttattttccaaagccagtataggaccatttatggagttttgcccctcctttcccccctaaccaaggttccaaaaatatattcctaaagaaaaagatttggttaaaatcccgaaaaaaacctttccaatttgggaaggg

SEQ ID NO: 47098 - DNA, 659 bp, Homo Sapiens
caaagtaaatatcgtgcagtcactcagtgcttatcctttaaacagcagttgtgtgattgtttcctggatactatcacccagtgattacaagctaatgtattttattattgagtggaaaaatcttaatgaagatggtgaaataaaatggcttagaatctcttcatctgttaagaagtattatatccatgatcattttatccccattgagaagtaccagttcagtctttacccaatatttatggaaggagtgggaaaaccaaagataattaatagtttcactcaagatgatattgaaaaacaccagagtgatgcaggtttatatgtaattgtgccagtaattatttcctcttccatcttattgcttggaacattattaatatcacaccaaagaatgaaaaagctattttgggaaagatgttccgaaccccaagaattgttcctgggcacaaggacttaattttcagaagagaacggacattctttgaagtctaatcatgatcactacagatgaacccaatgtgccaacttcccaacagtctatagagtattagaagatttttacattttgaagaaggggagcaaatctaaaaaaaattcagttgaacttctgagagttaacatatggggggattatggttgatttagaacttaaaatagat

SEQ ID NO: 47099 - DNA, 692 bp, Homo Sapiens
  misc_feature (18)..(18): n is a, c, g, or t
gggcaggcatcgccgggnagctggagcgtgtggagcagcagtctcggctggagcagctgagtgcggcagagctgcagagcaggaaccagggccactgggctgactggctacaggcgtacagagcccggctggacaaggacctggaaggcgctggggacgctgccgcctggcaggctgagcacgtgcgcgtgatgcacgccaacaacccgaagtacgtgctgaggaactacatcgcgcagaatgccatcgaggctgccgagcgcggggacttctcagaggtgcggcgggtgctgaaactactggagaccccttaccactgcgaggcgggggccgccacagacgccgaggccacggaagccgacggggcggacggcaggcagcgctcctacagcagtaagcccccgctctgggcagcagaactgtgcgtgacatgatcttcgtaacggcctcggcacgctccacacccctggagtctcccgaggcccccatgtgctgctgagtggccaagatgatgccaggctgccctatacactgggggattctgccctggcccatgcacacccgtctttccatgatggcagagacatccagtcaggacctgacccgtctctgactgaggccggctcagcagtgcagactggaccctgatggctgaacccaggctgctaaataaaccagtaactgcctggtgt

SEQ ID NO: 47100 - DNA, 577 bp, Homo Sapiens
tgaaaacgaaatggagacagagattctggactacgtgtgacagggcccaaggctgggcctccctgacccggccagactggtgtctggcctaatgagggagccggggctccccattgccacccacagtgcccggaatggccctaggaggccctctgaggagagctagagtcccagcaaagggtgcagctgaccctagcactggctgtgacatgctgcttggtgctgcctctggtcctgaggggttagggacatccccaaagggtataccctggctctgccacccatgaaccagcccagcatccagccagtgagtgggcacccaatgcctctcaggatgagaccagtaaatgccggaggtggagctgggcagctgtggagccccaggccacaggccagtctcgcttggctctcatgactgtggtggtggagatagcgtggggagcctcgcccatggtctcacgtggcaagaagtgcctttagctctggatcccaaccgtttggcacagctttggccacagccaggcccctctggaattgtccttattaaaccagtttcccgagaaaaaaaaaaaaaaaa

SEQ ID NO: 47101 - DNA, 804 bp, Homo Sapiens
cgctcgcccactgcagattcctttcccgtgcagacatggcctctggcaccaccaccaccgccgtgaagattggaataattggtggaacaggcctggatgatccagaaattttagaaggaagaactgaaaaatatgtggatactccatttggcaagccatctgatgccttaattttggggaagataaaaaatgttgattgcatcctccttgcaaggcatggaaggcagcacaccatcatgccttcaaaggtcaactaccaggcgaacatctgggctttgaaggaagagggctgtacacatgtcatagtgaccacagcttgtggctccttgagggaggagattcagcccggcgatattgtcattattgatcagttcattgacaggaccactatgagacctcagtccttctatgatggaagtcattcttgtgccagaggagtgtgccatattccaatggctgagccgttttgccccaaaacgagagaggttcttatagagactgctaagaagctaggactccggtgccactcaaaggggacaatggtcacaatcgagggacctcgttttagctcccgggcagaaagcttcatgttccgtacctggggggcggatgttatcaacatgaccacagttccagaggtggttcttgctaaggaggctggaatttgttacgcaagtatcgccatggcgacagattatgactgctggaaggagcacgaggaagcagtttcggtggaccgggtcttaaagaccctgaaagaaaacgctaataaagccaaaagcttactgctcactaccatacctc

SEQ ID NO: 47102 - DNA, 633 bp, Homo Sapiens
ctcagctcctctcatctgatctccgtcacctgacacggccctaccaggaacagccgcgctcccgcggattctgattggaaaacaagcgaaattaaactaaaccgctgcacgcctctgacgcgacatctggacacggcgcggcgctggcgctgccggagctgtcgacccggcctggcgccggactaggactatttgccacaacatttcaaaggattccaagagagaatattggtgtccatgctgtgatgattcctcagctcctctcatctgatctccgtcctggcccccatgactttctttgtggtagttagggtgtggtatgtgccactgaggcccacacctattgctgcaatttatagcactgatctgtcatcaataccacttgctgtcttggatgtgaagatgatttttcctgcagggattccctctacaaggttgaggacactgggcatgtggagatagtattcatgctttgaattgtcttttctcttcactacaccaggggtccccaacccctaggccacagactgtggccctagtgtagtgaatagaaaagacaatttggagcgtgaatgttatttcctcatgcccagtgtttgtaattttgtactggtctgtggcttgttagaaagc

SEQ ID NO: 47103 - DNA, 732 bp, Homo Sapiens
gactccatgattgaaatcacaattgggataaagttggtagagatgcttcttaatttacagtggggttatatcctcataaacccctcataagttaaaaatattgtaagtggaaaatgcatttaatacacctactgacatcatagctcagccttgtctgccttaactgtgcccagaaatgcgcattagcctacaatgggggcaaaatcatgtaacaaaaagcctattttgtattaaagcatcaaatatctcatgtagtttattgaatactgtattgaaagtgaaaaacagattggttgtataggcactcaaagagatctcagttctcttgcaagctccttaaagatgactggatgaggctttacaccattgtgtgtttgccaccgtgtttgtacacaggaagggctcaataaacaaatcattggtgactctttgacaacacagaaaacgattttgacttacagtgatttaaaggaattttagacccttttagcttgaagtcttaaaggaagttaagaagatagaaacttatttttaagagcttcccctacttgcattaataatgattacatgttgaatcaaattagaatgaccaggctgcagtgcgtataccaatgttgggaggtgaatgttctcaatgagggtcatgattctaacaaaattagttgttactcacaagcctgtttttcaacttccatttgcctcctactttgcccacaaaaaaaaaacaacaaa

SEQ ID NO: 47104 - DNA, 519 bp, Homo Sapiens
  misc_feature (518)..(518): n is a, c, g, or t
ggaagctgaaagtccccgaatgggtggataccgtcaagctggccaagcacaaagagcttgctccctacgatgagaactggttctacacgcgagctgcttccacagcgcggcacctgtacctccggggtggcgctggggttggctccatgaccaagatctatgggggacgtcagagaaacggcgtcatgcccagccacttcagccgaggctccaagagtgtggcccgccgggtcctccaagccctggaggggctgaaaatggtggaaaaggaccaagatggcggccgctcgagcatgcatctagagggccctattctatagtgtcacctaaatgctagagctcgctgatcagcctcgactgtgccttctagttgccagccatctgttgtttgcccctcccccgtgccttccttgaccctggaaggtgccactcccactgtcctttcctaataaaatgaggaaattgcatcgcattgtctgagtaggtgtcattctattctggggggtggggtggggcang

SEQ ID NO: 47105 - DNA, 481 bp, Homo Sapiens
gagttttatgcatcacagttaacatgtcagctggccctccaggcccccgcccccatcccgtccacgttgctgtgtcgtgaggtgcagcgggtcaccctgtggcccgtcctgtgacccatatttagccgtgtttgggactccgtgtcttcaatggtttgttagttgccattacaactttgtctgggtagagtttttgagtttttgcagttcagtatccctctgtctattcacacttcgtgttagtggtaactcagtttgtctttaaatagttacagaagggatacgtcatttgttaatgcttttgtgaagtgagttaaacgagctttctgtattttaatgctttagtgtttcagttttataagtgaagattttattttaaaaaccagtgggaaagagtggggggtttctttttatgtctgggtcattcaggcagtacatctgaattaagctgaatgtagacaaataaagaaaaacaaaactg

SEQ ID NO: 47106 - DNA, 871 bp, Homo Sapiens
  misc_feature (753)..(753): n is a, c, g, or t
  misc_feature (864)..(864): n is a, c, g, or t
tctatatagaatccatttggatgtctgtcaactgagacgtgtgattgcagcccatggcttttcttccaaggagatcatcactttttggcaggtcatgctaaggaacaccacatgccattattaacttcacattctacaaaaagcctagaaggacaggatactttgtggaaagtgttaaataaagtaggtactgtggaaaattcatggggaggtcagtgtgctggcttacactgaactgaaactcatgaaaaacccagactggagactggagggttacacttgtgatttattagtcaggcccttcaaagatgatatgtggaggaattaaatataaaggaattggaggtttttgctaaagaaattaataggaccaaacaatttggacatgtcattctgtagactagaatttcttaaaagggtgttactgagttataagctcactaggctgtaaaaacaaaacaatgtagagttttatttattgaacaatgtagtcacttgaaggttttgtgtatatcttatgtggattaccaatttaaaaatatatgtagttctgtgtcaaaaaacttcttcactgaagttatactgaacaaaattttacctgtttttggtcatttataaagtacttcaagatgttgcagtatttcacagttattattatttaaaattacttcaactttgtgtttttaaatgttttgacgatttcaatacaagataaaaaggatagtgaatcattctttacatgcaaacattttncagttacttaactgatcagtttattattgatacatcacttcattaatgtaaagtcataggtcattattgcatatcataatctcttggactttggtaaatatttactggggnaatataa

SEQ ID NO: 47107 - DNA, 769 bp, Homo Sapiens
cgcgtccggaagaccatcgctcagatgatagaggacgaacagagagagaagtcagtctcccaccagacggtgcagcagctggttctggagaaggagcaagccctggccgacctgaactccgtggagaagtctctggccgacctcttcagaagatatgagaagatgaaggaggtcctagaaggcttccgcaagaatgaagaggtgttgaagagatgtgcgcaggagtacctgtcccgggtgaagaaggaggagcagaggtaccaggccctgaaggtgcacgcggaggagaaactggacagggccaatgctgagattgctcaggttcgaggcaaggcccagcaggagcaagccgcccaccaggccagcctgcggaaggagcagctgcgagtggacgccctggaaaggacgctggagcagaagaataaagaaatagaagaactcaccaagatttgtgacgaactgattgccaaaatggggaaaagctaactctgaaccgaatgttttggacttaactgttgcgtgcaatatgaccgtcggcacactgctgttcctccagttccatggacaggttctgttttcactttttcgtatgcactactgtatttcctttctaaataaaattgatttgattgtatgcagtactaaggagactatcagaatttcttgctattggtttgcattttcctagtataattcatagcaagttgacctcagagttcctgtatcagggagattgtctgattctctaataaaagacacattgctgacc

SEQ ID NO: 47108 - DNA, 893 bp, Homo Sapiens
  misc_feature (549)..(549): n is a, c, g, or t
cccttccttgagttcaaagccccagggattccctcagggatggagactctgaaagacacaccggccccacgactcctgaagacacacctgcccctggctctgctcccccagactctgttggatcagaaggtcaaggtggtctatgttgcccgcaacgcaaaggatgtggcagtttcctactaccacttctaccacatggccaaggtgcaccctgagcctgggacctgggacagcttcctggagaagttcatggtcggagaagtgtcctacggatcctggtaccagcacgtgcaggagtggtgggagctgagccgcacccaccctgttctctacctcttctatgaagacatgaaggagaaccccaaaagggagattcaaaagatcctggagtttgtggggcactccctgccagaggagaccgtggacttcatggttcagcacacgtcgttcaaggagatgaagaagaaccctatgaccaactacaccaccgtcccccaggagttcatggaccacagcatctcccccttcatgaggaaaggcatggctggngactggaagaccaccttcaccgtggcgcagaatgagcgcttcgatgcggactatgcggagaagatggcaggctgcagcctcagcttccgctctgagctgtgagaggggctcctggggtcactgcagagggagtgtgcgaatcaaccctgacaagcgctcaagaataaatatgaattgagggcctgggacggtaagtcatgtctgtattccaacaattttggaggtgaggtgggaggatcttttgagcccggaattcgagaccaacctggggaacatagggagattctgttaaaaaaataaataaattaagaccatttttaaaaaaaaaaaaaaaaaaaaaaaca

SEQ ID NO: 47109 - DNA, 2276 bp, Homo Sapiens
  misc_feature (2247)..(2247): n is a, c, g, or t
cacgagggacagcctcatcacaaagacatgtatagagtaaatcttttccacagcagaaaggacgtaatatgcattatatctggttataagtaaatatgacaacctcataatatttaagaaatttttatattggtttgctcatttgggtatgagggtcaaatcatgactgctatagccacataattttcacccggccagccagacacacatatgcataagcatatacatgtgtttgatgtaaaacagcttttggaccagctgatccagatttttcttagtgccacccatgggctcaaagaaagtctatttcttgactatgtgaacagtaagaatggcatcaactacccatttcctcattctccatgttattgtctcagaacaaaatattctcttacaccaagcattttttccctcaagatggatgtgtataacaacaagtgatctcttaatagtgcctcctgaaggatatcaagagtgcacatatcttttctacatagaactgaaggagcaagattagatttcgtgcaatcttagaacaagatgtgtataaagctgttgacagcaactaagtaacccaaacttcagaagtttcgttgtctagagccccttctccaattgtaagtccaaagagtatgtctagctctttactggtccatcttccaaaagactattacaatacagccttacaatctcttataatggaagtttatcattttttgcctcatttcacccaagtggcagtcaacagagtacatgtttgtatgtggtggggatgggaggcaggtctaacttctactgattcaaacagctttatcttacttagggagtatactttatcacttagaagtcaaaacattcttccagccaggaattagtgatccattaaaacttatttctaattcatgtcaaatcatgaaccaaaacatactcagtataaaaacctaatgtgagtcagtgtaatgtttatttcttcatactaagcagtgtttacttcaattttttattactctctccatctttctccagataagaaaatcacagatttcacaaaacctttcatatatgtatatacacatacttgaagacatcaattaactcaaagattaaggaaaaagagtttttgttttgttgtttgttttttgagatagagtttcactcttgtcacccaggctggagtgtagtggtgtgatcctggctcactgcaatctccgcctccccagttcaagcgattctcctgcctcagcctccggagtaactggcattacaggcgcctgccaccacccctggctaatttttgtatttttagtagagacggagtttcaccatgttagccaggctggtctcgaactcctgacctcagatgatccgcctgcctgggcctcccaaaagtgctgggattacaggcgtgagccaccgcccccagccagaaaaacaatttttaattttcaaggctggctctccattaataatctctcccatgccctggactagctatactttatcctgcaaggggaataagttatggattccattggtatgtctactttgttcacttcttgggctgcaatatctacacttcccattcacccttaccacttacttagtagatagtctagccacttgcaacaggttcatggctaccatttgggaatgtctataggagatcaaggagatccattgaaactcagcccccaaatccaaagtcactttccttttgatatctgtagtttcatcatctgtcataaccatgcctacttatcatctgtgaaacaccctttctacattaagggatactcacattatgaattctagttgtggttgttttaaaatatattcacaaattttctcatgctcggtcacttcctcctttgagtatgtgttggatttagtgattcccatctaatgaatacaatgaaacaatggtgtttaaattatagactaggtcataaaaaattgtgtacttcctccatgtttatctctcttctatcacttcctctagtacaagccagctgccatgttgtgagcacataccacatagctccatggagatgcccatgtgactgtgatgaagagctaagacttcctgtcagtggccgtgtgagtgacccatgttagaaacagatccgccagcccaaacagaaccttcagacaactgcaggcccagctggcatcttgactgcaactcatgagcgattctaagcccaccgaagctgctcttgaattattgattcacaaaaacttttaggnaataaatgtgtgttgttttaaaaaaaaaa

SEQ ID NO: 47110 - DNA, 618 bp, Homo Sapiens
tgtggtaaggtgttactgatgccaccggctccggcagcacgaggcccagcacggtgtcaccagcctccagctgggctacatcgaccttcctcctccgaggctgggtgagaatgggctacccatctctgaagaccccgacggcccccgaaagaggagccggaccaggaagcaggtggcttgtgagatctgcggcaagatcttccgtgatgtgtatcatcttaaccggcacaagctgtcccactctggggagaagccctactcctgccctgtgtgtgggttgcggttcaagagaaaagaccgcatgtcctaccatgtgcggtcccatgatgggtccgtgggcaagccttacatctgccagagctgtgggaaaggcttctccaggcctgatcacttgaacggacatatcaagcaggtgcacacttctgagcggcctcacaagtgtcagacctgcaatgcttcttttgccacccgagaccgtctgcgctcccacctggcctgtcatgaagacaaggtgccctgccaggtgtgtgggaagtacttgcgggcagcatacatggcagaccacctgaagaagcacagcgaggggcccagcaacttctgcagtatctgaaaccgagg

SEQ ID NO: 47111 - DNA, 650 bp, Homo Sapiens
tccaaagtggacacaggggttattttagaagaaggagaactaaaggatgatggagaagactcagagatgcaagtggaagctccctcagattctagcgttatagcacaacaaaaggccatgaaaagtctgttcggagatgatgaaaaagaaacaggtgaagaaagtgagatcattcctactttggaacccttgccacctcatgaggttcctggacatcagtcagtttttatgaatgaaccaaggctgtcagacttcaagcaagttctcttacgggaggggattcaagctgaatttgtaggaggtgtacttgtttgcaacaatcaagtagcagtccgcagaacggaaactggacgcattggattagaaggctgcctttgtcaagatttttataggataagagaccttttatatgaacaatatgccattgtataaaggacatgatgtcaagaagtatctgcttgacctttctaagaaaaagggattcttatcttactctgagcttttgatgttttgttttgtaacatacaaaaagaatctgccagaaaaacttacatgtatcaaaattttaaaaatataaattgagaacattttgcaaatgctcaaatgaacattctatctttttggctttcaaagtgaatgagctcctaacg

SEQ ID NO: 47112 - DNA, 761 bp, Homo Sapiens
tgggagagcaggatgggggactgatcggtgccgaagagaaagtgattaacagtaagaataaagtggatgaaaacatggtcattgacgagactctggatgttaaggaaatgattttcaatgccgagagagttggaggcctcgaggaagagcgggaatccgtgggcccactgcgggaggacttcagtctgagtagcagtgctctcattggcctgctggtcatcgcagtggccattgccacggtcatcgtcatcagcctggtgatgctgaggaagaggcagtatggcaccatcagccacgggatcgtggaggttgatccaatgctcaccccagaagagcgtcacctgaacaagatgcagaaccatggctatgagaaccccacctacaaatacctggagcagatgcagatttaggtggcagggagcgcggcagccctggcggagggatgcaggtgggccggaagatcccacgattccgatcgactgccaagcagcagccgctgccaggggctgcgtctgacatcctgacctcctggactgtaggactatataaagtactactgtagaactgcaatttccattcttttaaatgggtgaaaaatggtaatataacaatatatgatatataaaccttaaatgaaaaaaatgatctattgcagatatttgatgtagttttcttttttaaattaatcagaaaccccacttccattgtattgtctgacacatgctctcaatatataataaatgggaaatgtcgattttcaa

SEQ ID NO: 47113 - DNA, 718 bp, Homo Sapiens
  misc_feature (97)..(97): n is a, c, g, or t
  misc_feature (467)..(467): n is a, c, g, or t
aatcctaccagatctttagttctaaagggcacttgactgtgagtaggagggccccaagaaagggaggaaagtccacacccagtaacacacaacaggncttcattatggaaatattttacaaaagtacatgtattaccaaccaaagagatgcatgtgcaatagaagccttccttaaaaacaggctaaataacctcattttatgcagcagtttaatctgagaacagagggcaaggtgtgcagtggttccagaggggccttatattctatttttagtctagatatttcgttataaattcccaaggaatgttaacactttggtgacacctaatggattctttttgaaattccaaggtgcttcagttcttgtgcccaagtgaactgtgccttttattgcatttctggttcgtctcttggtggctcttctgactttttggagaatacccatcttgtggaggcagacttaagtntgttatgctgtgccagacaatttactgagacaatcatatcttcctaagcatttaaggaaagttggagaaacaatagaatgagctataaaatatgtatggcacatcttgtttgactttgcagtgtaaacttctctttgtgtacattgatgaggtttaagttgacattgtcatccaacactttacctttattgttcagggaatgccttcgtgatgtcgtactgggttcattattcagactatggctggattga

SEQ ID NO: 47114 - DNA, 907 bp, Homo Sapiens
  misc_feature (667)..(667): n is a, c, g, or t
  misc_feature (744)..(744): n is a, c, g, or t
accgcgtccgatgataacttgttttgacttgaataaagtactacatcagtgtggaaaaaaattctgatacattagcagctatgtaaatgacctaattgatagcaggtgtaataagactatcgtcttcctacacataggaggctcattctctggacacactatcacctattacattttactgattaacaaataaattggaatttaaaaatatcgatatcaccatgatttaatccagatctgggattatgtagctaaacattgtgatgattattatttaaaaccattatttaataagagtaaaaatatgtgaatctggatatatttaaaaaaagaaatttgatgcccagataatatattaggcactactgattttttagttaaattgatgcactacacttttgatgtttgaagttacaaacctgtaatttttttgtaaaggaaataattgccaaatacctaggcccattgctgacgattagttctaaaatcttattcctcctcttctcccctcacttttccctacttcctctgcaaaaagatttaacaaatacattcataaggaaatgtgtgttgtaacaaatatattgcaaaaacatagtttgtaaaggcattctataagctatttatgtaaaatcaataaaagttgatcataattaaactgtatcangtgagtattatagcagcacaaagtattctttgtacagattttgtgccaatttgaagccacagaaatgatgtggattngttaattgtgttttaaaacatccccggacactcagtgtcacaggggggaaagaagtgggtaccacattctgtttatatttcacattttaactagatttgagtgtttttagcaagaatcagtcttaaaatctaatgcctgggatcccaaaaaaaatgtctttaa

SEQ ID NO: 47115 - DNA, 604 bp, Homo Sapiens
  misc_feature (481)..(481): n is a, c, g, or t
  misc_feature (542)..(542): n is a, c, g, or t
attactggaacctatgatctgaagagcgtcctgggtcaactgggcatcactaaggtcttcagcaatggggctgacctctccggggtcacagaggaggcacccctgaagctctccaaggccgtgcataaggctgtgctgaccatcgacgagaaagggactgaagctgctggggccatgtttttagaggccatacccatgtctatcccccccgaggtcaagttcaacaaaccctttgtcttcttaatgattgaacaaaataccaagtctcccctcttcatgggaaaagtggtgaatcccacccaaaaataactgcctctcgctcctcaacccctcccctccatccctggccccctccctggatgacattaaagaagggttgagctggaaaaaaaaaaaaaaaaaaaaaaaaaaaaaaaaaaaaaaaaaaaactcgagggggggcccggtacccaattcgccctatagtgagtcgtattacaantcactggccgtcgttttacaacgtcgtgactggggctggcgtaataaccgagaagccccgnaccgattcgcctttccaacagttgcgcagcctgaatggcgaatgcttgtaagcgttttttgt

SEQ ID NO: 47116 - DNA, 921 bp, Homo Sapiens
  misc_feature (772)..(772): n is a, c, g, or t
  misc_feature (898)..(898): n is a, c, g, or t
  misc_feature (900)..(900): n is a, c, g, or t
tggggactactatcgtcaaggctgtgcctccaaactgcctgtcaagtggctggccctggagagcctggccgacaacctgtatactgtgcagagtgacgtgtgggcgttcggggtgaccatgtgggagatcatgacacgtgggcagacgccatatgctggcatcgaaaacgctgagatttacaactacctcattggcgggaaccgcctgaaacagcctccggagtgtatggaggacgtgtatgatctcatgtaccagtgctggagtgctgaccccaagcagcgcccgagctttacttgtctgcgaatggaactggagaacatcttgggccagctgtctgtgctatctgccagccaggaccccttatacatcaacatcgagagagctgaggagcccactgcgggaggcagcctggagctacctggcagggatcagccctacagtggggctggggatggcagtggcatgggggcagtgggtggcactcccagtgactgtcggtacatactcacccccggagggctggctgagcagccagggcaggcagagcaccagccagagagtcccctcaatgagacacagaggcttttgctgctgcagcaagggctactgccacacagtagctgttagcccacaggcagagggcatcggggccatttggccggctctggtggccactgagctggctgactaagccccgtctgaccccagcccagacagcaaggtgtggaggctcctgtggtagtcctcccaagctgtgctgggaagcccggnactgacaaatcaccccatcccagttctttcctgcaccactctgtggccagcctggcatcagttttaggccttggccttgatggaagtgggcccagtcctggttgtctgaacccaggcagctggcangnattgggggtggtttatgttcc

SEQ ID NO: 47117 - DNA, 917 bp, Homo Sapiens
ctcctgtggtagtcctcccaagctgtgctgggaagcccggactgaccaaatcacccaatcccagttcttcctgcaaccactctgtggccagcctggcatcagtttaggccttggcttgatggaagtgggccagtcctggttgtctgaacccaggcagctggcaggagtggggtggttatgtttccatggttaccatgggtgtggatggcagtgtggggagggcaggtccagctctgtgggccctaccctcctgctgagctgcccctgctgcttaagtgcatgcattgagctgcctccagcctggtggcccagctattaccacacttggggtttaaatatccaggtgtgcccctccaagtcacaaagagatgtccttgtaatattcccttttaggtgagggttggtaaggggttggtatctcaggtctgaatcttcaccatctttctgattccgcaccctgcctacgccaggagaagttgaggggagcatgcttccctgcagctgaccgggtcacacaaaggcatgctggagtacccagcctatcaggtgcccctcttccaaaggcagcgtgccgagccagcaagaggaaggggtgctgtgaggcttgcccaggagcaagtgaggccggagaggagttcaggaacccttctccatacccacaatctgagcacgctaccaaatctcaaaatatcctaagactaacaaaggcagctgtgtctgagcccaacccttctaaacggtgacctttagtgccaacttcccctctaactggacagcctcttctgtcccaagtctccagagagaaatcaggcctgatgagggggaattcctggaacctggaccccagccttggtgggggagctctggaatgcatggggcgggtctagctgttaggrcatttcaagctgttagttgct

SEQ ID NO: 47118 - DNA, 748 bp, Homo Sapiens
  misc_feature (583)..(603): n is a, c, g, or t
  misc_feature (641)..(641): n is a, c, g, or t
  misc_feature (677)..(677): n is a, c, g, or t
gggtgtttcatctgcaggttttttcaaattgttgaaatctctgaaaaattttattgaaaaaaaatccatatatgtaagtggacccacacatttcaaacctgtgttcaagggtcagctgtgtaaataattttcctcaaaattaaagtggaaaaggagagttactactagtagaaagtagaactgtacccttgggcaggggtgtgtgtgtgtagttaaagatcaatttaacttaaaaggtcttggttagagaataaaactggcccttattagctttaatttacatgaaaaatgaaaaattttaggccaggcacagtggctcaggcctgtaatcccttaactttgggagaccaaggggagtggatcacttgaggtcaggagttcaagacagcctggccaacatgctgactcacccttccctactgaaaatacaaaagttagccaggcgcagtggccatccctacagtgctagctactcgggaggctgaggcaggagaattgcttgaacccgggaggcaaggttgcggtgagctgagatcgcaccactgcactccagactgggtgacagagcgagactccatcccannnnnnnnnnnnnnnnnnnnnaacatgtcgggccgcctcggcccctcgagaaagctttnctagaccatttcgttttgggcgcgccgggccccagntaaggtaaagtggaacattggcccataggctggttttccctagggagaatccctgggccactgaacttaat

SEQ ID NO: 47119 - DNA, 808 bp, Homo Sapiens
gatgtatcaaattcattttatagaaagatttaaagtttttttctggaagtgatatatgtcaaattacatttcctactgcagtatttgagcagggacagtcattttttaaatgtttttggccgggcgtggtggctcatgcctgtaatctcagtacattgggaggccaaggcaggtggatcacctgaggtcaagagttcgaggccagcctggccaacatggtgaaaccctgtctctactaaaaatacaaaaaattggccgggcgtgatggtgggcgcctgtaatcccagccactccagaggctgaggcaggagaatcgcttgaacctgcgaggcagagattgcagtgagccaagatcaagccattgtactccagcctggacaacaagagcgaaactctgtctaaaaaaaaaaaaaaaaaacacacacacacacaacacaatgttttcacgcctgtaaacctagcactttgggaagccaaggtgggaggattgcttgaggccaggagttcaaggctgcagtgagctatgattgcacactgtactctagcctgggagacagagtgagacccgctggtcctctaaaactaaacaaaatatcaactaaacaactgttcttgaacccttaaaaaatctttggcggcggaacttcctatcctcttttcaaaaagaccgtaaaaagggggtctctgtctccttgtacaaccctacttttaacctactgcgggataaacgagcgaccccgtggggtatggggaatactttccctggtttgccccagtttcctgcggaactcggttagtcgcgagaaat

SEQ ID NO: 47120 - DNA, 591 bp, Homo Sapiens
aactgataaatgtccatgaaatcttcacaatttatgttcctctgccacggctccagccggtccctccatttggggtccctgacttcccgcaacatataaggaaacaaaatacccccagctccttaccccagacccttgtccagatagaaatttagacttattaatatattgaattgttcaagtgtccatatactaagaattacatcagcgatgtggaactatggataggcttccttgggttcctggctccacactataaccaccgccccccaccccttaaatttctgtatagcagacttaagagtgaatatcaccatatgcagttgttcatgtacttcttcccctttctcttctagctcttgacaaaattctcagggaaaactctccagctctggatgtctccctttttgtggatcaaacacaaagggcatcattctaaaatatatacagaaccataaaagccccaaatagccaaagcaaccctgagcaaaaagaacaaggctggaagcatcacactaccagacttcaaaatttactacaaagctctaatacctaaaataacatggtactggcattaaaaaaaaaaaaaaa

SEQ ID NO: 47121 - DNA, 683 bp, Homo Sapiens
  misc_feature (559)..(559): n is a, c, g, or t
agtaccacccaggggtggcagtagacaacaacccagaaatttagacagggatctcttacctttggaaaataggggttaggcatgaaggtggttgtgattaagaagatggttttgttattaaatagcattaaactggaattgacaagagtgttgagcatccctgtctaacctgctctttctctttggtgccccttatctcaccccttccttggaatttaataagtctcaggcatttccaattgtagactaaaaccactcttagcatctcctctagtattttccatgtatcaggacagaggtgtcttatgtagggagggggcaagtatgaagtaaggtaattatatactactctcattcaggattcttgctcccatgctgctgtcccttcaggctcacatgcacaggaatgctacatgatggccagctgcttccctccttggttatcatccactgcagctgctagttagaaaggtttggagggatgacttttagtaaatcatggggattttattgatttattttcacttttgggattttgtggggtgggagtggggagcangaattgcactcagacatgacatttcaattcatctctgctaatgaaaagggttctttctcttgggggaaatgtgtgtgtcagttctgtcagctgcaagttcttgtataatgaagtcaatgccatc

SEQ ID NO: 47122 - DNA, 624 bp, Homo Sapiens
  misc_feature (448)..(448): n is a, c, g, or t
ttaaaaacatgagaagcgaatgtcaaaggatgaagaaagagcagtcaaagatgagcttctcagtgaaaagcctgaaatcaaacagaagtgggcatccaggctccttgccaaactgcgcaaagatattcgccaggagtatcgagaggactttgtgctcaccgtgactggcaagaagcacccgtgctgtgtcttatccaatcccgaccagaagggtaagattaggagaatcgactgcctgcgacaggcagacaaagtctggcgtctggatctagtcatggtgatcctgttcaaaggcatccccttggaaagtaccgatggagagcggctcatgaaatccccacattgcacaaacccagcactttgtgtccagccacatcatatcacagtatcagttaaggagcttgatttgtttttggcatactacgtgcaggagcaagattctggacantcaggaagtccaagccacaatgatcctgccaagaatcctccaggttaccttgagggtagttttgtaaaatctggagtcttcaatgtatcagaacttgtaagagtatccagaacgcccataacccaaggaactggagtcaacttcccaattggagaaatcccaagccaaccatacta

SEQ ID NO: 47123 - DNA, 1220 bp, Homo Sapiens
ccaaagtgctggctacctgctgagcgcccccgtaactctgacacagtagtaatttgagcctctgcaattgccgtctgcttcctgtgaaagtcctttccgtgcccactgacccttgagtgggcctttgagctgctgactttcagctggaacttgaagggaccccaaccctgagacactatggccctgacctcagacctggggaaacagataaaactgaaagaggtggaggggaccctcctgcagcctgcaactgtggacaactggagccagatccagagcttcgaggccaaaccagatgatctcctcatctgcacctaccctaaagcagggacaacgtggattcaggaaattgtggatatgattgaacagaatggggacgtggagaagtgccagcgagccatcatccaacaccgccatcctttcattgagtgggctcggccaccccaaccttctgctcgaaatgccaaagactgtatggtttcctactaccatttccaaaggatgaaccacatgcttcctgaccctggtacctgggaagagtattttgaaaccttcatcaatggaaaagtggtttggggttcctggtttgaccacgtgaaaggatggtgggagatgaaagacagacaccagattctcttcctcttctatgaggacataaagagggacccaaagcatgaaattcggaaggtgatgcagttcatgggaaagaaggtggatgaaacagtgctagataaaattgtccaggagacgtcatttgagaaaatgaaagaaaatcccatgacaaatcgttctacagtttccaaatctatcttggaccagtcaatttcctccttcatgagaaaaggaactgtgggggattggaaaaaccacttcactgttgcccagaatgagaggtttgatgaaatctatagaagaaagatggaaggaacctccataaacttctgcatggaactctgagcaagatgtaaataaaattaaaaggtggatggcaagagtgcaaatactatcttcaatccttcagtcccagccagaagaatctctgaaagcatattgtgaatgtatacaatgtagtacaaacaatctctgtgatgattaacagtatgtcaccacttcattttttaaaaaggatcacgtctaatgcccattttcccaactattctttccaaagtaagatataaggtagcttaataaactaagtaaaacgtaaaaaaaaaaaaaaa

SEQ ID NO: 47124 - DNA, 585 bp, Homo Sapiens
agcacttgtagttccctgccttctgtctcctctgcacctatcactagcgggcaagctcccaccacatttctacctgcaagtacttctcaagcacagctttcttcacaaaagatggagtctttctctgctgtgccacccaccaaagagaaagtgtccacacaggaccagcccatggcaaacctatgtaccccatcttcaactgcaaacagttgcagtagctctgccagcaacaccccgggagctccagaaactcacccatccagtagtcccactcctacttccagtaacacacaagaggaggcacagccatccagtgtgtctgatttaagtcctatgtcaatgccttttgcatctaactcagaacctgctccattgactttgacatcacccagaatggttgctgctgataatcaggacaccagtaatttacctcagttagctgtaccagcacctcgagtttctcatcgaatgcagcccagaggttctttttactccatggtaccaaatgcaactattcaccaggatccccagtctatttttgttacgaatccagttactttaacaccacctcaaggcccaccagct

SEQ ID NO: 47125 - DNA, 566 bp, Homo Sapiens
atagactgtcagaggagataaaggaaatagatgatcagaacatggagacgagaattagaggaagagcaagggattttccacatagaattgggctgtgatagccctaaagacaggaaagaagcccctttctttgatttgctgctagatgttcttttcgtagcatgggctcttcctggggaggatccgtgctgtgctatttcccctctactgagctctgctcactttgccggtcaaaggtgtgttttcgggctcccgcttgtcacttctctgagccccctgaattacatgttgtttccaccacctgagctttcaataattggagcttcttggatcagaattcttctttgttcttctgactttgaattacgacaattaaagcaggtgatttttaaattttaaaacttaaaaagtttagatccttatctatagactaaacaaagggcttaagaggaataaagacgggagagactttctggtttattttagtgggggtattagcttctttattgctatgggatttctcatttccatgagcaaaaataaaaaatactaaaaaaaaaaaaaaa

SEQ ID NO: 47126 - DNA, 688 bp, Homo Sapiens
caggacaggagcgatttagggctgttacacggagctactacagaggagctgcgggagctcttatggtctatgatatcactagaagaagtacatataaccacttaagcagctggttgacagatgcaaggaatctcaccaatccaaatactgtaataattctcataggaaataaagcagatttggaggcacagagagatgttacatatgaagaagccaaacagtttgctgaagaaaatggcttattgttcctcgaagcgagtgcaaaaacgggagagaatgtagaagatgccttccttgaggctgccaagaaaatctatcagaacattcaggatggaagcttggatctgaatgctgctgagtctggtgtacaacacaaaccttcagccccgcagggaggccggctaaccagtgaaccccaaccccagagagaaggctgtggctgctagtgacctctttgctgtggcccctcatttgacctttcacctctgtctgttggaagcagtactttttactgcctcattgtcttctgtacatcttactgggtttaattaaaaaaaaagaaaaaactctgttgtacaaagggcagtagagtaataaatctctcctgcatggtaaatctagactttttttcccccttgtcctcgtgataagtatgtcaccaatatatgatttaaaccgagcactgatg

SEQ ID NO: 47127 - DNA, 930 bp, Homo Sapiens
gccacctgccatcactctggaatggaagaggaaggtggcccaggaagccattgagagcctcagcgcctccaaattggctaagagcatttgcagccaattccggactcggctcaatagttcccacgaggctttgcagcctccttgcggcagctggaagctggccactcaggccggttagagaaaacggaagatctatggctgagggttcggaaagatcatgctccccgcctggcccgcctttctctggaaagccgttctttacaggatgtcttgcttcatcgtaaacctaaactgggacaggaactgggccggggccagtatggtgtggtatacctgtgtgacaactggggaggacacttcccttgtgccctcaaatcagttgtccctccagatgagaagcactggaatgatctggctttggaatttcactatatgaggtctctgccgaagcatgagcgattggtggatctccatggttcagtcattgactacaactatggtggtggctccagccattgcttgtgctcctcattatggagcggtacaccgggatctctacacaggctgaaggctgggctgaccctggagacaacgtttgcagatagcactagatgtggtggagggaatcccgtcctgacaagacaggacacgtccatcgtgatatcaaacctggaaaatgtgctgctgcatatcggagaaacgtgacaagatcactgagtaagattctggcaagcagaggcatgatgtccgggagaaatgggggaccaccagccaaggggccgaacttcaagggacgacaaatacgggagaagagaggaagcacaggaaaggcaagccggaaagccgggatggagggcagacaacctcgacagggggggggccaagccagttcgagcgcggagaactcggcaccaaactggatcacacaca

SEQ ID NO: 47128 - DNA, 792 bp, Homo Sapiens
gcaagggctggatcttcaacgtggttccttggttggtggcgattccggccagtctattcagcgggtttctctctgatcatctcatcaatcgggttacagagccatcacggtgcggaagctcatgcagggcatgggccttggcctctccagcgtctttgctctgtgcctgggccacacctccagcttctgtgagtctgtggtctttgcatcagcctccatcggcctccagaccttcaaccacagtggcatttctgttaacatccaggacttggccccgtcctgcgccggctttctgtttggtgtggccaacacagccggggccttggcaggtgtcgtgggtgtgtgtctaggcggctacttgatggagaccacgggctcctggacttgcctgttcaaccttgtggccatcatcagcaacctggggctgtgcaccttcctggtgtttggacaggctcagagggtggacctgagctctacccatgaggacctctagctcccaaccccacagcctctccaaggacccaggcgccagcagccccaggacacaggggactcagtgtgtgggacttggtcactccatgtcagacacacgagcagagaggaacacaaaccactgtggagcctgaagctccttaacgaagagtccacaacagctggtgggagggtggggattgggcctgggtccagaacaggatcagatgctctctgggcctacagttcccccacctgccagcgggctcggccctgtactccctcacaggctggagtggcgacaaggtgggtggaggaaaa

SEQ ID NO: 47129 - DNA, 919 bp, Homo Sapiens
  misc_feature (15)..(15): n is a, c, g, or t
  misc_feature (23)..(23): n is a, c, g, or t
  misc_feature (30)..(30): n is a, c, g, or t
  misc_feature (718)..(718): n is a, c, g, or t
  misc_feature (845)..(845): n is a, c, g, or t
acacgaactactggnacacgagnactggtnccaccacaatgtgacacggtgggaaacttttgatgtgagccctgcggtccttcgctggacccgggagaagcagccaaactatgggctagccattgaggtgactcacctccatcagactcggacccaccagggccagcatgtcaggattagccgatcgttacctcaagggagtgggaattgggcccagctccggcccctcctggtcacctttggccatgatggccggggccatgccttgacccgacgccggagggccaagcgtagccctaagcatcactcacagcgggccaggaagaagaataagaactgccggcgccactcgctctatgtggacttcagcgatgtgggctggaatgactggattgtggccccaccaggctaccaggccttctactgccatggggactgcccctttccactggctgaccacctcaactcaaccaaccatgccattgtgcagaccctggtcaattctgtcaattccagtatccccaaagcctgttgtgtgcccactgaactgagtgccatctccatgctgtacctggatgagtatgataaggtggtactgaaaaattatcaggagatggtagagagggatggtggggtgccgctgagatcaggcagtccttgaggatagacagatatacacaccacacacacacaccacatacaccacacacacacgttnccatccactcacccacacactacacagactgcttccttatagctggacttttatttaaaaaaaaaaaaaaaaaaaggaaaaaatccctaaacattcacctttgaccttatttatgacttttacgtgncaaatgtttttgaccatatttgatcataatattttgacaaaatatatttataacttacgtattaaaaagaaaaa

SEQ ID NO: 47130 - DNA, 459 bp, Homo Sapiens
  misc_feature (448)..(448): n is a, c, g, or t
acctatgcacctgctccactgtgtctgcttctcatagagacactcttcctgctgagtctctgacctctgctcctagatccaaatggcatctcctgccctatccctgtatggcttaacctagggaaactctttcccagaggagtcaggtaaaaagacagtggctgagcttcttacagatttaaaggagacatcctggaatttaggactccatccttcctttctgtcccctggcagctcctgctgcttctcaaagtttagctttgtctctcatccagctcagactgttgctggtcctgatggcctctgcttagctgtattagtatgttcttgcattgctataaagaaatacatgagaaatacctttagttggctcatggttccatagggtatacaggaagcatggtggtttctgcttgtggggaggcctcaggaaacttttactcaaggngcagggcaaaa

SEQ ID NO: 47131 - DNA, 1041 bp, Homo Sapiens
ccgcgtctacgtggggttcactgtcaacactgctcgtcgggtccagcagcacaatgggggccgcaaaaaaggcggggcctggcggaccagcgggcgagggccctgggagatggtgctcgtcgtgcacggcttcccgtcctccgtggccgcccttcggtttgagtgggcttggcagcacccgcacgcctcgcgccgcctggcgcacgtggggcctcgcctgcgaggagagacagccttcgctttccacctgcgcgtgctggcgcacatgctgcgcgcaccgccctgggctcgcctcccgctcacgctgcgctgggtgcgcccagacctccgccaggacctctgcctcccgccgccgccgcacgtgcctctggccttcgggcctccaccgccccaggccccggccccaaggcgccgcgcaggtccctttgatgacgcggagcctgagccagaccagggggatccaggggcctgctgctccctgtgcgcccagaccatccaggatgaagaggggcccttgtgttgcccccaccctggctgcctgctaagggcccatgtgatctgcctggcagaggagtttcttcaggaagaaccagggcagcttctgcccctagagggccaatgcccttgctgtgagaagtcactgctttggggagacctgatctggctgtgccagatggacactgagaaagaagtagaagactcagaattagaagaggcacactggacagacctgctggagacctgatcctcagtgtccttaccccctcctacctcttttctgtgccacctgctgtggggtcagcagggtttttacttgagtacaataaaaagtctgagtcaaaaaaaaaaaaaaaaaaactcaaggcaatctatggtcgggggccgaaaaaggaggtaatgcaatgggcccatggtccataacctggtttcctggacccggctttcttggcacaaaagggggtaaatttggccgggctctccctaataattgaagccgctatttaatttcccaagaaagaaaggcacacccgggccttaatt

SEQ ID NO: 47132 - DNA, 846 bp, Homo Sapiens
cacctgctacagccgggacacaggcacacccaagtggagcgatagggtccccaaatgcgccttgaagtacgagccgtgcctgaacccgggggttcccgagaatggctaccagacgctgtacaagcaccactaccaggcgggcgagtctctgcgcttcttctgctatgagggctttgagcttatcggcgaggtcaccatcacctgtgtgcccggccacccctcccagtggaccagccagcccccactctgcaaagttgcctatgaggagctcctggacaaccgaaaactggaagtgacccagaccacagatccatcacggcagctggaaggggggaacctggccctggccatcctgctgcctctaggcttggtcattgtcctcggcagtggcgtttacatctactacaccaagcttcagggaaagtcccttttcggcttctcgggctcccactcctacagccccatcaccgtggagtcggacttcagcaacccgctgtatgaagctggggatacgcgggagtatgaagtttccatctgaaccccaagactacagctgcaggacccaggacgcccctcccctcctcattcgggcagagggaaatacgggacccggtctctgcctcctggctgccctcctccctggctgtgtaaatagtctccctatcccacgagggggctttgatggccctggagatcctacagtaaataaaccaccatcctgcccgccccaagccgccctcttctccgtttgccaaaacgagggggcctgcccccccggcccctaccgggctttttgggattctgggggagggggaaacctctggccttcccctggccaaattctta

SEQ ID NO: 47133 - DNA, 636 bp, Homo Sapiens
  misc_feature (207)..(207): n is a, c, g, or t
  misc_feature (413)..(413): n is a, c, g, or t
  misc_feature (574)..(574): n is a, c, g, or t
  misc_feature (578)..(579): n is a, c, g, or t
  misc_feature (593)..(593): n is a, c, g, or t
  misc_feature (601)..(601): n is a, c, g, or t
  misc_feature (603)..(603): n is a, c, g, or t
  misc_feature (605)..(605): n is a, c, g, or t
  misc_feature (609)..(609): n is a, c, g, or t
  misc_feature (611)..(611): n is a, c, g, or t
  misc_feature (613)..(613): n is a, c, g, or t
  misc_feature (615)..(615): n is a, c, g, or t
  misc_feature (620)..(620): n is a, c, g, or t
  misc_feature (622)..(622): n is a, c, g, or t
  misc_feature (624)..(625): n is a, c, g, or t
  misc_feature (631)..(631): n is a, c, g, or t
  misc_feature (633)..(635): n is a, c, g, or t
gaattcggcacgaggcagaccaaagaaagatagagcaagacaagaaaatccctgtgggccttgctcagagcggagaaagcatttgtttgtacaagatccgcagacgtgtaaatgttcctgcaaaaacacagactcgcgttgcaaggcgaggcagcttgagttaaacgaacgtacttgcagatgtgacaagccgaggcggtgagccgngcaggaggaaggagcctccctcagggtttcgggaaccagatctctcaccaggaaagactgatacagaacgatcgatacagaaaccacgctgccgccaccacaccatcaccatcgacagaacagtccttaatccagaaacctgaaatgaaggaagaggagactctgcgcagagcactttgggtccggaggcgagactccggcggaanattcccgggcgggtgacccagcacggtccctcttggaattggattcgccattttatttttcttgctgctaaatcaccgagcccggaagattagagagttttatttctgggattcctgtagacacacccacccacatacatacatttatatatatatatatnaggnntatatatagggagngtgtgtgngngngggngngngnggtancncnnatccanannnc

SEQ ID NO: 47134 - DNA, 596 bp, Homo Sapiens
ggcaatattgtcctgtgactggcttatttcacttagcatagtgaaataagattcatccatttggaagccaggcatggtgctgtgcatctatagtccctgctatttgagaggctgaggtgggaggatcatttgagtgcaggagttcaaggacagcctgggtaatataggaagaccctgtcttaaagaccctgacctcaagtgatccacccacctcggcctccgaaagtgctaggattacaggtgtgagccactgtgcctggcctccggtgagtattttatatttagtctacacttccatacttggcttttttctgcttttatattgatctgctttcatagcagtgtgtagagtgccacttatgttttctttcttgtgtacagtattttattgtatggatttaccatcccctgtgtatttaagtcgttccattctttggccattataacttttttctgcaaatattctggtgacttatctttggccattataaactgttgataatagatcatcttgtatatacttctgcaattataagatgttttgatgatgaaagctttcctaaggtaattctttcctgagtttggttcagatggtc

SEQ ID NO: 47135 - DNA, 1140 bp, Homo Sapiens
cttctgttggcagtgacggtgcaggccggagcggcacctacgtcctgatcgacatggttctcaacaagatggccaaaggtgctaaagagattgatatcgcagcgaccctggagcacttgagggaccagagacccggcatggtccagacgaaggagcagtttgagttcgcgctgacagccgtggctgaggaggtgaacgccatcctcaaggcccttccccagtgagcggcagcctcaggggcctcagagggagcccccaccccacggatgttgtcaggaatcatgatctgactttaattgtgtgtcttctattataactgcatagtaatagggcccttagctctcccgtagtcagcgcagtttagcagttaaaagtgtatttttgtttaatcaaacaataataaagagagatttgtggaaaaatccagttacgggtggaggggaatcggttcatcaattttcacttgcttaaaaaaaatactttttcttaaagcacccgttcaccttcttggttgaagttgtgttaacaatgcagtagccagcacgttcgaggcggtttccaggaagagtgtgcttgtcatctgccactttcgggagggtggatccactgtgcaggagtggccggggaagctggcagcactcagtgaggccgcccggcacacaaggcacgtttggcatttctctttgagagagtttatcattgggagaagccgcggggacagaactgaacgtcctgcagcttcggggcaagtgagacaatcacagctcctcgctgcgtctccatcaacactgcgccgggtaccatggacggccccgtcagccacacctgtcagcccaagcagagtgattcaggggctccccgggggcagacacctgtgcaccccatgagtagtgcccacttgaggctggcactcccctgacctcacctttgcaaagttacagatgcaccccaacattgagatgtgtttttaatgttaaaatattgatttctacgttatgaaaacagatgcccccgtgaatgcttacctgtgagataacacaaccaggaagaacaatctgggcattgagcagctatgagggtcccgggagmcacgaaccygccaggccccgctggctctccaggcacgtccggamctgtkgg

SEQ ID NO: 47136 - DNA, 676 bp, Homo Sapiens
tgctggcaggagccggctgcctaccaggggccttcctgtgtggcctgccttcaccccactcagctcacctctccctccacctcctctccacctgctggtgagaggtgcaaagaggcagatctttgctgccagccacttcatcccctcccagatgttggaccaacacccctccctgccaccaggcactgcctggagggcagggagtgggagccaatgaacaggcatgcaagtgagagcttcctgagctttctcctgtcggtttggtctgttttgccttcacccataagcccctcgcactctggtggcaggtgccttgtcctcagggctacagcagtagggaggtcagtgcttcgtgcctcgattgaaggtgacctctgccccagataggtggtgccagtggcttattaattccgatactagtttgctttgctgaccaaatgcctggtaccagaggatggtgaggcgaaggccaggttgggggcagtgttgtggccctggggcccagccccaaactgggggctctgtatatagctatgaagaaaacacaaagtgtataaatctgagtatatatttacatgtctttttaaaagggtcgttaccagagatttacccatcgggtaagatgctcctggtggctgggaggcatcagttgctatatattaaaaaaaaaaaaaaa

SEQ ID NO: 47137 - DNA, 709 bp, Homo Sapiens
aggagcggaagctgtgtgcctatcctcggctggagatctaccaggaagaccagatccatttcatgtgcccactggcacggcagggagacttctatgtgcctgagatgaaggagacagagtggaaatggcgggggcttgtggaggccattgacacccaggtggatggcacaggagctgacacaatgagtgacacgagttctgtaagcttggaagtgagccctggcagccgggagacttcagctgccacactgtcacctggggcgagcagccgtggctgggatgacggtgacacccgcagcgagcacagctacagcgagtcaggtgccagcggctcctcttttgaggagctggacttggagggcgaggggcccttaggggagtcacggctggaccctgggactgagcccctggggactaccaagtggctctgggagcccactgcccctgagaagggcaaggagtaacccatggcctgcaccctcctgcagtgcagttgctgaggaactgagcagactctccagcagactctccagccctcttcctccttcctctgggggaggaggggttcctgagggacctgacttcccctgctccaggcctcttgctaagccttctcctcactgccctttaggctcccaggggccagaggagccagggactattttctgcaccagcccccagggctgccgcccctgttgtgtcttttttt

SEQ ID NO: 47138 - DNA, 607 bp, Homo Sapiens
  misc_feature (577)..(578): n is a, c, g, or t
ccggtaccggaccctgcagccgcagagatgttgatgcctaagaagaaccggattgccatttatgaactcctttttaaggagggagtcatggtggccaagaaggatgtccacatgcctaagcacccggagctggcagacaagaatgtgcccaaccttcatgtcatgaaggccatgcagtctctcaagtcccgaggctacgtgaaggaacagtttgcctggagacatttctactggtaccttaccaatgagggtatccagtatctccgtgattaccttcatctgcccccggagattgtgcctgccaccctacgccgtagccgtccagagactggcaggcctcggcctaaaggtctggagggtgagcgacctgcgagactcacaagaggggaagctgacagagatacctacagacggagtgctgtgccacctggtgccgacaagaaagccgaggctggggctgggtcagcaaccgaattccagtttagaggcggatttggtcgtggacgtggtcagccacctcagtaaaattggagaggattcttttgcattgaataaacttacagccaaaaaaccttannaaaaaaaaaaaaaaaaaaaaaaaaaaaaa

SEQ ID NO: 47139 - DNA, 767 bp, Homo Sapiens
aggtggagcggctggtgaaggaggtccccgaggagtattccgagcgcttttccccgcaggcccgctcactttgctcacagctcctctgcaaggaccctgccgaacgcctggggtgtcgtgggggcagtgcccgcgaggtgaaggagcaccccctctttaagaagctgaacttcaagcggctgggagctggcatgctggagccgccgttcaagcctgacccccaggccatttactgcaaggatgttctggacattgaacagttctctacggtcaagggcgtggagctggagcctaccgaccaggacttctaccagaagtttgccacaggcagtgtgcccatcccctggcagaacgagatggtggagaccgagtgcttccaagagctgaatgtctttgggctggatggctcagttcccccagacctggactggaagggccagccacctgcacctcctaaaaagggactgctgcagagactcttcagtcgccaagattgctgtggaaactgcagcgacagcgaggaagagctccccacccgcctctagcccccagcccgaggcccccaccagcagttggcggtagcagctactccgagcgccgtttacagttttgcacagtgatcttccccattgtccactcaagtcgtggcctggggaacacagacggagctgtccccagtgtcctccgtccctcagcccctggcctggctgagtttggcagggcctgggccatccctgggacaaaggtgcgtcccttcagctcttctc

SEQ ID NO: 47140 - DNA, 713 bp, Homo Sapiens
tctagcgaggtgacagcgtagaaccaactggtctgtggcctgctaggatccagggtgcacagcaggaggtgaatgtaggatgagcaaacattactgcctgagctcaactttctgtcagatcagcagtggcattagattctcataggagcatgaactttattgtgaactgcacatgcaagggatctaggttgcacactccttatgagaatctaatgcctgatgatctgaactggaacagtttaatccccaactccagtccgtgggaaaaatgtcttccacgaaactggtccctggtgccaaaaagttaggggaccactgatttagattatgtcacatgtcccatccactcattaacattaaggctttcatccctgggacctcaagataatggtggtatttagagatgtggttttttaaagaggtgattttaaaatgaggcagttagaatggggccctcattcaatatgactggtttccttataagaagtgaaagagataccagggtagcaggcacagaattttatgtgaagtgaccggaaatggttaccttcaaggcaaagagagattcctggaggagatccttcttttaaggctcattatagaggaaatcatccttatctacactttgatcctggacttccagcctcaaaaattatgagcaaataaatttctgttgtttaagccaaaaaaaaaaaaaaaactctccagcgctg

SEQ ID NO: 47141 - DNA, 694 bp, Homo Sapiens
ttcagaatcttctgaaccatctatgtaatgaatggggattatacattggaatttttgtcatgacacatttgccaaatcagtaggatatatttgttttggcagcctatcacgcagaggctagtggtatatttatgtaagaaaatgactgtaaatctcaagaaaaatctcagcagctaatagcaactcatttatttcattttggtcttaatgctttgtaaacaggtcaaaaaatactgtcatactctaagcttctattttccacactggacatacttctagttgtattctccatactattagactgtgtagtgatgtgacttccaagtagaatttaatctccccattgagtgtgtcatggtacaaatcactattcgtttttggtgttttttagggatgtgcaatgtgcattacataatgacagaaatactgagaaggttctgtgtgcccatttgaaaggagtgggaggaatacagcagtttgtttttcaacatgaatctgatattgatttaaactgtgtttcacttacaagttttaaaaaaatgacagggtttaatggagcgtgcataaaaatgtactgttttcaccttttgtttatatgtaaatgtttgtaagtatatgggcctatctgtaagtgggtaagtctgtatgtgtgtatcatacacatcaacctccatgtccttagtccctgggtttt

SEQ ID NO: 47142 - DNA, 521 bp, Homo Sapiens
gtgagtggtttaccagagccatgcattcaccatgcacgatccatctgccacctggccttggacatgatggaaattgctggccaggttcaagtagatggtgaatctgttcagataacaatagggatacacactggagaggtagttacaggtgtcataggacagcggatgcctcgatactgtctttttgggaatactgtcaacctcacaagccgaacagaaaccacaggagaaaagggaaaaataaatgtgtctgaatatacatacagatgtcttatgtctccagaaaattcagatccacaattccacttggagcacagaggcccagtgtccatgaagggcaaaaaagaaccaatgcaagtttggtttctatccagaaaaaatacaggaacagaggaaacaaagcaggatgatgactgaatcttggattatggggtgaagaggagtacagactaggttccagttttctcctaacacgtgccaagcccaggagcagttcttccctatggatacagattttcttt

SEQ ID NO: 47143 - DNA, 594 bp, Homo Sapiens
ttatgaagagcaaacagtaaacgaaagaacagcactggcagtggccactctgccctggagctgccgaccatcaggacgcctgcagacatttacagagcctttgttgatgttgtgaatggagaatatgtccctcgcaaatccatcctgaagtctcgaagtagagagaatagtgtgtgtagcgacactagtgaaagcagtgctgctgaatttgatgataggcggggagttatgatttttatcagctgcgaagaagccacttgcagtgacaccagtgagagcatttcggaagaggaaccacaagaaaatcaaaagaaacttttgcccttatcagtaacacctgaggctttttctggaactgttatagaaaaagaatttgtatcaccttccttaacaccacccccagccattgctcatcccgcactacccactattccagaacgaaaggaagttctgttggaagcatctgaagaaactggaaagagggtttcaaagtttaaagctgccagattgcaacagaaagactaggccctgtctaggaaatgggaatttacatcctagaacctagttgtacatttgtaaagagtatctatagca

SEQ ID NO: 47144 - DNA, 996 bp, Homo Sapiens
gcaggctccggctgcggctccagcccgcgatgccccattccgtgaccctgcgcgggccttcgccctggggcttccgcctggtgggcggccgggacttcagcgcgcccctcaccatctcacgggtccatgctggcagcaaggctgcattggctgccctgtgcccaggagacctgatccaggccatcaatggtgagagcacagagctcatgacacacctggaggcacagaaccgcatcaagggctgccacgatcacctcacactgtctgtgagcaggcctgagggcaggagctggcccagtgcccctgatgacagcaaggctcaggcacacaggatccacatcgatcctgagatccaggacggcagcccaacaaccagcaggcggccctcaggcaccgggactgggccagaagatggcagaccaagcctgggatctccatatggacaaccccctcgctttccagtccctcacaatggcagcagcgaggcaccctgccagcccagatgagcaccctgcatgtgtctccaccccccagcgctgacccagccagaggcctcccgcggagccgggactgcagagtcgacctgggctccgaggtgtacaggatgctgcgggagccgtgcgagcccgtggccgcggagcccaagcagtcaggctccttcccgtacttgcagggcatgctagaggccggcgagggcggggcaccatccgtcaaggcacgggacaagctctaccatcccgagtgcttccatgtgcagtgattgcgggctgaacctcaagcagggtggtacttctttctggacgagcggtctactgtgagaagccacgccaaggcgcgccgtgaaaccgccgaggctagcacgtggtggcggtgttacccaagccaaggtggactcgtcttactgggaccctgtccacctggtctaaggtccctgtcgcgtgtaattttttcacctgtccttataatcctgttccttaaaaaacaaaaaaaaatcgg

SEQ ID NO: 47145 - DNA, 743 bp, Homo Sapiens
aaaatgaagccatcacatcctttgaaggaaaaaccaaccaagttatgtccagcatgaaacaaatggaagaaaggttgcagcactcggagcgggcgaggcagggggctgaggagcggagccacaagctgcagcaggagctgggcgggaggatcggcgccctgcagctgcagctctcccagctgcacgagcaatgctcaagcctggagaaagaattgaaatcagaaaaagagcaaagacaggctcttcagcgcgaattacagcacgagaaagacacttcctctctactcaggatggagctgcaacaagtggaaggactgaaaaaggagttgcgggagcttcaggacgagaaggcagagctgcagaagatctgcgaggagcaggaacaagccctccaggaaatgggcctgcacctcagccagtccaagctgaagatggaagatataaaagaagtgaaccaggcactgaagggccacgcctggctgaaagatgacgaagcgacacactgtaggcagtgtgagaaggagttctccatttcccggagaaagcaccactgccggaactgtggccacatcttctgcaacacctgctccagcaacgagctagccctgccctcctaccccaagccggtgcgagtgtgcgacagctgccacaccctgctcctgcagcgctgctcctccacggcctcctgaacgtccgtcctcaggagcacagcctcacggacagtgccaaaccctgtgggtctc

SEQ ID NO: 47146 - DNA, 764 bp, Homo Sapiens
  misc_feature (656)..(656): n is a, c, g, or t
  misc_feature (711)..(711): n is a, c, g, or t
cacgaggccagaaaagtacctcatgcctttgacttctctggaacaccccagtccctaagcccaaataaatcacaggtgctgcttcgccctgagaaagccctctgaggggccacctttcaaagcctcagccgcctcccctgtggaatggagtccatgtgctccccagggctggtcaagaatcagggctttggcccgcacggagaagggcttcctcaggcctgtgggacgcagtgcccgctgtccatcaccttctgtctctccacaaggatcagcgtcaacaagtgtcttagtctcactcagatttggcccttcttccgcgcctgccagttcagctagcacttcggccagtgtctcaggcagggtctagggttgcaggcaccagaagctcgctctgcttacttcagccaaagggaactgattgaaagtgggagtgtgcctgagtgagcagatgctggagaccgcctggaggccccagggcagcctgcagaggccaagaggtggagcacggagctaggatgcagaaatcccggctgcggccagacggggaaagagccccttgatgacagtcctgtgaggccccatctgatggagaaacagtgcctcactaggaaacaggtgctatgagggacaatggatgtggccagaacgcagctacncactcatcaggggcttagacagaaagtggattctagaatgtcttttcttcttcanggccacgcctggctgaaagatgacgaagcgacacactgtaggcagtgtgagaa

SEQ ID NO: 47147 - DNA, 567 bp, Homo Sapiens
gcgttcctcaagtgtgcccgcactatcctcaacaagattgactcaggcgagctagacccggagaggatgggctctggcattcagtacggggatgcgtccctccgccagcttcggcagcctcggagtgcccaggccgtggcccctcagccgtgtggctgctgagctctgtggagccagctcacctgttctccaggaccagccctgctggggcccaggcccaggctctgagaggccgtgtcctaacctgccctggccccggagaagctacgttgccacctgtcccccttccctggcctggtggggcctggctttggggcaagactgagccacgggggaagggggaatcccgtacctgctgctgcttcctctgtcttggctaacgtctgtccccctgaacccctaaccataccccaagagctcccaaagcctgagaccagggtcatttgtccccaactccccatctggccctgctgttgctagtacctgttatttattacctggaggcctgtccagcacccaccctacccccataaagcattgtttacacctgaaaaaaaaaaaaaaaaa

SEQ ID NO: 47148 - DNA, 635 bp, Homo Sapiens
ttatggccgggcttgggaaaaaatagaagaaacccagttcccttcccagaagagagtatagttccagctgctaaaccatgccacagacgtgtactctgtttcgacagcactactgctcctgtggcaaatacgcaggggccaaaccataaggtggtgtcccaaaacaaagaaaggaatgcagtctcttttcctaatcttgactcacccaatgtgtcctccaccttaaaacccccttctaataatgctatcaaaagagagaaagagaagcctcctctgcctaagattttatctaaatcggaaagtgccattagccggcataccaccataagagaaactcaatcagaaaagaaagtttcaccaacagaaattgtgcttgaatctttccataaagcaacagctaataaggagaatgaattatgcagcgatgtagaaagacagaaaaatccagaaaattcaaaactatctattgggcagcaaaatgggggtttgcaaagtgagaaatctatagcttcactgcaagaaatgaccaaaaaacaaggcacatcttcaaacaataaaaatgtactttcagtaggtacagctgtgaaggatctaaaacaagaacaaactaaatccgccagttctttgattaccac

SEQ ID NO: 47149 - DNA, 719 bp, Homo Sapiens
cccacgcgtccgagaacagccgggtgcacaggagctgagcttggcacctcacccagaagtgagccagagtgtggcccctaaaggagcaggagagagtggggaagaggatcctttcccgtccagagaccctaggagcctgggcccaatggtcccaagcctattgacagggatcacactggggcctcccagaatggaaagtcccagtggtccccacaggaggctcgggagcccacaagccattgaggaggctgccagctcctcctcagcaggccccaacctaggtcagtctggagccacagaccccatccctcctgaaggttgctggaaggcccagcacctccacacccaggcactaacagcactttctcccagcacttcgggactcacccccaccagcagttgctctcctcccagctccacctctgggaagctgagcatgtggtcctggaaatcccttattgagggcccagacagggcatccccaagcagaaaggcaaccatggcaggtgggctagccaacctccaggatttggaaaacacaactccagcccagcctaagaacctgtctcccagggagcaggggaagacacagccacctagtgcccccagactggcccatccatcttatgaggatcccagccagggctggctatgggagtctgagtgtgcacaagcagtgaaagaggatccagccctgagcatcacccaagtgcctgatg

SEQ ID NO: 47150 - DNA, 533 bp, Homo Sapiens
ttttttttttttttttttccaattcctgaatctgctttatttctctgcataaggaaccctgaacaggcaattcaaattaaaacaaaataaatatatgaatattcatgtaaaactgtcctttctaatgaacaattatacacaatgtacaatttcatgttcactgggtggatttacaaaaatgtaccattcccatcaaccaaccacacctagcattcctgcacatctgtacccacgccttcttcaaagccatactatttatgtgctccgggtccatcatccacaaccttaacaatgaacaagatattcgaaaaataggaggactactcaaaaccatacctctcacttcaacctccctcaccattggcagcctagcattagcaggaatacctttcctcacaggtttctactccaaagaccacatcatcgaaaccgcaaacatatcatacacaaacgcctgagccctatctattactctcatcgctacctccctgacaagcgcctatagcactcgaataatccttctcaccctaaca

SEQ ID NO: 47151 - DNA, 784 bp, Homo Sapiens
ctggtgagcgttacgtgtacaagtttgtgtgtgagcccgaggccctcttctctttggccttcccggacaatcagcgtccagctctcaaggctgagtttgaccggcctgtcagtgaggaggacacagtccctttgtcccacttggatgagagccccgcctacctcccagagctggctggccccgcccagccatttggccccaagggtggctactcttactagcccccagcggctgttccccctgccgcaggtgggtgctgccctgtgtacatataaatgaatctggtgttggggaaaccttcatctgaaacccacagatgtctctggggcagatccccactgtcctaccagttgccctagcccagactctgagctgctcaccggagtcattgggaaggaaaagtggagaaatggcaagtctagagtctcagaaactcccctgggggtttcacctgggccctggaggaattcagctcagcttcttcctaggtccaagccccccacaccttttccccaaccacagagaacaagagtttgttctgttctgggggacagagaaggcgcttcccaacttcatactggcaggagggtgaggaggttcactgagctccccagatctcccactgcggggagacagaagcctggactctgccccacgctgtggccctggagggtcccggtttgtcagttcttggtgctctgtgttcccagaggcaggcggaggttgaagaaaggaacctgggatgaggggtgctgggtataagcagagagggatgggttcctgc

SEQ ID NO: 47152 - DNA, 761 bp, Homo Sapiens
tccgaggaaaggaagatgcactggtcaccaagaacctggtccctggggaatcagtttatggagagaagagagtctcgatttcggaaggagatgacaaaattgagtaccgagcctggaaccccttccgctccaagctagcagcagcaatcctgggtggtgtggaccagatccacatcaaaccgggggctaaggttctctacctcggggctgcctcgggcaccacggtctcccatgtctctgacatcgttggtccggatggtctagtctatgcagtcgagttctcccaccgctctggccgtgacctcattaacttggccaagaagaggaccaacatcattcctgtgatcgaggatgctcgacacccacacaaataccgcatgctcatcgcaatggtggatgtgatctttgctgatgtggcccagccagaccagacccggattgtggccctgaatgcccacaccttcctgcgtaatggaggacactttgtgatttccattaaggccaactgcattgactccacagcctcagccgaggccgtgtttgcctccgaagtgaaaaagatgcaacaggagaacatgaagccgcaggagcagttgacccttgagccatatgaaagagaccatgccgtggtcgtgggagtgtacaggccaccccccaaggtgaagaactgaagttcagcgctgtcaggattgcgagagatgtgtgttgatactgttgcacgtgtgtttttctattaaaagactcatccgtcaaaaaaaaaa

SEQ ID NO: 47153 - DNA, 927 bp, Homo Sapiens
ctatattcaatcgtgctaagctcctcaatgttggctttcaagaagccttgaaggactatgactacacctgctttgtgtttagtgacgtggacctcattccaatgaatgaccataatgcgtacaggtgtttttcacagccacggcacatttccgttgcaatggataagtttggattcagcctaccttatgttcagtattttggaggtgtctctgctctaagtaaacaacagtttctaaccatcaatggatttcctaataattattggggctggggaggagaagatgatgacatttttaacagattagtttttagaggcatgtctatatctcgcccaaatgctgtggtcgggaggtgtcgcatgatccgccactcaagagacaagaaaaatgaacccaatcctcagaggtttgaccgaattgcacacacaaaggagacaatgctctctgatggtttgaactcactcacctaccaggtgctggatgtacagagatacccattgtatacccaaatcacagtggacatcgggacaccgagctagcgttttggtacacggataagagacctgaaattagccagggacctctgctgtgtgtctctgccaatctgctgggctggtccctctcatttttaccagtctgagtgacaggtccccttcgctcatcattcagatggctttccagatgaccaggacgagtgggatattttgcccccaacttggctcggcatgtgaattcttagctctgcaagtgtttatgcctttgcgggtttcttgatgtgttcgcagtgtcacccagagtcagaactgtacacatccccaaattgggtgggccgtggaacacattcccggggataagaattgcctaaattgtccgtgaaaaataggttagaaattttttccttttaaattaaggggtttttctttaata

SEQ ID NO: 47154 - DNA, 986 bp, Homo Sapiens
gaaatactttctgagagtcctggacctcctgtgcaagaacatgaaacatctgtggttcttccttctcctggtggcagctcccagatgggtcctgtcccaggtgcagctgcaggagtcgggcccaggactggtgaagccttcggagaccctgtccctcacctgcactgtctctggtggctccatcagtagttactactggagctggatccggcagcccccagggaagggactggagtggattgggtatatctattacagtgggagcaccaactacaacccctccctcaagagtcgagtcaccatatcagtagacacgtccaagaaccagttctccctgaagctgagctctgtgaccgctgcggacacggccgtgtattactgtgcgagagacacagtgaggggagacgtgtcgtctttataagaagaggaagagacaccagagacctctcacttttcacgtgcaggcagagaagaggccatgtggagacgtaatgctctagaaggtggcccagtgcaagccaggaagaagcctcaccaagaaccaaccctgccagaacattgatcttcaacattcagactgcagaattttaagaaaatcaatatttgttgtttaagccacccactcctgttgtcttcttatgaagatccagacagactaataccacataactctgttagcgctgtcccctggatgcagaatcagcccgctggggctgggcacatctctcagatttccacataaagtaggcaaaaaatagtagttctgatataaaaatttgtcatgtccctgttggccaatttctgggcaaggtcttttaaagaagccctgggggctttgtcacaaaagttgccttttatcatttattaggacataactgatgaacaatgagtaccagttggatggagactgaccactgaccatcttctgctgtctcctaagtatgccacagaaaaccacaccaacattactctatgtyttyaacttt

SEQ ID NO: 47155 - DNA, 868 bp, Homo Sapiens
  misc_feature (633)..(633): n is a, c, g, or t
agcgggtctaaggcagtaacacgcaaagtttcaatgatgttatctaagggccggagctcagaggaatgggctctgaagactctcccagcactccctcagcataaggatgaaaagaggtgtccagtgtgaggtgcagctggtggagtccgggggaggcttagttcagcctggggggtccctgagactctcctgtgcagcctctggattcaccttcagtagctactggatgcactgggtccgccaagctccagggaaggggctggtgtgggtctcacgtattaatagtgatgggagtagcacaagctacgcggactccgtgaagggccgattcaccatctccagagacaacgccaagaacacgctgtatctgcaaatgaacagtctgagagccgaggacacggctgtgtattactgtgcaagagacacagtgaggggaagtcaatgtgagcccagacacaaacctcgctgcaggggcatctgagaccacgagggggtgtcctgggccctgtgaactgggctgctctccgtggcagcggctggtggtgctaaaggctgattttctctcagcatctggggctgattcatcaagtttcctcagagaacctttcagatttacaattctgtacttacgtntaatgtctctgaatgtgacactttccttccctggtgtgtcttgttttgtgacaagaggacacattctcacctccacagaagcccgaagtgtcactttggggaccgaatgaccctgcctggtcaccagtatcagagtcccgaggaagccagaggactgggaaagggtttcaatccgaatctcgcaagcgttccggggaaactctgatgggaacaggctgggaatcgacttgggcca

SEQ ID NO: 47156 - DNA, 448 bp, Homo Sapiens
cacgaggggaaccatggaagccccagcgcagcttctcttcctcctgctactctggctcccagataccactggagaaatagtgatgacgcagtctccagccaccctgtctgtgtctccaggggaaagagccaccctctcctgcagggccagtcagagtgttcgcagcaacttagcctggtaccagcagaaacctggccaggctcccaggctcctcatctatggtgcatccaccagggccactggtatcccagccaggttcagtggcagtgggtctgggacagagttcactctcaccatcagcagcctgcagtctgaagattttgcagtttattactgtcagcagtataataactggcctcggagttttggccaggggaccaagctggagatcaaacgaactgtggctgcaccatccgtcttcatcttcccgccatctgatgagcagttt

SEQ ID NO: 47157 - DNA, 886 bp, Homo Sapiens
  misc_feature (886)..(886): n is a, c, g, or t
ggacacagcatggacatgagggtccccgctcagctcctggggctcctgctgctctggttcccaggtgccaggtgtgacatccagatgacccagtctccatcctccctgtctgcatctgtaggagacagagtcaccatcacttgccgggcaagtcagggcattagaaatgatttaggctggtatcagcagaaaccagggaaagcccctaagcgcctgatctatgctgcatccagtttgcaaagtggggtcccatcaaggttcagcggcagtggatctgggacagaattcactctcacaatcagcagcctgcagcctgaagattttgcaacttattactgtctacagcataatagttacccgtacacttttggcctggggaccaagctggagatcaaacgaactgtggctgcaccatctgtcttcatcttcccgccatctgatgagcagttgaaatctggaactgcctctgttgtgtgcctgctgaataacttctatcccagagaggccaaagtacagtggaaggtggataacgccctccaatcgggtaactcccaggagagtgtcacagagcaggacagcaaggacagcacctacagcctcagcagcaccctgacgctgagcaaagcagactacgagaaacacaaagtctacgcctgcgaagtcacccatcagtggcctgagctcgcccgtcacaaagagcttcaacaggggagagtgttagaggggggaaattgcccccacctgctcctcagttccaagcctggaccccttccatcctttgggctctgacccttttccccaggggacctaccctattgcggcctcagctcatcttcacctacccctctcctccttggtttattatgctatgtggaggagatgatcn

SEQ ID NO: 47158 - DNA, 783 bp, Homo Sapiens
cgcgtccggctctccaagatggtctctgaagcaaaactgagggcagatgaggcaaaacaaagtgctgaagacattctgttgaagacaaatgctaccaaagaaaaaatggacaagagcaatgaggagctgagaaatctaatcaagcaaatcagaaactttttgacccaggatagtgctgatttggacagcattgaagcagttgctaatgaagtattgaaaatggagatgcctagcaccccacagcagttacagaacttgacagaagatatacgtgaacgagttgaaagcctttctcaagtagaggttattcttcagcatagtgctgctgacattgccagagctgagatgttgttagaagaagctaaaagagcaagcaaaagtgcaacagatgttaaagtcactgcagatatggtaaaggaagctctggaagaagcagaaaaggcccaggtcgcagcagagaaggcaattaaacaagcagatgaagacattcaaggaacccagaacctgctaacttcgattgagtctgaaacagcagcttctgaggaaaccttgttcaacgcgtcccagcgcatcagcgagttagagaggaatgtggaagaacttaagcggaaagctgcccaaaactccggggaggcagaatatattgaaaaagtagtatatactgtgaagcaaagtgcagaagatgttaagaagactttagatggtgaacttgatgaaaagtataaaaaagtagaaaatttaattgccaaaaaaactgaagagtcagctgatgccagaaggaaa

SEQ ID NO: 47159 - DNA, 567 bp, Homo Sapiens
agtggatctctgtgcccatgggaggccatggagaagtgtaaagatgcaggattggccaagtccatcggggtgtccaacttcaaccacaggctgctggagatgatcctcaacaagccagggctcaagtacaagcctgtctgcaaccaggtggaatgtcatccttacttcaaccagagaaaactgctggatttctgcaagtcaaaagacattgttctggttgcctatagtgctctgggatcccatcgagaagaaccatgggtggacccgaactccccggtgctcttggaggacccagtcctttgtgccttggcaaaaaagcacaagcgaaccccagccctgattgccctgcgctaccagctgcagcgtggggttgtggtcctggccaagagctacaatgagcagcgcatcagacagaacgtgcaggtgtttgaattccagttgacttcagaggagatgaaagccatagatggcctaaacagaaatgtgcgatatttgacccttgatatttttgctggcccccctaattatccattttctgatgaatattaacatggagggcattgcatg

SEQ ID NO: 47160 - DNA, 649 bp, Homo Sapiens
gagacaactggcgttgtgtccaccccccttattaggaacggtgactggaccttccagatcctggtgatgctggaaatgactccccagcgtggagacgtctacacctgccacgtggagcaccccagcctccagaaccccatcatcgtggagtggcgggctcagtctgaatctgcccagagcaagatgctgagtggcattggaggcttcgtgctggggctgatcttcctcgggctgggccttattatccatcacaggagtcagaaagggctcctgcactgactcctgagactattttaactgggattggttatcacttttctgtaacgcctgcttgtccctgcccagaattcccagctgcctgtgtcagcctgtccccctgagatcagagtcctacagtggctgtcacgcagccaccaggtcatctcctttcatccccacctcgaggctgatggctgtgaccctgcttcctgcacttacccagagcctctgcctgtgcacggccagctgcgtctactgaggccccaaggggtttctgtttctattctctcctcagactgctcaagagaagcacatgaaaaccattacctgactttagagcttttttacataattaaacatgatcctgagttacaaaaagactaaaaagaac

SEQ ID NO: 47161 - DNA, 1853 bp, Homo Sapiens
acagcatagaggctgaggctggggccaggacccagacagagacacacggtcactgcagctgaagccgctgcccctgctacagatgaagaaaaggaggctgggagagccaaggatcacgcagcaaggaagaaacagacccaggtgcagactcaggcaccaccaggaccagctgatcattccagcccacagcaatggagccacatgactcctcccacatggactctgagttccgatacactctcttcccgattgtttacagcatcatctttgtgctcggggtcattgctaatggctacgtgctgtgggtctttgcccgcctgtacccttgcaagaaattcaatgagataaagatcttcatggtgaacctcaccatggcggacatgctcttcttgatcaccctgccactttggattgtctactaccaaaaccagggcaactggatactccccaaattcctgtgcaacgtggctggctgccttttcttcatcaacacctactgctctgtggccttcctgggcgtcatcacttataaccgcttccaggcagtaactcggcccatcaagactgctcaggccaacacccgcaagcgtggcatctctttgtccttggtcatctgggtggccattgtgggagctgcatcctacttcctcatcctggactccaccaacacagtgcccgacagtgctggctcaggcaacgtcactcgctgctttgagcattacgagaagggcagcgtgccagtcctcatcatccacatcttcatcgtgttcagcttcttcctggtcttcctcatcatcctcttctgcaacctggtcatcatccgtaccttgctcatgcagccggtgcagcagcagcgcaacgctgaagtcaagcgccgggcgctgtggatggtgtgcacggtcttggcggtgttcatcatctgcttcgtgccccaccacgtggtgcagctgccctggacccttgctgagctgggcttccaggacagcaaattccaccaggccattaatgatgcacatcaggtcaccctctgcctccttagcaccaactgtgtcttagaccctgttatctactgtttcctcaccaagaagttccgcaagcacctcaccgaaaagttctacagcatgcgcagtagccggaaatgctcccgggccaccacggatacggtcactgaagtggttgtgccattcaaccagatccctggcaattccctcaaaaattagtccctgcttccaggcctgaagtcttctcctccatgaacatcatggactgagctgggggaagaagggatatctactgtggtctgggcaccacctctgtgggcactggtgggccattagatttggaggctacctcacctgggcagggatgatggcagagccaggctgttggaaaatccagaactcaaatgagccccttcatccgcctgtgggcgcatactacagtaactgtgactgatgactttatcctgagtcccttaatcttatggggccggaaggaatgtcagggccaggtgcagaccttgggggaagactttaaaccacctagttctccccgatggggcatcggtctaaagctttgggggagtgggcgcagtggctcacacctgtaatcccagcactttgggaggccgaggtgggcagatcatgggtcaagagatcgagaccatcctggccaacattgtaaaaccccatctctactaaaacatacaaaaattagccgggcatggtggcacacgcctgtagtcccagctactcaggaggctgaggcaggagaatcgcttgaacctgggaggcagaggttgcagtgaacctagattgcaccattgcactctagcctggcaacagagcgagatc

SEQ ID NO: 47162 - DNA, 774 bp, Homo Sapiens
ctggcaccaggccccggacacccgctctgctgcaggagaatggctactcatcacacgctgtggatgggactggccctgctgggggtgctgggcgacctgcaggcagcaccggaggcccaggtctccgtgcagcccaacttccagcaggacaagttcctggggcgctggttcagcgcgggcctcgcctccaactcgagctggctccgggagaagaaggcggcgttgtccatgtgcaagtctgtggtggcccctgccacggatggtggcctcaacctgacctccaccttcctcaggaaaaaccagtgtgagacccgaaccatgctgctgcagcccgcggggtccctcggctcctacagctaccggagtccccactggggcagcacctactccgtgtcagtggtggagaccgactacgaccagtacgcgctgctgtacagccagggcagcaagggccctggcgaggacttccgcatggccaccctctacagccgaacccagacccccagggctgagttaaaggagaaattcaccgccttctgcaaggcccagggcttcacagaggataccattgtcttcctgccccaaaccgataagtgcatgacggaacaataggactccccagggctgaagctgggatcccggccagccaggtgacccccacgctctggatgtctctgctctgttccttccccgagccctgccccggctccccgccaaagcacccctgcccactcgggcttcatcctgcacaataaactccggaagcaagtyagt

SEQ ID NO: 47163 - DNA, 710 bp, Homo Sapiens
ccggttcttttagtcaggaggatcactcctgtggcctaagaaaatgaccaaggctataaatatccaacctcaaatctcaacaaagcaatttccaggttttaccttatatgcacatgtgaggcattccattttatttgtaaatgttggtggcattggatattcctctgtttccttctaatttcagtatggttttaataatgttggggtttaatggtctaacagtaatataatacatgttaatctcagtcatgtaagaaatgtcacatttatttaattcaaatcctactctggaccctattcttgctttggtgggaaatgtggcctaagtaattattggaggaccctctgcttctttggaatctctgaagtattaggaggccaatctggtatggggaaaatgaaggaggccctctctccttcagttcatcacggctgctgctaacccattcctgtcccagctgatagggtatctgagaagatgggtgattcttctccctccaagccaagcttgacaagactagaagctgtgaggtatctgatatggcctttgtagatgaacaattgagccatacccttgagttttctcacctccccaatgtattgccatgaggataaagacaggtccctattggtcatgacatcccttgctgcctcacccctgaacagagagagcctaaagtcctacctactttcttggaaaaaaaaaaaaa

SEQ ID NO: 47164 - DNA, 728 bp, Homo Sapiens
cctcatcctacacaaggactacagcgctgacacgcttgctcaccacaacgacattgccttgctgaagatccgttccaaggagggcaggtgtgcgcagccatcccggactatacagaccatctgcctgccctcgatgtataacgatccccagtttggcacaagctgtgagatcactggctttggaaaagagaattctaccgactatctctatccggagcagctgaaaatgactgttgtgaagctgatttcccaccgggagtgtcagcagccccactactacggctctgaagtcaccaccaaaatgctgtgtgctgctgacccacagtggaaaacagattcctgccagggagactcagggggacccctcgtctgttccctccaaggccgcatgactttgactggaattgtgagctggggccgtggatgtgccctgaaggacaagccaggcgtctacacgagagtctcacacttcttaccctggatccgcagtcacaccaaggaagagaatggcctggccctctgagggtccccagggaggaaacgggcaccacccgctttcttgctggttgtcatttttgcagtagagtcatctccatcagctgtaagaagagactgggaagataggctctgcacagatggatttgcctgtgccacccaccagggtgaacgacaatagctttaccctcaggcataggcctgggtgctggctgcccagacccctctggcca

SEQ ID NO: 47165 - DNA, 950 bp, Homo Sapiens
cctggctacagtgctatctataacgccatgtctgtagtatcgtatcctgatcgagctgtacactaggatctcaaaatatttacatatagccaaaattaacttatgctcatatattaggatgtgagaatatcatctgtttatggacacatgaaacctcctaatgacctggaattgtagaatatttgactttttatatgcaaagtttttcaagccaagtggtttgtctaatatttaaacatgtactggcacaatttgtgatgaaaatattagcacatttgcaataatgtttctccataacagagaatgttaatggataccagaattttattttgtatttatgttcatagtacttttcctcttgtctactccagacagttattccataaagcatttgtataattaaaaggaaacacagaaaaaggaaaagtaggcaaatgtgaaaatagtttcaatatatcttatgatttcttaatgtaaaatgtttgttgaagtatatggctatcatgactaagtgctagaatttatagttacaggcggtgtccttttaaatgtggacaggctttaaaatattttaaaactggacctgtattatcctgaatacactattttggaaaattttttacaaaataccaaatgaaattaagtaaagaggacaccatagcagacaagataaagaggcaagaaattgtccacgatcaaaaagagactatatacgacagtgagaaagagggtagcctataagatagcaaacggagggtgacaacaatctattaatgaacaatatttaacagagggagcacaaatagcaggataaaacaacgggtgagaataaaaaagtggagtagaaaaagagattagtagtacgagagaaaataggggtggaaaacccacagtaatagaacaagagataatgatgaatgtgaaacatatgtaaacgtattgtttatacg

SEQ ID NO: 47166 - DNA, 750 bp, Homo Sapiens
gtgaaggagcggctgtggagggctgacaaggagcaggcctgagcgaggccggcccagcacagcaagcagcaggaccgctgcccagtcctcaggcccggaggggcaggcctagcttctcccagaactcccggacagccaggacagcctcgtggctgggcaggagcctggggccgcttgtgagtcaggccagagcgagaggacagtatctgtggggctggccccttttctccctctgagactcacgtcccccagggcaagtgcttgtggaggagagcaagtctcaagagcgcagtatttggataatcagggtctcctccctggaggccagctctgccccaggggctgagctgccaccagaggtcctgggaccctcactttagttcttggtatttatttttctccatctcccacctccttcatccagataacttatacattcccaagaaagttcagcccagatggaaggtgttcagggaaaggtgggctgccttttccccttgtccttatttagcgatgccgccgggcatttaacacccacctggacttcagcagagtggtccggggcgaaccagccatgggacggtcacccagcagtgccgggctgggctctgcggtgcggtccacgggagagcaggcctccagctggaaaggccaggcctggagcttgcctcttcagtatttgtggcagttttagttttttgtttttttttttttatcaaaaaacatttttttaaaaaaaagctttgaaaa

SEQ ID NO: 47167 - DNA, 635 bp, Homo Sapiens
gcacatcgcaagatgaacagttgttaataaaagctgttgctggaaacttgctttaggaacagctcaagaaccttggagttcatatttcacaaatattaataaatataagtccaagagctgtcagcctaatctgtaggagcagaacctctgattgaccaaaaggcatatgggtttaggttggttttttgatgtcatatgtctctgatggggctgcaagtgctacctcgcgcttgtacactgctgctgtggggctccgcgcctgccggtgaagagctgcagatgccgagaagccagcaaacacagggcccactggaaaaaaatagttttttcattagtatttctcgggaggacccaaaagttaaggtcagcttgttcactgtaatttctggaagaagttcactcagaccttcctgaattcagatcatctcagaagtctggagggaaatctggcgaaaccttcgtttgagggactgatgtgagtgtatgtccacctcactggtggcaccgagaaacttacttccttgtattaagtgcacttcttgtatttctaataagatgactttccagaaagtgagatttgttatgttctggcttttaaaaggtaaaatataaataaatttcataacttaatctaa

SEQ ID NO: 47168 - DNA, 574 bp, Homo Sapiens
cactggactccatactgcacgcccttatgtttttcttcctctcacacctggcggtcgtcgacatcgcctacgcctgcaacacggtgccccggatgctggtgaacctcctgcatccagccaagcccatctcctttgcgggccgcatgatgcagacctttctgttttccacttttgctgtcacagaatgtctcctcctggtggtgatgtcctatgatctgtacgtggccatctgccaccccctccgatatttggccatcatgacctggagagtctgcatcaccctcgcggtgacttcctggaccactggagtccttttatccttgattcatcttgtgttacttctacctttacccttctgtaggccccagaaaatttatcactttttttgtgaaatcttggctgttctcaaacttgcctgtgcagatacccacatcaatgagaacatggtcttggccggagcaatttctgggctggtgggacccttgtccacaattgtagtttcatatatgtgcatcctctgtgctatccttcagatccaatcaagggaagttcagaggaaagccttctgcacctg

SEQ ID NO: 47169 - DNA, 739 bp, Homo Sapiens
  misc_feature (1)..(1): n is a, c, g, or t
  misc_feature (608)..(608): n is a, c, g, or t
  misc_feature (625)..(625): n is a, c, g, or t
  misc_feature (654)..(654): n is a, c, g, or t
  misc_feature (723)..(723): n is a, c, g, or t
nttaggtcatccaacaccagtcttttatactcaggtggggccaatggcatctatgaggcaatctaccatgggatccctatggtgggcattccattgttttgggatcaacctgataacattgctcacatgaaggccaagggagcagctgttagactggacttccacacaatgtcgagtacagacctgctgaatgcactgaagacagtaattaatgatccttcatataaagagaatgttatgaaattatcaagaattcaacatgatcaaccagtaaagcccctggatcgagcagtcttctggattgaatttgtgatgtgccacaaaggagccaaacaccttcgagttgcagcccgcgacctcacctggttccagtaccactctttggatgtgattgggtttctgctggcctgtgtggcaactgtgatatttgtcgtcacaaagttttgtctgttttgtttctggaagtttgctagaaaagggaagaagggaaaaagagattagttatgtctgacatttgaagctggaaaaccagatagatgggttgacatcagtttattccagcaagaaagaaaagattgttatgcaagatttctttcttcctgtgacanaaaaaaaaacttttcanaatctaccttgtcaagtaaaaatttgttnttcagagatttaccaccccagtaatggttagaaatattctgtggcaatgaagaaacactagggaaatanaaataatataaagcca

SEQ ID NO: 47170 - DNA, 483 bp, Homo Sapiens
  misc_feature (481)..(481): n is a, c, g, or t
cccagaaaatttatcactttttttgtgaaatcttggctgttctcaaacttgcctgtgcagatacccacatcaatgagaacatggtcttggccggagcaatttctgggctggtgggacccttgtccacaattgtagtttcatatatgtgcatcctctgtgctatccttcagatccaatcaagggaagttcagaggaaagccttctgcacctgcttctcccacctctgtgtgattggactcttttatggcacagccattataatgtatgttggacccagatatgggaaccccaaggagcagaagaaatatctcctgctgtttcacagcctctttaatcccatgctcaatccccttatctgtagtcttaggaactcagaagtgaagaatactttgaagagagtgctgggagtagaaagggctttatgaaaaggattatggcattgtgactgacagtgacctaggaagttacatcattgagcggntc

SEQ ID NO: 47171 - DNA, 708 bp, Homo Sapiens
gtctgcaggaaactctggaatcaggaagaaaagctatgttcatactctaaatctggatattaaaattggaagagacttcaaagactgtcaagtggaaagctatcatttcctaaattaaggaacttaggtcaaagttaaatgaaaaagacctaaaaacagaaccaaagtcagcctctagatttcttaccctcaagtctcctgttagcatactgcctatacacacagacacaccctctgccacactgctctcttccttccagaagcttggttctactataagcaacagctccttcatgggctgagaaggggaaaccaggatctccccaaccaagggcctatacttttatttttcaactctattaactgaactatgcttggagagagccctgaatcctttaactttaatgccatcttaggcctggaagttagagtgagggaaatgagcttggcttctgggactgtgtcaagttgaattttctgtcatttaatttcagatcctagctcatcatcagtgaagtccagcctacttacttgtaactattaacctttctaaaagttttcatcgccttggtaaagctccagaaatggacaatgctagtgactgcacaatattgtgactgtacttaatgccactgaactgtacactttaaaatggaaaatttatatgtatttttaccacaataaacaaaaaaccctaaaaaaacttta

SEQ ID NO: 47172 - DNA, 639 bp, Homo Sapiens
tatgactccaagaccaagaacaatgacattgcgctgatgaagctgcagaagcctctgactttcaacgacctagtgcaaccagtgtgtctgcccaacccaggcatgatgctgcagccagaacagctctgctggatttccgggtggggggccaccgaggagaaagggaagacctcagaagtgctgaacgctgccaaggtgcttctcattgagacacagagatgcaacagcagatatgtctatgacaacctgatcacaccagccatgatctgtgccggcttcctgcaggggaacgtcgattcttgccagggtgacagtggagggcctctggtcacttcgaagaaaatatctggtggctgataggggatacaagctggggttctggctgtgccaaagcttacagaccaggagtgtacgggaatgtgatggtattcacggactggatttatcgacaaatgagggcagacggctaatccacatggtcttcgtccttgacgtcgttttacaagaaaacaatggggctggttttgcttccccgtgcatgatttactcttagagatgattcagaggtcacttcatttttattaaacagtgaacttgtctggctttggcactctctgccattctgtgcaggctgcagtg

SEQ ID NO: 47173 - DNA, 566 bp, Homo Sapiens
  misc_feature (566)..(566): n is a, c, g, or t
attagaatgttggtggttgtgtagtgcatttggggtgctacaacgttaatcaaatataattgagctgttctgtttccagtcagtgtaaccatttaaaaataccttggcaaaacaagctaggagctagttcatgctaatattcttaaggacaaaaatagtttacagcttttttttttttaatctgaaatcctgaaggctatgcttaaaagttagagataaacctgttggaaataagtgattcatttatagactgaagcctctatgacttcaaaaagatactcaacagtctctggcatttgaagaacaaaatattttctctgtaaatacacctcatttccattctagttaggagcaatggcgcccaggacggcacacagaatggagaaaactggatagctggtaactcatttagctcttggcactctaaaaaacctcaaatacagccatccaagccagtaattctattgctgcgttatttctgtgtttaactgtgaaacttgcttcttgtctgtacccttgaaatggaataaaatttcatgagactccttgttaaaaaaaaaaaaaan

SEQ ID NO: 47174 - DNA, 991 bp, Homo Sapiens
  misc_feature (829)..(829): n is a, c, g, or t
cagagaggaggaagctcctgccggctgagcgggcctggaggaagtgagcagcggggctcctgcctcccggcctggtccccgaagaccccagaagaacccggaacttgcttccattcggaatccagggaccaccctttgcactcagtaggcctttgttttcctgcgtggaaagcggttgggcttgggaggcgatggagccggagttcttgtacgacctgctgcagctccccaagggggtggagcccccagcggaggaggagctctcaaaaggaggaaagaagaaatacctgccacccacttcccggaaggaccccaaatttgaagaactgcagaaggtgttgatggagtggatcaatgccactcttctccccgagcacattgtggtccgcagcctggaggaggacatgttcgacgggctcatcctacaccacctattccagaggctggcggcgctcaagctggaagcagaggacatcaccctgacagccacaagccagaagcacaagctcacagtggtgctggaggccgtgaaccggagtctgcagctggaggagtggcaggccaagtggagcgtggagagcatcttcaacaaggacctgttgtctaccctgcacctccttgtggccctggccaagcgcttccagcccgacctctccctcccaaccaacgcccaggtggaggtcatcactatcgagagcaccaaaagtggtctgaagtcagagaagttggtggaacagctcactgaatacagcacagacaaggacgagcctccaaaggacgtctttgatgaattatttaagctggctccggagaaagtgaacgcakgganagaggccatcgtgaactttgtcaaccagaagctggaccgcctgggcctgtctgtgcagatctggacaccagtttgcagatggggtmtcttactcttgctgattggacacttgaaggcttcttctgcacttaaggawtctactcactccaactctctgcagaa

SEQ ID NO: 47175 - DNA, 575 bp, Homo Sapiens
gtcctcaagtttgcatgcagggtgcagaagaaagaccccaaggactgggctgtgcagtaccgcgaggcagtggagatggaagtccaagctgcagctgtggctgtggctgaggctgaagccagggctgagtggttccaacaccagcactggctttactggcgaacccagcaccagcacgggcttcagtagtggacccagttctattgttggcttcagcggtggaccaagcactggtgttggcttctgcagtggaccaagcaccagtggcttcagcggtggaccgagcacaggagctggcttcggcggtggaccaaacactggtgctggctttggtggtggaccgagcaccagtgctggctttggcagtggagccgccagtcttggtgcctgtggcttctcgtatggctagtgaggtttcagatttattccccatgtttacagataccgctaataaattgcagtagtccttcccatggagccaaagtacatccttggaatctttgtccacacagcagtcaaggcagttatggccaatcagctgagggtgtcatgtgatggaaaaatctgtttgctgt

SEQ ID NO: 47176 - DNA, 591 bp, Homo Sapiens
atggcggccgcctggccgtctggtccgtctgctccggaggccgtgacggccagactcgttggtgtcctgtggttcgtctcagtcactacaggaccctggggggctgttgccacctccgccgggggcgaggagtcgcttaagtgcgaggacctcaaagtgggacaatatatttgtaaagatccaaaaataaatgacgctacgcaagaaccagttaactgtacaaactacacagctcatgtttcctgttttccagcacccaacataacttgtaaggattccagtggcaatgaaacacattttactgggaacgaagttggttttttcaagcccatatcttgccgaaatgtaaatggctattcctacaaagtggcagtcgcattgtctctttttcttggatggttgggagcagatcgattttaccttggataccctgctttgggtttgttaaagttttgcactgtagggttttgtggaattgggagcctaattgatttcattcttatttcaatgcagattgttggaccttcagatggaagtagttacattatagattactatggaaccagacttacaagactgagtattactaat

SEQ ID NO: 47177 - DNA, 532 bp, Homo Sapiens
cccagtgacccagggacacgtggggtgtgctgctgctgctccccagcccaccagtgcctggccagcctgcccccttccctggacagggctgtggagatggctccggcggcttggggaaagccaaattgccaaaactcaagtcacctcagtaccatccaggaggctgggtattgtcctgcctctgccttttctgtctcagcgggcagtgcccagagcccacacccccccaagagccctcgatggacagcctcacccaccccacctgggcccagccaggagccccgcctggccatcagtatttattgcctccgtccgtgccgtccctgggccactggcctggcgcctgttcccccaggctctcagtgccaccacccccggcaggccttccctgacccagccaggaacaaacaagggaccaagtgcacacattgctgagagccgtctcctgtgcctcccccgccccatccccggtcttcgtgttgtgtctgccaggctcaggcagaggcgcctgtccctgcttcttttctgaccg

SEQ ID NO: 47178 - DNA, 837 bp, Homo Sapiens
ctgagagagagcggasctatttctagccactcctgttgacagtgcacctgaagggctgggatgcgtttttcttggtgttgcatgctcacaactctgctgacattgggaacttatgagagaggaagactcgggaaagcacagatactggacagatggattctggtgtggggaaagcacagatactggacagatggattctagtgtgacttgtgactgtgaggtttcctataacatatttataaatgttactcaggttaaaagtatttaagaatacagttaactaattgtaaatatgctgttaaccaaaagagctttccctccctcactttttcctttgtaaacactcatgactgcttctctgtctcgagtcatctctgcattaactccccttcgtggtcactagagggctctctgatgccttctaaaagaacaactgcttttttacaatgcccbccacccccaccccgcccatagagacagggtctcactatgtggcccaggctggtctcaaacttctggccttaagtgatgctcctgtccttggcctcccaaagtgctgggattacaggtgtgagccactgcacccagcccactttttttttactctgaagtgattccagtcatatgtgtgtgtaactgcatcctatgagaagagcacaaatattgctgttccatgttctccactttcattttccactacaaatgaaaagcaatttttgagactgaatctgttgctattttaaaggttattgtgggaaactgagctaaaggagttagcatctttatttttgtatcaaaaataaaggttattttgaaattattaggatttttaaaaaa

SEQ ID NO: 47179 - DNA, 769 bp, Homo Sapiens
  misc_feature (260)..(260): n is a, c, g, or t
ggatgaaaaggaggcagttgtgacaatccccagtgcttctgtgaacgtgaattttgttcagttgtccacaggagatccacataattcctagcactggtgaggggaatctgttgcccaggtcctgcaaaggagccatgtgccatggcatataagtcagtgtagactggtgccatttgttgtcagactataggtgtggaggtgaaattacaggttcaacagtaattgggacagaaactccaggtaaatggggagtggagaanactgcagtaaattagatggaatgactcttctaaaagttcatctacaaattttccagtgaatatggttgtgtaggatcattgcatacagaaattctcaggatcttctgtttactatcgctgagatcattatcagaaaatagtctggccgggcatggtgtaatcctaacactttgggaggccaaggcgggcggattgcctgagctcaggagttcaagaccagcctgggcaacatggtgaaatcccatgtctactaaaatacaaaaaattagccaggcgtggcagcatgcgcctatagtcccagccacttgggaggctgaggcaggagaatcgcttgaacccagaaggcggaagttgcagtgagctgagattgcaccactgcactccagcctgggtgacagagcgagactgcatctcaaaaaaaagaaatctatctatctatctatctatctatctatctatctatctatctatctatgtatatctatctatagtgtttaaaaaactgttta

SEQ ID NO: 47180 - DNA, 688 bp, Homo Sapiens
  misc_feature (623)..(623): n is a, c, g, or t
ttttttttttttttttttaggaggtagtgactgacaagataataaagcccaaagcattatgctgactaggaccattgaagttggcaaaaaaaaggccacaacaacagcaagaaggcccaggattttcaacagaaaagaaactgagaaattagatgaatccttcagggcccgaatcttgagtggcttcagtattctttgtttctgggtgaagatggcatttctggctccttcccattgcccaggcccaaccaggcgatactaataggagttgcagggtccgaaatagagtctcacagccagtttaggatctttgaacaagagagagcagaaatctggcttcgcacctatctctaaggcgagctcgtccaagtagtcaacataattggtctgcaacgtctggctctggctttctccaaacaggtcaattcttttttcattccttttgataatgtccatcatcatagttctctctgagggcaggctacacaagcctttgaaaactcttgtcacccaacgagcttgaagttcagcagttgggaaaatggaacctaggggctggatgagaccaatgcacgcgagggttgacttgtccaggtgagaactatgatgatggacattatcanaaagaaaaaaaaaaaaaaaaaagcctacagccgcggccgctccaacatcagcctcgtgccgaatt

SEQ ID NO: 47181 - DNA, 547 bp, Homo Sapiens
gtcctctttatcctggtgtttgccacttcgaacagtcactttcccacttggaacttacttgtggctttgctgacaaaacaggaaaaaaccaaatatggcatcttccatgaggagcttgttttctgaccacgggaaatatgttgaatctttccggaggtttctcaaccattccacggaacaccagtgcatgcaggaattcatggacaagaagctgccaggcataataggaagataccagaattgctgttaacaaataaaatactggccagatgtgttggttcacgcctgtaatcctagcacttcgggaggctgaggcgggaggattacttgagcctaggagtttgagaccagcctgggcaacatagcaagatcccatctctacaaaaaagtgaaaaagttagctgaacaaggcggcatgcacatgctactccagacgctgaagtgggaagatcacttaagtccgagagatcgaggcttcagtgagatatggctgagacactgctctcagcctggatgacagagtgagaacctgtctcaaacaagagaa

SEQ ID NO: 47182 - DNA, 741 bp, Homo Sapiens
  misc_feature (738)..(738): n is a, c, g, or t
caccagtggagactgtgggctgggcacacgggagggcactcggactggagctgagtgcaagcaaaccatgaagacccagagatgtaagatcccctgcaactggaagaagcaatttggcgcggagtgcaaataccagttccaggcctggggagaatgtgacctgaacacagccctgaagaccagaactggaagtctgaagcgagccctgcacaatgccgaatgccagaagactgtcaccatctccaagccctgtggcaaactgaccaagcccaaacctcaagcagaatctaagaagaagaaaaaggaaggcaagaaacaggagaagatgctggattaaaagatgtcacctgtggaacataaaaaggacatcagcaaacaggatcagttaactattgcatttatatgtaccgtaggctttgtattcaaaaattatctatagctaagtacacaataagcaaaaacaaaaagaaaagaaaatttttgtagtagcgttttttaaatgtatactatagtaccagtaggggcttataataaaggactgtaatcttatttaggaagttgacttatagtacatgataaatgatagacaattgaggtaagttttttgaaattatgtgacattttacattaaattttttttacattttttgggcagcaatttaaatgttatgactatgtaaactacttctcttggtaggtaatttttttcacctagatttttttcccaattgagaaaantat

SEQ ID NO: 47183 - DNA, 745 bp, Homo Sapiens
ccgaggtcacctgaagaaaaagcggccagaagaatgtgactgtcacaaaatcagctaccacacccagcacaaaggccgcctcaagcacagaggctccagtctgcatcctttcaggaagggcctgcaagagaaggacaaggtgtggctgttgcgggagcagaagcgcaagaagaaactccgcaagctgctcaagcgcctgcagaacaacgacacgtgcagcatgccaggcctcacgtgcttcacccacgacaaccagcactggcagacggcgcctttctggacactggggcctttctgtgcctgcaccagcgccaacaataacacgtactggtgcatgaggaccatcaatgagactcacaatttcctcttctgtgaatttgcaactggcttcctagagtactttgatctcaacacagacccctaccagctgatgaatgcagtgaacacactggacagggatgtcctcaaccagctacacgtacagctcatggagctgaggagctgcaagggttacaagcagtgtaacccccggactcgaaacatggacctgggacttaaagatggaggaagctatgagcaatacaggcagtttcagcgtcgaaagtggccagaaatgaagagaccttcttccaaatcactgggacaactgtgggaaggctgggaaggttaagaaacaacagaggtggacctccaaaaacatagaggcatcacctgactgcacaggcaatgaaaaaccatgtgggtg

SEQ ID NO: 47184 - DNA, 795 bp, Homo Sapiens
  misc_feature (754)..(754): n is a, c, g, or t
  misc_feature (763)..(763): n is a, c, g, or t
  misc_feature (771)..(771): n is a, c, g, or t
gttctgtggagcccagtgatgccttcatgttctcaggtctcaaacagattcgattacgtatcctccctggcacggagcaggaaatgctatataatttctatcctctgatggctggataccagcagctgccatctctcaacatcaacttgcttagatttcctaacttcacaaatcagctgctcaggcgttttatacctaccagtatttttgtcaagccacagggtcgactcatggatgatacctctattgctgctgcatgatgttcaagaccggcccttggctgttgttacagagatgttgggcagagctatgcaggtgtttcattgtgaactctagctttgatcatggtaaaaagttaaccttttctattttttaatggatgttataccaactattcagaggaactcatacttcaaaaatattaggaaaatctgtcttatagtttctctaataaatatctgaaatctcagtacgacatgaaagaatgtcagaccattgttattgttgaaagtcatttgatgaatggtaaattctatgaaaagtaagtgatttgcatgtataatatcaggaaaattaagcatcccaagtgtgactggacaaagagagcagatgcaccagtgcctgtgccataaagttccgaatcccccatgtgtctctttcagagctggccagaccggaaataaatcattctcataaattcagtgtgtactcagaacacatacacaacaacatagggagttgtatgactgatacngaaaacttncagaaagntttaatcaaagcagttaattaagg

SEQ ID NO: 47185 - DNA, 601 bp, Homo Sapiens
  misc_feature (513)..(513): n is a, c, g, or t
ggtaagtaagttgtgaaatttctgtaataacaaaggcagtccgcattcttccctttcccccaaattcctagggcaaaacttttttatggtgctgttaacatgggagtcacacaagccgcctgactttttctcattgccattagtaatgactgatggaaaacccagccaccactgtgatgcgaaatgatcagtctgttgcctgaaacagcccagtcctcttaactgaaacagcattctacttcttgttccaagatgagcctctgcaatattctggcaatttaatataccccctacaaaagcactccacagcttttacactattttgactttgagttataactagtattattcatgttttcataaaaagaagttagtgacccagagctataatcatccatcaagtcttccacaataattcccaactcataaattgctttcctaacaactagcaaaagctattgttcataatggcatttctaaagcttttgggcactgtgtaccaggatgaggaanagaagaaatgaggagcctgtcttttaatattccagtatttgtgtgtttcattttttttgacaacagtacatatatctatctctctagg

SEQ ID NO: 47186 - DNA, 600 bp, Homo Sapiens
  misc_feature (2)..(2): n is a, c, g, or t
  misc_feature (5)..(6): n is a, c, g, or t
  misc_feature (10)..(14): n is a, c, g, or t
  misc_feature (27)..(27): n is a, c, g, or t
  misc_feature (598)..(598): n is a, c, g, or t
gnagnnaggnnnnntttgatcctcggnctgttggcctctgggatgtaatgttgtcactaattaattgccattactcccagttagttacccttgtcatttggcattattttcagaaccacattttaaacctttgggtaatcagatttccaacttatgccttccagaaaaaaacactactgcctaacacaaatctgtgataacaacaggctgtgccttattttgataattttctgattccctagaagagaaccctctactttttgtaagcactactgactctcgctgtatttaagatgctggtgaagagcttttgctcttgcattagatttgaagatgtttacattgttgttattgttatgtatcacttgctaaaaatattgttttaatcagagataacctctttaaaaaaatttttaaagaactatggctatgaccaaagcttctattttgccaaaaagttaaataccgataaaatggccttaagtgtattcctgacagttaaattcagaaacgtgccaaatggaactcaaggtgccccttcagaattaaaatcattaccttgtgtgtgaaccttctacatcttcataggcctttcttnct

SEQ ID NO: 47187 - DNA, 544 bp, Homo Sapiens
agtttcaggagagtaagtgtttcccttgtccagctgaaggatgccccaaaatggggcactatgctgaccaatttaaggggaaaacaagtgctgtggaacaaacctttttcctgaacacaggagagagtggtaactttactagttggagatataaggtatcagtcacactttctggaaaagagaaagtgaatgggtacatcaggattgctttgtatggaagtaatgaaaactcaaaacaatatgagattttcaaaggatccctcaaaccagatgcaagtcacacgtgtgctattgatgtggattttaatgttggaaaaatacagaaagttaaattcctctggaacaaacgtgggataaatctatctgagcccaaactgggggcttcccaaatcacagtgcaaagtggtgaagatgggactgagtataatttttgtagcagcgacactgtggaagaaaacgtcttgcaatctctttacccttgttaaaaacgtggtgcggctattgcggtaataaaatctttaatgcaaaaaaaaaaaaaaaaaaa

SEQ ID NO: 47188 - DNA, 462 bp, Homo Sapiens
  misc_feature (355)..(355): n is a, c, g, or t
  misc_feature (358)..(358): n is a, c, g, or t
ctaaaaaagactatctctaatcaaggctagaaccaagggaaggctaagaattgcccagtactgtgcaactactgaaagccctacccaaggccaccagccttgtcttcctctttcctctgtcagttcaaaaagaacagaaacctccagctcttttacatagcaggtaccaggcatttatcagaagaggccaagcttctggttcccatgcagccctttgaatagtgtgtctaaacaaaaataggtgtccaagtagtcacactgagactttaactggtaacccaccctgtggccgtcagtcgcagtgctctggccaacactatagcagggcttattcttctccctcatgtgtagtganacnaaatgtaacaccttgggttcattcagttccattccctatgtctacctgtgtcaatataattccctgatttggaggcagctctcctcattttccccaaaacaggg

SEQ ID NO: 47189 - DNA, 644 bp, Homo Sapiens
  misc_feature (617)..(617): n is a, c, g, or t
gtcacaaacatgtggtttttctgtgtgctttcaaccaatcgtagatgtttttgctgttccattctgtgtagcaccattcaccacagcaggatagggagcctcgactctttctcggtaaccacggcagagagcagcgccgatgtgaagatgaatgaatgtaactcctggtgtgaagatgaatgtaaaccctggcgacagttgagacctttttcttttagactctgctaaaacagtgctctggcttgggcttacctcaagagggaagatagttgagttttatttcctgtatatcaggtgacctggtagagatgtaaagcaatttaccatagtttgggctttagtattgtaaaataaacatgagaacaaataatcagacatatactttaatgttaaaggtgctctatttttttggatgtacagtagttttatttccacagccacattaccatagcaataagaaaggaggcatagtacatagttggaaaagctttgtggggggattaaaaaaaaaaaaaagcactgttgtgtttaacactagttcagatgcagttaccttagagactttattatttgcaggaacaaatggtgccttgaatattaacagtgttctgattaanaactcaactcttagttcacttttggat

SEQ ID NO: 47190 - DNA, 568 bp, Homo Sapiens
gcacgagcaagcgtgggccattcatccacctgtcagtcaacaacacccgctgagcatcggcttgtatcaaaaggtccagacctaaggggaaattttatctctttctttctttctttcttttttttttgacacagagttttgctcttgttgcccaggctggagtgcaatgacacgatctcggttcactgcaacctctgcctcctgggttcaagcgattctcctgcctcagcctcccgagtagctgggattacaggcgcccgccatcacgcccgggtaatttttttgtattgttggtagagacggtgattcactatgttggccaggctagtcacgaactcctgacctcgtgatccgcccacctcggcctcccaaagtgctgggattacaggtgtgagccaccgtgcccggcctctttttatttattcctaaaatattaccttgaggccaaattctgcgcttaaggagaatgtgcaccaagtgctggggtgggggctggttataaacgaggccacaaatcatgcttgttaataaattgtgtggttcaaatctgaaaaaaaaaaaaaaaaaa

SEQ ID NO: 47191 - DNA, 506 bp, Homo Sapiens
tgaccaagcgtagtacccaatggacacagaagtcaccaaagccaagatcattggatttggttctgcacttcttgaagaagttgatcctaatcctgcgaatttcgtgggagctggaatcatccacacgaaaaccacccagattggatgcctgctgcgcttggagccgaacctgcaagcccagacgtaccggctcacgctgcgcacaagtaaggaagccgtttctcagagattatgtgaattgctctcagcgcagttttagtcctgaggatggaagaccaggctcgtgtgtcttgtgttgtcttcgtctgtgccgtttgtcttcgtggccatcctgcagatgagcaccgtgtccagtgccacagcacaaggcgcctccccgccccgccgccccacacctctcccctttgggctggacgggaacacacgtgtgtggctcaggaggaaaagctcagcctggactgtggcagccacggcagaaggtggatcttgggtactacgctttggca

SEQ ID NO: 47192 - DNA, 642 bp, Homo Sapiens
  misc_feature (603)..(603): n is a, c, g, or t
  misc_feature (623)..(623): n is a, c, g, or t
agatccgcaagctgctctcatcctcggaaaccaagcgtgctgcccgccggccctacaagcccatcgccctgcgccagagccaggccctgccgccgcggccaccgccacctgcgcccgtcaacgacgagcccatcgtcatcgaggactaggggccgcccccacctgcggccgccccccgcccctcgcccgcccacacggccccttcccagccagcccgccgcccgcccctcagtttggtagtgccccacctcccgccctcacctgcagagaaacgcgctccttggcggacactgggggaggagaggaagaagcgcggctaacttattccgagaatgccgaggagttgtcgtttttagctttgtgtttactttttggctggagcggagatgaggggccaccccgtgcccctgtgctgcggggccttttgcccggaggccgggccctaaggttttgttgtgttctgttgaaggtgccattttaaattttatttttattactttttttgtagatgaacttgagctctgtaacttacacctggaatgttaggatcgtgcggccgcggccggccgagctgcctggcggggttggcccttgtcttttcangtaattttcatattaaacanaaacaaagaaaaaaaatct

SEQ ID NO: 47193 - DNA, 959 bp, Homo Sapiens
  misc_feature (763)..(763): n is a, c, g, or t
  misc_feature (847)..(847): n is a, c, g, or t
  misc_feature (854)..(854): n is a, c, g, or t
  misc_feature (923)..(923): n is a, c, g, or t
  misc_feature (930)..(930): n is a, c, g, or t
agtaaaggtgagtacccagaacatgaagatgggtgggctgccgcgtacaacacctccaactcagaagccccctagtccccctatgtcagggaaagggacacttgggcggcactccccctatcgcacactggagccagtgcgtcctccagtggtaccaaatgattacgtacctagcccaacccgtaatatggctccctcgcagcagagccctgtgaggacagcttctgtgaatcaaagaaatcgaacttacagcagcagtgggagtagtggagggagccacccaagtagtcggagcagcagtcgagagaacagtggaagtggtagtgtgggggttcctattgctgttcctactccatctcctcccagtgtctttccaggtcatcctgtacagttctacagcatgaataggcctgcctctcgccatactcccccaacaatagggggctcgttgccctatagacgccctccttccattacttcacaaacaagccttcagaatcagatgaatggaggacctttttatagccagaatccagtttcagatacaccacctccaccgccacctgtggaagaaccagtctttgatgagtctcccccacctcctcctcctccagaagattacgaagaggaggaagctgctgtggttgagtatagtgatccttatgctgaagaggacccaccgtgggctccacgttcttacttggaaaaggttgtggcaatttatgactatacaaaagacaaggaagatgagctgtcctttcangaaggagccattatttatgtcatcaagaagaatgacgatggttggtatgagggagttatgaatggagtgactgggctttttccntgggaantacgtttgagtctatcatgcaattattctgaagtaaagctcagcaggggctgttgctggcctcacaggnaaatagntcagggttctttccccagattaatctgaa

SEQ ID NO: 47194 - DNA, 866 bp, Homo Sapiens
gttagtctgattataattgtgttctcactttctttgtagtttccctgctcctcctaaacaattggacatgggagatgaagtttacgatgatgtggatacctctgatttccctgtttcatcagcagagatgagtcaaggaactaattttggaaaagctaagacagaagaaaaggaccttaagaagctaaaaaagcaggaaaaagaagaaaaagacttcaggaaaaaatttaaatatgatggtgaaattagagtcctatattcaactaaagttacaacttccataacttctaaaaagtggggaaccagagatctacaggtaaaacctggtgaatctctagaagttatacaaaccacagatgacacaaaagttctctgcagaaatgaagaagggaaatatggttatgtccttcggagttacctagcggacaatgatggagagatctatgatgatattgctgatggctgcatctatgacaatgactagcactcaactttggtcattctgctgtgttcattaggtgccaatgtgaagtctggattttaattggcatgttattgggtatcaagaaaattaatgcacaaaaccacttattatcatttgttatgaaatcccaattatctttacaaagtgtttaaagtttgaacatagaaaatratctctctgcttaattgttatctcagaagactacattagtgagatgtragarttattaaatattccatttccgctttggctacaawttatgaagaagttgaaggtacttcttttagaccaccagtraatratcctccttcaaaarataaaaatraaaggaaaaaggaaatcmttcaggargaatgacyktctaararrvckagggagaata

SEQ ID NO: 47195 - DNA, 756 bp, Homo Sapiens
gttcttcgggccagggacacggctcaccgtgctagaggacctgaaaaacgtgttcccacccgaggtcgctgtgtttgagccatcagaagcagagatctcccacacccaaaaggccacactggtgtgcctggccacaggcttctaccccgaccacgtggagctgagctggtgggtgaatgggaaggaggtgcacagtggggtcagcacagacccgcagcccctcaaggagcagcccgccctcaatgactccagatactgcctgagcagccgcctgagggtctcggccaccttctggcagaacccccgcaaccacttccgctgtcaagtccagttctacgggctctcggagaatgacgagtggacccaggatagggccaaacctgtcacccagatcgtcagcgccgaggcctggggtagagcagactgtggcttcacctccgagtcttaccagcaaggggtcctgtctgccaccatcctctatgagatcttgctagggaaggccaccttgtatgccgtgctggtcagtgccctcgtgctgatggccatggtcaagagaaaggattccagaggctagctccaaaaccatcccaggtcattcttcatcctcacccaggattctcctgtacctgctcccaatctgtgttcctaaaagtgattctcactctgcttctcatctcctacttacatgaatacttctctcttttttctgtttccctgaagattgagctcccaacccccaagtacgaaataggctaa

SEQ ID NO: 47196 - DNA, 729 bp, Homo Sapiens
acgcgtccgtggattgggacagtgaaactcggagactttactatgatgagcaagaatctgaggcctacgagaagcatgtgagcatgttgcagcctcagaagaagaagaagaccacagtggccctgagagactgcatcgagctcttcaccaccatggagacccttggggagcatgacccctggtactgtcccaactgtaagaagcatcaacaggccacaaaaaagtttgacctatggtccttgcccaagatcctggtggtccacctcaaacgtttctcctacaacagatactggagggataagctcgacacagtcgtagaattcccaatcagagggctgaacatgtccgagtttgtctgtaacctgtcagcaaggccttatgtgtacgacctcattgccgtgtccaatcattatggagccatgggggttggccactacactgcatatgcgaagaacaaactgaatggtaaatggtattactttgatgatagcaacgtgtccctggcctctgaggatcagatagtgactaaagcagcttatgtgctattttaccaacgtcgagatgatgaattttataagacaccttcacttagcagttctggttcctctgatggagggacacgaccaagcagctctcagcagggctttggggatgatgaggcttgcagcatggacaccaactaatgctgactccacgatcctgccaccctgtagcgccagtgtaatcccc

SEQ ID NO: 47197 - DNA, 670 bp, Homo Sapiens
ttttttttttttttttttccctgggctggtcttcccttgtacatcgatttttgggccctagaaatgctcaaagggtgctcctaggattatcagagcctatctttcagctccctagatctttagcttctactcccactgctcctaccactccagcaacgccagataatgcatcacaggaagaactcatgattacattagtaacaggattggcgtccgttacatctagaacttctatgggcatcattattgttggaggagtgatttggaaaactataggctggaaactcctatctgtttcattaactatgtatggagctttgtatctttatgaaagactgagctggaccacccatgccaaggagcgagcctttaaacagcagtttgtaaactatgcaactgaaaaactgaggatgattgttagctccacgagtgcaaactgcagtcaccaagtaaaacaacaaatagctaccacttttgctcgcctgtgccaacaagttgatattactcaaaaacagctggaagaagaaattgctagattacccaaagaaatagatcagttggagaaaatacaaaacaattcaaagctcttaagaaataaagctgttcaacttgaaaatgagctggagaattttactaagcagtttctaccttcaagcaatgaagaatccta

SEQ ID NO: 47198 - DNA, 931 bp, Homo Sapiens
gaaatctgggtcagagatgagacctgccagagccaaatttgactttaaagctcagacactaaaggagcttcctctgcagaagggagatattgtttacatttataagcaaattgatcagaactggtatgaaggagaacaccacggccgggtgggaatcttcccacgcacctacatcgagcttcttcctcctgctgagaaggcacagcccaaaaagttgacaccagtgcaggttttggaatatggagaagctattgctaagtttaactttaatggtgatacacaagtagaaatgtccttcagaaagggtgagaggatcacactgctccggcaggtagatgagaactggtacgaagggaggatcccggggacatcccgacaaggcatcttccccatcacctacgtggatgtgatcaagcgaccactggtgaaaaaccctgtggattacatggacctgcctttctcctcctccccaagtcgcagtgccactgcaagcccacagcaacctcaagcccagcagcgaagagtcacccccgacaggagtcaaacctcacaagatttatttagctatcaagcattatatagctatataccacagaatgatgatgagttggaactccgcgatggagatatcgttgatgtcatggaaaaatgtgacgatggatggtttgttggtacttcaagaaggacaaagcagtttggtacttttccaggcaactatgtaaaacctttgtatctataagaagactgaaaaccatggagattatttttattggaggaggaagcatcattcatgaaccgatctttttagttgagtcagtaggaaaattaataccgtggataaagtaagaagcaaaagacagggacacgagaagtgttggtgtttaaaaccccaagccctgttctaaaggttactgggggtattagaacaggg

SEQ ID NO: 47199 - DNA, 864 bp, Homo Sapiens
gggagcctgcagtctgacctgaacagctgggggtcgccacagtcgccaaaggagtctgcggggcctgcaagaagcccatcgccgggcaggttgtgaccgccatggggaagacgtggcaccccgagcacttcgtctgcacccactgccaggaggagatcggatcccggaacttcttcgagcgggatggacagccctactgtgaaaaggactaccacaacctcttctccccgcgctgctactactgcaacggccccatcctggataaagtggtgacagcccttgaccggacgtggcaccctgaacacttcttctgtgcacagtgtggagccttctttggtcccgaagggttccacgagaaggacggcaaggcctactgtcgcaaggactacttcgacatgttcgcacccaagtgtggcggctgcgcccgggccatcctggagaactatatctcagccctcaacacgctgtggcatcctgagtgctttgtgtgccgggaatgcttcacgccattcgtgaacggcagcttcttcgagcacgacgggcagccctactgtgaggtgcactaccacgagcggcgcggctcgctgtgttctggctgccagaagcccatcaccggccgctgcatcaccgccatggccaagaagttccaccccgagcacttcgtctgtgccttctgcctcaagcagctcaacaagggcaccttcaaggagcagaacgacaagccttactgtcagaactgcttcctcaagctcttctgctaggtgccctgccccttgtctctgcccccccttccccagccaggcatccccccaactgcggactgtggaccctaaaagaactttccaccccggggggggtgaaaag

SEQ ID NO: 47200 - DNA, 973 bp, Homo Sapiens
  misc_feature (558)..(558): n is a, c, g, or t
  misc_feature (692)..(692): n is a, c, g, or t
  misc_feature (738)..(738): n is a, c, g, or t
  misc_feature (773)..(773): n is a, c, g, or t
  misc_feature (893)..(893): n is a, c, g, or t
  misc_feature (969)..(969): n is a, c, g, or t
  misc_feature (971)..(971): n is a, c, g, or t
tccccttggaggggcacaaacgatcagtaagaatacagagcaacggccccagccagatccgtatcagatcctgggcccgaccagcagtcgcctagccaaccctggaagcgggcagatccagctgtggcaattcctcctggagctgctctccgacagcgccaacgccagctgtatcacctgggaggggaccaacggggagttcaaaatgacggaccccgatgaggtggccaggcgctggggcgagcggaaaagcaagcccaacatgaattacgacaagctgagccgggccctccgttattactatgataaaaacattatgaccaaagtgcacggcaaaagatatgcttacaaatttgacttccacggcattgcccaggctctgcagccacatccgaccgagtcgtccatgtacaagtacccttctgacatctcctacatgccttcctaccatgcccaccagcagaaggtgaactttgtccctccccatccatcctccatgcctgtcacttcctccagcttctttggagccgcatcacaatactggacctcccccacggngggaatctaccccaaccccaacgtcccccgccatcctaacacccacgtgccttcacacttaggcagctactactagaagcttactcatcagtggccttctagctgaagcccatcctgcacacttactggatgcnttggactcaacaggacatatgtggcccttgaagggaagacaaaacntggatggtcttcttgttggatagaacctttgtatntgttccttaaaaaacatttttttaaatgttggaacttttgcttcctctacctgacaaagagatgataatttcatgggcccagtatgccaggttgaaattctcagtctcctagcatcttgngaggttgcatattaagattactggatagggttaagtccatggttctgagaaagagcctgaaccgtttcttttagcntnta

SEQ ID NO: 47201 - DNA, 1066 bp, Homo Sapiens
  misc_feature (938)..(938): n is a, c, g, or t
  misc_feature (1042)..(1042): n is a, c, g, or t
tcagaatactttgtgcagctctgtggggtgtaaaccttctggtggggactgaaaatggcctgatgcttttggaccgaagtgggcaaggcaaagtctataatctgatcaaccggaggcgatttcagcagatggatgtgctagagggactgaatgtccttgtgacaatttcaggaaagaagaataagctacgagtttactatctttcatggttaagaaacagaatactacataatgacccagaagtagaaaagaaacaaggctggatcactgttggggacttggaaggctgtatacattataaagttgttaaatatgaaaggatcaaatttttggtgattgccttaaagaatgctgtggaaatatatgcttgggctcctaaaccgtatcataaattcatggcatttaagtcttttgcagatctccagcacaagcctctgctagttgatctcacggtagaagaaggtcaaagattaaaggttatttttggttcacacactggtttccatgtaattgatgttgattcaggaaactcttatgatatctacataccatctcatattcagggcaatatcactcctcatgctattgtcatcttgcctaaaacagatggaatggaaatgcttgtttgctatgaggatgagggggtgtatgtaaacaccctatggccggataactaaggatgtggtgctccaatggggagaaatgcccacgtctgtggccctacattcattcccaatcagataatgggctggggcgagaaaagctattgagatccggtcagtggaaacaggacatttggatggagtatttatgcataagcgagctcaaaggttaaagtttctatgtgaaagaaatgattaggtattttttgcatccgtggcgatctggaggaagtacccaagtgtttttcatgaccctcaacagaaatcccatgatgnaactggtaacagaagaaccacttggcacttatctttctggcgttatttctaatttaaaagaacctaactctgggggaattatgccagtcttgagggcgaatccnaagggttgggttggacatatccgc

SEQ ID NO: 47202 - DNA, 781 bp, Homo Sapiens
  misc_feature (707)..(707): n is a, c, g, or t
  misc_feature (732)..(733): n is a, c, g, or t
  misc_feature (735)..(736): n is a, c, g, or t
  misc_feature (738)..(738): n is a, c, g, or t
  misc_feature (740)..(740): n is a, c, g, or t
  misc_feature (742)..(747): n is a, c, g, or t
  misc_feature (749)..(749): n is a, c, g, or t
  misc_feature (752)..(753): n is a, c, g, or t
  misc_feature (755)..(755): n is a, c, g, or t
  misc_feature (757)..(757): n is a, c, g, or t
gggcctcagcaagttcagcttccaaagatcttcatgagtttgcactccagaatttaatgcatattggacccctgtatccacatgctttcaagacagtaatgggggctgctcctgagttgaaagtgcgtctagaaactgccgttcgagcaagccaagcgagcaaagctaaagcggctgccagacaaccagcccccgccatacattctgcaccaacaattaagctaaaaacaagttttttttaatttgtaatttcatttatttgtatttatgttgtcaactagcccctaattagtgatggccactgtatcattccaggctacctatgggttctgttttatttgtatattggtattatagtgcttccaagtaggttaagtgaaataatgctcacaccacttattgatttttaaggagtgattttttttatcatgtggtgaatatgttttcattttcctcctaataatgtttctcttttgttaacttatttatttttcaaacactgagccatagtcttaaatttaaatgctaaaaacaattgtatcatgtagtcgggcagcctattgatactgtcaggggaaaaaaaatgggtcagaactcagcatctgtcatgaaaaaaatcaattgaaaaacaagcagattttaaattttgaagtaatcaaaataatggaaagtggtctgttttggtggtgtatatactatgaaataanatcacagcatttttctaggcaaaannannananannnnnnanatnnananataaaaaaacacaacaagggaaac

SEQ ID NO: 47203 - DNA, 668 bp, Homo Sapiens
ggggcgctagggccgagatcatgtctgactgggagaggtttccttggcagcagaggacgctaggtttgggatgaaagaagctgggcagatgcaaaatctggagagcgcgagggccgggcggtcagtcagcacccagactggcagcatgaccggtcagataccaaggctttctaaagtcaaccttttcactctgctcagcctctggatggagctctttccagcagaagcccagcggcaaaaatctcagaaaaatgaagagggaaagcatggacccttaggagataatgaagagaggaccagagtatctactgacaaaagacagaaaaccatgttctgcttgtttgaaaatgattgtaaatgctggagttaaccgaatttcatactggcctgctgatccagaaataagtttgcttacggaggcttctagttctgaagatgcaaagttagatgccaaagcagtggaaagattgaagtcaaacagtcgggcccatgtgtgtgtcttacttcaacctttggtgtgttatatggtgcagtttgtagaggagacctcttacaaatgtgactttattcaaaaaattacaaaaacattgccggatgctaacactgacttttattatgaatgttaacagaaagaataacagaatatgacactgttcacgaaaaaaaaa

SEQ ID NO: 47204 - DNA, 666 bp, Homo Sapiens
tttgcagccatcaacaagttccagccgttcaacgtggctgtttctagcaacgtgctgttcctgctgatctaccagagcctgttcctgcggggcctgtccctggtgggctggtaccacagccacccacacagcccggcgctgccatctctgcaggacatcgacgcacagatggactaccagctgcggctgcagggctccagcaatggcttccagccctgcctcgccctgctctgctccccttactattctggcaacccaggccccgagtccaagatctcgcctttctgggtgatgcctcctcccgagcaaaggcccagtgactatggcatccccatggatgtggagatggcctacgtccaggacagcttcctgaccaatgacatccttcacgagatgatgctgctggtggagttctacaagggttcccctgacctcgtgaggctccaggaaccctggagccaggagcacacctacctcgacaagcttaagatctccttggccagcaggacgcccaaggaccagagcctgtgtcacgtcctggaacaggtgtgcggcgtcctcaagcaggggagctgagccttccagggcagggtgggctccagttgtcttgagggtccggatgggctcaggtaataaagaaacggaagcagcaaaaaaaaaaaaaaa

SEQ ID NO: 47205 - DNA, 651 bp, Homo Sapiens
taaaactatgttgtggaattcttttcagatatcaattggaattagttctaagagttttaaagataatgattttggcatattacacgaaactctcccggaagaagttggtcatctaagttttaatagttccagtagttcagaggccaattttaaactggagccaaatagtcctatgcatggtggcactcttctagaagatgttgtgggagggagacagactactccagaatcagactttaatttacaggctcttcgcagtagatacgaggctctgaagaaatctctttccaagaaaagggaagaatcttacctctcgaattcccaaacacccgaaagacacaaaccagaattgagccctactccccaaaatgtacaaacagatgatacgcttaactttttggacacctgtgatttgcatactgagcatataaagccatctttacgcacgtccatcggtgaaagaaaacggtctctttcaccactaattaagttttctccagtggaacaaagattgagaaccacaatagcatgtagtcttggagaactacctaatttaaaggaagaagacattttgaataagagccttgatgcaaaagaaccaccgtctgacttgacaagatgaagacgtaccccatttaatataactatgat

SEQ ID NO: 47206 - DNA, 847 bp, Homo Sapiens
  misc_feature (768)..(768): n is a, c, g, or t
  misc_feature (837)..(837): n is a, c, g, or t
atatagcatgcttaggcattttgatcatatcactaaggactaccatgatcacatagctgaaatatcagctaagcttgtagcgataatggatagcttatttgacaagctgttatctaagtatgaagtgaaggctcctgttccttctgcctgtttcaggaatatttgtaagcaaatgacaaaaatgcacgaagctatatttgatctccttccagaagaacaaacacagatgttatttttaagaattaatgcaagttataaactccacttgaaaaagcagttatctcacttaaatgtgataaatgatggaggacctcaaaatgggttggtcacagcagatgtagctttttacactggaaatcttcaagccttaaaaggccttaaagatttggacctaaatatggccgaaatttgggagcagaagaggtgatgtcatcctggaaaactgggtagttcatctgaccatgggatgtgtttgttatgaagaaaatctggatgcctgtgattcgagaattgaacctgaaacccaaagtgaactggggtgggggaagggaaaaaggaaagtatcaagtgttgggaaactggattcagtgggatctacaaggaatgtcatttttgtgcatcctacagtgaggagtaactgatcaggtgtctataacatttttcattctctctggaaacagactcaggtttctttggaccaaatccaaaagaacacatagctgtaacacagctgtagttgactagaatgctctgtatactttatattanaaaatgctttgcatttcttccagtgcaatgaaattcatatggtgtcccacccttatttatgatggtacnatttaaaaac

SEQ ID NO: 47207 - DNA, 631 bp, Homo Sapiens
caacaaaagaatgtccatggtggtgtctggcctgaccccagaagaatttatgctcgtgtacaagtttgccagaaaacaccacatcactttaactaatctaattactgaagagactactcatgttgttatgaaaacagatgctgagtttgtgtgtgaacggacactgaaatattttctaggaattgcgggaggaaaatgggtagttagctatttctgggtgacccagtctattaaagaaagaaaaatgctgaatgagcatgattttgaagtcagaggagatgtggtcaatggaagaaaccaccaaggtccaaagcgagcaagagaatcccaggacagaaagatcttcagggggctagaaatctgttgctatgggcccttcaccaacatgcccacagatcaactggaatggatggtacagctgtgtggtgcttctgtggtgaaggagctttcatcattcacccttggcacaggtgtccacccaattgtggttgtgcagccagatgcctggacagaggacaatggcttccatgcaattgggcagatgtgtgaggcacctgtggtgacccgagagtgggtgttggacagtgtagcactctaccagtgccaggagctggacacctacctgataccc

SEQ ID NO: 47208 - DNA, 895 bp, Homo Sapiens
  misc_feature (767)..(767): n is a, c, g, or t
  misc_feature (863)..(863): n is a, c, g, or t
tgtaggctctgcccctgtgccatgggctcacatgtgtggagcttgcagagcaaaatggggcttcatgtgggggccctgttccctgtctgtgcagcatttgtggctctggcagtggctctgctttttctgttgcgatgctattttgtgcttgaacctaagaggcatggatgctctgtatccaatgatgaaggccaccaaacactggtcatgtataatgcggagagcaaaggcacttcagcccagacatggtcagatgttgaaggccagaggccggctctgctcatctgcacagctgcagcaggacccacgcagggagttaagggttatggcaagccctttgagccaagaagtgtgaaaaacatacactctactcctgcttacccagatgccacaatgcacagacaactcctggctccggtggaaggaaggatggcagagacattgaatcagaaactccatgttgccaatgtgctggaagatgaccccggctacctacctcacgtctacagcgaggaaggggagtgtggaggggccccatccctcagctctctggccagcttggaacaggagttgcaacctgatttgctggactctttgggttcaaaagcgactccgtttgaggaaatatattcagagtcaggtgttccttcctaaaaaaaaaagtctattttggagattgaaatattcatggaagggaatcactattccggggatttttcccctttgctcttctttttcccttcttaaaagaaaaataccttctagtnctaggatgaggacacactattagtttggattaaatgcttggatttctcaaatcagccattttgaccaaagcaaacccagttacactttttaaaatngatattgcatatttctagaaaccttgatttat

SEQ ID NO: 47209 - DNA, 697 bp, Homo Sapiens
actctgtatcgttgcgaaaaaagagcatttctggagtattgaccaaacggaatttcgaatcccacccaggctgatcattcagatatgggacaatgacaagttttctctggatgactacttgggtttcctagaacttgacttgcgtcacacgatcattcctgcaaaatcaccagagaaatgcagattggacatgattccggacctcaaagccatgaacccccttaaagccaagacagcctccctctttgagcagaagtccatgaaaggatggtggccatgctacgcagagaaagatggcgcccgcgtaatggctgggaaagtggagatgacattggaaatcctcaacgagaaggaggccgacgagaggccagccgggaaggggcgggacgaacccaacatgaaccccaagctggacttaccaaatcgaccagaaacctccttcctctggttcaccaacccatgcaagaccatgaagttcatcgtgtggcgccgctttaagtgggtcatcatcggcttgctgttcctgcttatcctgctgctcttcgtggccgtgctcctctactctttgccgaactatttgtcaatgaagattgtaaagccaaatgtgtaacaaaggcaaaggcttcatttcaagagtcatccagcaatgagagaatcctgcctctgtagaccaacatccagtgtgattttgtgtctg

SEQ ID NO: 47210 - DNA, 837 bp, Homo Sapiens
ttaggaaaagagtatggtgtgaggaaagcacccaaggactttgagtccactgcctcttcacttaatgttctggctcctccaattgctgcatcacccttgggtaagctaattaacttctctgagcctgagcatccgcatttattaaacagggattagatacttacctcgcagggtggttgtaaggattagaagtaatgacatataaagcacccctcccacaatttagtgtctggccagatggtgggtgttgagattgtccgttattactgaggacttaatgtggtctagtctgtaagggttgacagatcattgtggcagatcccagacatgcttattatgttagcagtaggggccctgaggtcaaaaggcttaggacagctatcctgcctcccagacctgggaggaaaagagagagaaagaggggctccagggcagttgtcacagttaggaaggtgctgagtcgccacaggcatcagaggaggattttctgaatgggtacagtgaggacccagtggtgctctctcctcaaacctacctgttgggaaccagatcagcccagcaggctggtagcagagccatggcctgggaacctgggtcagcctcactgtcttagctccagactcacccactccctttgcaatgctgtgctgtgtagtggtaaagcctgcacacgctagggcccattcctgcgccattcttcctgcttgtgtgacctcaggcaagccccaaacagccttgtgactcaatgttctcatctgtacaatagggattatggcacctatcgcatagggtccttgtggagatccaatggtttatttatgaaaagcatttagagaa

SEQ ID NO: 47211 - DNA, 719 bp, Homo Sapiens
ggggaatatgggtcccgctgccttctggctcctgctcttccttctcaagaatcctgaagccctggctgctgtccgcggagagctcgagagtatcctttggcaagcggagcagcctgtctcgcagacgaccactctcccacagaaggttctagacagcacacctgtgcttgatagcgtgctgagtgagagcctcaggcttacagctgcccccttcatcacccgcgaggttgtggtggacctggccatgcccatggcagacgggcgagaattcaacctgcgacgtggtgaccgcctcctcctcttccccttcctgagcccccagagagacccagaaatctacacagacccagaggtatttaaatacaaccgattcctgaaccctgacggatcagagaagaaagacttttacaaggatgggaaacggctgaagaattacaacatgccctggggggcggggcacaatcactgcctggggaggagttatgcggtcaacagcatcaaacaatttgtgttccttgtgctggtgcacttggacttggagctgatcaacgcagatgtggagatccctgagtttgacctcagcaggtacggcttcggtctgatgcagccggaacacgacgtgcccgtccgctaccgcatccgcccatgacacagggagcagatggaatccacggtgctcgcctcttggccagcctgccccaggctgccccaggctccca

SEQ ID NO: 47212 - DNA, 995 bp, Homo Sapiens
gtgtgtgtatagaaatgagctctcaaggcatcccaaagcccatggtaattttacccttcatgaaatacggggacctgcatacttacttactttattcccgattggagacaggaccaaagcatattcctctgcagacactattgaagttcatggtggatattgccctgggaatggagtatctgagcaacaggaattttcttcatcgagatttagctgctcgaaactgcatgttgcgagatgacatgactgtctgtgttgcggacttcggcctctctaagaagatttacagtggcgattattaccgccaaggccgcattgctaagatgcctgttaaatggatcgccatagaaagtcttgcagaccgagtctacacaagtaaaagtgatgtgtgggcatttggcgtgaccatgtgggaaatagctacgcggggaatgactccctatcctggggtccagaaccatgagatgtatgactatcttctccatggccacaggttgaagcagcccgaagactgcctggatgaactgtatgamataatgtactcttgctggagaaccgatcccttagaccgccccaccttttcagtattgaggctgcagctagaaaaactcttagaaagtttgcctgacgttcggaaccaagcagacgttatttacgtcaatacacagttgctggagagctctgagggcctggcccagggctccacccttgctccactggacttgaacatcgaccctgactctataattgcctcctgcactccccgcgctgccatcagtgtggtcacagcagaagtgtcatgacagcaaacctcatgaaggacggtacatcctgaatgggggcagtgaggaatgggragwytgacttctgcccctctgctgcagtacagctgaaaagacagtgtttaccggggagagactgttaggatgggtctctggtccatcgacmtgctgccttggagctcttgccgatgactttgttgctgcgmtctcaga

SEQ ID NO: 47213 - DNA, 612 bp, Homo Sapiens
ctcagcacagcaaatcaggagctgcagcagctcttctaccagtggaagtgcaagaggttccgggatcagctgtccccgaagcaggtagagatcctgagggaaaagctctgtgccagtgaactgttcaagggcaagaaggcttcatatccccagagtgtccccattccattctgtggtgactacattgggctgcaagggaaccccaagctgcagaagctgaaaggcggggaggaggggcctgttctgatggcagaggccgtgaagaaggtcaatcgtggcaatggcaagacttcttctcggattctcctcctgacaagggccatgtgttctcacagacaccaagaagtcccaggccaaaattgtcattgggctagacaatgtggctggggtgtcagtcaccagcctcaaggatgggctctttagcttgcatctgagtgagatgtcatcggtgggctccaagggggacttcctgctggtcagcgagcatgtgattgaactgctgaccaaaatgtaccgggctgtgctggatgccacgcagaggcagcttatagtcaccgtgactgagaagttctcagtgaggttcaaggagaacagtgtggctgtcaaggtcgt

SEQ ID NO: 47214 - DNA, 799 bp, Homo Sapiens
atgttgaggcgagcagggcaggcccccggggaggggccagagttttctatgaatctatttttcttcagactgaggccttttggtagtcggagcccccgcagtcgtcagcctccctgacgtctgccaccagcgcccccactcctcctcctttctttgctgtttgcaatcacacgtggtgacctcacacacctctgccccttgggcctcccactcccatggctctgggcggtccagaaggagcaggccctgggcctccacctctgtgcagggcacagaaggctggggtggggggaagagtggattcctccccaccctgtcccaggcagcgccactgtccgctgtctccctcctgattctaaaatgtctcaagtgcaatgccccctcccctcctttaccgaggacagcctgcctctgccacagcaaggctgtcggggtcaagctggaaaggccagcagccttccagtggcttctcccaacactcttggggaccaaatatatttaatggttaagggacttgtcccaagtctgacagccagagcgttagaggggccagcggccctcccaggcgatcttgtgtctactctaggactgggcccgagggtggtttacctgcaccgttgactcagtatagtttaaaaatctgccacctgcacaggtattttgaaagcaaaataaggttttcttttttcccctttcttgtaatacatgataaaattccgagtctttctcactgcctttgtttagaagagagtagctcgtcctcactggtctacactggttgccgaattaccttgtattc

SEQ ID NO: 47215 - DNA, 995 bp, Homo Sapiens
cccagacgctgagccacctcaagcgcaccgtggagaatatcaaggatcctttgttcaggttctttgagagaraagtgaagatgggcgcaaagctgcttcaggacgttcgccaggaccttgcagatgtcgtccaggtgtgcgaaggaaagaagaagcagaccaactacttgcgcacgctgatcaacgagctagtgaaagggatcttgcctcggagctggtcccactacacggtgcctgccggcatgaccgtcatccagtgggtgtccgacttcagcgagaggatcaaacagctgcagaacatctcactggcagctgcatctggtggcgccaaggagctaaagaacatccacgtgtgcctgggtggcctgttcgtgcctgargcgtacatcactgccaccaggcagtatgtggcccaggccaacagctggtccctggaggagctctgcctggaagtcaacgtcaccacctcacagggcgccacccttgacgcttgcagcttcggagtcacgggtttgaaacttcaaggggccacgtgcaacaacaacaagctgtcactgtccaatgccatctcaaccgcccttcccctgacgcagctgcgctgggtcaagcagacaaacaccgagaagaaggccagtgtggtaaccttacctgtctacctgaacttcacccgtgcagacctcatcttcaccgtggacttcgaaattgctacaaaggaggatcctcgcagcttctacgagcggggtgtcgcagtcttgtgcacagagtaaacttttctagctgcccctttctgtaatagtgaaagttggtatttaacatttattcatttttaaaatatttggaaggtctgagcttgtgaaaagaaagtggttggtctgaggttggaggaagctgaatggaatctgacggttgggagtggtggaaattggaaggataccaggaggtatttgggraggccaatggcgtggctcctttgaggaaataaacactaagcatga

SEQ ID NO: 47216 - DNA, 849 bp, Homo Sapiens
ggaattccgggatatagccataagtattcatatcaagtcagttgtgactccttgtgtatacaattcattttttgtgtcttcagggtaaactcaatttttggtaaagtggtttcagcttttgtgaaaaccgtttttgtgtgtaagcatgacacacaacagactcagtaagctgcccatcctcatactaggaaaacaccttcaaaggaacattaaaagttaccagggccaggcacagtggctcacgcctgtaatcccagcactttgggaggctgaggcagatggatcccaagtccaggaatttgagacgagcctgggcaacatagtgagagcctgtcaacaaaaaatagaaaaattagctgggcttggtgatacacatctgtagtcccagctatttgggaggctgccttgatatcaggcagtcgaggctgcagtgagctgactgccccactgtattccagcctgggtgaccccatctcaaagaagaaaagttaccagatgtcatgggtaaaggttggtcttcaagtggcctcataagttgtcttgcatttaaattcagggaattcattggaccaataggttacattttcgttccttttttgttttggttcatctgttaagcagtgggggcctaattactgctcctttgtaaaaacacattttcccaaagaacactgaattaccgttcaaactggttgttgatgggtaataagggctgtttttgctgccccaaaagggcttaacaatttaggcggatagtttacttaaaaaaaaaaatcctttggagacatactgaaaatgcaaactagtttctaaattatcaattccctacatgaagaagcagtttgccag

SEQ ID NO: 47217 - DNA, 806 bp, Homo Sapiens
tacaatgaaggaggaaattttggcggtggtaactatggtggtggtgggaactataatgattttggaaattatagtggacaacagcaatcaaattatggacccatgaaagggggcagttttggtggaagaagctcgggcagtccctatggtggtggttatggatctggtggtggaagtggtggatatggtagcagaaggttctaaaaacagcagaaaagggctacagttcttagcaggagagagagcgaggagttgtcaggaaagctgcaggttactttgagacagtcgtcccaaatgcattagaggaactgtaaaaatctgccacagaaggaacgatgatccatagtcagaaaagttactgcagcttaaacaggaaacccttcttgttcaggactgtcatagccacagtttgcaaaaagtgcagctattgattaatgcaatgtagtgtcaattagatgtacattcctgaggtcttttatctgttgtagctttgtctttttctttttcttttcattacatcaggtatattgccctgtaaattgtggtagtggtaccaggaataaaaaattaaggaatttttaacttttcaatatttgtgtagttcagtttttctacattttagtacagaaactttaacaaaatgcagtttcgaaggtgtttccttgtgagttaacaagtaaagaagatcattgttaattactattttgtatgaattttgctaaagttaactgtaaagaaacacctgctgacttgcagtttaaggggaatctattctccccatttccaaaccatgatatgaatgggcg

SEQ ID NO: 47218 - DNA, 669 bp, Homo Sapiens
ctctcccactccattgataccaactctttcccttcattcccccaacatcctgttgctctaactggagcacattcacttacgaacaccaggaaaccacagggcccttgtcgccccttctctttcccttatttaggagccctgaactcccccagagtctatccattcatgcctcttgtatgttgatgccacttcttggaagaagatgagggcaatgagttagggctccttttccccttccctcccaccagattgctctcccacctttcatttcttcctccaggctttactcccctttttatgccccaccgatacactgggaccaccccttaccccggacaggatgaatggatcaaaggagtgaggttgctaaagaacatccttttccctctcattctacccttttcctctccccgattccttgtagagctgctgcaattcttagaggggcagttctacctcctctgtccctcggcagaaagacgtttccacacctcttaggggatgcgcattaaacttcttttgcccccttcttgtcccctttgaggggcacttaagatggagaaatcagttgtggtttcagtgaatcatggtcacctgtatttattgctaggagaagcctgagggtgggggggagatgatcatgtgtgctcggggttggctggaagcctg

SEQ ID NO: 47219 - DNA, 816 bp, Homo Sapiens
ctcccatcatcaaagccttgaacatatttgtggaaagacgaatatcagctctgcctgttgtggatgagtcaggaaaagttgtagatatttattccaaatttgatgtaattaatcttgctgctgagaaaacatacaataacctagatatcacggtgacccaggcccttcagcaccgttcacagtattttgaaggtgttgtgaagtgcaataagctggaaatactggagaccatcgtggacagaatagtaagagctgaggtccatcggctggtggtggtaaatgaagcagatagtattgtgggtattatttccctgtcggacattctgcaagccctgatcctcacaccagcaggtgccaaacaaaaggagacagaaacggagtgaccgccgtgaatgtagacgccctaggaggagaacttgaacaaagtctctgggtcacgttttgcctcatgaacactggctgcaagtggttaagaatgtatatcagggtttaacgataggtatttcttccagtgatgttgaaattaagcttaaaaaagaaagattttatgtgcttgaagattcaggcttgcattaaaagactgttttcagacctttgtctgaaggattttaaatgctgtatgtcattaaagtgcactgtgtcctgaagtttcattatttttcatttcaaagaattcactggtatggaacaggtgatgtggcataaggtgagtgcacggtatggttcagatcacagtgccttatgtccgaatacagcaatatgtcaccgccgcagtcggggcgcaccgcgtgtgaaaccacaccgagctgaatgtgg

SEQ ID NO: 47220 - DNA, 692 bp, Homo Sapiens
gctgcgaaagtgctttggcggtttgtccatccgcagcttcggcttttccagtctggtggcccttccggccacccctttaaccccagctttccctcccccttctttcgatcagagatcggcggagaccctcgaagtgcgcaaacttgacactcaccctgaccggactggggttttaaggggtgtggcaggaggttttggactcgatgagtttccaccgaaatgtcggagaagtcaggccagagcacaaaagcaaaggatgggaaaaagtatgcaacactcagtttatttaatacttacaaggggaaatcattagaaacacagaaaaccacagttgcagctcgacatggattacagagtcttggaaaagtcggtatttcacggcgtatgcctccacctgctaacctcccaagtcttaaagcagaaaacaaaggcaatgatcctaatgtaaacattgtacctaaagatggcacagggtgggcatcaaaacaagagcaacatgaagaagaaaaaacaccagaagtgccaccagcacagccaaaacctggggttgcagctcccccagaagtagcacctgctcccaaatcatgggccagtaacaagcaaggtgggcaaggagatggaatccaagtgaatagtcagtttcagcaagaatttctcagcctgcaggcagctggggatcaggaaaaaaaaaa

SEQ ID NO: 47221 - DNA, 580 bp, Homo Sapiens
  misc_feature (563)..(563): n is a, c, g, or t
  misc_feature (567)..(573): n is a, c, g, or t
aatagctttaaaacctgtgtgccattttaagagttacttaatgtttggtaacttttatgccttcactttacaaattcaagccttagataaaagaaccgagcaattttctgctaaaaagtccttgatttagcactatttacatacaggccatactttacaaagtatttgctgaatggggaccttttgagttgaatttattttattatttttattttgtttaatgtctggtgctttctatcacctcttctaatcttttaatgtatttgtttgcaattttggggtaagactttttttatgagtactttttctttgaagttttagcggtcaatttgcctttttaatgaacatgtgaagttatactgtggctatgcaacagctctcacctacgcgagtcttactttgagttagtgccataacagaccactgtatgtttacttctcaccatttgagttgcccatcttgtttcacactagtcacattcttgttttaagtgcctttagttttaacagttcactttttacagtgctatttactgaagttatttattaaatatgcctaaaatncttnnnnnnnaaaaaaa

SEQ ID NO: 47222 - DNA, 973 bp, Homo Sapiens
gatcaaggttcaaaagcctctgaaaacaacgaaaacaaaaagagaaacagatgaagtttccaacactaaatcatcttcccaaatacctgcccaaccatcagtagcaaaagttccctatgggaaaggaccttcatttaatcaggaacgtggaacatcttcacatctgccaccacctccaaagttgcttgcacagcagcatccacctccagatcgacaggcagtacctggaagaccaggcccctttccctccaagcagcaagtagctgatgaagatgaaatatggaagcaaagacgaagacaacaatcagaaatttctgcagcagtagaacgtgctcgtaaacggcgtgaagaggaagagcgaagaatggaagaacaaaggaaggcagcttgtgcggagaaactgaaacgattggatgagaagcttggcatcctggaaaaacaaccatctccagaggaaattagggaaagggagcgagaaaaagaacgggagcgtgagaaagaacttgaaaaagaacaagaacaggagcgagagaaggagagggaacacacgacagagagagacagcaggaaacaggagaaagagctggagaaggagcaggaaaaacaaagagcacatggcgaaagaaagaaagcaagaaaaccgaaaaagaactagaacggcagaaagaaagggaacagaactacaaagatgaagaaccgacaggatgtgactgggaaggacgggaaaattcgagggaaatggaccgaaaactatttgagccctggttaaaaatctatacaaaaaaaagggggcgccaaaaaatcccgagggccaattacgaccggtttggacaagggccaacgagggataaaaaagagaggcgcggtaaagcgagtgggacagtatgggcatgtcaaacacctcgggcggaagtgaccaccaatagcacgggaaacaagatagaaacacatggaagcgtaaaacacaaaaaga

SEQ ID NO: 47223 - DNA, 613 bp, Homo Sapiens
tcttcccttctcttttgggccctcgtcgatctcatttacaacatgtttaagaaggtgcctaccagtaacacagagggaggctggtcctgctctctcgctgagtacatccgccacaacgacatgcccatctacgaagctgccgacaaagccctgaaaaccttccaggaggagttcatgccagtggagaccttctcagagttcctcgatgtggccggtcttttatcagaaatcaccgatccagagagcttcctgaaggacctgttgaactcagtcccctgaccaccacacagcagctgcggcggcgaagacgaagctggcttgccttccaccctctgttctccctccttgtgcattaagttccctccgcgggatgctgcattgttaccccgccctcccctctctcatttttcttggtgtggcttggggtttttaggcttcctgttttatctcgtgtgtgtggtgcaccagctatgaggttgtctgtaacccaagccatcaaagggcctgtacatacctaggagccatgagttgtcccggccagcttcatacttgagtgtgcacatcttgagaaataaacaagtgacttaacacacattgaaaaaaaaaaaaaaag

SEQ ID NO: 47224 - DNA, 620 bp, Homo Sapiens
cacttgcagaaaagaaacatgttaaaatcatggcacacctgcagaatttcagatgacagtgtggtcagaagatgttttttgggagaacctagtgtttgctgggcactatgctaagcactttgggagcaagaacctcctaccttccagtttaaacactagtggtattgtcagatgccgttagtatctgagatgtacttacagcagggttctaagagctctgaaagaagcgctctgttagatgcagactggcagcatcctccttgataaaagcagaaaagcaaagaggtaattggagttgaatcaagttaatagggaaggttggtagtaaatgctgttagtgtgacatgattctgaaacccagagctcagaactaactgtgagatgtaccatgaactaacaattctttgaaaggacctgcagaagcatttttaatacctcattctgtctatgcaagatgaaaatccatggagttttttcttggcttttgtaccaaatttaggggtcttgcatgtcagcaagtgatatatattgtttataaatgcaagctatttctggaggggaaaaatgtgtgtggctcttacgttttctgggaattttgtaacaagttacacgcacaagtg

SEQ ID NO: 47225 - DNA, 582 bp, Homo Sapiens
ctggaatgctccaatatgtatgtgacaacagcccagaagtcaggcaagcagctgcatatggcctgggagtcatggcacagtacggtggagataattatcgccctttttgtacagaagcacttcccctgctggtaagagttattcagtctgcggattctaagaccaaagaaaatgtcaatgctacagagaactgcatctcagcagtagggaaaatcatgaagttcaagcctgactgtgtaaacgttgaagaggtccttccacactggttgtcttggcttccactacatgaagataaagaagaagctgttcagactttcaattatctgtgtgacctgattgaaagtaatcatccaattgttcttggcccaaacaataccaatctgcccaaaatatttagtataattgcggaaggagaaatgcacgaggcaattaaacatgaagatccttgtgccaaacgtctggccaatgtcgttcgccaagtacagacttctggaggactgtggactgagtgcatagcacagctcagtcctgagcagcaggccgccattcaggagctcctgaactctgcgtgaagggccttaa

SEQ ID NO: 47226 - DNA, 637 bp, Homo Sapiens
acgcgtccggccaggagatagggaagcccagccaggactgaccctccttcctccagcctgccctgacccacctggcaaagcagggcacatggggaggaagagactggaacctttctttgacagccaggcctagacagacaggcctggggacactggccccatgaggggaggaaggcaggcgcacgaggtccagggaggcccttttctgatcatgccccttctctcccaccccatctccccaccaccacctctgtggcctccatggtacccccacagggctggcctcccctagagggtgggcctcaaccacctgctcccgccacgcaccggttagtgagacagggctgccacggcaaccgccaagcccccctcaaggtgggacagtaccccggacccatccactcactcctgagagggctccggcccagaatgggaacctcagagaagagctctaaggagaagaaaccccatagcgtcagagaggatatgtctggcttccaagagaaaggaggctccgttttgcaaagtggaggagggacgagggacaggggtttcaccagccagcaacctgggccttgtactgtctgtgtttttaaaaccactaaagtgcaagaattacatttgcactggtttctcc

SEQ ID NO: 47227 - DNA, 580 bp, Homo Sapiens
gttttctaatggagtatatagtttagtcatttcacagactctggcctcctctcctgaaatccttttggatggggaaagggaaggtggggagggtccgaggggaaggggaccccagcttccctgtgcccgctcaccccactccaccagtccccggtcgccagccggagtctcctctctaccgccactgtcacaccgtagcccacatggatagcacagttgtcagacaagattccttcagattccgagttgcctaccggttgttttcgttgttgttgttgttgtttttctttttctttttttttttgaagacagcaataaccacagtacatattactgtagttctctatagttttacatacattcataccataactctgttctctcctcttttttgttttcaactttaaaaacaaaaataaacgatgataatctttactggtgaaaaggatggaaaaataaatcaacaaatgcaaccagtttgtgagaaaaaaaaaaaaaaagccgaaaaaaaaaaaaaaaacacctgaatgcggaagagctcggctcccgtttagcattttgtacttaaggaaataaaaaa

SEQ ID NO: 47228 - DNA, 437 bp, Homo Sapiens
cttggggtctgcctgcccacccacatgagcccgcgagtatggcagcaggacaagccagcggtggaagtcattctgatatggagttggcattggaagcttattctttttgttcactggagagagagagaactgtttacagttaatctgtgtctaattatctgattttttttattggtcttgtggtctttttaccccccctttcccctccctccttgaaggctaccccttgggaaggctggtgccccatgccccattacaggctcacacccagtctgatcaggctgagttttgtatgtatctatctgttaatgcttgttacttttaactaatcagatctttttacagtatccatttattatgtaatgcttcttagaaaagaatcttatagtacatgttaatatatgcaaccaattaaaatgtataaattagtgtaaaaa

SEQ ID NO: 47229 - DNA, 632 bp, Homo Sapiens
cacgcgtccgaaacgatttcctgtagaagtagctttaatggtttttgctctagaataccgtaggtctatccttagagcactcacgccatgctttcttccctgggttttaaacttcatataactttcagaaattggagagcaaaaattttgcttgtcactgcacatcaatataaaaaagcttatttaacttatcaaaacgtatttattgccaaactatgcttttttttgttaattttgttcatatttatcgggatgacaaatccatagaatatattcttttatgttaaattatgatcttcatattaatcttaaaattttgtgacgtgtctttttcctttttttccacagttttaatatattattcttcaacgacattttttgtaactttacacttttttggttattttattttaaaaaaatgaaaaattaatttaaaaaaatgcaaaaaactgttggattatttattttagaaattcccccctttgtgttggactgcaaattgagtttctttctctttaggcctttcacaactaggactgagaatgtatgtaaaagttctgtgacagtacagaaggaaaacaactttttatgtatagcttctaaaaggggaaaaaaaaaaaaaagagaaaccc

SEQ ID NO: 47230 - DNA, 642 bp, Homo Sapiens
gttttatttttttcttaaaaaaaaaaaagtctaccaaaggaatttgcatccagcagcagcacttagacctgccagccactgtcaccgagcgggtgcaagcactcggggtccctggagggcaagccctgcccacagaaagccaggagcagccctggcccccatcagccctgctagacgcaccgcctgaaggcacagctaaccacttcgcacacacccatgtaaccactgcactttccaatgccacagacaactcacattgttcaactcccttctcggggtgggacagacgagacaacagcacacaggcagccagccgtggccagaggctcgaggggctcaggggctcaggcacccgtccccacacgagggccccgtgggtgggcctggccctgctttctacgccaatgttatgccagctccatgttctcccaaataccgttgatgtgaattattttaaaggcaaaactgtgctctttattttaaaaaacactgataatcacactgcggtaggtcattcttttgccacatccctatagaccactgggtttggcaaaactcaggcagaagtggagacctttctagacatcattgtcagccttgctacttgaaggtacaccccatagggtcggaggtgctgtcccc

SEQ ID NO: 47231 - DNA, 580 bp, Homo Sapiens
gtcagaacttcgtagaccgacctgaagtttctttttgaatacttgtttctttagcactttgaagatagaaaaaccactttttaagtactaagtcatcatttgccttgaaagtttcctctgcattgggtttgaagtagtttagttatgtctttttctctgtatgtaagtagtataatttgttactttcaaatacccgtactttgaatgtaggtttttttgttgttgttatctataaaaattgagggaaatggttatgcaaaaaaatattttgctttggaccatatttcttaagcataaaaaaaatgctcagttttgcttgcattccttgagaatgtatttatctgaagatcaaaacaaacaatccagatgtataagtactaggcagaagccaattttaaaatttccttgaataatccatgaaaggaataattcaaatacagataaacagagttggcagtatattatagtgataattttgtattttcacaaaaaaaaaagttaaactcttcttttctttttattataatgaccagcttttggtatttcattgttaccaagttctatttttagaataaaatgg

SEQ ID NO: 47232 - DNA, 919 bp, Homo Sapiens
  misc_feature (619)..(619): n is a, c, g, or t
ccacgcgtccgtggggaggggagcttatagggaacccgtgttaactcagaatgctgaagaaagtgcttttagccaacaaaagtaagattactatctagaaggtggaaagaagtcattgcttctgttcctccagcagtcagttgactctaggtttcctttggtttatatccccagttcttaatactaaaacttatttgacttcctatcaggaagcacacaaaaaaagcgtcatttaaaaccctggatataggctttaaaggatacaaaaacagcagcattgtcgttttgccaggttcatcaccattttgatgtgctacccatccttccaccctccctttcctgcccccaagcctcccagccaggccagatgtgaagattctattaatcactgtttcagagaacattaattcttgtatagaataattatctactaaattgcttattatctgtgactaccttgcagagaacatctcaacagtgcagtaaaatagctctcctagacttgagcttccagccaggcatttagatcactcttaagcctttgtggaattctgaggaaaaaaagcaagatgcctcaatgccaatgctgggccataagattctactcccctccctgtanggtggggcgcgtggctcagctttggaaaatcattttgccagtaatattgcctgtgaatccctttaagaagtcgtcctgatctgagcctgtctttctgagcactttggtgctgaattgaaaatggtaagctaaagcagtgacagatccacgtagcctctttaacctctttattatcttgccaaaaaaaagtttctcaggttaaacctttgtctttaccctcccttttgttgggggagaaaatgtgtcactaatcagtggtccaagggatatccttagctttgggtactcagttcctgcagc

SEQ ID NO: 47233 - DNA, 739 bp, Homo Sapiens
ctggaaggagttcactgtagacccgtcccatggggaaagaggctgcggacttgctgctgctgctgctgccagtggcctcttctgggtgccaggagaggggaaggacctttgtctgggcgttaccaagggctggaaactttacctggtacctaaaggtttcatttggtatcagaccggagacccttgggttctcccgtctcaccacccctttctacagtaagcacttggaagattgtttcagggtgtctcagggtccctctgtaccatctgctgtggaatgcaggaccctctgtgacattctttatcccttcttccccgggttggtggccatggagggtcttgtctgctgtgattcgactctggatgctgtgagcttgatgctggccagggaagcagaggatgtgagaggcagaggcaggctcctggggctgagctccttcctctgcatcattctgggcttggcctggacagcacccgccagtgagagctgtgggcctcaccctctggcagctgagccaagcactgtcattcttggtgccatcttcccctgccgcaccggcagtctcagcccagcccccacctttgggttgtaggttgggctcccaagcaacacagaccactcttccccttgcccctcccccagagggacttgactttctttctggactgtttgtattgaaacaaagtggtgtcaaaataaagcccctgcagggcctggctccctgttggtctgagtgaa

SEQ ID NO: 47234 - DNA, 694 bp, Homo Sapiens
  misc_feature (654)..(654): n is a, c, g, or t
ttttttttttttttttttccaaaatagccttgcttggtactgcatggaaagttcaagcttttcttcttgcccgctcagggctggcctcttccccgtgtcttcacagcgtccctaaggaagatttttgcagcactctctggagctgaggggagtgaaatttggtccagagaaggcggaaggaaatagttttcctgtttccttttctcgaggtggatgtcctcaggcttccttcacacctccttctcatgggtgcggctggcagtacagtcaggctgtggaggagggctgagaagaaaggggcactggtccagccccaggtttggtctgagacaggtacacagcagataccatcccaccttcctctctaaagaacaggccagccacacatataaccctttccctactttactaatgtatcccttatgtggtaccagcaatggaggacaggcagacttaccccctgccatctagagagaatgttgttattacccgtaaaacttgaccacccccatatcccactcctttttgtaaaaacaaatgcttaaacctgtgagcctgccgttcctttctatgtgttaatcagtttccttccatttgagctgtgtgggagggaagggcattgaaattgtaggttgtaatcttgtgccaaccaantaaaaccagtatttcacacacaaaaaaaaaaaaaaaacct

SEQ ID NO: 47235 - DNA, 768 bp, Homo Sapiens
acctccctgctcggaagggtctccgtggaggggtcctcatttcacatgctgggttttgcaagcgaggaagccaggcagtggaggaactagagagaggcaggcgtgtgtgtggacaagcgctggagccgcagccctcagactggcacgggaacgccagcgttgggtgttcagattccacgcgtatgtctgggctcactcacagcatggccgagtgtctgcagtgctggtcctgacccttccagagcagcagtggacagatgagataagactgtttcagaaacaaagatggccacagccttcctaacaagcaggtcatctggccatgtctgtattgtaactggtaaaaggcttcaagtcagattgatgatcaagaaaagtcaaaaccccagcccaagattgggaaagcaggtggtggttccaagcttttaaaaaattattgaagctctccatcctgttctgtgagtgtgtcttctctttctccttcacgtcatagccgtgacccaccgttcatctctgctcttgcgtaaagatgaccgatggagtccaaagccaagtggcttcaccagctgacaagccaccctcctgcagccctgagtttcacagtccactgggttcgttgtcacgcggtgtttgaatggttaagcccttgcagtatttcagatcgggcaaaaaatatcggatgcacatagcagaaccattggtggtatttatagctttgctttgtactcctcactgtttctgcctacgcaaaatatccatgtttcctct

SEQ ID NO: 47236 - DNA, 780 bp, Homo Sapiens
cccacgcgtccgaaaaatggttttttgaacctccaaatggaattacagactcagtagccatatcttccaaccccccagtataaatttctgtctttctgctatgtgtggtactttgcagctgcttttgcagaaatcaaaattttcctgtggaataaagatggtccaaaaatagtcaaaaattaaatatatatatatattagtaatttatatagatgtcagcaattaggcagatcaaggtttagtttaacttccactgttaaaataaagcttacatagttttcttcctttgaaagactgtgctgtcctttaacataggtttttaaagactaggatattgaatgtgaaacatccgttttcattgttcacttctaaaccaaaaattatgtgttgccaaaaccaaacccaggttcatgaatatggtgtctattatagtgaaacatgtactttgagcttattgtttttattctgtattaaatattttcagggttttaaacactaatcacaaactgaatgacttgacttcaaaagcaacaaccttaaaggccgtcatttcattagtattcctcattctgcatcctggcttgaaaaacagctctgttgaatcacagtatcagtattttcacacgtaagcacattcgggccatttccgtggtttctcatgagctgtgttcacagacctcagcagggcatcgcatggaccgcaggagggcagattcggaccactaggcctgaaatgacatttcactaaaagtctccaaaacatttctaagactactaagg

SEQ ID NO: 47237 - DNA, 477 bp, Homo Sapiens
acttgtaacaatattgtaatgaacggctgtgcagtaggcccagcgctgctgtgtctcgtcagaggaatagcttaccacgaacccctcagcatactgggaatctcttcctgaacaacgaatgtaaatttggtcaagtctactcttccgttcattcaattattttaagcatttgaattatttattgtatatcctaaatatatttctcctttggcagtgactagatttccactaatgtgtcttaatctatccctccagctggcagttactgtttttttaatcccctgaagttgtcctgtaggagacagaaattctttgctgtctgtatcccttggagtaagaaggtagtggcatgggtggagtgtgtgttctttctccaaatctattatgatgtttattaaacacttctgtagcaaagatggtggtagttcttttgttactgaagttgcccttcaccatggctatttgaaaaggagatgt

SEQ ID NO: 47238 - DNA, 672 bp, Homo Sapiens
  misc_feature (542)..(542): n is a, c, g, or t
gttgggtgttagtctgcatgagtttgtgagaggaaatagctgggtgtcctggcagtgcccttgaagttggttaggaccttcctgtaaactcttgcccctacttctaactactctataaatatatacatatatttatatataaagtgattagttgaactggcatcctgctttagcctgagacttgccataagaaactgctgagtacttggcaaaccctttcatagttttgttctccatctgtttggggtaggtgttgagcgaggcaaatggatctcgatatttcagatgggcttttgatgcactgttgccaaggaaggctttttctgattttttgacaaatgaatttttgcacactttcattggtgtctttcggcaacttacacacattgaaaatgagctattgtacatatttttatattctctttataaatgcatgtctgattgtacttgtaacaatattgtaatgaacggctgtgcagtaggcccagcgctgctgtgtctcgtcagaggaatagcttaccacgaacccctcagcatactgngaatctcttcctgaacaacgaatgtaaatttggtcaagtctactcttccgttcatcaattattttagcatttgaatatttattgatatcctaatatatttctcctttggcatgactagatttccccaatg

SEQ ID NO: 47239 - DNA, 804 bp, Homo Sapiens
  misc_feature (720)..(720): n is a, c, g, or t
  misc_feature (730)..(730): n is a, c, g, or t
  misc_feature (748)..(748): n is a, c, g, or t
attttaaagagtctcaaaatgaaccagcaactaggttagcattacatagtaattagttgtggtgttcaggctttaactcactcagtaccagacagtatagttaaactgtcgctgaaaaaacattgctacttacatgatattctctagtttaaacctatagcagtaatttttgtaccttaaaaaaccaaggtattatgacagattatataaatgttgaaccagtaacagacaaacaattatttaaaggacgtgctaatgactcagtttattgacctaggggttatttaagccgctcagcaagtcccttaacatttggtggtatgaaatgaagcattgcttgatagtatagaactgccagtttcaagaagtccttgtacttaatggaagaaatgtaagttaaagatgactagatggcataccttcattaaaatattgccagaaaaagccaaagacctttataggtttgagtaaatattcatttcaacttgataatcacatctgacaacttccattaggtacctattagagcattttttctgttaataactacaaataaggaaaaataaaatatattttaatggctccagttatttcttgcacgtcatttttctcttcaagaaagcctattatgagccagaggaatctaaaatttatatttttttccttgaatatgcagataaataataataaaatgggtcagacacggtggcttacgcctgnaatctcacantttgggaagctggggcangcggatcacctgagttcaggagttcgagactagcctggacacgtggcaaaccccat

SEQ ID NO: 47240 - DNA, 556 bp, Homo Sapiens
taactggttatttcttgccagaggggaatgtttttaatactgcattgagccctcagaatggagagtctcccccgctccagttattggaatgggagaggaaggaaagaacagcttttttgtcaaggggcagcttcagaccatgctttcctgtttatctatactcagtaatgaggatgagggctaggaaagtcttgttcataaggaagctggagaactcaatgtaaaatcaaacccatctgtaatttcgagtgggtggagctcttgcttttggtacatgccctgaatccctcactccctcaagaatccgaaccacaggacaaaaaccacctactgggctctctcctaccctgccctcctcccttttttttacccctctcttttttattttttctttgctctttagaacccagtgaaaaataccagggtactggggtgcaactctttcttatgataggtcattagtgctttaagcaaaagatattagcagctttgactgcagcattagcaattaggaaaaaaaaaaaattaagttccctgcggacatgtaactttgcca

SEQ ID NO: 47241 - DNA, 986 bp, Homo Sapiens
acggtgctcctgggtgtgctgcaggggcaacagcagagcctacagcagggggcacactccaccggctccagccgcctgcacgacctctactggcaggccatgaaaaccctgggagtccagcgccccaagttggagaagaaggatgccaaggagatccccagtgccacccagagccccatcagtaagaagcggaagaaaaagggattcttgccagagacgaagaagcgcaagaaacgcaagtcagaggatggcacgccagcggaggatggcacacctgcagccaccggcgggagccagccccccagcatgggcaggaagaagaggaacaggacaaaggctaaggtcccagcccaggcaaacgggacgccaaccaccaagagtccagcccctggcgcccccacccggagccccagcacccctgccaaatccccaaaactgcagaagaaaaaccagaagccgtcccaggtgaatggagctcccgggtcccccacggaacctgcaggccaaaagcagcatcagaaggctcttcccaaaaagggggtcttgggcaaatcaccactgtccgcgctggcacggaaaaaggcaaggctgtctttggtcatcaggagtcccagcctgcttcagagtgggggcaagaagaaagcccaggtgagggaagggagggaagccctggagcacaggtacggggcccccctcaacccctggcctcatttggctggagagccctatttttttttttttttttttaaaccctggattttaatacgcaagctggtttctagggggctgcccctgggggaaggggggctggttccccccggtccgggcattctgggtcggggaaagacgaacgggaacccggtcctggcgggggtccccggggggcaagagactccccgcccctgggtgtcgggggggggaaaccttggatcctctgggctattgcttgggggcttgggggttcactccgagatttgggcgcgatt

SEQ ID NO: 47242 - DNA, 930 bp, Homo Sapiens
  misc_feature (872)..(872): n is a, c, g, or t
  misc_feature (912)..(912): n is a, c, g, or t
ttaattttggggtgcttcttgactcttagttgggaaactgaaaatatttccaaccttttacccacgtcaatggcatattctgggaatcaccaccaccaccaccactaccacagaaagaggctggaggctcctgtaccctgttcattccttaagggccctgcttcccttaataagtaagtaagttggtctacggccctaaatatgcaaatgagagctgaaggtttttaaaaggtagaaaggaaaagggcaagggcttccacccctgctttaaaatgatttatttattctctgcttgtatttcttgtggagagagtaaggatagaaccaacaaggggctgagtagctgagaaaggggccacccaagagtgaaacatactttataccagaggagcagtggagcctcatgcagcacattatcatttgttatttgggtttaataataattttgacatcttttcactcatacacaaaaaaagtcagaactggtgttatttactgttgatttcatcctcctgtgtatgaaataacaagcctagaggaatgaactagtgctactgaactgtttaaattatttttgtgttaatagtacactttgagtatctttttccacattaaaaactttctgaattataaatgttttccttacattatttaacaatgtacactgttaaaaataaaaataaaaattcaaactttggggggttttcctcgccagcccggtaaattgtacatttttgccactaaactcctggggttggtgcccccttccttgtaaagaattgccgcctttcgcgggcctccaacttttggtttacccttttggtaggaactttactttaaaatggaaaccccaatttcccacattaaaaatnccaaaaaccttggcctttcttttggttttgaaaaaccacncacacccaccctttcttt

SEQ ID NO: 47243 - DNA, 399 bp, Homo Sapiens
gaaaaaccacgcaaacccaagaggcagagggcggctgagatggaaccacctcccgaacccaagaggcggagggtcggtgacgtggaaccgtcacgcaaacccaagaggcggagggccgctgacgtggaaccatcatcacccgaacccaagaggcggagggtcggtgatgtggaaccgtcacgcaaacccaagaggcggagggccgctgacgtggaaccatcatcacccgaacccaagaggcggagggtcggtgacgtggaaccgtcacgcaaacccaagaggcggagggccgctgacgtggaaccatcattacccgaacccaagaggcggaggttgagctgagaagaggccagtgcactcaagcctgagcaataagaataaaaccgagtagaacaaaat

SEQ ID NO: 47244 - DNA, 897 bp, Homo Sapiens
ttttcgctcgtcgactgcggctcttcctcgggcagcggaagcggcgcggcggtcggagaagtggcctaaaacttcggcgttgggtgaaagaaaatggcccgaaccaagcagactgctcgtaagtccaccggtgggaaagccccccgcaaacagctggccacgaaagccgccaggaaaagcgctccctctaccggcggggtgaagaagcctcatcgctacaggcccgggaccgtggcgcttcgagagattcgtcgttatcagaagtcgaccgagctgctcatccggaagctgcccttccagaggttggtgagggagatcgcgcaggatttcaaaaccgacctgaggtttcagagcgcagccatcggtgcgctgcaggaggctagcgaagcgtacctggtgggtctgttcgaagataccaacctgtgtgccatccacgctaagagagtcaccatcatgcccaaagacatccagttggctcgccggatacggggagagagagcttaagtgaaggcagtttttatggcgttttgtagtaaattctgtaaaatactttggtttaatttgtgactttttttgtaagaaattgtttataatatgttgcatttgtacttaagtcattccatctttcactcaggatgaatgcgaaaagtgactgttcacagacctcagtgatgtgagcactgttgctcaggagtgacaagttgctaatatgcagaagggatgggtgatacttcttgcttctcatgatgcatgtttctgtatgttaatgacttgttgggtagctattaaggtactagagttgataaatgtgtacagggtccttttgcaataaaactggttatgacttgatccaagtgtttaacaattggggctgttaagtctgaccatacatcactg

SEQ ID NO: 47245 - DNA, 737 bp, Homo Sapiens
ccgggggggtgggctctgcagctgctctatttccaggcatgtgatcgcccccgctctccagattccccagcactctgctgcgtgtaactccactcaattctccactcatccttccttgtgaagcaggatcgttgaagttttaagtatgggcaaaaatctggaaaacttaggatccctctgacaccccaggattaggggacacagcagtggctagggcatcagccacagaactgagcgggaaatgccacttgtattggctgtaaagaaatcctggctttgggccaggcacagtggctcaagcctgtaatcccagcactttaggaggttgaggcggatggatcacctgaggtcaggagtttgagaccagcctggccaacatggtgtaaccccgtctctactaaaaatacaaaaaaattagccaggcgtggtagcgggcacctgtaatcccagctactcaggaggctgaggcaggagaatcacttgaaccggggaggcagaggttgcagtgagctgagatcatgccactccactccagcctgggcgacagagcaagactccatctccaaaaaaaaaaaaaaaaaggccggcacggtgactcacgcctataattccagcactttgggaggccgaggcaggtggatcacgaggtcaagagatcgagaccatcctggccaacatggtgaaaccctgtctctactaaaaatgcaaaaaattagctgggcgtggtggcgggcgct

SEQ ID NO: 47246 - DNA, 730 bp, Homo Sapiens
  misc_feature (712)..(712): n is a, c, g, or t
ggggttttagtggtttaatgaatttttaattaagaaagggtagtttggtagtctacttaaaaatgtttctgggaaattcactagaaacattaaccaataggattttggtgagcttagcttctgtattcctactgccgcccagaaaaggggcagggctctgcagccgccaggacagacgagcaccccatgcctatacctccctccccgagctaagtcccagggcatctgggccttgcctggagactgggctagctctgtaggctcggagagcctggggagggtgccaaccccacctctagtattttgggagatagggaaagtgaaccgacttccccttcccatacccctcagggtggttccctaccagccaggcttactacttctagaagaaagcagagtgccagggagtgagattgcatccctgggcttagaagtgacggagagaagacttgtttagtattttgccatcagcacaaggaaaaccaggagagagtctgcctccaggactctgagccttctgcctcgtatgttcagaaggtggataggtcttcccactccagcatggcttgaactcttaggggtctgcagtgctccatctccattggtggccccagctcagtaactatacctggtacatttcctgtgtgcaatcagtaccttgaaggcagaacattctgaatacagttggaaaaagaacagctttgctttgcanagattgatgacagactgg

SEQ ID NO: 47247 - DNA, 1041 bp, Homo Sapiens
  misc_feature (309)..(309): n is a, c, g, or t
ggatgaaattttctcagagcaaactttctattttttacctgtgaaataacagtgactttttaaaatggtgacagtgttggcaaggmaacagcaacacaggctgcgctgttggtaggagtgaaaaccagtataattcttctgaaaaacatttatcagaaacttaaaatatttcataccgtttgatccagtagcttcttctaaatcataaatgcagacaatgtttaggtaaagacatactcattaagtgttatttattttactcaagaactggaaaccaactaaatgccttctatagaagtaatttttgangaggagaaatggtacaatactaattaacaacttggtttaacatgtttactgagcatctgttaagtgtkgggggaaaaagcagcaggatccagagctataggtacagtgtgatctcagctttgcaaacacattttctacatagatagtactaggtattaatagatatgtaaagamagaaatcacaccattaataatggtaagattggtttatgtgattttagtggtatttttggcacccttatatatgtyttccaaactttcagcagtgatattatttccataacttaaaaagtgagtttgaaaaagaaaatctccagcaagcatctcatttaaataaaggtttgtcatctttaaaaatacagcaatatgtgactttttaaaaaagctgtcaaataggtgtgaccctactaataattattagaaatacatttaaaaacatcgagtacctcaagtcagtttgccttgaaaaatatcaaatataactcttagagaaatgtacataaaagaatgcttcgtaattttggagtaggrggktccctcctcaattttgtatttttaaaagtacatggtaaaaaaaaaaattcacaacagtwtwtawggctgtaaaatgrgaattctgccccycmcctcttacccagtactattytccagaggtatytattammatttyttatgtawtttcaaaaattktatgggawawaacaaaawgtaacytaattttaaaaaaagggg

SEQ ID NO: 47248 - DNA, 836 bp, Homo Sapiens
ctttatccattccttgccatctggagattaattagcaatttcttgtttagtaatccgcctcccacacagacttcagtgagagtaacatcgtcagaacccccaaaccctgcatcatctagcaaatcagaaaaaagggaaccagtgagaaaaagagtgctggaaaaacgtggagacgactttaaaaaggaggggaaaatttatagattaaggactcaagatgatggtgaagatgaaaacaacacttggaatggaaattccactcaacagatgtagtgtgacaagtataatatgtgcaataatcattgtttctcttatgatttaattcaactaaaattctactggagaagtgggactgctttatattttccaactggtctataaaatgtctctttattcctgcttagtgggtgtgggttgaaggtgtttaactcagaaaagtaaagacaggaaataactctctgctaggtccttgcttatatggcaaccactgctagaaccctaaaagaaccaaaaatctgccacagcctgcctccatcagcttcttatttagtatttcatatgcccattagccctatgcttcagatgacacgttttgtttagagctactttgctccaagactcttaagcccaaagtaactggtatgtcactgagtaacttgactcggtgtcagagcattttaactagccactcagatgagaatttatgtttaacttctctttttactcatcagctgcaagcaaaatcttgtagtttttaatcttaaacactgaataaaaaaactttcccctaaattggaatgatcttagttttgctttgagttttgttatctagcatc

SEQ ID NO: 47249 - DNA, 683 bp, Homo Sapiens
gaggaagcatccaaagtgagcccatcagttctacttagcattgatgacagtgacccaattgtctgcccagctctctgggaagctgtactctatacacttacaactattgaggactgttggcttcatgtaaatgcaaaaaagagtgtgtttcccaagctatcaactgtgattcgtgaaggtggtcggggtctagctactgtcatatatccttaccttctgccattcatcagcaagctccctcagtccatcacaaatccaaagttggatttcttcaaaaatttcctcacgtctctagttgctgggctgtcaacagagagaactaaaaccagctctttagagtcctcggcagtaatatctgctttttttgaatgcttacgttttataatgcagcaaaacttaggtgaggaagagattgaacagatgctcgtcaatgatcagttgatcccttttattgatgcagttctcaaagacccaggattgcaacatgggcagctatttaaccatttagcagaaactctaagttcctgggaagccaaagcagacacggaacaaagatgaacaaaacagctcacaacttggagaacgtactgatacatttctgggaaagactgtcagagatctgtgttgcgaaaatcagtgagccagaagctgatgttgagtccgtttgggtgtatctaacctat

SEQ ID NO: 47250 - DNA, 792 bp, Homo Sapiens
ttaaacacgaggcaaataaccctcaactgaaagagggtttacagaatatggaggccaggttggcagagagaaaattcatgaaccctttcaacatgcctaatctgtatcagaagttggagagtgatcccaggacaaggacactactcagtgatcctacctaccgggagctgatagagcagctacgaaacaagccttctgacctgggcacgaaactacaagatccccggatcatgaccactctcagcgtcctccttggggtcgatctgggcagtatggatgaggaggaagagattgcaacacctccaccaccaccccctcccaaaaaggagaccaagccagagccaatggaagaagatcttccagagaataagaagcaggcactgaaagaaaaagagctggggaacgatgcctacaagaagaaagactttgacacagccttgaagcattacgacaaagccaaggagctggaccccactaacatgacttacattaccaatcaagcagcggtatactttgaaaagggcgactacaataagtgccgggagctttgtgagaaggccattgaagtggggagagaaaaccgagaagactatcgacagattgccaaagcatatgctcgaattggcaactcctacttcaaagaagaaaagtacaaggatgccatccatttctataacaagtctctggcagagcaccgaaccccagatgtgctcaagaaatgccagcaggcagagaaaatcctgaaggagcaagagcggctggcctacataaaccccgacctggctttggagg

SEQ ID NO: 47251 - DNA, 777 bp, Homo Sapiens
cgtcgaggcttccatggggtgggggaggccagcttccttctgacaggatgggcgcatacagtgcctggtgtgatttgtgcacaacccgtgttccaggtgcacatcctcccaaggagacacccagacccttccagcacgggccggccaagttgctgcggcggaggcagcatttcagctgaggaaggtcattggattcatgtgttttatctgtaaaaatggttgtcttaacttcttaacctcatattggtaagtgattgataaaaattggttggtgtttcatgacatgtggacttcttttgaaatagcaagtcaaatgtagtgaccaaattgtggaagagatttctgtcaaataggaaatgtgtaagttcgtctaaaagctgatggttatgtaagttgctcaggcactcagatgacagcagattctgggttctgggagtgttctgtgcctcttacatgccctggaggcctcatggtctcagtgctgaggcggcacacctgtagcacacctgcgtaatgtgcggtctgggccagtcacaaggaattgtgttgtctaagccaaagggggaagctgactgtgatttaccaaaaaaaattctgtaattcaaaccaaaatgtctgcggaatcaccagtttgatactctctgtaatcagaacagtgggcagtgcctgggtgaacgtgtctagcagccactgtgcgggatcgctgtaacaggagtggaatgtacatatttatttacttttctaactgctccaacagccaaatgccttttttatgac

SEQ ID NO: 47252 - DNA, 928 bp, Homo Sapiens
tttgtacaaaaaagcaggctggtaccggtccggaattcccgggatcagatgccaggagccggcagacctgtcacccgcaggtggggtgagtctcggagctgccagaggggctcaccgaaatcggggttccatcacaagctatgtttaaaaagaaaattggtgtttggcaaacggaacagaacctttgatgagagcgttcacagggacactgtctgggggtgcagtgcaagcccccggcctcttccctgggaacctctgaactcctccttcctctgggctctctgtaacatttcaccacacgtcagcatctaatcccaagacaaacattcccgctgctcgaagcagctgtatagcctgtgactctccgtgtgtcagctccttccacacctgattagaacattcataagccacatttagaaacaggtttgctttcagctgtcacttgcacacatactgcctagttgtgaaccaaatgtgaaaaaacctccttcatcccattgtgtatctgatacctgccgagggccaagggtgtgtgttgacaacgccgctcccagccggccctggttgcgtccacgtcctgaacaagagccgcttccggatggctcttcccaagggaggaggagctcaagtgtcgggaactgtctaacttcaggttgtgtgagtgcgttaaaaaaaaaaaaaaaaaaagaatccctatacctcatttgtatttttaaaatgcgtgatgttttatgaaattgtgtccattttttaggtattagatatggcaggaaaaccattttccactatgcaaaggttcttttagacgtcagtgaaaatcaactctcatacctaatgggctctcttttaattgacaaaccttccatttttctttaaatcaaagcgatctgtgttctgagcaacctttcccgaacacacagttgagtgc

SEQ ID NO: 47253 - DNA, 692 bp, Homo Sapiens
gcaaaagaaatagttttaagtaactttttatagcaagatgatacaatggtatgagtgtaatctaaacttccttgttgtattaccttgtatgctgttacttttattttattccttgtaattaagtcacaggcaggacccagtttccagagagcaggcggggccgcccagtgggtcaggcacagggagccccggtcctatcttagagcccctgagcttcagggaaggggcgggcgtgtcgccgcctctggcatcgcctccggttgccttacaccacgccttcacctgcagtcgcctagaaaacttgctctcaaacttcagggttttttcttccttcaaattttggaccaaagtctcatttctgtgttttgcctgcctctgatgctgggacccggaaggcgggcgctcctcctgtcttctctgtgctctttctaccgcccccgcgtcctgtcccgggggctctcctaggatcccctttccgtaaaagcgtgtaacaagggtgtaaatatttataattttttatacctgttgtgagacccgaggggcggcggcgcggttttttatggtgacacaaatgtatattttgctaacagcaattccaggctcagtattgtgaccgcggagccacaggggaccccacgcacattccgttgccttacccgatggcttgtgacgcggagagaaccgattaaaac

SEQ ID NO: 47254 - DNA, 874 bp, Homo Sapiens
cagggcctgaccaaggactacggcaactcacccctgcaccgcttcaagaagccgggctccaagaacttccagaacatattcccgccctcggccacgctgcacctctccaacatcccgccctcagtctccgaggaggatctcaaggtcctgttttccagcaatgggggcgtcgtcaaaggattcaagttcttccagaaggaccgcaagatggcactgatccagatgggctccgtggaggaggcggtccaggccctcattgacctgcacaaccacgacctcggggagaaccaccacctgcgggtctccttctccaagtccaccatctaggggcacaggcccccacggccgggccccctggcgacaacttccatcattccagagaaaagccactttaaaaacagctgaagtgaccttagcagaccagagattttatttttttaaagagaaatcagtttacctgtttttaaaaaaattaaatctagttcaccttgctcaccctgcggtgacagggacagctcaggctcttggtgactgtggcagcgggagttcccggccctccacacccggggccagaccctcggggccatgccttggtggggcctgtgtcgggcgtggggcctgcaagtgggcgccccgaccacgacttggcttccttgtgccttaaaaaactgccttcctgcagccaacacccacccgggggggccctggggacccaaaggggtggggggggccacaccaaaaaaaaggaggggggccctggccgggtccctggcaggatcattgcactttgggggcccggggggcccgttttaatttacccccgaaggaaagggttcccctaaaagtggagggtcgtaattttaaaagaccaaag

SEQ ID NO: 47255 - DNA, 912 bp, Homo Sapiens
tgtggttggcctgggggaaggcagagcacgtatttctcccctctagtacctctgcatttgtgagtgttccctctggctttctgaagggcagcagactcttgagtatactgcagaggacatgctttatcagtaggtcctgagggctccaggggctcaactgaccaagtaacacagaagttggggtatgtggcctatttgggtcggaaactgcatgtttcagaaagtttgtctctttttcctactcattatttgaagaagagagagcctgtggggatagccttatcttggtccacaggactgaagtgaagtcacttgggaaggggagacagaggatgagcggcgtctgtgtagggacccccccccgggcctgcagaagggtggtgtgctcccaggactggcatgacaggtgtctcctcctcaccacaggctgtgcccatgagtccctgtgcagaccagtgggcaaggcagctgggccagatctcaggccagccgtttgtgctcctagcagggttgctgtgctggccacacggagaggccctagagagcctcatggattgtaactaaagaagaaacggttcctttttgtttttttaaaaatgatttttaaataccgttttttacaccgttctctcggtactttttttaagctaagtcagcattgtcttccagtgttaaaggcatccctcacctctgcattgaacttacgtatccatgccaaggaatggaatttccatcctgagccagttcagttaggtgtcaattgatactattttaattttttatgcaatctgatgagatgagctcagatttaaaaatctcaaaagcacgtttattgtaacaagaaattgttatgtattaatactgcagttttcaataaagaattgacttgtgttgcaaaaaaaaaaaaaaaaa

SEQ ID NO: 47256 - DNA, 409 bp, Homo Sapiens
  misc_feature (409)..(409): n is a, c, g, or t
atccctggagtctggtcttctgcacgtcaagggacggtttcagcctgcagacctgtaccggcggatggagggctgcagcgggccagtgctgctggtgctcagggaccaggacgggcagatatttggagccttctcctcctcggctatccgactcagcaaaggcttctatggtactggcgagacattcctcttctccttctccccacagctgaaggtctttaagtggactggaagcaactctttctttgtgaagggagacttggattcactgatgatgggcagtggcagtggcggtttgggctgtggttggatggagacttgttccgcgggggaagctccccttgcccgaccttcaacaacgaggttctggcccggcaggaagcaagttctgcaatccaggagctggagn

SEQ ID NO: 47257 - DNA, 653 bp, Homo Sapiens
ggacatattccaagactcttttacattatgtcagaatgcaagccctgcctcagcttctcccaacactcagcttttcgcaacataatcccagcactttggaacgctgggtggattgcttgaacccaggagttcgagaccatcctgggcaatatggcaaaaccccatctttaccaaaaataagctgggtgtggtggaacatgcctgtggtcccagcttcttgggaggctgaggtgggaggattgcttgaacccgggaggtagaggctgcaatgggccatgatcacgatcctgcactccagcctgggcaacagagagagacagtccctggcccactgcccccttccctggcccagtctcaaaaaaaatgaggctgggcgtggtggctcacatctgtaatcccagccaaggctggcagatcacttgaggccaggagttctgagaccagcctggcttacatggtgaaaccccatctctactaaaaatacaaaaactagccaggcatggtgggaggcacctgtagtcccagctacttgggaggctgaagcaggagaatcactttaacccgggaggtggaggttgcagtgagctgagatcacaccactgcactccagcctgggcggcagagcaaaactgaaaaaaaaaaaaaaaaaaaaa

SEQ ID NO: 47258 - DNA, 690 bp, Homo Sapiens
tcaaactggctcctaatctccagctttcctgtcattgaaagcttcggaagtttactggctctgctcccgcctgttttctttctgactctatctggcagcccgatgccacccagtacaggaagtgacaccagtactctgtaaagcatcatcatccttggagagactgagcactcagcaccttcagccacgatttcaggatcgcttccttgtgagccgctgcctccgaaatctcctttgaagcccagacatctttctccagcttcagacttgtagatataactcgttcatcttcatttactttccactttgccccctgtcctctctgtgttccccaaatcagagaatagcccgccatcccccaggtcacctgtctggattcctccccattcacccaccttgccaggtgcaggtgaggatggtgcaccagacagggtagctgtcccccaaaatgtgccctgtgcgggcagtgccccgtctccacgtttgtttccccagtgtctggcggggagccaggtgacatcattaatacttgctgaatgaatgcaaaaattaacggttcttgacttggactatattggctgccatgaaaggggtcttcacaagggtattcattatcgtaaggggaaaagacattctgctttgagggagggaataaaaaggggccagggagggggaccttttgaggcttta

SEQ ID NO: 47259 - DNA, 584 bp, Homo Sapiens
actttggatttgctgggtctgaatcggcttcataaactccactgggagcactgctgggctcctggactgagaatagttgaacaccgggggctttgtgaaggagtctgggccaaggtttgccctcagctttgcagaatgaagccttgaggtctgtcaccacccacagccaccctacagcagccttaactgtgacacttgccacactgtgtcgtcgtttgtttgcctatgtcctccagggcacggtggcaggaacaactatcctcgtctgtcccaacactgagcaggcactcggtaaacacgaatgaatggatgagcgcacggatgaatggagcttacaagatctgtctttccaatggccgggggcatttggtccccaaattaaggctattggacatctgcacaggacagtcctatttttgatgtcctttcctttctgaaaataaagttttgtgctttggagaatgactcgtgagcacatctttagggaccaagagtgactttctgtaaggagtgactcgtggcttgccttggtctcttgggaatacttttctaactagggttgctctcacctgagacattctcca

SEQ ID NO: 47260 - DNA, 587 bp, Homo Sapiens
agaacaaatacccacccatttccaccatggtatggtaacttctctgagcttcagtttccaagtgaatttccatgtaataggacattcccattaaatacaagctgtttttactttttcgcctcccagggcctgtgggatctggtcccccagcctctcttgggctttcttacactaactctgtacctaccatctcctgcctcccttaggcaggcacctccaaccaccacacactccctgctgttttccctgcctggaactttccctcctgccccaccaagatcatttcatccagtcctgagctcagcttaagggaggcttcttgcctgtgggttccctcacccccatgcctgtcctccaggctggggcaggttcttagtttgcctggaattgttctgtacctctttgtagcacgtagtgttgtggaaactaagccactaattgagtttctggctcccctcctggggttgtaagttttgttcattcatgagggccgactgcatttcctggttactctatcccagtgaccagccacaggagatgtccaataaagtatgtgatgaaatggtcttaaaaacaaaaacaacaaa

SEQ ID NO: 47261 - DNA, 779 bp, Homo Sapiens
aagatggacttgacagttcggtcggaattcccgggatggagattgtaatgggtatggagacatatcatataagtaatgctagggtgagtggtaggaagttttttcataggaggtgaaggccgagggcaaagaaggcgaggaagcaaccgctgaggcagaggagaagcagccagaggaggacttccagtgcatcgtgtacttctggcagggccgtgaagcctccaatatgggctggctcaccttcaccttcagcctgcaaaagaagttcgagagcctcttccctgggaagctggaggtggtacgcatgacgcagcagcaggagaaccccaagttcctgtcccatttcaagaggaagttcatcatccaccggggcaagaggaaggcggtccagggcgcccaacagcccagcctctaccagatccgcaccaacggcagcgccctctgcacccggtgcatccagatcaacaccgactccagcctcctcaactccgagttctgcttcatcctcaaggttccctttgagagtgaggacaaccagggcatcgtgtatgcctgggtgggccgggcatcagaccctgacgaagccaagttggcagaagacatcctgaacaccatgtttgacacctcctacagcaagcaggttatcaacgaaggtgaggagcctgagaacttcttctgggtgggcattggggcacagaagccctatgatgacgatgccgagtacatgaaacacacacgtctcttccggtgctccaacgagaagggctactttgcagtga

SEQ ID NO: 47262 - DNA, 835 bp, Homo Sapiens
tatctgtaaagtgctgggcaacctgcagttgaacttgctgagcaagtccaaggtgtacgaggacccagctctgagcgccatcttcctgcacaacaactacaattacatcctcaagtccctggagaagtctgaactgatccagctggtggcagtgacacagaagactgctgagcgctcctaccgggagcacattgagcagcagatccagacctaccagcgcagctggttaaaggtgactgattacatcgcagagaagaatctacctgtgttccagccgggagtcaagctccgggacaaggagcggcagattatcaaggagcgtcttaagggcttcaatgatggcctcgaagaactgtgcaaaatccagaaggcctgggctattccagacacagagcagagggacaggattcgccaggcccagaagaccattgtcaaggagacctacggggcctttctacaagaagttcggcagcgtgcccttcaccaagaacccggagaagtcacatcaagtacggggtggagcaggtgggcgacatgatcgatcgccttttcgacacctctgcctgagcctgctgctagccctgcctggttccaccagactggcgtgtcatgggacagattaaccagtgttaggcttggcaaacacatcactaaaacgtcaaccgacaccacacaggagcacagacaaccaaggaaaagagaaagacgacggagacgccgagcaaagacagacgagcagcatccataagaaggtgaacgagagagagaccgtgggggcgagcgcgcgggaccgatggaataggcgggtgggggtggcgccccgttggcggacaag

SEQ ID NO: 47263 - DNA, 462 bp, Homo Sapiens
aaagagaacgtgaacgagaaaaggagaaagaacgggagcgggaacgagaacgggatagggaccgtgaccggacaaaagagagagaccgagatcgggatcgagagagagatcgtgaccgggatagagaaaggagctcagatcgtaataaggatcgcagtcgatcaagagaaaaaagcagagatcgtgaaagggaacgagagcgggaaagagagagagagagagaacgagagcgagaacgagaacgggagcgagagagagagcgagagagggaacgggagcgagaaagagaaaaagacaaaaaacgggaccgagaagaagatgaagaagatgcatacgaacgaagaaaacttgaaagaaaactccgagagaaagaagctgcttatcaagagcgccttaagaattgggaaatcagagaacgaaagaaaacccgggaatatgagaaagaagctgaaagaaaaaaaa

SEQ ID NO: 47264 - DNA, 690 bp, Homo Sapiens
ggctaaagaaaatgatgaaaattgtggtcctactaccactgtttttgttggcaacatttccgagaaagcttcagacatgcttataagacaactcttagctaaatgtggtttggttttgagctggaagagagtacaaggtgcttccggaaagcttcaagccttcggattctgtgagtacaaggagccagaatctaccctccgtgcactcagattattacatgacctgcaaattggagagaaaaagctactcgttaaagttgatgcaaagacaaaggcacagctggatgaatggaaagcaaagaagaaagcttctaatgggaatgcaaggccagaaactgtcactaatgacgatgaagaagccttggatgaagaaacaaagaggagagatcagatgattaaaggggctattgaagttttaattcgtgaatactccagtgagctaaatgccccctcacaggaatctgattctcaccccaggaagaagaagaaggaaaagaaggaggacattttccgcagatttccagtggccccactgatcccttatccactcatcactaaggaggatataaatgctatagaaatggaacgaagacaaaagagacctgatatctcgagagatcagcaaattcagagacacacataagaaactggaagaagagaaaggccacacagaacacacacacaacacaa

SEQ ID NO: 47265 - DNA, 897 bp, Homo Sapiens
  misc_feature (713)..(713): n is a, c, g, or t
  misc_feature (847)..(847): n is a, c, g, or t
ggacgcgtgggcggacgcgtggggacattgtgagatctgtaattttttttttttgtagaaaatgtgaattttttggtcctctaatttgttgttgccctgtgtactcccttggttgtaaagtcatctgaatccttggttctctttatactcaccaggtacaaattactggtatgttttataagccgcagctactgtacacagcctatctgatataatcttgttctgctgatttgtttcttgtaaatattaaaacgactccccaattattttgcagaattgcacttaatattgaaatgtactgtataggaaccaacatgaacaattttaattgaaaacaccagtcataaactattaccacccccactctcttttgatcagaaatggcaagcccttgtgaaggcatggagtttaaaattggaatgcaaaaattagcagacaatccattcctactgtatttctgtatgaatgtgtttgtgaatgtatgtgtaaaagtctttcttttccctaatttgctttggtggggtccttaaaacatttcccaactaaagaatagaattgtaaaggaaaagtggtactgttccaacctgaaatgtctgttataattaggttattagtttcccagagcatggtgttctcgtgtcgtgagcaatgtggtttgctaactggatggggttttcttattaataagatggctgcttcagcttctcttttanaggaatgtggatcatagtgatttttccttttaattttattgctcagaaatgaggcatatcctaaaaatcctggagagctgtattttatgcatttttgcactaattggtccttagtttaattctattggatccgntttattaaaccaaaaattcatcatacccaaaaaagtgtaagtgaaaaccc

SEQ ID NO: 47266 - DNA, 676 bp, Homo Sapiens
  misc_feature (609)..(609): n is a, c, g, or t
  misc_feature (637)..(637): n is a, c, g, or t
ggcagatgaatttccaagtttaaactctttcctgcaggtgattactttgaaaaaggttggtccagaccattttgatcaagaacctgtatatgtgttgtgttagaggcatctgcctcaagtctatgtacagtgtttgctgcgggtgtgttccaatattcattttacctctgcttgggggttttgtgtgttcccctccccccatgccctgcctacccccttttccctgaaccacgtccttttgaataatttccagatggatttctgtagccataccaaagccagggtgttttcattcatgcggatactagtatttatagatgtctgactacctaacttaatttttgtttttgaacttctaattggggccagtgtaaggtcgatcccagaggctgatctgcaaatcaagctacatgtatttgtgtataagaccctgtgttcaggactgggtgacttttctaagaaatatggggtttagaatggggttgactgtattttttaacctaattctggagagaagattgtattttttacagttttttgggtttggcttccttctcacatttctttagctttgaaatttttactaataaatttcctcctgattaattnttttttctcatctgggaatttgaatctncgtgctactgtacaccatttgtccaagagttgaatcact

SEQ ID NO: 47267 - DNA, 603 bp, Homo Sapiens
gtggattctatactgatggaacgtcgaattagaccatggattaataagaaaatcatagaatatataggtgaagaagaagctacattagttgattttgtttgttctaaggttatggctcatagttcaccccagagcattttagatgatgttgccatggtacttgatgaagaagcagaagtttttatagtcaaaatgtggagattattgatatatgaaacagaagccaagaaaattggtcttgtgaagtaaaactttttatatttagagttccatttcagatttcttctttgccacccttttaaggactttgaatttttctttgtctttgaagacattgtgagatctgtaatttttttttttttgtagaaaatgtgaattttttggtcctctaatttgttgttgccctgtgtactcccttggttgtaaagtcatctgaatccttggttctctttatactcaccaggtacaaattactggtatgttttataagccgcagctactgtacacagcctatctgatataatcttgttctgctgatttgtttcttgtaaatattaaaacgactccccaattattttgcagaattgcacttaatattgaaat

SEQ ID NO: 47268 - DNA, 638 bp, Homo Sapiens
aaagtgtaagtgaaaaccccctttaaaacaaaacaaaaaaatgaaataaaattaggcaaattgacagacagtgagagttttacaaacatgataggtattctgctcggcaatttgtaagtttacatgttatttaaggataaaggtaaatcattcaaggcagttaccaaccactaactatttgttttcatttttgtcttgtagaaggtttatatcttgttttaccttggctcattagtgtttaaaaatgtactgatgatgtgcttagagaaattcctggggctttcttcgttgtagatcagaatttcaccagggagtaaaattacctgaaaacgtaagaagttttaaacagcttttcacacaaattagatgcaactgttcccatgtctgagtacttatttaaaagaaaggtaaagattggcctgttagaaaaagcataatgtgagctttggattactggattttttttttttttaaacacacctggagaggacatttgaaaacactgttcttaccctcgaaccctgatgtggttccattatgtaaatatttcaaatattaaaaatgtatatatttgatcctggggactcatattctttcagaatcatgtaaataaatggcatcatgttgtaaaaaaaaaa

SEQ ID NO: 47269 - DNA, 863 bp, Homo Sapiens
tcaacctcagcctcagtctcagccccagcttcagcttcaatcccagtcccaaccagtactccagtcccagcctccctctcagcctgaggatttgtcattagctgttttacagccaacaccccaagttactcaggagcaagggcatttactacctgagaggaaggattttcctgtagagtctgtaaaactcactgaggtaccagtagagccagtcttgacagtacatccagagagcaagagcaaaaccaaaactaggagcagaagtagaggtcgagctagaaataaaacaagcaagagtagaagtcgaagcagtagcagtagcagttctagtagcagttcaaccagtagcagcagtggaagtagttccagcagtggaagtagtagcagtcgcagtagttccagtagcagctccagtacaagtggcagcagcagcagagatagtagcagtagcactagtagtagtagtgagagtagaagtcggagtaggggccggggacataatagagatagaaagcacagaaggagcgtggatcggaagagaagggatacttcaggactagaaagaagtcacaaatcttcaaaaggtggtagtagtagagatacaaaaggatcaaaggataagaattcccggtccgacagaaagaggtctatatcagagagtagtcgatcaggcaaaagatcttcaagaagtgaaagagaccgaaaatcagacaggaaagacaaaaggcgttaatggaagaagccaggctttcttagccattctttgcagcagaagatttcttgataaaaaaggattacctttccttgtaaagaggatgctgccttaagaattgcatgttgtaaaaaatctttttgggagatac

SEQ ID NO: 47270 - DNA, 647 bp, Homo Sapiens
cactagatactgcacgtgattagaatgtttttgaaggtttcctcgtttttatttgccttggacagtttttagttgtcagagtcagagctttgcagctttgagggggaacagttctctttaaaatcatttgctattttctattctcccttgttattttaatctaagcattttcccccgtttctcatattttaaccatatgttcggtagataactaaacagtatgatctggttggcattttcttcctgatgatgggagcgtcattcttttgtcttcatgttacttgtgtgatataacatacatctgttaaagaaaatcacttctttctaggggagggaggtagaaaagtatctttcaaacttggtttttgagtttgtgtcttgtcttaactttgtgttggctctaacttaaacatgctgatatgtgttttcaagaatttgtttaaggaagtattgtatggaagtccacaaaatgaaggaagttcatctaggttttaatatgtaagcaagataacacacaagtgtaccaagtgattattaactttgttgttttacaaatttgtatgaacttggagtatctgttggcattactatacattgtgcaaataaatgtggttagacttgtgtgactgtttaaaaaaaaaaaaaag

SEQ ID NO: 47271 - DNA, 883 bp, Homo Sapiens
  misc_feature (716)..(716): n is a, c, g, or t
tctatattacttatacctattgtctatatagctttaatttatagttgtcagtttaactattggcatgtctggcaaagaaaattaaactttaagagttttataaactgtttctaggttgctaaagaatttatttttctactatatatggtatagacaaagcatcaaactatgtacaggaaaaaagcctgactatttctatttggaagtaggctgaaaagagaattttcaaaactgttcgtgtcttcagttcattctgtcataactttgctattgtaatatgtgaataccagtttatttaagctgttctcttttatactgtattaatttaatgttcatctgcgtttagtaccatttttgttattaaaactggcatttaccgtttttcacattaacccaccttgcaccttcccccaaacttatctccacttttctatgcattctatcattgatttgacacacttcatagtgagtcatttaaatactctacgtttggttcaattaaccagtaggttacagttattgaaaattaaagtacagtttaaagctcagtctgttacactgaattgattgtgtttgtttttgccaagggtttagatatgcttttaaatattagaaacatctaagaacagaataacataattaaacttttttctggtaagttactgggaggtttcactgtttagggacctatcatatgagacttcttaagggattanagaataggatagtctcataattgtgagtaaacatcaaggcattatattttacaatactgaataaaatttcatctacacacatggttgccattgtttcattttaggttcagtgcttataggtaactaccatattgggacttaacaggatctagattagccatataaaa

SEQ ID NO: 47272 - DNA, 586 bp, Homo Sapiens
gcacgagccagcactgtgcagatgctcttggcaggacagcatcgcagggaggtgctgggattctgggcctcactgtctgggtcttggttcctctgaaagagatggatcttgtgcagaccagggttgttgagtgaggggagcgtgggatggggaccgtgggaaagaggacagctcagggagaagtgacctggaaaggtcctgtttgcatctgacccatctcaactggcccagcatcccaacttctctgcagcgaaagggtggcgccccgcagcctcgggaggcctgcccaggctcccgtggagcttccaacagctgcttggccccgcagctgcccccacttcctttgagacctgcactctcatgcttgccgcatcatgcctccctgtgggggctttgggcatggaggaggcagaagagggggtgccaggcctcctgtatttggggtcttcccccagtggatgtctcatggactctggccccacacactcacaatgactctggctggccccacgcagcgggcccagccgccccccaggtggcctcacattctgctctgctaagtttggagaaaacagaacaataaacc

SEQ ID NO: 47273 - DNA, 692 bp, Homo Sapiens
cttccttaggacttccagagttcagttccttctggcagagaggttttctttctccatgccatatggatgtgactcaaatgaggggtcccacagcttttcctggctaccacttgctgtgaccttatacatgttggggtttgctcttaaagaggagagcaggaagaaaggttggtttcagaaaccaagagggtcggcagtggacgcgtacattttgtcacggagtccacagagctgagcttttgagcagactctgagaagtatcattgcttgtgttgaaagaatacaacaggatttaagtttctctttaaaaattgcactgaagaaaggccgggcgcggtggctccccctgtaatcccagcgctttgggaggccgaggcggggggatcacgaggtcaagagatcgagaccatcctggccaacatggtgaaaccccgtctctaataaaaatacaaaaattagccgggcatggtgacgtgcacctgtagtcccagctactagataggctgaggcaggagaattgcttgaatccgggaggcggaggttgcagtgagccgagatcgtgccactgaactccaacctgccaatagagcgagactccgtctcaaaaaaaaaaaaaaaaaagaaagaaatagcattgaagaaaataccgcacatcagaggaaagcttattttctgcatggtgtcttttcaaa

SEQ ID NO: 47274 - DNA, 817 bp, Homo Sapiens
  misc_feature (644)..(644): n is a, c, g, or t
  misc_feature (718)..(722): n is a, c, g, or t
  misc_feature (724)..(725): n is a, c, g, or t
  misc_feature (731)..(733): n is a, c, g, or t
gcaaccctggagacaagacgctggaggaccgattctttgagcacgaggtaaagctgaacaagttggccttcctgaaccagttccactttggtgtcttctatgccttcgtgaagctcaaggagcaggagtgtcgcaacatcgtgtggatcgctgaatgtatcgcccagcgccaccgcgccaaaatcgacaactacatccctatcttctagcgtcctggcccaaggctctcaattgcactctttgtgtgtgtgtgtgtgtgtgtgcgcgtgtgtgtgcgtgtgtgtgtatgtggtctgtgacaagcctgtggctcacctgcctgtccggggtgtagtacgctgtcctagcggctgcccagttctcctgaccctcttagagactgttgttaggcctgaaaaggggctgggcacccccccccaccaaggatggacgaagaccccctccagagcaaggaggccccctcagccctgtggttacagccgctgatgtatctaagaagcatgtcactttcatgttcctccctaactccctgacctgagaaccctggggcctgggggcagtttgagcctcctctcccttctgtgggtcgctcccagagccatggcccatgggaaggacagagtgtgtgtgtccttggggcctgnggggatgttgctcctcagctccctccctcagccctgcccttctgagacaataaaactgcccctctctaaagggnnnnnannaaaaannnaaaaggggggcccgcctctagaagtatcccctccgagggggcccaaagctttacgccgtaaccccaagctttttctttggaaac

SEQ ID NO: 47275 - DNA, 639 bp, Homo Sapiens
  misc_feature (561)..(561): n is a, c, g, or t
  misc_feature (624)..(624): n is a, c, g, or t
gcagccgttccccaggctgtgtggggtcctgctttcttctgctgagacagtgacgctttccagtttccaccctaatcagccactgctggtcacagccccacagccatgggtatttctgtggtctcctcgcttcattgaagcaaagcatgagccttcctagacaagggcagctggggaggggaagggaccggaagtttgtgaagttgaacagtccatccatctgcactgagaggctggatcctgagtcccggggcagcaggatcccaggaaccttcctcctccagggcagcacaggactcagccatgtctggaccggccctgctgaggctacagtcactctggaagctctgcgcttcatcaggaggcaggactgtggcgggaggggtccttgaagatgggtgtggggagcagtgggtcaggaagtgggagccagaggtttgactcactttgctttatttttcaggctacaatacaggtcagagacaatggcttataaaggtttagtgtggtctcaggatgtgacaggcagtccagcctgacccttctgcacactccagacanacttcccagacaagctcctttgtgcctctacgtggagagggtgtggaaagttatcacattaanagatggaggatttgc

SEQ ID NO: 47276 - DNA, 962 bp, Homo Sapiens
accacgacgaggtgctggaggcgctgctgagcgcgcgcttcgacgtgaacacgccgctggcgcccgagcgcgcgcgcctctacgaagaccggcgcagctccgcgctgtacttcgcggtggtcaacaacaacgtgtacgccaccgagctgctgctgcaacacggcgccgaccccaaccgcgacgtcatcagccccttgctcgtggccatccgccacggctgcctgcgcacaatgcagctgctgctggaccacggcgcgaacatcgacgcctatatcgccacgcaccccaccgccttccccgccaccatcatgttcgccatgaagtgcctgtcgctgctcaagttcctcatggacctgggctgcgacggcgagccctgcttctcatgcctctacggcaacggcccgcacccgccggcccgcagcctccagcaggttcaacgacgcgcccgcggccgacaaggagcccagcgtggtgcacagttctgtgagttcgtatctgccccagaggtgagccgctgggcggggcccatcatcgatgtcctcctggactacgtgggcaacgtgcagctctgctcgcggctgaaggaacacatcgacagctttgaggactgggccgtcatcaaggagaaggcagaacctccaagacctctggctcacctttgccgactgcgggtcgaaaggccattgggaaataccgtattaaactcctagacaccttgccgtccaggcaggctgattagatacctgaaatacgagaacacccaagtactggggccggggagagagggtagcctcagactcttctactagtctcaggacgtggtgttccactcagggactgggacaacacaagtgggggctccttaactggagtccggatccgggttcagccaagtttgcgcggccacatttgggacacacttgtacggggaccccaccttctgaaggggctctccgcggggg

SEQ ID NO: 47277 - DNA, 487 bp, Homo Sapiens
cttcccttggcagctggagaaatctggtttcaatataactcatttaaaaatttatgccacagtccttataattggaaaaatactggtgcccaggttttcttggagttatccaagcagctgcgcccctagctgggatctggtacctggactaggctaattacagcttctccccaacaggaaactgtgggatttgaaaaggaaagggaagggaaaacagagaacctagtggtctaccaagtggttggcaactttcccaatgtctgcttactctgaggcttggcactgggggccagggcctgccccagggctcctggaatttcccttgatccagctaggctgggacactccctaaatcagctgcgtgttgttagcatcaggcagaatgaatggcagagagtgattctgtcttcatagagggtggggtacttctccataaggcatctcagtcaaatccccatcactgtcataaattcaaataaaatgtctg

SEQ ID NO: 47278 - DNA, 1046 bp, Homo Sapiens
  misc_feature (973)..(973): n is a, c, g, or t
cggacgcgtgggcaaaccccaaaaacctctggtgggagataggaagaacgggcgtgggcctgggccttaacctcaatcttgtgtctgcctcagacttttctgactggccctgaagttgtcagtggctctttctgtccttcagcccctggaaggtgctccaggataacaaagaaaggcaggttgaagcccctcatggaaggagctggctttgtggggctgcaaaggacttttaagtcctgcctgtactgaagttcacagcccacctgactgagcagactcttcctgttcctttctctaccacccttgccttcccaggactgcacggtttaacacagcagagtacagaagggtgaagaagtgagcagaggcttatgaagatattcagatactcttctatgccaggaagcacaaagactttgttgagatttgcctcagttcagtagatcttccttggcagccagccataggttgtttctttgtcttccgggtcctaaagagcacagagaaaatggaggtccccagtctaggtaagaagctgattggatgaggacttctttttttccgacagcaggatggggctcttgggctccacacaccagatgctttggttttctacaactgttgctatgtgtagagggtgctcacagcgtggcatgagagcaaggagaccatggctactctttgaaatggatggggaaaattagcttaaaaatttaatcacgagattgcgccactgaactccagcctgggcgacagagccagactccgtctccggagcccccagaaccgaaaatttaatcccccacatcacagggcttaaaatgtccttagaaaactttttccatttgattgggtcccaggccttaagggatctgtgcattggtggcccgggggaaacccaaggtcttcccacgggttaagcgcacggcagacctctaacgcggagtcaattgagcaacggcggacttctgtnccctcggcacctcaccttggccatcatgtggactgacggggcagaaaccttgtaattgtcatacgcgccaaac

SEQ ID NO: 47279 - DNA, 610 bp, Homo Sapiens
gttaagctaccctaatttcgggaatgggaggggagagaggagggccattacaactctgccttcaagactcatctcttaaaaacaaaacgaaacaaaactacaaccaccatcaaaaccacacgcaaaaaaaaaaaaaaaaaaaaaaaaggataactttaaccgaaggaagggtttggttccattcaactccacattcattgtgcctttacttgcattagatttctgtgctttcttcctttccctctttgaagcaattaaaatcttccttgataactgctgtttctttctactcttgtttctggcaatttagtgggttccttctctagtggtcttaaatctcattccactggtggcaagatggggcctagccttcttttcacatgtctaatcttttcctttctcatggtgccctccatggaagtcacagtcaacactgaataaatgactagaatgacacgtgtgcgtgcgcacgcgtgtgcgtgtgtgtgttcatctgtctgcatgtggatcaatttcttttagaaaataatttattgtatgatttattttggagttatattctgattacagtgctccctctcccaaatagcattgattttttcccccctct

SEQ ID NO: 47280 - DNA, 656 bp, Homo Sapiens
  misc_feature (507)..(507): n is a, c, g, or t
  misc_feature (518)..(518): n is a, c, g, or t
  misc_feature (520)..(520): n is a, c, g, or t
  misc_feature (615)..(615): n is a, c, g, or t
  misc_feature (621)..(621): n is a, c, g, or t
atcatttccaagttgacttttgtcttctcagtgtaacatttggcacttcttttcctaaaattatcacttgtggctgagatacaagctgttgaattcagactataagctaaattgttggctctcgattattcttgagattgaaaatctttctggcatcaacaatttagatctatcaaaatgtgttaatagcagtaaatcttcaacttagagacttagaatatactgcaatatttcaattctgatgctaaccactcaaaagttagcatagaccccacaagttagaggcacagttcccagactgccctcacttcagatgcctgttgcaagttggggttgggggtcccaggccatcttcatttctgaccaactggctataaattggagggatcccttaagcctccttcaggctctataattagaacaactcacagaactcaggaaagtactatacatttgacccttgaacaacacgggtttgaactgcacaggtccacttactagtgattntttcccaacananagtaaatcagaaatatagttggctgggtgcagttgctcacgcttgtaatctcagtactttgagaggcccgaggaaagaggatcgcttgaggtcangagttngaagccagcttgcaccatagcgagaccctgtcacc

SEQ ID NO: 47281 - DNA, 754 bp, Homo Sapiens
gcgtccgggctgatgcctgcagctgtgaggcctggcccaaggtgtcatcagtggggctggcctcatctcctcctgcctttcctcccttatcagtttctctttaaaggtgtgcccctcctgctctcccaggagcagtgagttgtgagtggaaagaaggctggtgcagacccagctgccttagacagattccctgggcctgcatctcctggcgccggctgcttctgggcccaggaagaggctgtggctcccaccttccttacacctggtgggagcccgcctcgcaccagctgcacctgcctagcattagaggctctcagatctgcccttgcttgcctcatacctctgtgctccacactgcggccaggccagctgagtccctccatccgtggatgctttcctgcagctatgtggtatgggggtcattcctgcctcttggcaccaggttggggggcatgtgcttgttgggcaccaaagtgatggaaccctcaggtgctctccgggagcctgaacctcctgactgaggaacatgggcagaacatgtttattgcacagagtgggcgctgcgcacaggcgtggctgtacacgtgctctcagctcatcatcctttccagtaactttaaaaaaacatccctcaggtcctgatatatttccttggattcatttcacttggctagaaattacactgtgctcaatgccttaataaatccctgaaagaaataaaaaccactgtgtgcaatgccttgctgtggccccc

SEQ ID NO: 47282 - DNA, 586 bp, Homo Sapiens
acccctttgacctgtctcccactgaagcttctactgccctggcagctcgcctgggcccaactcagaaacaggagccagcagagcactctctcacgctgatccagccgggcaccctgcttaagtcagtagaagctcgctggcactgcccgttcctacttttccgaagtactgcgtcactttgtcgtaagtaatggcccctgtgccttcttaatccagcagtcaagcttttgggagacctgaaaatgggaaaattcacactgggtttctggactgtagtattggaagccttagttatagtatattaagcctataattatactctgatttgatgggatttttgacatttacacttgtcaaaatgcagggggttttttttggtgcagatgattaaacagtcttccctatttggtgcaatgaagtatagcagataaaatgggggaggggtaaattatcaccttcaagaaaattacatgtttttatatatatttggaattgttaaattggttttgctgaaacatttcacccttgagatattactttgacgtgtcggtttcatacaggttcttgacattgttacccacaccac

SEQ ID NO: 47283 - DNA, 501 bp, Homo Sapiens
tgcagctttttatagaaattctgaacagatatatctatttttatgaaaaggaaaatgatgcggtaacaattcaggttttaaaccagcttatccaaaagattcgagaagacctcccgaatcttgaatccagtgaagaaacagagcagattaacaaacattttcataacacactggagcatttgcgcttgcggcgggaatcaccagaatccgaggggccaatttatgaaggtctcatcctttaaaaaggaaatagctcaccatactcctttccatgtacatccagtgagggttttattacgctaggtttcccttccatagattgtgcctttcagaaatgctgaggtaggtttcccatttcttacctgtgatgtgttttacccagcacctccggacactcaccttcaggaccttaataaaattattcacttggtaagtgttcaagtctttctgatcaccccaagtagcatgactgatctgcaatttaaaattcctgtgatctgt

SEQ ID NO: 47284 - DNA, 724 bp, Homo Sapiens
  misc_feature (615)..(615): n is a, c, g, or t
  misc_feature (671)..(718): n is a, c, g, or t
aaaaaccactgtgtgcaatgccttgctgtggcccccaaccactgcttaggcctcccaacttctccccaggccaagtatggggctctggctgtgttctggaagttcaagacacttagtcctccacagtgggtggaagagtgcaaggtctgccaggtcagatggagacgcagaacctgctggtgcaagctgggcaggtcctgaccaacctgcatcaggggatgccctgagctccacaggtcttcatgggcaggggttgtgggtcctggtgaaggaagtgcatcctcaggcctgggctgtagcaagctgtctgcccttgggttcaagaaccagactgtggagccaaaggtgaccgcagggggccccagggctggagccacaaggataccctcactttgcatgaggagctgaaactgaccagtgtccagtgttagcccccacatggggctgctcttgcttctactaaaagatacagcagttacccccttatccacaggggatacagtggatatctaaaaccagacccccagtggatgtctaaaaccacagataataacaaaccttatacatactgttttttcctatgcatacatacctgtgattaagtttatgaattangcaccttaagagattgacaacaataactaataataaaatgtaacggttatactgtnnnnnnnnnnnnnnnnnnnnnnnnnnnnnnnnnnnnnnnnnnnnnnnnggggcg

SEQ ID NO: 47285 - DNA, 907 bp, Homo Sapiens
tgtgaataagctagatcccagcaaagtgtttaagagcaagaacaagatcgtaatcccaaaaaagaaagggcctgtgcagcctgcaggtggccagaaagggccctcaggaccctccggtccctccacttcctccacttctaaatcctcctctggctctggaaaccccacccggaagtgagcacccctccctccaactccctaccagctccagagtggtggtttccatgcacagatggccctaggggtgacctccagttttgcgtgtggaccgtagcctctttctagttgaatgaccaaaattgtaaggcttttagtcccaccgacattagccaggctcgtagtgaggcctccagagcaggttgtgctgtcccctgcctctggaagcaatggggaatttggaatcttgtgtaagtgcccaaataagtctgagtgctttcctcttcttcaacactcaaccctcaatcccttagcactgattgattagagaggtcccccaaagaaaccactggttttgacccatgaagcattagaactgcattgttcattcaggagccactagtcacatatgactatttaaatttaaagtaaattgtatgaaaaattcatttcttcaattgcattagccacattttgagtattcatgtggctggtagattctgtattagcacaaagatatggaacatttccatcaccacagaaagttctgttggacagcactgcattagaatattttcatactgctcttcctcaattaatttttgttgttaatgttgatgtcttcattggatgggtcataatgttccatgaaacctctcaagtacacaattgtatgttctttgtatcccttaccacaaatatctcgctctactcatttcttttgsagcttcctataaagtttgtcttctca

SEQ ID NO: 47286 - DNA, 671 bp, Homo Sapiens
tgacatgataaaatatcatgttcctaatctgttgtctcagataagtgaccaagacgggactttccacattttagtctacattctaatcttaaaggaataaagcactgaattgggactaacattctgataggttgcacccttaagagtattcagagagcatcaaaaggagcccacaccttcagcagtgaaggattctaacacagggaatctgcagtttgtagcagaatggtattttcctcaagtagctcataatactgccaaatctcaaaagttaagctgaatttcacaccagatcctacccctttccctgagccacatgtttcacacaagtgtagaaaatgccagggatccaccacaagatggagatggtcagcacaaaccgattctgttcctctttaaagtgtatattagccacttagcaatctctatattctttcaagtaaccaagctgttgactttcttactacttgcagtagcctgtccccaacttttccatccagtgcttaacctaaaaaactccttaactctgccttgacctgaggaagaccatgctaactggtgttattttgtatgtaccctgtgcttaattctataacagtaaaccccatacgcaggtgggagggaggaacaccgttgcctcggtcactctgggggcagtttaaatgctgtga

SEQ ID NO: 47287 - DNA, 553 bp, Homo Sapiens
catgaaggctccattagcaacactaaaacttgatcattaacagccccctgtgcatatgagtggatcaaaccggttctgttctttcttgtgttgccatgttactatgcctcaagcccagtttgcttttgccgcagcgatggggccagtctcattcctccccaggagtgaaacttgcttcagctgaaaaggttgggtgcattgtcagtaaaaagggcttatttgtttcattttactttcctgcaaaattttcttcaaagcaacaagtcctaggagcacacaaagcaacccaaaggcttttccctggaaaagctctttcttacctaaagataaaaccaattcacaaactgaaggtagctttttattactccgtggggagcatgtacagagctctgtgtatacacagcttcacacccaccagattgttactacagtgggttgggttttcatacagacgtaaattttgagagaaaagtcaaaggtgcttcagccttgtactgtgtatatatattaaaaaaaaaacaaagttttgtatggttttattactttaactatt

SEQ ID NO: 47288 - DNA, 902 bp, Homo Sapiens
  misc_feature (740)..(740): n is a, c, g, or t
  misc_feature (767)..(767): n is a, c, g, or t
  misc_feature (810)..(810): n is a, c, g, or t
  misc_feature (843)..(843): n is a, c, g, or t
agtacatcccccagcccatctcgcagtagcagtggtagacgagtgaaatccccatcaccaaaatcggagcgatcagagcgttcagaaagatctcataaagagagctcacggtccaggtcatctcacaaagattctcctagagatgttagcaaaaaagccaaaagatcaccatctggttcaaggacacctaaaaggtctaggcgatcacggtctagatctcctaaaaaatcaggaaagaagtccagatcccagtccagatctccacacaggtctcataaaaagtcaaagaaaaacaaacactgacgtaaatttttaagatgctgtcacttattggaaatgcgatttgttttgtgcctgaacggtctgttttttaaaaaaacaaaaaatcaaatgaaagagcattcctggggttttttgtttgtttgtgtatgcatgtgtaaactcatgagcaactgcatctgtagatctgtcattgttttatattgtgtaaattactttcattgtggctatttctcaagatgaaatttttattgttctaatggatttcatcagaaatgtgtataatggatctgctgacagtagtagtattttgttttaggatgttgtgacttagcaaaaataatacagatgtcttccccccttttgtagctttgacaatttgaattagatttcaaataaaatctgaacagaaaactataatgttgtttttttgccccaccggtgatattaagtccccttanagtcctactgagtttcacactactgtntgtgcttcttataccctgatgcactttaataagccccagtggntcaagtagccttaagtttttatattttacttangatgaactatcccaaatttaaggggaccctggagactcccctatttttggtggggtttt

SEQ ID NO: 47289 - DNA, 601 bp, Homo Sapiens
  misc_feature (559)..(559): n is a, c, g, or t
  misc_feature (563)..(563): n is a, c, g, or t
gacgaggcctagaagcccttggtccccctgggtctgagggccctaggtcatggagagcctcagtccccataatgaggacagggtaccatgcccacctttccttcagaaccctggggcccagggccacccagaggtaagaggacatttagcattagctctgtgtgagctcctgccggtttcttggctgtcagtcagtcccagagtggggaggaagatatgggtgacccccaccccccatctgtgagccaagcctcccttgtccctggcctttggacccaggcaaaggcttctgagccctgggcaggggtggtgggtaccagagaatgctgccttcccccaagcctgcccctctgcctcattttcctgtagctcctctggttctgtttgctcattggccgctgtgttcatccaagggggttctcccagaagtgaggggcctttccctccatcccttggggcacggggcagctgtgcctgccctgcctctgcctgaggcagccgctcctgcctgagcctggacatggggcccttccttgtgttgccaatttattaacagcanatanaccaattaaatggagactattaaataactttattttaa

SEQ ID NO: 47290 - DNA, 692 bp, Homo Sapiens
ctaatacccagatatcaaagactaggtagatatggcatggcgtttgttagtggaatgcctggctaaaacatttttttcacagaagcaatatgatttccatacatccaacccatgttctgagcaactacttacttttagggggaaattaaatatcttttcatttcctcttctattatgaaagaagtttatttgtaaaacaaattttctaacaaggtttggccatagaattctcttgtatgatcgttgaccttttataatcttctgtaggctatctttcaaacactggcatcagaatattttttataagtttgtgtttaaacagcttagttggtccccccccactcccaagagacttgggtttagttatagctttaagtaaaatttaaaaataaaatgtttttcaggaaacttcgtatctaatggtttgtaaattcaaggtgcaaaaagttgatttaaaccatttgcagagttgaactctattatgaaaataaatttgctacggtatgaggaagaaataaaacttgtgtaatgttggtcataatactgctataaatataataaagggttatgtagaattgaactgaaaaaaaaaaaacaagacgagaagtgaaaagcgaaatcagcacgaccaacgaagaacacgataccatgacgaacaacagaaacaacgaacatcgagaagaaaaaaaggg

SEQ ID NO: 47291 - DNA, 584 bp, Homo Sapiens
cgtccggtgacttaaactgttctgatgaccacacagtgtgatttctttagcagagaaagttggttttaaaaataaatagtaccacttttctaagactgtacagtttacaaataaggtttttttctttgttgttttcctcttctattaagttttagtgaaaagcctaattacagaaaattgtgcagatactagtgaagatactagtataagtttaaaggaacacgtgactgtaaaatctcacatttacaaagtgcttgatctcttcatatttcacacgcatgttttagaatagattttagggagtgtttaattcattatccttttgacttaaaatttttgttaccaacttcctaggacttagataatatataaataagtacaaatcccaggggaagtgttgtgatgctagactaaaaggtgggaatgtgctgctgttccgtgagccttgttccattgttgaaaatttgatgcctcagtgtttattcagtaccacctcatggagcttcaatgtaaatggattatatgtataattggtaatttgtatagttttgtagattgtagattaaatgcactcatcatgtcac

SEQ ID NO: 47292 - DNA, 699 bp, Homo Sapiens
ttcatttaaaaaaatatacaaagagctttgtaaatacaacacattttatttctcccccttcttttaatgtacagcttttttgccacttatatatacttaaaatattcccatgaattatgtccagttcttcttggaaaaaaatttggttttgaatgaacctgcaaagcatcctgcagcgtgagcagctcctccacctggagctccgaagcatcttctcaggccaaagcggcattacccgtgaatctgtcttctccgccacagcatggtttgaggcgcagtctgttaatatagctgggccatgtcagtgactgttgtgtttgtggggtcaggtggggggcatggtatttgcaaaaaaaacaaattatggctaatttattattttgttgcagtggggttaactgtaaactcatgtaagagtctgtgatttcctcattggttgatctctctctctgtaatcctcattgcaaattttcaccaggacagcgttttttgattagaggggagctctggcacagtatgctttaatttagcaggaacttccagatgatttaaattctcgatgctgtgatgacacacatatgatctttcgtgtttctgagcgactctactttcattgtttgccagcgtggctcgttgctgttgcccaataaagcttgtgtacgttctgcaaaaaaaaaaaaaaaaaaaaaatctgattct

SEQ ID NO: 47293 - DNA, 865 bp, Homo Sapiens
agaaagtgcctggattttacaacaggaagatacagatcgaccttccatatcaagtaatcggccctgggggctggtatccctattgctaccatctgctccaaacagaaagtcctttaccaagaagaaaagcaataagtttgcaattgaaacagtcaaaaacttgctagaatctttaaaaggtaacagaacagaaaatttcacaaaaaccagtgggaagagaacaattagtactcagacatgatggctgctacattgtgtaaagaactgggcttagcctatcaaatggtctgtggacttacttggaaaaactgatttgaaactttcacagatctcagctttcatctgatgtcacttttcatgatcttctcattggcccccttaacctggtctgaagttctgggatgttttcagtttgatcagtctgatactcagtggcactttattaaaacatcagctgtggagtgtggcggtgcacacctgtagtcccagctgctcaggaggctgaggcaggaggatctcttgagcccaggattttgaatccatcgtggacaacatagcaagattccatctctaaaaaaaatgaaaataaacataagccacaaggaatgggtgaaagattattgtaatgtgctttaactaaataggtaaatatactaaacaaatgctaaaactcagttttaggatgaaaccattgttgatatccacatcagtccctgtttagaaaacatttaaaatgacttttagttatgtacagtacgttggcaatgaatacattaagcttcaaaatttggtagtgctctcgaatatgtatatttgcatttttcaggcgaagttcttcttatcccatataaattaaagtgggttg

SEQ ID NO: 47294 - DNA, 451 bp, Homo Sapiens
gggctgtcccaaagagggaaagcggtgaggtttgaggaggggcagaagcagggccggcaaaggttgtaccttcataaggtggtatggggggttggggtcaggccctgaacatcgtcctacttgagaatctgtcaggggaaaaagtcaaggggagcaggaggaagagccaggagggccagaggcagagaagagatggagtcttaggggccagggtgagcgaggggtccagggcctagaggtgcttcctgggggcgggggaatgcagccagtgtccccctcccctcttccaccccagctccagccctggtcttgtcttttcatccctcttccccacgacagaagaagttgtggccctggccatgtcatcgtgttcctgtgtcccctgcatgtaccccaccctccaccccttccttttgcgcggaccccattacaataaattttaaatgaaaaa

SEQ ID NO: 47295 - DNA, 618 bp, Homo Sapiens
caagagtgaaagtggcccattagatgatttttatcagtgattttcaaccttttctacagggttagaattctttgttcaagtaaaatcttatccccaagtgtcatgtgtatgtgaaataaatgagggcaagatggtggtagtgtagtatatgtgcacatgtgcctttgtatgtgttggggatatagcagagcttttttgctgacttggattcctattcccattccttgagggctttatagcccaatttgaaagtcactaatatagagagtacaaataggtatataaaaaagtaagcaaatgagaaaataagccagttattagttacagaggaaacaaactatccaggaaaggaaatttacagtatatctcattttggggtttggaaggatgtgtacaaaatagtgtaattgaaaattgataaaataaaaaatcttatatacttatattgggtaaaggaagataggagaagtgacagagcgagagagagagagagtgtttatgtgtgaaggaaataagaaagctcagtcttataagaagtctcagataatgtgtagactttacagaaaagcagtttaagaatggtatttaaaaataaggaattaaataacatgagagttg

SEQ ID NO: 47296 - DNA, 456 bp, Homo Sapiens
  misc_feature (400)..(400): n is a, c, g, or t
gcggtcgctctctgcttgaatggcaagatagatttataggcttaattcttggtcaggcagaactccagatgaaaaaaacttgcatcttcagtatacttcctaaagggcaatcagataatggatatgttttatgtaattaagagttcactttagtggctttcatttaatatggctgtctgggaagaacagggttgcctagccctgtacaatgtaatttaaacttacagcatttttactgtgtatgatatggtgtcctctgtgccagttttgtaccttatagaggcagattgcctccgatcgctgtggttcttattatcaaaattaagtttacttgtatacggaacaaccacaagaaatttgattctgtaaagaatcctctttagctgtggcctggcagtanataaatggtgctttatttaacagaatacctgtggtggaaataaagcacacttgatg

SEQ ID NO: 47297 - DNA, 588 bp, Homo Sapiens
  misc_feature (17)..(17): n is a, c, g, or t
gccggggggcaggggtnttttggaggagaacttgtgttaggccttagacatgcaggtggtggtggaagcaggattccagctgtgacctctagctaccagcaacttgcttcttagattaaatgatctaagcttctgttttgatcttgataactctatcaagcattagacatatctaaaatggaaggcacggtggactctcactccctccgccttggagctggatccacattttatacagtagctaagccggaaataccggcaccatccttagagctactttcatagtacactttgaatcaatctctcaggcattttgattctatttcctaaatatagtttgcttcagtgcattcctcgccctctgtcaatgattaccacgtgtgcctgaatatgaggtgaggttccccttttcctgcaaaattactcctcagagaagagggagtcttgaggtggagtcaatgcaaagcctctgctattactgggtgctttctccaaggctttattttaaatagagcatttgtgaggaagacacattagccccacatgaccctgtttaatgcggttaggtattatggagggcacctgaca

SEQ ID NO: 47298 - DNA, 800 bp, Homo Sapiens
  misc_feature (789)..(789): n is a, c, g, or t
  misc_feature (791)..(792): n is a, c, g, or t
  misc_feature (799)..(800): n is a, c, g, or t
ctgggtggcgctggaaatggcctttgaagacaaggataccaggatgtgtgcactctgtcgtgttctgtgatgaatgggaaacgtaggcttccagaaagccagctctcttctgaaatgtgacggacctaagcaggaagtcatccaggacaggagtggctcagtgttggggatggacgctgtcgcccagccatgctccaccagggccaccaatgtgtagttggctggtggtcttcgggcatgtgagacctgctcttcactgtttccaccccacttggtggcctccaggatggtagtggcaccctcagagccccatcttcagcatgttctgaagcctcagagtggaaattcctgctaaggctctgtgtggacgcctttctcccgtgatctaaaggggacactgtactcaagcttttgacctcatgccttgtgtagtaaaaaaggatttgggggttttgtttggttcctgagagggttgtgttttgtttttgtttccttttgtttatgttttggcctttcctctttgtctttccatgtagaccagatatttgaaagggcagacgatggctagaggtgtaatgtgcagcttgtttatacggtattttgggaaacttaccttggatgggaaatcgaatcgtggattcaccaggccggtgctgggacactcaccctcgccctttccctccggttcagtacctattgtttctcctttcaaatatgtgattgtactagctctttccatatgaaagaattctccttatttaaataaaaaaagtttaaaaggaacacacnannaaaacann

SEQ ID NO: 47299 - DNA, 702 bp, Homo Sapiens
ggctcacgggtgcaggacagcgctcaggcttgggctctaagctctgtgtctagtgtagaacatggggaaggagcatcttaggaactgctgaagtaacttcttactgctctcacaattctaaggaagcgggagaacggcctcctaccaacagcgcccaccccagagctgcctgggaaagggcagttttactgaaaggtgctttactgttcacctgcatctttcagcagctcccctcctgccctcacctggtcttttccctctttatcccaagcctttatgcttgagtcccttccccaggggctgcccacccgacagttccaggcattccctacctgagcttcttgtctgcttttccttctcccactgcaagcggctgcttgtggggcctgggatgagccctctctgtccccaccggccctccttgccaagccattcctgggtgagttcaggcctgcgggagccacacattcatctccacctggacacttgagccgcatggccagacccctcccacctgatgcggtggtgcgtgtgatttgtcaaaagaaagccttctggatgctgttaagatgtacccttcaggtgaacctggtatcagacccacagtacttgctgtttgagaaaaaataaaaacaaaaaggtcacctgttctccagcccttttctcttacctggtatttccttcctttctcctcccccaccc

SEQ ID NO: 47300 - DNA, 497 bp, Homo Sapiens
tggtttccatcccaccactccaaggactgagactgacctcctctggtgacactggcctagggcctgacactctcctaagaggttctctccaagcccccaaatagctccaggcgccctcggccgcccatcatggttaattctgtccaacaaacacacacgggtagattgctggcctgttgtaggtggtagggacacagatgaccgacctggtcactcctcctgccaacattcagtctggtatgtgaggcgtgcgtgaagcaagaactcctggagctacagggacagggagccatcattcctgcctgggaatcctggaagacttcctgcaggagtcagcgttcaatcttgaccttgaagatgggaaggatgttctttttacgtaccaattcttttgtcttttgatattaaaaagaagtacatgttcattgtagagaatttggaaactgtagaagagaatcaagaagaaaaataaaaatcagctgttgtaatcacctagc

SEQ ID NO: 47301 - DNA, 629 bp, Homo Sapiens
cagaccaaaccatttgtatctggcatcacttactaacctttattaaacagatcgcatattatgatcttgctgcagccacagtgcagctccacattaactctacagaccaaaccatttgtatctggcatcacttactaacacacgacatgcggcttttctgcatcaactgctatgacggttaagaatgtcagtatacaagaaggaatagaaaactgatactgttttaaataatctgtaatttcaatttttttttttttttgctgaaatacattatattgtacgtttgagataattctagtacaaagtataataaaactagatgtataataaaccctttaaatcattggtaagtgtacaagtggtggaactgaagcatttactggacaaagtaatgttactctaatggttacttgctcgtgcgttgccacactgtgttataatttgcttcatttccttgctatttgatacatagtgtgcatttctctgtcactgtaactattgtaatgacaaattttcatcttactgcacaatcaaaatgacattgataggaatgaactccagaggctgggcctgaacagggaggtggtcgctcaggcctggtgctcagtcgtacgacctgtacctctcaa

SEQ ID NO: 47302 - DNA, 501 bp, Homo Sapiens
  misc_feature (314)..(314): n is a, c, g, or t
  misc_feature (350)..(350): n is a, c, g, or t
  misc_feature (426)..(426): n is a, c, g, or t
  misc_feature (453)..(453): n is a, c, g, or t
  misc_feature (479)..(479): n is a, c, g, or t
  misc_feature (494)..(494): n is a, c, g, or t
  misc_feature (496)..(496): n is a, c, g, or t
atgtatgcattcaccttgcctcttgcacaaatgtcaaaaaaaagatggtaatatctcaaagaaatgaacttgtagattaccaagcagtttgctaaaaattcaatctttgacccaagctgtagcatttttttttcatgtgtggcatctttttcatgccaccaacaaacttgttgtgtgtgtgcgtgtgtgtgtgtgtgtgtgtgtgtgtgtgtgtgtgttctgtacccactaagatttgtttaggtgcccattgcatctttttgtgctatggagttgtttacattaagcatgaccgaacgagggacaatactatntcccacaggagtccattgggttcagctttgaaagangaatagaatcgaggctcctttgaccatcaaaatgatgaactttacttatgtggtacccaatgccagaatgtaaganttgcaagtgattttgtgctgctattcnttaaaacttgtattccagtcttgccngcttaagggagatcnanatatt

SEQ ID NO: 47303 - DNA, 938 bp, Homo Sapiens
ttttatttttagttcagtttaaaatgttgataccttccctcccaggctccttaccttggtcttttccctgttcatctcccaacatgctgtgctccatagctggtaggagagggaaggcaaaatctttcttagttttctttgtcttggccattttgaattcatttagttactgggcataacttactgctttttacaaaagaaacaaacattgtctgtacaggtttcatgctagagctaatgggagatgtggccacactgacttccattttaagctttctaccttcttttcctccgaccgtccccttccctcacatgccatccagtgagaagacctgctcctcagtcttgtaaatgtatcttgagaggtaggagcagagccactatctccattgaagctgaaatggtagacctgtaattgtgggaaaactataaactctcttgttacagccccgccaccccttgctgtgtgtatatatataatactttgtccttcatatgtgaaagatccagtgttggaattctttggtgtaaataaacgtttggttttatttatcaaggttagatttaagttccctgtgtaaaggtcttgctgggtgggtgtctcatgttcacatctgaggggcctgcagccctgtaccgtggaggcttcccaaagcccccattttatacaccccctcgttcgacccatggtaccgggcacagcagagaggccttaaaaaaaaagcaccacaagcccaaagcgtcctcttggggaattaaggataccttttgccactaaaacttcatttttggggtcttcagcccagtggcaaggaattggggggaatgggaaaaaaagctcccccaatttcttttgtgtcgctttggtggggggggggtgggggaaaaagagtgggaaacttttcttccccctgggaaaattccccaccacccccccc

SEQ ID NO: 47304 - DNA, 591 bp, Homo Sapiens
catagataaacgtaattgtttggggagttgaatttaatgaacttatctaactttgtaacccatcttggctttagtaactttatcaaggtggtggctttagtgaatataatggtaaactttagaggacgctaaagcctccttttatagcgcttctcaacggtagggagagctgaagggaaaacattctgactgtgtggcagggtgattttcttccttatgaccacttacagtggatatttattgtacttgacccttttatgccctagaatgctgtgagggttaccatgttgaatttgtgcagaagctaaaagcaccagatgtgccagagatgcaatttgtgattatgtttgcactggattgtgatttgaacaggacacttataactaatgagttctttcttttgaggtggggagagggttgtaaatcaagacttcataccctatccttgtagctcggaaattgaggtgtagcttaggctgatgcggagagctgcagacagctggacctccttacacccatcagaccttggaataaaccgaaggtgaatgcagaggactctgaggtgccacccaagagccttttaaaataaat

SEQ ID NO: 47305 - DNA, 774 bp, Homo Sapiens
cacgaggatcagttggtgaggatagccaaggttctggggacagaagatttatatgactatattgacaaatacaacattgaattagatccacgtttcaatgatatcttgggcagacactctcgaaagcgatgggaacgctttgtccacagtgaaaatcagcaccttgtcagccctgaggccttggatttcctggacaaactgctgcgatatgaccaccagtcacggcttactgcaagagaggcaatggagcacccctatttctacactgttgtgaaggaccaggctcgaatgggttcatctagcatgccagggggcagtacgcccgtcagcagcgccaatatgatgtcagggatttcttcagtgccaaccccttcaccccttggacctctggcaggctcaccagtgattgctgctgccaacccccttgggatgcctgttccagctgccgctggcgctcagcagtaacggccctatctgtctcctgatgcctgagcagaggtgggggagtccaccctctccttgatgcagcttgcgcctggcggggaggggtgaaacacttcagaagcaccgtgtctgaaccgttgcttgtggatttatagtagttcagtcataaaaaaaaaattataataggctgattttcttttttctttttttttttaactcgaacttttcataactcaggggattccctgaaaaattactgcaggtggatatttcatggacaatttttttctccctcccaatttagtctcacacaaagacaagataacagcc

SEQ ID NO: 47306 - DNA, 520 bp, Homo Sapiens
  misc_feature (399)..(399): n is a, c, g, or t
  misc_feature (469)..(469): n is a, c, g, or t
  misc_feature (479)..(479): n is a, c, g, or t
  misc_feature (494)..(494): n is a, c, g, or t
  misc_feature (505)..(505): n is a, c, g, or t
  misc_feature (520)..(520): n is a, c, g, or t
tttttctaatatcttaagcagttcagacagtgacttgcttgagtcatcttctgaagctttaaaaacaattgatgaattggccttcaagatagacctaaatagcacatcacatgtgaatattacaactcggaacttggctctcagcgtatcatccctgttaccagggacaaatgcaatttcaaattttagcattggtcttccaagcaataatgaatcgtatttccaggtaatgagccagtggtttctttcattttaattaattagttagacatataaaaacttgctgatcacttagcagttgctgcttccaagaggtcttgggtccatgaagtgggcaaggtctggaatgttggcttaagtttaactaggaggcagtagcccattaaagtattgtggggngcttcaggagtggggtattgctttcataatctggggtgacaggggttggtcagctttaccttctacaagnggggttactnggagcttaagcatgngtaggggcccnccatacttggggttn

SEQ ID NO: 47307 - DNA, 959 bp, Homo Sapiens
gaagtcttcatcacatgattctgggactgatattacttctgtgactcttggggatacaacagctgtcaaaaccaaaatacttataaagaaagggagaggaaatctggaaaaaaccaacttggacctcggcccaactgccccatccctggagaaggagaaaaccctctgcctttccactccttcatctagcactgttaaacattccacttcctccataggctccatgttggctcaggcagacaagcttccaatgactgacaagagggttgccagcctcctaaaaaaggccaaagctcagctctgcaagattgagaagagtaagagtcttaaacaaaccgaccagcccaaagcacagggtcaagaaagtgactcatcagagacctctgtgcgaggaccccggattaaacatgtctgcagaagagcagctgttgcccttggccgaaaacgagctgtgtttcctgatgacatgcccaccctgagtgccttaccatgggaagaacgagaaaagatttgtcttccatggggaatgatgacaagtcatcaattgctggctcagaagatgctgaacctcttgctccacccatcaaaccaattaaacctgtcactagaaacaaggcaccccaggaacctccagtaaagaaaggacgtcgatcgaggcggtgtgggcagtgtcccggctgccaggtgcctgaggactgtggtgtttgtactaattgcttagataagccccaagtgtggggtcgcaatattacagaagcagtgctgcagatgagcacaatgtcagaatctacaaggatgccttccaaagcctacctgcagaagcgagctaaagctgtgaaaaacgaaggagaaaaagtctagaccggacaagaagacagcaagagacaggtggaagaacggggggctcagtcgaaaactaccccaaagagagaggccggccaaagaaggcggggaccccc

SEQ ID NO: 47308 - DNA, 897 bp, Homo Sapiens
catttgttactgaaatgattaatgcactgatgggtcctgaattcaccttgagaaagacccaaaggccagthagggggtggggggaactcagctaaatagacctagttactgccctgctaggccatgctgtactgtgagcccctcctcactctctaccaaccctaaaccctgaggacaggggaggaacccacagcttccttctcctgccagctgcagatggtttgccttgcctttccaccccctaattgtcaaccacaaaaatgagaaattcctcttctagctcagccttgagtccattgccaaattttcagcacacctgccagcaacttgggggaataagcgaaggtttccctacaagagggaaagaaggcaaaaacggcacagctatctccaaacacatctgagttcatttcaaaagtgaccaagggaatctccgcacaaaagtgcagattgaggaattgtgatgggtcattcccaagaatcccccaaggggcatcccaaatccctgaggagtaacagctgcaaacctggtcagttctcagtgagagccagctcacttatagctttgctgctagaacctgttgtggctgcatttcctggtggccagtgacaactgtgtaaccagaatagctgcatggcgctgaccctttggccggaacttggtctcttggctccctccttggccacccaccacctctcgcacagcccctctgtttttacaccaataacaagaattaagggggaagccctggcagctatacgttttcaaccagactcctttgccgggacccagcccgccaccctgctcgcctccgtcaaacccccggccaatgcagtgagcaccatgtagctcccttgatttaaaaaaaaaaaaaaaaaaaaaaaaaaaaaaaaaaa

SEQ ID NO: 47309 - DNA, 441 bp, Homo Sapiens
cacgaggcgggtgctgccttcacctgccaggcccttccccgctagcttggggcgagcagagctgcatccagtggaactaaagccgttccaggattatcaaaaactgagcagcaaccttgggggacctggatcatcacggactcccccaactggaaggtccttctctggcctcaattcccgtctcaaggccacgccttccacctacagtggagtcttccgcacccagcgcgtcgacctttaccagcaggcctccccaccagatgccctgcgctggatacctaagccttgggagcggacagggccgccacctcgagaagggccctcccgacgggcagaggagcctgggtcccgaggggacaaggagcctgggttgcccccaccccgctgagggagttcctcttgccccctacccccggggcttgtatatagattataaatata

SEQ ID NO: 47310 - DNA, 743 bp, Homo Sapiens
cgggatttactgtgttggctgggatggtcttgatctcttgacctcgtgatccacccacctcggcctcccatagtgctgggattacaggtgtgagccaccgcactcagctgatttgcaaaaactttcttccatactgttgtttcactttctggatagtgtcctctgaagcacaaaagttaattttgatgaagtacagcaatttatctgtttttttcttttgttgcttatgcttttgctgtcacatttcagaagccatcacctaatccaagatcacagagatttacacctagtttctaataagcattttataatttcagctcttatgtgtagatctttgatccattgtgaattaagttttgtgtgtggtgtaagagcccacattcttttgcatgtggatatccagttgtcccagcaccatttgttgaaaacattatttttccccattgaattatcttcgcaccattattgataatcagttgaccaaaaatgtacaggcttatttctgggcacttgactctattccattgacctgtttaaccttatgccagtgccacagtgccttgatcagtgctgctttgttgtgagaagttttactttgttctgcttcaaggctgttttgactcttctgcatctcttgcatttccaaatgaattttaggatccactcatcagtttcttcaaaaaaaaaaaaaaagcagctgagatttttgataggaattacattaaatctagagattgctttgg

SEQ ID NO: 47311 - DNA, 1236 bp, Homo Sapiens
  misc_feature (453)..(453): n is a, c, g, or t
  misc_feature (659)..(659): n is a, c, g, or t
agaacgtcctgccctctaccatgcagccaggagatgatgtcgtctccaattatttcaccaaaggcaagcggggcaaacgcttagggatcctggttgtcttccccttcatcaaagaggccattctacccagtcgtcagaagatatactgacccccatgcaggcaggatgtggggggcaagatcaggagagtcaggcccctgggcctctatgccaggtggggaccagaagtcgggaaggcatctaccacctgccctggctttcttcccctcaactctggagccccatccccaccctccttggggggctcagcttggctcagatctgatgcttcaagaggctgtaacctcagagggcaccaaggagggtggcagagcctgcttagccaggaggccgaggtccctcagtcctcccctgtcccttccaaggtgggtcaggaggttctggccccgctgnggcaggcagggcagggtctgtgaagcttaagagcagatggtgacaagttctctgggcaggtggccatggggaggggccatggcttggcatgtccaacagaaatagtttttgctgttgaacggtgatttctgtccaagtgcagatttcccgtttgaataaaagcttcgcttctaggtgggccacaaaaaaaaaatcatttatacgcngcccgcattcggggtcacttggcacattggcctatagggagtcgtatacaattcaatggccgcgggttacaacgcggggccgggaaaccctgcggtaccaacttaatgcctttgagacattcccttttccagttgcggaatacgaaaggccccgaccgttggccttccaacgttgccaacctgaggggaaggaaatgtagcgtaatattggtaaattcgcgtaattctgtaacccgcatttttacccaagccgcaatggaaaaccttttatcaacgaaatcccgcttaggctttaaggtgttcattggcgggcactttcgcgttcaccgcgaagggcgatacgcgcttctgggctggccctcgggactacctcttaacattcttcgtgcagggctccaggcctaattggccctcggggctctttctaactttcgttatattccttcacgccacgttcgctctacgacagactctccgctatcgagactgcctctctgcctcactctcttcttcgcttctctcactagcctagctgtttcttctcttctgcgcgctatctctcgctctattatccccg

SEQ ID NO: 47312 - DNA, 922 bp, Homo Sapiens
ctgggctgcaggagctggggccacccacagcccccctaccgacctggtgtggaaggcacagaacacctggggctgcgggaacagcctgcgtacggctctcatcaactccactggggaagaagtggccatgcgcaagctggtgcgctcagtgactgtggttgaggacgacgaggatgaggatggagatgacctgctccatcaccaccacggctcccactgcagcagctcgggggaccccgctgagtacaacctgcgctcgcgcaccgtgctgtgcgggacctgcgggcagcctgccgacaaggcatctgccagcggctcaggagcccaggtgggcggacccatctcctctggctcttctgcctccagtgtcacggtcactcgcagctaccgcagtgtggggggcagtgggggtggcagcttcggggacaatctggtcacccgctcctacctcctgggcaactccagcccccgaacccagagcccccagaactgcagcatcatgtaatctgggacctgccaggcaggggtgggggtggaggcttcctgcgtcctcctcacctcatgcccaccccctgccctgcacgtcatgggagggggcttgaagccaaagaaaaataaccctttggtttatttcttctgtatttgttttttctaagagaagttattttcgtacaggtggttttatacctgaagggaataaacgacaatgcaaaaataaacagatccgagcctctatctcagtacatgttgtcaggccgataatgtccgacctcgcgtttcgttttgcccgtgtttcccgtgaagcgtcggaattcggccttgaaaaccaataagggaattcctttagaagccagggctgaaaggggtagcgtaagtaaagaggtcaacctgcgaggtatcatgaccttgtaggttggcccgc

SEQ ID NO: 47313 - DNA, 792 bp, Homo Sapiens
ccaccagcgcttcgccagcgcctggccgagcgcttcctcacagcgggcaggacggaccccgcccacgacgtgcgggtggcggtggtgcagtacagcggcacgggccagcagcgcccagagcgggcgtcgctgcagttcctgcagaactacacggccctggccagtgccgtcgatgccatggactttatcaacgacgccaccgacgtcaacgatgccctgggctatgtgacccgcttctaccgcgaggcctcgtccggcgctgccaagaagaggctgctgctcttctcagatggcaactcgcagggcgccacgcccgctgccatcgagaaggccgtgcaggaagcccagcgggcaggcatcgagatcttcgtggtggtcgtgggccgccaggtgaatgagccccacatccgcgtcctggtcaccggcaagacggccgagtacgacgtggcctacggcgagagccacctgttccgtgtccccagctaccaggccctgctccgcggtgtcttccaccagacagtctccaggaaggtggcgctgggctagcccaccctgcacgccggcaccaaaccctgtcctcccacccctccccactcatcactaaacagagtaaaatgtgatgcgaattttcccgaccaacctgattcgctagattttttttaaggaaaagcttggaaagccaggacacaacgctgctgcctgctttgtgcagggtcctccggggctcagccctgagttggcatcacctgcgcagggccctctggggctcagccctgagctagtgtcacctgc

SEQ ID NO: 47314 - DNA, 663 bp, Homo Sapiens
cgagagcatcttgttcattgcctttttcacctaagcatagggggaaaaactctcagggccctattaagatttataacctttgtaatgttcttcaccacagacaccttcttgtgagttttcagtctgactgggggggtggggggtgtgaatgaaatggatgtcacagagtgtcatgtgtctgatgcagcctcctctgctgtgtattaaatgtcaaaatctgaatatatctggatatgtactaatcaaataataatcaatcaatcagcatatacatttcagccaaagccatagaagaaaaagcaatagttgcttgaattatgatcatctaccaccaactctgctcagccctgtaacagggtagggagagggtataacaggaagagctttgacttgtccctgtctatacattctctgtatcttttgggggtaacttcttggcagtttttcagtgttcagccatgtcagttgaaactagatttttctgtagattttttacttacccatgtgagcctaacactatcctgtaattcattttctcaggctatgtgtaaatgtagaaccctaatttttctataaaaaaacaaactaactaactgtgtaaagaaagaaaaagggaagtaccaatgggtttttccaccttatttttacctttgatctaccctt

SEQ ID NO: 47315 - DNA, 830 bp, Homo Sapiens
  misc_feature (738)..(738): n is a, c, g, or t
  misc_feature (740)..(740): n is a, c, g, or t
  misc_feature (778)..(778): n is a, c, g, or t
cacacagtcgaaaagagcaggcaaaagaatcctcgaagcttatgtatccagccacagacggctcccgatgcgctgccccctgagaaaacacttgaattgacgcaatataaaacaaaatgtgaaaaccaaagtggatttatcctgcagctcaagcagcttcttgcctgtggtaataccaagtttgaggcattgacagttgtgattcagcacctgctgtctgagcgggaggaagcactgaaacaacacaaaaccctatctcaagaacttgttaacctccggggagagctagtcactgcttcaaccacctgtgagaaattagaaaaagccaggaatgagttacaaacagtgtatgaagcattcgtccagcagcaccaggctgaaaaaacagaacgagagaatcggcttaaagagttttacaccagggagtatgaaaagcttcgggacacttacattgaagaagcagagaagtacaaaatgcaattgcaagagcagtttgacaacttaaatgctgcgcatgaaacctctaagttggaaattgaagctagccactcagagaaacttgaattgctaaagaaggcctatgaagcctccctttcagaaattaagaaaggccatgaaatagaaaagaaatcgcttgaaggatttactttctgagaagcaggaatcgctagagaagcaaatcaatgatctgaagagtgaaatgatgctttaaatgaaaaattgaatcaggagaacaananaggaagagcaaggggaaaaagcaaatttgaaaaatccncagattaggtatccagaacaaggagttagaaagcctgaaagctgtgttagag

SEQ ID NO: 47316 - DNA, 584 bp, Homo Sapiens
caaataacagctgtagtaagaagagattcaggatgctagaggtgaatatttgggtcatttacatgtacactacatagcaagttgatactcatgttgcatgttcttttaaattagtgattttgtgtcttaagtctttaacttccaatacttcatcatgtatgtaaccttccatgtttgcttctgataaatggaaatgtaggttcactgccacttcatgagatatctctgctcacgcttccaagttgttctcaatgacattagccaaagttgggtttgccattcatcccctaggcatggtaaatcttgtgttgttccctgctgtcctccgtattacgtgaccggcaaataaatctcatagcagttaatataaaacatctttggaggatgggagagaacaggagggaagatgggaaacaaaatagagaattcttaagattttgtttaaaccaaatgtttcatgtagaatgcaaaatgttggcacgtcaaaaatatgaatgtgtagacaactgtagttgtgctcagtttgtagtgatgggaagtgtattttactctgatcaaataaataatgctggaatactcaaaaa

SEQ ID NO: 47317 - DNA, 623 bp, Homo Sapiens
ccgggcacaactctggatagattgcaggtgtggaatttgctggagtttggtgacttcgtcaaattcctttggattctgttccgccaaatcagcagtctcgtcctgtggatgcagtgactggaatttcccatctgcaaagcatctctgtagcccagattttgtggagccttaagacactccctcaatgccaccctgaccccacggctggagaaccctgtgcttatgtggtgggcagggccactgttgatggaggatggcggggacggggtggtgctcaaaggatctgtggtgctggaggtctacacgcctctcaggacagcgtgtcaggaacctcagagcagcttcacatctgccaaagctgagagggagcgaacttgggaagcattttgctcattgtcctacccaagtattaatagcataatagttgatgccaaaggagatggtgacgtcccttccactgtagttgctgtcacaaccttgacgtctttaagctaatggccgtttgcatctgtgtcttcaaacagatcctggttacagccattttgtgtgattcacttcgggggttaagtaatgcaggattctgcaaacaaggtgtcgccgtccaaatgtactgtcctggcata

SEQ ID NO: 47318 - DNA, 888 bp, Homo Sapiens
ggccggattctccgattcgtcgacccacgcgtccgaaggcacatgccgaagatactcaagagcccaggcagtccctgaatgaccaggccagtgttgtcactgagtggtcccctgctggttgggagtgaagagaatccaggctggcagagctggagccagttggggagcacggttctgggagctctgcaaaatcagtagcaagtgctggaaaaggcacatgccgaagatactcaagagctcccaagatttgcttgaggctagcccagtgaagaaaaaccagagactcatgtttccaggggtcagtctgtcaggcaggaaggacccaggatttgaacccagcttcagtgtgcaggctctgaggctgcccaggacgggaaagtccaaggaaggggcctggtggtgctccacttgcagttctttaaagaatgctgctttttattctcctaaccctttcaagtgggtgcagacttctcgttagcagctggaagacattcctcccacacttttcccttcctggcccaagagagcatccagaaggcagtaggacctggtttttcaggtactgggagccgggggctcactgcttgcactgtgcttagggtagggatggtaaatatcctccctgcatggctttatcctccctctcatcccaaagcaggtatcttctggttgtcacagagtttcattgagtccagctgcagccacgtggccatctggagctggtgctataggtgaccatctggtacattgaggggacctgtttgcctcctccactctataagcagtcatcttgggagaccgggaggagaaagtggtgggctagtcctgtgtcctcctccacttcccatgcctctatgttacccatctgtgtctcctgtgcagaaagga

SEQ ID NO: 47319 - DNA, 793 bp, Homo Sapiens
cgtttctctgttgtctcggtagaaggccagagtcacacacggtcctaagagctgggcaccaggaagcgaaggctgatctgaagaagacacttgaatcatgggtgacgttaaaaattttctgtatgcctggtgtggcaaaaggaagatgaccccatcctatgaaattagagcagtggggaacaaaaacaggcagaaattcatgtgtgaggttcaggtggaaggttataattacactggcatgggaaattccaccaataaaaaagatgcacaaagcaatgctgccagagactttgttaactatttggttcgaataaatgaaataaagagtgaagaagttccagcttttggggtagcatctccgcccccacttactgatactcctgacactacagcaaatgctgaaggagatttaccaacaaccatgggaggacctcttcctccacatctggctctcaaagcagaaaataattctgaggtaggggcctctggctatggtgttcctgggcccacctgggaccgaggagccaacttgaaggattactactcaagaaaggaagaacaagaagtgcaagcgactctagaatcagaagaagtggatttaaatgctgggcttcatggaaactggaccttggaaaatgctaaagctcgtctaaaccaatattttcagaaagaaaagatccaaggagaatataagtacacccaagtgggtcctgatcacaacaggagctttattgcagaaatgaccatttatatcaagcagctgggcagaaggatttttgcacgagaacatgga

SEQ ID NO: 47320 - DNA, 583 bp, Homo Sapiens
gagttactgcctgtgaagaaatttgaaagtgagattctggaagcaatcagccaaaattcagttgtcattattagaggggctactggatgtgggaaaaccacacaggttccccagttcattctagatgactttatccagaatgaccgagcagcagagtgtaacatcgtagtaactcagcccagaagaatcagtgcggtttctgtggcagagcgagttgcatttgaaagaggagaagagcctggaaaaagctgtggctacagcgttcgatttgagtctatacttcctcgtcctcatgccagtataatgttttgtactgtaggtgtgctcctgagaaaattagaagcaggcattcgaggaatcagtcatgtaattgtagatgaaatacatgaaagagatattaatactgacttccttttggtagtactgcgtgatgttgttcaggcttatcctgaagttcgcattgttcttatgtctgctactattgataccagcatgttttgtgaatatttcttcaattgccccatcattgaagtttatgggaggacttacccagttcaagaatattttctggaagactgcattc

SEQ ID NO: 47321 - DNA, 624 bp, Homo Sapiens
tttcaagttttgttctgcactcccacgactgaagttgtagattgagccgaataaccatgggaagtgaccaagcaaagacactcgattggagtcagttgaatatttgtaccctcagtggagcccttctggtcttttcttccacttctgcagaatttcctctagcaaatacttctttctccttgcttgcctccaccatgatatttgaataagagatggccagaggataacacttgtctcttaaaaactaagctaaaaagaacctagaaccttcaattgagcagttgtgaaaattgctaatggtgccaaggccaagcaaagagtttcagaaaatgactgagaaggagcgataacccccagaatgcaaaatcaggggcatcattatccggtgcttgaacaaggagctccgctctacaactggtttttttaggacttgtgaggaacacagcaacggaaatccatccacaaaggatgcagtgccccaacttgtactgcgcctgaatagtcatgtgataatttactgaagaaatctagtgtactttaaatttttttcataaaagtttacattgtattgtaggttaacattaaatgttttatagcaaaaacttcaaaaaaaaaaaaaaaaaa

SEQ ID NO: 47322 - DNA, 568 bp, Homo Sapiens
caaatggaaagggatcatggcaaaagcaaataccgcatccttttcttccgcagaactagagtcagagttcggcagctgcgtacaaaggcctctgccctcggcttgagcaaaagttgtaaataactagtatttattaagcacttataagcagtttttctcacttagtcctggctccagttctagagttcctctttattgcttttggtgaaagtttggggttgggggtacacctcagaggttcagtaattcacctggagtcccaccctgaacagagctggacccagagccacacacgcccgggaacacacactgtgctggggaggaagtgggcctaggagggcctgcaggtccaggcagctgtagagctgctagaagctggggtgttgctctccccgctttctcatagacacagaggtactgtctgcctgttgtcacacagttcatatgctcgcttgagatggaatctgaaccttggtcccaggatctgtgctttttcccactttgccacactgtctaaggtggctttgaactggaacccaagtgcaaataaaggttggtattcgctcct

SEQ ID NO: 47323 - DNA, 618 bp, Homo Sapiens
ctcttgctgaaagagtttgccttgttttgttttgttgttttgtatttagccagaggatgccaaaattagtcttctcaaagctttgagtagagtaagtgtgggaataagccagtttttttttttctgtttctgtaacttaaatgaacgggtttttttcccttgtatgccacttgtcctaacatgtccttaaggtgtttaacctgcctctgacctggcttgcaatgcataggtgaggagaagcagagagcttgtcatatgcaagtcctgtcaagaaaacaggtgggcatggtggctcaggtctgtagtctttgggtctttgggaggccagggtgggaggatcacttgagctcaggagtttgagaccagcctagacaacatactacgaccctgtctatacaaaaaaaaacttctctaaattagccggatgtggtggtgcatgcctgtagtcccagctactcgggaggctgagtgaggcaggaggatcacttgagaccaggaggttgtggctgtagtgagtgatgatcatgccactgcacttcagcctggaccacagagcaagaccctgtgtaaaaaaataaaataaaaaacagattggaaaaaaaaaaaaaaaaaaaaaaa

SEQ ID NO: 47324 - DNA, 648 bp, Homo Sapiens
cggccgccgctccaccatttttttttttttttttttttttgtagtatgtttttatgagttaacctcctaatgtggtaggtattaggtaatgtgctgtcatgaaaaaaattgagacttccaagaaaactggacaccaggtgagggttggtttggagacggaataggtgtagctgcctttccttgaaaaacagtgtgtaaagatggctgagtgcaatggctcacacttgtaatcccaacactttggaaggctgaggcgggaggatcagtatatcggtacgtctgagcccaagagttcaagatcagcctgggcagtatagcaagaccccatctccattttttttttaatgattttttaattaaaaaaaagaacaacaggatagagctgttggggtggcacagtggcccaaagagcagcttcagagataattccttggttctatgatccctgtttaactccaaattacagtcggacttggatacatcatttgtaacattgtaggaaagaaaaaagtcttggttgtgaaaaacgatttgcatttgggtaaaataaagtgaccatgcttttgttctgtaatactgtgtgacctgtggttgttgtaatggtgatcatggagagcaaatatgaacttggcctggattttaaatggc

SEQ ID NO: 47325 - DNA, 1027 bp, Homo Sapiens
gggatggaagaggcccaggaggctgggtgaggcgctgagacggtttggcggtgagtcctgggccaggcgcactgaaaggcccgcaacccgggaaacgtcaaaacaaacagaaggacttgggattccggagcagtcgcccctatcgctgctcctgcagttgcggacgccaccgaccccgccgccggaggactgggcactgaaaggcctctaggcctaggcgcggcccgcggagccagacgtgttgctgccgtgagtaaaacgagcgccctctccgcactcgtttacaaattaaaatggaggaaatttcgttggccaacctggatactaacaagctagaggccatcgctcaggagatttacgtagacctgatagaggattcttgtttgggattctgctttgaggtgcaccgggcagtcaagtgtggctacttctacctggagttcgcagagactggtagcgtgaaggattttggcattcagccagtggaagacaaaggagcgtgccgcctcccgctttgctcccttcccggagaacctgggaatgggcctgatcagcagctccagcgctcacctccggaattccagtagctgcaaaatgagagtctgaaagtggccaggacaataacatagactggtcctgtggcttcgaggagtaagctaagtagaaaaaagtagaaaaatcagacaaaagttttaattcccccttgaagatcctagcatttaaaaacccaaagtggataatttaggaatcctttttttaaagtgtattacctggagcaagctctgaagccctgggcaggaggagctgcacagcctgcgggccatgcagtgcctgttgatctctaaacacaccaggatgtgcgcaagatcctgtagtgcccccagtgcacaggtgagcagttgtgtgcccagcatataaaatttttggttctcagcctttctgtctgcctgatgtcaagggcttcyggacagtttggacgttamarttcgtcaggcgtgatartggsctsagtgggatkctcctttga

SEQ ID NO: 47326 - DNA, 695 bp, Homo Sapiens
gggaagagctagtggttatttaatggaccttataaattttttgagaagcatctttcaagtgtttactcatttgcctgggaaagttgctcagacagcttgcatgtcagcctgccagcatctgtcaacatccttaatgcagatgctactggacagtgagttaaaacaaataagcatgggagctgttcagcagtttaacttagatgtcatacagtgtgaattgtttgccagctctgagcctgtgccaggattccagggggataccctgcagctagcattcattgacctcagacaactccttgacctgtttatggtttgggattggtctacttacctagctgattatgggcagccagcttctaagtaccttcgggtgaatccaaacacagcccttactcttttggagaagatgaaggatactagcaaaaagaacaatatatttgctcagttcaggaagaatgatcgagacaaacagaagttgatagagacagtcgtgaaacagctgagaagtttggtgaatggtatgtcccagcacatgtagacctcacatggcttgcactcagtgacaccaaatccatgattcaatgttgatcttgagcaagtattggtcatgatacagtaatttgtttacagaatccaaaaatacaatagagaagatacatgagggcttaaacaagaaatagtaataaatatcattt

SEQ ID NO: 47327 - DNA, 690 bp, Homo Sapiens
atgacaggtttgccaggaagaaataggacgtgacggtactgggccctgtgattctcccagcccttgcagtccgctaggtgagaggaaaagctctttacttccgcccctggcagggacttctgggttatgggagaaaccagagatgggaatgaggaaaatatgaactacagcagaagcccctgggcagctgtgatggagcccctgacattactcttcttgcatctgtcctgccttctttccctctgcgaggcagtggggtgggattcagagtgcttagtctgctcactgggagaagaagagttcctgcgcatgcaagccctgctgtgtggctgtcgtttacatttgggaggtgtcctgtatgtctgtacgttggggactgcctgtatttggaagatttaaaaacctagcatcctgttctcaccctctaagctgcattgagaaatgactcgtctctgtatttgtattaagccttaacacttttcttaagtgcattcggtgccaacattttttagagctgtaccaaaacaaaaagcctgtactcacatcacaatgtcatttcgataggagcgcttgttatttttacaaggcagaatggggtgtaacagttgaattaaacttagcaatcacgtgcctcagagcttttgcctgtcagtggtgtgtgtcccttataagtccccttcccccacagtc

SEQ ID NO: 47328 - DNA, 747 bp, Homo Sapiens
acagaaactagcaaaagagataggagcatgctgctatgtggaatgttcagctttaacccagaagggattgaagactgtttttgatgaggctatcatagccattttaactccaaagaaacacactgtaaaaaaaagaataggatcaagatgtataaactgttgtttaattacgtgagaaacatcttcagtggccaaggaaactgtccatttctctcagaaagcaaatgaaatgctacagctatacccagaccttttataggtaatgaagcagttcaaaacttgaaagaaaacaaaacctgtcctcagaattctataaagtgtattaagaatgttccttaaaggtttaagaagcagtaagcagcatctgaagccacaatctattataaatactttatttcaactggaaggtacaatctctcaggggtttcatagtttaaaaagctacaatcacatcatgttgtaactacgtaaaaaacagagctgtaaatggaactgcttggctttgaccatacacatttctgcccagcccttacagaatctgcacaaagaaatatctccctttgctccagttaattgttcttgtatgtaagttgctttctattccagtatatccagagtggtgaaataacaaggccagccacgtagccaaaggtcgctccaagcgtacaggagatgggccatacctgaggagagaatgtatgagatcaaaaaagaacaaatgttttattattacttgagcacaagtgt

SEQ ID NO: 47329 - DNA, 529 bp, Homo Sapiens
gaagaaggagcaggagcaagtgagagccacgagccaaggtgggcacttgatgtcggatctcttcaacaagctggtcatgaggcgcaagggcatctctgggaaaggacctggggctggtgaggggcccggaggagcctttgcccgcgtgtcagactccatccctcctgtgcccccaccgcaacagccacaggcagaggaggacgaggacgactgggaatcctagggggctccatgacaccttcccccccagacccagacttgggctgttgctctgacacggacacagccaggacaagctgctcagacctgcttccctgggagggggtgacggaaccagcactgtgtggagaccagcttcaaggagcggaaggctggcttgaggccacacagctggggcggggacttctgtctgcctgtgctccatggggggacggctccacccagcctgcgccactgtgttcttaagaggcttccagagaaaacggcacaccaatcaataaagaactgagcaaaaaaaaaaaaaaaaaag

SEQ ID NO: 47330 - DNA, 715 bp, Homo Sapiens
tacactggagccatttctagtctttctctggggggaacaggccacagaactgtgttagaggtgaaccatcttaattactagttctattacctaattcagcttccttgtttggtctgctgtggatctgccttattgcatatgccatgcatcagataatggatgcatcagataatggtgttagacaaagcttcattgtgaacaacctaatgcattttagagaaacaatctcatcacattttttctagcctttcctacatttaaacttgctgttgcccaaattataattttttaaatgtctttggtgggcttctgttaattcacatgacttgagcttatagctatgtctactgcacagattgggtaatggaacactaaacttttatacttgaaaatgacagccttaaatgctcatatcagtcacaaatctaggatgtactgtcttgttgtatgtgagctttgtagagatttttaaaaatataagcatcaccttcccattgaagagtggagagagtctactggatgactggccaggaactttctctctgaatcggacatttggatgtcttctttcttccaagaaatggtggttcacattaaagtatcatggccttatgtatgctcaaatggaatcttatgtaacttttcttatttaattttggtctgcttatttttagatatgtataaacgaattacacagtaaactatacacatttcc

SEQ ID NO: 47331 - DNA, 531 bp, Homo Sapiens
caattcgttttcgcgtttacccaaataacctctttaatatttgctactgttaggtgtaattagaagatacatgaaagaggcagggtgtggtggcttatgcttgtaatcctagcactttgggaggctgaggcaggtggatcaacatggcgaaatcccatctctaccaaaaatacaaaaaattagccaggcgtggtggcacccgctgcacctgtatcagctattcaggaggccaaggtgggaggatcacttgggccctggaggcagagattgcagtaagccaggatctcaggatcgtgccactgcactccagccttggagacagagagagactccatctcggggtggggggaaaaaaaagagaaaaagtgagagagcctggacaacataacaagagcctgtctctacaaaaataaaattaaaaaaaaattagccaggtgtgatgccacatgcctgtagtcctagctacttgcaagcctaaggtgggaggatccattgagcccaggagttcaaggctgcagtgagctgtgatgt

SEQ ID NO: 47332 - DNA, 736 bp, Homo Sapiens
tgcttggttctttagtttttcttttgcaaaaatccttcctgtcactttaactaaaaaccaaagattgttttctatgataagcagactagagaaaaactgccttattttcagaagcatgtcttcattcaaagcttaggcttcaatagaaattcagactaatcactgaaatgactatttcaaactagtgaaatatctgggaaataaactgcttcaaaaatattttactgacatgaattttgctagtgaatacaaatacactgcctcaaataaggccatgtatgaatgaacttacaagatatttgagttaatcagtgtttgcatatagagaattagttctaaagttcttaaaaataaatttaggggctccctgaaattttatttaatactttgctaacttacactcttgttttatctccacaggtacattttaggttagctcatggtgaattctatttacaataagtggagcttggattaatgggttttgttatgaattatcttagtgactttaggacactgtttccatttgatttttaactatttaaaataccaaattaaataccagtttgtggttgttacttttaaatgattgttactttaacagtgttccttcttaacacatgggggttacaaataaaatactatgcatagtttaaaaaaaaaaaaaaaaagggcaaaaaaaaaaaaaaaaaaaaaattgtggggggcgcaaaaaattaaaaaacatttggggggc

SEQ ID NO: 47333 - DNA, 486 bp, Homo Sapiens
agctctctgctttgggctctgcaggccaccagatacacatgaggcccctacttctcaagctgggaaggccaagagccttccttcagcctttctggttatgttacacctagctgaatgtttacaaggtctggatccatcagccctcaggcacagttgggccaagcagaaagagagaaacacttctgctgtcaccttgaatgaactcaggaatagcttccctctggactgtagaggagctaactgtttggaacagaaaactgctggctgttgattttgtctggttcctttgccaacatctgggcacaccctttgcccagacacgagtggggaaagcagttctttctcctcagtttccaaagtaaatggggaatcccagctttcttttctactagcaaatgaccctaccatttatttctgcctttttcttccgttcattgtgaggaaaaataaaactggttgagaaaaaaaaaaaaaaaaaaaaatggc

SEQ ID NO: 47334 - DNA, 895 bp, Homo Sapiens
gggaaatagagacgtgtcaacagatgcattcatttctcttggaatgtgtattgtttttattttgcgaaacaaaacaaaacaaaaaaaaaagcttggaactccatcacgtggaaaaactagatcctgttggttatagcatttgtgagttctccacgtctgtctctctcgctcatgtaatatactctgaccctgagtggaaaggggtttttgttctgtttttattttacctacatgtactatttagcttcagtgtactagtcctgccacctgtgtatttttagggtgctatggaaataatgaaaagaaacggggatttcagaagaaaattgtaaccaaattcatactttgtataatttttgatatcatgatcacaggtgattcacacgtacacacataaacacacccaccagtgcagcctgaagtaactcccacagaaaccatcatcgtctttgtacatcgtatgtacaatgcaatcatttcatactttaaactggtcaaaaaactaattgtgatttctagtcttgcaaagctgtatgtagttagatgatgtgacaacctctaatatttatctaataaatatgtattcagattgagcaaacgagaaacataacataaataacttagggataaacacaaaaaatacctaaagaaaaattttgttcggcccccctcccccccccagaaaacctttcaaaaacatttcttttggggcgccgggcgcccccctggggaaaagtgaaacatggtcctaaacgctgttttccaaggaaaaaacccgggacaaagaaaaccagggccttgggaattttcccccaaattaaaaaaacacccgcgggggggacaaacagaaagaggtttttctaaaaaataattaccagaaagggggggtgttttt

SEQ ID NO: 47335 - DNA, 594 bp, Homo Sapiens
atccatgaaaaagcacaaggtcctggctccttgcggtcacattctggttctctgtgttttgtggactctgctctcactgttcacccagcactagcagtaccagatggttctgtggagtcctggggaatggagagagcacagtctgactccctgccaagtagccaggagttgacttgcccatggtccgctggctttcccaccacttcctacaggatgggatctaagagactcaagagctgggtttctttcagcactctgtactgtcccaaatagcaaacaaatcactttgtagccagatttctgaatggaaatgagaaattgaattctccatggacttttaggtttatgggggagttttagctgtgtttcttggttttatttcagccaaacatgtctgcttttgattttttttttaaagtataagtggtctatatatatgttcaccttttaaatgtaaatgtttaaaaagtaagcatttatgtgtttccataactgacatctgatgcagacctcattctctccccctcttctaccctcctcttttcccccttttcatactcttgtattggttctaataaatggttgcttttcaaa

SEQ ID NO: 47336 - DNA, 607 bp, Homo Sapiens
gcgtccggttttagtctatgaaaatgctttattttttcattggtgatgaaagtctgaaatgtgcatttgtcatccccactccatcaatccctgaccatgtaaggcttttttattttaaaaaaacagagttatcccaatacattatcctgtgatttaccttacctacaaaagtggctcctgtttgtttgatgatgattggttttatttttgaaatatttattaagggaaaactaagttactgaatgaaggaacctctttcttacaaaacaaaaaaaagggcagaaatcaccccaaggaacgatttctcaggttgagatgatcaccgtgaatccggcttcctctgagcattcgatggccttagcacctcatcaagccagcacatcctgcctgctgttgcagcctggctgggtttattcttcagttaccctaatcccatgatgcctggaaccttgattaccgttttacatcagctcttgtacttttcagtatattttcataatgagttatattgtcatttagactttgaacagctctgggaaatagaagactagggttgtttcttaaagtttagctcatgttataataaaaagttgaaatgaaaaaaaac

SEQ ID NO: 47337 - DNA, 500 bp, Homo Sapiens
gaaactgcactgtaggagaattggaatatttaaggctggttgacattttttattttcattttatatcttttgtatagctctacaaggcagtgttttgtaatttggtttcattatgaagatccagtacttggcagccatagtttagacaatattgttcagtgctgtttgcttgcatgttaacaacaaaaccttttagaggacccacaaatcatgatattgaacacagttccgaggcattcagagcatcagagcaagtaccatggcaatacatgtgtagactgttggagatgtcccgggccaatttcaagaaagaaaactgtaaatactagttctacttgctctgaaattatgagtttatgcgttttcccagccctccgaatcactgactggggcgttttgtgccccagcaataactggcagcatggcatacctgcagtaccccttacaatattaaagcaaagtttttattctaaaacagaataaaactgttcaataaaaaa

SEQ ID NO: 47338 - DNA, 563 bp, Homo Sapiens
tgttttttgtttgtttttccgcttaatttcaaagataaaatgcagttacttttgggggtggaaggctcatcttaaaacatgagcattaaatatatttggaatagcagaaggttaagtaatttcttatgtatagttaaactaaagcagtacttcagtgggacttaacaagtattttttcatcactgaaaggttttttttttttatcactaaattgtatttggcaattgcaagttgcctgcagatagggccgtgatactgtgttttgagccacagaaggttgtgtgtgtgtgtgtgtgtgtgtgtgtgtgtgtgtgtgtatgtgtgtgtctttttcctcctttcttttggggaatcctgtaatatgaggtagcttatttcgtcaattaattagggtgctggatggtagagaattttgtcagtcaactatgtacacacagtaaatactgtttcttaggcaaaggtaacttttttatatagttgtaaaattccattatattccattgccaaagaaacattaagaactttgtatagctgtataaaaagcaactaattttttaaagaat

SEQ ID NO: 47339 - DNA, 660 bp, Homo Sapiens
ttcttattctaaaagtctgaatgcttagaacaaacttaacatgtttatagaatatggtctctttgtaccaagtactttgcttaagagctcctttgggccactacatattttggtttctagaaaatgtttgtttatgaagaagtcgatggaaaactgcaaacatatgcagaaaaggtagaataataaaaaaggtctaatgaactccattcagctttgaacctatccactcataaccattgactggcctttaaaaaaaagtattggcagaattaatttccacctaggtgatgggaagaaagtgttcgcctgttccagcctgtggctcctgcctggaggttacccagtggtgcgccagcgccaagccatcactccccgagggcctcccctgccaatggtgctggtatcccatgcagctcaccactggctgcgtggaaactcccttttttccaactttattattggccttctaaggagctgttttagatgttttttctaactgcctcctcccatgccattttaatactacagatgtactacgtatctgtttatatactgtacctacatctgtgctttgtacataaaagaaccagttttctcccccttgaggacagagactcatttgaacatgcataggttaataaataataaattcttatttaa

SEQ ID NO: 47340 - DNA, 800 bp, Homo Sapiens
cgagggacgcttgtgggttctttagggtttgagtttcttcttccccttgagcttcagagaggagagttggcatggttaaatctgaatggttacctcactgctgaaaacccagaggggcgtggcacactcgcttgtgtggaaaagcctctaaatgcatcccttcctttctttcctgcttcctttgccttacaattgaagcagcccgtggtaccatcacagtatgcagagacttcctcacctttcatatctagggaccacccccgatgcattggtgagggtgggcacttataaatgcctgctattgttaagccattccagcctcttcctctgaatagaccagacgccctttcacttagttcagtgccagtccttttgccttcccaaccctgctgttaggcctgctgttccctttgctcttgattaggagagatggaaggagatgagctcccataactgaattggcctttggttcatgttttctccccatatgtatatatgccatatgtgaatatgccatatatatgtgccaacaaatctatctacgttgttcttttcaaattagcacgcagataggaattttgagtttcttcttcttttagtaactagtataacaagcactggtatttttgtacaaaaaagaaaaacaaaagattgactattgtggtctgcatgacataaacaaacaaatggtgatatcaaagcaacgtataccccagtccagtgtgtgttgccataatttgcaattcagcttaacagtgcacccaatctatatttgcattttgatattatttaagctctag

SEQ ID NO: 47341 - DNA, 709 bp, Homo Sapiens
tagagaagggccatcctgccgtgccccagcctggacccctggggctcagatagaggtgctgagcccctgtgtcaaagttgttaaatgtttttgttttgttccattgtagctcttttttttttttttcccctttcctggtgattgattttacaaaagaaagtaagctgcttagaaggccctggaagggaagtgaggaggagggacaaggaagatgactagttacggagggtgagggttgttttttgccaaaaagcctgggtagagtgatctgaattatctggcaccctcctgaatggaaccccagagtacctcctgtgtggaagggtccctggattttccctaacacccaccctctcccccttcagccatgctgatggcagagaagataagaacttggagcccatttctcactggagaggaaaacttgtcatctggctttgcggagaaggttccaccttacgctcgtagtacattatctttactatgtgctaggatatcatatttaaaaggacaaaaaaatgtaaaatacttgaatgagcttgtattataacattaatattattgagagtatctgctttccaggctgaagtgattcattcattattctagtcctgctttagtcctttgtaatttgtggtaattatgcttttctttttatacaaaaaatgtataaaaataaacacttgaaaagcaaaaaaaaaaaaaaaaa

SEQ ID NO: 47342 - DNA, 601 bp, Homo Sapiens
aggtgcgggagctggaggctgagcttgatgcagagcagaagaagcacgccgaggcccttaagggcgtgcgcaagcatgagcgccgtgtcaaggagctcgcataccaggccgaggaggacaggaagaacctggctcgcatgcaggacctggtggacaagctgcagagcaaggtcaagagctacaagcgccagtttgaggaggcggagcagcaggccaacaccaacctggccaagtatcgcaaggcccagcacgagctggatgatgcggaggagcgggcagacatggcggaaacccaggccaacaagctgcgggcacggacccgggacgccctgggccccaagcacaaggagtgacggcctgaccccctgggctctaaagaggaatgtctgctgttgcacatctggctgaggccacctgccccgatcctgccatctctgcatcgccccctgccgccttcagccttccctgggccctgaataaacaccacagccagtttccttctcattcttttctttggggttcaggaggaaaaacacagtcctagggacaaaagccaggtccacagcagtcatttttaaaataaagttatttaatagtcaaa

SEQ ID NO: 47343 - DNA, 623 bp, Homo Sapiens
  misc_feature (588)..(596): n is a, c, g, or t
  misc_feature (598)..(603): n is a, c, g, or t
  misc_feature (605)..(616): n is a, c, g, or t
ggtgagaggcctgggccagcagcagcattgccgctccacatctttgctcaatgttttcatttttgaaaatacatttgttccaatggggagcttggaagatggcgttcccagaaagtattttaatatcaatagaccacagccaaagccttaaatcaaacccacacacaactgaaaattgcctcctccatctctcaccttttcctgtggagaagagaaggaaaagcacacgcatgcgcctcagcaaatggcagcccaggagctgtttgtccagtttagcatggctaggtctggaactataatagcagggtcagactgtgggttcctcttctcctgtgcttgagctctggtttgagagctggcgctaccaacctttttcctatatcccgagtggggcacagacggtggatctctgcccagtgtggtgtgtctggcttggcttttcaatattgtgaggtctgaatggatctgatccctgtcagatgaaaatgattcacagctctggcagttcccaagtctggggaggggtataggtttgaaaggctgtttgaaagaggaatgtttaaataaaggctttgattttatcttgtnnnnnnnnnannnnnnannnnnnnnnnnncatgtcg

SEQ ID NO: 47344 - DNA, 967 bp, Homo Sapiens
  misc_feature (711)..(711): n is a, c, g, or t
  misc_feature (717)..(717): n is a, c, g, or t
aaaagagagaaatgtatgagcatcctgtcttctgcttggcctcccaagtgatggatttaaccattcaaaatgtaggccggttaatcactcctgccaaaaagcttgaagatacaatacgtcttgctgaactagtcattgaagttcttcagcaaaatgaggagcaccacgcagaggcctttgcgtggtggtcagatttaatggtggagcatgcggagacgttcctgtcactctttgcagtagacatggatgcagccttagaggtgcaacctccagacacatgggacagttttccactatttcagctgctgaatgattttctccgtactgactataatttgtgcaatggaaaatttcacaaacacctgcaagacctgtttgccccacttgttgttagatatgtggatctgatggagtcctcaattgcacaatccattcacaggggctttgagcgggagtcatgggaaccagtcaataatgggtcaggcacctcacaagatctgttttggaaacttgacgcccttcagaccttcattcgggacctgcactggcctgaagaagagtttggaaagcacctggaacaacggctgaagttgatggcaagtgacatgatcgaatcttgtgtcaaaagaaccaggattgcatttgagttaagctgcaaaaaaccagtcgatcaacagattttcgagtcccacagtcaatatgcaccatgtntaatgntatgcttgatgccaaagcttcatcaacaaacttttgatcatgcaaatgggccaagacatcaatacatttcaaaatagacgactaattgaagaactgtcacagaatgataccctcttggctgccagtcgtactaatttggaagactgttgcaaaataattcaaatgacgaacggacttggttctttttttggcattacgtggaagcagtttcaataattgattacctaaaccggggatgacgtgccgggcc

SEQ ID NO: 47345 - DNA, 712 bp, Homo Sapiens
ggttctatttagagagagtttaaagttctcttagcatcagacaacttgattcctaaggtttccagtgtgtcaccaacaaaaagtgcattgatagggacctttgtctcttcctccctttgattaattgcccggcatcacagtttactagattaccaagtgttacatcatattaaataaaatgtagcagaaccatctgcatcaatatattcctgtttagatttttgcaggagagaagttaaaaggatttgctccttgtatgatgtaagtggcccaccccaattttgtaacatgatgcaagtgtctggcactaagggaagcaagagtagggttgtggaaagaccaagctgatggggagggacttgtttacgggaatttttttagttttccttttcaaaggaaaacattaaaatcccttaggaatttggtattcacatctcagagaactacaacacaaaagtgcagacttatatttgagaattaatgttaaccctttgtgtctagtttgaagcttcttgtatttgtctaaaacaacaagccagaattttgtatctcctttgataaaaagtgtgtataatgtaaagtagttttgcatattcttgtgctgcacatgggctgaatttttaaattttttttaaaaacttgaagcagaaccttgtaatttgtgtaaatgacaagtgtaaaatcctaccataaaatgctaaaatatgcactg

SEQ ID NO: 47346 - DNA, 742 bp, Homo Sapiens
  misc_feature (725)..(725): n is a, c, g, or t
  misc_feature (733)..(733): n is a, c, g, or t
ccattattgccgcggctaagtgaggtaagccagccaggctctcatcgaggcttatgtagacatgaggaagattggcagtagccggggaatggtttctgcataccctcgacagctagagtcattaatccgcttagcagaagcccatgctaaagtaagattgtctaacaaagttgaagccattgatgtggaagaggccaaacgcctccatcgggaagctctgaagcagtctgcaactgatccccggactggcatcgtggacatatctattcttactacggggatgagtgccacctctcgtaaacggaaagaagaattagctgaagcattgaaaaagcttattttatctaagggcaaaacaccagctctaaaataccagcaactttttgaagatattcggggacaatctgacatagcaattactaaagatatgtttgaagaagcactgcgtgccctggcagatgatgatttcctgacagtgactgggaagaccgtgcgcttgctctgaagccttgtgagcaaggaaggctccctgcatgtcctgcttgctgcacgccacatgggtgtggtctgcatctcagttggccgccatcagtgtaaatagagcttaaagtcatggtttggctgcataaaaattttctaacttgggttcaatatttgtagtgaagtatctgtcttcatttttttcacgttataaataaaaactatgctgcggcgcgccggggggncccctccntgtcttccc

SEQ ID NO: 47347 - DNA, 985 bp, Homo Sapiens
  misc_feature (863)..(863): n is a, c, g, or t
aaggacatgaccagcagctggctacagcctcgatttatatttctgtttgtggtgaactgattttttttaaaccaaagtttagaaagaggtttttgaaatgcctatggtttctttgaatggtaaacttgagcatcttttcactttccagtagtcagcaaagagcagtttgaattttcttgtcgcttcctatcaaaatattcagagactcgagcacagcacccagacttcatgcgcccgtggaatgctcaccacatgttggtcgaagcggccgaccactgactttgtgacttaggcggctgtgttgcctatgtagagaacacgcttcacccccactccccgtacagtgcgcacaggctttatcgagaataggaaaacctttaaaccccggtcatccggacatcccaacgcatgctcctggagctcacagccttctgtggtgtcatttctgaaacaagggcgtggatccctcaaccaagaagaatgtttatgtcttcaagtgacctgtactgcttggggactattggagaaaataaggtggagtcctacttgtttaaaaaatatgtatctaagaatgttctagggcactctgggaacctataaaggcaggtatttcgggccctcctcttcaggaatcttcctgaagacatggcccagtcgaaggcccaggatggcttttgctgcggccccgtggggtaggagggacagagagacagggagagtcagcctccacattcagaggcatcacaagtaatggcacaattcttcggatgactgcagaaaatagtgttttgtagttcaacaactcaagacgaagcttatttctgaggataagctctttaaagggcaaaagcttatttccactnctcatccttttgtcctcctttagcacaatggtaaaaaagaataagtaatatccgaaccagggaagggagggaatgggctttgtctgggggaagcccaatccagggacaactggggaagccac

SEQ ID NO: 47348 - DNA, 637 bp, Homo Sapiens
ggagaagagtggggagcatggaactcctgggctcttgtggggacgttcagggtatcggggtgcgaggtctgtctgcaccggcccccacatctaaccaggccctgatgtaggggtcgtccgctcaggctgcccccttgggctcttgcagctcttgttcaggtagtcgcccttctggtttgttctctgtggggcagttggtgggggctgggggaagaggctggcagaagttaccctggatagggaagggggaggaggggacttttagagccagcaggccccactgtattatgtatatatttttcaaggtctgtttttctaactgaaaagctaagggcttgattcctagccccgttctgtggggcactgggtgatactcagtttcttgttcctggccgtggagaggggcctggggcactggttccggctgtgtctggtggtctggctgcggggaaggggcaagaaggcgggcaggccttcactgcagcactgagcctcaaatccgctctggagcatgaggctggatgcagtggtggtgaggccgccccgctccatcccgaggcagccagggtttgttttgcgctctcctgtcacaaatgctgcactattggttcttaagttttttatctccagatcctaa

SEQ ID NO: 47349 - DNA, 653 bp, Homo Sapiens
ccgagtgtggcttaagacaggtccctccactccaggatccagatcaggtgcccggcacccctgggcatcctgcccgacaggtagcgaatggaggtcgctgggggcagagggtccgagccctgtgggctctgcggatgcacgccctcctcccgggcctccgcctcagtctgcagaatttctgccgagtggcaccgagaacaccatccatctaaggacgaacaaaagaaccaggagggcgggacccccctcttcctctcctgggttgggggctggggccctgagtgcccagccatccttgttcgtgtttgaacactctcctggccacgtggggaagcgggaacacggggtgtctgcgcatgtttcctcctcctagctccatcactgcgcacacagctgcctgcctcgccagatgcaggggggcgggcagccctccctggctgccaggaggctctgcatgcccacagtcctgccctgcctgtcccctcaacccggcagtgcctgtagcaccgaggagcaaagggggtggatggggggcttggagaagggcggagcccaccagcctggcatccatgttgacatcttctgactgtcccctgcttggctggagccaggcccttccctagagtttcgtcaagagcctcctggggaagggg

SEQ ID NO: 47350 - DNA, 576 bp, Homo Sapiens
  misc_feature (576)..(576): n is a, c, g, or t
ggcatcattcaacaaattatgttcagaaagtggtcagaacttaagcaagaaaagtaaagaaagaatgcagaattgtggagcaatgctttaggaaatatttctacctgaacacttgtactcttgaagtcacaacaaaataatgatgagcttttcacatcacctttatggtttcaatccctagctcaaagcttcctggaatcttttattttttgtaaacttttttttcttttgttaaaataaataaaacattcaatgtttttctccttttctctcttattacttctttcctttggcattttcaatttgaaatgctttcctttggttgttggttttattctccccctacccctccccttttcttattattcagaatataaacctgcaaagctctgctctgttttggttttgaaagtttaagcttttctgcttctgtgagagcacaggcttctgtcccttttgattccaactgaacttttgtgttctctaatgatactaacacggtgtaggttttacagtctcctaatttgtactggtaatgcatattccaaataaatagtttcttttgttgccaaaaan

SEQ ID NO: 47351 - DNA, 387 bp, Homo Sapiens
atatttaggatttggtgaagttcactgtattgctatatttttgtagataaataaaactcaataaattgttaatcattctctttttgctgtatagaattgcttatatcactctttctttcatgacattggttaacatttaaatgttcctcctgtacttgtgttgtctgtgaccgcttatagagttttattgttattggtgtttacctgaatacctatgcgtacacacacacatatttccttaatacttctgaactcattatcttttagaataataatactactacactttaccagcaattaacttctccctacccaaaatgtttttcttcctgtctgaaaatggaactaatttgtcttattcgtgcttatatctgtattaaatgcaat

SEQ ID NO: 47352 - DNA, 633 bp, Homo Sapiens
taggcgaagcaggagaacactgagagcagcaggatgggtttggaaagagcatgcctctggaaacacagcttcctgggaattcacatgaggccagtcctacagagagcaagatgcaccccaggatttcttcattttctaatagatgtgggagtgctccattttccccgacagcgaatttcccctgagaaacgatactagaccctgggtttgcccaccttgtaactcttccttatctcctccttttcatccctaattcatcctccctctggcatggaattgacgcccgtgcagtacatttgccaagtggcaccttctttcaatttatgttttattttgctatggtggtgattctttatttgctggttgtcttttctcacacatctttctctctgtctctctctttcctgctctttgtttttctgcccagaaaaacctgacttcgataccaaaaaagatgaaactacagaaactcaaatttaaaaaaaactttaaaagaaacaaaaaaatactcaacgattctttcagctttattaacattttccattgtttcttgcgacttgtgtctcgttctttgtagtattgatgatgaacatttgataatgaatgttcttgtatattcagataaagaaaaaa

SEQ ID NO: 47353 - DNA, 543 bp, Homo Sapiens
ggtggacgagaaccactcagagtttactctgtacgaatcacggctgttggacatctcggtatcaccgttgatgaactcattggtttcacaagtcatttgtgatgtactgtttttgattggccagtcatgacagccgtgggacacctcccccccccgtgtgtgtgtgcgtgtgtggagaacttagaaactgactgttgccctttatttatgcaaaaccacctcagaatccagtttaccctgtgctgtccagcttctcccttgggaaaaagtctctcctgtttctctctcctccttccacctcccctccctccatcacctcacgcctttctgttccttgtcctcaccttactcccctcaggaccctaccccaccctctttgaaaagacaaagctctgcctacatagaagactttttttattttaaccaaagttactgttgtttacagtgagtttggggaaaaaaaataaaataaaaatggctttcccagtccttgcatcaacgggatgccacatttcataactgtttttaatggtaaaaaaaaaa

SEQ ID NO: 47354 - DNA, 500 bp, Homo Sapiens
gtccacctcccccttcctggcccccaccccactcctgtgcctcccaggagccctccctgtgctccacctgcctccgcagaaggaagcctctttctctgtttccctgggtgagggggctggcaggtggctaaccccatttagcatctccaggccctgccatggtgtctcatcttgctgttatctctagctctttccctcctcccatttcctttagtagttgaattttgcaaagcttgtagcagtagctcagttgcctgcagcatccttgtgtgtagataaattagtcgacagaaactcagcactggggacaggattgcaaagtcggggacatagatgcagacagttgttgagatttggggatagccgggcttgtgagcggtgcccatttccagatgaagcctttcagcccttctgagtccccggcccttggtgcgatgtctgtgagtttgacctgcccagcgtgtgggctggctcaatgctgaataaagtgggtttgtgtc

SEQ ID NO: 47355 - DNA, 763 bp, Homo Sapiens
aggcacctggcaggctgatgacacacaggggagagtggccctgcctcctgtcctccccggggtttttgcagactcgaagtctcactgcaccagtgtctttgatggtggtgagggtgggtgatggtgcccagcaccaacagttttagtggcctgtccttgacctgccgtggtcctttgtaaactatggctccatgctgtgtgacagatcaacgtgctgatggtaagtagactaggcttccccaggcatgccgtccgtgggggcctgaagagacagtgagtgccattggccccattcgcagatgtgggagactctgctcaggcctgtgaggctgggcagcccttcaccagagttcggaggagcagtgtgtggcgccacgtcccgactggccatacccacacagaagcagtgctgcccggggcctcatctgggccagcttggactctgcttcctccaggagcagcagggaagctctgggccacctccctggatagcaggaacttgacctgccatgtgtgccctgccttcctggccagctgtgcttgttatcttccattctcacaaactgtctttgaagcaatagaataaagaatgtgtgttttctttcctgggatacatacatgatcccatgcttccaagctccattctttctttcctcaactctttgcccttcacagagctattgagaagggctggagatgatagctcttgtatgaggactgaaaaagaactcatcactgctccttaatatacacctcataaggc

SEQ ID NO: 47356 - DNA, 574 bp, Homo Sapiens
  misc_feature (571)..(572): n is a, c, g, or t
  misc_feature (574)..(574): n is a, c, g, or t
ggcaaatatgtaaactttaacttccactttgtataaatttttaagtgtcagactatccattttacacttgctttatttttcattacctgtagctttgggcagatttgcaacagcaaattaatgtgtaaaattggattattactacaaaaccgtttagtcatatctatctaatcagatcttcttttgggaggatttgatgtaagttactgacaagcctcagcaaacccaaagatgttaacagtattttaagaagttgctgcagattcctttggccactgtatttgttaatttcttgcaatttgaaggtacgagtagaggtttaaagaaaaatcagtttttgttcttaaaaatgcatttaagttgtaaacgtctttttaagcctttgaagtgcctctgattctatgtaacttgttgcagactggtgttaatgagtatatgtaacagtttaaaaaaaagttggtattttataagcacagacaattctaatggtaacttttgtagtcttatgaatagacataaattgtaatttgggaacataaaaactactgaataaatcatgtggcctaataannan

SEQ ID NO: 47357 - DNA, 605 bp, Homo Sapiens
cttccagaacgtgtctgtgcagctgcccatcactctcaacaaattcttccagccgacagaaatggcttctcaggatttctttcaacgttggaagcagttgagcaatccacagcaggaagtgcagaacatcttcaaagcaaagcacccaatggacacagaagtcaccaaagccaagatcattggatttggttctgcacttcttgaagaagttgatcctaatcctgcgaatttcgtgggagctggaatcatccacacgaaaaccacccagattggatgcctgctgcgcttggagccgaacctgcaagcccagatgtaccggctcacgctgcgcacaagtaaggaagccgtttctcagagattatgtgaattgctctcagcgcagttttagtcctgaggatggaagaccaggctcgtgtgtcttgtgttgtcttcgtctgtgccgtttgtcttcgtggctatcctgcagatgagcaccgtgtccagtgccacagcacaaggcgcctccccgccccaccgccccacacctctcccctttgggctggacgggaacacacgtgtgtggctcaggaggaaaagctcagcctggactgtggcagccacggcag

SEQ ID NO: 47358 - DNA, 713 bp, Homo Sapiens
gggcccagaatgtgttcagtatcttcaacaagaatacctgccctccttgcaagtagctccagaaataattcaggagttttgtcaagcgcttcagcagcctgatgctaaagtttttaaaaattacttaaaggtgttcttccagagagcaaagccctgaggactggatttccctgtgcctacttcatgatcatgaattccagttaatttataaagaggcgatttttgtgtgccattcacactggtctttttcacattgttttgagcttattgcagtatatgttttgggatttttctgtaaaatgggtgtaattttcctaatacaggtatgtaacaacaaaagaagttgcctgcatgccggtccaaattgttctgtataaagatgctcttaaaagacacaagagttatcctagaaccttaattcttttttatttgaaattttaagtcaagtcctttataaagaccatagcagtggaaaacagtgtactttttaaaaaattgctgaatataaaatctttgaaaattttctttatgtgtgaagacacaaagtatgggggaagacagcaatcaaaactaactttttgtagatagccatttcatttctttaaactgtttcaacgccaatatgtattctacaaaagagaatggttttaggctccagtgttatacttttttttatatatatatataaraataaactttacgtwtgawatctt

SEQ ID NO: 47359 - DNA, 1131 bp, Homo Sapiens
gatgggagcatgagaagcatggctcaccagccagcctctgtggtctttgtaattagaagcttcagaactcactaatactactgtacctttcattggcgcattaccccataaaactttttgagacgaggtgagatctgagtataaagataggtcagaagtattttaaagggcttaatgtgccaaaaagaaaaaaagctagagaccctttttgcaaacatttggtgaccacacatttgagggaagacgtggcgttaggtgaagcagaagcaaaccctgctcttaggggctcacctaggtgagtgcacagcctgtgacgctacagggagaggctgagtaaaccgagatccagcgttctgtatggcaggggtattgcttatcacagaggttctgaagagtaggaagtacataatgaagagggctttaaaaattgccaacaaagtgagtcaccagggctggcagtagtgtgacggggctgtcctgagctgttaggagagtagatgcggggagggctggtgacctccgtgggtttatatgtcggaaactcttctctccaaatcccaggcctggcttccagcaccatccagctgtgcccaagaagccaccctggtctgttctccaactcttttaaatggtgcccaacttttctaagtgagcttagcaatgagaagaaaaaaaaacatgaattctttttctggaaaatcagggagacatgggtaataataggtactaataaatatttatagatgagtgaatgaggaaataattacatcaaaaaggtcagtgacaattgataaatgacaaggaaatatttaattaggtaaactaaatcattgctctctatactaggatagactttatctacttcatctgttcctaagtcagcatgttagttctggggraggatcataagaaaggaaatactttttaaaaaaaatttggraacatgtaacaagcaagggkaaaatatatatatatatcymtatarbgsygtgactgtaaagkgtactttcmttaattttagcgggttagrgatggycmwtggagtacktgtggcyagaawgtaccygtcaycwgcawgaaaattgtwwcgttttamaarcccwtatwgtarawgaatctggggkttctcca

SEQ ID NO: 47360 - DNA, 815 bp, Homo Sapiens
caagaaagttatttcaggaaggatagtgaccctttccttgaactgttagaagggcatttattaggctaaaacgtcattaacaaaatgcattgcatgttgaaaccagcctcttgaaccataagcacttagcgactttgctctgccctgtactgtgctgcttctgctgtcatcctgtgtgcctacagaagcctggtcttccgtccatgcagaaatgcttatgtcctcctgttgtttagatgactcctattgttcaggtgtactctgagaagagaatcacgtttttctgttttgctaaggagaaaaccttgctgcttgtctctcctcccaccctccaccatccaaaattaaccagtgagctggatattacctggatattgccaggaggtgggcattaagacagtattctttaaaagtgaaaatcttgtgaggcaaactgctaaattcacatttttgtttttttttttttaccatcttccctaggaatattcctagaaagcatctgcttaattttgctgctaacagctaaccttatcccacgttgagggtggtattaaaactgttcacacagagtgagcctgggtcagtcaaaaacagaatttgggcatttgagtgataacagacaacctaaggacaatgagcactttgcagatctctacaattaaaagttgcctctttgaggcaggaggggrgaagcacagtccctgccaggttgcctgaactaaagatgccatggagcatgagtgtcttggtgcattgttccccgcttaggagtacctttaaaaagggggkgaaataaatttggcttaataattgta

SEQ ID NO: 47361 - DNA, 584 bp, Homo Sapiens
tgttgggaacagacaggagccaatgtgggaattcaacttcaagttcaaaaaacagtcccctaggttaaagagcaagtgtacaggaggattgcagcctcccgttcagtacgaagatgttcataccaatccagaccaggactgctgcctactgcaggtcaccaccctcaatttcatctttattccgattgtcatgggaatgatatttactctgtttactatcaatgtgagcacggacatgcggcatcatcgagtgagactggtgttccaagattcccctgtccatggtggtcggaaactgcgcagtgaacagggtgtgcaagtcatcctggacccagtgcacagcgttcggctctttgactggtggcatcctcagtacccattctccctgagagcgtagttactgcttcccatcccttgggggcagcctcgagtgtagtccattagtaatcagattccagtttggacagggtggctggattgtatatctcgttagtaatgtacatgctcttcaggttctagggctcctgttaggggagggagacatgttgaatcaagagggaaaacaactactatgatttataaac

SEQ ID NO: 47362 - DNA, 658 bp, Homo Sapiens
tcaagtaatcccaggctcagtgtgtttaaaatacaatgaaaaaggtatgcccacaggtgaagccatggtggcctttgagtctcgggatgaagccacagctgctgtcattgacttaaatgacaggcctataggttcaagaaaagtaaaacttgtattagggtagccattcacatcattttttatagggtagatcttcatattgctgtgattaatgcatccagattgttttcctagtatttccaggttagaacctgtggattgtttcaattgcatatagcttggtttccataacatagagcattggttgactgtttacagaagactcactcaccaggataaacattgctgtatgttacagtaaagctatctggagagaacacataaatgattttggcataccattagagaaaccatttgtaaaactcaaatgaccacataaagcttatcaaggagtctagattggttttgttttataccatatgggatgaagaaaatagaaatgtcagtagaactcattgagggtgctcttgccagctgctgaaaatagaagttggctactctcagaatttggtttaaagctggacagatttgctttgttatagggtaaagctttgtctaaagtcctcattttcttttaaattgaataaaatttctgtat

SEQ ID NO: 47363 - DNA, 640 bp, Homo Sapiens
  misc_feature (627)..(627): n is a, c, g, or t
  misc_feature (640)..(640): n is a, c, g, or t
acggggtttcactgtgttggccaggatggtctcaatctcgacctcgtgatccgcccaccttggcctcccaaagtgttgggattacaggcgtgactcaccatgcccagccacttagttttttcttattcccacctttctatcccatagaacactcttttttatcttccctgaaccatattgatgagataaatagggctgggggctgggccccgctggtcactcaacagagtatttcccttggccgagatggaagttttgtcccaatagatgagctgctgagcatcaacaaggtgacatttttctgctgcccatttgtgtcctggagacggtggtaccctgaaggcagaggccagctgccgcaagacagcaatgacagtccacctgccgacctgattcctgcatcatggaataaccacatggctaccttctatcctctgttcccaaatggtggtggcacttatcctgaagtcgtcaatgatttccctttgaaactactttattttactaatttaaactattttgtactgatgtagccctgaggtagttcatgaaaatgctgtgcactcattccatggaataaatgttggaaagctgatcttttctgatataaaatgttgaatgataaanaaaaaaaaaaaan

SEQ ID NO: 47364 - DNA, 667 bp, Homo Sapiens
gagatgagagactctggcatgatcttttttttgtcccacttggtggggccagggtcctctcccctgcccaggaatgtgcaaggccagggcatgggggcaaatatgacccagttttgggaacaccgacaaacccagccctggcgctgagcctctctaccccaggtcagacggacagaaagacagatcacaggtacagggatgaggacaccggctctgaccaggagtttggggagcttcaggacattgctgtgctttggggattccctccacatgctgcacgcgcatctcgcccccaggggcactgcctggaagattcaggagcctgggcggccttcgcttactctcacctgcttctgagttgcccaggagaccactggcagatgtcccggcgaagagaagagacacattgttggaagaagcagcccatgacagctccccttcctgggactcgccctcatcctcttcctgctccccttcctggggtgcagcctaaaaggacctatgtcctcacaccattgaaaccactagttctgtccccccaggagacctggttgtgtgtgtgtgagtggttgaccttcctccatcccctggtccttcccttcccttcccgaggcacagagagacagggcaggatccacgtgcccattgtggaggcagagaaaagaga

SEQ ID NO: 47365 - DNA, 722 bp, Homo Sapiens
agaaggtttttgctcagtacctggcatgcaacagacattggataaatgttagttggatccagatatacacagaaagatatctgcttcctgccaggctggataactgttgaatggacacttgtccatagtctagaaagccagtgcttctaatccttaagccagatctttgactaccttttcagttgcttctttaacactctttgttgcttctctgtgtgtcctagtttaaattcatttcctctccagcaaaagtgagcttaaataatttctccaaactaaagctctcatgtttttggaagggctgcctttgcaagtgaggtttctgagaaatgactgttgttcccaaaacaagagggagctgggctggaagcaccactattcttctttaggcatcttgttacagagagaggcagggtcttcactgacatattaaatcctgttccctgaaccagcccctccctcttctgctccacttcctcacctgtgcagagtcattttcaggtgttagccttactgatttgcactgatctgtttgttccctgagctttttaaataccctgtgaaaattttctttcctcccttggtcatcatgcatctaattgtggggaaatgtttgtcaaaccaacctgcaagcagcatggtgttggttgagaaagaataaacagacgaagacctgggacaaaacatatacaccccctacgaatcaaataacaaaaaacgag

SEQ ID NO: 47366 - DNA, 657 bp, Homo Sapiens
caggaccgagcagtggtcaaaaagaaactcaaggaaatgaagatgtctctagagaaggctcggaaggcccaagagaaaatggaaaaacaaagagaaaagctaaggagaaaggagcaagagcaaatgcagaggaagtccaaaaagacagaaaagatgacgtcaactacagccgagggtgctggtgagcagtaacacataccctcttacagatgatggagatgctccaagagaagtccccacctcttcctgccctgctctcctccagaggatgaaaaagaaactaaatgataagggtaatgcggctctaggccggctgaggaactgtgtgttgaataactgcattttctgcaatagaatgcactcttaattttaactacttagctgtgttttgctcttctctaacttaccaacatcttgtgttgtgttgggtgtgttttgtcacttggagaactagtgtgaccccacccaagagcatgacacaccctggtgttgtaatggagcgccgtgaattttcagtgtgggatcctggaatggcactgcacatgtctgcatggcagagagcaccctggcatgagatctgagacccgtacttaacttctaggactgcaacacctacttcaatgtgtgggaaagattggctcttaattctcagccggg

SEQ ID NO: 47367 - DNA, 500 bp, Homo Sapiens
tctctctctctttaataaactcagtttggtacttgataaataatcatagtcttaaatgttagaaatcctatataatattatttatttaaaattgcagatttttaatttaaaatacatttttatttttaaattttgtcttttcccttttttttcagatcaacaacccctccccgtcgtaaacgctgaggaatgatgtggcaagaatgccatgatgttctttaaaaaaattccatgagttttaagggcttgtctcattatagaggcacattgtggctgtgtaggtgaaaccagaatctttttttttttaatctgtaaataggtgtactttttccaatgctgctccaaggttacttaataggatttctttgtattacgtttttttcaaaaaatatagtgcataataagactataaacatgccattctctttcagctgtaatgttcttaaaattattcttgaatgtactgtgatgtcaataaagctctttagttcatttttgtt

SEQ ID NO: 47368 - DNA, 808 bp, Homo Sapiens
gcccctcagagcttggtggctcaagactgttagcctggcagagccaggggtgaagggagaagctcttggagcaggcaggatgcccaccgctgcttcagctgcctcctcgcccagctaccctttggccccattgggccctcgtctgcctctccaggattgtatgtttcaagccttgtcctgtgttcctttgtctgacgctctgtgtattgctctttgaatcgagtttggaggaagagttgagttgtatgagtggcggcatgttggtagtgccggacttcctgtttcaagttttctggggcctcgctaattgaatgtggaaagtagcaccacttgacggctacaagtgccgactcctgaattttcccatggtgttctgacttcaagggctggcagccagggagaatgggcccaggggaagcaaagacctcttccctctgcggtttctgtcccacttaactgacctcactggaggctacgtcacccaaagtagatgttagaaaacctaaattaatgaaccatatttttaaaatcctatttttcccaaacagggccctctgcagcccatcttttccttccgtccttctgaaacacatacccaaggcccagcgccttgttgtcacgcaactctttggagaattagatgcctgtgctaattaataaaaaaatattacacgttttaccaaattattttgattagctcttgcttaattcctcactggtctgagtgaaaattaatcttaaaaatctgtaatattatcttaataattaacttactctttctgttaatccttctttataattttttcat

SEQ ID NO: 47369 - DNA, 796 bp, Homo Sapiens
gggtgccctcctgggagctcatgtgtccctggcgctgtgctagctttcctttacagctgtttacagacaaggcaggcctgaggcagatggccactgctcttgtgatgtttgctcagaggaatatgaacattttatttttgaaaagggatgatgtggttttttgccaggtgtttataattaatcctttaatattatggttattaacctcttaaacatgaatgaattcttgattgttttaacacagtacctaagactaatgctttctgtggacaccactgagctctgcctcaactccaccctctgcgaccggaggactatgcccctagtaactgctgtcggtgtggacgctgtgctggttctgttttctaaaggagcagaaggacaggtctctgagacaggatcgttgtccctacaggaggaacagtggccttgcttcttagacggtcttcactgtgtgttttaaaacaacaacaacaacaacaacaacataaaactcttttgacctgtaacttaaagatcataaacttcaggcaataatattttctgtgtaagcttttaaaattatttttggggatcatagcttgttttattttgtgctataaaattaacagtattaaatgacttatattcttagaatacatcgagtgtcttttcttaacagattaatgcctttttatttttggattccgttttacggtactgggcccaccatcaaaacccttgtttccatgggcctggttggaatatgggctcaataaaacttgcattagccggggggggggggctaaaaaaaaaa

SEQ ID NO: 47370 - DNA, 588 bp, Homo Sapiens
aactagcaaaaatctgcataatgcaacaacacagttttcacacttcaaattttacatgaggggttcttcacgattctcctggaacccagtctagcaaaatgagaggaaaggccctagggagatttatttctgttaaatagttaactctgctgagtatgacaaatagtgtctactatctcaaccctccaaaatttgcagagtgttgggactgtcatttgtgatttttttttttttttttggtggggtagttgaataaaattgggcagctaaatttttcagttccatgtgcctcccaaataaaaaacagaaaataagtagtttttgtgaattgacttgcagacaaagtagaaactgtgctgcatgatgttattttgtaaacagatgacattttctgaccaggcacatgccatccaattttctgtcaatcacactgttgtataaagcagcagaactgaaggggaaaaatgattgttgtatacactgaattgctttgcatggtctcatttgagataattgatgtaagaatcctgacttttttatatttggaaacatcaaataaaaatggaaaaaataaaaaaaaaaaaaaag

SEQ ID NO: 47371 - DNA, 504 bp, Homo Sapiens
tttttttttttttttttccaggtggtagatgacagatttttattatttacacttctctcaaattattacattcagcatgttttgctttttatgttatttaaagtataaaccctcatataattccctaagatgggtggcatgccaagtagctaaatgaaatatcatcccagcccaaaagtacttattcgaatgaaatattacatttttcttaaataaagcaataaattaggtaccctattatcatggtattttcttttttggccagcttttctagataaggttgtattgctactgcaactaacaaaaaagatgtggcagggctgggcagtcgattttcaggaagccacttaatgttcagattcttttcttctctcccaggactttgcagatgctgctgttccctctgcctggagatgttcatctggcctgaatccaaaagtctgtccaagttacttctcttttccatgacagagttacaactatttgtctgtccccctcgtgccg

SEQ ID NO: 47372 - DNA, 697 bp, Homo Sapiens
tgggtatggagcggacagcccccaggagtcagagcctcagcccggctgccctggtggaaggtacaggtgttcagcaccttcagaaaagggcataaagtggtgggggacaattctcagtccaggaaaatgcattgaccattgctggctatttgcttacctagtaagaattggattcatttttgaccagattattcttctatgcttttttgcaataaatcaaatcccacatatctacaagtggtatgaagtcctgcaccccccaggaggcctgtccaggcatgtcttcagaggcagggtgggttacactcatttacctccgctctccccaccaaattatgacacaaacgagtatgtttcctctctagaaccctgtaatgcctcctcccccatccccagagctccttactgtaggtcttaccctggacaaggattttttcaagttggaggcacagaacatgagcaatctgacattcccacagcccctcaaacatgcaaggctactaaggcaggaggagtataaatgatggatattgaccaagacctgcttggacggagaccgccatattatctgttctcttcgttcacaaaacagccttcacttgtctcagaatttgatggacacatactgtgatgagcaggagcttcagatgcactctttacacattttgttgaaataaacctctacatttgtagaaga

SEQ ID NO: 47373 - DNA, 965 bp, Homo Sapiens
ggaccggtccggaatttccgggatgaaacctttgaggtgaactattccactgtcttgtacataggcatcttattcactgcaccctgtcacacccagcaccccccgccccgcacattatttgaaagactgggaatttaatggttagggacagtaaatctacttctttttccagggacgactgtcccctctaaagttaaagtcaatacaagaaaactgtctatttttagcctaaagtaaaggctgtgaagaaaattcattttacattgggtagacagtaaaaaacaagtaaaataacttgacatgagcacctttagatcccttcccctccatgggctttgggccacagaatgaacctttgaggcctgtaaagtggattgtaatttcctataagctgtaatagtggaggtattgtgggttcatttgagtaagccctccaaagataccattcaaataacctgggagaatgtcataaattattcagataattaacactgcatgaatctgattcagaggcatgcgtttacatatgttgccctaattaccatttgatgatcataaatacaagtgaatgacattggacttttagtaacaaacttaatttttaaaaaggtgtagacaatggtggttaaaaaaaaaaaaaaacaggtaccaggttctgtgtgtttgcaccaagtaattgacatgttttttgtttaatacatgtggaccatgaacagtattcattctcctttttcaatgatatgctgtagaaaatattccttgaagatgtgagatttaaaaatttttccctttcaatgttggtttaattgaatttcctaacttgggtttttttgattgatagcccagtgataaatcctaatactagacaaaatttgtcttctctttttcaaccagagcccaaatataatggcctggaataaaggggaaccttactgccttctctttgaggaaaatgcattaatcct

SEQ ID NO: 47374 - DNA, 761 bp, Homo Sapiens
caaaccctgaagagtatacaaaagaaaccatgcaaagcaacgactactttgctacgaagaaagactcctttcctgcatctttcatagttctgttaaatatttttgtacatcgcttctttttcaaaactagttcttaggaacagactcgatgcaagtgtttctgttctgggaggtattggagggaaaaaacaagcaggatggctggaacactgtactgaggaatgaatagaaaggcttccagatgtctaaaagattctttaaactactgaactgttacctaggttaacaaccctgttgagtatttgctgtttgtccagttcaggaatttttgttttgttttgtctatatgtgcggcttttcagaagaaatttaatcagtgtgacagaaaaaaaaatgttttatggtagcttttactttttatgaaaaaaaaattatttgccttttaaattcttttcccccatccccctccaaagtcttgatagcaagcgttattttgggggtagaaacggtgaaatctctagcctctttgtgtttttgttgttgttgttgttgttgttttatataatgcatgtattcactaaaataaaatttaaaaaactcctgtcttgctagacaaggttgctgttgtgcagtgtgcctgtcactactggtctgtactccttggatttgcatttttgtattttgtacaaagtaaaaataaactgttatgagtagtaaaaataaagctatttctctgttatttgaaaataaaaaaaaaaaaa

SEQ ID NO: 47375 - DNA, 939 bp, Homo Sapiens
atgcaggagggtgcgatagcggacgtggccaggcaggaggggccgggttcaggagctgagcaggggatgcctgtgcgtggtgcctgggtctagggaagctccagccccaggatggggctgccctgcacaccggtgcccgccacatgccaaccctcacctccccgaggactggatgatgtgctgccacgtgtgactcgtctcccttgtctgccctgtgtgaccctcagtcttggccagccatgcatgcgcccgaagctcgtgcagtttgtacgtgaggtgctctcctccctgccaccatgctcatcactctggccttggccatgctccctggtcaccccacttcccggtcgccgtctgcagcactcctggagcagcctgggcccttcagcccctgtgctcgtcccaccctagggactcagccacttgcagaacaggatgggaccgagatttcagcgagccctcctggcgcccggtcctccctgtgggcaccagccctcttggtagctggtgtggagggccggtgtccttggctgccacggagggatttgatcaccgaagcagccacctgctgtagttggacctgaggtcagaggcggggcatcagaggctcaaggtgctgagaagccaccgggaaagcagccagcacaaagggcccaggaagccagcccccgagagctgaagcgtggggggtctttgagtgtctttctccaagctgaaacgtgggcggccgcgtggtatcctcccgagggctgcttggaccctggtgggctgagtgctccgaagagggggggactccaccctggacagtgggaatgtggcggtttcacaatgtggcctgtttccaccgccaaccccccttgcaccttggccagcatggaaacccaaagggtatgggtcccccatccccaagaagagggggccctttcctccggggtgggc

SEQ ID NO: 47376 - DNA, 642 bp, Homo Sapiens
cccagtttttttaaattctaaatgtgttttgaggtatgggtacattaattgtaatgtaaactattatacaactgtttttgcgactttataggcaggtaaattttgctattactattgaatacaaatgacaattcatttatgaccactcaaacagcgttagtaaccatttagtgacaaaggattaaaacatccatctggatgttaattttgaagatgtaaattatatgttgtttaaatttttccaggcatctgaaaaccttatctgctagacaatgtaagattcacacagagttatctgggattctgattttttaaatagtacatatcattaaaccattttctctaaatgtaagaagagcagaaaaaatcttataagattatcagatttttctaatgacacagaaatgtaagaaaaaaatccctttatattgaaaaaagatgcagtcaaagtcttttcagacatgcccaaactttgagaatttcttcaaccatctaatgctataaagatttttgttcttcctgttcacaaccagttgtataacagaaatactagctactgttttccttcctgtgtgtgaagtaatgaatcattgattatgtgacttgttatgtattcaattaaacactaaagaataaaacatt

SEQ ID NO: 47377 - DNA, 719 bp, Homo Sapiens
aagcagccatatgacaaccctgtgcgcaccaaccagattccccggcagatccccgagcagcggtggtacatgaaccgatttgtgggcatcctcatggctgggatcttgcccttcggcgccatgttcatcgagctcttcttcatcttcagtgctatctgggagaatcagttctattacctctttggcttcctgttccttgttttcatcatcctggtggtatcctgttcacaaatcagcatcgtcatggtgtacttccagctgtgtgcagaggattaccgctggtggtggagaaatttcctagtctccgggggctctgcattctacgtcctggtttatgccatcttttatttcgttaacaagctggacatcgtggagttcatcccctctctcctctactttggctacacggccctcatggtcttgtccttctggctgctaacgggtaccatcggcttctatgcagcctacatgtttgttcgcaagatctatgctgctgtgaagatagactgattggagtggaccacggccaagcttgctccgtcctcggacaggaagccaccctgcgtgggggactgcaggcacgcaaaataaaataactcctgctcgtttggaatgtaactcctggcacagtgttcctggatcctggggctgcgtggggggcgggagggcctgtagataatcttgcgtttttcgtcatcttattccagttctgtggggga

SEQ ID NO: 47378 - DNA, 635 bp, Homo Sapiens
cgcgtccggtttgtacaaactggttagtttaacttcattacccatttcattaaagttgatgggtcgtgtgatgagatgcatttaaggccgatagtgatagatgttttttttatttcttgaacacaggctttgtctgaatgatgttcttttatctcttgaacacaagctttgaatgataactacaggttttaagtgctgttacattaataccataatgtgatgtgttagaaacaaagggatatttcaaaggtagatatttgaaaattctctagtctcaatatgtatgtgtattgaatatactctaaaaataaatgtgcaatttgctagtaggacaatgcagtgactgactagcattaggtatgtttcttttatatcctagctatgtcccactttcttctaagtgcaatcctttcatgttcacttgctgttttaccccatctactctaacttcatttggaaggcttgtctagagtatagcatgtatttttacctttgcagtgaattgcatgtgctaattgtaaccacagctatttttatgttgacataactccaaatgttatattaaatgttctattatatattagctctaatcccttaagtaaattttaagaaataaatacttgttcaaattttaa

SEQ ID NO: 47379 - DNA, 789 bp, Homo Sapiens
ccacgcgtccgacccgcttcccggcccatgcaggagagtctgaaggaaggcctgacggtgcaagaacggttgaagctctttgaatccagggacttgaagaaagactaggtgtgtcccatccaagttgagcacgcgccttccccagcttgcagcagcacaccccaagcgctgcttttcacctgtacctttgttttattattattattattattgctgttgttgtcatcgttaactgtgggcatggaatgcgtgaggctggcttctgggttgtccacaccactctctgctgtgttgacttcctgttgtcttcatcaaagcttttttccgtggtattctaaaattaggccagcagtgggggctgggagggcatctgtgttagtcctttcctggctgtgacccgccacactcactgtcagtattaaggcccagcagcctgttgataagctaccctgtctcaccatgtgctggtgtggaaacggggcccagccagcacgcctcaaggtagatggaatccccactggtcagagaaaaagctatgcggacactccagcttggcctgggtcacagcactgactcctcacccgctagtctggctgttaagaggagaaagtgcactgccttccagcccaggaggaggacagcattttgtatttgttccactgatgcagcttagaaccacacccctgagagtcgtggcaaacctttcacaacctgggaaatggttgaagcaacattcctatttttgggttgttttttaataaatcttgcacaaaaaaaaaaaaaaaaaag

SEQ ID NO: 47380 - DNA, 666 bp, Homo Sapiens
tgtttttgaaatgttgggcatggcctcgtattttgctgttacctttgtgacctgattgttttttggaacacgtcaagacgtgggatcagaatcttccaactttagaggtgcaatggaagacactacgctacttggttgagcctggtgaagaatgtattaatgagactgctttgcataaaactgggaagaaagagaagacagttggagatggaagatggttttgtatatattttggaactttagttcctctgtgagacgaaagaggagagctatgttttgtgtcacattgtctgatatatattgtgtaacctgtcaggtgagttgatttagacaacatagctgaccttttatgacaaggcagtttgaatagggactattgtaataccctcacacattataggggcatcagagaatggcatggaagagacagtctacagagagctttaagaggccggagaaaggaaaagacattatcagggcctggaaagtctcttccagttcatcagggtagtagacctgtcagattggaggtcaaagtcaaaagtataataagtgttaatttgccttgaaaaacaaagacctaaaaagccttttttaagaaataaattttttgttcacatgaccaaagcccctcctgtgtgtgttaataaaagaatcataaacaaa

SEQ ID NO: 47381 - DNA, 670 bp, Homo Sapiens
tcggacgaggcctgacttcaagaatcaatgcagtagaaagagacttgttagagccttctcccgcagaccaactcgggaatggccacaggaggacagaaagtgaaatgtcagccaggatcgctaaaatgtccttgagtcccagcagccccaggcacgaggatcagctcgaggtcaccagggaaccggccaggcggctcttcctttttggagaggagccatcaaaactcgatcaggatgttttggccgctcttgaatgtgcagacgtcgacccccatcagttcccggccgtgcacagatggaagagtgctgtcctgtgctactcaccctcggacagacagagttggcccagtcccgcggtgaaaggaaggttcaagtctcagctgccagatctcagtggccctcacagctacagtccggggagaaacagcgtggctggaagcaaccccgcaaagccaggcctgggcagtcctgggcgctacagccccgtgcacgggagccagctccgcaggatggcgcgcctggctgagcttgccgccctgtaggcttggcgctgggctctcggtttgttcttcatttttaaagaaggaagggtcatatgtttattgctaaactgtcaaaaaaggaatatattctgattaaattattactcctcaaaaaaaaaaaaaaaaaa

SEQ ID NO: 47382 - DNA, 529 bp, Homo Sapiens
ctttaaagagaaatattagcttaactcttttgacatctgctattgtgacacatcccattgctggcaatgtggtgcacactccgaaacttttaactactgttttgtaagcctccaagggtggcattgcagggtccttaggcaatgttttgtttgcctttatgcagagaggtgctccaagtgctgtgattgagcaccgtgctagaggaactgtaatgcttcagaagttgtagcttatacaaaggaaacaggtcctgctggcttaatttaaacagttattgcatgaagtagcgtggaggccctggactgctgctcgttctttaggatggactgttctggtatctggtattggtttagagactgttaataagggacatcacaaggtgatgggattcatttgaagcactctatttctgttttaatggttttatccaattttgccttcccaagatttttgttctacataaaaagttcatgccactttttaatataaaaaaatttaacaaaaaaaaaaaaaaaaaatggtggagcg

SEQ ID NO: 47383 - DNA, 615 bp, Homo Sapiens
gctcttcatgaggagtcctttattcctgcatgtttcctgttctttgggacctttaggagctaacctccacagatgctgatagtctgtagagtcaggaataccatgtaacatgttgaagtagactaaagattagttctttggcaatagcccagtctggacttactatgtacttttgaaaataaaactgcttatttgtaaactctgtaattaggaccttttgctatttgagttatattcctttctaacttcaaacgtctgcattcatgtataatagccattttatgcacagatgaggtgattcccacacttcttttcgcagatgtttcattatctggatgagtgtattacataataaatttgaataatggtagtcttccaaacgacaaaaagcaagctagttgatttgtcaattttgagtttaaatgttttgactgcttatcagcaaaaaaaatcaaagaatagcatactaatattaatggaaatgcagagtatatttaattggcatgattttttcatggatgtgtgcttcatttgatctattgtatgtagctcgagatcacattttctgttggttaacattgttcctagcttatatgatggaattaaatatattct

SEQ ID NO: 47384 - DNA, 758 bp, Homo Sapiens
  misc_feature (724)..(724): n is a, c, g, or t
  misc_feature (726)..(726): n is a, c, g, or t
  misc_feature (728)..(728): n is a, c, g, or t
  misc_feature (732)..(735): n is a, c, g, or t
  misc_feature (748)..(748): n is a, c, g, or t
  misc_feature (750)..(750): n is a, c, g, or t
ggcctgggtggcgtttccggcacgagggagggttgtctttgataccctgtttctaacccttgtgttgtgtgtttctgtctgaggacagtgggtgtgtactggcctcccgggagccactgtgaccaggcctttgagctcttgtcatctgtggagagaatcatgcagattttaaaagttcttccaagagacttccatgtcctggttattaacaaaaaaggaaaaatgtaataattgatatgattttgtaaaagtatttttcttgaaataatctaaagtttaaaacattatattaaaaaaaaagttgtgtggtgggaatgtgaaagcagagaaataacttgtaaatggataattttgttctctgtaccaccagttgaagggggggttgactttcgcaatgtataggataaaaaatctgatatatcaaaccatttgtatctaatgtgtacagtgtaaaattgactttaaaaatattgcagtgctattttttcttaatcagaaaggaaaattctcaaggccttttgaagagcataagaagatgaagattgtaaacttgtataaaattatcttggtgagaagacaaattgtaaagtagatatttgtaatcttttaccactttggggttgcttttttcccggaattcatcagaactttgaattttttttttaaatgggctgtttttaatgcaggggcttttcttccctagaaacccaattctaagcaaaanananaaannnnaaaaaaaaaaaananaaaaaaaa
